United States Patent Application Publication US 2018/0305689 A1 - sequence listing, part 17

SEQ ID NO: 212595 - RNA, 19 nt, Artificial Sequence
  Description of Artificial Sequence: Synthetic oligonucleotide
  Antisense strand to SEQ ID NO: 212594
uacacucaggaguaaccug

SEQ ID NO: 212596 - RNA, 19 nt, Artificial Sequence
  Description of Artificial Sequence: Synthetic oligonucleotide
  Sense strand starting at position 289 of SEQ ID NO: 2739
ucuaaagucucagcuuaag

SEQ ID NO: 212597 - RNA, 19 nt, Artificial Sequence
  Description of Artificial Sequence: Synthetic oligonucleotide
  Antisense strand to SEQ ID NO: 212596
cuuaagcugagacuuuaga

SEQ ID NO: 212598 - RNA, 19 nt, Artificial Sequence
  Description of Artificial Sequence: Synthetic oligonucleotide
  Sense strand starting at position 305 of SEQ ID NO: 2739
aagucaucuuaggcugaau

SEQ ID NO: 212599 - RNA, 19 nt, Artificial Sequence
  Description of Artificial Sequence: Synthetic oligonucleotide
  Antisense strand to SEQ ID NO: 212598
auucagccuaagaugacuu

SEQ ID NO: 212600 - RNA, 19 nt, Artificial Sequence
  Description of Artificial Sequence: Synthetic oligonucleotide
  Sense strand starting at position 307 of SEQ ID NO: 2739
gucaucuuaggcugaauau

SEQ ID NO: 212601 - RNA, 19 nt, Artificial Sequence
  Description of Artificial Sequence: Synthetic oligonucleotide
  Antisense strand to SEQ ID NO: 212600
auauucagccuaagaugac

SEQ ID NO: 212602 - RNA, 19 nt, Artificial Sequence
  Description of Artificial Sequence: Synthetic oligonucleotide
  Sense strand starting at position 308 of SEQ ID NO: 2739
ucaucuuaggcugaauaua

SEQ ID NO: 212603 - RNA, 19 nt, Artificial Sequence
  Description of Artificial Sequence: Synthetic oligonucleotide
  Antisense strand to SEQ ID NO: 212602
uauauucagccuaagauga

SEQ ID NO: 212604 - RNA, 19 nt, Artificial Sequence
  Description of Artificial Sequence: Synthetic oligonucleotide
  Sense strand starting at position 1010 of SEQ ID NO: 2739
gcccucccucaagaguaau

SEQ ID NO: 212605 - RNA, 19 nt, Artificial Sequence
  Description of Artificial Sequence: Synthetic oligonucleotide
  Antisense strand to SEQ ID NO: 212604
auuacucuugagggagggc

SEQ ID NO: 212606 - RNA, 19 nt, Artificial Sequence
  Description of Artificial Sequence: Synthetic oligonucleotide
  Sense strand starting at position 1107 of SEQ ID NO: 2739
gcauaugauggaugcaacu

SEQ ID NO: 212607 - RNA, 19 nt, Artificial Sequence
  Description of Artificial Sequence: Synthetic oligonucleotide
  Antisense strand to SEQ ID NO: 212606
aguugcauccaucauaugc

SEQ ID NO: 212608 - RNA, 19 nt, Artificial Sequence
  Description of Artificial Sequence: Synthetic oligonucleotide
  Sense strand starting at position 1256 of SEQ ID NO: 2739
acgucaguuccaggaggaa

SEQ ID NO: 212609 - RNA, 19 nt, Artificial Sequence
  Description of Artificial Sequence: Synthetic oligonucleotide
  Antisense strand to SEQ ID NO: 212608
uuccuccuggaacugacgu

SEQ ID NO: 212610 - RNA, 19 nt, Artificial Sequence
  Description of Artificial Sequence: Synthetic oligonucleotide
  Sense strand starting at position 2016 of SEQ ID NO: 2739
gguguuacgaaaggaucua

SEQ ID NO: 212611 - RNA, 19 nt, Artificial Sequence
  Description of Artificial Sequence: Synthetic oligonucleotide
  Antisense strand to SEQ ID NO: 212610
uagauccuuucguaacacc

SEQ ID NO: 212612 - RNA, 19 nt, Artificial Sequence
  Description of Artificial Sequence: Synthetic oligonucleotide
  Sense strand starting at position 2017 of SEQ ID NO: 2739
guguuacgaaaggaucuau

SEQ ID NO: 212613 - RNA, 19 nt, Artificial Sequence
  Description of Artificial Sequence: Synthetic oligonucleotide
  Antisense strand to SEQ ID NO: 212612
auagauccuuucguaacac

SEQ ID NO: 212614 - RNA, 19 nt, Artificial Sequence
  Description of Artificial Sequence: Synthetic oligonucleotide
  Sense strand starting at position 2344 of SEQ ID NO: 2739
gggccugacugugugaaga

SEQ ID NO: 212615 - RNA, 19 nt, Artificial Sequence
  Description of Artificial Sequence: Synthetic oligonucleotide
  Antisense strand to SEQ ID NO: 212614
ucuucacacagucaggccc

SEQ ID NO: 212616 - RNA, 19 nt, Artificial Sequence
  Description of Artificial Sequence: Synthetic oligonucleotide
  Sense strand starting at position 2538 of SEQ ID NO: 2739
uggguaggacgccaaauua

SEQ ID NO: 212617 - RNA, 19 nt, Artificial Sequence
  Description of Artificial Sequence: Synthetic oligonucleotide
  Antisense strand to SEQ ID NO: 212616
uaauuuggcguccuaccca

SEQ ID NO: 212618 - RNA, 19 nt, Artificial Sequence
  Description of Artificial Sequence: Synthetic oligonucleotide
  Sense strand starting at position 2618 of SEQ ID NO: 2739
ccagguguguaaaucggua

SEQ ID NO: 212619 - RNA, 19 nt, Artificial Sequence
  Description of Artificial Sequence: Synthetic oligonucleotide
  Antisense strand to SEQ ID NO: 212618
uaccgauuuacacaccugg

SEQ ID NO: 212620 - RNA, 19 nt, Artificial Sequence
  Description of Artificial Sequence: Synthetic oligonucleotide
  Sense strand starting at position 2716 of SEQ ID NO: 2739
cugcuagagauguagccua

SEQ ID NO: 212621 - RNA, 19 nt, Artificial Sequence
  Description of Artificial Sequence: Synthetic oligonucleotide
  Antisense strand to SEQ ID NO: 212620
uaggcuacaucucuagcag

SEQ ID NO: 212622 - RNA, 19 nt, Artificial Sequence
  Description of Artificial Sequence: Synthetic oligonucleotide
  Sense strand starting at position 2753 of SEQ ID NO: 2739
cccaaagagcuuugcacaa

SEQ ID NO: 212623 - RNA, 19 nt, Artificial Sequence
  Description of Artificial Sequence: Synthetic oligonucleotide
  Antisense strand to SEQ ID NO: 212622
uugugcaaagcucuuuggg

SEQ ID NO: 212624 - RNA, 19 nt, Artificial Sequence
  Description of Artificial Sequence: Synthetic oligonucleotide
  Sense strand starting at position 2757 of SEQ ID NO: 2739
aagagcuuugcacaaggau

SEQ ID NO: 212625 - RNA, 19 nt, Artificial Sequence
  Description of Artificial Sequence: Synthetic oligonucleotide
  Antisense strand to SEQ ID NO: 212624
auccuugugcaaagcucuu

SEQ ID NO: 212626 - RNA, 19 nt, Artificial Sequence
  Description of Artificial Sequence: Synthetic oligonucleotide
  Sense strand starting at position 2760 of SEQ ID NO: 2739
agcuuugcacaaggauauu

SEQ ID NO: 212627 - RNA, 19 nt, Artificial Sequence
  Description of Artificial Sequence: Synthetic oligonucleotide
  Antisense strand to SEQ ID NO: 212626
aauauccuugugcaaagcu

SEQ ID NO: 212628 - RNA, 19 nt, Artificial Sequence
  Description of Artificial Sequence: Synthetic oligonucleotide
  Sense strand starting at position 2808 of SEQ ID NO: 2739
uuuaguggucgggaagagu

SEQ ID NO: 212629 - RNA, 19 nt, Artificial Sequence
  Description of Artificial Sequence: Synthetic oligonucleotide
  Antisense strand to SEQ ID NO: 212628
acucuucccgaccacuaaa

SEQ ID NO: 212630 - RNA, 19 nt, Artificial Sequence
  Description of Artificial Sequence: Synthetic oligonucleotide
  Sense strand starting at position 2817 of SEQ ID NO: 2739
cgggaagagugcucaugau

SEQ ID NO: 212631 - RNA, 19 nt, Artificial Sequence
  Description of Artificial Sequence: Synthetic oligonucleotide
  Antisense strand to SEQ ID NO: 212630
aucaugagcacucuucccg

SEQ ID NO: 212632 - RNA, 19 nt, Artificial Sequence
  Description of Artificial Sequence: Synthetic oligonucleotide
  Sense strand starting at position 2821 of SEQ ID NO: 2739
aagagugcucaugaugcga

SEQ ID NO: 212633 - RNA, 19 nt, Artificial Sequence
  Description of Artificial Sequence: Synthetic oligonucleotide
  Antisense strand to SEQ ID NO: 212632
ucgcaucaugagcacucuu

SEQ ID NO: 212634 - RNA, 19 nt, Artificial Sequence
  Description of Artificial Sequence: Synthetic oligonucleotide
  Sense strand starting at position 3047 of SEQ ID NO: 2739
ggcuuuaagccagaacuca

SEQ ID NO: 212635 - RNA, 19 nt, Artificial Sequence
  Description of Artificial Sequence: Synthetic oligonucleotide
  Antisense strand to SEQ ID NO: 212634
ugaguucuggcuuaaagcc

SEQ ID NO: 212636 - RNA, 19 nt, Artificial Sequence
  Description of Artificial Sequence: Synthetic oligonucleotide
  Sense strand starting at position 3156 of SEQ ID NO: 2739
agcgguaaccuguaggaaa

SEQ ID NO: 212637 - RNA, 19 nt, Artificial Sequence
  Description of Artificial Sequence: Synthetic oligonucleotide
  Antisense strand to SEQ ID NO: 212636
uuuccuacagguuaccgcu

SEQ ID NO: 212638 - RNA, 19 nt, Artificial Sequence
  Description of Artificial Sequence: Synthetic oligonucleotide
  Sense strand starting at position 3184 of SEQ ID NO: 2739
agaaucuguguaggcagaa

SEQ ID NO: 212639 - RNA, 19 nt, Artificial Sequence
  Description of Artificial Sequence: Synthetic oligonucleotide
  Antisense strand to SEQ ID NO: 212638
uucugccuacacagauucu

SEQ ID NO: 212640 - RNA, 19 nt, Artificial Sequence
  Description of Artificial Sequence: Synthetic oligonucleotide
  Sense strand starting at position 3342 of SEQ ID NO: 2739
caugauucuuaguuguuag

SEQ ID NO: 212641 - RNA, 19 nt, Artificial Sequence
  Description of Artificial Sequence: Synthetic oligonucleotide
  Antisense strand to SEQ ID NO: 212640
cuaacaacuaagaaucaug

SEQ ID NO: 212642 - RNA, 19 nt, Artificial Sequence
  Description of Artificial Sequence: Synthetic oligonucleotide
  Sense strand starting at position 3350 of SEQ ID NO: 2739
uuaguuguuagucaugacu

SEQ ID NO: 212643 - RNA, 19 nt, Artificial Sequence
  Description of Artificial Sequence: Synthetic oligonucleotide
  Antisense strand to SEQ ID NO: 212642
agucaugacuaacaacuaa

SEQ ID NO: 212644 - RNA, 19 nt, Artificial Sequence
  Description of Artificial Sequence: Synthetic oligonucleotide
  Sense strand starting at position 3353 of SEQ ID NO: 2739
guuguuagucaugacucaa

SEQ ID NO: 212645 - RNA, 19 nt, Artificial Sequence
  Description of Artificial Sequence: Synthetic oligonucleotide
  Antisense strand to SEQ ID NO: 212644
uugagucaugacuaacaac

SEQ ID NO: 212646 - RNA, 19 nt, Artificial Sequence
  Description of Artificial Sequence: Synthetic oligonucleotide
  Sense strand starting at position 3384 of SEQ ID NO: 2739
ggagucgcuacugauuaca

SEQ ID NO: 212647 - RNA, 19 nt, Artificial Sequence
  Description of Artificial Sequence: Synthetic oligonucleotide
  Antisense strand to SEQ ID NO: 212646
uguaaucaguagcgacucc

SEQ ID NO: 212648 - RNA, 19 nt, Artificial Sequence
  Description of Artificial Sequence: Synthetic oligonucleotide
  Sense strand starting at position 3392 of SEQ ID NO: 2739
uacugauuacauugaggug

SEQ ID NO: 212649 - RNA, 19 nt, Artificial Sequence
  Description of Artificial Sequence: Synthetic oligonucleotide
  Antisense strand to SEQ ID NO: 212648
caccucaauguaaucagua

SEQ ID NO: 212650 - RNA, 19 nt, Artificial Sequence
  Description of Artificial Sequence: Synthetic oligonucleotide
  Sense strand starting at position 3607 of SEQ ID NO: 2739
gaguuuggaguccaguagu

SEQ ID NO: 212651 - RNA, 19 nt, Artificial Sequence
  Description of Artificial Sequence: Synthetic oligonucleotide
  Antisense strand to SEQ ID NO: 212650
acuacuggacuccaaacuc

SEQ ID NO: 212652 - RNA, 19 nt, Artificial Sequence
  Description of Artificial Sequence: Synthetic oligonucleotide
  Sense strand starting at position 3618 of SEQ ID NO: 2739
ccaguagucugauuccaga

SEQ ID NO: 212653 - RNA, 19 nt, Artificial Sequence
  Description of Artificial Sequence: Synthetic oligonucleotide
  Antisense strand to SEQ ID NO: 212652
ucuggaaucagacuacugg

SEQ ID NO: 212654 - RNA, 19 nt, Artificial Sequence
  Description of Artificial Sequence: Synthetic oligonucleotide
  Sense strand starting at position 3686 of SEQ ID NO: 2739
ugaugaguccuccagcaga

SEQ ID NO: 212655 - RNA, 19 nt, Artificial Sequence
  Description of Artificial Sequence: Synthetic oligonucleotide
  Antisense strand to SEQ ID NO: 212654
ucugcuggaggacucauca

SEQ ID NO: 212656 - RNA, 19 nt, Artificial Sequence
  Description of Artificial Sequence: Synthetic oligonucleotide
  Sense strand starting at position 3718 of SEQ ID NO: 2739
gacucagcagguuaagagu

SEQ ID NO: 212657 - RNA, 19 nt, Artificial Sequence
  Description of Artificial Sequence: Synthetic oligonucleotide
  Antisense strand to SEQ ID NO: 212656
acucuuaaccugcugaguc

SEQ ID NO: 212658 - RNA, 19 nt, Artificial Sequence
  Description of Artificial Sequence: Synthetic oligonucleotide
  Sense strand starting at position 3880 of SEQ ID NO: 2739
ugggauucagcauggguga

SEQ ID NO: 212659 - RNA, 19 nt, Artificial Sequence
  Description of Artificial Sequence: Synthetic oligonucleotide
  Antisense strand to SEQ ID NO: 212658
ucacccaugcugaauccca

SEQ ID NO: 212660 - RNA, 19 nt, Artificial Sequence
  Description of Artificial Sequence: Synthetic oligonucleotide
  Sense strand starting at position 3891 of SEQ ID NO: 2739
augggugaauuggcaguaa

SEQ ID NO: 212661 - RNA, 19 nt, Artificial Sequence
  Description of Artificial Sequence: Synthetic oligonucleotide
  Antisense strand to SEQ ID NO: 212660
uuacugccaauucacccau

SEQ ID NO: 212662 - RNA, 19 nt, Artificial Sequence
  Description of Artificial Sequence: Synthetic oligonucleotide
  Sense strand starting at position 3895 of SEQ ID NO: 2739
gugaauuggcaguaaggau

SEQ ID NO: 212663 - RNA, 19 nt, Artificial Sequence
  Description of Artificial Sequence: Synthetic oligonucleotide
  Antisense strand to SEQ ID NO: 212662
auccuuacugccaauucac

SEQ ID NO: 212664 - RNA, 19 nt, Artificial Sequence
  Description of Artificial Sequence: Synthetic oligonucleotide
  Sense strand starting at position 26 of SEQ ID NO: 2740
ggaaguuaugauugcaucu

SEQ ID NO: 212665 - RNA, 19 nt, Artificial Sequence
  Description of Artificial Sequence: Synthetic oligonucleotide
  Antisense strand to SEQ ID NO: 212664
agaugcaaucauaacuucc

SEQ ID NO: 212666 - RNA, 19 nt, Artificial Sequence
  Description of Artificial Sequence: Synthetic oligonucleotide
  Sense strand starting at position 95 of SEQ ID NO: 2740
uugaauaaaucaucugguu

SEQ ID NO: 212667 - RNA, 19 nt, Artificial Sequence
  Description of Artificial Sequence: Synthetic oligonucleotide
  Antisense strand to SEQ ID NO: 212666
aaccagaugauuuauucaa

SEQ ID NO: 212668 - RNA, 19 nt, Artificial Sequence
  Description of Artificial Sequence: Synthetic oligonucleotide
  Sense strand starting at position 219 of SEQ ID NO: 2740
acagcuaaguguuuaaaua

SEQ ID NO: 212669 - RNA, 19 nt, Artificial Sequence
  Description of Artificial Sequence: Synthetic oligonucleotide
  Antisense strand to SEQ ID NO: 212668
uauuuaaacacuuagcugu

SEQ ID NO: 212670 - RNA, 19 nt, Artificial Sequence
  Description of Artificial Sequence: Synthetic oligonucleotide
  Sense strand starting at position 255 of SEQ ID NO: 2740
uaaggagacuggucuaagu

SEQ ID NO: 212671 - RNA, 19 nt, Artificial Sequence
  Description of Artificial Sequence: Synthetic oligonucleotide
  Antisense strand to SEQ ID NO: 212670
acuuagaccagucuccuua

SEQ ID NO: 212672 - RNA, 19 nt, Artificial Sequence
  Description of Artificial Sequence: Synthetic oligonucleotide
  Sense strand starting at position 257 of SEQ ID NO: 2740
aggagacuggucuaagucu

SEQ ID NO: 212673 - RNA, 19 nt, Artificial Sequence
  Description of Artificial Sequence: Synthetic oligonucleotide
  Antisense strand to SEQ ID NO: 212672
agacuuagaccagucuccu

SEQ ID NO: 212674 - RNA, 19 nt, Artificial Sequence
  Description of Artificial Sequence: Synthetic oligonucleotide
  Sense strand starting at position 264 of SEQ ID NO: 2740
uggucuaagucucuugaua

SEQ ID NO: 212675 - RNA, 19 nt, Artificial Sequence
  Description of Artificial Sequence: Synthetic oligonucleotide
  Antisense strand to SEQ ID NO: 212674
uaucaagagacuuagacca

SEQ ID NO: 212676 - RNA, 19 nt, Artificial Sequence
  Description of Artificial Sequence: Synthetic oligonucleotide
  Sense strand starting at position 321 of SEQ ID NO: 2740
ugaaauaaggccuggacua

SEQ ID NO: 212677 - RNA, 19 nt, Artificial Sequence
  Description of Artificial Sequence: Synthetic oligonucleotide
  Antisense strand to SEQ ID NO: 212676
uaguccaggccuuauuuca

SEQ ID NO: 212678 - RNA, 19 nt, Artificial Sequence
  Description of Artificial Sequence: Synthetic oligonucleotide
  Sense strand starting at position 345 of SEQ ID NO: 2740
cagguuacuccugagugua

SEQ ID NO: 212679 - RNA, 19 nt, Artificial Sequence
  Description of Artificial Sequence: Synthetic oligonucleotide
  Antisense strand to SEQ ID NO: 212678
uacacucaggaguaaccug

SEQ ID NO: 212680 - RNA, 19 nt, Artificial Sequence
  Description of Artificial Sequence: Synthetic oligonucleotide
  Sense strand starting at position 445 of SEQ ID NO: 2740
ucuaaagucucagcuuaag

SEQ ID NO: 212681 - RNA, 19 nt, Artificial Sequence
  Description of Artificial Sequence: Synthetic oligonucleotide
  Antisense strand to SEQ ID NO: 212680
cuuaagcugagacuuuaga

SEQ ID NO: 212682 - RNA, 19 nt, Artificial Sequence
  Description of Artificial Sequence: Synthetic oligonucleotide
  Sense strand starting at position 461 of SEQ ID NO: 2740
aagucaucuuaggcugaau

SEQ ID NO: 212683 - RNA, 19 nt, Artificial Sequence
  Description of Artificial Sequence: Synthetic oligonucleotide
  Antisense strand to SEQ ID NO: 212682
auucagccuaagaugacuu

SEQ ID NO: 212684 - RNA, 19 nt, Artificial Sequence
  Description of Artificial Sequence: Synthetic oligonucleotide
  Sense strand starting at position 463 of SEQ ID NO: 2740
gucaucuuaggcugaauau

SEQ ID NO: 212685 - RNA, 19 nt, Artificial Sequence
  Description of Artificial Sequence: Synthetic oligonucleotide
  Antisense strand to SEQ ID NO: 212684
auauucagccuaagaugac

SEQ ID NO: 212686 - RNA, 19 nt, Artificial Sequence
  Description of Artificial Sequence: Synthetic oligonucleotide
  Sense strand starting at position 464 of SEQ ID NO: 2740
ucaucuuaggcugaauaua

SEQ ID NO: 212687 - RNA, 19 nt, Artificial Sequence
  Description of Artificial Sequence: Synthetic oligonucleotide
  Antisense strand to SEQ ID NO: 212686
uauauucagccuaagauga

SEQ ID NO: 212688 - RNA, 19 nt, Artificial Sequence
  Description of Artificial Sequence: Synthetic oligonucleotide
  Sense strand starting at position 1166 of SEQ ID NO: 2740
gcccucccucaagaguaau

SEQ ID NO: 212689 - RNA, 19 nt, Artificial Sequence
  Description of Artificial Sequence: Synthetic oligonucleotide
  Antisense strand to SEQ ID NO: 212688
auuacucuugagggagggc

SEQ ID NO: 212690 - RNA, 19 nt, Artificial Sequence
  Description of Artificial Sequence: Synthetic oligonucleotide
  Sense strand starting at position 1263 of SEQ ID NO: 2740
gcauaugauggaugcaacu

SEQ ID NO: 212691 - RNA, 19 nt, Artificial Sequence
  Description of Artificial Sequence: Synthetic oligonucleotide
  Antisense strand to SEQ ID NO: 212690
aguugcauccaucauaugc

SEQ ID NO: 212692 - RNA, 19 nt, Artificial Sequence
  Description of Artificial Sequence: Synthetic oligonucleotide
  Sense strand starting at position 1412 of SEQ ID NO: 2740
acgucaguuccaggaggaa

SEQ ID NO: 212693 - RNA, 19 nt, Artificial Sequence
  Description of Artificial Sequence: Synthetic oligonucleotide
  Antisense strand to SEQ ID NO: 212692
uuccuccuggaacugacgu

SEQ ID NO: 212694 - RNA, 19 nt, Artificial Sequence
  Description of Artificial Sequence: Synthetic oligonucleotide
  Sense strand starting at position 2172 of SEQ ID NO: 2740
gguguuacgaaaggaucua

SEQ ID NO: 212695 - RNA, 19 nt, Artificial Sequence
  Description of Artificial Sequence: Synthetic oligonucleotide
  Antisense strand to SEQ ID NO: 212694
uagauccuuucguaacacc

SEQ ID NO: 212696 - RNA, 19 nt, Artificial Sequence
  Description of Artificial Sequence: Synthetic oligonucleotide
  Sense strand starting at position 2173 of SEQ ID NO: 2740
guguuacgaaaggaucuau

SEQ ID NO: 212697 - RNA, 19 nt, Artificial Sequence
  Description of Artificial Sequence: Synthetic oligonucleotide
  Antisense strand to SEQ ID NO: 212696
auagauccuuucguaacac

SEQ ID NO: 212698 - RNA, 19 nt, Artificial Sequence
  Description of Artificial Sequence: Synthetic oligonucleotide
  Sense strand starting at position 2500 of SEQ ID NO: 2740
gggccugacugugugaaga

SEQ ID NO: 212699 - RNA, 19 nt, Artificial Sequence
  Description of Artificial Sequence: Synthetic oligonucleotide
  Antisense strand to SEQ ID NO: 212698
ucuucacacagucaggccc

SEQ ID NO: 212700 - RNA, 19 nt, Artificial Sequence
  Description of Artificial Sequence: Synthetic oligonucleotide
  Sense strand starting at position 2694 of SEQ ID NO: 2740
uggguaggacgccaaauua

SEQ ID NO: 212701 - RNA, 19 nt, Artificial Sequence
  Description of Artificial Sequence: Synthetic oligonucleotide
  Antisense strand to SEQ ID NO: 212700
uaauuuggcguccuaccca

SEQ ID NO: 212702 - RNA, 19 nt, Artificial Sequence
  Description of Artificial Sequence: Synthetic oligonucleotide
  Sense strand starting at position 2774 of SEQ ID NO: 2740
ccagguguguaaaucggua

SEQ ID NO: 212703 - RNA, 19 nt, Artificial Sequence
  Description of Artificial Sequence: Synthetic oligonucleotide
  Antisense strand to SEQ ID NO: 212702
uaccgauuuacacaccugg

SEQ ID NO: 212704 - RNA, 19 nt, Artificial Sequence
  Description of Artificial Sequence: Synthetic oligonucleotide
  Sense strand starting at position 2872 of SEQ ID NO: 2740
cugcuagagauguagccua

SEQ ID NO: 212705 - RNA, 19 nt, Artificial Sequence
  Description of Artificial Sequence: Synthetic oligonucleotide
  Antisense strand to SEQ ID NO: 212704
uaggcuacaucucuagcag

SEQ ID NO: 212706 - RNA, 19 nt, Artificial Sequence
  Description of Artificial Sequence: Synthetic oligonucleotide
  Sense strand starting at position 2909 of SEQ ID NO: 2740
cccaaagagcuuugcacaa

SEQ ID NO: 212707 - RNA, 19 nt, Artificial Sequence
  Description of Artificial Sequence: Synthetic oligonucleotide
  Antisense strand to SEQ ID NO: 212706
uugugcaaagcucuuuggg

SEQ ID NO: 212708 - RNA, 19 nt, Artificial Sequence
  Description of Artificial Sequence: Synthetic oligonucleotide
  Sense strand starting at position 2913 of SEQ ID NO: 2740
aagagcuuugcacaaggau

SEQ ID NO: 212709 - RNA, 19 nt, Artificial Sequence
  Description of Artificial Sequence: Synthetic oligonucleotide
  Antisense strand to SEQ ID NO: 212708
auccuugugcaaagcucuu

SEQ ID NO: 212710 - RNA, 19 nt, Artificial Sequence
  Description of Artificial Sequence: Synthetic oligonucleotide
  Sense strand starting at position 2916 of SEQ ID NO: 2740
agcuuugcacaaggauauu

SEQ ID NO: 212711 - RNA, 19 nt, Artificial Sequence
  Description of Artificial Sequence: Synthetic oligonucleotide
  Antisense strand to SEQ ID NO: 212710
aauauccuugugcaaagcu

SEQ ID NO: 212712 - RNA, 19 nt, Artificial Sequence
  Description of Artificial Sequence: Synthetic oligonucleotide
  Sense strand starting at position 2964 of SEQ ID NO: 2740
uuuaguggucgggaagagu

SEQ ID NO: 212713 - RNA, 19 nt, Artificial Sequence
  Description of Artificial Sequence: Synthetic oligonucleotide
  Antisense strand to SEQ ID NO: 212712
acucuucccgaccacuaaa

SEQ ID NO: 212714 - RNA, 19 nt, Artificial Sequence
  Description of Artificial Sequence: Synthetic oligonucleotide
  Sense strand starting at position 2973 of SEQ ID NO: 2740
cgggaagagugcucaugau

SEQ ID NO: 212715 - RNA, 19 nt, Artificial Sequence
  Description of Artificial Sequence: Synthetic oligonucleotide
  Antisense strand to SEQ ID NO: 212714
aucaugagcacucuucccg

SEQ ID NO: 212716 - RNA, 19 nt, Artificial Sequence
  Description of Artificial Sequence: Synthetic oligonucleotide
  Sense strand starting at position 2977 of SEQ ID NO: 2740
aagagugcucaugaugcga

SEQ ID NO: 212717 - RNA, 19 nt, Artificial Sequence
  Description of Artificial Sequence: Synthetic oligonucleotide
  Antisense strand to SEQ ID NO: 212716
ucgcaucaugagcacucuu

SEQ ID NO: 212718 - RNA, 19 nt, Artificial Sequence
  Description of Artificial Sequence: Synthetic oligonucleotide
  Sense strand starting at position 3203 of SEQ ID NO: 2740
ggcuuuaagccagaacuca

SEQ ID NO: 212719 - RNA, 19 nt, Artificial Sequence
  Description of Artificial Sequence: Synthetic oligonucleotide
  Antisense strand to SEQ ID NO: 212718
ugaguucuggcuuaaagcc

SEQ ID NO: 212720 - RNA, 19 nt, Artificial Sequence
  Description of Artificial Sequence: Synthetic oligonucleotide
  Sense strand starting at position 3312 of SEQ ID NO: 2740
agcgguaaccuguaggaaa

SEQ ID NO: 212721 - RNA, 19 nt, Artificial Sequence
  Description of Artificial Sequence: Synthetic oligonucleotide
  Antisense strand to SEQ ID NO: 212720
uuuccuacagguuaccgcu

SEQ ID NO: 212722 - RNA, 19 nt, Artificial Sequence
  Description of Artificial Sequence: Synthetic oligonucleotide
  Sense strand starting at position 3337 of SEQ ID NO: 2740
uugagaaucuguguaggca

SEQ ID NO: 212723 - RNA, 19 nt, Artificial Sequence
  Description of Artificial Sequence: Synthetic oligonucleotide
  Antisense strand to SEQ ID NO: 212722
ugccuacacagauucucaa

SEQ ID NO: 212724 - RNA, 19 nt, Artificial Sequence
  Description of Artificial Sequence: Synthetic oligonucleotide
  Sense strand starting at position 3340 of SEQ ID NO: 2740
agaaucuguguaggcagaa

SEQ ID NO: 212725 - RNA, 19 nt, Artificial Sequence
  Description of Artificial Sequence: Synthetic oligonucleotide
  Antisense strand to SEQ ID NO: 212724
uucugccuacacagauucu

SEQ ID NO: 212726 - RNA, 19 nt, Artificial Sequence
  Description of Artificial Sequence: Synthetic oligonucleotide
  Sense strand starting at position 3498 of SEQ ID NO: 2740
caugauucuuaguuguuag

SEQ ID NO: 212727 - RNA, 19 nt, Artificial Sequence
  Description of Artificial Sequence: Synthetic oligonucleotide
  Antisense strand to SEQ ID NO: 212726
cuaacaacuaagaaucaug

SEQ ID NO: 212728 - RNA, 19 nt, Artificial Sequence
  Description of Artificial Sequence: Synthetic oligonucleotide
  Sense strand starting at position 3506 of SEQ ID NO: 2740
uuaguuguuagucaugacu

SEQ ID NO: 212729 - RNA, 19 nt, Artificial Sequence
  Description of Artificial Sequence: Synthetic oligonucleotide
  Antisense strand to SEQ ID NO: 212728
agucaugacuaacaacuaa

SEQ ID NO: 212730 - RNA, 19 nt, Artificial Sequence
  Description of Artificial Sequence: Synthetic oligonucleotide
  Sense strand starting at position 3509 of SEQ ID NO: 2740
guuguuagucaugacucaa

SEQ ID NO: 212731 - RNA, 19 nt, Artificial Sequence
  Description of Artificial Sequence: Synthetic oligonucleotide
  Antisense strand to SEQ ID NO: 212730
uugagucaugacuaacaac

SEQ ID NO: 212732 - RNA, 19 nt, Artificial Sequence
  Description of Artificial Sequence: Synthetic oligonucleotide
  Sense strand starting at position 3540 of SEQ ID NO: 2740
ggagucgcuacugauuaca

SEQ ID NO: 212733 - RNA, 19 nt, Artificial Sequence
  Description of Artificial Sequence: Synthetic oligonucleotide
  Antisense strand to SEQ ID NO: 212732
uguaaucaguagcgacucc

SEQ ID NO: 212734 - RNA, 19 nt, Artificial Sequence
  Description of Artificial Sequence: Synthetic oligonucleotide
  Sense strand starting at position 3548 of SEQ ID NO: 2740
uacugauuacauugaggug

SEQ ID NO: 212735 - RNA, 19 nt, Artificial Sequence
  Description of Artificial Sequence: Synthetic oligonucleotide
  Antisense strand to SEQ ID NO: 212734
caccucaauguaaucagua

SEQ ID NO: 212736 - RNA, 19 nt, Artificial Sequence
  Description of Artificial Sequence: Synthetic oligonucleotide
  Sense strand starting at position 3763 of SEQ ID NO: 2740
gaguuuggaguccaguagu

SEQ ID NO: 212737 - RNA, 19 nt, Artificial Sequence
  Description of Artificial Sequence: Synthetic oligonucleotide
  Antisense strand to SEQ ID NO: 212736
acuacuggacuccaaacuc

SEQ ID NO: 212738 - RNA, 19 nt, Artificial Sequence
  Description of Artificial Sequence: Synthetic oligonucleotide
  Sense strand starting at position 3774 of SEQ ID NO: 2740
ccaguagucugauuccaga

SEQ ID NO: 212739 - RNA, 19 nt, Artificial Sequence
  Description of Artificial Sequence: Synthetic oligonucleotide
  Antisense strand to SEQ ID NO: 212738
ucuggaaucagacuacugg

SEQ ID NO: 212740 - RNA, 19 nt, Artificial Sequence
  Description of Artificial Sequence: Synthetic oligonucleotide
  Sense strand starting at position 3842 of SEQ ID NO: 2740
ugaugaguccuccagcaga

SEQ ID NO: 212741 - RNA, 19 nt, Artificial Sequence
  Description of Artificial Sequence: Synthetic oligonucleotide
  Antisense strand to SEQ ID NO: 212740
ucugcuggaggacucauca

SEQ ID NO: 212742 - RNA, 19 nt, Artificial Sequence
  Description of Artificial Sequence: Synthetic oligonucleotide
  Sense strand starting at position 3874 of SEQ ID NO: 2740
gacucagcagguuaagagu

SEQ ID NO: 212743 - RNA, 19 nt, Artificial Sequence
  Description of Artificial Sequence: Synthetic oligonucleotide
  Antisense strand to SEQ ID NO: 212742
acucuuaaccugcugaguc

SEQ ID NO: 212744 - RNA, 19 nt, Artificial Sequence
  Description of Artificial Sequence: Synthetic oligonucleotide
  Sense strand starting at position 75 of SEQ ID NO: 2741
gccacagugaguugagauc

SEQ ID NO: 212745 - RNA, 19 nt, Artificial Sequence
  Description of Artificial Sequence: Synthetic oligonucleotide
  Antisense strand to SEQ ID NO: 212744
gaucucaacucacuguggc

SEQ ID NO: 212746 - RNA, 19 nt, Artificial Sequence
  Description of Artificial Sequence: Synthetic oligonucleotide
  Sense strand starting at position 213 of SEQ ID NO: 2741
uggugaguguauucaagua

SEQ ID NO: 212747 - RNA, 19 nt, Artificial Sequence
  Description of Artificial Sequence: Synthetic oligonucleotide
  Antisense strand to SEQ ID NO: 212746
uacuugaauacacucacca

SEQ ID NO: 212748 - RNA, 19 nt, Artificial Sequence
  Description of Artificial Sequence: Synthetic oligonucleotide
  Sense strand starting at position 284 of SEQ ID NO: 2741
uucuuugugccaggaacua

SEQ ID NO: 212749 - RNA, 19 nt, Artificial Sequence
  Description of Artificial Sequence: Synthetic oligonucleotide
  Antisense strand to SEQ ID NO: 212748
uaguuccuggcacaaagaa

SEQ ID NO: 212750 - RNA, 19 nt, Artificial Sequence
  Description of Artificial Sequence: Synthetic oligonucleotide
  Sense strand starting at position 418 of SEQ ID NO: 2741
uaaugacacgccuguaauc

SEQ ID NO: 212751 - RNA, 19 nt, Artificial Sequence
  Description of Artificial Sequence: Synthetic oligonucleotide
  Antisense strand to SEQ ID NO: 212750
gauuacaggcgugucauua

SEQ ID NO: 212752 - RNA, 19 nt, Artificial Sequence
  Description of Artificial Sequence: Synthetic oligonucleotide
  Sense strand starting at position 545 of SEQ ID NO: 2741
gaguuaguaacauggcaga

SEQ ID NO: 212753 - RNA, 19 nt, Artificial Sequence
  Description of Artificial Sequence: Synthetic oligonucleotide
  Antisense strand to SEQ ID NO: 212752
ucugccauguuacuaacuc

SEQ ID NO: 212754 - RNA, 19 nt, Artificial Sequence
  Description of Artificial Sequence: Synthetic oligonucleotide
  Sense strand starting at position 561 of SEQ ID NO: 2741
agagcuaaagccuguuuga

SEQ ID NO: 212755 - RNA, 19 nt, Artificial Sequence
  Description of Artificial Sequence: Synthetic oligonucleotide
  Antisense strand to SEQ ID NO: 212754
ucaaacaggcuuuagcucu

SEQ ID NO: 212756 - RNA, 19 nt, Artificial Sequence
  Description of Artificial Sequence: Synthetic oligonucleotide
  Sense strand starting at position 570 of SEQ ID NO: 2741
gccuguuugacuuagagag

SEQ ID NO: 212757 - RNA, 19 nt, Artificial Sequence
  Description of Artificial Sequence: Synthetic oligonucleotide
  Antisense strand to SEQ ID NO: 212756
cucucuaagucaaacaggc

SEQ ID NO: 212758 - RNA, 19 nt, Artificial Sequence
  Description of Artificial Sequence: Synthetic oligonucleotide
  Sense strand starting at position 580 of SEQ ID NO: 2741
cuuagagagccugagcuua

SEQ ID NO: 212759 - RNA, 19 nt, Artificial Sequence
  Description of Artificial Sequence: Synthetic oligonucleotide
  Antisense strand to SEQ ID NO: 212758
uaagcucaggcucucuaag

SEQ ID NO: 212760 - RNA, 19 nt, Artificial Sequence
  Description of Artificial Sequence: Synthetic oligonucleotide
  Sense strand starting at position 655 of SEQ ID NO: 2741
uugugucaccuuuagacua

SEQ ID NO: 212761 - RNA, 19 nt, Artificial Sequence
  Description of Artificial Sequence: Synthetic oligonucleotide
  Antisense strand to SEQ ID NO: 212760
uagucuaaaggugacacaa

SEQ ID NO: 212762 - RNA, 19 nt, Artificial Sequence
  Description of Artificial Sequence: Synthetic oligonucleotide
  Sense strand starting at position 874 of SEQ ID NO: 2741
aacugaauuccuuggguuu

SEQ ID NO: 212763 - RNA, 19 nt, Artificial Sequence
  Description of Artificial Sequence: Synthetic oligonucleotide
  Antisense strand to SEQ ID NO: 212762
aaacccaaggaauucaguu

SEQ ID NO: 212764 - RNA, 19 nt, Artificial Sequence
  Description of Artificial Sequence: Synthetic oligonucleotide
  Sense strand starting at position 908 of SEQ ID NO: 2741
uucuaagugggccagaauu

SEQ ID NO: 212765 - RNA, 19 nt, Artificial Sequence
  Description of Artificial Sequence: Synthetic oligonucleotide
  Antisense strand to SEQ ID NO: 212764
aauucuggcccacuuagaa

SEQ ID NO: 212766 - RNA, 19 nt, Artificial Sequence
  Description of Artificial Sequence: Synthetic oligonucleotide
  Sense strand starting at position 975 of SEQ ID NO: 2741
uggugacuucuagaucuuu

SEQ ID NO: 212767 - RNA, 19 nt, Artificial Sequence
  Description of Artificial Sequence: Synthetic oligonucleotide
  Antisense strand to SEQ ID NO: 212766
aaagaucuagaagucacca

SEQ ID NO: 212768 - RNA, 19 nt, Artificial Sequence
  Description of Artificial Sequence: Synthetic oligonucleotide
  Sense strand starting at position 1113 of SEQ ID NO: 2741
ccugaugaauucccaguga

SEQ ID NO: 212769 - RNA, 19 nt, Artificial Sequence
  Description of Artificial Sequence: Synthetic oligonucleotide
  Antisense strand to SEQ ID NO: 212768
ucacugggaauucaucagg

SEQ ID NO: 212770 - RNA, 19 nt, Artificial Sequence
  Description of Artificial Sequence: Synthetic oligonucleotide
  Sense strand starting at position 1117 of SEQ ID NO: 2741
augaauucccagugagguc

SEQ ID NO: 212771 - RNA, 19 nt, Artificial Sequence
  Description of Artificial Sequence: Synthetic oligonucleotide
  Antisense strand to SEQ ID NO: 212770
gaccucacugggaauucau

SEQ ID NO: 212772 - RNA, 19 nt, Artificial Sequence
  Description of Artificial Sequence: Synthetic oligonucleotide
  Sense strand starting at position 1242 of SEQ ID NO: 2741
gcugcugagaacuguucua

SEQ ID NO: 212773 - RNA, 19 nt, Artificial Sequence
  Description of Artificial Sequence: Synthetic oligonucleotide
  Antisense strand to SEQ ID NO: 212772
uagaacaguucucagcagc

SEQ ID NO: 212774 - RNA, 19 nt, Artificial Sequence
  Description of Artificial Sequence: Synthetic oligonucleotide
  Sense strand starting at position 1254 of SEQ ID NO: 2741
uguucuagugaugacaguu

SEQ ID NO: 212775 - RNA, 19 nt, Artificial Sequence
  Description of Artificial Sequence: Synthetic oligonucleotide
  Antisense strand to SEQ ID NO: 212774
aacugucaucacuagaaca

SEQ ID NO: 212776 - RNA, 19 nt, Artificial Sequence
  Description of Artificial Sequence: Synthetic oligonucleotide
  Sense strand starting at position 1350 of SEQ ID NO: 2741
agacaucacuggucuccau

SEQ ID NO: 212777 - RNA, 19 nt, Artificial Sequence
  Description of Artificial Sequence: Synthetic oligonucleotide
  Antisense strand to SEQ ID NO: 212776
auggagaccagugaugucu

SEQ ID NO: 212778 - RNA, 19 nt, Artificial Sequence
  Description of Artificial Sequence: Synthetic oligonucleotide
  Sense strand starting at position 1600 of SEQ ID NO: 2741
gccguuccgcucgcaagau

SEQ ID NO: 212779 - RNA, 19 nt, Artificial Sequence
  Description of Artificial Sequence: Synthetic oligonucleotide
  Antisense strand to SEQ ID NO: 212778
aucuugcgagcggaacggc

SEQ ID NO: 212780 - RNA, 19 nt, Artificial Sequence
  Description of Artificial Sequence: Synthetic oligonucleotide
  Sense strand starting at position 2038 of SEQ ID NO: 2741
ggcaauuucgcgcagcgaa

SEQ ID NO: 212781 - RNA, 19 nt, Artificial Sequence
  Description of Artificial Sequence: Synthetic oligonucleotide
  Antisense strand to SEQ ID NO: 212780
uucgcugcgcgaaauugcc

SEQ ID NO: 212782 - RNA, 19 nt, Artificial Sequence
  Description of Artificial Sequence: Synthetic oligonucleotide
  Sense strand starting at position 2052 of SEQ ID NO: 2741
gcgaaucgcagcucuaagu

SEQ ID NO: 212783 - RNA, 19 nt, Artificial Sequence
  Description of Artificial Sequence: Synthetic oligonucleotide
  Antisense strand to SEQ ID NO: 212782
acuuagagcugcgauucgc

SEQ ID NO: 212784 - RNA, 19 nt, Artificial Sequence
  Description of Artificial Sequence: Synthetic oligonucleotide
  Sense strand starting at position 2204 of SEQ ID NO: 2741
gcgagcuggguuguguaaa

SEQ ID NO: 212785 - RNA, 19 nt, Artificial Sequence
  Description of Artificial Sequence: Synthetic oligonucleotide
  Antisense strand to SEQ ID NO: 212784
uuuacacaacccagcucgc

SEQ ID NO: 212786 - RNA, 19 nt, Artificial Sequence
  Description of Artificial Sequence: Synthetic oligonucleotide
  Sense strand starting at position 2263 of SEQ ID NO: 2741
gcgcgcuuucccucgugaa

SEQ ID NO: 212787 - RNA, 19 nt, Artificial Sequence
  Description of Artificial Sequence: Synthetic oligonucleotide
  Antisense strand to SEQ ID NO: 212786
uucacgagggaaagcgcgc

SEQ ID NO: 212788 - RNA, 19 nt, Artificial Sequence
  Description of Artificial Sequence: Synthetic oligonucleotide
  Sense strand starting at position 2291 of SEQ ID NO: 2741
aggagucaugcguacauuc

SEQ ID NO: 212789 - RNA, 19 nt, Artificial Sequence
  Description of Artificial Sequence: Synthetic oligonucleotide
  Antisense strand to SEQ ID NO: 212788
gaauguacgcaugacuccu

SEQ ID NO: 212790 - RNA, 19 nt, Artificial Sequence
  Description of Artificial Sequence: Synthetic oligonucleotide
  Sense strand starting at position 2399 of SEQ ID NO: 2741
uuuacauucgcgucugcaa

SEQ ID NO: 212791 - RNA, 19 nt, Artificial Sequence
  Description of Artificial Sequence: Synthetic oligonucleotide
  Antisense strand to SEQ ID NO: 212790
uugcagacgcgaauguaaa

SEQ ID NO: 212792 - RNA, 19 nt, Artificial Sequence
  Description of Artificial Sequence: Synthetic oligonucleotide
  Sense strand starting at position 2599 of SEQ ID NO: 2741
gccugcucugaugggaaau

SEQ ID NO: 212793 - RNA, 19 nt, Artificial Sequence
  Description of Artificial Sequence: Synthetic oligonucleotide
  Antisense strand to SEQ ID NO: 212792
auuucccaucagagcaggc

SEQ ID NO: 212794 - RNA, 19 nt, Artificial Sequence
  Description of Artificial Sequence: Synthetic oligonucleotide
  Sense strand starting at position 2600 of SEQ ID NO: 2741
ccugcucugaugggaaauc

SEQ ID NO: 212795 - RNA, 19 nt, Artificial Sequence
  Description of Artificial Sequence: Synthetic oligonucleotide
  Antisense strand to SEQ ID NO: 212794
gauuucccaucagagcagg

SEQ ID NO: 212796 - RNA, 19 nt, Artificial Sequence
  Description of Artificial Sequence: Synthetic oligonucleotide
  Sense strand starting at position 2609 of SEQ ID NO: 2741
augggaaaucggugaugga

SEQ ID NO: 212797 - RNA, 19 nt, Artificial Sequence
  Description of Artificial Sequence: Synthetic oligonucleotide
  Antisense strand to SEQ ID NO: 212796
uccaucaccgauuucccau

SEQ ID NO: 212798 - RNA, 19 nt, Artificial Sequence
  Description of Artificial Sequence: Synthetic oligonucleotide
  Sense strand starting at position 3088 of SEQ ID NO: 2741
ucuugagucccagguaguu

SEQ ID NO: 212799 - RNA, 19 nt, Artificial Sequence
  Description of Artificial Sequence: Synthetic oligonucleotide
  Antisense strand to SEQ ID NO: 212798
aacuaccugggacucaaga

SEQ ID NO: 212800 - RNA, 19 nt, Artificial Sequence
  Description of Artificial Sequence: Synthetic oligonucleotide
  Sense strand starting at position 3090 of SEQ ID NO: 2741
uugagucccagguaguuua

SEQ ID NO: 212801 - RNA, 19 nt, Artificial Sequence
  Description of Artificial Sequence: Synthetic oligonucleotide
  Antisense strand to SEQ ID NO: 212800
uaaacuaccugggacucaa

SEQ ID NO: 212802 - RNA, 19 nt, Artificial Sequence
  Description of Artificial Sequence: Synthetic oligonucleotide
  Sense strand starting at position 3342 of SEQ ID NO: 2741
ccugaaggcauuuguguuu

SEQ ID NO: 212803 - RNA, 19 nt, Artificial Sequence
  Description of Artificial Sequence: Synthetic oligonucleotide
  Antisense strand to SEQ ID NO: 212802
aaacacaaaugccuucagg

SEQ ID NO: 212804 - RNA, 19 nt, Artificial Sequence
  Description of Artificial Sequence: Synthetic oligonucleotide
  Sense strand starting at position 3357 of SEQ ID NO: 2741
guuugugacccuugaucuu

SEQ ID NO: 212805 - RNA, 19 nt, Artificial Sequence
  Description of Artificial Sequence: Synthetic oligonucleotide
  Antisense strand to SEQ ID NO: 212804
aagaucaagggucacaaac

SEQ ID NO: 212806 - RNA, 19 nt, Artificial Sequence
  Description of Artificial Sequence: Synthetic oligonucleotide
  Sense strand starting at position 3467 of SEQ ID NO: 2741
guacauauccuguaugguu

SEQ ID NO: 212807 - RNA, 19 nt, Artificial Sequence
  Description of Artificial Sequence: Synthetic oligonucleotide
  Antisense strand to SEQ ID NO: 212806
aaccauacaggauauguac

SEQ ID NO: 212808 - RNA, 19 nt, Artificial Sequence
  Description of Artificial Sequence: Synthetic oligonucleotide
  Sense strand starting at position 3537 of SEQ ID NO: 2741
ugguucugauguucuguaa

SEQ ID NO: 212809 - RNA, 19 nt, Artificial Sequence
  Description of Artificial Sequence: Synthetic oligonucleotide
  Antisense strand to SEQ ID NO: 212808
uuacagaacaucagaacca

SEQ ID NO: 212810 - RNA, 19 nt, Artificial Sequence
  Description of Artificial Sequence: Synthetic oligonucleotide
  Sense strand starting at position 3540 of SEQ ID NO: 2741
uucugauguucuguaauuu

SEQ ID NO: 212811 - RNA, 19 nt, Artificial Sequence
  Description of Artificial Sequence: Synthetic oligonucleotide
  Antisense strand to SEQ ID NO: 212810
aaauuacagaacaucagaa

SEQ ID NO: 212812 - RNA, 19 nt, Artificial Sequence
  Description of Artificial Sequence: Synthetic oligonucleotide
  Sense strand starting at position 3605 of SEQ ID NO: 2741
uugggaauugucugcaguc

SEQ ID NO: 212813 - RNA, 19 nt, Artificial Sequence
  Description of Artificial Sequence: Synthetic oligonucleotide
  Antisense strand to SEQ ID NO: 212812
gacugcagacaauucccaa

SEQ ID NO: 212814 - RNA, 19 nt, Artificial Sequence
  Description of Artificial Sequence: Synthetic oligonucleotide
  Sense strand starting at position 3627 of SEQ ID NO: 2741
ugggucagaugguucuuua

SEQ ID NO: 212815 - RNA, 19 nt, Artificial Sequence
  Description of Artificial Sequence: Synthetic oligonucleotide
  Antisense strand to SEQ ID NO: 212814
uaaagaaccaucugaccca

SEQ ID NO: 212816 - RNA, 19 nt, Artificial Sequence
  Description of Artificial Sequence: Synthetic oligonucleotide
  Sense strand starting at position 3630 of SEQ ID NO: 2741
gucagaugguucuuuagca

SEQ ID NO: 212817 - RNA, 19 nt, Artificial Sequence
  Description of Artificial Sequence: Synthetic oligonucleotide
  Antisense strand to SEQ ID NO: 212816
ugcuaaagaaccaucugac

SEQ ID NO: 212818 - RNA, 19 nt, Artificial Sequence
  Description of Artificial Sequence: Synthetic oligonucleotide
  Sense strand starting at position 3846 of SEQ ID NO: 2741
guguuucugagcgcgggaa

SEQ ID NO: 212819 - RNA, 19 nt, Artificial Sequence
  Description of Artificial Sequence: Synthetic oligonucleotide
  Antisense strand to SEQ ID NO: 212818
uucccgcgcucagaaacac

SEQ ID NO: 212820 - RNA, 19 nt, Artificial Sequence
  Description of Artificial Sequence: Synthetic oligonucleotide
  Sense strand starting at position 3874 of SEQ ID NO: 2741
uagagcugucuguaguuau

SEQ ID NO: 212821 - RNA, 19 nt, Artificial Sequence
  Description of Artificial Sequence: Synthetic oligonucleotide
  Antisense strand to SEQ ID NO: 212820
auaacuacagacagcucua

SEQ ID NO: 212822 - RNA, 19 nt, Artificial Sequence
  Description of Artificial Sequence: Synthetic oligonucleotide
  Sense strand starting at position 3956 of SEQ ID NO: 2741
cugcuuugguacucugauu

SEQ ID NO: 212823 - RNA, 19 nt, Artificial Sequence
  Description of Artificial Sequence: Synthetic oligonucleotide
  Antisense strand to SEQ ID NO: 212822
aaucagaguaccaaagcag

SEQ ID NO: 212824 - RNA, 19 nt, Artificial Sequence
  Description of Artificial Sequence: Synthetic oligonucleotide
  Sense strand starting at position 54 of SEQ ID NO: 2742
aguuacaaaucugucaaga

SEQ ID NO: 212825 - RNA, 19 nt, Artificial Sequence
  Description of Artificial Sequence: Synthetic oligonucleotide
  Antisense strand to SEQ ID NO: 212824
ucuugacagauuuguaacu

SEQ ID NO: 212826 - RNA, 19 nt, Artificial Sequence
  Description of Artificial Sequence: Synthetic oligonucleotide
  Sense strand starting at position 277 of SEQ ID NO: 2742
ggcucuuugggcuaaucca

SEQ ID NO: 212827 - RNA, 19 nt, Artificial Sequence
  Description of Artificial Sequence: Synthetic oligonucleotide
  Antisense strand to SEQ ID NO: 212826
uggauuagcccaaagagcc

SEQ ID NO: 212828 - RNA, 19 nt, Artificial Sequence
  Description of Artificial Sequence: Synthetic oligonucleotide
  Sense strand starting at position 326 of SEQ ID NO: 2742
acucgaauugccugaaaga

SEQ ID NO: 212829 - RNA, 19 nt, Artificial Sequence
  Description of Artificial Sequence: Synthetic oligonucleotide
  Antisense strand to SEQ ID NO: 212828
ucuuucaggcaauucgagu

SEQ ID NO: 212830 - RNA, 19 nt, Artificial Sequence
  Description of Artificial Sequence: Synthetic oligonucleotide
  Sense strand starting at position 327 of SEQ ID NO: 2742
cucgaauugccugaaagac

SEQ ID NO: 212831 - RNA, 19 nt, Artificial Sequence
  Description of Artificial Sequence: Synthetic oligonucleotide
  Antisense strand to SEQ ID NO: 212830
gucuuucaggcaauucgag

SEQ ID NO: 212832 - RNA, 19 nt, Artificial Sequence
  Description of Artificial Sequence: Synthetic oligonucleotide
  Sense strand starting at position 567 of SEQ ID NO: 2742
uuaagacagugagucuauu

SEQ ID NO: 212833 - RNA, 19 nt, Artificial Sequence
  Description of Artificial Sequence: Synthetic oligonucleotide
  Antisense strand to SEQ ID NO: 212832
aauagacucacugucuuaa

SEQ ID NO: 212834 - RNA, 19 nt, Artificial Sequence
  Description of Artificial Sequence: Synthetic oligonucleotide
  Sense strand starting at position 573 of SEQ ID NO: 2742
cagugagucuauucuguaa

SEQ ID NO: 212835 - RNA, 19 nt, Artificial Sequence
  Description of Artificial Sequence: Synthetic oligonucleotide
  Antisense strand to SEQ ID NO: 212834
uuacagaauagacucacug

SEQ ID NO: 212836 - RNA, 19 nt, Artificial Sequence
  Description of Artificial Sequence: Synthetic oligonucleotide
  Sense strand starting at position 576 of SEQ ID NO: 2742
ugagucuauucuguaacau

SEQ ID NO: 212837 - RNA, 19 nt, Artificial Sequence
  Description of Artificial Sequence: Synthetic oligonucleotide
  Antisense strand to SEQ ID NO: 212836
auguuacagaauagacuca

SEQ ID NO: 212838 - RNA, 19 nt, Artificial Sequence
  Description of Artificial Sequence: Synthetic oligonucleotide
  Sense strand starting at position 714 of SEQ ID NO: 2742
caaguagaguaaccuugau

SEQ ID NO: 212839 - RNA, 19 nt, Artificial Sequence
  Description of Artificial Sequence: Synthetic oligonucleotide
  Antisense strand to SEQ ID NO: 212838
aucaagguuacucuacuug

SEQ ID NO: 212840 - RNA, 19 nt, Artificial Sequence
  Description of Artificial Sequence: Synthetic oligonucleotide
  Sense strand starting at position 878 of SEQ ID NO: 2742
cuguuaagucuauaaggcu

SEQ ID NO: 212841 - RNA, 19 nt, Artificial Sequence
  Description of Artificial Sequence: Synthetic oligonucleotide
  Antisense strand to SEQ ID NO: 212840
agccuuauagacuuaacag

SEQ ID NO: 212842 - RNA, 19 nt, Artificial Sequence
  Description of Artificial Sequence: Synthetic oligonucleotide
  Sense strand starting at position 895 of SEQ ID NO: 2742
cuauuugacuaagacguga

SEQ ID NO: 212843 - RNA, 19 nt, Artificial Sequence
  Description of Artificial Sequence: Synthetic oligonucleotide
  Antisense strand to SEQ ID NO: 212842
ucacgucuuagucaaauag

SEQ ID NO: 212844 - RNA, 19 nt, Artificial Sequence
  Description of Artificial Sequence: Synthetic oligonucleotide
  Sense strand starting at position 920 of SEQ ID NO: 2742
acucgaaguauuuguugua

SEQ ID NO: 212845 - RNA, 19 nt, Artificial Sequence
  Description of Artificial Sequence: Synthetic oligonucleotide
  Antisense strand to SEQ ID NO: 212844
uacaacaaauacuucgagu

SEQ ID NO: 212846 - RNA, 19 nt, Artificial Sequence
  Description of Artificial Sequence: Synthetic oligonucleotide
  Sense strand starting at position 921 of SEQ ID NO: 2742
cucgaaguauuuguuguaa

SEQ ID NO: 212847 - RNA, 19 nt, Artificial Sequence
  Description of Artificial Sequence: Synthetic oligonucleotide
  Antisense strand to SEQ ID NO: 212846
uuacaacaaauacuucgag

SEQ ID NO: 212848 - RNA, 19 nt, Artificial Sequence
  Description of Artificial Sequence: Synthetic oligonucleotide
  Sense strand starting at position 932 of SEQ ID NO: 2742
uguuguaaacuacagcauu

SEQ ID NO: 212849 - RNA, 19 nt, Artificial Sequence
  Description of Artificial Sequence: Synthetic oligonucleotide
  Antisense strand to SEQ ID NO: 212848
aaugcuguaguuuacaaca

SEQ ID NO: 212850 - RNA, 19 nt, Artificial Sequence
  Description of Artificial Sequence: Synthetic oligonucleotide
  Sense strand starting at position 1041 of SEQ ID NO: 2742
uccaauaaucuagggucaa

SEQ ID NO: 212851 - RNA, 19 nt, Artificial Sequence
  Description of Artificial Sequence: Synthetic oligonucleotide
  Antisense strand to SEQ ID NO: 212850
uugacccuagauuauugga

SEQ ID NO: 212852 - RNA, 19 nt, Artificial Sequence
  Description of Artificial Sequence: Synthetic oligonucleotide
  Sense strand starting at position 1207 of SEQ ID NO: 2742
agaacucuuguguaggcau

SEQ ID NO: 212853 - RNA, 19 nt, Artificial Sequence
  Description of Artificial Sequence: Synthetic oligonucleotide
  Antisense strand to SEQ ID NO: 212852
augccuacacaagaguucu

SEQ ID NO: 212854 - RNA, 19 nt, Artificial Sequence
  Description of Artificial Sequence: Synthetic oligonucleotide
  Sense strand starting at position 1209 of SEQ ID NO: 2742
aacucuuguguaggcauaa

SEQ ID NO: 212855 - RNA, 19 nt, Artificial Sequence
  Description of Artificial Sequence: Synthetic oligonucleotide
  Antisense strand to SEQ ID NO: 212854
uuaugccuacacaagaguu

SEQ ID NO: 212856 - RNA, 19 nt, Artificial Sequence
  Description of Artificial Sequence: Synthetic oligonucleotide
  Sense strand starting at position 1218 of SEQ ID NO: 2742
guaggcauaaucugugaga

SEQ ID NO: 212857 - RNA, 19 nt, Artificial Sequence
  Description of Artificial Sequence: Synthetic oligonucleotide
  Antisense strand to SEQ ID NO: 212856
ucucacagauuaugccuac

SEQ ID NO: 212858 - RNA, 19 nt, Artificial Sequence
  Description of Artificial Sequence: Synthetic oligonucleotide
  Sense strand starting at position 1219 of SEQ ID NO: 2742
uaggcauaaucugugagau

SEQ ID NO: 212859 - RNA, 19 nt, Artificial Sequence
  Description of Artificial Sequence: Synthetic oligonucleotide
  Antisense strand to SEQ ID NO: 212858
aucucacagauuaugccua

SEQ ID NO: 212860 - RNA, 19 nt, Artificial Sequence
  Description of Artificial Sequence: Synthetic oligonucleotide
  Sense strand starting at position 1220 of SEQ ID NO: 2742
aggcauaaucugugagaug

SEQ ID NO: 212861 - RNA, 19 nt, Artificial Sequence
  Description of Artificial Sequence: Synthetic oligonucleotide
  Antisense strand to SEQ ID NO: 212860
caucucacagauuaugccu

SEQ ID NO: 212862 - RNA, 19 nt, Artificial Sequence
  Description of Artificial Sequence: Synthetic oligonucleotide
  Sense strand starting at position 1229 of SEQ ID NO: 2742
cugugagauguuuauaguu

SEQ ID NO: 212863 - RNA, 19 nt, Artificial Sequence
  Description of Artificial Sequence: Synthetic oligonucleotide
  Antisense strand to SEQ ID NO: 212862
aacuauaaacaucucacag

SEQ ID NO: 212864 - RNA, 19 nt, Artificial Sequence
  Description of Artificial Sequence: Synthetic oligonucleotide
  Sense strand starting at position 2256 of SEQ ID NO: 2742
uggagauucuuauugcaua

SEQ ID NO: 212865 - RNA, 19 nt, Artificial Sequence
  Description of Artificial Sequence: Synthetic oligonucleotide
  Antisense strand to SEQ ID NO: 212864
uaugcaauaagaaucucca

SEQ ID NO: 212866 - RNA, 19 nt, Artificial Sequence
  Description of Artificial Sequence: Synthetic oligonucleotide
  Sense strand starting at position 2323 of SEQ ID NO: 2742
gauggaucccacuggccaa

SEQ ID NO: 212867 - RNA, 19 nt, Artificial Sequence
  Description of Artificial Sequence: Synthetic oligonucleotide
  Antisense strand to SEQ ID NO: 212866
uuggccagugggauccauc

SEQ ID NO: 212868 - RNA, 19 nt, Artificial Sequence
  Description of Artificial Sequence: Synthetic oligonucleotide
  Sense strand starting at position 2397 of SEQ ID NO: 2742
gaggguucccuggagagca

SEQ ID NO: 212869 - RNA, 19 nt, Artificial Sequence
  Description of Artificial Sequence: Synthetic oligonucleotide
  Antisense strand to SEQ ID NO: 212868
ugcucuccagggaacccuc

SEQ ID NO: 212870 - RNA, 19 nt, Artificial Sequence
  Description of Artificial Sequence: Synthetic oligonucleotide
  Sense strand starting at position 2678 of SEQ ID NO: 2742
aaagaagugucaccuggaa

SEQ ID NO: 212871 - RNA, 19 nt, Artificial Sequence
  Description of Artificial Sequence: Synthetic oligonucleotide
  Antisense strand to SEQ ID NO: 212870
uuccaggugacacuucuuu

SEQ ID NO: 212872 - RNA, 19 nt, Artificial Sequence
  Description of Artificial Sequence: Synthetic oligonucleotide
  Sense strand starting at position 2732 of SEQ ID NO: 2742
ccugauaacugagauuucu

SEQ ID NO: 212873 - RNA, 19 nt, Artificial Sequence
  Description of Artificial Sequence: Synthetic oligonucleotide
  Antisense strand to SEQ ID NO: 212872
agaaaucucaguuaucagg

SEQ ID NO: 212874 - RNA, 19 nt, Artificial Sequence
  Description of Artificial Sequence: Synthetic oligonucleotide
  Sense strand starting at position 2791 of SEQ ID NO: 2742
ggaggcuagugauucucaa

SEQ ID NO: 212875 - RNA, 19 nt, Artificial Sequence
  Description of Artificial Sequence: Synthetic oligonucleotide
  Antisense strand to SEQ ID NO: 212874
uugagaaucacuagccucc

SEQ ID NO: 212876 - RNA, 19 nt, Artificial Sequence
  Description of Artificial Sequence: Synthetic oligonucleotide
  Sense strand starting at position 2812 of SEQ ID NO: 2742
gugguugcacauuaaaguu

SEQ ID NO: 212877 - RNA, 19 nt, Artificial Sequence
  Description of Artificial Sequence: Synthetic oligonucleotide
  Antisense strand to SEQ ID NO: 212876
aacuuuaaugugcaaccac

SEQ ID NO: 212878 - RNA, 19 nt, Artificial Sequence
  Description of Artificial Sequence: Synthetic oligonucleotide
  Sense strand starting at position 2973 of SEQ ID NO: 2742
cucuaagcagggugauaaa

SEQ ID NO: 212879 - RNA, 19 nt, Artificial Sequence
  Description of Artificial Sequence: Synthetic oligonucleotide
  Antisense strand to SEQ ID NO: 212878
uuuaucacccugcuuagag

SEQ ID NO: 212880 - RNA, 19 nt, Artificial Sequence
  Description of Artificial Sequence: Synthetic oligonucleotide
  Sense strand starting at position 2996 of SEQ ID NO: 2742
ggagcugaguacuuguaau

SEQ ID NO: 212881 - RNA, 19 nt, Artificial Sequence
  Description of Artificial Sequence: Synthetic oligonucleotide
  Antisense strand to SEQ ID NO: 212880
auuacaaguacucagcucc

SEQ ID NO: 212882 - RNA, 19 nt, Artificial Sequence
  Description of Artificial Sequence: Synthetic oligonucleotide
  Sense strand starting at position 3032 of SEQ ID NO: 2742
gaaagugagucccugggaa

SEQ ID NO: 212883 - RNA, 19 nt, Artificial Sequence
  Description of Artificial Sequence: Synthetic oligonucleotide
  Antisense strand to SEQ ID NO: 212882
uucccagggacucacuuuc

SEQ ID NO: 212884 - RNA, 19 nt, Artificial Sequence
  Description of Artificial Sequence: Synthetic oligonucleotide
  Sense strand starting at position 3236 of SEQ ID NO: 2742
ccucauuccuggucacacu

SEQ ID NO: 212885 - RNA, 19 nt, Artificial Sequence
  Description of Artificial Sequence: Synthetic oligonucleotide
  Antisense strand to SEQ ID NO: 212884
agugugaccaggaaugagg

SEQ ID NO: 212886 - RNA, 19 nt, Artificial Sequence
  Description of Artificial Sequence: Synthetic oligonucleotide
  Sense strand starting at position 3273 of SEQ ID NO: 2742
cuaacuauagcaggaguuu

SEQ ID NO: 212887 - RNA, 19 nt, Artificial Sequence
  Description of Artificial Sequence: Synthetic oligonucleotide
  Antisense strand to SEQ ID NO: 212886
aaacuccugcuauaguuag

SEQ ID NO: 212888 - RNA, 19 nt, Artificial Sequence
  Description of Artificial Sequence: Synthetic oligonucleotide
  Sense strand starting at position 3285 of SEQ ID NO: 2742
ggaguuucucaagguucuu

SEQ ID NO: 212889 - RNA, 19 nt, Artificial Sequence
  Description of Artificial Sequence: Synthetic oligonucleotide
  Antisense strand to SEQ ID NO: 212888
aagaaccuugagaaacucc

SEQ ID NO: 212890 - RNA, 19 nt, Artificial Sequence
  Description of Artificial Sequence: Synthetic oligonucleotide
  Sense strand starting at position 3369 of SEQ ID NO: 2742
cuaggacucuuacuguuua

SEQ ID NO: 212891 - RNA, 19 nt, Artificial Sequence
  Description of Artificial Sequence: Synthetic oligonucleotide
  Antisense strand to SEQ ID NO: 212890
uaaacaguaagaguccuag

SEQ ID NO: 212892 - RNA, 19 nt, Artificial Sequence
  Description of Artificial Sequence: Synthetic oligonucleotide
  Sense strand starting at position 3428 of SEQ ID NO: 2742
ggaagagcuucaguuugau

SEQ ID NO: 212893 - RNA, 19 nt, Artificial Sequence
  Description of Artificial Sequence: Synthetic oligonucleotide
  Antisense strand to SEQ ID NO: 212892
aucaaacugaagcucuucc

SEQ ID NO: 212894 - RNA, 19 nt, Artificial Sequence
  Description of Artificial Sequence: Synthetic oligonucleotide
  Sense strand starting at position 3622 of SEQ ID NO: 2742
auuagagcucacuggcauu

SEQ ID NO: 212895 - RNA, 19 nt, Artificial Sequence
  Description of Artificial Sequence: Synthetic oligonucleotide
  Antisense strand to SEQ ID NO: 212894
aaugccagugagcucuaau

SEQ ID NO: 212896 - RNA, 19 nt, Artificial Sequence
  Description of Artificial Sequence: Synthetic oligonucleotide
  Sense strand starting at position 3761 of SEQ ID NO: 2742
ggcuuugaauuguccugaa

SEQ ID NO: 212897 - RNA, 19 nt, Artificial Sequence
  Description of Artificial Sequence: Synthetic oligonucleotide
  Antisense strand to SEQ ID NO: 212896
uucaggacaauucaaagcc

SEQ ID NO: 212898 - RNA, 19 nt, Artificial Sequence
  Description of Artificial Sequence: Synthetic oligonucleotide
  Sense strand starting at position 3786 of SEQ ID NO: 2742
aguaauaaggauuguguuu

SEQ ID NO: 212899 - RNA, 19 nt, Artificial Sequence
  Description of Artificial Sequence: Synthetic oligonucleotide
  Antisense strand to SEQ ID NO: 212898
aaacacaauccuuauuacu

SEQ ID NO: 212900 - RNA, 19 nt, Artificial Sequence
  Description of Artificial Sequence: Synthetic oligonucleotide
  Sense strand starting at position 3950 of SEQ ID NO: 2742
ucuccugaacuuuagguau

SEQ ID NO: 212901 - RNA, 19 nt, Artificial Sequence
  Description of Artificial Sequence: Synthetic oligonucleotide
  Antisense strand to SEQ ID NO: 212900
auaccuaaaguucaggaga

SEQ ID NO: 212902 - RNA, 19 nt, Artificial Sequence
  Description of Artificial Sequence: Synthetic oligonucleotide
  Sense strand starting at position 3953 of SEQ ID NO: 2742
ccugaacuuuagguauuau

SEQ ID NO: 212903 - RNA, 19 nt, Artificial Sequence
  Description of Artificial Sequence: Synthetic oligonucleotide
  Antisense strand to SEQ ID NO: 212902
auaauaccuaaaguucagg

SEQ ID NO: 212904 - RNA, 19 nt, Artificial Sequence
  Description of Artificial Sequence: Synthetic oligonucleotide
  Sense strand starting at position 13 of SEQ ID NO: 2743
gccagaauuuaucagacac

SEQ ID NO: 212905 - RNA, 19 nt, Artificial Sequence
  Description of Artificial Sequence: Synthetic oligonucleotide
  Antisense strand to SEQ ID NO: 212904
gugucugauaaauucuggc

SEQ ID NO: 212906 - RNA, 19 nt, Artificial Sequence
  Description of Artificial Sequence: Synthetic oligonucleotide
  Sense strand starting at position 91 of SEQ ID NO: 2743
accugcuaucccugagucu

SEQ ID NO: 212907 - RNA, 19 nt, Artificial Sequence
  Description of Artificial Sequence: Synthetic oligonucleotide
  Antisense strand to SEQ ID NO: 212906
agacucagggauagcaggu

SEQ ID NO: 212908 - RNA, 19 nt, Artificial Sequence
  Description of Artificial Sequence: Synthetic oligonucleotide
  Sense strand starting at position 311 of SEQ ID NO: 2743
ugcuuugugcaugucaauu

SEQ ID NO: 212909 - RNA, 19 nt, Artificial Sequence
  Description of Artificial Sequence: Synthetic oligonucleotide
  Antisense strand to SEQ ID NO: 212908
aauugacaugcacaaagca

SEQ ID NO: 212910 - RNA, 19 nt, Artificial Sequence
  Description of Artificial Sequence: Synthetic oligonucleotide
  Sense strand starting at position 322 of SEQ ID NO: 2743
ugucaauuucugcaggcga

SEQ ID NO: 212911 - RNA, 19 nt, Artificial Sequence
  Description of Artificial Sequence: Synthetic oligonucleotide
  Antisense strand to SEQ ID NO: 212910
ucgccugcagaaauugaca

SEQ ID NO: 212912 - RNA, 19 nt, Artificial Sequence
  Description of Artificial Sequence: Synthetic oligonucleotide
  Sense strand starting at position 363 of SEQ ID NO: 2743
aacaauacuguccggugaa

SEQ ID NO: 212913 - RNA, 19 nt, Artificial Sequence
  Description of Artificial Sequence: Synthetic oligonucleotide
  Antisense strand to SEQ ID NO: 212912
uucaccggacaguauuguu

SEQ ID NO: 212914 - RNA, 19 nt, Artificial Sequence
  Description of Artificial Sequence: Synthetic oligonucleotide
  Sense strand starting at position 575 of SEQ ID NO: 2743
cggaguggaagcgagaaau

SEQ ID NO: 212915 - RNA, 19 nt, Artificial Sequence
  Description of Artificial Sequence: Synthetic oligonucleotide
  Antisense strand to SEQ ID NO: 212914
auuucucgcuuccacuccg

SEQ ID NO: 212916 - RNA, 19 nt, Artificial Sequence
  Description of Artificial Sequence: Synthetic oligonucleotide
  Sense strand starting at position 605 of SEQ ID NO: 2743
ucuacuuugugaucuaaga

SEQ ID NO: 212917 - RNA, 19 nt, Artificial Sequence
  Description of Artificial Sequence: Synthetic oligonucleotide
  Antisense strand to SEQ ID NO: 212916
ucuuagaucacaaaguaga

SEQ ID NO: 212918 - RNA, 19 nt, Artificial Sequence
  Description of Artificial Sequence: Synthetic oligonucleotide
  Sense strand starting at position 761 of SEQ ID NO: 2743
gcacaaucuaguuucgcga

SEQ ID NO: 212919 - RNA, 19 nt, Artificial Sequence
  Description of Artificial Sequence: Synthetic oligonucleotide
  Antisense strand to SEQ ID NO: 212918
ucgcgaaacuagauugugc

SEQ ID NO: 212920 - RNA, 19 nt, Artificial Sequence
  Description of Artificial Sequence: Synthetic oligonucleotide
  Sense strand starting at position 886 of SEQ ID NO: 2743
agugccuucgaguaccaaa

SEQ ID NO: 212921 - RNA, 19 nt, Artificial Sequence
  Description of Artificial Sequence: Synthetic oligonucleotide
  Antisense strand to SEQ ID NO: 212920
uuugguacucgaaggcacu

SEQ ID NO: 212922 - RNA, 19 nt, Artificial Sequence
  Description of Artificial Sequence: Synthetic oligonucleotide
  Sense strand starting at position 927 of SEQ ID NO: 2743
aggacaggguuaucaguuu

SEQ ID NO: 212923 - RNA, 19 nt, Artificial Sequence
  Description of Artificial Sequence: Synthetic oligonucleotide
  Antisense strand to SEQ ID NO: 212922
aaacugauaacccuguccu

SEQ ID NO: 212924 - RNA, 19 nt, Artificial Sequence
  Description of Artificial Sequence: Synthetic oligonucleotide
  Sense strand starting at position 933 of SEQ ID NO: 2743
ggguuaucaguuuaauauc

SEQ ID NO: 212925 - RNA, 19 nt, Artificial Sequence
  Description of Artificial Sequence: Synthetic oligonucleotide
  Antisense strand to SEQ ID NO: 212924
gauauuaaacugauaaccc

SEQ ID NO: 212926 - RNA, 19 nt, Artificial Sequence
  Description of Artificial Sequence: Synthetic oligonucleotide
  Sense strand starting at position 1042 of SEQ ID NO: 2743
gacugugggccugauaguu

SEQ ID NO: 212927 - RNA, 19 nt, Artificial Sequence
  Description of Artificial Sequence: Synthetic oligonucleotide
  Antisense strand to SEQ ID NO: 212926
aacuaucaggcccacaguc

SEQ ID NO: 212928 - RNA, 19 nt, Artificial Sequence
  Description of Artificial Sequence: Synthetic oligonucleotide
  Sense strand starting at position 1093 of SEQ ID NO: 2743
caggaagucccuggcgaau

SEQ ID NO: 212929 - RNA, 19 nt, Artificial Sequence
  Description of Artificial Sequence: Synthetic oligonucleotide
  Antisense strand to SEQ ID NO: 212928
auucgccagggacuuccug

SEQ ID NO: 212930 - RNA, 19 nt, Artificial Sequence
  Description of Artificial Sequence: Synthetic oligonucleotide
  Sense strand starting at position 1137 of SEQ ID NO: 2743
ccgugugccggagcauaaa

SEQ ID NO: 212931 - RNA, 19 nt, Artificial Sequence
  Description of Artificial Sequence: Synthetic oligonucleotide
  Antisense strand to SEQ ID NO: 212930
uuuaugcuccggcacacgg

SEQ ID NO: 212932 - RNA, 19 nt, Artificial Sequence
  Description of Artificial Sequence: Synthetic oligonucleotide
  Sense strand starting at position 1426 of SEQ ID NO: 2743
ggaggaaauccguggcaag

SEQ ID NO: 212933 - RNA, 19 nt, Artificial Sequence
  Description of Artificial Sequence: Synthetic oligonucleotide
  Antisense strand to SEQ ID NO: 212932
cuugccacggauuuccucc

SEQ ID NO: 212934 - RNA, 19 nt, Artificial Sequence
  Description of Artificial Sequence: Synthetic oligonucleotide
  Sense strand starting at position 1625 of SEQ ID NO: 2743
uucuuaccucucgaagaug

SEQ ID NO: 212935 - RNA, 19 nt, Artificial Sequence
  Description of Artificial Sequence: Synthetic oligonucleotide
  Antisense strand to SEQ ID NO: 212934
caucuucgagagguaagaa

SEQ ID NO: 212936 - RNA, 19 nt, Artificial Sequence
  Description of Artificial Sequence: Synthetic oligonucleotide
  Sense strand starting at position 2061 of SEQ ID NO: 2743
gcucgucuucgcgucaaac

SEQ ID NO: 212937 - RNA, 19 nt, Artificial Sequence
  Description of Artificial Sequence: Synthetic oligonucleotide
  Antisense strand to SEQ ID NO: 212936
guuugacgcgaagacgagc

SEQ ID NO: 212938 - RNA, 19 nt, Artificial Sequence
  Description of Artificial Sequence: Synthetic oligonucleotide
  Sense strand starting at position 2062 of SEQ ID NO: 2743
cucgucuucgcgucaaaca

SEQ ID NO: 212939 - RNA, 19 nt, Artificial Sequence
  Description of Artificial Sequence: Synthetic oligonucleotide
  Antisense strand to SEQ ID NO: 212938
uguuugacgcgaagacgag

SEQ ID NO: 212940 - RNA, 19 nt, Artificial Sequence
  Description of Artificial Sequence: Synthetic oligonucleotide
  Sense strand starting at position 2601 of SEQ ID NO: 2743
gcugcuucucaucaaagua

SEQ ID NO: 212941 - RNA, 19 nt, Artificial Sequence
  Description of Artificial Sequence: Synthetic oligonucleotide
  Antisense strand to SEQ ID NO: 212940
uacuuugaugagaagcagc

SEQ ID NO: 212942 - RNA, 19 nt, Artificial Sequence
  Description of Artificial Sequence: Synthetic oligonucleotide
  Sense strand starting at position 2647 of SEQ ID NO: 2743
auugauuuaugagguggua

SEQ ID NO: 212943 - RNA, 19 nt, Artificial Sequence
  Description of Artificial Sequence: Synthetic oligonucleotide
  Antisense strand to SEQ ID NO: 212942
uaccaccucauaaaucaau

SEQ ID NO: 212944 - RNA, 19 nt, Artificial Sequence
  Description of Artificial Sequence: Synthetic oligonucleotide
  Sense strand starting at position 2698 of SEQ ID NO: 2743
auuaauugcuacuugauga

SEQ ID NO: 212945 - RNA, 19 nt, Artificial Sequence
  Description of Artificial Sequence: Synthetic oligonucleotide
  Antisense strand to SEQ ID NO: 212944
ucaucaaguagcaauuaau

SEQ ID NO: 212946 - RNA, 19 nt, Artificial Sequence
  Description of Artificial Sequence: Synthetic oligonucleotide
  Sense strand starting at position 2708 of SEQ ID NO: 2743
acuugaugacgaugaugau

SEQ ID NO: 212947 - RNA, 19 nt, Artificial Sequence
  Description of Artificial Sequence: Synthetic oligonucleotide
  Antisense strand to SEQ ID NO: 212946
aucaucaucgucaucaagu

SEQ ID NO: 212948 - RNA, 19 nt, Artificial Sequence
  Description of Artificial Sequence: Synthetic oligonucleotide
  Sense strand starting at position 3054 of SEQ ID NO: 2743
gccaguaggcuauacuaaa

SEQ ID NO: 212949 - RNA, 19 nt, Artificial Sequence
  Description of Artificial Sequence: Synthetic oligonucleotide
  Antisense strand to SEQ ID NO: 212948
uuuaguauagccuacuggc

SEQ ID NO: 212950 - RNA, 19 nt, Artificial Sequence
  Description of Artificial Sequence: Synthetic oligonucleotide
  Sense strand starting at position 3070 of SEQ ID NO: 2743
aaaccuuuccagugggcau

SEQ ID NO: 212951 - RNA, 19 nt, Artificial Sequence
  Description of Artificial Sequence: Synthetic oligonucleotide
  Antisense strand to SEQ ID NO: 212950
augcccacuggaaagguuu

SEQ ID NO: 212952 - RNA, 19 nt, Artificial Sequence
  Description of Artificial Sequence: Synthetic oligonucleotide
  Sense strand starting at position 3162 of SEQ ID NO: 2743
acucuaucucuugaaagug

SEQ ID NO: 212953 - RNA, 19 nt, Artificial Sequence
  Description of Artificial Sequence: Synthetic oligonucleotide
  Antisense strand to SEQ ID NO: 212952
cacuuucaagagauagagu

SEQ ID NO: 212954 - RNA, 19 nt, Artificial Sequence
  Description of Artificial Sequence: Synthetic oligonucleotide
  Sense strand starting at position 3196 of SEQ ID NO: 2743
cuauacuggugcuuccaau

SEQ ID NO: 212955 - RNA, 19 nt, Artificial Sequence
  Description of Artificial Sequence: Synthetic oligonucleotide
  Antisense strand to SEQ ID NO: 212954
auuggaagcaccaguauag

SEQ ID NO: 212956 - RNA, 19 nt, Artificial Sequence
  Description of Artificial Sequence: Synthetic oligonucleotide
  Sense strand starting at position 3283 of SEQ ID NO: 2743
caaggucaccugugaucuu

SEQ ID NO: 212957 - RNA, 19 nt, Artificial Sequence
  Description of Artificial Sequence: Synthetic oligonucleotide
  Antisense strand to SEQ ID NO: 212956
aagaucacaggugaccuug

SEQ ID NO: 212958 - RNA, 19 nt, Artificial Sequence
  Description of Artificial Sequence: Synthetic oligonucleotide
  Sense strand starting at position 3313 of SEQ ID NO: 2743
acacaaaggucaguucuua

SEQ ID NO: 212959 - RNA, 19 nt, Artificial Sequence
  Description of Artificial Sequence: Synthetic oligonucleotide
  Antisense strand to SEQ ID NO: 212958
uaagaacugaccuuugugu

SEQ ID NO: 212960 - RNA, 19 nt, Artificial Sequence
  Description of Artificial Sequence: Synthetic oligonucleotide
  Sense strand starting at position 3445 of SEQ ID NO: 2743
gauccucuuccugguuuga

SEQ ID NO: 212961 - RNA, 19 nt, Artificial Sequence
  Description of Artificial Sequence: Synthetic oligonucleotide
  Antisense strand to SEQ ID NO: 212960
ucaaaccaggaagaggauc

SEQ ID NO: 212962 - RNA, 19 nt, Artificial Sequence
  Description of Artificial Sequence: Synthetic oligonucleotide
  Sense strand starting at position 3447 of SEQ ID NO: 2743
uccucuuccugguuugaaa

SEQ ID NO: 212963 - RNA, 19 nt, Artificial Sequence
  Description of Artificial Sequence: Synthetic oligonucleotide
  Antisense strand to SEQ ID NO: 212962
uuucaaaccaggaagagga

SEQ ID NO: 212964 - RNA, 19 nt, Artificial Sequence
  Description of Artificial Sequence: Synthetic oligonucleotide
  Sense strand starting at position 3476 of SEQ ID NO: 2743
ucuuguguauccucacaug

SEQ ID NO: 212965 - RNA, 19 nt, Artificial Sequence
  Description of Artificial Sequence: Synthetic oligonucleotide
  Antisense strand to SEQ ID NO: 212964
caugugaggauacacaaga

SEQ ID NO: 212966 - RNA, 19 nt, Artificial Sequence
  Description of Artificial Sequence: Synthetic oligonucleotide
  Sense strand starting at position 3519 of SEQ ID NO: 2743
acagauuagugcccuaucu

SEQ ID NO: 212967 - RNA, 19 nt, Artificial Sequence
  Description of Artificial Sequence: Synthetic oligonucleotide
  Antisense strand to SEQ ID NO: 212966
agauagggcacuaaucugu

SEQ ID NO: 212968 - RNA, 19 nt, Artificial Sequence
  Description of Artificial Sequence: Synthetic oligonucleotide
  Sense strand starting at position 3521 of SEQ ID NO: 2743
agauuagugcccuaucuuc

SEQ ID NO: 212969 - RNA, 19 nt, Artificial Sequence
  Description of Artificial Sequence: Synthetic oligonucleotide
  Antisense strand to SEQ ID NO: 212968
gaagauagggcacuaaucu

SEQ ID NO: 212970 - RNA, 19 nt, Artificial Sequence
  Description of Artificial Sequence: Synthetic oligonucleotide
  Sense strand starting at position 3526 of SEQ ID NO: 2743
agugcccuaucuucuuaua

SEQ ID NO: 212971 - RNA, 19 nt, Artificial Sequence
  Description of Artificial Sequence: Synthetic oligonucleotide
  Antisense strand to SEQ ID NO: 212970
uauaagaagauagggcacu

SEQ ID NO: 212972 - RNA, 19 nt, Artificial Sequence
  Description of Artificial Sequence: Synthetic oligonucleotide
  Sense strand starting at position 3569 of SEQ ID NO: 2743
guucuacccucauuagcua

SEQ ID NO: 212973 - RNA, 19 nt, Artificial Sequence
  Description of Artificial Sequence: Synthetic oligonucleotide
  Antisense strand to SEQ ID NO: 212972
uagcuaaugaggguagaac

SEQ ID NO: 212974 - RNA, 19 nt, Artificial Sequence
  Description of Artificial Sequence: Synthetic oligonucleotide
  Sense strand starting at position 3600 of SEQ ID NO: 2743
agacucugucucugaauac

SEQ ID NO: 212975 - RNA, 19 nt, Artificial Sequence
  Description of Artificial Sequence: Synthetic oligonucleotide
  Antisense strand to SEQ ID NO: 212974
guauucagagacagagucu

SEQ ID NO: 212976 - RNA, 19 nt, Artificial Sequence
  Description of Artificial Sequence: Synthetic oligonucleotide
  Sense strand starting at position 3798 of SEQ ID NO: 2743
ggccauuucuucucagucu

SEQ ID NO: 212977 - RNA, 19 nt, Artificial Sequence
  Description of Artificial Sequence: Synthetic oligonucleotide
  Antisense strand to SEQ ID NO: 212976
agacugagaagaaauggcc

SEQ ID NO: 212978 - RNA, 19 nt, Artificial Sequence
  Description of Artificial Sequence: Synthetic oligonucleotide
  Sense strand starting at position 3821 of SEQ ID NO: 2743
ccugguuacuccucacuuu

SEQ ID NO: 212979 - RNA, 19 nt, Artificial Sequence
  Description of Artificial Sequence: Synthetic oligonucleotide
  Antisense strand to SEQ ID NO: 212978
aaagugaggaguaaccagg

SEQ ID NO: 212980 - RNA, 19 nt, Artificial Sequence
  Description of Artificial Sequence: Synthetic oligonucleotide
  Sense strand starting at position 3852 of SEQ ID NO: 2743
aaguuauaguggccuagga

SEQ ID NO: 212981 - RNA, 19 nt, Artificial Sequence
  Description of Artificial Sequence: Synthetic oligonucleotide
  Antisense strand to SEQ ID NO: 212980
uccuaggccacuauaacuu

SEQ ID NO: 212982 - RNA, 19 nt, Artificial Sequence
  Description of Artificial Sequence: Synthetic oligonucleotide
  Sense strand starting at position 3854 of SEQ ID NO: 2743
guuauaguggccuaggagu

SEQ ID NO: 212983 - RNA, 19 nt, Artificial Sequence
  Description of Artificial Sequence: Synthetic oligonucleotide
  Antisense strand to SEQ ID NO: 212982
acuccuaggccacuauaac

SEQ ID NO: 212984 - RNA, 19 nt, Artificial Sequence
  Description of Artificial Sequence: Synthetic oligonucleotide
  Sense strand starting at position 88 of SEQ ID NO: 2744
ccauuaugcucucuggacu

SEQ ID NO: 212985 - RNA, 19 nt, Artificial Sequence
  Description of Artificial Sequence: Synthetic oligonucleotide
  Antisense strand to SEQ ID NO: 212984
aguccagagagcauaaugg

SEQ ID NO: 212986 - RNA, 19 nt, Artificial Sequence
  Description of Artificial Sequence: Synthetic oligonucleotide
  Sense strand starting at position 120 of SEQ ID NO: 2744
gaagaugugagcuguaaag

SEQ ID NO: 212987 - RNA, 19 nt, Artificial Sequence
  Description of Artificial Sequence: Synthetic oligonucleotide
  Antisense strand to SEQ ID NO: 212986
cuuuacagcucacaucuuc

SEQ ID NO: 212988 - RNA, 19 nt, Artificial Sequence
  Description of Artificial Sequence: Synthetic oligonucleotide
  Sense strand starting at position 122 of SEQ ID NO: 2744
agaugugagcuguaaagca

SEQ ID NO: 212989 - RNA, 19 nt, Artificial Sequence
  Description of Artificial Sequence: Synthetic oligonucleotide
  Antisense strand to SEQ ID NO: 212988
ugcuuuacagcucacaucu

SEQ ID NO: 212990 - RNA, 19 nt, Artificial Sequence
  Description of Artificial Sequence: Synthetic oligonucleotide
  Sense strand starting at position 366 of SEQ ID NO: 2744
gcaguauaaucauccauga

SEQ ID NO: 212991 - RNA, 19 nt, Artificial Sequence
  Description of Artificial Sequence: Synthetic oligonucleotide
  Antisense strand to SEQ ID NO: 212990
ucauggaugauuauacugc

SEQ ID NO: 212992 - RNA, 19 nt, Artificial Sequence
  Description of Artificial Sequence: Synthetic oligonucleotide
  Sense strand starting at position 495 of SEQ ID NO: 2744
acacauggcugucccauua

SEQ ID NO: 212993 - RNA, 19 nt, Artificial Sequence
  Description of Artificial Sequence: Synthetic oligonucleotide
  Antisense strand to SEQ ID NO: 212992
uaaugggacagccaugugu

SEQ ID NO: 212994 - RNA, 19 nt, Artificial Sequence
  Description of Artificial Sequence: Synthetic oligonucleotide
  Sense strand starting at position 599 of SEQ ID NO: 2744
ccugaaauguacuucugag

SEQ ID NO: 212995 - RNA, 19 nt, Artificial Sequence
  Description of Artificial Sequence: Synthetic oligonucleotide
  Antisense strand to SEQ ID NO: 212994
cucagaaguacauuucagg

SEQ ID NO: 212996 - RNA, 19 nt, Artificial Sequence
  Description of Artificial Sequence: Synthetic oligonucleotide
  Sense strand starting at position 748 of SEQ ID NO: 2744
ccaaaugaguuucuuagaa

SEQ ID NO: 212997 - RNA, 19 nt, Artificial Sequence
  Description of Artificial Sequence: Synthetic oligonucleotide
  Antisense strand to SEQ ID NO: 212996
uucuaagaaacucauuugg

SEQ ID NO: 212998 - RNA, 19 nt, Artificial Sequence
  Description of Artificial Sequence: Synthetic oligonucleotide
  Sense strand starting at position 760 of SEQ ID NO: 2744
cuuagaauauuugacuaug

SEQ ID NO: 212999 - RNA, 19 nt, Artificial Sequence
  Description of Artificial Sequence: Synthetic oligonucleotide
  Antisense strand to SEQ ID NO: 212998
cauagucaaauauucuaag

SEQ ID NO: 213000 - RNA, 19 nt, Artificial Sequence
  Description of Artificial Sequence: Synthetic oligonucleotide
  Sense strand starting at position 1199 of SEQ ID NO: 2744
gccucugaaauggaauguu

SEQ ID NO: 213001 - RNA, 19 nt, Artificial Sequence
  Description of Artificial Sequence: Synthetic oligonucleotide
  Antisense strand to SEQ ID NO: 213000
aacauuccauuucagaggc

SEQ ID NO: 213002 - RNA, 19 nt, Artificial Sequence
  Description of Artificial Sequence: Synthetic oligonucleotide
  Sense strand starting at position 1202 of SEQ ID NO: 2744
ucugaaauggaauguuaau

SEQ ID NO: 213003 - RNA, 19 nt, Artificial Sequence
  Description of Artificial Sequence: Synthetic oligonucleotide
  Antisense strand to SEQ ID NO: 213002
auuaacauuccauuucaga

SEQ ID NO: 213004 - RNA, 19 nt, Artificial Sequence
  Description of Artificial Sequence: Synthetic oligonucleotide
  Sense strand starting at position 1211 of SEQ ID NO: 2744
gaauguuaauuagugugga

SEQ ID NO: 213005 - RNA, 19 nt, Artificial Sequence
  Description of Artificial Sequence: Synthetic oligonucleotide
  Antisense strand to SEQ ID NO: 213004
uccacacuaauuaacauuc

SEQ ID NO: 213006 - RNA, 19 nt, Artificial Sequence
  Description of Artificial Sequence: Synthetic oligonucleotide
  Sense strand starting at position 1216 of SEQ ID NO: 2744
uuaauuaguguggaucuuu

SEQ ID NO: 213007 - RNA, 19 nt, Artificial Sequence
  Description of Artificial Sequence: Synthetic oligonucleotide
  Antisense strand to SEQ ID NO: 213006
aaagauccacacuaauuaa

SEQ ID NO: 213008 - RNA, 19 nt, Artificial Sequence
  Description of Artificial Sequence: Synthetic oligonucleotide
  Sense strand starting at position 1327 of SEQ ID NO: 2744
aaggaaggcgcuuaacaau

SEQ ID NO: 213009 - RNA, 19 nt, Artificial Sequence
  Description of Artificial Sequence: Synthetic oligonucleotide
  Antisense strand to SEQ ID NO: 213008
auuguuaagcgccuuccuu

SEQ ID NO: 213010 - RNA, 19 nt, Artificial Sequence
  Description of Artificial Sequence: Synthetic oligonucleotide
  Sense strand starting at position 1333 of SEQ ID NO: 2744
ggcgcuuaacaauaacuuu

SEQ ID NO: 213011 - RNA, 19 nt, Artificial Sequence
  Description of Artificial Sequence: Synthetic oligonucleotide
  Antisense strand to SEQ ID NO: 213010
aaaguuauuguuaagcgcc

SEQ ID NO: 213012 - RNA, 19 nt, Artificial Sequence
  Description of Artificial Sequence: Synthetic oligonucleotide
  Sense strand starting at position 2086 of SEQ ID NO: 2744
gggugauuccugggagcuc

SEQ ID NO: 213013 - RNA, 19 nt, Artificial Sequence
  Description of Artificial Sequence: Synthetic oligonucleotide
  Antisense strand to SEQ ID NO: 213012
gagcucccaggaaucaccc

SEQ ID NO: 213014 - RNA, 19 nt, Artificial Sequence
  Description of Artificial Sequence: Synthetic oligonucleotide
  Sense strand starting at position 2131 of SEQ ID NO: 2744
aauagacagcgcgacuuau

SEQ ID NO: 213015 - RNA, 19 nt, Artificial Sequence
  Description of Artificial Sequence: Synthetic oligonucleotide
  Antisense strand to SEQ ID NO: 213014
auaagucgcgcugucuauu

SEQ ID NO: 213016 - RNA, 19 nt, Artificial Sequence
  Description of Artificial Sequence: Synthetic oligonucleotide
  Sense strand starting at position 2142 of SEQ ID NO: 2744
cgacuuauggcaugggaua

SEQ ID NO: 213017 - RNA, 19 nt, Artificial Sequence
  Description of Artificial Sequence: Synthetic oligonucleotide
  Antisense strand to SEQ ID NO: 213016
uaucccaugccauaagucg

SEQ ID NO: 213018 - RNA, 19 nt, Artificial Sequence
  Description of Artificial Sequence: Synthetic oligonucleotide
  Sense strand starting at position 2143 of SEQ ID NO: 2744
gacuuauggcaugggauac

SEQ ID NO: 213019 - RNA, 19 nt, Artificial Sequence
  Description of Artificial Sequence: Synthetic oligonucleotide
  Antisense strand to SEQ ID NO: 213018
guaucccaugccauaaguc

SEQ ID NO: 213020 - RNA, 19 nt, Artificial Sequence
  Description of Artificial Sequence: Synthetic oligonucleotide
  Sense strand starting at position 2444 of SEQ ID NO: 2744
guaucuuucccugacuccu

SEQ ID NO: 213021 - RNA, 19 nt, Artificial Sequence
  Description of Artificial Sequence: Synthetic oligonucleotide
  Antisense strand to SEQ ID NO: 213020
aggagucagggaaagauac

SEQ ID NO: 213022 - RNA, 19 nt, Artificial Sequence
  Description of Artificial Sequence: Synthetic oligonucleotide
  Sense strand starting at position 2642 of SEQ ID NO: 2744
uuggaauagauugaugugu

SEQ ID NO: 213023 - RNA, 19 nt, Artificial Sequence
  Description of Artificial Sequence: Synthetic oligonucleotide
  Antisense strand to SEQ ID NO: 213022
acacaucaaucuauuccaa

SEQ ID NO: 213024 - RNA, 19 nt, Artificial Sequence
  Description of Artificial Sequence: Synthetic oligonucleotide
  Sense strand starting at position 2728 of SEQ ID NO: 2744
ugaagaaacuguuuauguc

SEQ ID NO: 213025 - RNA, 19 nt, Artificial Sequence
  Description of Artificial Sequence: Synthetic oligonucleotide
  Antisense strand to SEQ ID NO: 213024
gacauaaacaguuucuuca

SEQ ID NO: 213026 - RNA, 19 nt, Artificial Sequence
  Description of Artificial Sequence: Synthetic oligonucleotide
  Sense strand starting at position 2738 of SEQ ID NO: 2744
guuuauguccuugauacug

SEQ ID NO: 213027 - RNA, 19 nt, Artificial Sequence
  Description of Artificial Sequence: Synthetic oligonucleotide
  Antisense strand to SEQ ID NO: 213026
caguaucaaggacauaaac

SEQ ID NO: 213028 - RNA, 19 nt, Artificial Sequence
  Description of Artificial Sequence: Synthetic oligonucleotide
  Sense strand starting at position 2746 of SEQ ID NO: 2744
ccuugauacugauauuuag

SEQ ID NO: 213029 - RNA, 19 nt, Artificial Sequence
  Description of Artificial Sequence: Synthetic oligonucleotide
  Antisense strand to SEQ ID NO: 213028
cuaaauaucaguaucaagg

SEQ ID NO: 213030 - RNA, 19 nt, Artificial Sequence
  Description of Artificial Sequence: Synthetic oligonucleotide
  Sense strand starting at position 2880 of SEQ ID NO: 2744
aggaacuguccuugucuca

SEQ ID NO: 213031 - RNA, 19 nt, Artificial Sequence
  Description of Artificial Sequence: Synthetic oligonucleotide
  Antisense strand to SEQ ID NO: 213030
ugagacaaggacaguuccu

SEQ ID NO: 213032 - RNA, 19 nt, Artificial Sequence
  Description of Artificial Sequence: Synthetic oligonucleotide
  Sense strand starting at position 2918 of SEQ ID NO: 2744
ugauacuugcuugauguua

SEQ ID NO: 213033 - RNA, 19 nt, Artificial Sequence
  Description of Artificial Sequence: Synthetic oligonucleotide
  Antisense strand to SEQ ID NO: 213032
uaacaucaagcaaguauca

SEQ ID NO: 213034 - RNA, 19 nt, Artificial Sequence
  Description of Artificial Sequence: Synthetic oligonucleotide
  Sense strand starting at position 2941 of SEQ ID NO: 2744
uggcuucauguugacgaga

SEQ ID NO: 213035 - RNA, 19 nt, Artificial Sequence
  Description of Artificial Sequence: Synthetic oligonucleotide
  Antisense strand to SEQ ID NO: 213034
ucucgucaacaugaagcca

SEQ ID NO: 213036 - RNA, 19 nt, Artificial Sequence
  Description of Artificial Sequence: Synthetic oligonucleotide
  Sense strand starting at position 2946 of SEQ ID NO: 2744
ucauguugacgagaggcua

SEQ ID NO: 213037 - RNA, 19 nt, Artificial Sequence
  Description of Artificial Sequence: Synthetic oligonucleotide
  Antisense strand to SEQ ID NO: 213036
uagccucucgucaacauga

SEQ ID NO: 213038 - RNA, 19 nt, Artificial Sequence
  Description of Artificial Sequence: Synthetic oligonucleotide
  Sense strand starting at position 2967 of SEQ ID NO: 2744
guaagaguccagugagggu

SEQ ID NO: 213039 - RNA, 19 nt, Artificial Sequence
  Description of Artificial Sequence: Synthetic oligonucleotide
  Antisense strand to SEQ ID NO: 213038
acccucacuggacucuuac

SEQ ID NO: 213040 - RNA, 19 nt, Artificial Sequence
  Description of Artificial Sequence: Synthetic oligonucleotide
  Sense strand starting at position 3037 of SEQ ID NO: 2744
gcucuuucccaaugggaaa

SEQ ID NO: 213041 - RNA, 19 nt, Artificial Sequence
  Description of Artificial Sequence: Synthetic oligonucleotide
  Antisense strand to SEQ ID NO: 213040
uuucccauugggaaagagc

SEQ ID NO: 213042 - RNA, 19 nt, Artificial Sequence
  Description of Artificial Sequence: Synthetic oligonucleotide
  Sense strand starting at position 3270 of SEQ ID NO: 2744
ucaugucugugacuuaaac

SEQ ID NO: 213043 - RNA, 19 nt, Artificial Sequence
  Description of Artificial Sequence: Synthetic oligonucleotide
  Antisense strand to SEQ ID NO: 213042
guuuaagucacagacauga

SEQ ID NO: 213044 - RNA, 19 nt, Artificial Sequence
  Description of Artificial Sequence: Synthetic oligonucleotide
  Sense strand starting at position 3308 of SEQ ID NO: 2744
ggaacuguaccuugucuua

SEQ ID NO: 213045 - RNA, 19 nt, Artificial Sequence
  Description of Artificial Sequence: Synthetic oligonucleotide
  Antisense strand to SEQ ID NO: 213044
uaagacaagguacaguucc

SEQ ID NO: 213046 - RNA, 19 nt, Artificial Sequence
  Description of Artificial Sequence: Synthetic oligonucleotide
  Sense strand starting at position 3662 of SEQ ID NO: 2744
guucuuuguccauauugau

SEQ ID NO: 213047 - RNA, 19 nt, Artificial Sequence
  Description of Artificial Sequence: Synthetic oligonucleotide
  Antisense strand to SEQ ID NO: 213046
aucaauauggacaaagaac

SEQ ID NO: 213048 - RNA, 19 nt, Artificial Sequence
  Description of Artificial Sequence: Synthetic oligonucleotide
  Sense strand starting at position 3668 of SEQ ID NO: 2744
uguccauauugauuacuca

SEQ ID NO: 213049 - RNA, 19 nt, Artificial Sequence
  Description of Artificial Sequence: Synthetic oligonucleotide
  Antisense strand to SEQ ID NO: 213048
ugaguaaucaauauggaca

SEQ ID NO: 213050 - RNA, 19 nt, Artificial Sequence
  Description of Artificial Sequence: Synthetic oligonucleotide
  Sense strand starting at position 3671 of SEQ ID NO: 2744
ccauauugauuacucagua

SEQ ID NO: 213051 - RNA, 19 nt, Artificial Sequence
  Description of Artificial Sequence: Synthetic oligonucleotide
  Antisense strand to SEQ ID NO: 213050
uacugaguaaucaauaugg

SEQ ID NO: 213052 - RNA, 19 nt, Artificial Sequence
  Description of Artificial Sequence: Synthetic oligonucleotide
  Sense strand starting at position 3675 of SEQ ID NO: 2744
auugauuacucaguaacug

SEQ ID NO: 213053 - RNA, 19 nt, Artificial Sequence
  Description of Artificial Sequence: Synthetic oligonucleotide
  Antisense strand to SEQ ID NO: 213052
caguuacugaguaaucaau

SEQ ID NO: 213054 - RNA, 19 nt, Artificial Sequence
  Description of Artificial Sequence: Synthetic oligonucleotide
  Sense strand starting at position 3676 of SEQ ID NO: 2744
uugauuacucaguaacugu

SEQ ID NO: 213055 - RNA, 19 nt, Artificial Sequence
  Description of Artificial Sequence: Synthetic oligonucleotide
  Antisense strand to SEQ ID NO: 213054
acaguuacugaguaaucaa

SEQ ID NO: 213056 - RNA, 19 nt, Artificial Sequence
  Description of Artificial Sequence: Synthetic oligonucleotide
  Sense strand starting at position 3738 of SEQ ID NO: 2744
gcuuuaguuccuucuguuu

SEQ ID NO: 213057 - RNA, 19 nt, Artificial Sequence
  Description of Artificial Sequence: Synthetic oligonucleotide
  Antisense strand to SEQ ID NO: 213056
aaacagaaggaacuaaagc

SEQ ID NO: 213058 - RNA, 19 nt, Artificial Sequence
  Description of Artificial Sequence: Synthetic oligonucleotide
  Sense strand starting at position 3759 of SEQ ID NO: 2744
uugguacaaagcuguagau

SEQ ID NO: 213059 - RNA, 19 nt, Artificial Sequence
  Description of Artificial Sequence: Synthetic oligonucleotide
  Antisense strand to SEQ ID NO: 213058
aucuacagcuuuguaccaa

SEQ ID NO: 213060 - RNA, 19 nt, Artificial Sequence
  Description of Artificial Sequence: Synthetic oligonucleotide
  Sense strand starting at position 3901 of SEQ ID NO: 2744
uaccaaggcuugguuugaa

SEQ ID NO: 213061 - RNA, 19 nt, Artificial Sequence
  Description of Artificial Sequence: Synthetic oligonucleotide
  Antisense strand to SEQ ID NO: 213060
uucaaaccaagccuuggua

SEQ ID NO: 213062 - RNA, 19 nt, Artificial Sequence
  Description of Artificial Sequence: Synthetic oligonucleotide
  Sense strand starting at position 3904 of SEQ ID NO: 2744
caaggcuugguuugaaauc

SEQ ID NO: 213063 - RNA, 19 nt, Artificial Sequence
  Description of Artificial Sequence: Synthetic oligonucleotide
  Antisense strand to SEQ ID NO: 213062
gauuucaaaccaagccuug

SEQ ID NO: 213064 - RNA, 19 nt, Artificial Sequence
  Description of Artificial Sequence: Synthetic oligonucleotide
  Sense strand starting at position 204 of SEQ ID NO: 2745
auguaaauguuacugaaag

SEQ ID NO: 213065 - RNA, 19 nt, Artificial Sequence
  Description of Artificial Sequence: Synthetic oligonucleotide
  Antisense strand to SEQ ID NO: 213064
cuuucaguaacauuuacau

SEQ ID NO: 213066 - RNA, 19 nt, Artificial Sequence
  Description of Artificial Sequence: Synthetic oligonucleotide
  Sense strand starting at position 206 of SEQ ID NO: 2745
guaaauguuacugaaagug

SEQ ID NO: 213067 - RNA, 19 nt, Artificial Sequence
  Description of Artificial Sequence: Synthetic oligonucleotide
  Antisense strand to SEQ ID NO: 213066
cacuuucaguaacauuuac

SEQ ID NO: 213068 - RNA, 19 nt, Artificial Sequence
  Description of Artificial Sequence: Synthetic oligonucleotide
  Sense strand starting at position 281 of SEQ ID NO: 2745
guguuuacugaaugaucau

SEQ ID NO: 213069 - RNA, 19 nt, Artificial Sequence
  Description of Artificial Sequence: Synthetic oligonucleotide
  Antisense strand to SEQ ID NO: 213068
augaucauucaguaaacac

SEQ ID NO: 213070 - RNA, 19 nt, Artificial Sequence
  Description of Artificial Sequence: Synthetic oligonucleotide
  Sense strand starting at position 636 of SEQ ID NO: 2745
cuauuaagucgcuaucaga

SEQ ID NO: 213071 - RNA, 19 nt, Artificial Sequence
  Description of Artificial Sequence: Synthetic oligonucleotide
  Antisense strand to SEQ ID NO: 213070
ucugauagcgacuuaauag

SEQ ID NO: 213072 - RNA, 19 nt, Artificial Sequence
  Description of Artificial Sequence: Synthetic oligonucleotide
  Sense strand starting at position 676 of SEQ ID NO: 2745
ccgggaagcucauuaccuu

SEQ ID NO: 213073 - RNA, 19 nt, Artificial Sequence
  Description of Artificial Sequence: Synthetic oligonucleotide
  Antisense strand to SEQ ID NO: 213072
aagguaaugagcuucccgg

SEQ ID NO: 213074 - RNA, 19 nt, Artificial Sequence
  Description of Artificial Sequence: Synthetic oligonucleotide
  Sense strand starting at position 701 of SEQ ID NO: 2745
cuggcuaacucaucuugga

SEQ ID NO: 213075 - RNA, 19 nt, Artificial Sequence
  Description of Artificial Sequence: Synthetic oligonucleotide
  Antisense strand to SEQ ID NO: 213074
uccaagaugaguuagccag

SEQ ID NO: 213076 - RNA, 19 nt, Artificial Sequence
  Description of Artificial Sequence: Synthetic oligonucleotide
  Sense strand starting at position 855 of SEQ ID NO: 2745
aaagucuugcccgauuaaa

SEQ ID NO: 213077 - RNA, 19 nt, Artificial Sequence
  Description of Artificial Sequence: Synthetic oligonucleotide
  Antisense strand to SEQ ID NO: 213076
uuuaaucgggcaagacuuu

SEQ ID NO: 213078 - RNA, 19 nt, Artificial Sequence
  Description of Artificial Sequence: Synthetic oligonucleotide
  Sense strand starting at position 941 of SEQ ID NO: 2745
ugcaaauagucuccacgaa

SEQ ID NO: 213079 - RNA, 19 nt, Artificial Sequence
  Description of Artificial Sequence: Synthetic oligonucleotide
  Antisense strand to SEQ ID NO: 213078
uucguggagacuauuugca

SEQ ID NO: 213080 - RNA, 19 nt, Artificial Sequence
  Description of Artificial Sequence: Synthetic oligonucleotide
  Sense strand starting at position 942 of SEQ ID NO: 2745
gcaaauagucuccacgaac

SEQ ID NO: 213081 - RNA, 19 nt, Artificial Sequence
  Description of Artificial Sequence: Synthetic oligonucleotide
  Antisense strand to SEQ ID NO: 213080
guucguggagacuauuugc

SEQ ID NO: 213082 - RNA, 19 nt, Artificial Sequence
  Description of Artificial Sequence: Synthetic oligonucleotide
  Sense strand starting at position 945 of SEQ ID NO: 2745
aauagucuccacgaacuga

SEQ ID NO: 213083 - RNA, 19 nt, Artificial Sequence
  Description of Artificial Sequence: Synthetic oligonucleotide
  Antisense strand to SEQ ID NO: 213082
ucaguucguggagacuauu

SEQ ID NO: 213084 - RNA, 19 nt, Artificial Sequence
  Description of Artificial Sequence: Synthetic oligonucleotide
  Sense strand starting at position 1044 of SEQ ID NO: 2745
cgccucauuuguuccaaga

SEQ ID NO: 213085 - RNA, 19 nt, Artificial Sequence
  Description of Artificial Sequence: Synthetic oligonucleotide
  Antisense strand to SEQ ID NO: 213084
ucuuggaacaaaugaggcg

SEQ ID NO: 213086 - RNA, 19 nt, Artificial Sequence
  Description of Artificial Sequence: Synthetic oligonucleotide
  Sense strand starting at position 1090 of SEQ ID NO: 2745
ugguauagcgaagaguaga

SEQ ID NO: 213087 - RNA, 19 nt, Artificial Sequence
  Description of Artificial Sequence: Synthetic oligonucleotide
  Antisense strand to SEQ ID NO: 213086
ucuacucuucgcuauacca

SEQ ID NO: 213088 - RNA, 19 nt, Artificial Sequence
  Description of Artificial Sequence: Synthetic oligonucleotide
  Sense strand starting at position 1194 of SEQ ID NO: 2745
guugguuuggagugaaauc

SEQ ID NO: 213089 - RNA, 19 nt, Artificial Sequence
  Description of Artificial Sequence: Synthetic oligonucleotide
  Antisense strand to SEQ ID NO: 213088
gauuucacuccaaaccaac

SEQ ID NO: 213090 - RNA, 19 nt, Artificial Sequence
  Description of Artificial Sequence: Synthetic oligonucleotide
  Sense strand starting at position 1195 of SEQ ID NO: 2745
uugguuuggagugaaauca

SEQ ID NO: 213091 - RNA, 19 nt, Artificial Sequence
  Description of Artificial Sequence: Synthetic oligonucleotide
  Antisense strand to SEQ ID NO: 213090
ugauuucacuccaaaccaa

SEQ ID NO: 213092 - RNA, 19 nt, Artificial Sequence
  Description of Artificial Sequence: Synthetic oligonucleotide
  Sense strand starting at position 1242 of SEQ ID NO: 2745
ggcgaaaugcuagggauca

SEQ ID NO: 213093 - RNA, 19 nt, Artificial Sequence
  Description of Artificial Sequence: Synthetic oligonucleotide
  Antisense strand to SEQ ID NO: 213092
ugaucccuagcauuucgcc

SEQ ID NO: 213094 - RNA, 19 nt, Artificial Sequence
  Description of Artificial Sequence: Synthetic oligonucleotide
  Sense strand starting at position 1346 of SEQ ID NO: 2745
ggcagaaacguucgggaca

SEQ ID NO: 213095 - RNA, 19 nt, Artificial Sequence
  Description of Artificial Sequence: Synthetic oligonucleotide
  Antisense strand to SEQ ID NO: 213094
ugucccgaacguuucugcc

SEQ ID NO: 213096 - RNA, 19 nt, Artificial Sequence
  Description of Artificial Sequence: Synthetic oligonucleotide
  Sense strand starting at position 1468 of SEQ ID NO: 2745
acacauuggcagggugaaa

SEQ ID NO: 213097 - RNA, 19 nt, Artificial Sequence
  Description of Artificial Sequence: Synthetic oligonucleotide
  Antisense strand to SEQ ID NO: 213096
uuucacccugccaaugugu

SEQ ID NO: 213098 - RNA, 19 nt, Artificial Sequence
  Description of Artificial Sequence: Synthetic oligonucleotide
  Sense strand starting at position 2052 of SEQ ID NO: 2745
aaacguuucugauugguua

SEQ ID NO: 213099 - RNA, 19 nt, Artificial Sequence
  Description of Artificial Sequence: Synthetic oligonucleotide
  Antisense strand to SEQ ID NO: 213098
uaaccaaucagaaacguuu

SEQ ID NO: 213100 - RNA, 19 nt, Artificial Sequence
  Description of Artificial Sequence: Synthetic oligonucleotide
  Sense strand starting at position 2053 of SEQ ID NO: 2745
aacguuucugauugguuaa

SEQ ID NO: 213101 - RNA, 19 nt, Artificial Sequence
  Description of Artificial Sequence: Synthetic oligonucleotide
  Antisense strand to SEQ ID NO: 213100
uuaaccaaucagaaacguu

SEQ ID NO: 213102 - RNA, 19 nt, Artificial Sequence
  Description of Artificial Sequence: Synthetic oligonucleotide
  Sense strand starting at position 2054 of SEQ ID NO: 2745
acguuucugauugguuaaa

SEQ ID NO: 213103 - RNA, 19 nt, Artificial Sequence
  Description of Artificial Sequence: Synthetic oligonucleotide
  Antisense strand to SEQ ID NO: 213102
uuuaaccaaucagaaacgu

SEQ ID NO: 213104 - RNA, 19 nt, Artificial Sequence
  Description of Artificial Sequence: Synthetic oligonucleotide
  Sense strand starting at position 2108 of SEQ ID NO: 2745
agcuauuggcuggaaguca

SEQ ID NO: 213105 - RNA, 19 nt, Artificial Sequence
  Description of Artificial Sequence: Synthetic oligonucleotide
  Antisense strand to SEQ ID NO: 213104
ugacuuccagccaauagcu

SEQ ID NO: 213106 - RNA, 19 nt, Artificial Sequence
  Description of Artificial Sequence: Synthetic oligonucleotide
  Sense strand starting at position 2147 of SEQ ID NO: 2745
uucugauaaaugcguagga

SEQ ID NO: 213107 - RNA, 19 nt, Artificial Sequence
  Description of Artificial Sequence: Synthetic oligonucleotide
  Antisense strand to SEQ ID NO: 213106
uccuacgcauuuaucagaa

SEQ ID NO: 213108 - RNA, 19 nt, Artificial Sequence
  Description of Artificial Sequence: Synthetic oligonucleotide
  Sense strand starting at position 2611 of SEQ ID NO: 2745
uaauuaaaggguugucuga

SEQ ID NO: 213109 - RNA, 19 nt, Artificial Sequence
  Description of Artificial Sequence: Synthetic oligonucleotide
  Antisense strand to SEQ ID NO: 213108
ucagacaacccuuuaauua

SEQ ID NO: 213110 - RNA, 19 nt, Artificial Sequence
  Description of Artificial Sequence: Synthetic oligonucleotide
  Sense strand starting at position 2613 of SEQ ID NO: 2745
auuaaaggguugucugaaa

SEQ ID NO: 213111 - RNA, 19 nt, Artificial Sequence
  Description of Artificial Sequence: Synthetic oligonucleotide
  Antisense strand to SEQ ID NO: 213110
uuucagacaacccuuuaau

SEQ ID NO: 213112 - RNA, 19 nt, Artificial Sequence
  Description of Artificial Sequence: Synthetic oligonucleotide
  Sense strand starting at position 2708 of SEQ ID NO: 2745
aucucuuacgcuuggauaa

SEQ ID NO: 213113 - RNA, 19 nt, Artificial Sequence
  Description of Artificial Sequence: Synthetic oligonucleotide
  Antisense strand to SEQ ID NO: 213112
uuauccaagcguaagagau

SEQ ID NO: 213114 - RNA, 19 nt, Artificial Sequence
  Description of Artificial Sequence: Synthetic oligonucleotide
  Sense strand starting at position 2709 of SEQ ID NO: 2745
ucucuuacgcuuggauaaa

SEQ ID NO: 213115 - RNA, 19 nt, Artificial Sequence
  Description of Artificial Sequence: Synthetic oligonucleotide
  Antisense strand to SEQ ID NO: 213114
uuuauccaagcguaagaga

SEQ ID NO: 213116 - RNA, 19 nt, Artificial Sequence
  Description of Artificial Sequence: Synthetic oligonucleotide
  Sense strand starting at position 2779 of SEQ ID NO: 2745
uuaaauaaaugccuuggua

SEQ ID NO: 213117 - RNA, 19 nt, Artificial Sequence
  Description of Artificial Sequence: Synthetic oligonucleotide
  Antisense strand to SEQ ID NO: 213116
uaccaaggcauuuauuuaa

SEQ ID NO: 213118 - RNA, 19 nt, Artificial Sequence
  Description of Artificial Sequence: Synthetic oligonucleotide
  Sense strand starting at position 2832 of SEQ ID NO: 2745
gguggaguccauuguggaa

SEQ ID NO: 213119 - RNA, 19 nt, Artificial Sequence
  Description of Artificial Sequence: Synthetic oligonucleotide
  Antisense strand to SEQ ID NO: 213118
uuccacaauggacuccacc

SEQ ID NO: 213120 - RNA, 19 nt, Artificial Sequence
  Description of Artificial Sequence: Synthetic oligonucleotide
  Sense strand starting at position 2858 of SEQ ID NO: 2745
uucaguggucauugugaag

SEQ ID NO: 213121 - RNA, 19 nt, Artificial Sequence
  Description of Artificial Sequence: Synthetic oligonucleotide
  Antisense strand to SEQ ID NO: 213120
cuucacaaugaccacugaa

SEQ ID NO: 213122 - RNA, 19 nt, Artificial Sequence
  Description of Artificial Sequence: Synthetic oligonucleotide
  Sense strand starting at position 2937 of SEQ ID NO: 2745
auaggauuauauguacagu

SEQ ID NO: 213123 - RNA, 19 nt, Artificial Sequence
  Description of Artificial Sequence: Synthetic oligonucleotide
  Antisense strand to SEQ ID NO: 213122
acuguacauauaauccuau

SEQ ID NO: 213124 - RNA, 19 nt, Artificial Sequence
  Description of Artificial Sequence: Synthetic oligonucleotide
  Sense strand starting at position 2940 of SEQ ID NO: 2745
ggauuauauguacaguuau

SEQ ID NO: 213125 - RNA, 19 nt, Artificial Sequence
  Description of Artificial Sequence: Synthetic oligonucleotide
  Antisense strand to SEQ ID NO: 213124
auaacuguacauauaaucc

SEQ ID NO: 213126 - RNA, 19 nt, Artificial Sequence
  Description of Artificial Sequence: Synthetic oligonucleotide
  Sense strand starting at position 3009 of SEQ ID NO: 2745
uuugcaacugcauaguauu

SEQ ID NO: 213127 - RNA, 19 nt, Artificial Sequence
  Description of Artificial Sequence: Synthetic oligonucleotide
  Antisense strand to SEQ ID NO: 213126
aauacuaugcaguugcaaa

SEQ ID NO: 213128 - RNA, 19 nt, Artificial Sequence
  Description of Artificial Sequence: Synthetic oligonucleotide
  Sense strand starting at position 3059 of SEQ ID NO: 2745
ugugaaugugcacacagua

SEQ ID NO: 213129 - RNA, 19 nt, Artificial Sequence
  Description of Artificial Sequence: Synthetic oligonucleotide
  Antisense strand to SEQ ID NO: 213128
uacugugugcacauucaca

SEQ ID NO: 213130 - RNA, 19 nt, Artificial Sequence
  Description of Artificial Sequence: Synthetic oligonucleotide
  Sense strand starting at position 3072 of SEQ ID NO: 2745
acaguaucuuaccugaaug

SEQ ID NO: 213131 - RNA, 19 nt, Artificial Sequence
  Description of Artificial Sequence: Synthetic oligonucleotide
  Antisense strand to SEQ ID NO: 213130
cauucagguaagauacugu

SEQ ID NO: 213132 - RNA, 19 nt, Artificial Sequence
  Description of Artificial Sequence: Synthetic oligonucleotide
  Sense strand starting at position 3074 of SEQ ID NO: 2745
aguaucuuaccugaaugca

SEQ ID NO: 213133 - RNA, 19 nt, Artificial Sequence
  Description of Artificial Sequence: Synthetic oligonucleotide
  Antisense strand to SEQ ID NO: 213132
ugcauucagguaagauacu

SEQ ID NO: 213134 - RNA, 19 nt, Artificial Sequence
  Description of Artificial Sequence: Synthetic oligonucleotide
  Sense strand starting at position 3090 of SEQ ID NO: 2745
gcaugaagaugaucauuau

SEQ ID NO: 213135 - RNA, 19 nt, Artificial Sequence
  Description of Artificial Sequence: Synthetic oligonucleotide
  Antisense strand to SEQ ID NO: 213134
auaaugaucaucuucaugc

SEQ ID NO: 213136 - RNA, 19 nt, Artificial Sequence
  Description of Artificial Sequence: Synthetic oligonucleotide
  Sense strand starting at position 3093 of SEQ ID NO: 2745
ugaagaugaucauuaugug

SEQ ID NO: 213137 - RNA, 19 nt, Artificial Sequence
  Description of Artificial Sequence: Synthetic oligonucleotide
  Antisense strand to SEQ ID NO: 213136
cacauaaugaucaucuuca

SEQ ID NO: 213138 - RNA, 19 nt, Artificial Sequence
  Description of Artificial Sequence: Synthetic oligonucleotide
  Sense strand starting at position 3576 of SEQ ID NO: 2745
cuugguuaauuugaccaaa

SEQ ID NO: 213139 - RNA, 19 nt, Artificial Sequence
  Description of Artificial Sequence: Synthetic oligonucleotide
  Antisense strand to SEQ ID NO: 213138
uuuggucaaauuaaccaag

SEQ ID NO: 213140 - RNA, 19 nt, Artificial Sequence
  Description of Artificial Sequence: Synthetic oligonucleotide
  Sense strand starting at position 3635 of SEQ ID NO: 2745
guaaacaauuguguaauga

SEQ ID NO: 213141 - RNA, 19 nt, Artificial Sequence
  Description of Artificial Sequence: Synthetic oligonucleotide
  Antisense strand to SEQ ID NO: 213140
ucauuacacaauuguuuac

SEQ ID NO: 213142 - RNA, 19 nt, Artificial Sequence
  Description of Artificial Sequence: Synthetic oligonucleotide
  Sense strand starting at position 3947 of SEQ ID NO: 2745
ccauguuaguagccaggau

SEQ ID NO: 213143 - RNA, 19 nt, Artificial Sequence
  Description of Artificial Sequence: Synthetic oligonucleotide
  Antisense strand to SEQ ID NO: 213142
auccuggcuacuaacaugg

SEQ ID NO: 213144 - RNA, 19 nt, Artificial Sequence
  Description of Artificial Sequence: Synthetic oligonucleotide
  Sense strand starting at position 543 of SEQ ID NO: 2746
cugcuuguuagggauguga

SEQ ID NO: 213145 - RNA, 19 nt, Artificial Sequence
  Description of Artificial Sequence: Synthetic oligonucleotide
  Antisense strand to SEQ ID NO: 213144
ucacaucccuaacaagcag

SEQ ID NO: 213146 - RNA, 19 nt, Artificial Sequence
  Description of Artificial Sequence: Synthetic oligonucleotide
  Sense strand starting at position 547 of SEQ ID NO: 2746
uuguuagggaugugaaaca

SEQ ID NO: 213147 - RNA, 19 nt, Artificial Sequence
  Description of Artificial Sequence: Synthetic oligonucleotide
  Antisense strand to SEQ ID NO: 213146
uguuucacaucccuaacaa

SEQ ID NO: 213148 - RNA, 19 nt, Artificial Sequence
  Description of Artificial Sequence: Synthetic oligonucleotide
  Sense strand starting at position 643 of SEQ ID NO: 2746
accugacagugauuaagca

SEQ ID NO: 213149 - RNA, 19 nt, Artificial Sequence
  Description of Artificial Sequence: Synthetic oligonucleotide
  Antisense strand to SEQ ID NO: 213148
ugcuuaaucacugucaggu

SEQ ID NO: 213150 - RNA, 19 nt, Artificial Sequence
  Description of Artificial Sequence: Synthetic oligonucleotide
  Sense strand starting at position 768 of SEQ ID NO: 2746
uuaucuuggcuugggauau

SEQ ID NO: 213151 - RNA, 19 nt, Artificial Sequence
  Description of Artificial Sequence: Synthetic oligonucleotide
  Antisense strand to SEQ ID NO: 213150
auaucccaagccaagauaa

SEQ ID NO: 213152 - RNA, 19 nt, Artificial Sequence
  Description of Artificial Sequence: Synthetic oligonucleotide
  Sense strand starting at position 806 of SEQ ID NO: 2746
aucacaguucucuagaucu

SEQ ID NO: 213153 - RNA, 19 nt, Artificial Sequence
  Description of Artificial Sequence: Synthetic oligonucleotide
  Antisense strand to SEQ ID NO: 213152
agaucuagagaacugugau

SEQ ID NO: 213154 - RNA, 19 nt, Artificial Sequence
  Description of Artificial Sequence: Synthetic oligonucleotide
  Sense strand starting at position 814 of SEQ ID NO: 2746
ucucuagaucugcagcaaa

SEQ ID NO: 213155 - RNA, 19 nt, Artificial Sequence
  Description of Artificial Sequence: Synthetic oligonucleotide
  Antisense strand to SEQ ID NO: 213154
uuugcugcagaucuagaga

SEQ ID NO: 213156 - RNA, 19 nt, Artificial Sequence
  Description of Artificial Sequence: Synthetic oligonucleotide
  Sense strand starting at position 898 of SEQ ID NO: 2746
aggaacugucucuagcuuu

SEQ ID NO: 213157 - RNA, 19 nt, Artificial Sequence
  Description of Artificial Sequence: Synthetic oligonucleotide
  Antisense strand to SEQ ID NO: 213156
aaagcuagagacaguuccu

SEQ ID NO: 213158 - RNA, 19 nt, Artificial Sequence
  Description of Artificial Sequence: Synthetic oligonucleotide
  Sense strand starting at position 931 of SEQ ID NO: 2746
gcaucaucauuugaagaua

SEQ ID NO: 213159 - RNA, 19 nt, Artificial Sequence
  Description of Artificial Sequence: Synthetic oligonucleotide
  Antisense strand to SEQ ID NO: 213158
uaucuucaaaugaugaugc

SEQ ID NO: 213160 - RNA, 19 nt, Artificial Sequence
  Description of Artificial Sequence: Synthetic oligonucleotide
  Sense strand starting at position 1221 of SEQ ID NO: 2746
auguuucucucuuugauag

SEQ ID NO: 213161 - RNA, 19 nt, Artificial Sequence
  Description of Artificial Sequence: Synthetic oligonucleotide
  Antisense strand to SEQ ID NO: 213160
cuaucaaagagagaaacau

SEQ ID NO: 213162 - RNA, 19 nt, Artificial Sequence
  Description of Artificial Sequence: Synthetic oligonucleotide
  Sense strand starting at position 1341 of SEQ ID NO: 2746
ccaaauugaugaucuguaa

SEQ ID NO: 213163 - RNA, 19 nt, Artificial Sequence
  Description of Artificial Sequence: Synthetic oligonucleotide
  Antisense strand to SEQ ID NO: 213162
uuacagaucaucaauuugg

SEQ ID NO: 213164 - RNA, 19 nt, Artificial Sequence
  Description of Artificial Sequence: Synthetic oligonucleotide
  Sense strand starting at position 1411 of SEQ ID NO: 2746
aguugaaaguaucuuuaga

SEQ ID NO: 213165 - RNA, 19 nt, Artificial Sequence
  Description of Artificial Sequence: Synthetic oligonucleotide
  Antisense strand to SEQ ID NO: 213164
ucuaaagauacuuucaacu

SEQ ID NO: 213166 - RNA, 19 nt, Artificial Sequence
  Description of Artificial Sequence: Synthetic oligonucleotide
  Sense strand starting at position 1413 of SEQ ID NO: 2746
uugaaaguaucuuuagaag

SEQ ID NO: 213167 - RNA, 19 nt, Artificial Sequence
  Description of Artificial Sequence: Synthetic oligonucleotide
  Antisense strand to SEQ ID NO: 213166
cuucuaaagauacuuucaa

SEQ ID NO: 213168 - RNA, 19 nt, Artificial Sequence
  Description of Artificial Sequence: Synthetic oligonucleotide
  Sense strand starting at position 1554 of SEQ ID NO: 2746
uuugcuauggcuuagaaag

SEQ ID NO: 213169 - RNA, 19 nt, Artificial Sequence
  Description of Artificial Sequence: Synthetic oligonucleotide
  Antisense strand to SEQ ID NO: 213168
cuuucuaagccauagcaaa

SEQ ID NO: 213170 - RNA, 19 nt, Artificial Sequence
  Description of Artificial Sequence: Synthetic oligonucleotide
  Sense strand starting at position 1614 of SEQ ID NO: 2746
gcucaugcacuacgauuua

SEQ ID NO: 213171 - RNA, 19 nt, Artificial Sequence
  Description of Artificial Sequence: Synthetic oligonucleotide
  Antisense strand to SEQ ID NO: 213170
uaaaucguagugcaugagc

SEQ ID NO: 213172 - RNA, 19 nt, Artificial Sequence
  Description of Artificial Sequence: Synthetic oligonucleotide
  Sense strand starting at position 1652 of SEQ ID NO: 2746
ccuucuuggcucuaagauc

SEQ ID NO: 213173 - RNA, 19 nt, Artificial Sequence
  Description of Artificial Sequence: Synthetic oligonucleotide
  Antisense strand to SEQ ID NO: 213172
gaucuuagagccaagaagg

SEQ ID NO: 213174 - RNA, 19 nt, Artificial Sequence
  Description of Artificial Sequence: Synthetic oligonucleotide
  Sense strand starting at position 1731 of SEQ ID NO: 2746
cuucucuuagugcauugaa

SEQ ID NO: 213175 - RNA, 19 nt, Artificial Sequence
  Description of Artificial Sequence: Synthetic oligonucleotide
  Antisense strand to SEQ ID NO: 213174
uucaaugcacuaagagaag

SEQ ID NO: 213176 - RNA, 19 nt, Artificial Sequence
  Description of Artificial Sequence: Synthetic oligonucleotide
  Sense strand starting at position 1751 of SEQ ID NO: 2746
aucaguuuccaggaaagcu

SEQ ID NO: 213177 - RNA, 19 nt, Artificial Sequence
  Description of Artificial Sequence: Synthetic oligonucleotide
  Antisense strand to SEQ ID NO: 213176
agcuuuccuggaaacugau

SEQ ID NO: 213178 - RNA, 19 nt, Artificial Sequence
  Description of Artificial Sequence: Synthetic oligonucleotide
  Sense strand starting at position 1881 of SEQ ID NO: 2746
acgggaugguaucuugagu

SEQ ID NO: 213179 - RNA, 19 nt, Artificial Sequence
  Description of Artificial Sequence: Synthetic oligonucleotide
  Antisense strand to SEQ ID NO: 213178
acucaagauaccaucccgu

SEQ ID NO: 213180 - RNA, 19 nt, Artificial Sequence
  Description of Artificial Sequence: Synthetic oligonucleotide
  Sense strand starting at position 2048 of SEQ ID NO: 2746
gugaccaaucccugaugua

SEQ ID NO: 213181 - RNA, 19 nt, Artificial Sequence
  Description of Artificial Sequence: Synthetic oligonucleotide
  Antisense strand to SEQ ID NO: 213180
uacaucagggauuggucac

SEQ ID NO: 213182 - RNA, 19 nt, Artificial Sequence
  Description of Artificial Sequence: Synthetic oligonucleotide
  Sense strand starting at position 2172 of SEQ ID NO: 2746
acuacuuguacugggagau

SEQ ID NO: 213183 - RNA, 19 nt, Artificial Sequence
  Description of Artificial Sequence: Synthetic oligonucleotide
  Antisense strand to SEQ ID NO: 213182
aucucccaguacaaguagu

SEQ ID NO: 213184 - RNA, 19 nt, Artificial Sequence
  Description of Artificial Sequence: Synthetic oligonucleotide
  Sense strand starting at position 2173 of SEQ ID NO: 2746
cuacuuguacugggagaug

SEQ ID NO: 213185 - RNA, 19 nt, Artificial Sequence
  Description of Artificial Sequence: Synthetic oligonucleotide
  Antisense strand to SEQ ID NO: 213184
caucucccaguacaaguag

SEQ ID NO: 213186 - RNA, 19 nt, Artificial Sequence
  Description of Artificial Sequence: Synthetic oligonucleotide
  Sense strand starting at position 2398 of SEQ ID NO: 2746
uaggguaggcacuauuauu

SEQ ID NO: 213187 - RNA, 19 nt, Artificial Sequence
  Description of Artificial Sequence: Synthetic oligonucleotide
  Antisense strand to SEQ ID NO: 213186
aauaauagugccuacccua

SEQ ID NO: 213188 - RNA, 19 nt, Artificial Sequence
  Description of Artificial Sequence: Synthetic oligonucleotide
  Sense strand starting at position 2449 of SEQ ID NO: 2746
uagagaguuuaaguccuuu

SEQ ID NO: 213189 - RNA, 19 nt, Artificial Sequence
  Description of Artificial Sequence: Synthetic oligonucleotide
  Antisense strand to SEQ ID NO: 213188
aaaggacuuaaacucucua

SEQ ID NO: 213190 - RNA, 19 nt, Artificial Sequence
  Description of Artificial Sequence: Synthetic oligonucleotide
  Sense strand starting at position 2469 of SEQ ID NO: 2746
gcaguuagaucucugagaa

SEQ ID NO: 213191 - RNA, 19 nt, Artificial Sequence
  Description of Artificial Sequence: Synthetic oligonucleotide
  Antisense strand to SEQ ID NO: 213190
uucucagagaucuaacugc

SEQ ID NO: 213192 - RNA, 19 nt, Artificial Sequence
  Description of Artificial Sequence: Synthetic oligonucleotide
  Sense strand starting at position 2470 of SEQ ID NO: 2746
caguuagaucucugagaaa

SEQ ID NO: 213193 - RNA, 19 nt, Artificial Sequence
  Description of Artificial Sequence: Synthetic oligonucleotide
  Antisense strand to SEQ ID NO: 213192
uuucucagagaucuaacug

SEQ ID NO: 213194 - RNA, 19 nt, Artificial Sequence
  Description of Artificial Sequence: Synthetic oligonucleotide
  Sense strand starting at position 2489 of SEQ ID NO: 2746
caugaauggcaccgauaug

SEQ ID NO: 213195 - RNA, 19 nt, Artificial Sequence
  Description of Artificial Sequence: Synthetic oligonucleotide
  Antisense strand to SEQ ID NO: 213194
cauaucggugccauucaug

SEQ ID NO: 213196 - RNA, 19 nt, Artificial Sequence
  Description of Artificial Sequence: Synthetic oligonucleotide
  Sense strand starting at position 2730 of SEQ ID NO: 2746
gcaaauuguucugugauuu

SEQ ID NO: 213197 - RNA, 19 nt, Artificial Sequence
  Description of Artificial Sequence: Synthetic oligonucleotide
  Antisense strand to SEQ ID NO: 213196
aaaucacagaacaauuugc

SEQ ID NO: 213198 - RNA, 19 nt, Artificial Sequence
  Description of Artificial Sequence: Synthetic oligonucleotide
  Sense strand starting at position 2793 of SEQ ID NO: 2746
cugaaauagucuuuaaugg

SEQ ID NO: 213199 - RNA, 19 nt, Artificial Sequence
  Description of Artificial Sequence: Synthetic oligonucleotide
  Antisense strand to SEQ ID NO: 213198
ccauuaaagacuauuucag

SEQ ID NO: 213200 - RNA, 19 nt, Artificial Sequence
  Description of Artificial Sequence: Synthetic oligonucleotide
  Sense strand starting at position 2794 of SEQ ID NO: 2746
ugaaauagucuuuaauggu

SEQ ID NO: 213201 - RNA, 19 nt, Artificial Sequence
  Description of Artificial Sequence: Synthetic oligonucleotide
  Antisense strand to SEQ ID NO: 213200
accauuaaagacuauuuca

SEQ ID NO: 213202 - RNA, 19 nt, Artificial Sequence
  Description of Artificial Sequence: Synthetic oligonucleotide
  Sense strand starting at position 2834 of SEQ ID NO: 2746
acgugugagguuuauuaaa

SEQ ID NO: 213203 - RNA, 19 nt, Artificial Sequence
  Description of Artificial Sequence: Synthetic oligonucleotide
  Antisense strand to SEQ ID NO: 213202
uuuaauaaaccucacacgu

SEQ ID NO: 213204 - RNA, 19 nt, Artificial Sequence
  Description of Artificial Sequence: Synthetic oligonucleotide
  Sense strand starting at position 2836 of SEQ ID NO: 2746
gugugagguuuauuaaaga

SEQ ID NO: 213205 - RNA, 19 nt, Artificial Sequence
  Description of Artificial Sequence: Synthetic oligonucleotide
  Antisense strand to SEQ ID NO: 213204
ucuuuaauaaaccucacac

SEQ ID NO: 213206 - RNA, 19 nt, Artificial Sequence
  Description of Artificial Sequence: Synthetic oligonucleotide
  Sense strand starting at position 2846 of SEQ ID NO: 2746
uauuaaagaggcuguuaaa

SEQ ID NO: 213207 - RNA, 19 nt, Artificial Sequence
  Description of Artificial Sequence: Synthetic oligonucleotide
  Antisense strand to SEQ ID NO: 213206
uuuaacagccucuuuaaua

SEQ ID NO: 213208 - RNA, 19 nt, Artificial Sequence
  Description of Artificial Sequence: Synthetic oligonucleotide
  Sense strand starting at position 3015 of SEQ ID NO: 2746
agugcuguaagucaugaga

SEQ ID NO: 213209 - RNA, 19 nt, Artificial Sequence
  Description of Artificial Sequence: Synthetic oligonucleotide
  Antisense strand to SEQ ID NO: 213208
ucucaugacuuacagcacu

SEQ ID NO: 213210 - RNA, 19 nt, Artificial Sequence
  Description of Artificial Sequence: Synthetic oligonucleotide
  Sense strand starting at position 3018 of SEQ ID NO: 2746
gcuguaagucaugagacaa

SEQ ID NO: 213211 - RNA, 19 nt, Artificial Sequence
  Description of Artificial Sequence: Synthetic oligonucleotide
  Antisense strand to SEQ ID NO: 213210
uugucucaugacuuacagc

SEQ ID NO: 213212 - RNA, 19 nt, Artificial Sequence
  Description of Artificial Sequence: Synthetic oligonucleotide
  Sense strand starting at position 3671 of SEQ ID NO: 2746
gguuacuacugguuaauug

SEQ ID NO: 213213 - RNA, 19 nt, Artificial Sequence
  Description of Artificial Sequence: Synthetic oligonucleotide
  Antisense strand to SEQ ID NO: 213212
caauuaaccaguaguaacc

SEQ ID NO: 213214 - RNA, 19 nt, Artificial Sequence
  Description of Artificial Sequence: Synthetic oligonucleotide
  Sense strand starting at position 3783 of SEQ ID NO: 2746
agauguauauaagcuagau

SEQ ID NO: 213215 - RNA, 19 nt, Artificial Sequence
  Description of Artificial Sequence: Synthetic oligonucleotide
  Antisense strand to SEQ ID NO: 213214
aucuagcuuauauacaucu

SEQ ID NO: 213216 - RNA, 19 nt, Artificial Sequence
  Description of Artificial Sequence: Synthetic oligonucleotide
  Sense strand starting at position 3787 of SEQ ID NO: 2746
guauauaagcuagaugauu

SEQ ID NO: 213217 - RNA, 19 nt, Artificial Sequence
  Description of Artificial Sequence: Synthetic oligonucleotide
  Antisense strand to SEQ ID NO: 213216
aaucaucuagcuuauauac

SEQ ID NO: 213218 - RNA, 19 nt, Artificial Sequence
  Description of Artificial Sequence: Synthetic oligonucleotide
  Sense strand starting at position 3792 of SEQ ID NO: 2746
uaagcuagaugauuguauu

SEQ ID NO: 213219 - RNA, 19 nt, Artificial Sequence
  Description of Artificial Sequence: Synthetic oligonucleotide
  Antisense strand to SEQ ID NO: 213218
aauacaaucaucuagcuua

SEQ ID NO: 213220 - RNA, 19 nt, Artificial Sequence
  Description of Artificial Sequence: Synthetic oligonucleotide
  Sense strand starting at position 3948 of SEQ ID NO: 2746
aguggacauuuccaaacau

SEQ ID NO: 213221 - RNA, 19 nt, Artificial Sequence
  Description of Artificial Sequence: Synthetic oligonucleotide
  Antisense strand to SEQ ID NO: 213220
auguuuggaaauguccacu

SEQ ID NO: 213222 - RNA, 19 nt, Artificial Sequence
  Description of Artificial Sequence: Synthetic oligonucleotide
  Sense strand starting at position 3976 of SEQ ID NO: 2746
cugguagaaugagccaaua

SEQ ID NO: 213223 - RNA, 19 nt, Artificial Sequence
  Description of Artificial Sequence: Synthetic oligonucleotide
  Antisense strand to SEQ ID NO: 213222
uauuggcucauucuaccag

SEQ ID NO: 213224 - RNA, 19 nt, Artificial Sequence
  Description of Artificial Sequence: Synthetic oligonucleotide
  Sense strand starting at position 441 of SEQ ID NO: 2747
cugcuuguuagggauguga

SEQ ID NO: 213225 - RNA, 19 nt, Artificial Sequence
  Description of Artificial Sequence: Synthetic oligonucleotide
  Antisense strand to SEQ ID NO: 213224
ucacaucccuaacaagcag

SEQ ID NO: 213226 - RNA, 19 nt, Artificial Sequence
  Description of Artificial Sequence: Synthetic oligonucleotide
  Sense strand starting at position 443 of SEQ ID NO: 2747
gcuuguuagggaugugaaa

SEQ ID NO: 213227 - RNA, 19 nt, Artificial Sequence
  Description of Artificial Sequence: Synthetic oligonucleotide
  Antisense strand to SEQ ID NO: 213226
uuucacaucccuaacaagc

SEQ ID NO: 213228 - RNA, 19 nt, Artificial Sequence
  Description of Artificial Sequence: Synthetic oligonucleotide
  Sense strand starting at position 445 of SEQ ID NO: 2747
uuguuagggaugugaaaca

SEQ ID NO: 213229 - RNA, 19 nt, Artificial Sequence
  Description of Artificial Sequence: Synthetic oligonucleotide
  Antisense strand to SEQ ID NO: 213228
uguuucacaucccuaacaa

SEQ ID NO: 213230 - RNA, 19 nt, Artificial Sequence
  Description of Artificial Sequence: Synthetic oligonucleotide
  Sense strand starting at position 541 of SEQ ID NO: 2747
accugacagugauuaagca

SEQ ID NO: 213231 - RNA, 19 nt, Artificial Sequence
  Description of Artificial Sequence: Synthetic oligonucleotide
  Antisense strand to SEQ ID NO: 213230
ugcuuaaucacugucaggu

SEQ ID NO: 213232 - RNA, 19 nt, Artificial Sequence
  Description of Artificial Sequence: Synthetic oligonucleotide
  Sense strand starting at position 665 of SEQ ID NO: 2747
guuaucuuggcuugggaua

SEQ ID NO: 213233 - RNA, 19 nt, Artificial Sequence
  Description of Artificial Sequence: Synthetic oligonucleotide
  Antisense strand to SEQ ID NO: 213232
uaucccaagccaagauaac

SEQ ID NO: 213234 - RNA, 19 nt, Artificial Sequence
  Description of Artificial Sequence: Synthetic oligonucleotide
  Sense strand starting at position 666 of SEQ ID NO: 2747
uuaucuuggcuugggauau

SEQ ID NO: 213235 - RNA, 19 nt, Artificial Sequence
  Description of Artificial Sequence: Synthetic oligonucleotide
  Antisense strand to SEQ ID NO: 213234
auaucccaagccaagauaa

SEQ ID NO: 213236 - RNA, 19 nt, Artificial Sequence
  Description of Artificial Sequence: Synthetic oligonucleotide
  Sense strand starting at position 704 of SEQ ID NO: 2747
aucacaguucucuagaucu

SEQ ID NO: 213237 - RNA, 19 nt, Artificial Sequence
  Description of Artificial Sequence: Synthetic oligonucleotide
  Antisense strand to SEQ ID NO: 213236
agaucuagagaacugugau

SEQ ID NO: 213238 - RNA, 19 nt, Artificial Sequence
  Description of Artificial Sequence: Synthetic oligonucleotide
  Sense strand starting at position 711 of SEQ ID NO: 2747
uucucuagaucugcagcaa

SEQ ID NO: 213239 - RNA, 19 nt, Artificial Sequence
  Description of Artificial Sequence: Synthetic oligonucleotide
  Antisense strand to SEQ ID NO: 213238
uugcugcagaucuagagaa

SEQ ID NO: 213240 - RNA, 19 nt, Artificial Sequence
  Description of Artificial Sequence: Synthetic oligonucleotide
  Sense strand starting at position 712 of SEQ ID NO: 2747
ucucuagaucugcagcaaa

SEQ ID NO: 213241 - RNA, 19 nt, Artificial Sequence
  Description of Artificial Sequence: Synthetic oligonucleotide
  Antisense strand to SEQ ID NO: 213240
uuugcugcagaucuagaga

SEQ ID NO: 213242 - RNA, 19 nt, Artificial Sequence
  Description of Artificial Sequence: Synthetic oligonucleotide
  Sense strand starting at position 795 of SEQ ID NO: 2747
uaggaacugucucuagcuu

SEQ ID NO: 213243 - RNA, 19 nt, Artificial Sequence
  Description of Artificial Sequence: Synthetic oligonucleotide
  Antisense strand to SEQ ID NO: 213242
aagcuagagacaguuccua

SEQ ID NO: 213244 - RNA, 19 nt, Artificial Sequence
  Description of Artificial Sequence: Synthetic oligonucleotide
  Sense strand starting at position 796 of SEQ ID NO: 2747
aggaacugucucuagcuuu

SEQ ID NO: 213245 - RNA, 19 nt, Artificial Sequence
  Description of Artificial Sequence: Synthetic oligonucleotide
  Antisense strand to SEQ ID NO: 213244
aaagcuagagacaguuccu

SEQ ID NO: 213246 - RNA, 19 nt, Artificial Sequence
  Description of Artificial Sequence: Synthetic oligonucleotide
  Sense strand starting at position 829 of SEQ ID NO: 2747
gcaucaucauuugaagaua

SEQ ID NO: 213247 - RNA, 19 nt, Artificial Sequence
  Description of Artificial Sequence: Synthetic oligonucleotide
  Antisense strand to SEQ ID NO: 213246
uaucuucaaaugaugaugc

SEQ ID NO: 213248 - RNA, 19 nt, Artificial Sequence
  Description of Artificial Sequence: Synthetic oligonucleotide
  Sense strand starting at position 1309 of SEQ ID NO: 2747
aguugaaaguaucuuuaga

SEQ ID NO: 213249 - RNA, 19 nt, Artificial Sequence
  Description of Artificial Sequence: Synthetic oligonucleotide
  Antisense strand to SEQ ID NO: 213248
ucuaaagauacuuucaacu

SEQ ID NO: 213250 - RNA, 19 nt, Artificial Sequence
  Description of Artificial Sequence: Synthetic oligonucleotide
  Sense strand starting at position 1311 of SEQ ID NO: 2747
uugaaaguaucuuuagaag

SEQ ID NO: 213251 - RNA, 19 nt, Artificial Sequence
  Description of Artificial Sequence: Synthetic oligonucleotide
  Antisense strand to SEQ ID NO: 213250
cuucuaaagauacuuucaa

SEQ ID NO: 213252 - RNA, 19 nt, Artificial Sequence
  Description of Artificial Sequence: Synthetic oligonucleotide
  Sense strand starting at position 1452 of SEQ ID NO: 2747
uuugcuauggcuuagaaag

SEQ ID NO: 213253 - RNA, 19 nt, Artificial Sequence
  Description of Artificial Sequence: Synthetic oligonucleotide
  Antisense strand to SEQ ID NO: 213252
cuuucuaagccauagcaaa

SEQ ID NO: 213254 - RNA, 19 nt, Artificial Sequence
  Description of Artificial Sequence: Synthetic oligonucleotide
  Sense strand starting at position 1486 of SEQ ID NO: 2747
guguacaccuccuuuaaug

SEQ ID NO: 213255 - RNA, 19 nt, Artificial Sequence
  Description of Artificial Sequence: Synthetic oligonucleotide
  Antisense strand to SEQ ID NO: 213254
cauuaaaggagguguacac

SEQ ID NO: 213256 - RNA, 19 nt, Artificial Sequence
  Description of Artificial Sequence: Synthetic oligonucleotide
  Sense strand starting at position 1512 of SEQ ID NO: 2747
gcucaugcacuacgauuua

SEQ ID NO: 213257 - RNA, 19 nt, Artificial Sequence
  Description of Artificial Sequence: Synthetic oligonucleotide
  Antisense strand to SEQ ID NO: 213256
uaaaucguagugcaugagc

SEQ ID NO: 213258 - RNA, 19 nt, Artificial Sequence
  Description of Artificial Sequence: Synthetic oligonucleotide
  Sense strand starting at position 1550 of SEQ ID NO: 2747
ccuucuuggcucuaagauc

SEQ ID NO: 213259 - RNA, 19 nt, Artificial Sequence
  Description of Artificial Sequence: Synthetic oligonucleotide
  Antisense strand to SEQ ID NO: 213258
gaucuuagagccaagaagg

SEQ ID NO: 213260 - RNA, 19 nt, Artificial Sequence
  Description of Artificial Sequence: Synthetic oligonucleotide
  Sense strand starting at position 2070 of SEQ ID NO: 2747
acuacuuguacugggagau

SEQ ID NO: 213261 - RNA, 19 nt, Artificial Sequence
  Description of Artificial Sequence: Synthetic oligonucleotide
  Antisense strand to SEQ ID NO: 213260
aucucccaguacaaguagu

SEQ ID NO: 213262 - RNA, 19 nt, Artificial Sequence
  Description of Artificial Sequence: Synthetic oligonucleotide
  Sense strand starting at position 2071 of SEQ ID NO: 2747
cuacuuguacugggagaug

SEQ ID NO: 213263 - RNA, 19 nt, Artificial Sequence
  Description of Artificial Sequence: Synthetic oligonucleotide
  Antisense strand to SEQ ID NO: 213262
caucucccaguacaaguag

SEQ ID NO: 213264 - RNA, 19 nt, Artificial Sequence
  Description of Artificial Sequence: Synthetic oligonucleotide
  Sense strand starting at position 2296 of SEQ ID NO: 2747
uaggguaggcacuauuauu

SEQ ID NO: 213265 - RNA, 19 nt, Artificial Sequence
  Description of Artificial Sequence: Synthetic oligonucleotide
  Antisense strand to SEQ ID NO: 213264
aauaauagugccuacccua

SEQ ID NO: 213266 - RNA, 19 nt, Artificial Sequence
  Description of Artificial Sequence: Synthetic oligonucleotide
  Sense strand starting at position 2347 of SEQ ID NO: 2747
uagagaguuuaaguccuuu

SEQ ID NO: 213267 - RNA, 19 nt, Artificial Sequence
  Description of Artificial Sequence: Synthetic oligonucleotide
  Antisense strand to SEQ ID NO: 213266
aaaggacuuaaacucucua

SEQ ID NO: 213268 - RNA, 19 nt, Artificial Sequence
  Description of Artificial Sequence: Synthetic oligonucleotide
  Sense strand starting at position 2367 of SEQ ID NO: 2747
gcaguuagaucucugagaa

SEQ ID NO: 213269 - RNA, 19 nt, Artificial Sequence
  Description of Artificial Sequence: Synthetic oligonucleotide
  Antisense strand to SEQ ID NO: 213268
uucucagagaucuaacugc

SEQ ID NO: 213270 - RNA, 19 nt, Artificial Sequence
  Description of Artificial Sequence: Synthetic oligonucleotide
  Sense strand starting at position 2368 of SEQ ID NO: 2747
caguuagaucucugagaaa

SEQ ID NO: 213271 - RNA, 19 nt, Artificial Sequence
  Description of Artificial Sequence: Synthetic oligonucleotide
  Antisense strand to SEQ ID NO: 213270
uuucucagagaucuaacug

SEQ ID NO: 213272 - RNA, 19 nt, Artificial Sequence
  Description of Artificial Sequence: Synthetic oligonucleotide
  Sense strand starting at position 2387 of SEQ ID NO: 2747
caugaauggcaccgauaug

SEQ ID NO: 213273 - RNA, 19 nt, Artificial Sequence
  Description of Artificial Sequence: Synthetic oligonucleotide
  Antisense strand to SEQ ID NO: 213272
cauaucggugccauucaug

SEQ ID NO: 213274 - RNA, 19 nt, Artificial Sequence
  Description of Artificial Sequence: Synthetic oligonucleotide
  Sense strand starting at position 2674 of SEQ ID NO: 2747
guauucuuccuccaaggcu

SEQ ID NO: 213275 - RNA, 19 nt, Artificial Sequence
  Description of Artificial Sequence: Synthetic oligonucleotide
  Antisense strand to SEQ ID NO: 213274
agccuuggaggaagaauac

SEQ ID NO: 213276 - RNA, 19 nt, Artificial Sequence
  Description of Artificial Sequence: Synthetic oligonucleotide
  Sense strand starting at position 2680 of SEQ ID NO: 2747
uuccuccaaggcugaaaua

SEQ ID NO: 213277 - RNA, 19 nt, Artificial Sequence
  Description of Artificial Sequence: Synthetic oligonucleotide
  Antisense strand to SEQ ID NO: 213276
uauuucagccuuggaggaa

SEQ ID NO: 213278 - RNA, 19 nt, Artificial Sequence
  Description of Artificial Sequence: Synthetic oligonucleotide
  Sense strand starting at position 2691 of SEQ ID NO: 2747
cugaaauagucuuuaaugg

SEQ ID NO: 213279 - RNA, 19 nt, Artificial Sequence
  Description of Artificial Sequence: Synthetic oligonucleotide
  Antisense strand to SEQ ID NO: 213278
ccauuaaagacuauuucag

SEQ ID NO: 213280 - RNA, 19 nt, Artificial Sequence
  Description of Artificial Sequence: Synthetic oligonucleotide
  Sense strand starting at position 2692 of SEQ ID NO: 2747
ugaaauagucuuuaauggu

SEQ ID NO: 213281 - RNA, 19 nt, Artificial Sequence
  Description of Artificial Sequence: Synthetic oligonucleotide
  Antisense strand to SEQ ID NO: 213280
accauuaaagacuauuuca

SEQ ID NO: 213282 - RNA, 19 nt, Artificial Sequence
  Description of Artificial Sequence: Synthetic oligonucleotide
  Sense strand starting at position 2732 of SEQ ID NO: 2747
acgugugagguuuauuaaa

SEQ ID NO: 213283 - RNA, 19 nt, Artificial Sequence
  Description of Artificial Sequence: Synthetic oligonucleotide
  Antisense strand to SEQ ID NO: 213282
uuuaauaaaccucacacgu

SEQ ID NO: 213284 - RNA, 19 nt, Artificial Sequence
  Description of Artificial Sequence: Synthetic oligonucleotide
  Sense strand starting at position 2734 of SEQ ID NO: 2747
gugugagguuuauuaaaga

SEQ ID NO: 213285 - RNA, 19 nt, Artificial Sequence
  Description of Artificial Sequence: Synthetic oligonucleotide
  Antisense strand to SEQ ID NO: 213284
ucuuuaauaaaccucacac

SEQ ID NO: 213286 - RNA, 19 nt, Artificial Sequence
  Description of Artificial Sequence: Synthetic oligonucleotide
  Sense strand starting at position 2913 of SEQ ID NO: 2747
agugcuguaagucaugaga

SEQ ID NO: 213287 - RNA, 19 nt, Artificial Sequence
  Description of Artificial Sequence: Synthetic oligonucleotide
  Antisense strand to SEQ ID NO: 213286
ucucaugacuuacagcacu

SEQ ID NO: 213288 - RNA, 19 nt, Artificial Sequence
  Description of Artificial Sequence: Synthetic oligonucleotide
  Sense strand starting at position 2916 of SEQ ID NO: 2747
gcuguaagucaugagacaa

SEQ ID NO: 213289 - RNA, 19 nt, Artificial Sequence
  Description of Artificial Sequence: Synthetic oligonucleotide
  Antisense strand to SEQ ID NO: 213288
uugucucaugacuuacagc

SEQ ID NO: 213290 - RNA, 19 nt, Artificial Sequence
  Description of Artificial Sequence: Synthetic oligonucleotide
  Sense strand starting at position 3569 of SEQ ID NO: 2747
gguuacuacugguuaauug

SEQ ID NO: 213291 - RNA, 19 nt, Artificial Sequence
  Description of Artificial Sequence: Synthetic oligonucleotide
  Antisense strand to SEQ ID NO: 213290
caauuaaccaguaguaacc

SEQ ID NO: 213292 - RNA, 19 nt, Artificial Sequence
  Description of Artificial Sequence: Synthetic oligonucleotide
  Sense strand starting at position 3653 of SEQ ID NO: 2747
gagcuaaauuguuuguaua

SEQ ID NO: 213293 - RNA, 19 nt, Artificial Sequence
  Description of Artificial Sequence: Synthetic oligonucleotide
  Antisense strand to SEQ ID NO: 213292
uauacaaacaauuuagcuc

SEQ ID NO: 213294 - RNA, 19 nt, Artificial Sequence
  Description of Artificial Sequence: Synthetic oligonucleotide
  Sense strand starting at position 3681 of SEQ ID NO: 2747
agauguauauaagcuagau

SEQ ID NO: 213295 - RNA, 19 nt, Artificial Sequence
  Description of Artificial Sequence: Synthetic oligonucleotide
  Antisense strand to SEQ ID NO: 213294
aucuagcuuauauacaucu

SEQ ID NO: 213296 - RNA, 19 nt, Artificial Sequence
  Description of Artificial Sequence: Synthetic oligonucleotide
  Sense strand starting at position 3685 of SEQ ID NO: 2747
guauauaagcuagaugauu

SEQ ID NO: 213297 - RNA, 19 nt, Artificial Sequence
  Description of Artificial Sequence: Synthetic oligonucleotide
  Antisense strand to SEQ ID NO: 213296
aaucaucuagcuuauauac

SEQ ID NO: 213298 - RNA, 19 nt, Artificial Sequence
  Description of Artificial Sequence: Synthetic oligonucleotide
  Sense strand starting at position 3690 of SEQ ID NO: 2747
uaagcuagaugauuguauu

SEQ ID NO: 213299 - RNA, 19 nt, Artificial Sequence
  Description of Artificial Sequence: Synthetic oligonucleotide
  Antisense strand to SEQ ID NO: 213298
aauacaaucaucuagcuua

SEQ ID NO: 213300 - RNA, 19 nt, Artificial Sequence
  Description of Artificial Sequence: Synthetic oligonucleotide
  Sense strand starting at position 3846 of SEQ ID NO: 2747
aguggacauuuccaaacau

SEQ ID NO: 213301 - RNA, 19 nt, Artificial Sequence
  Description of Artificial Sequence: Synthetic oligonucleotide
  Antisense strand to SEQ ID NO: 213300
auguuuggaaauguccacu

SEQ ID NO: 213302 - RNA, 19 nt, Artificial Sequence
  Description of Artificial Sequence: Synthetic oligonucleotide
  Sense strand starting at position 3874 of SEQ ID NO: 2747
cugguagaaugagccaaua

SEQ ID NO: 213303 - RNA, 19 nt, Artificial Sequence
  Description of Artificial Sequence: Synthetic oligonucleotide
  Antisense strand to SEQ ID NO: 213302
uauuggcucauucuaccag

SEQ ID NO: 213304 - RNA, 19 nt, Artificial Sequence
  Description of Artificial Sequence: Synthetic oligonucleotide
  Sense strand starting at position 440 of SEQ ID NO: 2748
cugcuuguuagggauguga

SEQ ID NO: 213305 - RNA, 19 nt, Artificial Sequence
  Description of Artificial Sequence: Synthetic oligonucleotide
  Antisense strand to SEQ ID NO: 213304
ucacaucccuaacaagcag

SEQ ID NO: 213306 - RNA, 19 nt, Artificial Sequence
  Description of Artificial Sequence: Synthetic oligonucleotide
  Sense strand starting at position 444 of SEQ ID NO: 2748
uuguuagggaugugaaaca

SEQ ID NO: 213307 - RNA, 19 nt, Artificial Sequence
  Description of Artificial Sequence: Synthetic oligonucleotide
  Antisense strand to SEQ ID NO: 213306
uguuucacaucccuaacaa

SEQ ID NO: 213308 - RNA, 19 nt, Artificial Sequence
  Description of Artificial Sequence: Synthetic oligonucleotide
  Sense strand starting at position 540 of SEQ ID NO: 2748
accugacagugauuaagca

SEQ ID NO: 213309 - RNA, 19 nt, Artificial Sequence
  Description of Artificial Sequence: Synthetic oligonucleotide
  Antisense strand to SEQ ID NO: 213308
ugcuuaaucacugucaggu

SEQ ID NO: 213310 - RNA, 19 nt, Artificial Sequence
  Description of Artificial Sequence: Synthetic oligonucleotide
  Sense strand starting at position 665 of SEQ ID NO: 2748
uuaucuuggcuugggauau

SEQ ID NO: 213311 - RNA, 19 nt, Artificial Sequence
  Description of Artificial Sequence: Synthetic oligonucleotide
  Antisense strand to SEQ ID NO: 213310
auaucccaagccaagauaa

SEQ ID NO: 213312 - RNA, 19 nt, Artificial Sequence
  Description of Artificial Sequence: Synthetic oligonucleotide
  Sense strand starting at position 703 of SEQ ID NO: 2748
aucacaguucucuagaucu

SEQ ID NO: 213313 - RNA, 19 nt, Artificial Sequence
  Description of Artificial Sequence: Synthetic oligonucleotide
  Antisense strand to SEQ ID NO: 213312
agaucuagagaacugugau

SEQ ID NO: 213314 - RNA, 19 nt, Artificial Sequence
  Description of Artificial Sequence: Synthetic oligonucleotide
  Sense strand starting at position 711 of SEQ ID NO: 2748
ucucuagaucugcagcaaa

SEQ ID NO: 213315 - RNA, 19 nt, Artificial Sequence
  Description of Artificial Sequence: Synthetic oligonucleotide
  Antisense strand to SEQ ID NO: 213314
uuugcugcagaucuagaga

SEQ ID NO: 213316 - RNA, 19 nt, Artificial Sequence
  Description of Artificial Sequence: Synthetic oligonucleotide
  Sense strand starting at position 795 of SEQ ID NO: 2748
aggaacugucucuagcuuu

SEQ ID NO: 213317 - RNA, 19 nt, Artificial Sequence
  Description of Artificial Sequence: Synthetic oligonucleotide
  Antisense strand to SEQ ID NO: 213316
aaagcuagagacaguuccu

SEQ ID NO: 213318 - RNA, 19 nt, Artificial Sequence
  Description of Artificial Sequence: Synthetic oligonucleotide
  Sense strand starting at position 828 of SEQ ID NO: 2748
gcaucaucauuugaagaua

SEQ ID NO: 213319 - RNA, 19 nt, Artificial Sequence
  Description of Artificial Sequence: Synthetic oligonucleotide
  Antisense strand to SEQ ID NO: 213318
uaucuucaaaugaugaugc

SEQ ID NO: 213320 - RNA, 19 nt, Artificial Sequence
  Description of Artificial Sequence: Synthetic oligonucleotide
  Sense strand starting at position 1118 of SEQ ID NO: 2748
auguuucucucuuugauag

SEQ ID NO: 213321 - RNA, 19 nt, Artificial Sequence
  Description of Artificial Sequence: Synthetic oligonucleotide
  Antisense strand to SEQ ID NO: 213320
cuaucaaagagagaaacau

SEQ ID NO: 213322 - RNA, 19 nt, Artificial Sequence
  Description of Artificial Sequence: Synthetic oligonucleotide
  Sense strand starting at position 1238 of SEQ ID NO: 2748
ccaaauugaugaucuguaa

SEQ ID NO: 213323 - RNA, 19 nt, Artificial Sequence
  Description of Artificial Sequence: Synthetic oligonucleotide
  Antisense strand to SEQ ID NO: 213322
uuacagaucaucaauuugg

SEQ ID NO: 213324 - RNA, 19 nt, Artificial Sequence
  Description of Artificial Sequence: Synthetic oligonucleotide
  Sense strand starting at position 1308 of SEQ ID NO: 2748
aguugaaaguaucuuuaga

SEQ ID NO: 213325 - RNA, 19 nt, Artificial Sequence
  Description of Artificial Sequence: Synthetic oligonucleotide
  Antisense strand to SEQ ID NO: 213324
ucuaaagauacuuucaacu

SEQ ID NO: 213326 - RNA, 19 nt, Artificial Sequence
  Description of Artificial Sequence: Synthetic oligonucleotide
  Sense strand starting at position 1310 of SEQ ID NO: 2748
uugaaaguaucuuuagaag

SEQ ID NO: 213327 - RNA, 19 nt, Artificial Sequence
  Description of Artificial Sequence: Synthetic oligonucleotide
  Antisense strand to SEQ ID NO: 213326
cuucuaaagauacuuucaa

SEQ ID NO: 213328 - RNA, 19 nt, Artificial Sequence
  Description of Artificial Sequence: Synthetic oligonucleotide
  Sense strand starting at position 1451 of SEQ ID NO: 2748
uuugcuauggcuuagaaag

SEQ ID NO: 213329 - RNA, 19 nt, Artificial Sequence
  Description of Artificial Sequence: Synthetic oligonucleotide
  Antisense strand to SEQ ID NO: 213328
cuuucuaagccauagcaaa

SEQ ID NO: 213330 - RNA, 19 nt, Artificial Sequence
  Description of Artificial Sequence: Synthetic oligonucleotide
  Sense strand starting at position 1511 of SEQ ID NO: 2748
gcucaugcacuacgauuua

SEQ ID NO: 213331 - RNA, 19 nt, Artificial Sequence
  Description of Artificial Sequence: Synthetic oligonucleotide
  Antisense strand to SEQ ID NO: 213330
uaaaucguagugcaugagc

SEQ ID NO: 213332 - RNA, 19 nt, Artificial Sequence
  Description of Artificial Sequence: Synthetic oligonucleotide
  Sense strand starting at position 1549 of SEQ ID NO: 2748
ccuucuuggcucuaagauc

SEQ ID NO: 213333 - RNA, 19 nt, Artificial Sequence
  Description of Artificial Sequence: Synthetic oligonucleotide
  Antisense strand to SEQ ID NO: 213332
gaucuuagagccaagaagg

SEQ ID NO: 213334 - RNA, 19 nt, Artificial Sequence
  Description of Artificial Sequence: Synthetic oligonucleotide
  Sense strand starting at position 1628 of SEQ ID NO: 2748
cuucucuuagugcauugaa

SEQ ID NO: 213335 - RNA, 19 nt, Artificial Sequence
  Description of Artificial Sequence: Synthetic oligonucleotide
  Antisense strand to SEQ ID NO: 213334
uucaaugcacuaagagaag

SEQ ID NO: 213336 - RNA, 19 nt, Artificial Sequence
  Description of Artificial Sequence: Synthetic oligonucleotide
  Sense strand starting at position 1648 of SEQ ID NO: 2748
aucaguuuccaggaaagcu

SEQ ID NO: 213337 - RNA, 19 nt, Artificial Sequence
  Description of Artificial Sequence: Synthetic oligonucleotide
  Antisense strand to SEQ ID NO: 213336
agcuuuccuggaaacugau

SEQ ID NO: 213338 - RNA, 19 nt, Artificial Sequence
  Description of Artificial Sequence: Synthetic oligonucleotide
  Sense strand starting at position 1778 of SEQ ID NO: 2748
acgggaugguaucuugagu

SEQ ID NO: 213339 - RNA, 19 nt, Artificial Sequence
  Description of Artificial Sequence: Synthetic oligonucleotide
  Antisense strand to SEQ ID NO: 213338
acucaagauaccaucccgu

SEQ ID NO: 213340 - RNA, 19 nt, Artificial Sequence
  Description of Artificial Sequence: Synthetic oligonucleotide
  Sense strand starting at position 1945 of SEQ ID NO: 2748
gugaccaaucccugaugua

SEQ ID NO: 213341 - RNA, 19 nt, Artificial Sequence
  Description of Artificial Sequence: Synthetic oligonucleotide
  Antisense strand to SEQ ID NO: 213340
uacaucagggauuggucac

SEQ ID NO: 213342 - RNA, 19 nt, Artificial Sequence
  Description of Artificial Sequence: Synthetic oligonucleotide
  Sense strand starting at position 2069 of SEQ ID NO: 2748
acuacuuguacugggagau

SEQ ID NO: 213343 - RNA, 19 nt, Artificial Sequence
  Description of Artificial Sequence: Synthetic oligonucleotide
  Antisense strand to SEQ ID NO: 213342
aucucccaguacaaguagu

SEQ ID NO: 213344 - RNA, 19 nt, Artificial Sequence
  Description of Artificial Sequence: Synthetic oligonucleotide
  Sense strand starting at position 2070 of SEQ ID NO: 2748
cuacuuguacugggagaug

SEQ ID NO: 213345 - RNA, 19 nt, Artificial Sequence
  Description of Artificial Sequence: Synthetic oligonucleotide
  Antisense strand to SEQ ID NO: 213344
caucucccaguacaaguag

SEQ ID NO: 213346 - RNA, 19 nt, Artificial Sequence
  Description of Artificial Sequence: Synthetic oligonucleotide
  Sense strand starting at position 2295 of SEQ ID NO: 2748
uaggguaggcacuauuauu

SEQ ID NO: 213347 - RNA, 19 nt, Artificial Sequence
  Description of Artificial Sequence: Synthetic oligonucleotide
  Antisense strand to SEQ ID NO: 213346
aauaauagugccuacccua

SEQ ID NO: 213348 - RNA, 19 nt, Artificial Sequence
  Description of Artificial Sequence: Synthetic oligonucleotide
  Sense strand starting at position 2346 of SEQ ID NO: 2748
uagagaguuuaaguccuuu

SEQ ID NO: 213349 - RNA, 19 nt, Artificial Sequence
  Description of Artificial Sequence: Synthetic oligonucleotide
  Antisense strand to SEQ ID NO: 213348
aaaggacuuaaacucucua

SEQ ID NO: 213350 - RNA, 19 nt, Artificial Sequence
  Description of Artificial Sequence: Synthetic oligonucleotide
  Sense strand starting at position 2366 of SEQ ID NO: 2748
gcaguuagaucucugagaa

SEQ ID NO: 213351 - RNA, 19 nt, Artificial Sequence
  Description of Artificial Sequence: Synthetic oligonucleotide
  Antisense strand to SEQ ID NO: 213350
uucucagagaucuaacugc

SEQ ID NO: 213352 - RNA, 19 nt, Artificial Sequence
  Description of Artificial Sequence: Synthetic oligonucleotide
  Sense strand starting at position 2367 of SEQ ID NO: 2748
caguuagaucucugagaaa

SEQ ID NO: 213353 - RNA, 19 nt, Artificial Sequence
  Description of Artificial Sequence: Synthetic oligonucleotide
  Antisense strand to SEQ ID NO: 213352
uuucucagagaucuaacug

SEQ ID NO: 213354 - RNA, 19 nt, Artificial Sequence
  Description of Artificial Sequence: Synthetic oligonucleotide
  Sense strand starting at position 2386 of SEQ ID NO: 2748
caugaauggcaccgauaug

SEQ ID NO: 213355 - RNA, 19 nt, Artificial Sequence
  Description of Artificial Sequence: Synthetic oligonucleotide
  Antisense strand to SEQ ID NO: 213354
cauaucggugccauucaug

SEQ ID NO: 213356 - RNA, 19 nt, Artificial Sequence
  Description of Artificial Sequence: Synthetic oligonucleotide
  Sense strand starting at position 2627 of SEQ ID NO: 2748
gcaaauuguucugugauuu

SEQ ID NO: 213357 - RNA, 19 nt, Artificial Sequence
  Description of Artificial Sequence: Synthetic oligonucleotide
  Antisense strand to SEQ ID NO: 213356
aaaucacagaacaauuugc

SEQ ID NO: 213358 - RNA, 19 nt, Artificial Sequence
  Description of Artificial Sequence: Synthetic oligonucleotide
  Sense strand starting at position 2690 of SEQ ID NO: 2748
cugaaauagucuuuaaugg

SEQ ID NO: 213359 - RNA, 19 nt, Artificial Sequence
  Description of Artificial Sequence: Synthetic oligonucleotide
  Antisense strand to SEQ ID NO: 213358
ccauuaaagacuauuucag

SEQ ID NO: 213360 - RNA, 19 nt, Artificial Sequence
  Description of Artificial Sequence: Synthetic oligonucleotide
  Sense strand starting at position 2691 of SEQ ID NO: 2748
ugaaauagucuuuaauggu

SEQ ID NO: 213361 - RNA, 19 nt, Artificial Sequence
  Description of Artificial Sequence: Synthetic oligonucleotide
  Antisense strand to SEQ ID NO: 213360
accauuaaagacuauuuca

SEQ ID NO: 213362 - RNA, 19 nt, Artificial Sequence
  Description of Artificial Sequence: Synthetic oligonucleotide
  Sense strand starting at position 2731 of SEQ ID NO: 2748
acgugugagguuuauuaaa

SEQ ID NO: 213363 - RNA, 19 nt, Artificial Sequence
  Description of Artificial Sequence: Synthetic oligonucleotide
  Antisense strand to SEQ ID NO: 213362
uuuaauaaaccucacacgu

SEQ ID NO: 213364 - RNA, 19 nt, Artificial Sequence
  Description of Artificial Sequence: Synthetic oligonucleotide
  Sense strand starting at position 2733 of SEQ ID NO: 2748
gugugagguuuauuaaaga

SEQ ID NO: 213365 - RNA, 19 nt, Artificial Sequence
  Description of Artificial Sequence: Synthetic oligonucleotide
  Antisense strand to SEQ ID NO: 213364
ucuuuaauaaaccucacac

SEQ ID NO: 213366 - RNA, 19 nt, Artificial Sequence
  Description of Artificial Sequence: Synthetic oligonucleotide
  Sense strand starting at position 2743 of SEQ ID NO: 2748
uauuaaagaggcuguuaaa

SEQ ID NO: 213367 - RNA, 19 nt, Artificial Sequence
  Description of Artificial Sequence: Synthetic oligonucleotide
  Antisense strand to SEQ ID NO: 213366
uuuaacagccucuuuaaua

SEQ ID NO: 213368 - RNA, 19 nt, Artificial Sequence
  Description of Artificial Sequence: Synthetic oligonucleotide
  Sense strand starting at position 2912 of SEQ ID NO: 2748
agugcuguaagucaugaga

SEQ ID NO: 213369 - RNA, 19 nt, Artificial Sequence
  Description of Artificial Sequence: Synthetic oligonucleotide
  Antisense strand to SEQ ID NO: 213368
ucucaugacuuacagcacu

SEQ ID NO: 213370 - RNA, 19 nt, Artificial Sequence
  Description of Artificial Sequence: Synthetic oligonucleotide
  Sense strand starting at position 2915 of SEQ ID NO: 2748
gcuguaagucaugagacaa

SEQ ID NO: 213371 - RNA, 19 nt, Artificial Sequence
  Description of Artificial Sequence: Synthetic oligonucleotide
  Antisense strand to SEQ ID NO: 213370
uugucucaugacuuacagc

SEQ ID NO: 213372 - RNA, 19 nt, Artificial Sequence
  Description of Artificial Sequence: Synthetic oligonucleotide
  Sense strand starting at position 3568 of SEQ ID NO: 2748
gguuacuacugguuaauug

SEQ ID NO: 213373 - RNA, 19 nt, Artificial Sequence
  Description of Artificial Sequence: Synthetic oligonucleotide
  Antisense strand to SEQ ID NO: 213372
caauuaaccaguaguaacc

SEQ ID NO: 213374 - RNA, 19 nt, Artificial Sequence
  Description of Artificial Sequence: Synthetic oligonucleotide
  Sense strand starting at position 3680 of SEQ ID NO: 2748
agauguauauaagcuagau

SEQ ID NO: 213375 - RNA, 19 nt, Artificial Sequence
  Description of Artificial Sequence: Synthetic oligonucleotide
  Antisense strand to SEQ ID NO: 213374
aucuagcuuauauacaucu

SEQ ID NO: 213376 - RNA, 19 nt, Artificial Sequence
  Description of Artificial Sequence: Synthetic oligonucleotide
  Sense strand starting at position 3684 of SEQ ID NO: 2748
guauauaagcuagaugauu

SEQ ID NO: 213377 - RNA, 19 nt, Artificial Sequence
  Description of Artificial Sequence: Synthetic oligonucleotide
  Antisense strand to SEQ ID NO: 213376
aaucaucuagcuuauauac

SEQ ID NO: 213378 - RNA, 19 nt, Artificial Sequence
  Description of Artificial Sequence: Synthetic oligonucleotide
  Sense strand starting at position 3689 of SEQ ID NO: 2748
uaagcuagaugauuguauu

SEQ ID NO: 213379 - RNA, 19 nt, Artificial Sequence
  Description of Artificial Sequence: Synthetic oligonucleotide
  Antisense strand to SEQ ID NO: 213378
aauacaaucaucuagcuua

SEQ ID NO: 213380 - RNA, 19 nt, Artificial Sequence
  Description of Artificial Sequence: Synthetic oligonucleotide
  Sense strand starting at position 3845 of SEQ ID NO: 2748
aguggacauuuccaaacau

SEQ ID NO: 213381 - RNA, 19 nt, Artificial Sequence
  Description of Artificial Sequence: Synthetic oligonucleotide
  Antisense strand to SEQ ID NO: 213380
auguuuggaaauguccacu

SEQ ID NO: 213382 - RNA, 19 nt, Artificial Sequence
  Description of Artificial Sequence: Synthetic oligonucleotide
  Sense strand starting at position 3873 of SEQ ID NO: 2748
cugguagaaugagccaaua

SEQ ID NO: 213383 - RNA, 19 nt, Artificial Sequence
  Description of Artificial Sequence: Synthetic oligonucleotide
  Antisense strand to SEQ ID NO: 213382
uauuggcucauucuaccag

SEQ ID NO: 213384 - RNA, 19 nt, Artificial Sequence
  Description of Artificial Sequence: Synthetic oligonucleotide
  Sense strand starting at position 82 of SEQ ID NO: 2750
uguuuagaucuuggaguug

SEQ ID NO: 213385 - RNA, 19 nt, Artificial Sequence
  Description of Artificial Sequence: Synthetic oligonucleotide
  Antisense strand to SEQ ID NO: 213384
caacuccaagaucuaaaca

SEQ ID NO: 213386 - RNA, 19 nt, Artificial Sequence
  Description of Artificial Sequence: Synthetic oligonucleotide
  Sense strand starting at position 494 of SEQ ID NO: 2750
ccguuccucuuaucggaaa

SEQ ID NO: 213387 - RNA, 19 nt, Artificial Sequence
  Description of Artificial Sequence: Synthetic oligonucleotide
  Antisense strand to SEQ ID NO: 213386
uuuccgauaagaggaacgg

SEQ ID NO: 213388 - RNA, 19 nt, Artificial Sequence
  Description of Artificial Sequence: Synthetic oligonucleotide
  Sense strand starting at position 497 of SEQ ID NO: 2750
uuccucuuaucggaaaucu

SEQ ID NO: 213389 - RNA, 19 nt, Artificial Sequence
  Description of Artificial Sequence: Synthetic oligonucleotide
  Antisense strand to SEQ ID NO: 213388
agauuuccgauaagaggaa

SEQ ID NO: 213390 - RNA, 19 nt, Artificial Sequence
  Description of Artificial Sequence: Synthetic oligonucleotide
  Sense strand starting at position 544 of SEQ ID NO: 2750
gcccgcugucuguuguaga

SEQ ID NO: 213391 - RNA, 19 nt, Artificial Sequence
  Description of Artificial Sequence: Synthetic oligonucleotide
  Antisense strand to SEQ ID NO: 213390
ucuacaacagacagcgggc

SEQ ID NO: 213392 - RNA, 19 nt, Artificial Sequence
  Description of Artificial Sequence: Synthetic oligonucleotide
  Sense strand starting at position 549 of SEQ ID NO: 2750
cugucuguuguagauuauc

SEQ ID NO: 213393 - RNA, 19 nt, Artificial Sequence
  Description of Artificial Sequence: Synthetic oligonucleotide
  Antisense strand to SEQ ID NO: 213392
gauaaucuacaacagacag

SEQ ID NO: 213394 - RNA, 19 nt, Artificial Sequence
  Description of Artificial Sequence: Synthetic oligonucleotide
  Sense strand starting at position 593 of SEQ ID NO: 2750
uuacuuaugcuauacgcua

SEQ ID NO: 213395 - RNA, 19 nt, Artificial Sequence
  Description of Artificial Sequence: Synthetic oligonucleotide
  Antisense strand to SEQ ID NO: 213394
uagcguauagcauaaguaa

SEQ ID NO: 213396 - RNA, 19 nt, Artificial Sequence
  Description of Artificial Sequence: Synthetic oligonucleotide
  Sense strand starting at position 760 of SEQ ID NO: 2750
cugcgugccacuguuaaua

SEQ ID NO: 213397 - RNA, 19 nt, Artificial Sequence
  Description of Artificial Sequence: Synthetic oligonucleotide
  Antisense strand to SEQ ID NO: 213396
uauuaacaguggcacgcag

SEQ ID NO: 213398 - RNA, 19 nt, Artificial Sequence
  Description of Artificial Sequence: Synthetic oligonucleotide
  Sense strand starting at position 949 of SEQ ID NO: 2750
gcaagcuuuccuugcacuu

SEQ ID NO: 213399 - RNA, 19 nt, Artificial Sequence
  Description of Artificial Sequence: Synthetic oligonucleotide
  Antisense strand to SEQ ID NO: 213398
aagugcaaggaaagcuugc

SEQ ID NO: 213400 - RNA, 19 nt, Artificial Sequence
  Description of Artificial Sequence: Synthetic oligonucleotide
  Sense strand starting at position 979 of SEQ ID NO: 2750
acauuaaacugcucuggaa

SEQ ID NO: 213401 - RNA, 19 nt, Artificial Sequence
  Description of Artificial Sequence: Synthetic oligonucleotide
  Antisense strand to SEQ ID NO: 213400
uuccagagcaguuuaaugu

SEQ ID NO: 213402 - RNA, 19 nt, Artificial Sequence
  Description of Artificial Sequence: Synthetic oligonucleotide
  Sense strand starting at position 1070 of SEQ ID NO: 2750
auacacaauuguugggaaa

SEQ ID NO: 213403 - RNA, 19 nt, Artificial Sequence
  Description of Artificial Sequence: Synthetic oligonucleotide
  Antisense strand to SEQ ID NO: 213402
uuucccaacaauuguguau

SEQ ID NO: 213404 - RNA, 19 nt, Artificial Sequence
  Description of Artificial Sequence: Synthetic oligonucleotide
  Sense strand starting at position 1072 of SEQ ID NO: 2750
acacaauuguugggaaagu

SEQ ID NO: 213405 - RNA, 19 nt, Artificial Sequence
  Description of Artificial Sequence: Synthetic oligonucleotide
  Antisense strand to SEQ ID NO: 213404
acuuucccaacaauugugu

SEQ ID NO: 213406 - RNA, 19 nt, Artificial Sequence
  Description of Artificial Sequence: Synthetic oligonucleotide
  Sense strand starting at position 1099 of SEQ ID NO: 2750
ccaacaacuuucgaaagga

SEQ ID NO: 213407 - RNA, 19 nt, Artificial Sequence
  Description of Artificial Sequence: Synthetic oligonucleotide
  Antisense strand to SEQ ID NO: 213406
uccuuucgaaaguuguugg

SEQ ID NO: 213408 - RNA, 19 nt, Artificial Sequence
  Description of Artificial Sequence: Synthetic oligonucleotide
  Sense strand starting at position 1348 of SEQ ID NO: 2750
ggcggaguugcggguagaa

SEQ ID NO: 213409 - RNA, 19 nt, Artificial Sequence
  Description of Artificial Sequence: Synthetic oligonucleotide
  Antisense strand to SEQ ID NO: 213408
uucuacccgcaacuccgcc

SEQ ID NO: 213410 - RNA, 19 nt, Artificial Sequence
  Description of Artificial Sequence: Synthetic oligonucleotide
  Sense strand starting at position 1424 of SEQ ID NO: 2750
gcgguaaacaaccgagaua

SEQ ID NO: 213411 - RNA, 19 nt, Artificial Sequence
  Description of Artificial Sequence: Synthetic oligonucleotide
  Antisense strand to SEQ ID NO: 213410
uaucucgguuguuuaccgc

SEQ ID NO: 213412 - RNA, 19 nt, Artificial Sequence
  Description of Artificial Sequence: Synthetic oligonucleotide
  Sense strand starting at position 1984 of SEQ ID NO: 2750
gcuugugugacugaguaug

SEQ ID NO: 213413 - RNA, 19 nt, Artificial Sequence
  Description of Artificial Sequence: Synthetic oligonucleotide
  Antisense strand to SEQ ID NO: 213412
cauacucagucacacaagc

SEQ ID NO: 213414 - RNA, 19 nt, Artificial Sequence
  Description of Artificial Sequence: Synthetic oligonucleotide
  Sense strand starting at position 2014 of SEQ ID NO: 2750
gguggaugucgacacaagu

SEQ ID NO: 213415 - RNA, 19 nt, Artificial Sequence
  Description of Artificial Sequence: Synthetic oligonucleotide
  Antisense strand to SEQ ID NO: 213414
acuugugucgacauccacc

SEQ ID NO: 213416 - RNA, 19 nt, Artificial Sequence
  Description of Artificial Sequence: Synthetic oligonucleotide
  Sense strand starting at position 2025 of SEQ ID NO: 2750
acacaaguuccacgcguua

SEQ ID NO: 213417 - RNA, 19 nt, Artificial Sequence
  Description of Artificial Sequence: Synthetic oligonucleotide
  Antisense strand to SEQ ID NO: 213416
uaacgcguggaacuugugu

SEQ ID NO: 213418 - RNA, 19 nt, Artificial Sequence
  Description of Artificial Sequence: Synthetic oligonucleotide
  Sense strand starting at position 2031 of SEQ ID NO: 2750
guuccacgcguuaggagua

SEQ ID NO: 213419 - RNA, 19 nt, Artificial Sequence
  Description of Artificial Sequence: Synthetic oligonucleotide
  Antisense strand to SEQ ID NO: 213418
uacuccuaacgcguggaac

SEQ ID NO: 213420 - RNA, 19 nt, Artificial Sequence
  Description of Artificial Sequence: Synthetic oligonucleotide
  Sense strand starting at position 2043 of SEQ ID NO: 2750
aggaguaaacacugcgagu

SEQ ID NO: 213421 - RNA, 19 nt, Artificial Sequence
  Description of Artificial Sequence: Synthetic oligonucleotide
  Antisense strand to SEQ ID NO: 213420
acucgcaguguuuacuccu

SEQ ID NO: 213422 - RNA, 19 nt, Artificial Sequence
  Description of Artificial Sequence: Synthetic oligonucleotide
  Sense strand starting at position 2273 of SEQ ID NO: 2750
cacuguuggccagaauggu

SEQ ID NO: 213423 - RNA, 19 nt, Artificial Sequence
  Description of Artificial Sequence: Synthetic oligonucleotide
  Antisense strand to SEQ ID NO: 213422
accauucuggccaacagug

SEQ ID NO: 213424 - RNA, 19 nt, Artificial Sequence
  Description of Artificial Sequence: Synthetic oligonucleotide
  Sense strand starting at position 2370 of SEQ ID NO: 2750
gcgcgaguguuuacaauug

SEQ ID NO: 213425 - RNA, 19 nt, Artificial Sequence
  Description of Artificial Sequence: Synthetic oligonucleotide
  Antisense strand to SEQ ID NO: 213424
caauuguaaacacucgcgc

SEQ ID NO: 213426 - RNA, 19 nt, Artificial Sequence
  Description of Artificial Sequence: Synthetic oligonucleotide
  Sense strand starting at position 2380 of SEQ ID NO: 2750
uuacaauuguugucuggga

SEQ ID NO: 213427 - RNA, 19 nt, Artificial Sequence
  Description of Artificial Sequence: Synthetic oligonucleotide
  Antisense strand to SEQ ID NO: 213426
ucccagacaacaauuguaa

SEQ ID NO: 213428 - RNA, 19 nt, Artificial Sequence
  Description of Artificial Sequence: Synthetic oligonucleotide
  Sense strand starting at position 2382 of SEQ ID NO: 2750
acaauuguugucugggagu

SEQ ID NO: 213429 - RNA, 19 nt, Artificial Sequence
  Description of Artificial Sequence: Synthetic oligonucleotide
  Antisense strand to SEQ ID NO: 213428
acucccagacaacaauugu

SEQ ID NO: 213430 - RNA, 19 nt, Artificial Sequence
  Description of Artificial Sequence: Synthetic oligonucleotide
  Sense strand starting at position 2384 of SEQ ID NO: 2750
aauuguugucugggaguca

SEQ ID NO: 213431 - RNA, 19 nt, Artificial Sequence
  Description of Artificial Sequence: Synthetic oligonucleotide
  Antisense strand to SEQ ID NO: 213430
ugacucccagacaacaauu

SEQ ID NO: 213432 - RNA, 19 nt, Artificial Sequence
  Description of Artificial Sequence: Synthetic oligonucleotide
  Sense strand starting at position 2789 of SEQ ID NO: 2750
cuacuuuauugugauucuu

SEQ ID NO: 213433 - RNA, 19 nt, Artificial Sequence
  Description of Artificial Sequence: Synthetic oligonucleotide
  Antisense strand to SEQ ID NO: 213432
aagaaucacaauaaaguag

SEQ ID NO: 213434 - RNA, 19 nt, Artificial Sequence
  Description of Artificial Sequence: Synthetic oligonucleotide
  Sense strand starting at position 2795 of SEQ ID NO: 2750
uauugugauucuuaaagag

SEQ ID NO: 213435 - RNA, 19 nt, Artificial Sequence
  Description of Artificial Sequence: Synthetic oligonucleotide
  Antisense strand to SEQ ID NO: 213434
cucuuuaagaaucacaaua

SEQ ID NO: 213436 - RNA, 19 nt, Artificial Sequence
  Description of Artificial Sequence: Synthetic oligonucleotide
  Sense strand starting at position 2891 of SEQ ID NO: 2750
gcaugaagagcucgggauu

SEQ ID NO: 213437 - RNA, 19 nt, Artificial Sequence
  Description of Artificial Sequence: Synthetic oligonucleotide
  Antisense strand to SEQ ID NO: 213436
aaucccgagcucuucaugc

SEQ ID NO: 213438 - RNA, 19 nt, Artificial Sequence
  Description of Artificial Sequence: Synthetic oligonucleotide
  Sense strand starting at position 3051 of SEQ ID NO: 2750
gagagucagucugugguau

SEQ ID NO: 213439 - RNA, 19 nt, Artificial Sequence
  Description of Artificial Sequence: Synthetic oligonucleotide
  Antisense strand to SEQ ID NO: 213438
auaccacagacugacucuc

SEQ ID NO: 213440 - RNA, 19 nt, Artificial Sequence
  Description of Artificial Sequence: Synthetic oligonucleotide
  Sense strand starting at position 3052 of SEQ ID NO: 2750
agagucagucugugguauu

SEQ ID NO: 213441 - RNA, 19 nt, Artificial Sequence
  Description of Artificial Sequence: Synthetic oligonucleotide
  Antisense strand to SEQ ID NO: 213440
aauaccacagacugacucu

SEQ ID NO: 213442 - RNA, 19 nt, Artificial Sequence
  Description of Artificial Sequence: Synthetic oligonucleotide
  Sense strand starting at position 3053 of SEQ ID NO: 2750
gagucagucugugguauuu

SEQ ID NO: 213443 - RNA, 19 nt, Artificial Sequence
  Description of Artificial Sequence: Synthetic oligonucleotide
  Antisense strand to SEQ ID NO: 213442
aaauaccacagacugacuc

SEQ ID NO: 213444 - RNA, 19 nt, Artificial Sequence
  Description of Artificial Sequence: Synthetic oligonucleotide
  Sense strand starting at position 3055 of SEQ ID NO: 2750
gucagucugugguauuuaa

SEQ ID NO: 213445 - RNA, 19 nt, Artificial Sequence
  Description of Artificial Sequence: Synthetic oligonucleotide
  Antisense strand to SEQ ID NO: 213444
uuaaauaccacagacugac

SEQ ID NO: 213446 - RNA, 19 nt, Artificial Sequence
  Description of Artificial Sequence: Synthetic oligonucleotide
  Sense strand starting at position 3199 of SEQ ID NO: 2750
ccugaugcugaagguaaau

SEQ ID NO: 213447 - RNA, 19 nt, Artificial Sequence
  Description of Artificial Sequence: Synthetic oligonucleotide
  Antisense strand to SEQ ID NO: 213446
auuuaccuucagcaucagg

SEQ ID NO: 213448 - RNA, 19 nt, Artificial Sequence
  Description of Artificial Sequence: Synthetic oligonucleotide
  Sense strand starting at position 3243 of SEQ ID NO: 2750
ggagauuccuucuuccauc

SEQ ID NO: 213449 - RNA, 19 nt, Artificial Sequence
  Description of Artificial Sequence: Synthetic oligonucleotide
  Antisense strand to SEQ ID NO: 213448
gauggaagaaggaaucucc

SEQ ID NO: 213450 - RNA, 19 nt, Artificial Sequence
  Description of Artificial Sequence: Synthetic oligonucleotide
  Sense strand starting at position 3377 of SEQ ID NO: 2750
ccaagauaguuauauucug

SEQ ID NO: 213451 - RNA, 19 nt, Artificial Sequence
  Description of Artificial Sequence: Synthetic oligonucleotide
  Antisense strand to SEQ ID NO: 213450
cagaauauaacuaucuugg

SEQ ID NO: 213452 - RNA, 19 nt, Artificial Sequence
  Description of Artificial Sequence: Synthetic oligonucleotide
  Sense strand starting at position 3439 of SEQ ID NO: 2750
gguagucacagccaaguua

SEQ ID NO: 213453 - RNA, 19 nt, Artificial Sequence
  Description of Artificial Sequence: Synthetic oligonucleotide
  Antisense strand to SEQ ID NO: 213452
uaacuuggcugugacuacc

SEQ ID NO: 213454 - RNA, 19 nt, Artificial Sequence
  Description of Artificial Sequence: Synthetic oligonucleotide
  Sense strand starting at position 3510 of SEQ ID NO: 2750
ggaguuaauaauugucuug

SEQ ID NO: 213455 - RNA, 19 nt, Artificial Sequence
  Description of Artificial Sequence: Synthetic oligonucleotide
  Antisense strand to SEQ ID NO: 213454
caagacaauuauuaacucc

SEQ ID NO: 213456 - RNA, 19 nt, Artificial Sequence
  Description of Artificial Sequence: Synthetic oligonucleotide
  Sense strand starting at position 3555 of SEQ ID NO: 2750
auccuaaacucugucaguu

SEQ ID NO: 213457 - RNA, 19 nt, Artificial Sequence
  Description of Artificial Sequence: Synthetic oligonucleotide
  Antisense strand to SEQ ID NO: 213456
aacugacagaguuuaggau

SEQ ID NO: 213458 - RNA, 19 nt, Artificial Sequence
  Description of Artificial Sequence: Synthetic oligonucleotide
  Sense strand starting at position 3557 of SEQ ID NO: 2750
ccuaaacucugucaguuau

SEQ ID NO: 213459 - RNA, 19 nt, Artificial Sequence
  Description of Artificial Sequence: Synthetic oligonucleotide
  Antisense strand to SEQ ID NO: 213458
auaacugacagaguuuagg

SEQ ID NO: 213460 - RNA, 19 nt, Artificial Sequence
  Description of Artificial Sequence: Synthetic oligonucleotide
  Sense strand starting at position 3563 of SEQ ID NO: 2750
cucugucaguuauccaagu

SEQ ID NO: 213461 - RNA, 19 nt, Artificial Sequence
  Description of Artificial Sequence: Synthetic oligonucleotide
  Antisense strand to SEQ ID NO: 213460
acuuggauaacugacagag

SEQ ID NO: 213462 - RNA, 19 nt, Artificial Sequence
  Description of Artificial Sequence: Synthetic oligonucleotide
  Sense strand starting at position 3564 of SEQ ID NO: 2750
ucugucaguuauccaaguu

SEQ ID NO: 213463 - RNA, 19 nt, Artificial Sequence
  Description of Artificial Sequence: Synthetic oligonucleotide
  Antisense strand to SEQ ID NO: 213462
aacuuggauaacugacaga

SEQ ID NO: 213464 - RNA, 19 nt, Artificial Sequence
  Description of Artificial Sequence: Synthetic oligonucleotide
  Sense strand starting at position 13 of SEQ ID NO: 2749
uuaucaugaguaugcagau

SEQ ID NO: 213465 - RNA, 19 nt, Artificial Sequence
  Description of Artificial Sequence: Synthetic oligonucleotide
  Antisense strand to SEQ ID NO: 213464
aucugcauacucaugauaa

SEQ ID NO: 213466 - RNA, 19 nt, Artificial Sequence
  Description of Artificial Sequence: Synthetic oligonucleotide
  Sense strand starting at position 19 of SEQ ID NO: 2749
ugaguaugcagaugaaagu

SEQ ID NO: 213467 - RNA, 19 nt, Artificial Sequence
  Description of Artificial Sequence: Synthetic oligonucleotide
  Antisense strand to SEQ ID NO: 213466
acuuucaucugcauacuca

SEQ ID NO: 213468 - RNA, 19 nt, Artificial Sequence
  Description of Artificial Sequence: Synthetic oligonucleotide
  Sense strand starting at position 26 of SEQ ID NO: 2749
gcagaugaaagugguauca

SEQ ID NO: 213469 - RNA, 19 nt, Artificial Sequence
  Description of Artificial Sequence: Synthetic oligonucleotide
  Antisense strand to SEQ ID NO: 213468
ugauaccacuuucaucugc

SEQ ID NO: 213470 - RNA, 19 nt, Artificial Sequence
  Description of Artificial Sequence: Synthetic oligonucleotide
  Sense strand starting at position 127 of SEQ ID NO: 2749
guagaagauguuuaucuau

SEQ ID NO: 213471 - RNA, 19 nt, Artificial Sequence
  Description of Artificial Sequence: Synthetic oligonucleotide
  Antisense strand to SEQ ID NO: 213470
auagauaaacaucuucuac

SEQ ID NO: 213472 - RNA, 19 nt, Artificial Sequence
  Description of Artificial Sequence: Synthetic oligonucleotide
  Sense strand starting at position 411 of SEQ ID NO: 2749
augugagaugacugcuuga

SEQ ID NO: 213473 - RNA, 19 nt, Artificial Sequence
  Description of Artificial Sequence: Synthetic oligonucleotide
  Antisense strand to SEQ ID NO: 213472
ucaagcagucaucucacau

SEQ ID NO: 213474 - RNA, 19 nt, Artificial Sequence
  Description of Artificial Sequence: Synthetic oligonucleotide
  Sense strand starting at position 431 of SEQ ID NO: 2749
ccuagaguuagaggcugaa

SEQ ID NO: 213475 - RNA, 19 nt, Artificial Sequence
  Description of Artificial Sequence: Synthetic oligonucleotide
  Antisense strand to SEQ ID NO: 213474
uucagccucuaacucuagg

SEQ ID NO: 213476 - RNA, 19 nt, Artificial Sequence
  Description of Artificial Sequence: Synthetic oligonucleotide
  Sense strand starting at position 668 of SEQ ID NO: 2749
uguauuugagagcgcacau

SEQ ID NO: 213477 - RNA, 19 nt, Artificial Sequence
  Description of Artificial Sequence: Synthetic oligonucleotide
  Antisense strand to SEQ ID NO: 213476
augugcgcucucaaauaca

SEQ ID NO: 213478 - RNA, 19 nt, Artificial Sequence
  Description of Artificial Sequence: Synthetic oligonucleotide
  Sense strand starting at position 723 of SEQ ID NO: 2749
uuugguuaucucuacggaa

SEQ ID NO: 213479 - RNA, 19 nt, Artificial Sequence
  Description of Artificial Sequence: Synthetic oligonucleotide
  Antisense strand to SEQ ID NO: 213478
uuccguagagauaaccaaa

SEQ ID NO: 213480 - RNA, 19 nt, Artificial Sequence
  Description of Artificial Sequence: Synthetic oligonucleotide
  Sense strand starting at position 725 of SEQ ID NO: 2749
ugguuaucucuacggaaug

SEQ ID NO: 213481 - RNA, 19 nt, Artificial Sequence
  Description of Artificial Sequence: Synthetic oligonucleotide
  Antisense strand to SEQ ID NO: 213480
cauuccguagagauaacca

SEQ ID NO: 213482 - RNA, 19 nt, Artificial Sequence
  Description of Artificial Sequence: Synthetic oligonucleotide
  Sense strand starting at position 727 of SEQ ID NO: 2749
guuaucucuacggaaugaa

SEQ ID NO: 213483 - RNA, 19 nt, Artificial Sequence
  Description of Artificial Sequence: Synthetic oligonucleotide
  Antisense strand to SEQ ID NO: 213482
uucauuccguagagauaac

SEQ ID NO: 213484 - RNA, 19 nt, Artificial Sequence
  Description of Artificial Sequence: Synthetic oligonucleotide
  Sense strand starting at position 761 of SEQ ID NO: 2749
ucuauuuacuuugcaugua

SEQ ID NO: 213485 - RNA, 19 nt, Artificial Sequence
  Description of Artificial Sequence: Synthetic oligonucleotide
  Antisense strand to SEQ ID NO: 213484
uacaugcaaaguaaauaga

SEQ ID NO: 213486 - RNA, 19 nt, Artificial Sequence
  Description of Artificial Sequence: Synthetic oligonucleotide
  Sense strand starting at position 808 of SEQ ID NO: 2749
acugaagagugucugaaga

SEQ ID NO: 213487 - RNA, 19 nt, Artificial Sequence
  Description of Artificial Sequence: Synthetic oligonucleotide
  Antisense strand to SEQ ID NO: 213486
ucuucagacacucuucagu

SEQ ID NO: 213488 - RNA, 19 nt, Artificial Sequence
  Description of Artificial Sequence: Synthetic oligonucleotide
  Sense strand starting at position 841 of SEQ ID NO: 2749
acagaauguuagguacaau

SEQ ID NO: 213489 - RNA, 19 nt, Artificial Sequence
  Description of Artificial Sequence: Synthetic oligonucleotide
  Antisense strand to SEQ ID NO: 213488
auuguaccuaacauucugu

SEQ ID NO: 213490 - RNA, 19 nt, Artificial Sequence
  Description of Artificial Sequence: Synthetic oligonucleotide
  Sense strand starting at position 844 of SEQ ID NO: 2749
gaauguuagguacaauccu

SEQ ID NO: 213491 - RNA, 19 nt, Artificial Sequence
  Description of Artificial Sequence: Synthetic oligonucleotide
  Antisense strand to SEQ ID NO: 213490
aggauuguaccuaacauuc

SEQ ID NO: 213492 - RNA, 19 nt, Artificial Sequence
  Description of Artificial Sequence: Synthetic oligonucleotide
  Sense strand starting at position 880 of SEQ ID NO: 2749
agccgcugagcauaugaaa

SEQ ID NO: 213493 - RNA, 19 nt, Artificial Sequence
  Description of Artificial Sequence: Synthetic oligonucleotide
  Antisense strand to SEQ ID NO: 213492
uuucauaugcucagcggcu

SEQ ID NO: 213494 - RNA, 19 nt, Artificial Sequence
  Description of Artificial Sequence: Synthetic oligonucleotide
  Sense strand starting at position 1045 of SEQ ID NO: 2749
caaguuaccugggcauacu

SEQ ID NO: 213495 - RNA, 19 nt, Artificial Sequence
  Description of Artificial Sequence: Synthetic oligonucleotide
  Antisense strand to SEQ ID NO: 213494
aguaugcccagguaacuug

SEQ ID NO: 213496 - RNA, 19 nt, Artificial Sequence
  Description of Artificial Sequence: Synthetic oligonucleotide
  Sense strand starting at position 1048 of SEQ ID NO: 2749
guuaccugggcauacuaaa

SEQ ID NO: 213497 - RNA, 19 nt, Artificial Sequence
  Description of Artificial Sequence: Synthetic oligonucleotide
  Antisense strand to SEQ ID NO: 213496
uuuaguaugcccagguaac

SEQ ID NO: 213498 - RNA, 19 nt, Artificial Sequence
  Description of Artificial Sequence: Synthetic oligonucleotide
  Sense strand starting at position 1162 of SEQ ID NO: 2749
aguggaucuugucuaaacu

SEQ ID NO: 213499 - RNA, 19 nt, Artificial Sequence
  Description of Artificial Sequence: Synthetic oligonucleotide
  Antisense strand to SEQ ID NO: 213498
aguuuagacaagauccacu

SEQ ID NO: 213500 - RNA, 19 nt, Artificial Sequence
  Description of Artificial Sequence: Synthetic oligonucleotide
  Sense strand starting at position 1163 of SEQ ID NO: 2749
guggaucuugucuaaacug

SEQ ID NO: 213501 - RNA, 19 nt, Artificial Sequence
  Description of Artificial Sequence: Synthetic oligonucleotide
  Antisense strand to SEQ ID NO: 213500
caguuuagacaagauccac

SEQ ID NO: 213502 - RNA, 19 nt, Artificial Sequence
  Description of Artificial Sequence: Synthetic oligonucleotide
  Sense strand starting at position 1179 of SEQ ID NO: 2749
cugccuugacucgaaguua

SEQ ID NO: 213503 - RNA, 19 nt, Artificial Sequence
  Description of Artificial Sequence: Synthetic oligonucleotide
  Antisense strand to SEQ ID NO: 213502
uaacuucgagucaaggcag

SEQ ID NO: 213504 - RNA, 19 nt, Artificial Sequence
  Description of Artificial Sequence: Synthetic oligonucleotide
  Sense strand starting at position 1191 of SEQ ID NO: 2749
gaaguuaccuguguaggua

SEQ ID NO: 213505 - RNA, 19 nt, Artificial Sequence
  Description of Artificial Sequence: Synthetic oligonucleotide
  Antisense strand to SEQ ID NO: 213504
uaccuacacagguaacuuc

SEQ ID NO: 213506 - RNA, 19 nt, Artificial Sequence
  Description of Artificial Sequence: Synthetic oligonucleotide
  Sense strand starting at position 1192 of SEQ ID NO: 2749
aaguuaccuguguagguaa

SEQ ID NO: 213507 - RNA, 19 nt, Artificial Sequence
  Description of Artificial Sequence: Synthetic oligonucleotide
  Antisense strand to SEQ ID NO: 213506
uuaccuacacagguaacuu

SEQ ID NO: 213508 - RNA, 19 nt, Artificial Sequence
  Description of Artificial Sequence: Synthetic oligonucleotide
  Sense strand starting at position 1210 of SEQ ID NO: 2749
acugcugagucuuccucaa

SEQ ID NO: 213509 - RNA, 19 nt, Artificial Sequence
  Description of Artificial Sequence: Synthetic oligonucleotide
  Antisense strand to SEQ ID NO: 213508
uugaggaagacucagcagu

SEQ ID NO: 213510 - RNA, 19 nt, Artificial Sequence
  Description of Artificial Sequence: Synthetic oligonucleotide
  Sense strand starting at position 1318 of SEQ ID NO: 2749
caauaaauguugguaggau

SEQ ID NO: 213511 - RNA, 19 nt, Artificial Sequence
  Description of Artificial Sequence: Synthetic oligonucleotide
  Antisense strand to SEQ ID NO: 213510
auccuaccaacauuuauug

SEQ ID NO: 213512 - RNA, 19 nt, Artificial Sequence
  Description of Artificial Sequence: Synthetic oligonucleotide
  Sense strand starting at position 1359 of SEQ ID NO: 2749
ggcauuggaguccauaaac

SEQ ID NO: 213513 - RNA, 19 nt, Artificial Sequence
  Description of Artificial Sequence: Synthetic oligonucleotide
  Antisense strand to SEQ ID NO: 213512
guuuauggacuccaaugcc

SEQ ID NO: 213514 - RNA, 19 nt, Artificial Sequence
  Description of Artificial Sequence: Synthetic oligonucleotide
  Sense strand starting at position 1368 of SEQ ID NO: 2749
guccauaaacacgaguuua

SEQ ID NO: 213515 - RNA, 19 nt, Artificial Sequence
  Description of Artificial Sequence: Synthetic oligonucleotide
  Antisense strand to SEQ ID NO: 213514
uaaacucguguuuauggac

SEQ ID NO: 213516 - RNA, 19 nt, Artificial Sequence
  Description of Artificial Sequence: Synthetic oligonucleotide
  Sense strand starting at position 1489 of SEQ ID NO: 2749
uguugugaguccucuggag

SEQ ID NO: 213517 - RNA, 19 nt, Artificial Sequence
  Description of Artificial Sequence: Synthetic oligonucleotide
  Antisense strand to SEQ ID NO: 213516
cuccagaggacucacaaca

SEQ ID NO: 213518 - RNA, 19 nt, Artificial Sequence
  Description of Artificial Sequence: Synthetic oligonucleotide
  Sense strand starting at position 1998 of SEQ ID NO: 2749
ggucaaacggcuuaugcau

SEQ ID NO: 213519 - RNA, 19 nt, Artificial Sequence
  Description of Artificial Sequence: Synthetic oligonucleotide
  Antisense strand to SEQ ID NO: 213518
augcauaagccguuugacc

SEQ ID NO: 213520 - RNA, 19 nt, Artificial Sequence
  Description of Artificial Sequence: Synthetic oligonucleotide
  Sense strand starting at position 2280 of SEQ ID NO: 2749
caaguaauaccguguuaaa

SEQ ID NO: 213521 - RNA, 19 nt, Artificial Sequence
  Description of Artificial Sequence: Synthetic oligonucleotide
  Antisense strand to SEQ ID NO: 213520
uuuaacacgguauuacuug

SEQ ID NO: 213522 - RNA, 19 nt, Artificial Sequence
  Description of Artificial Sequence: Synthetic oligonucleotide
  Sense strand starting at position 2303 of SEQ ID NO: 2749
ggucaaaugucaguuacaa

SEQ ID NO: 213523 - RNA, 19 nt, Artificial Sequence
  Description of Artificial Sequence: Synthetic oligonucleotide
  Antisense strand to SEQ ID NO: 213522
uuguaacugacauuugacc

SEQ ID NO: 213524 - RNA, 19 nt, Artificial Sequence
  Description of Artificial Sequence: Synthetic oligonucleotide
  Sense strand starting at position 2334 of SEQ ID NO: 2749
aacauaaagucgcuagaga

SEQ ID NO: 213525 - RNA, 19 nt, Artificial Sequence
  Description of Artificial Sequence: Synthetic oligonucleotide
  Antisense strand to SEQ ID NO: 213524
ucucuagcgacuuuauguu

SEQ ID NO: 213526 - RNA, 19 nt, Artificial Sequence
  Description of Artificial Sequence: Synthetic oligonucleotide
  Sense strand starting at position 2335 of SEQ ID NO: 2749
acauaaagucgcuagagaa

SEQ ID NO: 213527 - RNA, 19 nt, Artificial Sequence
  Description of Artificial Sequence: Synthetic oligonucleotide
  Antisense strand to SEQ ID NO: 213526
uucucuagcgacuuuaugu

SEQ ID NO: 213528 - RNA, 19 nt, Artificial Sequence
  Description of Artificial Sequence: Synthetic oligonucleotide
  Sense strand starting at position 2474 of SEQ ID NO: 2749
uguuuagaucuuggaguug

SEQ ID NO: 213529 - RNA, 19 nt, Artificial Sequence
  Description of Artificial Sequence: Synthetic oligonucleotide
  Antisense strand to SEQ ID NO: 213528
caacuccaagaucuaaaca

SEQ ID NO: 213530 - RNA, 19 nt, Artificial Sequence
  Description of Artificial Sequence: Synthetic oligonucleotide
  Sense strand starting at position 2886 of SEQ ID NO: 2749
ccguuccucuuaucggaaa

SEQ ID NO: 213531 - RNA, 19 nt, Artificial Sequence
  Description of Artificial Sequence: Synthetic oligonucleotide
  Antisense strand to SEQ ID NO: 213530
uuuccgauaagaggaacgg

SEQ ID NO: 213532 - RNA, 19 nt, Artificial Sequence
  Description of Artificial Sequence: Synthetic oligonucleotide
  Sense strand starting at position 2936 of SEQ ID NO: 2749
gcccgcugucuguuguaga

SEQ ID NO: 213533 - RNA, 19 nt, Artificial Sequence
  Description of Artificial Sequence: Synthetic oligonucleotide
  Antisense strand to SEQ ID NO: 213532
ucuacaacagacagcgggc

SEQ ID NO: 213534 - RNA, 19 nt, Artificial Sequence
  Description of Artificial Sequence: Synthetic oligonucleotide
  Sense strand starting at position 2941 of SEQ ID NO: 2749
cugucuguuguagauuauc

SEQ ID NO: 213535 - RNA, 19 nt, Artificial Sequence
  Description of Artificial Sequence: Synthetic oligonucleotide
  Antisense strand to SEQ ID NO: 213534
gauaaucuacaacagacag

SEQ ID NO: 213536 - RNA, 19 nt, Artificial Sequence
  Description of Artificial Sequence: Synthetic oligonucleotide
  Sense strand starting at position 2985 of SEQ ID NO: 2749
uuacuuaugcuauacgcua

SEQ ID NO: 213537 - RNA, 19 nt, Artificial Sequence
  Description of Artificial Sequence: Synthetic oligonucleotide
  Antisense strand to SEQ ID NO: 213536
uagcguauagcauaaguaa

SEQ ID NO: 213538 - RNA, 19 nt, Artificial Sequence
  Description of Artificial Sequence: Synthetic oligonucleotide
  Sense strand starting at position 3152 of SEQ ID NO: 2749
cugcgugccacuguuaaua

SEQ ID NO: 213539 - RNA, 19 nt, Artificial Sequence
  Description of Artificial Sequence: Synthetic oligonucleotide
  Antisense strand to SEQ ID NO: 213538
uauuaacaguggcacgcag

SEQ ID NO: 213540 - RNA, 19 nt, Artificial Sequence
  Description of Artificial Sequence: Synthetic oligonucleotide
  Sense strand starting at position 3371 of SEQ ID NO: 2749
acauuaaacugcucuggaa

SEQ ID NO: 213541 - RNA, 19 nt, Artificial Sequence
  Description of Artificial Sequence: Synthetic oligonucleotide
  Antisense strand to SEQ ID NO: 213540
uuccagagcaguuuaaugu

SEQ ID NO: 213542 - RNA, 19 nt, Artificial Sequence
  Description of Artificial Sequence: Synthetic oligonucleotide
  Sense strand starting at position 3816 of SEQ ID NO: 2749
gcgguaaacaaccgagaua

SEQ ID NO: 213543 - RNA, 19 nt, Artificial Sequence
  Description of Artificial Sequence: Synthetic oligonucleotide
  Antisense strand to SEQ ID NO: 213542
uaucucgguuguuuaccgc

SEQ ID NO: 213544 - RNA, 19 nt, Artificial Sequence
  Description of Artificial Sequence: Synthetic oligonucleotide
  Sense strand starting at position 59 of SEQ ID NO: 2752
ugcauuugaugggacuuaa

SEQ ID NO: 213545 - RNA, 19 nt, Artificial Sequence
  Description of Artificial Sequence: Synthetic oligonucleotide
  Antisense strand to SEQ ID NO: 213544
uuaagucccaucaaaugca

SEQ ID NO: 213546 - RNA, 19 nt, Artificial Sequence
  Description of Artificial Sequence: Synthetic oligonucleotide
  Sense strand starting at position 119 of SEQ ID NO: 2752
agcaaugacuuaucugaau

SEQ ID NO: 213547 - RNA, 19 nt, Artificial Sequence
  Description of Artificial Sequence: Synthetic oligonucleotide
  Antisense strand to SEQ ID NO: 213546
auucagauaagucauugcu

SEQ ID NO: 213548 - RNA, 19 nt, Artificial Sequence
  Description of Artificial Sequence: Synthetic oligonucleotide
  Sense strand starting at position 169 of SEQ ID NO: 2752
gaggaccuauugucauauu

SEQ ID NO: 213549 - RNA, 19 nt, Artificial Sequence
  Description of Artificial Sequence: Synthetic oligonucleotide
  Antisense strand to SEQ ID NO: 213548
aauaugacaauagguccuc

SEQ ID NO: 213550 - RNA, 19 nt, Artificial Sequence
  Description of Artificial Sequence: Synthetic oligonucleotide
  Sense strand starting at position 170 of SEQ ID NO: 2752
aggaccuauugucauauuu

SEQ ID NO: 213551 - RNA, 19 nt, Artificial Sequence
  Description of Artificial Sequence: Synthetic oligonucleotide
  Antisense strand to SEQ ID NO: 213550
aaauaugacaauagguccu

SEQ ID NO: 213552 - RNA, 19 nt, Artificial Sequence
  Description of Artificial Sequence: Synthetic oligonucleotide
  Sense strand starting at position 219 of SEQ ID NO: 2752
gccuauccuuaggucaaca

SEQ ID NO: 213553 - RNA, 19 nt, Artificial Sequence
  Description of Artificial Sequence: Synthetic oligonucleotide
  Antisense strand to SEQ ID NO: 213552
uguugaccuaaggauaggc

SEQ ID NO: 213554 - RNA, 19 nt, Artificial Sequence
  Description of Artificial Sequence: Synthetic oligonucleotide
  Sense strand starting at position 249 of SEQ ID NO: 2752
ggccaacuagaauguuauu

SEQ ID NO: 213555 - RNA, 19 nt, Artificial Sequence
  Description of Artificial Sequence: Synthetic oligonucleotide
  Antisense strand to SEQ ID NO: 213554
aauaacauucuaguuggcc

SEQ ID NO: 213556 - RNA, 19 nt, Artificial Sequence
  Description of Artificial Sequence: Synthetic oligonucleotide
  Sense strand starting at position 334 of SEQ ID NO: 2752
gauggagucuggcucuaua

SEQ ID NO: 213557 - RNA, 19 nt, Artificial Sequence
  Description of Artificial Sequence: Synthetic oligonucleotide
  Antisense strand to SEQ ID NO: 213556
uauagagccagacuccauc

SEQ ID NO: 213558 - RNA, 19 nt, Artificial Sequence
  Description of Artificial Sequence: Synthetic oligonucleotide
  Sense strand starting at position 1415 of SEQ ID NO: 2752
ccacaaugaccuugaguca

SEQ ID NO: 213559 - RNA, 19 nt, Artificial Sequence
  Description of Artificial Sequence: Synthetic oligonucleotide
  Antisense strand to SEQ ID NO: 213558
ugacucaaggucauugugg

SEQ ID NO: 213560 - RNA, 19 nt, Artificial Sequence
  Description of Artificial Sequence: Synthetic oligonucleotide
  Sense strand starting at position 1452 of SEQ ID NO: 2752
gcaguaggagagugauacu

SEQ ID NO: 213561 - RNA, 19 nt, Artificial Sequence
  Description of Artificial Sequence: Synthetic oligonucleotide
  Antisense strand to SEQ ID NO: 213560
aguaucacucuccuacugc

SEQ ID NO: 213562 - RNA, 19 nt, Artificial Sequence
  Description of Artificial Sequence: Synthetic oligonucleotide
  Sense strand starting at position 2131 of SEQ ID NO: 2752
uuguccuugcccguuuaau

SEQ ID NO: 213563 - RNA, 19 nt, Artificial Sequence
  Description of Artificial Sequence: Synthetic oligonucleotide
  Antisense strand to SEQ ID NO: 213562
auuaaacgggcaaggacaa

SEQ ID NO: 213564 - RNA, 19 nt, Artificial Sequence
  Description of Artificial Sequence: Synthetic oligonucleotide
  Sense strand starting at position 2139 of SEQ ID NO: 2752
gcccguuuaauaggagaug

SEQ ID NO: 213565 - RNA, 19 nt, Artificial Sequence
  Description of Artificial Sequence: Synthetic oligonucleotide
  Antisense strand to SEQ ID NO: 213564
caucuccuauuaaacgggc

SEQ ID NO: 213566 - RNA, 19 nt, Artificial Sequence
  Description of Artificial Sequence: Synthetic oligonucleotide
  Sense strand starting at position 2142 of SEQ ID NO: 2752
cguuuaauaggagauggua

SEQ ID NO: 213567 - RNA, 19 nt, Artificial Sequence
  Description of Artificial Sequence: Synthetic oligonucleotide
  Antisense strand to SEQ ID NO: 213566
uaccaucuccuauuaaacg

SEQ ID NO: 213568 - RNA, 19 nt, Artificial Sequence
  Description of Artificial Sequence: Synthetic oligonucleotide
  Sense strand starting at position 2157 of SEQ ID NO: 2752
gguacauccuuugccaacu

SEQ ID NO: 213569 - RNA, 19 nt, Artificial Sequence
  Description of Artificial Sequence: Synthetic oligonucleotide
  Antisense strand to SEQ ID NO: 213568
aguuggcaaaggauguacc

SEQ ID NO: 213570 - RNA, 19 nt, Artificial Sequence
  Description of Artificial Sequence: Synthetic oligonucleotide
  Sense strand starting at position 2306 of SEQ ID NO: 2752
gccuucucuguuuaacaag

SEQ ID NO: 213571 - RNA, 19 nt, Artificial Sequence
  Description of Artificial Sequence: Synthetic oligonucleotide
  Antisense strand to SEQ ID NO: 213570
cuuguuaaacagagaaggc

SEQ ID NO: 213572 - RNA, 19 nt, Artificial Sequence
  Description of Artificial Sequence: Synthetic oligonucleotide
  Sense strand starting at position 2356 of SEQ ID NO: 2752
uuugaauugcaagaugcua

SEQ ID NO: 213573 - RNA, 19 nt, Artificial Sequence
  Description of Artificial Sequence: Synthetic oligonucleotide
  Antisense strand to SEQ ID NO: 213572
uagcaucuugcaauucaaa

SEQ ID NO: 213574 - RNA, 19 nt, Artificial Sequence
  Description of Artificial Sequence: Synthetic oligonucleotide
  Sense strand starting at position 2455 of SEQ ID NO: 2752
uuagaugucuuugccuaga

SEQ ID NO: 213575 - RNA, 19 nt, Artificial Sequence
  Description of Artificial Sequence: Synthetic oligonucleotide
  Antisense strand to SEQ ID NO: 213574
ucuaggcaaagacaucuaa

SEQ ID NO: 213576 - RNA, 19 nt, Artificial Sequence
  Description of Artificial Sequence: Synthetic oligonucleotide
  Sense strand starting at position 2457 of SEQ ID NO: 2752
agaugucuuugccuagaaa

SEQ ID NO: 213577 - RNA, 19 nt, Artificial Sequence
  Description of Artificial Sequence: Synthetic oligonucleotide
  Antisense strand to SEQ ID NO: 213576
uuucuaggcaaagacaucu

SEQ ID NO: 213578 - RNA, 19 nt, Artificial Sequence
  Description of Artificial Sequence: Synthetic oligonucleotide
  Sense strand starting at position 2458 of SEQ ID NO: 2752
gaugucuuugccuagaaag

SEQ ID NO: 213579 - RNA, 19 nt, Artificial Sequence
  Description of Artificial Sequence: Synthetic oligonucleotide
  Antisense strand to SEQ ID NO: 213578
cuuucuaggcaaagacauc

SEQ ID NO: 213580 - RNA, 19 nt, Artificial Sequence
  Description of Artificial Sequence: Synthetic oligonucleotide
  Sense strand starting at position 2610 of SEQ ID NO: 2752
uuaguauuguuaccaugac

SEQ ID NO: 213581 - RNA, 19 nt, Artificial Sequence
  Description of Artificial Sequence: Synthetic oligonucleotide
  Antisense strand to SEQ ID NO: 213580
gucaugguaacaauacuaa

SEQ ID NO: 213582 - RNA, 19 nt, Artificial Sequence
  Description of Artificial Sequence: Synthetic oligonucleotide
  Sense strand starting at position 2658 of SEQ ID NO: 2752
gcucucagauucuugagga

SEQ ID NO: 213583 - RNA, 19 nt, Artificial Sequence
  Description of Artificial Sequence: Synthetic oligonucleotide
  Antisense strand to SEQ ID NO: 213582
uccucaagaaucugagagc

SEQ ID NO: 213584 - RNA, 19 nt, Artificial Sequence
  Description of Artificial Sequence: Synthetic oligonucleotide
  Sense strand starting at position 2665 of SEQ ID NO: 2752
gauucuugaggauggcaga

SEQ ID NO: 213585 - RNA, 19 nt, Artificial Sequence
  Description of Artificial Sequence: Synthetic oligonucleotide
  Antisense strand to SEQ ID NO: 213584
ucugccauccucaagaauc

SEQ ID NO: 213586 - RNA, 19 nt, Artificial Sequence
  Description of Artificial Sequence: Synthetic oligonucleotide
  Sense strand starting at position 2694 of SEQ ID NO: 2752
uguccuagagcuuaccaaa

SEQ ID NO: 213587 - RNA, 19 nt, Artificial Sequence
  Description of Artificial Sequence: Synthetic oligonucleotide
  Antisense strand to SEQ ID NO: 213586
uuugguaagcucuaggaca

SEQ ID NO: 213588 - RNA, 19 nt, Artificial Sequence
  Description of Artificial Sequence: Synthetic oligonucleotide
  Sense strand starting at position 2738 of SEQ ID NO: 2752
gcccacucaccagaugaau

SEQ ID NO: 213589 - RNA, 19 nt, Artificial Sequence
  Description of Artificial Sequence: Synthetic oligonucleotide
  Antisense strand to SEQ ID NO: 213588
auucaucuggugagugggc

SEQ ID NO: 213590 - RNA, 19 nt, Artificial Sequence
  Description of Artificial Sequence: Synthetic oligonucleotide
  Sense strand starting at position 2824 of SEQ ID NO: 2752
ucaucauagcaaggaaaug

SEQ ID NO: 213591 - RNA, 19 nt, Artificial Sequence
  Description of Artificial Sequence: Synthetic oligonucleotide
  Antisense strand to SEQ ID NO: 213590
cauuuccuugcuaugauga

SEQ ID NO: 213592 - RNA, 19 nt, Artificial Sequence
  Description of Artificial Sequence: Synthetic oligonucleotide
  Sense strand starting at position 2848 of SEQ ID NO: 2752
uggagagauugcccuauuc

SEQ ID NO: 213593 - RNA, 19 nt, Artificial Sequence
  Description of Artificial Sequence: Synthetic oligonucleotide
  Antisense strand to SEQ ID NO: 213592
gaauagggcaaucucucca

SEQ ID NO: 213594 - RNA, 19 nt, Artificial Sequence
  Description of Artificial Sequence: Synthetic oligonucleotide
  Sense strand starting at position 2896 of SEQ ID NO: 2752
gucugaagauuacugacau

SEQ ID NO: 213595 - RNA, 19 nt, Artificial Sequence
  Description of Artificial Sequence: Synthetic oligonucleotide
  Antisense strand to SEQ ID NO: 213594
augucaguaaucuucagac

SEQ ID NO: 213596 - RNA, 19 nt, Artificial Sequence
  Description of Artificial Sequence: Synthetic oligonucleotide
  Sense strand starting at position 2976 of SEQ ID NO: 2752
ucccuucuaucuguagagu

SEQ ID NO: 213597 - RNA, 19 nt, Artificial Sequence
  Description of Artificial Sequence: Synthetic oligonucleotide
  Antisense strand to SEQ ID NO: 213596
acucuacagauagaaggga

SEQ ID NO: 213598 - RNA, 19 nt, Artificial Sequence
  Description of Artificial Sequence: Synthetic oligonucleotide
  Sense strand starting at position 3057 of SEQ ID NO: 2752
uguaaagucagguauuauu

SEQ ID NO: 213599 - RNA, 19 nt, Artificial Sequence
  Description of Artificial Sequence: Synthetic oligonucleotide
  Antisense strand to SEQ ID NO: 213598
aauaauaccugacuuuaca

SEQ ID NO: 213600 - RNA, 19 nt, Artificial Sequence
  Description of Artificial Sequence: Synthetic oligonucleotide
  Sense strand starting at position 3081 of SEQ ID NO: 2752
ucgcuuuacaaguaggaaa

SEQ ID NO: 213601 - RNA, 19 nt, Artificial Sequence
  Description of Artificial Sequence: Synthetic oligonucleotide
  Antisense strand to SEQ ID NO: 213600
uuuccuacuuguaaagcga

SEQ ID NO: 213602 - RNA, 19 nt, Artificial Sequence
  Description of Artificial Sequence: Synthetic oligonucleotide
  Sense strand starting at position 3140 of SEQ ID NO: 2752
ggcccauaauugguagauc

SEQ ID NO: 213603 - RNA, 19 nt, Artificial Sequence
  Description of Artificial Sequence: Synthetic oligonucleotide
  Antisense strand to SEQ ID NO: 213602
gaucuaccaauuaugggcc

SEQ ID NO: 213604 - RNA, 19 nt, Artificial Sequence
  Description of Artificial Sequence: Synthetic oligonucleotide
  Sense strand starting at position 3154 of SEQ ID NO: 2752
agaucugaggcuugaaaca

SEQ ID NO: 213605 - RNA, 19 nt, Artificial Sequence
  Description of Artificial Sequence: Synthetic oligonucleotide
  Antisense strand to SEQ ID NO: 213604
uguuucaagccucagaucu

SEQ ID NO: 213606 - RNA, 19 nt, Artificial Sequence
  Description of Artificial Sequence: Synthetic oligonucleotide
  Sense strand starting at position 3343 of SEQ ID NO: 2752
ucuuuaguauaguucuuga

SEQ ID NO: 213607 - RNA, 19 nt, Artificial Sequence
  Description of Artificial Sequence: Synthetic oligonucleotide
  Antisense strand to SEQ ID NO: 213606
ucaagaacuauacuaaaga

SEQ ID NO: 213608 - RNA, 19 nt, Artificial Sequence
  Description of Artificial Sequence: Synthetic oligonucleotide
  Sense strand starting at position 3740 of SEQ ID NO: 2752
guuacaaguuaucuuccuu

SEQ ID NO: 213609 - RNA, 19 nt, Artificial Sequence
  Description of Artificial Sequence: Synthetic oligonucleotide
  Antisense strand to SEQ ID NO: 213608
aaggaagauaacuuguaac

SEQ ID NO: 213610 - RNA, 19 nt, Artificial Sequence
  Description of Artificial Sequence: Synthetic oligonucleotide
  Sense strand starting at position 3765 of SEQ ID NO: 2752
ggaagucagucucucagua

SEQ ID NO: 213611 - RNA, 19 nt, Artificial Sequence
  Description of Artificial Sequence: Synthetic oligonucleotide
  Antisense strand to SEQ ID NO: 213610
uacugagagacugacuucc

SEQ ID NO: 213612 - RNA, 19 nt, Artificial Sequence
  Description of Artificial Sequence: Synthetic oligonucleotide
  Sense strand starting at position 3878 of SEQ ID NO: 2752
gccauuuccucuuuggacu

SEQ ID NO: 213613 - RNA, 19 nt, Artificial Sequence
  Description of Artificial Sequence: Synthetic oligonucleotide
  Antisense strand to SEQ ID NO: 213612
aguccaaagaggaaauggc

SEQ ID NO: 213614 - RNA, 19 nt, Artificial Sequence
  Description of Artificial Sequence: Synthetic oligonucleotide
  Sense strand starting at position 3900 of SEQ ID NO: 2752
gggacuuaaaugugguuaa

SEQ ID NO: 213615 - RNA, 19 nt, Artificial Sequence
  Description of Artificial Sequence: Synthetic oligonucleotide
  Antisense strand to SEQ ID NO: 213614
uuaaccacauuuaaguccc

SEQ ID NO: 213616 - RNA, 19 nt, Artificial Sequence
  Description of Artificial Sequence: Synthetic oligonucleotide
  Sense strand starting at position 3903 of SEQ ID NO: 2752
acuuaaaugugguuaacug

SEQ ID NO: 213617 - RNA, 19 nt, Artificial Sequence
  Description of Artificial Sequence: Synthetic oligonucleotide
  Antisense strand to SEQ ID NO: 213616
caguuaaccacauuuaagu

SEQ ID NO: 213618 - RNA, 19 nt, Artificial Sequence
  Description of Artificial Sequence: Synthetic oligonucleotide
  Sense strand starting at position 3904 of SEQ ID NO: 2752
cuuaaaugugguuaacuga

SEQ ID NO: 213619 - RNA, 19 nt, Artificial Sequence
  Description of Artificial Sequence: Synthetic oligonucleotide
  Antisense strand to SEQ ID NO: 213618
ucaguuaaccacauuuaag

SEQ ID NO: 213620 - RNA, 19 nt, Artificial Sequence
  Description of Artificial Sequence: Synthetic oligonucleotide
  Sense strand starting at position 3907 of SEQ ID NO: 2752
aaaugugguuaacugaaga

SEQ ID NO: 213621 - RNA, 19 nt, Artificial Sequence
  Description of Artificial Sequence: Synthetic oligonucleotide
  Antisense strand to SEQ ID NO: 213620
ucuucaguuaaccacauuu

SEQ ID NO: 213622 - RNA, 19 nt, Artificial Sequence
  Description of Artificial Sequence: Synthetic oligonucleotide
  Sense strand starting at position 3976 of SEQ ID NO: 2752
gggagcccacccugauaaa

SEQ ID NO: 213623 - RNA, 19 nt, Artificial Sequence
  Description of Artificial Sequence: Synthetic oligonucleotide
  Antisense strand to SEQ ID NO: 213622
uuuaucagggugggcuccc

SEQ ID NO: 213624 - RNA, 19 nt, Artificial Sequence
  Description of Artificial Sequence: Synthetic oligonucleotide
  Sense strand starting at position 178 of SEQ ID NO: 2751
uugacauauugaccagguu

SEQ ID NO: 213625 - RNA, 19 nt, Artificial Sequence
  Description of Artificial Sequence: Synthetic oligonucleotide
  Antisense strand to SEQ ID NO: 213624
aaccuggucaauaugucaa

SEQ ID NO: 213626 - RNA, 19 nt, Artificial Sequence
  Description of Artificial Sequence: Synthetic oligonucleotide
  Sense strand starting at position 359 of SEQ ID NO: 2751
agcuguuaacacugccaaa

SEQ ID NO: 213627 - RNA, 19 nt, Artificial Sequence
  Description of Artificial Sequence: Synthetic oligonucleotide
  Antisense strand to SEQ ID NO: 213626
uuuggcaguguuaacagcu

SEQ ID NO: 213628 - RNA, 19 nt, Artificial Sequence
  Description of Artificial Sequence: Synthetic oligonucleotide
  Sense strand starting at position 398 of SEQ ID NO: 2751
gaaauuguacccggcucua

SEQ ID NO: 213629 - RNA, 19 nt, Artificial Sequence
  Description of Artificial Sequence: Synthetic oligonucleotide
  Antisense strand to SEQ ID NO: 213628
uagagccggguacaauuuc

SEQ ID NO: 213630 - RNA, 19 nt, Artificial Sequence
  Description of Artificial Sequence: Synthetic oligonucleotide
  Sense strand starting at position 515 of SEQ ID NO: 2751
uccgauaccuuguacuaag

SEQ ID NO: 213631 - RNA, 19 nt, Artificial Sequence
  Description of Artificial Sequence: Synthetic oligonucleotide
  Antisense strand to SEQ ID NO: 213630
cuuaguacaagguaucgga

SEQ ID NO: 213632 - RNA, 19 nt, Artificial Sequence
  Description of Artificial Sequence: Synthetic oligonucleotide
  Sense strand starting at position 557 of SEQ ID NO: 2751
gugacuauaugauacacuu

SEQ ID NO: 213633 - RNA, 19 nt, Artificial Sequence
  Description of Artificial Sequence: Synthetic oligonucleotide
  Antisense strand to SEQ ID NO: 213632
aaguguaucauauagucac

SEQ ID NO: 213634 - RNA, 19 nt, Artificial Sequence
  Description of Artificial Sequence: Synthetic oligonucleotide
  Sense strand starting at position 892 of SEQ ID NO: 2751
gguguuaucaucuguagaa

SEQ ID NO: 213635 - RNA, 19 nt, Artificial Sequence
  Description of Artificial Sequence: Synthetic oligonucleotide
  Antisense strand to SEQ ID NO: 213634
uucuacagaugauaacacc

SEQ ID NO: 213636 - RNA, 19 nt, Artificial Sequence
  Description of Artificial Sequence: Synthetic oligonucleotide
  Sense strand starting at position 893 of SEQ ID NO: 2751
guguuaucaucuguagaag

SEQ ID NO: 213637 - RNA, 19 nt, Artificial Sequence
  Description of Artificial Sequence: Synthetic oligonucleotide
  Antisense strand to SEQ ID NO: 213636
cuucuacagaugauaacac

SEQ ID NO: 213638 - RNA, 19 nt, Artificial Sequence
  Description of Artificial Sequence: Synthetic oligonucleotide
  Sense strand starting at position 894 of SEQ ID NO: 2751
uguuaucaucuguagaaga

SEQ ID NO: 213639 - RNA, 19 nt, Artificial Sequence
  Description of Artificial Sequence: Synthetic oligonucleotide
  Antisense strand to SEQ ID NO: 213638
ucuucuacagaugauaaca

SEQ ID NO: 213640 - RNA, 19 nt, Artificial Sequence
  Description of Artificial Sequence: Synthetic oligonucleotide
  Sense strand starting at position 927 of SEQ ID NO: 2751
ugaaauauauguguagacu

SEQ ID NO: 213641 - RNA, 19 nt, Artificial Sequence
  Description of Artificial Sequence: Synthetic oligonucleotide
  Antisense strand to SEQ ID NO: 213640
agucuacacauauauuuca

SEQ ID NO: 213642 - RNA, 19 nt, Artificial Sequence
  Description of Artificial Sequence: Synthetic oligonucleotide
  Sense strand starting at position 938 of SEQ ID NO: 2751
uguagacuaucucuggaua

SEQ ID NO: 213643 - RNA, 19 nt, Artificial Sequence
  Description of Artificial Sequence: Synthetic oligonucleotide
  Antisense strand to SEQ ID NO: 213642
uauccagagauagucuaca

SEQ ID NO: 213644 - RNA, 19 nt, Artificial Sequence
  Description of Artificial Sequence: Synthetic oligonucleotide
  Sense strand starting at position 939 of SEQ ID NO: 2751
guagacuaucucuggauag

SEQ ID NO: 213645 - RNA, 19 nt, Artificial Sequence
  Description of Artificial Sequence: Synthetic oligonucleotide
  Antisense strand to SEQ ID NO: 213644
cuauccagagauagucuac

SEQ ID NO: 213646 - RNA, 19 nt, Artificial Sequence
  Description of Artificial Sequence: Synthetic oligonucleotide
  Sense strand starting at position 940 of SEQ ID NO: 2751
uagacuaucucuggauagu

SEQ ID NO: 213647 - RNA, 19 nt, Artificial Sequence
  Description of Artificial Sequence: Synthetic oligonucleotide
  Antisense strand to SEQ ID NO: 213646
acuauccagagauagucua

SEQ ID NO: 213648 - RNA, 19 nt, Artificial Sequence
  Description of Artificial Sequence: Synthetic oligonucleotide
  Sense strand starting at position 946 of SEQ ID NO: 2751
aucucuggauaguuacaga

SEQ ID NO: 213649 - RNA, 19 nt, Artificial Sequence
  Description of Artificial Sequence: Synthetic oligonucleotide
  Antisense strand to SEQ ID NO: 213648
ucuguaacuauccagagau

SEQ ID NO: 213650 - RNA, 19 nt, Artificial Sequence
  Description of Artificial Sequence: Synthetic oligonucleotide
  Sense strand starting at position 949 of SEQ ID NO: 2751
ucuggauaguuacagaaug

SEQ ID NO: 213651 - RNA, 19 nt, Artificial Sequence
  Description of Artificial Sequence: Synthetic oligonucleotide
  Antisense strand to SEQ ID NO: 213650
cauucuguaacuauccaga

SEQ ID NO: 213652 - RNA, 19 nt, Artificial Sequence
  Description of Artificial Sequence: Synthetic oligonucleotide
  Sense strand starting at position 1088 of SEQ ID NO: 2751
gcgcgauuuggcuacugca

SEQ ID NO: 213653 - RNA, 19 nt, Artificial Sequence
  Description of Artificial Sequence: Synthetic oligonucleotide
  Antisense strand to SEQ ID NO: 213652
ugcaguagccaaaucgcgc

SEQ ID NO: 213654 - RNA, 19 nt, Artificial Sequence
  Description of Artificial Sequence: Synthetic oligonucleotide
  Sense strand starting at position 1465 of SEQ ID NO: 2751
uguccaauuguccaacugu

SEQ ID NO: 213655 - RNA, 19 nt, Artificial Sequence
  Description of Artificial Sequence: Synthetic oligonucleotide
  Antisense strand to SEQ ID NO: 213654
acaguuggacaauuggaca

SEQ ID NO: 213656 - RNA, 19 nt, Artificial Sequence
  Description of Artificial Sequence: Synthetic oligonucleotide
  Sense strand starting at position 1586 of SEQ ID NO: 2751
agugguugucuuuggauag

SEQ ID NO: 213657 - RNA, 19 nt, Artificial Sequence
  Description of Artificial Sequence: Synthetic oligonucleotide
  Antisense strand to SEQ ID NO: 213656
cuauccaaagacaaccacu

SEQ ID NO: 213658 - RNA, 19 nt, Artificial Sequence
  Description of Artificial Sequence: Synthetic oligonucleotide
  Sense strand starting at position 1590 of SEQ ID NO: 2751
guugucuuuggauagugga

SEQ ID NO: 213659 - RNA, 19 nt, Artificial Sequence
  Description of Artificial Sequence: Synthetic oligonucleotide
  Antisense strand to SEQ ID NO: 213658
uccacuauccaaagacaac

SEQ ID NO: 213660 - RNA, 19 nt, Artificial Sequence
  Description of Artificial Sequence: Synthetic oligonucleotide
  Sense strand starting at position 1593 of SEQ ID NO: 2751
gucuuuggauaguggaaua

SEQ ID NO: 213661 - RNA, 19 nt, Artificial Sequence
  Description of Artificial Sequence: Synthetic oligonucleotide
  Antisense strand to SEQ ID NO: 213660
uauuccacuauccaaagac

SEQ ID NO: 213662 - RNA, 19 nt, Artificial Sequence
  Description of Artificial Sequence: Synthetic oligonucleotide
  Sense strand starting at position 1663 of SEQ ID NO: 2751
gaacauguauuagcuuuga

SEQ ID NO: 213663 - RNA, 19 nt, Artificial Sequence
  Description of Artificial Sequence: Synthetic oligonucleotide
  Antisense strand to SEQ ID NO: 213662
ucaaagcuaauacauguuc

SEQ ID NO: 213664 - RNA, 19 nt, Artificial Sequence
  Description of Artificial Sequence: Synthetic oligonucleotide
  Sense strand starting at position 1748 of SEQ ID NO: 2751
uaaaguacaugcugugaga

SEQ ID NO: 213665 - RNA, 19 nt, Artificial Sequence
  Description of Artificial Sequence: Synthetic oligonucleotide
  Antisense strand to SEQ ID NO: 213664
ucucacagcauguacuuua

SEQ ID NO: 213666 - RNA, 19 nt, Artificial Sequence
  Description of Artificial Sequence: Synthetic oligonucleotide
  Sense strand starting at position 1750 of SEQ ID NO: 2751
aaguacaugcugugagaau

SEQ ID NO: 213667 - RNA, 19 nt, Artificial Sequence
  Description of Artificial Sequence: Synthetic oligonucleotide
  Antisense strand to SEQ ID NO: 213666
auucucacagcauguacuu

SEQ ID NO: 213668 - RNA, 19 nt, Artificial Sequence
  Description of Artificial Sequence: Synthetic oligonucleotide
  Sense strand starting at position 1751 of SEQ ID NO: 2751
aguacaugcugugagaaua

SEQ ID NO: 213669 - RNA, 19 nt, Artificial Sequence
  Description of Artificial Sequence: Synthetic oligonucleotide
  Antisense strand to SEQ ID NO: 213668
uauucucacagcauguacu

SEQ ID NO: 213670 - RNA, 19 nt, Artificial Sequence
  Description of Artificial Sequence: Synthetic oligonucleotide
  Sense strand starting at position 1759 of SEQ ID NO: 2751
cugugagaauaugcauauu

SEQ ID NO: 213671 - RNA, 19 nt, Artificial Sequence
  Description of Artificial Sequence: Synthetic oligonucleotide
  Antisense strand to SEQ ID NO: 213670
aauaugcauauucucacag

SEQ ID NO: 213672 - RNA, 19 nt, Artificial Sequence
  Description of Artificial Sequence: Synthetic oligonucleotide
  Sense strand starting at position 1779 of SEQ ID NO: 2751
uuauuagaacucugaaacg

SEQ ID NO: 213673 - RNA, 19 nt, Artificial Sequence
  Description of Artificial Sequence: Synthetic oligonucleotide
  Antisense strand to SEQ ID NO: 213672
cguuucagaguucuaauaa

SEQ ID NO: 213674 - RNA, 19 nt, Artificial Sequence
  Description of Artificial Sequence: Synthetic oligonucleotide
  Sense strand starting at position 1827 of SEQ ID NO: 2751
ccagacucacccugaaguu

SEQ ID NO: 213675 - RNA, 19 nt, Artificial Sequence
  Description of Artificial Sequence: Synthetic oligonucleotide
  Antisense strand to SEQ ID NO: 213674
aacuucagggugagucugg

SEQ ID NO: 213676 - RNA, 19 nt, Artificial Sequence
  Description of Artificial Sequence: Synthetic oligonucleotide
  Sense strand starting at position 2060 of SEQ ID NO: 2751
ucagaugacucuucgacca

SEQ ID NO: 213677 - RNA, 19 nt, Artificial Sequence
  Description of Artificial Sequence: Synthetic oligonucleotide
  Antisense strand to SEQ ID NO: 213676
uggucgaagagucaucuga

SEQ ID NO: 213678 - RNA, 19 nt, Artificial Sequence
  Description of Artificial Sequence: Synthetic oligonucleotide
  Sense strand starting at position 2062 of SEQ ID NO: 2751
agaugacucuucgaccaaa

SEQ ID NO: 213679 - RNA, 19 nt, Artificial Sequence
  Description of Artificial Sequence: Synthetic oligonucleotide
  Antisense strand to SEQ ID NO: 213678
uuuggucgaagagucaucu

SEQ ID NO: 213680 - RNA, 19 nt, Artificial Sequence
  Description of Artificial Sequence: Synthetic oligonucleotide
  Sense strand starting at position 3321 of SEQ ID NO: 2751
cuucuugauucucccagga

SEQ ID NO: 213681 - RNA, 19 nt, Artificial Sequence
  Description of Artificial Sequence: Synthetic oligonucleotide
  Antisense strand to SEQ ID NO: 213680
uccugggagaaucaagaag

SEQ ID NO: 213682 - RNA, 19 nt, Artificial Sequence
  Description of Artificial Sequence: Synthetic oligonucleotide
  Sense strand starting at position 3323 of SEQ ID NO: 2751
ucuugauucucccaggauu

SEQ ID NO: 213683 - RNA, 19 nt, Artificial Sequence
  Description of Artificial Sequence: Synthetic oligonucleotide
  Antisense strand to SEQ ID NO: 213682
aauccugggagaaucaaga

SEQ ID NO: 213684 - RNA, 19 nt, Artificial Sequence
  Description of Artificial Sequence: Synthetic oligonucleotide
  Sense strand starting at position 3385 of SEQ ID NO: 2751
acccaauggucacucugaa

SEQ ID NO: 213685 - RNA, 19 nt, Artificial Sequence
  Description of Artificial Sequence: Synthetic oligonucleotide
  Antisense strand to SEQ ID NO: 213684
uucagagugaccauugggu

SEQ ID NO: 213686 - RNA, 19 nt, Artificial Sequence
  Description of Artificial Sequence: Synthetic oligonucleotide
  Sense strand starting at position 3543 of SEQ ID NO: 2751
aaguuugaaccgggcuuua

SEQ ID NO: 213687 - RNA, 19 nt, Artificial Sequence
  Description of Artificial Sequence: Synthetic oligonucleotide
  Antisense strand to SEQ ID NO: 213686
uaaagcccgguucaaacuu

SEQ ID NO: 213688 - RNA, 19 nt, Artificial Sequence
  Description of Artificial Sequence: Synthetic oligonucleotide
  Sense strand starting at position 3751 of SEQ ID NO: 2751
ugaugaugccaaggaucaa

SEQ ID NO: 213689 - RNA, 19 nt, Artificial Sequence
  Description of Artificial Sequence: Synthetic oligonucleotide
  Antisense strand to SEQ ID NO: 213688
uugauccuuggcaucauca

SEQ ID NO: 213690 - RNA, 19 nt, Artificial Sequence
  Description of Artificial Sequence: Synthetic oligonucleotide
  Sense strand starting at position 3783 of SEQ ID NO: 2751
ccagcagugugagguugaa

SEQ ID NO: 213691 - RNA, 19 nt, Artificial Sequence
  Description of Artificial Sequence: Synthetic oligonucleotide
  Antisense strand to SEQ ID NO: 213690
uucaaccucacacugcugg

SEQ ID NO: 213692 - RNA, 19 nt, Artificial Sequence
  Description of Artificial Sequence: Synthetic oligonucleotide
  Sense strand starting at position 3816 of SEQ ID NO: 2751
uccugcagcuuaguaagaa

SEQ ID NO: 213693 - RNA, 19 nt, Artificial Sequence
  Description of Artificial Sequence: Synthetic oligonucleotide
  Antisense strand to SEQ ID NO: 213692
uucuuacuaagcugcagga

SEQ ID NO: 213694 - RNA, 19 nt, Artificial Sequence
  Description of Artificial Sequence: Synthetic oligonucleotide
  Sense strand starting at position 3817 of SEQ ID NO: 2751
ccugcagcuuaguaagaaa

SEQ ID NO: 213695 - RNA, 19 nt, Artificial Sequence
  Description of Artificial Sequence: Synthetic oligonucleotide
  Antisense strand to SEQ ID NO: 213694
uuucuuacuaagcugcagg

SEQ ID NO: 213696 - RNA, 19 nt, Artificial Sequence
  Description of Artificial Sequence: Synthetic oligonucleotide
  Sense strand starting at position 3820 of SEQ ID NO: 2751
gcagcuuaguaagaaagga

SEQ ID NO: 213697 - RNA, 19 nt, Artificial Sequence
  Description of Artificial Sequence: Synthetic oligonucleotide
  Antisense strand to SEQ ID NO: 213696
uccuuucuuacuaagcugc

SEQ ID NO: 213698 - RNA, 19 nt, Artificial Sequence
  Description of Artificial Sequence: Synthetic oligonucleotide
  Sense strand starting at position 3852 of SEQ ID NO: 2751
caaugaucgcgaugagcug

SEQ ID NO: 213699 - RNA, 19 nt, Artificial Sequence
  Description of Artificial Sequence: Synthetic oligonucleotide
  Antisense strand to SEQ ID NO: 213698
cagcucaucgcgaucauug

SEQ ID NO: 213700 - RNA, 19 nt, Artificial Sequence
  Description of Artificial Sequence: Synthetic oligonucleotide
  Sense strand starting at position 3912 of SEQ ID NO: 2751
cccuguggccuccaaggau

SEQ ID NO: 213701 - RNA, 19 nt, Artificial Sequence
  Description of Artificial Sequence: Synthetic oligonucleotide
  Antisense strand to SEQ ID NO: 213700
auccuuggaggccacaggg

SEQ ID NO: 213702 - RNA, 19 nt, Artificial Sequence
  Description of Artificial Sequence: Synthetic oligonucleotide
  Sense strand starting at position 3924 of SEQ ID NO: 2751
caaggauucccaugagcag

SEQ ID NO: 213703 - RNA, 19 nt, Artificial Sequence
  Description of Artificial Sequence: Synthetic oligonucleotide
  Antisense strand to SEQ ID NO: 213702
cugcucaugggaauccuug

SEQ ID NO: 213704 - RNA, 19 nt, Artificial Sequence
  Description of Artificial Sequence: Synthetic oligonucleotide
  Sense strand starting at position 320 of SEQ ID NO: 2753
ugcuuccaacugugacauu

SEQ ID NO: 213705 - RNA, 19 nt, Artificial Sequence
  Description of Artificial Sequence: Synthetic oligonucleotide
  Antisense strand to SEQ ID NO: 213704
aaugucacaguuggaagca

SEQ ID NO: 213706 - RNA, 19 nt, Artificial Sequence
  Description of Artificial Sequence: Synthetic oligonucleotide
  Sense strand starting at position 387 of SEQ ID NO: 2753
ucauguaauguguaaugag

SEQ ID NO: 213707 - RNA, 19 nt, Artificial Sequence
  Description of Artificial Sequence: Synthetic oligonucleotide
  Antisense strand to SEQ ID NO: 213706
cucauuacacauuacauga

SEQ ID NO: 213708 - RNA, 19 nt, Artificial Sequence
  Description of Artificial Sequence: Synthetic oligonucleotide
  Sense strand starting at position 405 of SEQ ID NO: 2753
gguuagugcgauguguuga

SEQ ID NO: 213709 - RNA, 19 nt, Artificial Sequence
  Description of Artificial Sequence: Synthetic oligonucleotide
  Antisense strand to SEQ ID NO: 213708
ucaacacaucgcacuaacc

SEQ ID NO: 213710 - RNA, 19 nt, Artificial Sequence
  Description of Artificial Sequence: Synthetic oligonucleotide
  Sense strand starting at position 418 of SEQ ID NO: 2753
uguugacacuuagacauuu

SEQ ID NO: 213711 - RNA, 19 nt, Artificial Sequence
  Description of Artificial Sequence: Synthetic oligonucleotide
  Antisense strand to SEQ ID NO: 213710
aaaugucuaagugucaaca

SEQ ID NO: 213712 - RNA, 19 nt, Artificial Sequence
  Description of Artificial Sequence: Synthetic oligonucleotide
  Sense strand starting at position 528 of SEQ ID NO: 2753
cuauaaugugcaugaacau

SEQ ID NO: 213713 - RNA, 19 nt, Artificial Sequence
  Description of Artificial Sequence: Synthetic oligonucleotide
  Antisense strand to SEQ ID NO: 213712
auguucaugcacauuauag

SEQ ID NO: 213714 - RNA, 19 nt, Artificial Sequence
  Description of Artificial Sequence: Synthetic oligonucleotide
  Sense strand starting at position 736 of SEQ ID NO: 2753
cucugauacuacucacugu

SEQ ID NO: 213715 - RNA, 19 nt, Artificial Sequence
  Description of Artificial Sequence: Synthetic oligonucleotide
  Antisense strand to SEQ ID NO: 213714
acagugaguaguaucagag

SEQ ID NO: 213716 - RNA, 19 nt, Artificial Sequence
  Description of Artificial Sequence: Synthetic oligonucleotide
  Sense strand starting at position 740 of SEQ ID NO: 2753
gauacuacucacuguggga

SEQ ID NO: 213717 - RNA, 19 nt, Artificial Sequence
  Description of Artificial Sequence: Synthetic oligonucleotide
  Antisense strand to SEQ ID NO: 213716
ucccacagugaguaguauc

SEQ ID NO: 213718 - RNA, 19 nt, Artificial Sequence
  Description of Artificial Sequence: Synthetic oligonucleotide
  Sense strand starting at position 757 of SEQ ID NO: 2753
gaccuaggcaggugucuua

SEQ ID NO: 213719 - RNA, 19 nt, Artificial Sequence
  Description of Artificial Sequence: Synthetic oligonucleotide
  Antisense strand to SEQ ID NO: 213718
uaagacaccugccuagguc

SEQ ID NO: 213720 - RNA, 19 nt, Artificial Sequence
  Description of Artificial Sequence: Synthetic oligonucleotide
  Sense strand starting at position 1132 of SEQ ID NO: 2753
ugaggauaacgguaucugu

SEQ ID NO: 213721 - RNA, 19 nt, Artificial Sequence
  Description of Artificial Sequence: Synthetic oligonucleotide
  Antisense strand to SEQ ID NO: 213720
acagauaccguuauccuca

SEQ ID NO: 213722 - RNA, 19 nt, Artificial Sequence
  Description of Artificial Sequence: Synthetic oligonucleotide
  Sense strand starting at position 1139 of SEQ ID NO: 2753
aacgguaucugucuccuaa

SEQ ID NO: 213723 - RNA, 19 nt, Artificial Sequence
  Description of Artificial Sequence: Synthetic oligonucleotide
  Antisense strand to SEQ ID NO: 213722
uuaggagacagauaccguu

SEQ ID NO: 213724 - RNA, 19 nt, Artificial Sequence
  Description of Artificial Sequence: Synthetic oligonucleotide
  Sense strand starting at position 1141 of SEQ ID NO: 2753
cgguaucugucuccuaaag

SEQ ID NO: 213725 - RNA, 19 nt, Artificial Sequence
  Description of Artificial Sequence: Synthetic oligonucleotide
  Antisense strand to SEQ ID NO: 213724
cuuuaggagacagauaccg

SEQ ID NO: 213726 - RNA, 19 nt, Artificial Sequence
  Description of Artificial Sequence: Synthetic oligonucleotide
  Sense strand starting at position 1260 of SEQ ID NO: 2753
caggguuauccuggguaac

SEQ ID NO: 213727 - RNA, 19 nt, Artificial Sequence
  Description of Artificial Sequence: Synthetic oligonucleotide
  Antisense strand to SEQ ID NO: 213726
guuacccaggauaacccug

SEQ ID NO: 213728 - RNA, 19 nt, Artificial Sequence
  Description of Artificial Sequence: Synthetic oligonucleotide
  Sense strand starting at position 1261 of SEQ ID NO: 2753
aggguuauccuggguaacu

SEQ ID NO: 213729 - RNA, 19 nt, Artificial Sequence
  Description of Artificial Sequence: Synthetic oligonucleotide
  Antisense strand to SEQ ID NO: 213728
aguuacccaggauaacccu

SEQ ID NO: 213730 - RNA, 19 nt, Artificial Sequence
  Description of Artificial Sequence: Synthetic oligonucleotide
  Sense strand starting at position 1262 of SEQ ID NO: 2753
ggguuauccuggguaacuu

SEQ ID NO: 213731 - RNA, 19 nt, Artificial Sequence
  Description of Artificial Sequence: Synthetic oligonucleotide
  Antisense strand to SEQ ID NO: 213730
aaguuacccaggauaaccc

SEQ ID NO: 213732 - RNA, 19 nt, Artificial Sequence
  Description of Artificial Sequence: Synthetic oligonucleotide
  Sense strand starting at position 1322 of SEQ ID NO: 2753
auggccucugcuugaauca

SEQ ID NO: 213733 - RNA, 19 nt, Artificial Sequence
  Description of Artificial Sequence: Synthetic oligonucleotide
  Antisense strand to SEQ ID NO: 213732
ugauucaagcagaggccau

SEQ ID NO: 213734 - RNA, 19 nt, Artificial Sequence
  Description of Artificial Sequence: Synthetic oligonucleotide
  Sense strand starting at position 1323 of SEQ ID NO: 2753
uggccucugcuugaaucau

SEQ ID NO: 213735 - RNA, 19 nt, Artificial Sequence
  Description of Artificial Sequence: Synthetic oligonucleotide
  Antisense strand to SEQ ID NO: 213734
augauucaagcagaggcca

SEQ ID NO: 213736 - RNA, 19 nt, Artificial Sequence
  Description of Artificial Sequence: Synthetic oligonucleotide
  Sense strand starting at position 2398 of SEQ ID NO: 2753
gcacacaugugaguacaga

SEQ ID NO: 213737 - RNA, 19 nt, Artificial Sequence
  Description of Artificial Sequence: Synthetic oligonucleotide
  Antisense strand to SEQ ID NO: 213736
ucuguacucacaugugugc

SEQ ID NO: 213738 - RNA, 19 nt, Artificial Sequence
  Description of Artificial Sequence: Synthetic oligonucleotide
  Sense strand starting at position 2436 of SEQ ID NO: 2753
gccagugugcaucagaagu

SEQ ID NO: 213739 - RNA, 19 nt, Artificial Sequence
  Description of Artificial Sequence: Synthetic oligonucleotide
  Antisense strand to SEQ ID NO: 213738
acuucugaugcacacuggc

SEQ ID NO: 213740 - RNA, 19 nt, Artificial Sequence
  Description of Artificial Sequence: Synthetic oligonucleotide
  Sense strand starting at position 2442 of SEQ ID NO: 2753
gugcaucagaaguauguuu

SEQ ID NO: 213741 - RNA, 19 nt, Artificial Sequence
  Description of Artificial Sequence: Synthetic oligonucleotide
  Antisense strand to SEQ ID NO: 213740
aaacauacuucugaugcac

SEQ ID NO: 213742 - RNA, 19 nt, Artificial Sequence
  Description of Artificial Sequence: Synthetic oligonucleotide
  Sense strand starting at position 2444 of SEQ ID NO: 2753
gcaucagaaguauguuuaa

SEQ ID NO: 213743 - RNA, 19 nt, Artificial Sequence
  Description of Artificial Sequence: Synthetic oligonucleotide
  Antisense strand to SEQ ID NO: 213742
uuaaacauacuucugaugc

SEQ ID NO: 213744 - RNA, 19 nt, Artificial Sequence
  Description of Artificial Sequence: Synthetic oligonucleotide
  Sense strand starting at position 2447 of SEQ ID NO: 2753
ucagaaguauguuuaacug

SEQ ID NO: 213745 - RNA, 19 nt, Artificial Sequence
  Description of Artificial Sequence: Synthetic oligonucleotide
  Antisense strand to SEQ ID NO: 213744
caguuaaacauacuucuga

SEQ ID NO: 213746 - RNA, 19 nt, Artificial Sequence
  Description of Artificial Sequence: Synthetic oligonucleotide
  Sense strand starting at position 2485 of SEQ ID NO: 2753
acuuucucugccugaggga

SEQ ID NO: 213747 - RNA, 19 nt, Artificial Sequence
  Description of Artificial Sequence: Synthetic oligonucleotide
  Antisense strand to SEQ ID NO: 213746
ucccucaggcagagaaagu

SEQ ID NO: 213748 - RNA, 19 nt, Artificial Sequence
  Description of Artificial Sequence: Synthetic oligonucleotide
  Sense strand starting at position 2498 of SEQ ID NO: 2753
gagggacccagauguaugu

SEQ ID NO: 213749 - RNA, 19 nt, Artificial Sequence
  Description of Artificial Sequence: Synthetic oligonucleotide
  Antisense strand to SEQ ID NO: 213748
acauacaucugggucccuc

SEQ ID NO: 213750 - RNA, 19 nt, Artificial Sequence
  Description of Artificial Sequence: Synthetic oligonucleotide
  Sense strand starting at position 2502 of SEQ ID NO: 2753
gacccagauguaugugaca

SEQ ID NO: 213751 - RNA, 19 nt, Artificial Sequence
  Description of Artificial Sequence: Synthetic oligonucleotide
  Antisense strand to SEQ ID NO: 213750
ugucacauacaucuggguc

SEQ ID NO: 213752 - RNA, 19 nt, Artificial Sequence
  Description of Artificial Sequence: Synthetic oligonucleotide
  Sense strand starting at position 2563 of SEQ ID NO: 2753
gcauguguggcucugugua

SEQ ID NO: 213753 - RNA, 19 nt, Artificial Sequence
  Description of Artificial Sequence: Synthetic oligonucleotide
  Antisense strand to SEQ ID NO: 213752
uacacagagccacacaugc

SEQ ID NO: 213754 - RNA, 19 nt, Artificial Sequence
  Description of Artificial Sequence: Synthetic oligonucleotide
  Sense strand starting at position 2570 of SEQ ID NO: 2753
uggcucuguguaugaggaa

SEQ ID NO: 213755 - RNA, 19 nt, Artificial Sequence
  Description of Artificial Sequence: Synthetic oligonucleotide
  Antisense strand to SEQ ID NO: 213754
uuccucauacacagagcca

SEQ ID NO: 213756 - RNA, 19 nt, Artificial Sequence
  Description of Artificial Sequence: Synthetic oligonucleotide
  Sense strand starting at position 2584 of SEQ ID NO: 2753
aggaauuugugacacggua

SEQ ID NO: 213757 - RNA, 19 nt, Artificial Sequence
  Description of Artificial Sequence: Synthetic oligonucleotide
  Antisense strand to SEQ ID NO: 213756
uaccgugucacaaauuccu

SEQ ID NO: 213758 - RNA, 19 nt, Artificial Sequence
  Description of Artificial Sequence: Synthetic oligonucleotide
  Sense strand starting at position 2986 of SEQ ID NO: 2753
ggguauggccaauguguga

SEQ ID NO: 213759 - RNA, 19 nt, Artificial Sequence
  Description of Artificial Sequence: Synthetic oligonucleotide
  Antisense strand to SEQ ID NO: 213758
ucacacauuggccauaccc

SEQ ID NO: 213760 - RNA, 19 nt, Artificial Sequence
  Description of Artificial Sequence: Synthetic oligonucleotide
  Sense strand starting at position 3030 of SEQ ID NO: 2753
cagaguguuagaggcauau

SEQ ID NO: 213761 - RNA, 19 nt, Artificial Sequence
  Description of Artificial Sequence: Synthetic oligonucleotide
  Antisense strand to SEQ ID NO: 213760
auaugccucuaacacucug

SEQ ID NO: 213762 - RNA, 19 nt, Artificial Sequence
  Description of Artificial Sequence: Synthetic oligonucleotide
  Sense strand starting at position 3032 of SEQ ID NO: 2753
gaguguuagaggcauaugu

SEQ ID NO: 213763 - RNA, 19 nt, Artificial Sequence
  Description of Artificial Sequence: Synthetic oligonucleotide
  Antisense strand to SEQ ID NO: 213762
acauaugccucuaacacuc

SEQ ID NO: 213764 - RNA, 19 nt, Artificial Sequence
  Description of Artificial Sequence: Synthetic oligonucleotide
  Sense strand starting at position 3034 of SEQ ID NO: 2753
guguuagaggcauauguau

SEQ ID NO: 213765 - RNA, 19 nt, Artificial Sequence
  Description of Artificial Sequence: Synthetic oligonucleotide
  Antisense strand to SEQ ID NO: 213764
auacauaugccucuaacac

SEQ ID NO: 213766 - RNA, 19 nt, Artificial Sequence
  Description of Artificial Sequence: Synthetic oligonucleotide
  Sense strand starting at position 3036 of SEQ ID NO: 2753
guuagaggcauauguauug

SEQ ID NO: 213767 - RNA, 19 nt, Artificial Sequence
  Description of Artificial Sequence: Synthetic oligonucleotide
  Antisense strand to SEQ ID NO: 213766
caauacauaugccucuaac

SEQ ID NO: 213768 - RNA, 19 nt, Artificial Sequence
  Description of Artificial Sequence: Synthetic oligonucleotide
  Sense strand starting at position 3064 of SEQ ID NO: 2753
ggugaacucuuccugaguu

SEQ ID NO: 213769 - RNA, 19 nt, Artificial Sequence
  Description of Artificial Sequence: Synthetic oligonucleotide
  Antisense strand to SEQ ID NO: 213768
aacucaggaagaguucacc

SEQ ID NO: 213770 - RNA, 19 nt, Artificial Sequence
  Description of Artificial Sequence: Synthetic oligonucleotide
  Sense strand starting at position 3066 of SEQ ID NO: 2753
ugaacucuuccugaguugu

SEQ ID NO: 213771 - RNA, 19 nt, Artificial Sequence
  Description of Artificial Sequence: Synthetic oligonucleotide
  Antisense strand to SEQ ID NO: 213770
acaacucaggaagaguuca

SEQ ID NO: 213772 - RNA, 19 nt, Artificial Sequence
  Description of Artificial Sequence: Synthetic oligonucleotide
  Sense strand starting at position 3074 of SEQ ID NO: 2753
uccugaguuguuugugaca

SEQ ID NO: 213773 - RNA, 19 nt, Artificial Sequence
  Description of Artificial Sequence: Synthetic oligonucleotide
  Antisense strand to SEQ ID NO: 213772
ugucacaaacaacucagga

SEQ ID NO: 213774 - RNA, 19 nt, Artificial Sequence
  Description of Artificial Sequence: Synthetic oligonucleotide
  Sense strand starting at position 3143 of SEQ ID NO: 2753
uccuccucccagugaugaa

SEQ ID NO: 213775 - RNA, 19 nt, Artificial Sequence
  Description of Artificial Sequence: Synthetic oligonucleotide
  Antisense strand to SEQ ID NO: 213774
uucaucacugggaggagga

SEQ ID NO: 213776 - RNA, 19 nt, Artificial Sequence
  Description of Artificial Sequence: Synthetic oligonucleotide
  Sense strand starting at position 3363 of SEQ ID NO: 2753
aaguuauauguugaagucu

SEQ ID NO: 213777 - RNA, 19 nt, Artificial Sequence
  Description of Artificial Sequence: Synthetic oligonucleotide
  Antisense strand to SEQ ID NO: 213776
agacuucaacauauaacuu

SEQ ID NO: 213778 - RNA, 19 nt, Artificial Sequence
  Description of Artificial Sequence: Synthetic oligonucleotide
  Sense strand starting at position 3480 of SEQ ID NO: 2753
aaucaauaugacugguguu

SEQ ID NO: 213779 - RNA, 19 nt, Artificial Sequence
  Description of Artificial Sequence: Synthetic oligonucleotide
  Antisense strand to SEQ ID NO: 213778
aacaccagucauauugauu

SEQ ID NO: 213780 - RNA, 19 nt, Artificial Sequence
  Description of Artificial Sequence: Synthetic oligonucleotide
  Sense strand starting at position 3547 of SEQ ID NO: 2753
uugcuauggccugaauauc

SEQ ID NO: 213781 - RNA, 19 nt, Artificial Sequence
  Description of Artificial Sequence: Synthetic oligonucleotide
  Antisense strand to SEQ ID NO: 213780
gauauucaggccauagcaa

SEQ ID NO: 213782 - RNA, 19 nt, Artificial Sequence
  Description of Artificial Sequence: Synthetic oligonucleotide
  Sense strand starting at position 3891 of SEQ ID NO: 2753
gcgacauccugccucugaa

SEQ ID NO: 213783 - RNA, 19 nt, Artificial Sequence
  Description of Artificial Sequence: Synthetic oligonucleotide
  Antisense strand to SEQ ID NO: 213782
uucagaggcaggaugucgc

SEQ ID NO: 213784 - RNA, 19 nt, Artificial Sequence
  Description of Artificial Sequence: Synthetic oligonucleotide
  Sense strand starting at position 98 of SEQ ID NO: 2754
ugcuuccaacugugacauu

SEQ ID NO: 213785 - RNA, 19 nt, Artificial Sequence
  Description of Artificial Sequence: Synthetic oligonucleotide
  Antisense strand to SEQ ID NO: 213784
aaugucacaguuggaagca

SEQ ID NO: 213786 - RNA, 19 nt, Artificial Sequence
  Description of Artificial Sequence: Synthetic oligonucleotide
  Sense strand starting at position 165 of SEQ ID NO: 2754
ucauguaauguguaaugag

SEQ ID NO: 213787 - RNA, 19 nt, Artificial Sequence
  Description of Artificial Sequence: Synthetic oligonucleotide
  Antisense strand to SEQ ID NO: 213786
cucauuacacauuacauga

SEQ ID NO: 213788 - RNA, 19 nt, Artificial Sequence
  Description of Artificial Sequence: Synthetic oligonucleotide
  Sense strand starting at position 183 of SEQ ID NO: 2754
gguuagugcgauguguuga

SEQ ID NO: 213789 - RNA, 19 nt, Artificial Sequence
  Description of Artificial Sequence: Synthetic oligonucleotide
  Antisense strand to SEQ ID NO: 213788
ucaacacaucgcacuaacc

SEQ ID NO: 213790 - RNA, 19 nt, Artificial Sequence
  Description of Artificial Sequence: Synthetic oligonucleotide
  Sense strand starting at position 196 of SEQ ID NO: 2754
uguugacacuuagacauuu

SEQ ID NO: 213791 - RNA, 19 nt, Artificial Sequence
  Description of Artificial Sequence: Synthetic oligonucleotide
  Antisense strand to SEQ ID NO: 213790
aaaugucuaagugucaaca

SEQ ID NO: 213792 - RNA, 19 nt, Artificial Sequence
  Description of Artificial Sequence: Synthetic oligonucleotide
  Sense strand starting at position 306 of SEQ ID NO: 2754
cuauaaugugcaugaacau

SEQ ID NO: 213793 - RNA, 19 nt, Artificial Sequence
  Description of Artificial Sequence: Synthetic oligonucleotide
  Antisense strand to SEQ ID NO: 213792
auguucaugcacauuauag

SEQ ID NO: 213794 - RNA, 19 nt, Artificial Sequence
  Description of Artificial Sequence: Synthetic oligonucleotide
  Sense strand starting at position 514 of SEQ ID NO: 2754
cucugauacuacucacugu

SEQ ID NO: 213795 - RNA, 19 nt, Artificial Sequence
  Description of Artificial Sequence: Synthetic oligonucleotide
  Antisense strand to SEQ ID NO: 213794
acagugaguaguaucagag

SEQ ID NO: 213796 - RNA, 19 nt, Artificial Sequence
  Description of Artificial Sequence: Synthetic oligonucleotide
  Sense strand starting at position 518 of SEQ ID NO: 2754
gauacuacucacuguggga

SEQ ID NO: 213797 - RNA, 19 nt, Artificial Sequence
  Description of Artificial Sequence: Synthetic oligonucleotide
  Antisense strand to SEQ ID NO: 213796
ucccacagugaguaguauc

SEQ ID NO: 213798 - RNA, 19 nt, Artificial Sequence
  Description of Artificial Sequence: Synthetic oligonucleotide
  Sense strand starting at position 535 of SEQ ID NO: 2754
gaccuaggcaggugucuua

SEQ ID NO: 213799 - RNA, 19 nt, Artificial Sequence
  Description of Artificial Sequence: Synthetic oligonucleotide
  Antisense strand to SEQ ID NO: 213798
uaagacaccugccuagguc

SEQ ID NO: 213800 - RNA, 19 nt, Artificial Sequence
  Description of Artificial Sequence: Synthetic oligonucleotide
  Sense strand starting at position 910 of SEQ ID NO: 2754
ugaggauaacgguaucugu

SEQ ID NO: 213801 - RNA, 19 nt, Artificial Sequence
  Description of Artificial Sequence: Synthetic oligonucleotide
  Antisense strand to SEQ ID NO: 213800
acagauaccguuauccuca

SEQ ID NO: 213802 - RNA, 19 nt, Artificial Sequence
  Description of Artificial Sequence: Synthetic oligonucleotide
  Sense strand starting at position 917 of SEQ ID NO: 2754
aacgguaucugucuccuaa

SEQ ID NO: 213803 - RNA, 19 nt, Artificial Sequence
  Description of Artificial Sequence: Synthetic oligonucleotide
  Antisense strand to SEQ ID NO: 213802
uuaggagacagauaccguu

SEQ ID NO: 213804 - RNA, 19 nt, Artificial Sequence
  Description of Artificial Sequence: Synthetic oligonucleotide
  Sense strand starting at position 919 of SEQ ID NO: 2754
cgguaucugucuccuaaag

SEQ ID NO: 213805 - RNA, 19 nt, Artificial Sequence
  Description of Artificial Sequence: Synthetic oligonucleotide
  Antisense strand to SEQ ID NO: 213804
cuuuaggagacagauaccg

SEQ ID NO: 213806 - RNA, 19 nt, Artificial Sequence
  Description of Artificial Sequence: Synthetic oligonucleotide
  Sense strand starting at position 1038 of SEQ ID NO: 2754
caggguuauccuggguaac

SEQ ID NO: 213807 - RNA, 19 nt, Artificial Sequence
  Description of Artificial Sequence: Synthetic oligonucleotide
  Antisense strand to SEQ ID NO: 213806
guuacccaggauaacccug

SEQ ID NO: 213808 - RNA, 19 nt, Artificial Sequence
  Description of Artificial Sequence: Synthetic oligonucleotide
  Sense strand starting at position 1039 of SEQ ID NO: 2754
aggguuauccuggguaacu

SEQ ID NO: 213809 - RNA, 19 nt, Artificial Sequence
  Description of Artificial Sequence: Synthetic oligonucleotide
  Antisense strand to SEQ ID NO: 213808
aguuacccaggauaacccu

SEQ ID NO: 213810 - RNA, 19 nt, Artificial Sequence
  Description of Artificial Sequence: Synthetic oligonucleotide
  Sense strand starting at position 1040 of SEQ ID NO: 2754
ggguuauccuggguaacuu

SEQ ID NO: 213811 - RNA, 19 nt, Artificial Sequence
  Description of Artificial Sequence: Synthetic oligonucleotide
  Antisense strand to SEQ ID NO: 213810
aaguuacccaggauaaccc

SEQ ID NO: 213812 - RNA, 19 nt, Artificial Sequence
  Description of Artificial Sequence: Synthetic oligonucleotide
  Sense strand starting at position 1100 of SEQ ID NO: 2754
auggccucugcuugaauca

SEQ ID NO: 213813 - RNA, 19 nt, Artificial Sequence
  Description of Artificial Sequence: Synthetic oligonucleotide
  Antisense strand to SEQ ID NO: 213812
ugauucaagcagaggccau

SEQ ID NO: 213814 - RNA, 19 nt, Artificial Sequence
  Description of Artificial Sequence: Synthetic oligonucleotide
  Sense strand starting at position 1101 of SEQ ID NO: 2754
uggccucugcuugaaucau

SEQ ID NO: 213815 - RNA, 19 nt, Artificial Sequence
  Description of Artificial Sequence: Synthetic oligonucleotide
  Antisense strand to SEQ ID NO: 213814
augauucaagcagaggcca

SEQ ID NO: 213816 - RNA, 19 nt, Artificial Sequence
  Description of Artificial Sequence: Synthetic oligonucleotide
  Sense strand starting at position 2176 of SEQ ID NO: 2754
gcacacaugugaguacaga

SEQ ID NO: 213817 - RNA, 19 nt, Artificial Sequence
  Description of Artificial Sequence: Synthetic oligonucleotide
  Antisense strand to SEQ ID NO: 213816
ucuguacucacaugugugc

SEQ ID NO: 213818 - RNA, 19 nt, Artificial Sequence
  Description of Artificial Sequence: Synthetic oligonucleotide
  Sense strand starting at position 2220 of SEQ ID NO: 2754
gugcaucagaaguauguuu

SEQ ID NO: 213819 - RNA, 19 nt, Artificial Sequence
  Description of Artificial Sequence: Synthetic oligonucleotide
  Antisense strand to SEQ ID NO: 213818
aaacauacuucugaugcac

SEQ ID NO: 213820 - RNA, 19 nt, Artificial Sequence
  Description of Artificial Sequence: Synthetic oligonucleotide
  Sense strand starting at position 2222 of SEQ ID NO: 2754
gcaucagaaguauguuuaa

SEQ ID NO: 213821 - RNA, 19 nt, Artificial Sequence
  Description of Artificial Sequence: Synthetic oligonucleotide
  Antisense strand to SEQ ID NO: 213820
uuaaacauacuucugaugc

SEQ ID NO: 213822 - RNA, 19 nt, Artificial Sequence
  Description of Artificial Sequence: Synthetic oligonucleotide
  Sense strand starting at position 2225 of SEQ ID NO: 2754
ucagaaguauguuuaacug

SEQ ID NO: 213823 - RNA, 19 nt, Artificial Sequence
  Description of Artificial Sequence: Synthetic oligonucleotide
  Antisense strand to SEQ ID NO: 213822
caguuaaacauacuucuga

SEQ ID NO: 213824 - RNA, 19 nt, Artificial Sequence
  Description of Artificial Sequence: Synthetic oligonucleotide
  Sense strand starting at position 2263 of SEQ ID NO: 2754
acuuucucugccugaggga

SEQ ID NO: 213825 - RNA, 19 nt, Artificial Sequence
  Description of Artificial Sequence: Synthetic oligonucleotide
  Antisense strand to SEQ ID NO: 213824
ucccucaggcagagaaagu

SEQ ID NO: 213826 - RNA, 19 nt, Artificial Sequence
  Description of Artificial Sequence: Synthetic oligonucleotide
  Sense strand starting at position 2276 of SEQ ID NO: 2754
gagggacccagauguaugu

SEQ ID NO: 213827 - RNA, 19 nt, Artificial Sequence
  Description of Artificial Sequence: Synthetic oligonucleotide
  Antisense strand to SEQ ID NO: 213826
acauacaucugggucccuc

SEQ ID NO: 213828 - RNA, 19 nt, Artificial Sequence
  Description of Artificial Sequence: Synthetic oligonucleotide
  Sense strand starting at position 2280 of SEQ ID NO: 2754
gacccagauguaugugaca

SEQ ID NO: 213829 - RNA, 19 nt, Artificial Sequence
  Description of Artificial Sequence: Synthetic oligonucleotide
  Antisense strand to SEQ ID NO: 213828
ugucacauacaucuggguc

SEQ ID NO: 213830 - RNA, 19 nt, Artificial Sequence
  Description of Artificial Sequence: Synthetic oligonucleotide
  Sense strand starting at position 2341 of SEQ ID NO: 2754
gcauguguggcucugugua

SEQ ID NO: 213831 - RNA, 19 nt, Artificial Sequence
  Description of Artificial Sequence: Synthetic oligonucleotide
  Antisense strand to SEQ ID NO: 213830
uacacagagccacacaugc

SEQ ID NO: 213832 - RNA, 19 nt, Artificial Sequence
  Description of Artificial Sequence: Synthetic oligonucleotide
  Sense strand starting at position 2348 of SEQ ID NO: 2754
uggcucuguguaugaggaa

SEQ ID NO: 213833 - RNA, 19 nt, Artificial Sequence
  Description of Artificial Sequence: Synthetic oligonucleotide
  Antisense strand to SEQ ID NO: 213832
uuccucauacacagagcca

SEQ ID NO: 213834 - RNA, 19 nt, Artificial Sequence
  Description of Artificial Sequence: Synthetic oligonucleotide
  Sense strand starting at position 2362 of SEQ ID NO: 2754
aggaauuugugacacggua

SEQ ID NO: 213835 - RNA, 19 nt, Artificial Sequence
  Description of Artificial Sequence: Synthetic oligonucleotide
  Antisense strand to SEQ ID NO: 213834
uaccgugucacaaauuccu

SEQ ID NO: 213836 - RNA, 19 nt, Artificial Sequence
  Description of Artificial Sequence: Synthetic oligonucleotide
  Sense strand starting at position 2764 of SEQ ID NO: 2754
ggguauggccaauguguga

SEQ ID NO: 213837 - RNA, 19 nt, Artificial Sequence
  Description of Artificial Sequence: Synthetic oligonucleotide
  Antisense strand to SEQ ID NO: 213836
ucacacauuggccauaccc

SEQ ID NO: 213838 - RNA, 19 nt, Artificial Sequence
  Description of Artificial Sequence: Synthetic oligonucleotide
  Sense strand starting at position 2808 of SEQ ID NO: 2754
cagaguguuagaggcauau

SEQ ID NO: 213839 - RNA, 19 nt, Artificial Sequence
  Description of Artificial Sequence: Synthetic oligonucleotide
  Antisense strand to SEQ ID NO: 213838
auaugccucuaacacucug

SEQ ID NO: 213840 - RNA, 19 nt, Artificial Sequence
  Description of Artificial Sequence: Synthetic oligonucleotide
  Sense strand starting at position 2810 of SEQ ID NO: 2754
gaguguuagaggcauaugu

SEQ ID NO: 213841 - RNA, 19 nt, Artificial Sequence
  Description of Artificial Sequence: Synthetic oligonucleotide
  Antisense strand to SEQ ID NO: 213840
acauaugccucuaacacuc

SEQ ID NO: 213842 - RNA, 19 nt, Artificial Sequence
  Description of Artificial Sequence: Synthetic oligonucleotide
  Sense strand starting at position 2812 of SEQ ID NO: 2754
guguuagaggcauauguau

SEQ ID NO: 213843 - RNA, 19 nt, Artificial Sequence
  Description of Artificial Sequence: Synthetic oligonucleotide
  Antisense strand to SEQ ID NO: 213842
auacauaugccucuaacac

SEQ ID NO: 213844 - RNA, 19 nt, Artificial Sequence
  Description of Artificial Sequence: Synthetic oligonucleotide
  Sense strand starting at position 2814 of SEQ ID NO: 2754
guuagaggcauauguauug

SEQ ID NO: 213845 - RNA, 19 nt, Artificial Sequence
  Description of Artificial Sequence: Synthetic oligonucleotide
  Antisense strand to SEQ ID NO: 213844
caauacauaugccucuaac

SEQ ID NO: 213846 - RNA, 19 nt, Artificial Sequence
  Description of Artificial Sequence: Synthetic oligonucleotide
  Sense strand starting at position 2842 of SEQ ID NO: 2754
ggugaacucuuccugaguu

SEQ ID NO: 213847 - RNA, 19 nt, Artificial Sequence
  Description of Artificial Sequence: Synthetic oligonucleotide
  Antisense strand to SEQ ID NO: 213846
aacucaggaagaguucacc

SEQ ID NO: 213848 - RNA, 19 nt, Artificial Sequence
  Description of Artificial Sequence: Synthetic oligonucleotide
  Sense strand starting at position 2844 of SEQ ID NO: 2754
ugaacucuuccugaguugu

SEQ ID NO: 213849 - RNA, 19 nt, Artificial Sequence
  Description of Artificial Sequence: Synthetic oligonucleotide
  Antisense strand to SEQ ID NO: 213848
acaacucaggaagaguuca

SEQ ID NO: 213850 - RNA, 19 nt, Artificial Sequence
  Description of Artificial Sequence: Synthetic oligonucleotide
  Sense strand starting at position 2852 of SEQ ID NO: 2754
uccugaguuguuugugaca

SEQ ID NO: 213851 - RNA, 19 nt, Artificial Sequence
  Description of Artificial Sequence: Synthetic oligonucleotide
  Antisense strand to SEQ ID NO: 213850
ugucacaaacaacucagga

SEQ ID NO: 213852 - RNA, 19 nt, Artificial Sequence
  Description of Artificial Sequence: Synthetic oligonucleotide
  Sense strand starting at position 2921 of SEQ ID NO: 2754
uccuccucccagugaugaa

SEQ ID NO: 213853 - RNA, 19 nt, Artificial Sequence
  Description of Artificial Sequence: Synthetic oligonucleotide
  Antisense strand to SEQ ID NO: 213852
uucaucacugggaggagga

SEQ ID NO: 213854 - RNA, 19 nt, Artificial Sequence
  Description of Artificial Sequence: Synthetic oligonucleotide
  Sense strand starting at position 3141 of SEQ ID NO: 2754
aaguuauauguugaagucu

SEQ ID NO: 213855 - RNA, 19 nt, Artificial Sequence
  Description of Artificial Sequence: Synthetic oligonucleotide
  Antisense strand to SEQ ID NO: 213854
agacuucaacauauaacuu

SEQ ID NO: 213856 - RNA, 19 nt, Artificial Sequence
  Description of Artificial Sequence: Synthetic oligonucleotide
  Sense strand starting at position 3258 of SEQ ID NO: 2754
aaucaauaugacugguguu

SEQ ID NO: 213857 - RNA, 19 nt, Artificial Sequence
  Description of Artificial Sequence: Synthetic oligonucleotide
  Antisense strand to SEQ ID NO: 213856
aacaccagucauauugauu

SEQ ID NO: 213858 - RNA, 19 nt, Artificial Sequence
  Description of Artificial Sequence: Synthetic oligonucleotide
  Sense strand starting at position 3325 of SEQ ID NO: 2754
uugcuauggccugaauauc

SEQ ID NO: 213859 - RNA, 19 nt, Artificial Sequence
  Description of Artificial Sequence: Synthetic oligonucleotide
  Antisense strand to SEQ ID NO: 213858
gauauucaggccauagcaa

SEQ ID NO: 213860 - RNA, 19 nt, Artificial Sequence
  Description of Artificial Sequence: Synthetic oligonucleotide
  Sense strand starting at position 3846 of SEQ ID NO: 2754
acgcaccaucucugaggaa

SEQ ID NO: 213861 - RNA, 19 nt, Artificial Sequence
  Description of Artificial Sequence: Synthetic oligonucleotide
  Antisense strand to SEQ ID NO: 213860
uuccucagagauggugcgu

SEQ ID NO: 213862 - RNA, 19 nt, Artificial Sequence
  Description of Artificial Sequence: Synthetic oligonucleotide
  Sense strand starting at position 3957 of SEQ ID NO: 2754
uuacucagucugugggauu

SEQ ID NO: 213863 - RNA, 19 nt, Artificial Sequence
  Description of Artificial Sequence: Synthetic oligonucleotide
  Antisense strand to SEQ ID NO: 213862
aaucccacagacugaguaa

SEQ ID NO: 213864 - RNA, 19 nt, Artificial Sequence
  Description of Artificial Sequence: Synthetic oligonucleotide
  Sense strand starting at position 263 of SEQ ID NO: 2755
uguguugacuaggcaauuu

SEQ ID NO: 213865 - RNA, 19 nt, Artificial Sequence
  Description of Artificial Sequence: Synthetic oligonucleotide
  Antisense strand to SEQ ID NO: 213864
aaauugccuagucaacaca

SEQ ID NO: 213866 - RNA, 19 nt, Artificial Sequence
  Description of Artificial Sequence: Synthetic oligonucleotide
  Sense strand starting at position 286 of SEQ ID NO: 2755
ucaucagucuauucugaca

SEQ ID NO: 213867 - RNA, 19 nt, Artificial Sequence
  Description of Artificial Sequence: Synthetic oligonucleotide
  Antisense strand to SEQ ID NO: 213866
ugucagaauagacugauga

SEQ ID NO: 213868 - RNA, 19 nt, Artificial Sequence
  Description of Artificial Sequence: Synthetic oligonucleotide
  Sense strand starting at position 344 of SEQ ID NO: 2755
uuucgucaagacuaguaaa

SEQ ID NO: 213869 - RNA, 19 nt, Artificial Sequence
  Description of Artificial Sequence: Synthetic oligonucleotide
  Antisense strand to SEQ ID NO: 213868
uuuacuagucuugacgaaa

SEQ ID NO: 213870 - RNA, 19 nt, Artificial Sequence
  Description of Artificial Sequence: Synthetic oligonucleotide
  Sense strand starting at position 368 of SEQ ID NO: 2755
uuguuauagccacauacau

SEQ ID NO: 213871 - RNA, 19 nt, Artificial Sequence
  Description of Artificial Sequence: Synthetic oligonucleotide
  Antisense strand to SEQ ID NO: 213870
auguauguggcuauaacaa

SEQ ID NO: 213872 - RNA, 19 nt, Artificial Sequence
  Description of Artificial Sequence: Synthetic oligonucleotide
  Sense strand starting at position 612 of SEQ ID NO: 2755
ucuugaauauuguucuaga

SEQ ID NO: 213873 - RNA, 19 nt, Artificial Sequence
  Description of Artificial Sequence: Synthetic oligonucleotide
  Antisense strand to SEQ ID NO: 213872
ucuagaacaauauucaaga

SEQ ID NO: 213874 - RNA, 19 nt, Artificial Sequence
  Description of Artificial Sequence: Synthetic oligonucleotide
  Sense strand starting at position 613 of SEQ ID NO: 2755
cuugaauauuguucuagaa

SEQ ID NO: 213875 - RNA, 19 nt, Artificial Sequence
  Description of Artificial Sequence: Synthetic oligonucleotide
  Antisense strand to SEQ ID NO: 213874
uucuagaacaauauucaag

SEQ ID NO: 213876 - RNA, 19 nt, Artificial Sequence
  Description of Artificial Sequence: Synthetic oligonucleotide
  Sense strand starting at position 639 of SEQ ID NO: 2755
ggagauacuuuggccauga

SEQ ID NO: 213877 - RNA, 19 nt, Artificial Sequence
  Description of Artificial Sequence: Synthetic oligonucleotide
  Antisense strand to SEQ ID NO: 213876
ucauggccaaaguaucucc

SEQ ID NO: 213878 - RNA, 19 nt, Artificial Sequence
  Description of Artificial Sequence: Synthetic oligonucleotide
  Sense strand starting at position 640 of SEQ ID NO: 2755
gagauacuuuggccaugac

SEQ ID NO: 213879 - RNA, 19 nt, Artificial Sequence
  Description of Artificial Sequence: Synthetic oligonucleotide
  Antisense strand to SEQ ID NO: 213878
gucauggccaaaguaucuc

SEQ ID NO: 213880 - RNA, 19 nt, Artificial Sequence
  Description of Artificial Sequence: Synthetic oligonucleotide
  Sense strand starting at position 643 of SEQ ID NO: 2755
auacuuuggccaugacauu

SEQ ID NO: 213881 - RNA, 19 nt, Artificial Sequence
  Description of Artificial Sequence: Synthetic oligonucleotide
  Antisense strand to SEQ ID NO: 213880
aaugucauggccaaaguau

SEQ ID NO: 213882 - RNA, 19 nt, Artificial Sequence
  Description of Artificial Sequence: Synthetic oligonucleotide
  Sense strand starting at position 737 of SEQ ID NO: 2755
gccaguauagucuacuuaa

SEQ ID NO: 213883 - RNA, 19 nt, Artificial Sequence
  Description of Artificial Sequence: Synthetic oligonucleotide
  Antisense strand to SEQ ID NO: 213882
uuaaguagacuauacuggc

SEQ ID NO: 213884 - RNA, 19 nt, Artificial Sequence
  Description of Artificial Sequence: Synthetic oligonucleotide
  Sense strand starting at position 773 of SEQ ID NO: 2755
gaccaacucuaguugagau

SEQ ID NO: 213885 - RNA, 19 nt, Artificial Sequence
  Description of Artificial Sequence: Synthetic oligonucleotide
  Antisense strand to SEQ ID NO: 213884
aucucaacuagaguugguc

SEQ ID NO: 213886 - RNA, 19 nt, Artificial Sequence
  Description of Artificial Sequence: Synthetic oligonucleotide
  Sense strand starting at position 785 of SEQ ID NO: 2755
uugagauagaaugguuucu

SEQ ID NO: 213887 - RNA, 19 nt, Artificial Sequence
  Description of Artificial Sequence: Synthetic oligonucleotide
  Antisense strand to SEQ ID NO: 213886
agaaaccauucuaucucaa

SEQ ID NO: 213888 - RNA, 19 nt, Artificial Sequence
  Description of Artificial Sequence: Synthetic oligonucleotide
  Sense strand starting at position 790 of SEQ ID NO: 2755
auagaaugguuucuaauuc

SEQ ID NO: 213889 - RNA, 19 nt, Artificial Sequence
  Description of Artificial Sequence: Synthetic oligonucleotide
  Antisense strand to SEQ ID NO: 213888
gaauuagaaaccauucuau

SEQ ID NO: 213890 - RNA, 19 nt, Artificial Sequence
  Description of Artificial Sequence: Synthetic oligonucleotide
  Sense strand starting at position 962 of SEQ ID NO: 2755
guacaaagcugauuugcau

SEQ ID NO: 213891 - RNA, 19 nt, Artificial Sequence
  Description of Artificial Sequence: Synthetic oligonucleotide
  Antisense strand to SEQ ID NO: 213890
augcaaaucagcuuuguac

SEQ ID NO: 213892 - RNA, 19 nt, Artificial Sequence
  Description of Artificial Sequence: Synthetic oligonucleotide
  Sense strand starting at position 1017 of SEQ ID NO: 2755
ugagauuaaugucuuugua

SEQ ID NO: 213893 - RNA, 19 nt, Artificial Sequence
  Description of Artificial Sequence: Synthetic oligonucleotide
  Antisense strand to SEQ ID NO: 213892
uacaaagacauuaaucuca

SEQ ID NO: 213894 - RNA, 19 nt, Artificial Sequence
  Description of Artificial Sequence: Synthetic oligonucleotide
  Sense strand starting at position 1019 of SEQ ID NO: 2755
agauuaaugucuuuguagg

SEQ ID NO: 213895 - RNA, 19 nt, Artificial Sequence
  Description of Artificial Sequence: Synthetic oligonucleotide
  Antisense strand to SEQ ID NO: 213894
ccuacaaagacauuaaucu

SEQ ID NO: 213896 - RNA, 19 nt, Artificial Sequence
  Description of Artificial Sequence: Synthetic oligonucleotide
  Sense strand starting at position 1020 of SEQ ID NO: 2755
gauuaaugucuuuguagga

SEQ ID NO: 213897 - RNA, 19 nt, Artificial Sequence
  Description of Artificial Sequence: Synthetic oligonucleotide
  Antisense strand to SEQ ID NO: 213896
uccuacaaagacauuaauc

SEQ ID NO: 213898 - RNA, 19 nt, Artificial Sequence
  Description of Artificial Sequence: Synthetic oligonucleotide
  Sense strand starting at position 1226 of SEQ ID NO: 2755
uuuggaaacucauucugca

SEQ ID NO: 213899 - RNA, 19 nt, Artificial Sequence
  Description of Artificial Sequence: Synthetic oligonucleotide
  Antisense strand to SEQ ID NO: 213898
ugcagaaugaguuuccaaa

SEQ ID NO: 213900 - RNA, 19 nt, Artificial Sequence
  Description of Artificial Sequence: Synthetic oligonucleotide
  Sense strand starting at position 1304 of SEQ ID NO: 2755
gcacguuuaaucgcaagcu

SEQ ID NO: 213901 - RNA, 19 nt, Artificial Sequence
  Description of Artificial Sequence: Synthetic oligonucleotide
  Antisense strand to SEQ ID NO: 213900
agcuugcgauuaaacgugc

SEQ ID NO: 213902 - RNA, 19 nt, Artificial Sequence
  Description of Artificial Sequence: Synthetic oligonucleotide
  Sense strand starting at position 1322 of SEQ ID NO: 2755
ucaugaaagucggcuagaa

SEQ ID NO: 213903 - RNA, 19 nt, Artificial Sequence
  Description of Artificial Sequence: Synthetic oligonucleotide
  Antisense strand to SEQ ID NO: 213902
uucuagccgacuuucauga

SEQ ID NO: 213904 - RNA, 19 nt, Artificial Sequence
  Description of Artificial Sequence: Synthetic oligonucleotide
  Sense strand starting at position 1324 of SEQ ID NO: 2755
augaaagucggcuagaaug

SEQ ID NO: 213905 - RNA, 19 nt, Artificial Sequence
  Description of Artificial Sequence: Synthetic oligonucleotide
  Antisense strand to SEQ ID NO: 213904
cauucuagccgacuuucau

SEQ ID NO: 213906 - RNA, 19 nt, Artificial Sequence
  Description of Artificial Sequence: Synthetic oligonucleotide
  Sense strand starting at position 1331 of SEQ ID NO: 2755
ucggcuagaaugcagaaau

SEQ ID NO: 213907 - RNA, 19 nt, Artificial Sequence
  Description of Artificial Sequence: Synthetic oligonucleotide
  Antisense strand to SEQ ID NO: 213906
auuucugcauucuagccga

SEQ ID NO: 213908 - RNA, 19 nt, Artificial Sequence
  Description of Artificial Sequence: Synthetic oligonucleotide
  Sense strand starting at position 2100 of SEQ ID NO: 2755
ccuugauuagggugucaag

SEQ ID NO: 213909 - RNA, 19 nt, Artificial Sequence
  Description of Artificial Sequence: Synthetic oligonucleotide
  Antisense strand to SEQ ID NO: 213908
cuugacacccuaaucaagg

SEQ ID NO: 213910 - RNA, 19 nt, Artificial Sequence
  Description of Artificial Sequence: Synthetic oligonucleotide
  Sense strand starting at position 2235 of SEQ ID NO: 2755
gcuauuuggcucugaaauu

SEQ ID NO: 213911 - RNA, 19 nt, Artificial Sequence
  Description of Artificial Sequence: Synthetic oligonucleotide
  Antisense strand to SEQ ID NO: 213910
aauuucagagccaaauagc

SEQ ID NO: 213912 - RNA, 19 nt, Artificial Sequence
  Description of Artificial Sequence: Synthetic oligonucleotide
  Sense strand starting at position 2304 of SEQ ID NO: 2755
ucgucacucguguccagau

SEQ ID NO: 213913 - RNA, 19 nt, Artificial Sequence
  Description of Artificial Sequence: Synthetic oligonucleotide
  Antisense strand to SEQ ID NO: 213912
aucuggacacgagugacga

SEQ ID NO: 213914 - RNA, 19 nt, Artificial Sequence
  Description of Artificial Sequence: Synthetic oligonucleotide
  Sense strand starting at position 2414 of SEQ ID NO: 2755
cagccagaggaauguaauu

SEQ ID NO: 213915 - RNA, 19 nt, Artificial Sequence
  Description of Artificial Sequence: Synthetic oligonucleotide
  Antisense strand to SEQ ID NO: 213914
aauuacauuccucuggcug

SEQ ID NO: 213916 - RNA, 19 nt, Artificial Sequence
  Description of Artificial Sequence: Synthetic oligonucleotide
  Sense strand starting at position 2642 of SEQ ID NO: 2755
cuguaaaggcuuuggaaac

SEQ ID NO: 213917 - RNA, 19 nt, Artificial Sequence
  Description of Artificial Sequence: Synthetic oligonucleotide
  Antisense strand to SEQ ID NO: 213916
guuuccaaagccuuuacag

SEQ ID NO: 213918 - RNA, 19 nt, Artificial Sequence
  Description of Artificial Sequence: Synthetic oligonucleotide
  Sense strand starting at position 2772 of SEQ ID NO: 2755
agaucugcucauuagagcu

SEQ ID NO: 213919 - RNA, 19 nt, Artificial Sequence
  Description of Artificial Sequence: Synthetic oligonucleotide
  Antisense strand to SEQ ID NO: 213918
agcucuaaugagcagaucu

SEQ ID NO: 213920 - RNA, 19 nt, Artificial Sequence
  Description of Artificial Sequence: Synthetic oligonucleotide
  Sense strand starting at position 2811 of SEQ ID NO: 2755
aggaaauucgcuuggacua

SEQ ID NO: 213921 - RNA, 19 nt, Artificial Sequence
  Description of Artificial Sequence: Synthetic oligonucleotide
  Antisense strand to SEQ ID NO: 213920
uaguccaagcgaauuuccu

SEQ ID NO: 213922 - RNA, 19 nt, Artificial Sequence
  Description of Artificial Sequence: Synthetic oligonucleotide
  Sense strand starting at position 2874 of SEQ ID NO: 2755
gauuguucuuucuugaaga

SEQ ID NO: 213923 - RNA, 19 nt, Artificial Sequence
  Description of Artificial Sequence: Synthetic oligonucleotide
  Antisense strand to SEQ ID NO: 213922
ucuucaagaaagaacaauc

SEQ ID NO: 213924 - RNA, 19 nt, Artificial Sequence
  Description of Artificial Sequence: Synthetic oligonucleotide
  Sense strand starting at position 2876 of SEQ ID NO: 2755
uuguucuuucuugaagauu

SEQ ID NO: 213925 - RNA, 19 nt, Artificial Sequence
  Description of Artificial Sequence: Synthetic oligonucleotide
  Antisense strand to SEQ ID NO: 213924
aaucuucaagaaagaacaa

SEQ ID NO: 213926 - RNA, 19 nt, Artificial Sequence
  Description of Artificial Sequence: Synthetic oligonucleotide
  Sense strand starting at position 3484 of SEQ ID NO: 2755
gggaacuugaagugagcau

SEQ ID NO: 213927 - RNA, 19 nt, Artificial Sequence
  Description of Artificial Sequence: Synthetic oligonucleotide
  Antisense strand to SEQ ID NO: 213926
augcucacuucaaguuccc

SEQ ID NO: 213928 - RNA, 19 nt, Artificial Sequence
  Description of Artificial Sequence: Synthetic oligonucleotide
  Sense strand starting at position 3522 of SEQ ID NO: 2755
gggcaagaacucuguuaag

SEQ ID NO: 213929 - RNA, 19 nt, Artificial Sequence
  Description of Artificial Sequence: Synthetic oligonucleotide
  Antisense strand to SEQ ID NO: 213928
cuuaacagaguucuugccc

SEQ ID NO: 213930 - RNA, 19 nt, Artificial Sequence
  Description of Artificial Sequence: Synthetic oligonucleotide
  Sense strand starting at position 3582 of SEQ ID NO: 2755
ugguguucucuguugguuu

SEQ ID NO: 213931 - RNA, 19 nt, Artificial Sequence
  Description of Artificial Sequence: Synthetic oligonucleotide
  Antisense strand to SEQ ID NO: 213930
aaaccaacagagaacacca

SEQ ID NO: 213932 - RNA, 19 nt, Artificial Sequence
  Description of Artificial Sequence: Synthetic oligonucleotide
  Sense strand starting at position 3637 of SEQ ID NO: 2755
uagagaaucugaguguuua

SEQ ID NO: 213933 - RNA, 19 nt, Artificial Sequence
  Description of Artificial Sequence: Synthetic oligonucleotide
  Antisense strand to SEQ ID NO: 213932
uaaacacucagauucucua

SEQ ID NO: 213934 - RNA, 19 nt, Artificial Sequence
  Description of Artificial Sequence: Synthetic oligonucleotide
  Sense strand starting at position 3638 of SEQ ID NO: 2755
agagaaucugaguguuuaa

SEQ ID NO: 213935 - RNA, 19 nt, Artificial Sequence
  Description of Artificial Sequence: Synthetic oligonucleotide
  Antisense strand to SEQ ID NO: 213934
uuaaacacucagauucucu

SEQ ID NO: 213936 - RNA, 19 nt, Artificial Sequence
  Description of Artificial Sequence: Synthetic oligonucleotide
  Sense strand starting at position 3641 of SEQ ID NO: 2755
gaaucugaguguuuaaccu

SEQ ID NO: 213937 - RNA, 19 nt, Artificial Sequence
  Description of Artificial Sequence: Synthetic oligonucleotide
  Antisense strand to SEQ ID NO: 213936
agguuaaacacucagauuc

SEQ ID NO: 213938 - RNA, 19 nt, Artificial Sequence
  Description of Artificial Sequence: Synthetic oligonucleotide
  Sense strand starting at position 3650 of SEQ ID NO: 2755
uguuuaaccucuucuggaa

SEQ ID NO: 213939 - RNA, 19 nt, Artificial Sequence
  Description of Artificial Sequence: Synthetic oligonucleotide
  Antisense strand to SEQ ID NO: 213938
uuccagaagagguuaaaca

SEQ ID NO: 213940 - RNA, 19 nt, Artificial Sequence
  Description of Artificial Sequence: Synthetic oligonucleotide
  Sense strand starting at position 3760 of SEQ ID NO: 2755
uauauugaggcugagcauu

SEQ ID NO: 213941 - RNA, 19 nt, Artificial Sequence
  Description of Artificial Sequence: Synthetic oligonucleotide
  Antisense strand to SEQ ID NO: 213940
aaugcucagccucaauaua

SEQ ID NO: 213942 - RNA, 19 nt, Artificial Sequence
  Description of Artificial Sequence: Synthetic oligonucleotide
  Sense strand starting at position 3934 of SEQ ID NO: 2755
cucaaacauuuccagagga

SEQ ID NO: 213943 - RNA, 19 nt, Artificial Sequence
  Description of Artificial Sequence: Synthetic oligonucleotide
  Antisense strand to SEQ ID NO: 213942
uccucuggaaauguuugag

SEQ ID NO: 213944 - RNA, 19 nt, Artificial Sequence
  Description of Artificial Sequence: Synthetic oligonucleotide
  Sense strand starting at position 507 of SEQ ID NO: 2756
aggaucauuccaggcagua

SEQ ID NO: 213945 - RNA, 19 nt, Artificial Sequence
  Description of Artificial Sequence: Synthetic oligonucleotide
  Antisense strand to SEQ ID NO: 213944
uacugccuggaaugauccu

SEQ ID NO: 213946 - RNA, 19 nt, Artificial Sequence
  Description of Artificial Sequence: Synthetic oligonucleotide
  Sense strand starting at position 827 of SEQ ID NO: 2756
agcuauggugcuccgcaaa

SEQ ID NO: 213947 - RNA, 19 nt, Artificial Sequence
  Description of Artificial Sequence: Synthetic oligonucleotide
  Antisense strand to SEQ ID NO: 213946
uuugcggagcaccauagcu

SEQ ID NO: 213948 - RNA, 19 nt, Artificial Sequence
  Description of Artificial Sequence: Synthetic oligonucleotide
  Sense strand starting at position 830 of SEQ ID NO: 2756
uauggugcuccgcaaagaa

SEQ ID NO: 213949 - RNA, 19 nt, Artificial Sequence
  Description of Artificial Sequence: Synthetic oligonucleotide
  Antisense strand to SEQ ID NO: 213948
uucuuugcggagcaccaua

SEQ ID NO: 213950 - RNA, 19 nt, Artificial Sequence
  Description of Artificial Sequence: Synthetic oligonucleotide
  Sense strand starting at position 879 of SEQ ID NO: 2756
cuaggaguucagggcagau

SEQ ID NO: 213951 - RNA, 19 nt, Artificial Sequence
  Description of Artificial Sequence: Synthetic oligonucleotide
  Antisense strand to SEQ ID NO: 213950
aucugcccugaacuccuag

SEQ ID NO: 213952 - RNA, 19 nt, Artificial Sequence
  Description of Artificial Sequence: Synthetic oligonucleotide
  Sense strand starting at position 1015 of SEQ ID NO: 2756
gucugauuaauguaaggua

SEQ ID NO: 213953 - RNA, 19 nt, Artificial Sequence
  Description of Artificial Sequence: Synthetic oligonucleotide
  Antisense strand to SEQ ID NO: 213952
uaccuuacauuaaucagac

SEQ ID NO: 213954 - RNA, 19 nt, Artificial Sequence
  Description of Artificial Sequence: Synthetic oligonucleotide
  Sense strand starting at position 1050 of SEQ ID NO: 2756
gaagacaggccuugaaauc

SEQ ID NO: 213955 - RNA, 19 nt, Artificial Sequence
  Description of Artificial Sequence: Synthetic oligonucleotide
  Antisense strand to SEQ ID NO: 213954
gauuucaaggccugucuuc

SEQ ID NO: 213956 - RNA, 19 nt, Artificial Sequence
  Description of Artificial Sequence: Synthetic oligonucleotide
  Sense strand starting at position 1131 of SEQ ID NO: 2756
cuagaauuccagggagagc

SEQ ID NO: 213957 - RNA, 19 nt, Artificial Sequence
  Description of Artificial Sequence: Synthetic oligonucleotide
  Antisense strand to SEQ ID NO: 213956
gcucucccuggaauucuag

SEQ ID NO: 213958 - RNA, 19 nt, Artificial Sequence
  Description of Artificial Sequence: Synthetic oligonucleotide
  Sense strand starting at position 1227 of SEQ ID NO: 2756
aagagugucuuagccaaag

SEQ ID NO: 213959 - RNA, 19 nt, Artificial Sequence
  Description of Artificial Sequence: Synthetic oligonucleotide
  Antisense strand to SEQ ID NO: 213958
cuuuggcuaagacacucuu

SEQ ID NO: 213960 - RNA, 19 nt, Artificial Sequence
  Description of Artificial Sequence: Synthetic oligonucleotide
  Sense strand starting at position 1229 of SEQ ID NO: 2756
gagugucuuagccaaagag

SEQ ID NO: 213961 - RNA, 19 nt, Artificial Sequence
  Description of Artificial Sequence: Synthetic oligonucleotide
  Antisense strand to SEQ ID NO: 213960
cucuuuggcuaagacacuc

SEQ ID NO: 213962 - RNA, 19 nt, Artificial Sequence
  Description of Artificial Sequence: Synthetic oligonucleotide
  Sense strand starting at position 1349 of SEQ ID NO: 2756
aggucagaguggucuagga

SEQ ID NO: 213963 - RNA, 19 nt, Artificial Sequence
  Description of Artificial Sequence: Synthetic oligonucleotide
  Antisense strand to SEQ ID NO: 213962
uccuagaccacucugaccu

SEQ ID NO: 213964 - RNA, 19 nt, Artificial Sequence
  Description of Artificial Sequence: Synthetic oligonucleotide
  Sense strand starting at position 1351 of SEQ ID NO: 2756
gucagaguggucuaggaac

SEQ ID NO: 213965 - RNA, 19 nt, Artificial Sequence
  Description of Artificial Sequence: Synthetic oligonucleotide
  Antisense strand to SEQ ID NO: 213964
guuccuagaccacucugac

SEQ ID NO: 213966 - RNA, 19 nt, Artificial Sequence
  Description of Artificial Sequence: Synthetic oligonucleotide
  Sense strand starting at position 1353 of SEQ ID NO: 2756
cagaguggucuaggaacaa

SEQ ID NO: 213967 - RNA, 19 nt, Artificial Sequence
  Description of Artificial Sequence: Synthetic oligonucleotide
  Antisense strand to SEQ ID NO: 213966
uuguuccuagaccacucug

SEQ ID NO: 213968 - RNA, 19 nt, Artificial Sequence
  Description of Artificial Sequence: Synthetic oligonucleotide
  Sense strand starting at position 1405 of SEQ ID NO: 2756
caggcagaucuggaagguu

SEQ ID NO: 213969 - RNA, 19 nt, Artificial Sequence
  Description of Artificial Sequence: Synthetic oligonucleotide
  Antisense strand to SEQ ID NO: 213968
aaccuuccagaucugccug

SEQ ID NO: 213970 - RNA, 19 nt, Artificial Sequence
  Description of Artificial Sequence: Synthetic oligonucleotide
  Sense strand starting at position 1426 of SEQ ID NO: 2756
aaagguaaaguuuggugau

SEQ ID NO: 213971 - RNA, 19 nt, Artificial Sequence
  Description of Artificial Sequence: Synthetic oligonucleotide
  Antisense strand to SEQ ID NO: 213970
aucaccaaacuuuaccuuu

SEQ ID NO: 213972 - RNA, 19 nt, Artificial Sequence
  Description of Artificial Sequence: Synthetic oligonucleotide
  Sense strand starting at position 1428 of SEQ ID NO: 2756
agguaaaguuuggugauca

SEQ ID NO: 213973 - RNA, 19 nt, Artificial Sequence
  Description of Artificial Sequence: Synthetic oligonucleotide
  Antisense strand to SEQ ID NO: 213972
ugaucaccaaacuuuaccu

SEQ ID NO: 213974 - RNA, 19 nt, Artificial Sequence
  Description of Artificial Sequence: Synthetic oligonucleotide
  Sense strand starting at position 1475 of SEQ ID NO: 2756
ggguguaggagucauagag

SEQ ID NO: 213975 - RNA, 19 nt, Artificial Sequence
  Description of Artificial Sequence: Synthetic oligonucleotide
  Antisense strand to SEQ ID NO: 213974
cucuaugacuccuacaccc

SEQ ID NO: 213976 - RNA, 19 nt, Artificial Sequence
  Description of Artificial Sequence: Synthetic oligonucleotide
  Sense strand starting at position 1555 of SEQ ID NO: 2756
ggcagagauugggugaaga

SEQ ID NO: 213977 - RNA, 19 nt, Artificial Sequence
  Description of Artificial Sequence: Synthetic oligonucleotide
  Antisense strand to SEQ ID NO: 213976
ucuucacccaaucucugcc

SEQ ID NO: 213978 - RNA, 19 nt, Artificial Sequence
  Description of Artificial Sequence: Synthetic oligonucleotide
  Sense strand starting at position 1677 of SEQ ID NO: 2756
cugaauccugagggucaga

SEQ ID NO: 213979 - RNA, 19 nt, Artificial Sequence
  Description of Artificial Sequence: Synthetic oligonucleotide
  Antisense strand to SEQ ID NO: 213978
ucugacccucaggauucag

SEQ ID NO: 213980 - RNA, 19 nt, Artificial Sequence
  Description of Artificial Sequence: Synthetic oligonucleotide
  Sense strand starting at position 1743 of SEQ ID NO: 2756
aggucuagaucacugggua

SEQ ID NO: 213981 - RNA, 19 nt, Artificial Sequence
  Description of Artificial Sequence: Synthetic oligonucleotide
  Antisense strand to SEQ ID NO: 213980
uacccagugaucuagaccu

SEQ ID NO: 213982 - RNA, 19 nt, Artificial Sequence
  Description of Artificial Sequence: Synthetic oligonucleotide
  Sense strand starting at position 1744 of SEQ ID NO: 2756
ggucuagaucacuggguaa

SEQ ID NO: 213983 - RNA, 19 nt, Artificial Sequence
  Description of Artificial Sequence: Synthetic oligonucleotide
  Antisense strand to SEQ ID NO: 213982
uuacccagugaucuagacc

SEQ ID NO: 213984 - RNA, 19 nt, Artificial Sequence
  Description of Artificial Sequence: Synthetic oligonucleotide
  Sense strand starting at position 1806 of SEQ ID NO: 2756
cucacaucucgagaccuuu

SEQ ID NO: 213985 - RNA, 19 nt, Artificial Sequence
  Description of Artificial Sequence: Synthetic oligonucleotide
  Antisense strand to SEQ ID NO: 213984
aaaggucucgagaugugag

SEQ ID NO: 213986 - RNA, 19 nt, Artificial Sequence
  Description of Artificial Sequence: Synthetic oligonucleotide
  Sense strand starting at position 2131 of SEQ ID NO: 2756
agagaaugcgccgcugagu

SEQ ID NO: 213987 - RNA, 19 nt, Artificial Sequence
  Description of Artificial Sequence: Synthetic oligonucleotide
  Antisense strand to SEQ ID NO: 213986
acucagcggcgcauucucu

SEQ ID NO: 213988 - RNA, 19 nt, Artificial Sequence
  Description of Artificial Sequence: Synthetic oligonucleotide
  Sense strand starting at position 2132 of SEQ ID NO: 2756
gagaaugcgccgcugaguu

SEQ ID NO: 213989 - RNA, 19 nt, Artificial Sequence
  Description of Artificial Sequence: Synthetic oligonucleotide
  Antisense strand to SEQ ID NO: 213988
aacucagcggcgcauucuc

SEQ ID NO: 213990 - RNA, 19 nt, Artificial Sequence
  Description of Artificial Sequence: Synthetic oligonucleotide
  Sense strand starting at position 2283 of SEQ ID NO: 2756
ggcuguugggcucagggau

SEQ ID NO: 213991 - RNA, 19 nt, Artificial Sequence
  Description of Artificial Sequence: Synthetic oligonucleotide
  Antisense strand to SEQ ID NO: 213990
aucccugagcccaacagcc

SEQ ID NO: 213992 - RNA, 19 nt, Artificial Sequence
  Description of Artificial Sequence: Synthetic oligonucleotide
  Sense strand starting at position 2514 of SEQ ID NO: 2756
guuuaauccugacuccaug

SEQ ID NO: 213993 - RNA, 19 nt, Artificial Sequence
  Description of Artificial Sequence: Synthetic oligonucleotide
  Antisense strand to SEQ ID NO: 213992
cauggagucaggauuaaac

SEQ ID NO: 213994 - RNA, 19 nt, Artificial Sequence
  Description of Artificial Sequence: Synthetic oligonucleotide
  Sense strand starting at position 2675 of SEQ ID NO: 2756
uggucagagaacugagcau

SEQ ID NO: 213995 - RNA, 19 nt, Artificial Sequence
  Description of Artificial Sequence: Synthetic oligonucleotide
  Antisense strand to SEQ ID NO: 213994
augcucaguucucugacca

SEQ ID NO: 213996 - RNA, 19 nt, Artificial Sequence
  Description of Artificial Sequence: Synthetic oligonucleotide
  Sense strand starting at position 2796 of SEQ ID NO: 2756
agagcuacuugauugugaa

SEQ ID NO: 213997 - RNA, 19 nt, Artificial Sequence
  Description of Artificial Sequence: Synthetic oligonucleotide
  Antisense strand to SEQ ID NO: 213996
uucacaaucaaguagcucu

SEQ ID NO: 213998 - RNA, 19 nt, Artificial Sequence
  Description of Artificial Sequence: Synthetic oligonucleotide
  Sense strand starting at position 2797 of SEQ ID NO: 2756
gagcuacuugauugugaac

SEQ ID NO: 213999 - RNA, 19 nt, Artificial Sequence
  Description of Artificial Sequence: Synthetic oligonucleotide
  Antisense strand to SEQ ID NO: 213998
guucacaaucaaguagcuc

SEQ ID NO: 214000 - RNA, 19 nt, Artificial Sequence
  Description of Artificial Sequence: Synthetic oligonucleotide
  Sense strand starting at position 2833 of SEQ ID NO: 2756
agucgcagugugucuguaa

SEQ ID NO: 214001 - RNA, 19 nt, Artificial Sequence
  Description of Artificial Sequence: Synthetic oligonucleotide
  Antisense strand to SEQ ID NO: 214000
uuacagacacacugcgacu

SEQ ID NO: 214002 - RNA, 19 nt, Artificial Sequence
  Description of Artificial Sequence: Synthetic oligonucleotide
  Sense strand starting at position 2854 of SEQ ID NO: 2756
ugaugaugacagugacauc

SEQ ID NO: 214003 - RNA, 19 nt, Artificial Sequence
  Description of Artificial Sequence: Synthetic oligonucleotide
  Antisense strand to SEQ ID NO: 214002
gaugucacugucaucauca

SEQ ID NO: 214004 - RNA, 19 nt, Artificial Sequence
  Description of Artificial Sequence: Synthetic oligonucleotide
  Sense strand starting at position 2889 of SEQ ID NO: 2756
aagugaacaguuugauacu

SEQ ID NO: 214005 - RNA, 19 nt, Artificial Sequence
  Description of Artificial Sequence: Synthetic oligonucleotide
  Antisense strand to SEQ ID NO: 214004
aguaucaaacuguucacuu

SEQ ID NO: 214006 - RNA, 19 nt, Artificial Sequence
  Description of Artificial Sequence: Synthetic oligonucleotide
  Sense strand starting at position 2898 of SEQ ID NO: 2756
guuugauacugagcuugga

SEQ ID NO: 214007 - RNA, 19 nt, Artificial Sequence
  Description of Artificial Sequence: Synthetic oligonucleotide
  Antisense strand to SEQ ID NO: 214006
uccaagcucaguaucaaac

SEQ ID NO: 214008 - RNA, 19 nt, Artificial Sequence
  Description of Artificial Sequence: Synthetic oligonucleotide
  Sense strand starting at position 2920 of SEQ ID NO: 2756
ucaguaguucuggauaagu

SEQ ID NO: 214009 - RNA, 19 nt, Artificial Sequence
  Description of Artificial Sequence: Synthetic oligonucleotide
  Antisense strand to SEQ ID NO: 214008
acuuauccagaacuacuga

SEQ ID NO: 214010 - RNA, 19 nt, Artificial Sequence
  Description of Artificial Sequence: Synthetic oligonucleotide
  Sense strand starting at position 2922 of SEQ ID NO: 2756
aguaguucuggauaaguga

SEQ ID NO: 214011 - RNA, 19 nt, Artificial Sequence
  Description of Artificial Sequence: Synthetic oligonucleotide
  Antisense strand to SEQ ID NO: 214010
ucacuuauccagaacuacu

SEQ ID NO: 214012 - RNA, 19 nt, Artificial Sequence
  Description of Artificial Sequence: Synthetic oligonucleotide
  Sense strand starting at position 3007 of SEQ ID NO: 2756
ggucaucgcacagaaagaa

SEQ ID NO: 214013 - RNA, 19 nt, Artificial Sequence
  Description of Artificial Sequence: Synthetic oligonucleotide
  Antisense strand to SEQ ID NO: 214012
uucuuucugugcgaugacc

SEQ ID NO: 214014 - RNA, 19 nt, Artificial Sequence
  Description of Artificial Sequence: Synthetic oligonucleotide
  Sense strand starting at position 3071 of SEQ ID NO: 2756
guauguuugaugggagaag

SEQ ID NO: 214015 - RNA, 19 nt, Artificial Sequence
  Description of Artificial Sequence: Synthetic oligonucleotide
  Antisense strand to SEQ ID NO: 214014
cuucucccaucaaacauac

SEQ ID NO: 214016 - RNA, 19 nt, Artificial Sequence
  Description of Artificial Sequence: Synthetic oligonucleotide
  Sense strand starting at position 3213 of SEQ ID NO: 2756
ccuuguugguacucagaaa

SEQ ID NO: 214017 - RNA, 19 nt, Artificial Sequence
  Description of Artificial Sequence: Synthetic oligonucleotide
  Antisense strand to SEQ ID NO: 214016
uuucugaguaccaacaagg

SEQ ID NO: 214018 - RNA, 19 nt, Artificial Sequence
  Description of Artificial Sequence: Synthetic oligonucleotide
  Sense strand starting at position 3282 of SEQ ID NO: 2756
cuuagaagaucugucuaac

SEQ ID NO: 214019 - RNA, 19 nt, Artificial Sequence
  Description of Artificial Sequence: Synthetic oligonucleotide
  Antisense strand to SEQ ID NO: 214018
guuagacagaucuucuaag

SEQ ID NO: 214020 - RNA, 19 nt, Artificial Sequence
  Description of Artificial Sequence: Synthetic oligonucleotide
  Sense strand starting at position 3364 of SEQ ID NO: 2756
uuaucugaccgagaaagca

SEQ ID NO: 214021 - RNA, 19 nt, Artificial Sequence
  Description of Artificial Sequence: Synthetic oligonucleotide
  Antisense strand to SEQ ID NO: 214020
ugcuuucucggucagauaa

SEQ ID NO: 214022 - RNA, 19 nt, Artificial Sequence
  Description of Artificial Sequence: Synthetic oligonucleotide
  Sense strand starting at position 3409 of SEQ ID NO: 2756
ccgguuucuagggaucuca

SEQ ID NO: 214023 - RNA, 19 nt, Artificial Sequence
  Description of Artificial Sequence: Synthetic oligonucleotide
  Antisense strand to SEQ ID NO: 214022
ugagaucccuagaaaccgg

SEQ ID NO: 214024 - RNA, 19 nt, Artificial Sequence
  Description of Artificial Sequence: Synthetic oligonucleotide
  Sense strand starting at position 28 of SEQ ID NO: 2757
aaugauuagugugcacacu

SEQ ID NO: 214025 - RNA, 19 nt, Artificial Sequence
  Description of Artificial Sequence: Synthetic oligonucleotide
  Antisense strand to SEQ ID NO: 214024
agugugcacacuaaucauu

SEQ ID NO: 214026 - RNA, 19 nt, Artificial Sequence
  Description of Artificial Sequence: Synthetic oligonucleotide
  Sense strand starting at position 29 of SEQ ID NO: 2757
augauuagugugcacacua

SEQ ID NO: 214027 - RNA, 19 nt, Artificial Sequence
  Description of Artificial Sequence: Synthetic oligonucleotide
  Antisense strand to SEQ ID NO: 214026
uagugugcacacuaaucau

SEQ ID NO: 214028 - RNA, 19 nt, Artificial Sequence
  Description of Artificial Sequence: Synthetic oligonucleotide
  Sense strand starting at position 40 of SEQ ID NO: 2757
gcacacuaaugcuugagaa

SEQ ID NO: 214029 - RNA, 19 nt, Artificial Sequence
  Description of Artificial Sequence: Synthetic oligonucleotide
  Antisense strand to SEQ ID NO: 214028
uucucaagcauuagugugc

SEQ ID NO: 214030 - RNA, 19 nt, Artificial Sequence
  Description of Artificial Sequence: Synthetic oligonucleotide
  Sense strand starting at position 75 of SEQ ID NO: 2757
cccagacuuguccauaaug

SEQ ID NO: 214031 - RNA, 19 nt, Artificial Sequence
  Description of Artificial Sequence: Synthetic oligonucleotide
  Antisense strand to SEQ ID NO: 214030
cauuauggacaagucuggg

SEQ ID NO: 214032 - RNA, 19 nt, Artificial Sequence
  Description of Artificial Sequence: Synthetic oligonucleotide
  Sense strand starting at position 302 of SEQ ID NO: 2757
acuagaguaguauaguagu

SEQ ID NO: 214033 - RNA, 19 nt, Artificial Sequence
  Description of Artificial Sequence: Synthetic oligonucleotide
  Antisense strand to SEQ ID NO: 214032
acuacuauacuacucuagu

SEQ ID NO: 214034 - RNA, 19 nt, Artificial Sequence
  Description of Artificial Sequence: Synthetic oligonucleotide
  Sense strand starting at position 600 of SEQ ID NO: 2757
ugaguaaguuuccugacga

SEQ ID NO: 214035 - RNA, 19 nt, Artificial Sequence
  Description of Artificial Sequence: Synthetic oligonucleotide
  Antisense strand to SEQ ID NO: 214034
ucgucaggaaacuuacuca

SEQ ID NO: 214036 - RNA, 19 nt, Artificial Sequence
  Description of Artificial Sequence: Synthetic oligonucleotide
  Sense strand starting at position 683 of SEQ ID NO: 2757
cauuaugugccaggaauug

SEQ ID NO: 214037 - RNA, 19 nt, Artificial Sequence
  Description of Artificial Sequence: Synthetic oligonucleotide
  Antisense strand to SEQ ID NO: 214036
caauuccuggcacauaaug

SEQ ID NO: 214038 - RNA, 19 nt, Artificial Sequence
  Description of Artificial Sequence: Synthetic oligonucleotide
  Sense strand starting at position 693 of SEQ ID NO: 2757
caggaauugcaagaugcau

SEQ ID NO: 214039 - RNA, 19 nt, Artificial Sequence
  Description of Artificial Sequence: Synthetic oligonucleotide
  Antisense strand to SEQ ID NO: 214038
augcaucuugcaauuccug

SEQ ID NO: 214040 - RNA, 19 nt, Artificial Sequence
  Description of Artificial Sequence: Synthetic oligonucleotide
  Sense strand starting at position 699 of SEQ ID NO: 2757
uugcaagaugcauaagauu

SEQ ID NO: 214041 - RNA, 19 nt, Artificial Sequence
  Description of Artificial Sequence: Synthetic oligonucleotide
  Antisense strand to SEQ ID NO: 214040
aaucuuaugcaucuugcaa

SEQ ID NO: 214042 - RNA, 19 nt, Artificial Sequence
  Description of Artificial Sequence: Synthetic oligonucleotide
  Sense strand starting at position 838 of SEQ ID NO: 2757
ugaugugcacacuaaucau

SEQ ID NO: 214043 - RNA, 19 nt, Artificial Sequence
  Description of Artificial Sequence: Synthetic oligonucleotide
  Antisense strand to SEQ ID NO: 214042
augauuagugugcacauca

SEQ ID NO: 214044 - RNA, 19 nt, Artificial Sequence
  Description of Artificial Sequence: Synthetic oligonucleotide
  Sense strand starting at position 844 of SEQ ID NO: 2757
gcacacuaaucauuaggga

SEQ ID NO: 214045 - RNA, 19 nt, Artificial Sequence
  Description of Artificial Sequence: Synthetic oligonucleotide
  Antisense strand to SEQ ID NO: 214044
ucccuaaugauuagugugc

SEQ ID NO: 214046 - RNA, 19 nt, Artificial Sequence
  Description of Artificial Sequence: Synthetic oligonucleotide
  Sense strand starting at position 948 of SEQ ID NO: 2757
guuggcauuugaguagcaa

SEQ ID NO: 214047 - RNA, 19 nt, Artificial Sequence
  Description of Artificial Sequence: Synthetic oligonucleotide
  Antisense strand to SEQ ID NO: 214046
uugcuacucaaaugccaac

SEQ ID NO: 214048 - RNA, 19 nt, Artificial Sequence
  Description of Artificial Sequence: Synthetic oligonucleotide
  Sense strand starting at position 965 of SEQ ID NO: 2757
aaagcugugccguauuuaa

SEQ ID NO: 214049 - RNA, 19 nt, Artificial Sequence
  Description of Artificial Sequence: Synthetic oligonucleotide
  Antisense strand to SEQ ID NO: 214048
uuaaauacggcacagcuuu

SEQ ID NO: 214050 - RNA, 19 nt, Artificial Sequence
  Description of Artificial Sequence: Synthetic oligonucleotide
  Sense strand starting at position 1081 of SEQ ID NO: 2757
ggcacugagaagugaacuu

SEQ ID NO: 214051 - RNA, 19 nt, Artificial Sequence
  Description of Artificial Sequence: Synthetic oligonucleotide
  Antisense strand to SEQ ID NO: 214050
aaguucacuucucagugcc

SEQ ID NO: 214052 - RNA, 19 nt, Artificial Sequence
  Description of Artificial Sequence: Synthetic oligonucleotide
  Sense strand starting at position 1200 of SEQ ID NO: 2757
uuaauagguaacgagaguu

SEQ ID NO: 214053 - RNA, 19 nt, Artificial Sequence
  Description of Artificial Sequence: Synthetic oligonucleotide
  Antisense strand to SEQ ID NO: 214052
aacucucguuaccuauuaa

SEQ ID NO: 214054 - RNA, 19 nt, Artificial Sequence
  Description of Artificial Sequence: Synthetic oligonucleotide
  Sense strand starting at position 1592 of SEQ ID NO: 2757
cuaccuguucgagagccau

SEQ ID NO: 214055 - RNA, 19 nt, Artificial Sequence
  Description of Artificial Sequence: Synthetic oligonucleotide
  Antisense strand to SEQ ID NO: 214054
auggcucucgaacagguag

SEQ ID NO: 214056 - RNA, 19 nt, Artificial Sequence
  Description of Artificial Sequence: Synthetic oligonucleotide
  Sense strand starting at position 1724 of SEQ ID NO: 2757
ggagaagaguguccuguca

SEQ ID NO: 214057 - RNA, 19 nt, Artificial Sequence
  Description of Artificial Sequence: Synthetic oligonucleotide
  Antisense strand to SEQ ID NO: 214056
ugacaggacacucuucucc

SEQ ID NO: 214058 - RNA, 19 nt, Artificial Sequence
  Description of Artificial Sequence: Synthetic oligonucleotide
  Sense strand starting at position 1731 of SEQ ID NO: 2757
aguguccugucauuuacca

SEQ ID NO: 214059 - RNA, 19 nt, Artificial Sequence
  Description of Artificial Sequence: Synthetic oligonucleotide
  Antisense strand to SEQ ID NO: 214058
ugguaaaugacaggacacu

SEQ ID NO: 214060 - RNA, 19 nt, Artificial Sequence
  Description of Artificial Sequence: Synthetic oligonucleotide
  Sense strand starting at position 1824 of SEQ ID NO: 2757
ucuccugggucuuuccaaa

SEQ ID NO: 214061 - RNA, 19 nt, Artificial Sequence
  Description of Artificial Sequence: Synthetic oligonucleotide
  Antisense strand to SEQ ID NO: 214060
uuuggaaagacccaggaga

SEQ ID NO: 214062 - RNA, 19 nt, Artificial Sequence
  Description of Artificial Sequence: Synthetic oligonucleotide
  Sense strand starting at position 2109 of SEQ ID NO: 2757
uuucguaagguguagaaau

SEQ ID NO: 214063 - RNA, 19 nt, Artificial Sequence
  Description of Artificial Sequence: Synthetic oligonucleotide
  Antisense strand to SEQ ID NO: 214062
auuucuacaccuuacgaaa

SEQ ID NO: 214064 - RNA, 19 nt, Artificial Sequence
  Description of Artificial Sequence: Synthetic oligonucleotide
  Sense strand starting at position 2111 of SEQ ID NO: 2757
ucguaagguguagaaauga

SEQ ID NO: 214065 - RNA, 19 nt, Artificial Sequence
  Description of Artificial Sequence: Synthetic oligonucleotide
  Antisense strand to SEQ ID NO: 214064
ucauuucuacaccuuacga

SEQ ID NO: 214066 - RNA, 19 nt, Artificial Sequence
  Description of Artificial Sequence: Synthetic oligonucleotide
  Sense strand starting at position 2143 of SEQ ID NO: 2757
uacgaauuuguuggcuaca

SEQ ID NO: 214067 - RNA, 19 nt, Artificial Sequence
  Description of Artificial Sequence: Synthetic oligonucleotide
  Antisense strand to SEQ ID NO: 214066
uguagccaacaaauucgua

SEQ ID NO: 214068 - RNA, 19 nt, Artificial Sequence
  Description of Artificial Sequence: Synthetic oligonucleotide
  Sense strand starting at position 2145 of SEQ ID NO: 2757
cgaauuuguuggcuacaac

SEQ ID NO: 214069 - RNA, 19 nt, Artificial Sequence
  Description of Artificial Sequence: Synthetic oligonucleotide
  Antisense strand to SEQ ID NO: 214068
guuguagccaacaaauucg

SEQ ID NO: 214070 - RNA, 19 nt, Artificial Sequence
  Description of Artificial Sequence: Synthetic oligonucleotide
  Sense strand starting at position 2513 of SEQ ID NO: 2757
cuagcauuuguccaugugu

SEQ ID NO: 214071 - RNA, 19 nt, Artificial Sequence
  Description of Artificial Sequence: Synthetic oligonucleotide
  Antisense strand to SEQ ID NO: 214070
acacauggacaaaugcuag

SEQ ID NO: 214072 - RNA, 19 nt, Artificial Sequence
  Description of Artificial Sequence: Synthetic oligonucleotide
  Sense strand starting at position 2526 of SEQ ID NO: 2757
augugugucccguccuaca

SEQ ID NO: 214073 - RNA, 19 nt, Artificial Sequence
  Description of Artificial Sequence: Synthetic oligonucleotide
  Antisense strand to SEQ ID NO: 214072
uguaggacgggacacacau

SEQ ID NO: 214074 - RNA, 19 nt, Artificial Sequence
  Description of Artificial Sequence: Synthetic oligonucleotide
  Sense strand starting at position 2615 of SEQ ID NO: 2757
cacggacaguuccugauua

SEQ ID NO: 214075 - RNA, 19 nt, Artificial Sequence
  Description of Artificial Sequence: Synthetic oligonucleotide
  Antisense strand to SEQ ID NO: 214074
uaaucaggaacuguccgug

SEQ ID NO: 214076 - RNA, 19 nt, Artificial Sequence
  Description of Artificial Sequence: Synthetic oligonucleotide
  Sense strand starting at position 2653 of SEQ ID NO: 2757
ugguuacugucauuaacuc

SEQ ID NO: 214077 - RNA, 19 nt, Artificial Sequence
  Description of Artificial Sequence: Synthetic oligonucleotide
  Antisense strand to SEQ ID NO: 214076
gaguuaaugacaguaacca

SEQ ID NO: 214078 - RNA, 19 nt, Artificial Sequence
  Description of Artificial Sequence: Synthetic oligonucleotide
  Sense strand starting at position 2654 of SEQ ID NO: 2757
gguuacugucauuaacuca

SEQ ID NO: 214079 - RNA, 19 nt, Artificial Sequence
  Description of Artificial Sequence: Synthetic oligonucleotide
  Antisense strand to SEQ ID NO: 214078
ugaguuaaugacaguaacc

SEQ ID NO: 214080 - RNA, 19 nt, Artificial Sequence
  Description of Artificial Sequence: Synthetic oligonucleotide
  Sense strand starting at position 2689 of SEQ ID NO: 2757
gggaccauuuguuaccuca

SEQ ID NO: 214081 - RNA, 19 nt, Artificial Sequence
  Description of Artificial Sequence: Synthetic oligonucleotide
  Antisense strand to SEQ ID NO: 214080
ugagguaacaaaugguccc

SEQ ID NO: 214082 - RNA, 19 nt, Artificial Sequence
  Description of Artificial Sequence: Synthetic oligonucleotide
  Sense strand starting at position 2719 of SEQ ID NO: 2757
cugucucugguggaaucau

SEQ ID NO: 214083 - RNA, 19 nt, Artificial Sequence
  Description of Artificial Sequence: Synthetic oligonucleotide
  Antisense strand to SEQ ID NO: 214082
augauuccaccagagacag

SEQ ID NO: 214084 - RNA, 19 nt, Artificial Sequence
  Description of Artificial Sequence: Synthetic oligonucleotide
  Sense strand starting at position 2936 of SEQ ID NO: 2757
ggauaaaccagucgugauu

SEQ ID NO: 214085 - RNA, 19 nt, Artificial Sequence
  Description of Artificial Sequence: Synthetic oligonucleotide
  Antisense strand to SEQ ID NO: 214084
aaucacgacugguuuaucc

SEQ ID NO: 214086 - RNA, 19 nt, Artificial Sequence
  Description of Artificial Sequence: Synthetic oligonucleotide
  Sense strand starting at position 2939 of SEQ ID NO: 2757
uaaaccagucgugauugau

SEQ ID NO: 214087 - RNA, 19 nt, Artificial Sequence
  Description of Artificial Sequence: Synthetic oligonucleotide
  Antisense strand to SEQ ID NO: 214086
aucaaucacgacugguuua

SEQ ID NO: 214088 - RNA, 19 nt, Artificial Sequence
  Description of Artificial Sequence: Synthetic oligonucleotide
  Sense strand starting at position 2943 of SEQ ID NO: 2757
ccagucgugauugauccau

SEQ ID NO: 214089 - RNA, 19 nt, Artificial Sequence
  Description of Artificial Sequence: Synthetic oligonucleotide
  Antisense strand to SEQ ID NO: 214088
auggaucaaucacgacugg

SEQ ID NO: 214090 - RNA, 19 nt, Artificial Sequence
  Description of Artificial Sequence: Synthetic oligonucleotide
  Sense strand starting at position 2947 of SEQ ID NO: 2757
ucgugauugauccauacga

SEQ ID NO: 214091 - RNA, 19 nt, Artificial Sequence
  Description of Artificial Sequence: Synthetic oligonucleotide
  Antisense strand to SEQ ID NO: 214090
ucguauggaucaaucacga

SEQ ID NO: 214092 - RNA, 19 nt, Artificial Sequence
  Description of Artificial Sequence: Synthetic oligonucleotide
  Sense strand starting at position 3052 of SEQ ID NO: 2757
aagccagaaccguaugauu

SEQ ID NO: 214093 - RNA, 19 nt, Artificial Sequence
  Description of Artificial Sequence: Synthetic oligonucleotide
  Antisense strand to SEQ ID NO: 214092
aaucauacgguucuggcuu

SEQ ID NO: 214094 - RNA, 19 nt, Artificial Sequence
  Description of Artificial Sequence: Synthetic oligonucleotide
  Sense strand starting at position 3057 of SEQ ID NO: 2757
agaaccguaugauuccauu

SEQ ID NO: 214095 - RNA, 19 nt, Artificial Sequence
  Description of Artificial Sequence: Synthetic oligonucleotide
  Antisense strand to SEQ ID NO: 214094
aauggaaucauacgguucu

SEQ ID NO: 214096 - RNA, 19 nt, Artificial Sequence
  Description of Artificial Sequence: Synthetic oligonucleotide
  Sense strand starting at position 3127 of SEQ ID NO: 2757
gggcgguugcuagcggaua

SEQ ID NO: 214097 - RNA, 19 nt, Artificial Sequence
  Description of Artificial Sequence: Synthetic oligonucleotide
  Antisense strand to SEQ ID NO: 214096
uauccgcuagcaaccgccc

SEQ ID NO: 214098 - RNA, 19 nt, Artificial Sequence
  Description of Artificial Sequence: Synthetic oligonucleotide
  Sense strand starting at position 3277 of SEQ ID NO: 2757
cacuaaguaugugcgauuu

SEQ ID NO: 214099 - RNA, 19 nt, Artificial Sequence
  Description of Artificial Sequence: Synthetic oligonucleotide
  Antisense strand to SEQ ID NO: 214098
aaaucgcacauacuuagug

SEQ ID NO: 214100 - RNA, 19 nt, Artificial Sequence
  Description of Artificial Sequence: Synthetic oligonucleotide
  Sense strand starting at position 3428 of SEQ ID NO: 2757
uagugugaaucuucugaaa

SEQ ID NO: 214101 - RNA, 19 nt, Artificial Sequence
  Description of Artificial Sequence: Synthetic oligonucleotide
  Antisense strand to SEQ ID NO: 214100
uuucagaagauucacacua

SEQ ID NO: 214102 - RNA, 19 nt, Artificial Sequence
  Description of Artificial Sequence: Synthetic oligonucleotide
  Sense strand starting at position 3923 of SEQ ID NO: 2757
aguccauagcaagaaugua

SEQ ID NO: 214103 - RNA, 19 nt, Artificial Sequence
  Description of Artificial Sequence: Synthetic oligonucleotide
  Antisense strand to SEQ ID NO: 214102
uacauucuugcuauggacu

SEQ ID NO: 214104 - RNA, 19 nt, Artificial Sequence
  Description of Artificial Sequence: Synthetic oligonucleotide
  Sense strand starting at position 172 of SEQ ID NO: 2759
ggguguugguauuuagugu

SEQ ID NO: 214105 - RNA, 19 nt, Artificial Sequence
  Description of Artificial Sequence: Synthetic oligonucleotide
  Antisense strand to SEQ ID NO: 214104
acacuaaauaccaacaccc

SEQ ID NO: 214106 - RNA, 19 nt, Artificial Sequence
  Description of Artificial Sequence: Synthetic oligonucleotide
  Sense strand starting at position 173 of SEQ ID NO: 2759
gguguugguauuuaguguu

SEQ ID NO: 214107 - RNA, 19 nt, Artificial Sequence
  Description of Artificial Sequence: Synthetic oligonucleotide
  Antisense strand to SEQ ID NO: 214106
aacacuaaauaccaacacc

SEQ ID NO: 214108 - RNA, 19 nt, Artificial Sequence
  Description of Artificial Sequence: Synthetic oligonucleotide
  Sense strand starting at position 179 of SEQ ID NO: 2759
gguauuuaguguuugagua

SEQ ID NO: 214109 - RNA, 19 nt, Artificial Sequence
  Description of Artificial Sequence: Synthetic oligonucleotide
  Antisense strand to SEQ ID NO: 214108
uacucaaacacuaaauacc

SEQ ID NO: 214110 - RNA, 19 nt, Artificial Sequence
  Description of Artificial Sequence: Synthetic oligonucleotide
  Sense strand starting at position 180 of SEQ ID NO: 2759
guauuuaguguuugaguaa

SEQ ID NO: 214111 - RNA, 19 nt, Artificial Sequence
  Description of Artificial Sequence: Synthetic oligonucleotide
  Antisense strand to SEQ ID NO: 214110
uuacucaaacacuaaauac

SEQ ID NO: 214112 - RNA, 19 nt, Artificial Sequence
  Description of Artificial Sequence: Synthetic oligonucleotide
  Sense strand starting at position 232 of SEQ ID NO: 2759
gcaaauguggaaugaaauu

SEQ ID NO: 214113 - RNA, 19 nt, Artificial Sequence
  Description of Artificial Sequence: Synthetic oligonucleotide
  Antisense strand to SEQ ID NO: 214112
aauuucauuccacauuugc

SEQ ID NO: 214114 - RNA, 19 nt, Artificial Sequence
  Description of Artificial Sequence: Synthetic oligonucleotide
  Sense strand starting at position 434 of SEQ ID NO: 2759
ugucuaacuauugggaagu

SEQ ID NO: 214115 - RNA, 19 nt, Artificial Sequence
  Description of Artificial Sequence: Synthetic oligonucleotide
  Antisense strand to SEQ ID NO: 214114
acuucccaauaguuagaca

SEQ ID NO: 214116 - RNA, 19 nt, Artificial Sequence
  Description of Artificial Sequence: Synthetic oligonucleotide
  Sense strand starting at position 487 of SEQ ID NO: 2759
uguaacugggucuacuuau

SEQ ID NO: 214117 - RNA, 19 nt, Artificial Sequence
  Description of Artificial Sequence: Synthetic oligonucleotide
  Antisense strand to SEQ ID NO: 214116
auaaguagacccaguuaca

SEQ ID NO: 214118 - RNA, 19 nt, Artificial Sequence
  Description of Artificial Sequence: Synthetic oligonucleotide
  Sense strand starting at position 518 of SEQ ID NO: 2759
guuguuuaaucucugaauu

SEQ ID NO: 214119 - RNA, 19 nt, Artificial Sequence
  Description of Artificial Sequence: Synthetic oligonucleotide
  Antisense strand to SEQ ID NO: 214118
aauucagagauuaaacaac

SEQ ID NO: 214120 - RNA, 19 nt, Artificial Sequence
  Description of Artificial Sequence: Synthetic oligonucleotide
  Sense strand starting at position 529 of SEQ ID NO: 2759
ucugaauuagauugcaaag

SEQ ID NO: 214121 - RNA, 19 nt, Artificial Sequence
  Description of Artificial Sequence: Synthetic oligonucleotide
  Antisense strand to SEQ ID NO: 214120
cuuugcaaucuaauucaga

SEQ ID NO: 214122 - RNA, 19 nt, Artificial Sequence
  Description of Artificial Sequence: Synthetic oligonucleotide
  Sense strand starting at position 687 of SEQ ID NO: 2759
auacgcauacauggugaaa

SEQ ID NO: 214123 - RNA, 19 nt, Artificial Sequence
  Description of Artificial Sequence: Synthetic oligonucleotide
  Antisense strand to SEQ ID NO: 214122
uuucaccauguaugcguau

SEQ ID NO: 214124 - RNA, 19 nt, Artificial Sequence
  Description of Artificial Sequence: Synthetic oligonucleotide
  Sense strand starting at position 840 of SEQ ID NO: 2759
cugcucaauccagaugcaa

SEQ ID NO: 214125 - RNA, 19 nt, Artificial Sequence
  Description of Artificial Sequence: Synthetic oligonucleotide
  Antisense strand to SEQ ID NO: 214124
uugcaucuggauugagcag

SEQ ID NO: 214126 - RNA, 19 nt, Artificial Sequence
  Description of Artificial Sequence: Synthetic oligonucleotide
  Sense strand starting at position 1023 of SEQ ID NO: 2759
gugaguacacauugauaaa

SEQ ID NO: 214127 - RNA, 19 nt, Artificial Sequence
  Description of Artificial Sequence: Synthetic oligonucleotide
  Antisense strand to SEQ ID NO: 214126
uuuaucaauguguacucac

SEQ ID NO: 214128 - RNA, 19 nt, Artificial Sequence
  Description of Artificial Sequence: Synthetic oligonucleotide
  Sense strand starting at position 1331 of SEQ ID NO: 2759
ugaugucaacugcgaauaa

SEQ ID NO: 214129 - RNA, 19 nt, Artificial Sequence
  Description of Artificial Sequence: Synthetic oligonucleotide
  Antisense strand to SEQ ID NO: 214128
uuauucgcaguugacauca

SEQ ID NO: 214130 - RNA, 19 nt, Artificial Sequence
  Description of Artificial Sequence: Synthetic oligonucleotide
  Sense strand starting at position 1415 of SEQ ID NO: 2759
ggcugcuaucaauaaaucu

SEQ ID NO: 214131 - RNA, 19 nt, Artificial Sequence
  Description of Artificial Sequence: Synthetic oligonucleotide
  Antisense strand to SEQ ID NO: 214130
agauuuauugauagcagcc

SEQ ID NO: 214132 - RNA, 19 nt, Artificial Sequence
  Description of Artificial Sequence: Synthetic oligonucleotide
  Sense strand starting at position 1496 of SEQ ID NO: 2759
agacucuuuggauggcauu

SEQ ID NO: 214133 - RNA, 19 nt, Artificial Sequence
  Description of Artificial Sequence: Synthetic oligonucleotide
  Antisense strand to SEQ ID NO: 214132
aaugccauccaaagagucu

SEQ ID NO: 214134 - RNA, 19 nt, Artificial Sequence
  Description of Artificial Sequence: Synthetic oligonucleotide
  Sense strand starting at position 1536 of SEQ ID NO: 2759
aaccuauaguggucuaugu

SEQ ID NO: 214135 - RNA, 19 nt, Artificial Sequence
  Description of Artificial Sequence: Synthetic oligonucleotide
  Antisense strand to SEQ ID NO: 214134
acauagaccacuauagguu

SEQ ID NO: 214136 - RNA, 19 nt, Artificial Sequence
  Description of Artificial Sequence: Synthetic oligonucleotide
  Sense strand starting at position 1538 of SEQ ID NO: 2759
ccuauaguggucuaugucu

SEQ ID NO: 214137 - RNA, 19 nt, Artificial Sequence
  Description of Artificial Sequence: Synthetic oligonucleotide
  Antisense strand to SEQ ID NO: 214136
agacauagaccacuauagg

SEQ ID NO: 214138 - RNA, 19 nt, Artificial Sequence
  Description of Artificial Sequence: Synthetic oligonucleotide
  Sense strand starting at position 1551 of SEQ ID NO: 2759
augucugucgaugauaucu

SEQ ID NO: 214139 - RNA, 19 nt, Artificial Sequence
  Description of Artificial Sequence: Synthetic oligonucleotide
  Antisense strand to SEQ ID NO: 214138
agauaucaucgacagacau

SEQ ID NO: 214140 - RNA, 19 nt, Artificial Sequence
  Description of Artificial Sequence: Synthetic oligonucleotide
  Sense strand starting at position 1901 of SEQ ID NO: 2759
guccauucugaaugaaaga

SEQ ID NO: 214141 - RNA, 19 nt, Artificial Sequence
  Description of Artificial Sequence: Synthetic oligonucleotide
  Antisense strand to SEQ ID NO: 214140
ucuuucauucagaauggac

SEQ ID NO: 214142 - RNA, 19 nt, Artificial Sequence
  Description of Artificial Sequence: Synthetic oligonucleotide
  Sense strand starting at position 2023 of SEQ ID NO: 2759
uagauuggccaccguaaga

SEQ ID NO: 214143 - RNA, 19 nt, Artificial Sequence
  Description of Artificial Sequence: Synthetic oligonucleotide
  Antisense strand to SEQ ID NO: 214142
ucuuacgguggccaaucua

SEQ ID NO: 214144 - RNA, 19 nt, Artificial Sequence
  Description of Artificial Sequence: Synthetic oligonucleotide
  Sense strand starting at position 2210 of SEQ ID NO: 2759
ugagucaugcauuauugca

SEQ ID NO: 214145 - RNA, 19 nt, Artificial Sequence
  Description of Artificial Sequence: Synthetic oligonucleotide
  Antisense strand to SEQ ID NO: 214144
ugcaauaaugcaugacuca

SEQ ID NO: 214146 - RNA, 19 nt, Artificial Sequence
  Description of Artificial Sequence: Synthetic oligonucleotide
  Sense strand starting at position 2325 of SEQ ID NO: 2759
augaaaggcuaaucuguau

SEQ ID NO: 214147 - RNA, 19 nt, Artificial Sequence
  Description of Artificial Sequence: Synthetic oligonucleotide
  Antisense strand to SEQ ID NO: 214146
auacagauuagccuuucau

SEQ ID NO: 214148 - RNA, 19 nt, Artificial Sequence
  Description of Artificial Sequence: Synthetic oligonucleotide
  Sense strand starting at position 2342 of SEQ ID NO: 2759
auccuuugcucauuaugga

SEQ ID NO: 214149 - RNA, 19 nt, Artificial Sequence
  Description of Artificial Sequence: Synthetic oligonucleotide
  Antisense strand to SEQ ID NO: 214148
uccauaaugagcaaaggau

SEQ ID NO: 214150 - RNA, 19 nt, Artificial Sequence
  Description of Artificial Sequence: Synthetic oligonucleotide
  Sense strand starting at position 2350 of SEQ ID NO: 2759
cucauuauggacugagguu

SEQ ID NO: 214151 - RNA, 19 nt, Artificial Sequence
  Description of Artificial Sequence: Synthetic oligonucleotide
  Antisense strand to SEQ ID NO: 214150
aaccucaguccauaaugag

SEQ ID NO: 214152 - RNA, 19 nt, Artificial Sequence
  Description of Artificial Sequence: Synthetic oligonucleotide
  Sense strand starting at position 2436 of SEQ ID NO: 2759
gaaguuuaacuagguauca

SEQ ID NO: 214153 - RNA, 19 nt, Artificial Sequence
  Description of Artificial Sequence: Synthetic oligonucleotide
  Antisense strand to SEQ ID NO: 214152
ugauaccuaguuaaacuuc

SEQ ID NO: 214154 - RNA, 19 nt, Artificial Sequence
  Description of Artificial Sequence: Synthetic oligonucleotide
  Sense strand starting at position 2635 of SEQ ID NO: 2759
guggaagccaguugggaau

SEQ ID NO: 214155 - RNA, 19 nt, Artificial Sequence
  Description of Artificial Sequence: Synthetic oligonucleotide
  Antisense strand to SEQ ID NO: 214154
auucccaacuggcuuccac

SEQ ID NO: 214156 - RNA, 19 nt, Artificial Sequence
  Description of Artificial Sequence: Synthetic oligonucleotide
  Sense strand starting at position 2675 of SEQ ID NO: 2759
ucaauuauaguguaacuac

SEQ ID NO: 214157 - RNA, 19 nt, Artificial Sequence
  Description of Artificial Sequence: Synthetic oligonucleotide
  Antisense strand to SEQ ID NO: 214156
guaguuacacuauaauuga

SEQ ID NO: 214158 - RNA, 19 nt, Artificial Sequence
  Description of Artificial Sequence: Synthetic oligonucleotide
  Sense strand starting at position 2802 of SEQ ID NO: 2759
gcuacaggaugcuuacauu

SEQ ID NO: 214159 - RNA, 19 nt, Artificial Sequence
  Description of Artificial Sequence: Synthetic oligonucleotide
  Antisense strand to SEQ ID NO: 214158
aauguaagcauccuguagc

SEQ ID NO: 214160 - RNA, 19 nt, Artificial Sequence
  Description of Artificial Sequence: Synthetic oligonucleotide
  Sense strand starting at position 2960 of SEQ ID NO: 2759
guguaaauacuuuaaucuc

SEQ ID NO: 214161 - RNA, 19 nt, Artificial Sequence
  Description of Artificial Sequence: Synthetic oligonucleotide
  Antisense strand to SEQ ID NO: 214160
gagauuaaaguauuuacac

SEQ ID NO: 214162 - RNA, 19 nt, Artificial Sequence
  Description of Artificial Sequence: Synthetic oligonucleotide
  Sense strand starting at position 3350 of SEQ ID NO: 2759
ccaaccgacucuuuagaca

SEQ ID NO: 214163 - RNA, 19 nt, Artificial Sequence
  Description of Artificial Sequence: Synthetic oligonucleotide
  Antisense strand to SEQ ID NO: 214162
ugucuaaagagucgguugg

SEQ ID NO: 214164 - RNA, 19 nt, Artificial Sequence
  Description of Artificial Sequence: Synthetic oligonucleotide
  Sense strand starting at position 3381 of SEQ ID NO: 2759
agugaaguuuaaccaauuc

SEQ ID NO: 214165 - RNA, 19 nt, Artificial Sequence
  Description of Artificial Sequence: Synthetic oligonucleotide
  Antisense strand to SEQ ID NO: 214164
gaauugguuaaacuucacu

SEQ ID NO: 214166 - RNA, 19 nt, Artificial Sequence
  Description of Artificial Sequence: Synthetic oligonucleotide
  Sense strand starting at position 3611 of SEQ ID NO: 2759
ucaugauaguuacccagaa

SEQ ID NO: 214167 - RNA, 19 nt, Artificial Sequence
  Description of Artificial Sequence: Synthetic oligonucleotide
  Antisense strand to SEQ ID NO: 214166
uucuggguaacuaucauga

SEQ ID NO: 214168 - RNA, 19 nt, Artificial Sequence
  Description of Artificial Sequence: Synthetic oligonucleotide
  Sense strand starting at position 3667 of SEQ ID NO: 2759
agagguaaggucuacugua

SEQ ID NO: 214169 - RNA, 19 nt, Artificial Sequence
  Description of Artificial Sequence: Synthetic oligonucleotide
  Antisense strand to SEQ ID NO: 214168
uacaguagaccuuaccucu

SEQ ID NO: 214170 - RNA, 19 nt, Artificial Sequence
  Description of Artificial Sequence: Synthetic oligonucleotide
  Sense strand starting at position 3679 of SEQ ID NO: 2759
uacuguagacucugcagau

SEQ ID NO: 214171 - RNA, 19 nt, Artificial Sequence
  Description of Artificial Sequence: Synthetic oligonucleotide
  Antisense strand to SEQ ID NO: 214170
aucugcagagucuacagua

SEQ ID NO: 214172 - RNA, 19 nt, Artificial Sequence
  Description of Artificial Sequence: Synthetic oligonucleotide
  Sense strand starting at position 3680 of SEQ ID NO: 2759
acuguagacucugcagauu

SEQ ID NO: 214173 - RNA, 19 nt, Artificial Sequence
  Description of Artificial Sequence: Synthetic oligonucleotide
  Antisense strand to SEQ ID NO: 214172
aaucugcagagucuacagu

SEQ ID NO: 214174 - RNA, 19 nt, Artificial Sequence
  Description of Artificial Sequence: Synthetic oligonucleotide
  Sense strand starting at position 3683 of SEQ ID NO: 2759
guagacucugcagauugua

SEQ ID NO: 214175 - RNA, 19 nt, Artificial Sequence
  Description of Artificial Sequence: Synthetic oligonucleotide
  Antisense strand to SEQ ID NO: 214174
uacaaucugcagagucuac

SEQ ID NO: 214176 - RNA, 19 nt, Artificial Sequence
  Description of Artificial Sequence: Synthetic oligonucleotide
  Sense strand starting at position 3703 of SEQ ID NO: 2759
uguauuuccugaguaaugu

SEQ ID NO: 214177 - RNA, 19 nt, Artificial Sequence
  Description of Artificial Sequence: Synthetic oligonucleotide
  Antisense strand to SEQ ID NO: 214176
acauuacucaggaaauaca

SEQ ID NO: 214178 - RNA, 19 nt, Artificial Sequence
  Description of Artificial Sequence: Synthetic oligonucleotide
  Sense strand starting at position 3838 of SEQ ID NO: 2759
aggguuuggucacuauuau

SEQ ID NO: 214179 - RNA, 19 nt, Artificial Sequence
  Description of Artificial Sequence: Synthetic oligonucleotide
  Antisense strand to SEQ ID NO: 214178
auaauagugaccaaacccu

SEQ ID NO: 214180 - RNA, 19 nt, Artificial Sequence
  Description of Artificial Sequence: Synthetic oligonucleotide
  Sense strand starting at position 3839 of SEQ ID NO: 2759
ggguuuggucacuauuaug

SEQ ID NO: 214181 - RNA, 19 nt, Artificial Sequence
  Description of Artificial Sequence: Synthetic oligonucleotide
  Antisense strand to SEQ ID NO: 214180
cauaauagugaccaaaccc

SEQ ID NO: 214182 - RNA, 19 nt, Artificial Sequence
  Description of Artificial Sequence: Synthetic oligonucleotide
  Sense strand starting at position 3896 of SEQ ID NO: 2759
uggugaagaacuuguaaau

SEQ ID NO: 214183 - RNA, 19 nt, Artificial Sequence
  Description of Artificial Sequence: Synthetic oligonucleotide
  Antisense strand to SEQ ID NO: 214182
auuuacaaguucuucacca

SEQ ID NO: 214184 - RNA, 19 nt, Artificial Sequence
  Description of Artificial Sequence: Synthetic oligonucleotide
  Sense strand starting at position 131 of SEQ ID NO: 2760
ucaccacagugguuaaaga

SEQ ID NO: 214185 - RNA, 19 nt, Artificial Sequence
  Description of Artificial Sequence: Synthetic oligonucleotide
  Antisense strand to SEQ ID NO: 214184
ucuuuaaccacugugguga

SEQ ID NO: 214186 - RNA, 19 nt, Artificial Sequence
  Description of Artificial Sequence: Synthetic oligonucleotide
  Sense strand starting at position 281 of SEQ ID NO: 2760
auaucucuuuaggaaagaa

SEQ ID NO: 214187 - RNA, 19 nt, Artificial Sequence
  Description of Artificial Sequence: Synthetic oligonucleotide
  Antisense strand to SEQ ID NO: 214186
uucuuuccuaaagagauau

SEQ ID NO: 214188 - RNA, 19 nt, Artificial Sequence
  Description of Artificial Sequence: Synthetic oligonucleotide
  Sense strand starting at position 515 of SEQ ID NO: 2760
aagugaauucuaggcucag

SEQ ID NO: 214189 - RNA, 19 nt, Artificial Sequence
  Description of Artificial Sequence: Synthetic oligonucleotide
  Antisense strand to SEQ ID NO: 214188
cugagccuagaauucacuu

SEQ ID NO: 214190 - RNA, 19 nt, Artificial Sequence
  Description of Artificial Sequence: Synthetic oligonucleotide
  Sense strand starting at position 516 of SEQ ID NO: 2760
agugaauucuaggcucagu

SEQ ID NO: 214191 - RNA, 19 nt, Artificial Sequence
  Description of Artificial Sequence: Synthetic oligonucleotide
  Antisense strand to SEQ ID NO: 214190
acugagccuagaauucacu

SEQ ID NO: 214192 - RNA, 19 nt, Artificial Sequence
  Description of Artificial Sequence: Synthetic oligonucleotide
  Sense strand starting at position 695 of SEQ ID NO: 2760
uaacguguuugaucaaaug

SEQ ID NO: 214193 - RNA, 19 nt, Artificial Sequence
  Description of Artificial Sequence: Synthetic oligonucleotide
  Antisense strand to SEQ ID NO: 214192
cauuugaucaaacacguua

SEQ ID NO: 214194 - RNA, 19 nt, Artificial Sequence
  Description of Artificial Sequence: Synthetic oligonucleotide
  Sense strand starting at position 761 of SEQ ID NO: 2760
uaggcuguucucguagcua

SEQ ID NO: 214195 - RNA, 19 nt, Artificial Sequence
  Description of Artificial Sequence: Synthetic oligonucleotide
  Antisense strand to SEQ ID NO: 214194
uagcuacgagaacagccua

SEQ ID NO: 214196 - RNA, 19 nt, Artificial Sequence
  Description of Artificial Sequence: Synthetic oligonucleotide
  Sense strand starting at position 764 of SEQ ID NO: 2760
gcuguucucguagcuauca

SEQ ID NO: 214197 - RNA, 19 nt, Artificial Sequence
  Description of Artificial Sequence: Synthetic oligonucleotide
  Antisense strand to SEQ ID NO: 214196
ugauagcuacgagaacagc

SEQ ID NO: 214198 - RNA, 19 nt, Artificial Sequence
  Description of Artificial Sequence: Synthetic oligonucleotide
  Sense strand starting at position 816 of SEQ ID NO: 2760
agcugaauacuuugaacgu

SEQ ID NO: 214199 - RNA, 19 nt, Artificial Sequence
  Description of Artificial Sequence: Synthetic oligonucleotide
  Antisense strand to SEQ ID NO: 214198
acguucaaaguauucagcu

SEQ ID NO: 214200 - RNA, 19 nt, Artificial Sequence
  Description of Artificial Sequence: Synthetic oligonucleotide
  Sense strand starting at position 858 of SEQ ID NO: 2760
cuuaaagucagguacguau

SEQ ID NO: 214201 - RNA, 19 nt, Artificial Sequence
  Description of Artificial Sequence: Synthetic oligonucleotide
  Antisense strand to SEQ ID NO: 214200
auacguaccugacuuuaag

SEQ ID NO: 214202 - RNA, 19 nt, Artificial Sequence
  Description of Artificial Sequence: Synthetic oligonucleotide
  Sense strand starting at position 939 of SEQ ID NO: 2760
gucauugcagacugagaaa

SEQ ID NO: 214203 - RNA, 19 nt, Artificial Sequence
  Description of Artificial Sequence: Synthetic oligonucleotide
  Antisense strand to SEQ ID NO: 214202
uuucucagucugcaaugac

SEQ ID NO: 214204 - RNA, 19 nt, Artificial Sequence
  Description of Artificial Sequence: Synthetic oligonucleotide
  Sense strand starting at position 1046 of SEQ ID NO: 2760
gucuccugagauuacaguu

SEQ ID NO: 214205 - RNA, 19 nt, Artificial Sequence
  Description of Artificial Sequence: Synthetic oligonucleotide
  Antisense strand to SEQ ID NO: 214204
aacuguaaucucaggagac

SEQ ID NO: 214206 - RNA, 19 nt, Artificial Sequence
  Description of Artificial Sequence: Synthetic oligonucleotide
  Sense strand starting at position 1364 of SEQ ID NO: 2760
aaucuuugugcguuugcaa

SEQ ID NO: 214207 - RNA, 19 nt, Artificial Sequence
  Description of Artificial Sequence: Synthetic oligonucleotide
  Antisense strand to SEQ ID NO: 214206
uugcaaacgcacaaagauu

SEQ ID NO: 214208 - RNA, 19 nt, Artificial Sequence
  Description of Artificial Sequence: Synthetic oligonucleotide
  Sense strand starting at position 1365 of SEQ ID NO: 2760
aucuuugugcguuugcaaa

SEQ ID NO: 214209 - RNA, 19 nt, Artificial Sequence
  Description of Artificial Sequence: Synthetic oligonucleotide
  Antisense strand to SEQ ID NO: 214208
uuugcaaacgcacaaagau

SEQ ID NO: 214210 - RNA, 19 nt, Artificial Sequence
  Description of Artificial Sequence: Synthetic oligonucleotide
  Sense strand starting at position 1839 of SEQ ID NO: 2760
aguuauucacgcguuauug

SEQ ID NO: 214211 - RNA, 19 nt, Artificial Sequence
  Description of Artificial Sequence: Synthetic oligonucleotide
  Antisense strand to SEQ ID NO: 214210
caauaacgcgugaauaacu

SEQ ID NO: 214212 - RNA, 19 nt, Artificial Sequence
  Description of Artificial Sequence: Synthetic oligonucleotide
  Sense strand starting at position 1840 of SEQ ID NO: 2760
guuauucacgcguuauugu

SEQ ID NO: 214213 - RNA, 19 nt, Artificial Sequence
  Description of Artificial Sequence: Synthetic oligonucleotide
  Antisense strand to SEQ ID NO: 214212
acaauaacgcgugaauaac

SEQ ID NO: 214214 - RNA, 19 nt, Artificial Sequence
  Description of Artificial Sequence: Synthetic oligonucleotide
  Sense strand starting at position 1904 of SEQ ID NO: 2760
gcacuugucgcugccauca

SEQ ID NO: 214215 - RNA, 19 nt, Artificial Sequence
  Description of Artificial Sequence: Synthetic oligonucleotide
  Antisense strand to SEQ ID NO: 214214
ugauggcagcgacaagugc

SEQ ID NO: 214216 - RNA, 19 nt, Artificial Sequence
  Description of Artificial Sequence: Synthetic oligonucleotide
  Sense strand starting at position 2556 of SEQ ID NO: 2760
gcugcauuccucuccguuu

SEQ ID NO: 214217 - RNA, 19 nt, Artificial Sequence
  Description of Artificial Sequence: Synthetic oligonucleotide
  Antisense strand to SEQ ID NO: 214216
aaacggagaggaaugcagc

SEQ ID NO: 214218 - RNA, 19 nt, Artificial Sequence
  Description of Artificial Sequence: Synthetic oligonucleotide
  Sense strand starting at position 2599 of SEQ ID NO: 2760
ugaugaaauugacacacau

SEQ ID NO: 214219 - RNA, 19 nt, Artificial Sequence
  Description of Artificial Sequence: Synthetic oligonucleotide
  Antisense strand to SEQ ID NO: 214218
augugugucaauuucauca

SEQ ID NO: 214220 - RNA, 19 nt, Artificial Sequence
  Description of Artificial Sequence: Synthetic oligonucleotide
  Sense strand starting at position 2811 of SEQ ID NO: 2760
aucugauaaucacuggcaa

SEQ ID NO: 214221 - RNA, 19 nt, Artificial Sequence
  Description of Artificial Sequence: Synthetic oligonucleotide
  Antisense strand to SEQ ID NO: 214220
uugccagugauuaucagau

SEQ ID NO: 214222 - RNA, 19 nt, Artificial Sequence
  Description of Artificial Sequence: Synthetic oligonucleotide
  Sense strand starting at position 2812 of SEQ ID NO: 2760
ucugauaaucacuggcaac

SEQ ID NO: 214223 - RNA, 19 nt, Artificial Sequence
  Description of Artificial Sequence: Synthetic oligonucleotide
  Antisense strand to SEQ ID NO: 214222
guugccagugauuaucaga

SEQ ID NO: 214224 - RNA, 19 nt, Artificial Sequence
  Description of Artificial Sequence: Synthetic oligonucleotide
  Sense strand starting at position 2943 of SEQ ID NO: 2760
uucgucguugucguuuaau

SEQ ID NO: 214225 - RNA, 19 nt, Artificial Sequence
  Description of Artificial Sequence: Synthetic oligonucleotide
  Antisense strand to SEQ ID NO: 214224
auuaaacgacaacgacgaa

SEQ ID NO: 214226 - RNA, 19 nt, Artificial Sequence
  Description of Artificial Sequence: Synthetic oligonucleotide
  Sense strand starting at position 2945 of SEQ ID NO: 2760
cgucguugucguuuaaugu

SEQ ID NO: 214227 - RNA, 19 nt, Artificial Sequence
  Description of Artificial Sequence: Synthetic oligonucleotide
  Antisense strand to SEQ ID NO: 214226
acauuaaacgacaacgacg

SEQ ID NO: 214228 - RNA, 19 nt, Artificial Sequence
  Description of Artificial Sequence: Synthetic oligonucleotide
  Sense strand starting at position 2990 of SEQ ID NO: 2760
gcuauauguguucccuguu

SEQ ID NO: 214229 - RNA, 19 nt, Artificial Sequence
  Description of Artificial Sequence: Synthetic oligonucleotide
  Antisense strand to SEQ ID NO: 214228
aacagggaacacauauagc

SEQ ID NO: 214230 - RNA, 19 nt, Artificial Sequence
  Description of Artificial Sequence: Synthetic oligonucleotide
  Sense strand starting at position 2997 of SEQ ID NO: 2760
guguucccuguuuaagaaa

SEQ ID NO: 214231 - RNA, 19 nt, Artificial Sequence
  Description of Artificial Sequence: Synthetic oligonucleotide
  Antisense strand to SEQ ID NO: 214230
uuucuuaaacagggaacac

SEQ ID NO: 214232 - RNA, 19 nt, Artificial Sequence
  Description of Artificial Sequence: Synthetic oligonucleotide
  Sense strand starting at position 3031 of SEQ ID NO: 2760
uguuucucugcuuagggau

SEQ ID NO: 214233 - RNA, 19 nt, Artificial Sequence
  Description of Artificial Sequence: Synthetic oligonucleotide
  Antisense strand to SEQ ID NO: 214232
aucccuaagcagagaaaca

SEQ ID NO: 214234 - RNA, 19 nt, Artificial Sequence
  Description of Artificial Sequence: Synthetic oligonucleotide
  Sense strand starting at position 3060 of SEQ ID NO: 2760
uuugguaucugaucaugua

SEQ ID NO: 214235 - RNA, 19 nt, Artificial Sequence
  Description of Artificial Sequence: Synthetic oligonucleotide
  Antisense strand to SEQ ID NO: 214234
uacaugaucagauaccaaa

SEQ ID NO: 214236 - RNA, 19 nt, Artificial Sequence
  Description of Artificial Sequence: Synthetic oligonucleotide
  Sense strand starting at position 3061 of SEQ ID NO: 2760
uugguaucugaucauguag

SEQ ID NO: 214237 - RNA, 19 nt, Artificial Sequence
  Description of Artificial Sequence: Synthetic oligonucleotide
  Antisense strand to SEQ ID NO: 214236
cuacaugaucagauaccaa

SEQ ID NO: 214238 - RNA, 19 nt, Artificial Sequence
  Description of Artificial Sequence: Synthetic oligonucleotide
  Sense strand starting at position 3072 of SEQ ID NO: 2760
ucauguagaucuucucuuu

SEQ ID NO: 214239 - RNA, 19 nt, Artificial Sequence
  Description of Artificial Sequence: Synthetic oligonucleotide
  Antisense strand to SEQ ID NO: 214238
aaagagaagaucuacauga

SEQ ID NO: 214240 - RNA, 19 nt, Artificial Sequence
  Description of Artificial Sequence: Synthetic oligonucleotide
  Sense strand starting at position 3111 of SEQ ID NO: 2760
ggcgucuuuccucuuaguu

SEQ ID NO: 214241 - RNA, 19 nt, Artificial Sequence
  Description of Artificial Sequence: Synthetic oligonucleotide
  Antisense strand to SEQ ID NO: 214240
aacuaagaggaaagacgcc

SEQ ID NO: 214242 - RNA, 19 nt, Artificial Sequence
  Description of Artificial Sequence: Synthetic oligonucleotide
  Sense strand starting at position 3112 of SEQ ID NO: 2760
gcgucuuuccucuuaguuc

SEQ ID NO: 214243 - RNA, 19 nt, Artificial Sequence
  Description of Artificial Sequence: Synthetic oligonucleotide
  Antisense strand to SEQ ID NO: 214242
gaacuaagaggaaagacgc

SEQ ID NO: 214244 - RNA, 19 nt, Artificial Sequence
  Description of Artificial Sequence: Synthetic oligonucleotide
  Sense strand starting at position 3143 of SEQ ID NO: 2760
agugucuucucucccauuu

SEQ ID NO: 214245 - RNA, 19 nt, Artificial Sequence
  Description of Artificial Sequence: Synthetic oligonucleotide
  Antisense strand to SEQ ID NO: 214244
aaaugggagagaagacacu

SEQ ID NO: 214246 - RNA, 19 nt, Artificial Sequence
  Description of Artificial Sequence: Synthetic oligonucleotide
  Sense strand starting at position 3401 of SEQ ID NO: 2760
augggcaaguguuuaagau

SEQ ID NO: 214247 - RNA, 19 nt, Artificial Sequence
  Description of Artificial Sequence: Synthetic oligonucleotide
  Antisense strand to SEQ ID NO: 214246
aucuuaaacacuugcccau

SEQ ID NO: 214248 - RNA, 19 nt, Artificial Sequence
  Description of Artificial Sequence: Synthetic oligonucleotide
  Sense strand starting at position 3402 of SEQ ID NO: 2760
ugggcaaguguuuaagaug

SEQ ID NO: 214249 - RNA, 19 nt, Artificial Sequence
  Description of Artificial Sequence: Synthetic oligonucleotide
  Antisense strand to SEQ ID NO: 214248
caucuuaaacacuugccca

SEQ ID NO: 214250 - RNA, 19 nt, Artificial Sequence
  Description of Artificial Sequence: Synthetic oligonucleotide
  Sense strand starting at position 3417 of SEQ ID NO: 2760
gaugcuauauguuuggaau

SEQ ID NO: 214251 - RNA, 19 nt, Artificial Sequence
  Description of Artificial Sequence: Synthetic oligonucleotide
  Antisense strand to SEQ ID NO: 214250
auuccaaacauauagcauc

SEQ ID NO: 214252 - RNA, 19 nt, Artificial Sequence
  Description of Artificial Sequence: Synthetic oligonucleotide
  Sense strand starting at position 3418 of SEQ ID NO: 2760
augcuauauguuuggaauu

SEQ ID NO: 214253 - RNA, 19 nt, Artificial Sequence
  Description of Artificial Sequence: Synthetic oligonucleotide
  Antisense strand to SEQ ID NO: 214252
aauuccaaacauauagcau

SEQ ID NO: 214254 - RNA, 19 nt, Artificial Sequence
  Description of Artificial Sequence: Synthetic oligonucleotide
  Sense strand starting at position 3594 of SEQ ID NO: 2760
ucaagaaagcuuuguggga

SEQ ID NO: 214255 - RNA, 19 nt, Artificial Sequence
  Description of Artificial Sequence: Synthetic oligonucleotide
  Antisense strand to SEQ ID NO: 214254
ucccacaaagcuuucuuga

SEQ ID NO: 214256 - RNA, 19 nt, Artificial Sequence
  Description of Artificial Sequence: Synthetic oligonucleotide
  Sense strand starting at position 3595 of SEQ ID NO: 2760
caagaaagcuuugugggau

SEQ ID NO: 214257 - RNA, 19 nt, Artificial Sequence
  Description of Artificial Sequence: Synthetic oligonucleotide
  Antisense strand to SEQ ID NO: 214256
aucccacaaagcuuucuug

SEQ ID NO: 214258 - RNA, 19 nt, Artificial Sequence
  Description of Artificial Sequence: Synthetic oligonucleotide
  Sense strand starting at position 3598 of SEQ ID NO: 2760
gaaagcuuugugggauaga

SEQ ID NO: 214259 - RNA, 19 nt, Artificial Sequence
  Description of Artificial Sequence: Synthetic oligonucleotide
  Antisense strand to SEQ ID NO: 214258
ucuaucccacaaagcuuuc

SEQ ID NO: 214260 - RNA, 19 nt, Artificial Sequence
  Description of Artificial Sequence: Synthetic oligonucleotide
  Sense strand starting at position 3627 of SEQ ID NO: 2760
auauaaagauugcugcuaa

SEQ ID NO: 214261 - RNA, 19 nt, Artificial Sequence
  Description of Artificial Sequence: Synthetic oligonucleotide
  Antisense strand to SEQ ID NO: 214260
uuagcagcaaucuuuauau

SEQ ID NO: 214262 - RNA, 19 nt, Artificial Sequence
  Description of Artificial Sequence: Synthetic oligonucleotide
  Sense strand starting at position 3970 of SEQ ID NO: 2760
ucccaugauuuauagguaa

SEQ ID NO: 214263 - RNA, 19 nt, Artificial Sequence
  Description of Artificial Sequence: Synthetic oligonucleotide
  Antisense strand to SEQ ID NO: 214262
uuaccuauaaaucauggga

SEQ ID NO: 214264 - RNA, 19 nt, Artificial Sequence
  Description of Artificial Sequence: Synthetic oligonucleotide
  Sense strand starting at position 5 of SEQ ID NO: 2758
ucaccacagugguuaaaga

SEQ ID NO: 214265 - RNA, 19 nt, Artificial Sequence
  Description of Artificial Sequence: Synthetic oligonucleotide
  Antisense strand to SEQ ID NO: 214264
ucuuuaaccacugugguga

SEQ ID NO: 214266 - RNA, 19 nt, Artificial Sequence
  Description of Artificial Sequence: Synthetic oligonucleotide
  Sense strand starting at position 155 of SEQ ID NO: 2758
auaucucuuuaggaaagaa

SEQ ID NO: 214267 - RNA, 19 nt, Artificial Sequence
  Description of Artificial Sequence: Synthetic oligonucleotide
  Antisense strand to SEQ ID NO: 214266
uucuuuccuaaagagauau

SEQ ID NO: 214268 - RNA, 19 nt, Artificial Sequence
  Description of Artificial Sequence: Synthetic oligonucleotide
  Sense strand starting at position 389 of SEQ ID NO: 2758
aagugaauucuaggcucag

SEQ ID NO: 214269 - RNA, 19 nt, Artificial Sequence
  Description of Artificial Sequence: Synthetic oligonucleotide
  Antisense strand to SEQ ID NO: 214268
cugagccuagaauucacuu

SEQ ID NO: 214270 - RNA, 19 nt, Artificial Sequence
  Description of Artificial Sequence: Synthetic oligonucleotide
  Sense strand starting at position 390 of SEQ ID NO: 2758
agugaauucuaggcucagu

SEQ ID NO: 214271 - RNA, 19 nt, Artificial Sequence
  Description of Artificial Sequence: Synthetic oligonucleotide
  Antisense strand to SEQ ID NO: 214270
acugagccuagaauucacu

SEQ ID NO: 214272 - RNA, 19 nt, Artificial Sequence
  Description of Artificial Sequence: Synthetic oligonucleotide
  Sense strand starting at position 569 of SEQ ID NO: 2758
uaacguguuugaucaaaug

SEQ ID NO: 214273 - RNA, 19 nt, Artificial Sequence
  Description of Artificial Sequence: Synthetic oligonucleotide
  Antisense strand to SEQ ID NO: 214272
cauuugaucaaacacguua

SEQ ID NO: 214274 - RNA, 19 nt, Artificial Sequence
  Description of Artificial Sequence: Synthetic oligonucleotide
  Sense strand starting at position 635 of SEQ ID NO: 2758
uaggcuguucucguagcua

SEQ ID NO: 214275 - RNA, 19 nt, Artificial Sequence
  Description of Artificial Sequence: Synthetic oligonucleotide
  Antisense strand to SEQ ID NO: 214274
uagcuacgagaacagccua

SEQ ID NO: 214276 - RNA, 19 nt, Artificial Sequence
  Description of Artificial Sequence: Synthetic oligonucleotide
  Sense strand starting at position 638 of SEQ ID NO: 2758
gcuguucucguagcuauca

SEQ ID NO: 214277 - RNA, 19 nt, Artificial Sequence
  Description of Artificial Sequence: Synthetic oligonucleotide
  Antisense strand to SEQ ID NO: 214276
ugauagcuacgagaacagc

SEQ ID NO: 214278 - RNA, 19 nt, Artificial Sequence
  Description of Artificial Sequence: Synthetic oligonucleotide
  Sense strand starting at position 690 of SEQ ID NO: 2758
agcugaauacuuugaacgu

SEQ ID NO: 214279 - RNA, 19 nt, Artificial Sequence
  Description of Artificial Sequence: Synthetic oligonucleotide
  Antisense strand to SEQ ID NO: 214278
acguucaaaguauucagcu

SEQ ID NO: 214280 - RNA, 19 nt, Artificial Sequence
  Description of Artificial Sequence: Synthetic oligonucleotide
  Sense strand starting at position 732 of SEQ ID NO: 2758
cuuaaagucagguacguau

SEQ ID NO: 214281 - RNA, 19 nt, Artificial Sequence
  Description of Artificial Sequence: Synthetic oligonucleotide
  Antisense strand to SEQ ID NO: 214280
auacguaccugacuuuaag

SEQ ID NO: 214282 - RNA, 19 nt, Artificial Sequence
  Description of Artificial Sequence: Synthetic oligonucleotide
  Sense strand starting at position 813 of SEQ ID NO: 2758
gucauugcagacugagaaa

SEQ ID NO: 214283 - RNA, 19 nt, Artificial Sequence
  Description of Artificial Sequence: Synthetic oligonucleotide
  Antisense strand to SEQ ID NO: 214282
uuucucagucugcaaugac

SEQ ID NO: 214284 - RNA, 19 nt, Artificial Sequence
  Description of Artificial Sequence: Synthetic oligonucleotide
  Sense strand starting at position 920 of SEQ ID NO: 2758
gucuccugagauuacaguu

SEQ ID NO: 214285 - RNA, 19 nt, Artificial Sequence
  Description of Artificial Sequence: Synthetic oligonucleotide
  Antisense strand to SEQ ID NO: 214284
aacuguaaucucaggagac

SEQ ID NO: 214286 - RNA, 19 nt, Artificial Sequence
  Description of Artificial Sequence: Synthetic oligonucleotide
  Sense strand starting at position 1238 of SEQ ID NO: 2758
aaucuuugugcguuugcaa

SEQ ID NO: 214287 - RNA, 19 nt, Artificial Sequence
  Description of Artificial Sequence: Synthetic oligonucleotide
  Antisense strand to SEQ ID NO: 214286
uugcaaacgcacaaagauu

SEQ ID NO: 214288 - RNA, 19 nt, Artificial Sequence
  Description of Artificial Sequence: Synthetic oligonucleotide
  Sense strand starting at position 1239 of SEQ ID NO: 2758
aucuuugugcguuugcaaa

SEQ ID NO: 214289 - RNA, 19 nt, Artificial Sequence
  Description of Artificial Sequence: Synthetic oligonucleotide
  Antisense strand to SEQ ID NO: 214288
uuugcaaacgcacaaagau

SEQ ID NO: 214290 - RNA, 19 nt, Artificial Sequence
  Description of Artificial Sequence: Synthetic oligonucleotide
  Sense strand starting at position 1713 of SEQ ID NO: 2758
aguuauucacgcguuauug

SEQ ID NO: 214291 - RNA, 19 nt, Artificial Sequence
  Description of Artificial Sequence: Synthetic oligonucleotide
  Antisense strand to SEQ ID NO: 214290
caauaacgcgugaauaacu

SEQ ID NO: 214292 - RNA, 19 nt, Artificial Sequence
  Description of Artificial Sequence: Synthetic oligonucleotide
  Sense strand starting at position 1714 of SEQ ID NO: 2758
guuauucacgcguuauugu

SEQ ID NO: 214293 - RNA, 19 nt, Artificial Sequence
  Description of Artificial Sequence: Synthetic oligonucleotide
  Antisense strand to SEQ ID NO: 214292
acaauaacgcgugaauaac

SEQ ID NO: 214294 - RNA, 19 nt, Artificial Sequence
  Description of Artificial Sequence: Synthetic oligonucleotide
  Sense strand starting at position 1778 of SEQ ID NO: 2758
gcacuugucgcugccauca

SEQ ID NO: 214295 - RNA, 19 nt, Artificial Sequence
  Description of Artificial Sequence: Synthetic oligonucleotide
  Antisense strand to SEQ ID NO: 214294
ugauggcagcgacaagugc

SEQ ID NO: 214296 - RNA, 19 nt, Artificial Sequence
  Description of Artificial Sequence: Synthetic oligonucleotide
  Sense strand starting at position 2430 of SEQ ID NO: 2758
gcugcauuccucuccguuu

SEQ ID NO: 214297 - RNA, 19 nt, Artificial Sequence
  Description of Artificial Sequence: Synthetic oligonucleotide
  Antisense strand to SEQ ID NO: 214296
aaacggagaggaaugcagc

SEQ ID NO: 214298 - RNA, 19 nt, Artificial Sequence
  Description of Artificial Sequence: Synthetic oligonucleotide
  Sense strand starting at position 2473 of SEQ ID NO: 2758
ugaugaaauugacacacau

SEQ ID NO: 214299 - RNA, 19 nt, Artificial Sequence
  Description of Artificial Sequence: Synthetic oligonucleotide
  Antisense strand to SEQ ID NO: 214298
augugugucaauuucauca

SEQ ID NO: 214300 - RNA, 19 nt, Artificial Sequence
  Description of Artificial Sequence: Synthetic oligonucleotide
  Sense strand starting at position 2685 of SEQ ID NO: 2758
aucugauaaucacuggcaa

SEQ ID NO: 214301 - RNA, 19 nt, Artificial Sequence
  Description of Artificial Sequence: Synthetic oligonucleotide
  Antisense strand to SEQ ID NO: 214300
uugccagugauuaucagau

SEQ ID NO: 214302 - RNA, 19 nt, Artificial Sequence
  Description of Artificial Sequence: Synthetic oligonucleotide
  Sense strand starting at position 2686 of SEQ ID NO: 2758
ucugauaaucacuggcaac

SEQ ID NO: 214303 - RNA, 19 nt, Artificial Sequence
  Description of Artificial Sequence: Synthetic oligonucleotide
  Antisense strand to SEQ ID NO: 214302
guugccagugauuaucaga

SEQ ID NO: 214304 - RNA, 19 nt, Artificial Sequence
  Description of Artificial Sequence: Synthetic oligonucleotide
  Sense strand starting at position 2817 of SEQ ID NO: 2758
uucgucguugucguuuaau

SEQ ID NO: 214305 - RNA, 19 nt, Artificial Sequence
  Description of Artificial Sequence: Synthetic oligonucleotide
  Antisense strand to SEQ ID NO: 214304
auuaaacgacaacgacgaa

SEQ ID NO: 214306 - RNA, 19 nt, Artificial Sequence
  Description of Artificial Sequence: Synthetic oligonucleotide
  Sense strand starting at position 2819 of SEQ ID NO: 2758
cgucguugucguuuaaugu

SEQ ID NO: 214307 - RNA, 19 nt, Artificial Sequence
  Description of Artificial Sequence: Synthetic oligonucleotide
  Antisense strand to SEQ ID NO: 214306
acauuaaacgacaacgacg

SEQ ID NO: 214308 - RNA, 19 nt, Artificial Sequence
  Description of Artificial Sequence: Synthetic oligonucleotide
  Sense strand starting at position 2864 of SEQ ID NO: 2758
gcuauauguguucccuguu

SEQ ID NO: 214309 - RNA, 19 nt, Artificial Sequence
  Description of Artificial Sequence: Synthetic oligonucleotide
  Antisense strand to SEQ ID NO: 214308
aacagggaacacauauagc

SEQ ID NO: 214310 - RNA, 19 nt, Artificial Sequence
  Description of Artificial Sequence: Synthetic oligonucleotide
  Sense strand starting at position 2871 of SEQ ID NO: 2758
guguucccuguuuaagaaa

SEQ ID NO: 214311 - RNA, 19 nt, Artificial Sequence
  Description of Artificial Sequence: Synthetic oligonucleotide
  Antisense strand to SEQ ID NO: 214310
uuucuuaaacagggaacac

SEQ ID NO: 214312 - RNA, 19 nt, Artificial Sequence
  Description of Artificial Sequence: Synthetic oligonucleotide
  Sense strand starting at position 2905 of SEQ ID NO: 2758
uguuucucugcuuagggau

SEQ ID NO: 214313 - RNA, 19 nt, Artificial Sequence
  Description of Artificial Sequence: Synthetic oligonucleotide
  Antisense strand to SEQ ID NO: 214312
aucccuaagcagagaaaca

SEQ ID NO: 214314 - RNA, 19 nt, Artificial Sequence
  Description of Artificial Sequence: Synthetic oligonucleotide
  Sense strand starting at position 2934 of SEQ ID NO: 2758
uuugguaucugaucaugua

SEQ ID NO: 214315 - RNA, 19 nt, Artificial Sequence
  Description of Artificial Sequence: Synthetic oligonucleotide
  Antisense strand to SEQ ID NO: 214314
uacaugaucagauaccaaa

SEQ ID NO: 214316 - RNA, 19 nt, Artificial Sequence
  Description of Artificial Sequence: Synthetic oligonucleotide
  Sense strand starting at position 2935 of SEQ ID NO: 2758
uugguaucugaucauguag

SEQ ID NO: 214317 - RNA, 19 nt, Artificial Sequence
  Description of Artificial Sequence: Synthetic oligonucleotide
  Antisense strand to SEQ ID NO: 214316
cuacaugaucagauaccaa

SEQ ID NO: 214318 - RNA, 19 nt, Artificial Sequence
  Description of Artificial Sequence: Synthetic oligonucleotide
  Sense strand starting at position 2946 of SEQ ID NO: 2758
ucauguagaucuucucuuu

SEQ ID NO: 214319 - RNA, 19 nt, Artificial Sequence
  Description of Artificial Sequence: Synthetic oligonucleotide
  Antisense strand to SEQ ID NO: 214318
aaagagaagaucuacauga

SEQ ID NO: 214320 - RNA, 19 nt, Artificial Sequence
  Description of Artificial Sequence: Synthetic oligonucleotide
  Sense strand starting at position 2985 of SEQ ID NO: 2758
ggcgucuuuccucuuaguu

SEQ ID NO: 214321 - RNA, 19 nt, Artificial Sequence
  Description of Artificial Sequence: Synthetic oligonucleotide
  Antisense strand to SEQ ID NO: 214320
aacuaagaggaaagacgcc

SEQ ID NO: 214322 - RNA, 19 nt, Artificial Sequence
  Description of Artificial Sequence: Synthetic oligonucleotide
  Sense strand starting at position 2986 of SEQ ID NO: 2758
gcgucuuuccucuuaguuc

SEQ ID NO: 214323 - RNA, 19 nt, Artificial Sequence
  Description of Artificial Sequence: Synthetic oligonucleotide
  Antisense strand to SEQ ID NO: 214322
gaacuaagaggaaagacgc

SEQ ID NO: 214324 - RNA, 19 nt, Artificial Sequence
  Description of Artificial Sequence: Synthetic oligonucleotide
  Sense strand starting at position 3017 of SEQ ID NO: 2758
agugucuucucucccauuu

SEQ ID NO: 214325 - RNA, 19 nt, Artificial Sequence
  Description of Artificial Sequence: Synthetic oligonucleotide
  Antisense strand to SEQ ID NO: 214324
aaaugggagagaagacacu

SEQ ID NO: 214326 - RNA, 19 nt, Artificial Sequence
  Description of Artificial Sequence: Synthetic oligonucleotide
  Sense strand starting at position 3275 of SEQ ID NO: 2758
augggcaaguguuuaagau

SEQ ID NO: 214327 - RNA, 19 nt, Artificial Sequence
  Description of Artificial Sequence: Synthetic oligonucleotide
  Antisense strand to SEQ ID NO: 214326
aucuuaaacacuugcccau

SEQ ID NO: 214328 - RNA, 19 nt, Artificial Sequence
  Description of Artificial Sequence: Synthetic oligonucleotide
  Sense strand starting at position 3276 of SEQ ID NO: 2758
ugggcaaguguuuaagaug

SEQ ID NO: 214329 - RNA, 19 nt, Artificial Sequence
  Description of Artificial Sequence: Synthetic oligonucleotide
  Antisense strand to SEQ ID NO: 214328
caucuuaaacacuugccca

SEQ ID NO: 214330 - RNA, 19 nt, Artificial Sequence
  Description of Artificial Sequence: Synthetic oligonucleotide
  Sense strand starting at position 3291 of SEQ ID NO: 2758
gaugcuauauguuuggaau

SEQ ID NO: 214331 - RNA, 19 nt, Artificial Sequence
  Description of Artificial Sequence: Synthetic oligonucleotide
  Antisense strand to SEQ ID NO: 214330
auuccaaacauauagcauc

SEQ ID NO: 214332 - RNA, 19 nt, Artificial Sequence
  Description of Artificial Sequence: Synthetic oligonucleotide
  Sense strand starting at position 3292 of SEQ ID NO: 2758
augcuauauguuuggaauu

SEQ ID NO: 214333 - RNA, 19 nt, Artificial Sequence
  Description of Artificial Sequence: Synthetic oligonucleotide
  Antisense strand to SEQ ID NO: 214332
aauuccaaacauauagcau

SEQ ID NO: 214334 - RNA, 19 nt, Artificial Sequence
  Description of Artificial Sequence: Synthetic oligonucleotide
  Sense strand starting at position 3468 of SEQ ID NO: 2758
ucaagaaagcuuuguggga

SEQ ID NO: 214335 - RNA, 19 nt, Artificial Sequence
  Description of Artificial Sequence: Synthetic oligonucleotide
  Antisense strand to SEQ ID NO: 214334
ucccacaaagcuuucuuga

SEQ ID NO: 214336 - RNA, 19 nt, Artificial Sequence
  Description of Artificial Sequence: Synthetic oligonucleotide
  Sense strand starting at position 3469 of SEQ ID NO: 2758
caagaaagcuuugugggau

SEQ ID NO: 214337 - RNA, 19 nt, Artificial Sequence
  Description of Artificial Sequence: Synthetic oligonucleotide
  Antisense strand to SEQ ID NO: 214336
aucccacaaagcuuucuug

SEQ ID NO: 214338 - RNA, 19 nt, Artificial Sequence
  Description of Artificial Sequence: Synthetic oligonucleotide
  Sense strand starting at position 3472 of SEQ ID NO: 2758
gaaagcuuugugggauaga

SEQ ID NO: 214339 - RNA, 19 nt, Artificial Sequence
  Description of Artificial Sequence: Synthetic oligonucleotide
  Antisense strand to SEQ ID NO: 214338
ucuaucccacaaagcuuuc

SEQ ID NO: 214340 - RNA, 19 nt, Artificial Sequence
  Description of Artificial Sequence: Synthetic oligonucleotide
  Sense strand starting at position 3501 of SEQ ID NO: 2758
auauaaagauugcugcuaa

SEQ ID NO: 214341 - RNA, 19 nt, Artificial Sequence
  Description of Artificial Sequence: Synthetic oligonucleotide
  Antisense strand to SEQ ID NO: 214340
uuagcagcaaucuuuauau

SEQ ID NO: 214342 - RNA, 19 nt, Artificial Sequence
  Description of Artificial Sequence: Synthetic oligonucleotide
  Sense strand starting at position 3844 of SEQ ID NO: 2758
ucccaugauuuauagguaa

SEQ ID NO: 214343 - RNA, 19 nt, Artificial Sequence
  Description of Artificial Sequence: Synthetic oligonucleotide
  Antisense strand to SEQ ID NO: 214342
uuaccuauaaaucauggga

SEQ ID NO: 214344 - RNA, 19 nt, Artificial Sequence
  Description of Artificial Sequence: Synthetic oligonucleotide
  Sense strand starting at position 69 of SEQ ID NO: 2761
ugucuuccguugucucaua

SEQ ID NO: 214345 - RNA, 19 nt, Artificial Sequence
  Description of Artificial Sequence: Synthetic oligonucleotide
  Antisense strand to SEQ ID NO: 214344
uaugagacaacggaagaca

SEQ ID NO: 214346 - RNA, 19 nt, Artificial Sequence
  Description of Artificial Sequence: Synthetic oligonucleotide
  Sense strand starting at position 94 of SEQ ID NO: 2761
gucucaucuccucagccua

SEQ ID NO: 214347 - RNA, 19 nt, Artificial Sequence
  Description of Artificial Sequence: Synthetic oligonucleotide
  Antisense strand to SEQ ID NO: 214346
uaggcugaggagaugagac

SEQ ID NO: 214348 - RNA, 19 nt, Artificial Sequence
  Description of Artificial Sequence: Synthetic oligonucleotide
  Sense strand starting at position 194 of SEQ ID NO: 2761
gcuagcucaucugcgaaau

SEQ ID NO: 214349 - RNA, 19 nt, Artificial Sequence
  Description of Artificial Sequence: Synthetic oligonucleotide
  Antisense strand to SEQ ID NO: 214348
auuucgcagaugagcuagc

SEQ ID NO: 214350 - RNA, 19 nt, Artificial Sequence
  Description of Artificial Sequence: Synthetic oligonucleotide
  Sense strand starting at position 195 of SEQ ID NO: 2761
cuagcucaucugcgaaaug

SEQ ID NO: 214351 - RNA, 19 nt, Artificial Sequence
  Description of Artificial Sequence: Synthetic oligonucleotide
  Antisense strand to SEQ ID NO: 214350
cauuucgcagaugagcuag

SEQ ID NO: 214352 - RNA, 19 nt, Artificial Sequence
  Description of Artificial Sequence: Synthetic oligonucleotide
  Sense strand starting at position 215 of SEQ ID NO: 2761
gcaugcguccugucucaga

SEQ ID NO: 214353 - RNA, 19 nt, Artificial Sequence
  Description of Artificial Sequence: Synthetic oligonucleotide
  Antisense strand to SEQ ID NO: 214352
ucugagacaggacgcaugc

SEQ ID NO: 214354 - RNA, 19 nt, Artificial Sequence
  Description of Artificial Sequence: Synthetic oligonucleotide
  Sense strand starting at position 231 of SEQ ID NO: 2761
agagcuguccaagggcuaa

SEQ ID NO: 214355 - RNA, 19 nt, Artificial Sequence
  Description of Artificial Sequence: Synthetic oligonucleotide
  Antisense strand to SEQ ID NO: 214354
uuagcccuuggacagcucu

SEQ ID NO: 214356 - RNA, 19 nt, Artificial Sequence
  Description of Artificial Sequence: Synthetic oligonucleotide
  Sense strand starting at position 455 of SEQ ID NO: 2761
cuuugccucucagagggau

SEQ ID NO: 214357 - RNA, 19 nt, Artificial Sequence
  Description of Artificial Sequence: Synthetic oligonucleotide
  Antisense strand to SEQ ID NO: 214356
aucccucugagaggcaaag

SEQ ID NO: 214358 - RNA, 19 nt, Artificial Sequence
  Description of Artificial Sequence: Synthetic oligonucleotide
  Sense strand starting at position 487 of SEQ ID NO: 2761
ggagguaucagugggauag

SEQ ID NO: 214359 - RNA, 19 nt, Artificial Sequence
  Description of Artificial Sequence: Synthetic oligonucleotide
  Antisense strand to SEQ ID NO: 214358
cuaucccacugauaccucc

SEQ ID NO: 214360 - RNA, 19 nt, Artificial Sequence
  Description of Artificial Sequence: Synthetic oligonucleotide
  Sense strand starting at position 491 of SEQ ID NO: 2761
guaucagugggauagcuua

SEQ ID NO: 214361 - RNA, 19 nt, Artificial Sequence
  Description of Artificial Sequence: Synthetic oligonucleotide
  Antisense strand to SEQ ID NO: 214360
uaagcuaucccacugauac

SEQ ID NO: 214362 - RNA, 19 nt, Artificial Sequence
  Description of Artificial Sequence: Synthetic oligonucleotide
  Sense strand starting at position 499 of SEQ ID NO: 2761
gggauagcuuaucauccca

SEQ ID NO: 214363 - RNA, 19 nt, Artificial Sequence
  Description of Artificial Sequence: Synthetic oligonucleotide
  Antisense strand to SEQ ID NO: 214362
ugggaugauaagcuauccc

SEQ ID NO: 214364 - RNA, 19 nt, Artificial Sequence
  Description of Artificial Sequence: Synthetic oligonucleotide
  Sense strand starting at position 1105 of SEQ ID NO: 2761
auggcacaagcuuaucaaa

SEQ ID NO: 214365 - RNA, 19 nt, Artificial Sequence
  Description of Artificial Sequence: Synthetic oligonucleotide
  Antisense strand to SEQ ID NO: 214364
uuugauaagcuugugccau

SEQ ID NO: 214366 - RNA, 19 nt, Artificial Sequence
  Description of Artificial Sequence: Synthetic oligonucleotide
  Sense strand starting at position 1175 of SEQ ID NO: 2761
ggucacgucuucucuguau

SEQ ID NO: 214367 - RNA, 19 nt, Artificial Sequence
  Description of Artificial Sequence: Synthetic oligonucleotide
  Antisense strand to SEQ ID NO: 214366
auacagagaagacgugacc

SEQ ID NO: 214368 - RNA, 19 nt, Artificial Sequence
  Description of Artificial Sequence: Synthetic oligonucleotide
  Sense strand starting at position 1186 of SEQ ID NO: 2761
cucuguaucuguucucuca

SEQ ID NO: 214369 - RNA, 19 nt, Artificial Sequence
  Description of Artificial Sequence: Synthetic oligonucleotide
  Antisense strand to SEQ ID NO: 214368
ugagagaacagauacagag

SEQ ID NO: 214370 - RNA, 19 nt, Artificial Sequence
  Description of Artificial Sequence: Synthetic oligonucleotide
  Sense strand starting at position 1193 of SEQ ID NO: 2761
ucuguucucucaccuauga

SEQ ID NO: 214371 - RNA, 19 nt, Artificial Sequence
  Description of Artificial Sequence: Synthetic oligonucleotide
  Antisense strand to SEQ ID NO: 214370
ucauaggugagagaacaga

SEQ ID NO: 214372 - RNA, 19 nt, Artificial Sequence
  Description of Artificial Sequence: Synthetic oligonucleotide
  Sense strand starting at position 1258 of SEQ ID NO: 2761
acgaaauggucuuaaacag

SEQ ID NO: 214373 - RNA, 19 nt, Artificial Sequence
  Description of Artificial Sequence: Synthetic oligonucleotide
  Antisense strand to SEQ ID NO: 214372
cuguuuaagaccauuucgu

SEQ ID NO: 214374 - RNA, 19 nt, Artificial Sequence
  Description of Artificial Sequence: Synthetic oligonucleotide
  Sense strand starting at position 1274 of SEQ ID NO: 2761
cagguagugcuuugcauuu

SEQ ID NO: 214375 - RNA, 19 nt, Artificial Sequence
  Description of Artificial Sequence: Synthetic oligonucleotide
  Antisense strand to SEQ ID NO: 214374
aaaugcaaagcacuaccug

SEQ ID NO: 214376 - RNA, 19 nt, Artificial Sequence
  Description of Artificial Sequence: Synthetic oligonucleotide
  Sense strand starting at position 1280 of SEQ ID NO: 2761
gugcuuugcauuugggaga

SEQ ID NO: 214377 - RNA, 19 nt, Artificial Sequence
  Description of Artificial Sequence: Synthetic oligonucleotide
  Antisense strand to SEQ ID NO: 214376
ucucccaaaugcaaagcac

SEQ ID NO: 214378 - RNA, 19 nt, Artificial Sequence
  Description of Artificial Sequence: Synthetic oligonucleotide
  Sense strand starting at position 1281 of SEQ ID NO: 2761
ugcuuugcauuugggagau

SEQ ID NO: 214379 - RNA, 19 nt, Artificial Sequence
  Description of Artificial Sequence: Synthetic oligonucleotide
  Antisense strand to SEQ ID NO: 214378
aucucccaaaugcaaagca

SEQ ID NO: 214380 - RNA, 19 nt, Artificial Sequence
  Description of Artificial Sequence: Synthetic oligonucleotide
  Sense strand starting at position 1323 of SEQ ID NO: 2761
agagauauugugggucuga

SEQ ID NO: 214381 - RNA, 19 nt, Artificial Sequence
  Description of Artificial Sequence: Synthetic oligonucleotide
  Antisense strand to SEQ ID NO: 214380
ucagacccacaauaucucu

SEQ ID NO: 214382 - RNA, 19 nt, Artificial Sequence
  Description of Artificial Sequence: Synthetic oligonucleotide
  Sense strand starting at position 1324 of SEQ ID NO: 2761
gagauauugugggucugac

SEQ ID NO: 214383 - RNA, 19 nt, Artificial Sequence
  Description of Artificial Sequence: Synthetic oligonucleotide
  Antisense strand to SEQ ID NO: 214382
gucagacccacaauaucuc

SEQ ID NO: 214384 - RNA, 19 nt, Artificial Sequence
  Description of Artificial Sequence: Synthetic oligonucleotide
  Sense strand starting at position 1349 of SEQ ID NO: 2761
guucgcuacuuaguaguua

SEQ ID NO: 214385 - RNA, 19 nt, Artificial Sequence
  Description of Artificial Sequence: Synthetic oligonucleotide
  Antisense strand to SEQ ID NO: 214384
uaacuacuaaguagcgaac

SEQ ID NO: 214386 - RNA, 19 nt, Artificial Sequence
  Description of Artificial Sequence: Synthetic oligonucleotide
  Sense strand starting at position 1361 of SEQ ID NO: 2761
guaguuauguccuugagca

SEQ ID NO: 214387 - RNA, 19 nt, Artificial Sequence
  Description of Artificial Sequence: Synthetic oligonucleotide
  Antisense strand to SEQ ID NO: 214386
ugcucaaggacauaacuac

SEQ ID NO: 214388 - RNA, 19 nt, Artificial Sequence
  Description of Artificial Sequence: Synthetic oligonucleotide
  Sense strand starting at position 1362 of SEQ ID NO: 2761
uaguuauguccuugagcau

SEQ ID NO: 214389 - RNA, 19 nt, Artificial Sequence
  Description of Artificial Sequence: Synthetic oligonucleotide
  Antisense strand to SEQ ID NO: 214388
augcucaaggacauaacua

SEQ ID NO: 214390 - RNA, 19 nt, Artificial Sequence
  Description of Artificial Sequence: Synthetic oligonucleotide
  Sense strand starting at position 1363 of SEQ ID NO: 2761
aguuauguccuugagcaug

SEQ ID NO: 214391 - RNA, 19 nt, Artificial Sequence
  Description of Artificial Sequence: Synthetic oligonucleotide
  Antisense strand to SEQ ID NO: 214390
caugcucaaggacauaacu

SEQ ID NO: 214392 - RNA, 19 nt, Artificial Sequence
  Description of Artificial Sequence: Synthetic oligonucleotide
  Sense strand starting at position 1368 of SEQ ID NO: 2761
uguccuugagcauguuauu

SEQ ID NO: 214393 - RNA, 19 nt, Artificial Sequence
  Description of Artificial Sequence: Synthetic oligonucleotide
  Antisense strand to SEQ ID NO: 214392
aauaacaugcucaaggaca

SEQ ID NO: 214394 - RNA, 19 nt, Artificial Sequence
  Description of Artificial Sequence: Synthetic oligonucleotide
  Sense strand starting at position 1643 of SEQ ID NO: 2761
acccaauguuacuuagaag

SEQ ID NO: 214395 - RNA, 19 nt, Artificial Sequence
  Description of Artificial Sequence: Synthetic oligonucleotide
  Antisense strand to SEQ ID NO: 214394
cuucuaaguaacauugggu

SEQ ID NO: 214396 - RNA, 19 nt, Artificial Sequence
  Description of Artificial Sequence: Synthetic oligonucleotide
  Sense strand starting at position 1682 of SEQ ID NO: 2761
agacauuaaugagauaggu

SEQ ID NO: 214397 - RNA, 19 nt, Artificial Sequence
  Description of Artificial Sequence: Synthetic oligonucleotide
  Antisense strand to SEQ ID NO: 214396
accuaucucauuaaugucu

SEQ ID NO: 214398 - RNA, 19 nt, Artificial Sequence
  Description of Artificial Sequence: Synthetic oligonucleotide
  Sense strand starting at position 1767 of SEQ ID NO: 2761
gguaaauccuaguucucuc

SEQ ID NO: 214399 - RNA, 19 nt, Artificial Sequence
  Description of Artificial Sequence: Synthetic oligonucleotide
  Antisense strand to SEQ ID NO: 214398
gagagaacuaggauuuacc

SEQ ID NO: 214400 - RNA, 19 nt, Artificial Sequence
  Description of Artificial Sequence: Synthetic oligonucleotide
  Sense strand starting at position 1904 of SEQ ID NO: 2761
gacacaguccaguaaguuc

SEQ ID NO: 214401 - RNA, 19 nt, Artificial Sequence
  Description of Artificial Sequence: Synthetic oligonucleotide
  Antisense strand to SEQ ID NO: 214400
gaacuuacuggacuguguc

SEQ ID NO: 214402 - RNA, 19 nt, Artificial Sequence
  Description of Artificial Sequence: Synthetic oligonucleotide
  Sense strand starting at position 3277 of SEQ ID NO: 2761
ccagguaaaucuuggacaa

SEQ ID NO: 214403 - RNA, 19 nt, Artificial Sequence
  Description of Artificial Sequence: Synthetic oligonucleotide
  Antisense strand to SEQ ID NO: 214402
uuguccaagauuuaccugg

SEQ ID NO: 214404 - RNA, 19 nt, Artificial Sequence
  Description of Artificial Sequence: Synthetic oligonucleotide
  Sense strand starting at position 3278 of SEQ ID NO: 2761
cagguaaaucuuggacaau

SEQ ID NO: 214405 - RNA, 19 nt, Artificial Sequence
  Description of Artificial Sequence: Synthetic oligonucleotide
  Antisense strand to SEQ ID NO: 214404
auuguccaagauuuaccug

SEQ ID NO: 214406 - RNA, 19 nt, Artificial Sequence
  Description of Artificial Sequence: Synthetic oligonucleotide
  Sense strand starting at position 3279 of SEQ ID NO: 2761
agguaaaucuuggacaauc

SEQ ID NO: 214407 - RNA, 19 nt, Artificial Sequence
  Description of Artificial Sequence: Synthetic oligonucleotide
  Antisense strand to SEQ ID NO: 214406
gauuguccaagauuuaccu

SEQ ID NO: 214408 - RNA, 19 nt, Artificial Sequence
  Description of Artificial Sequence: Synthetic oligonucleotide
  Sense strand starting at position 3470 of SEQ ID NO: 2761
ugcacaaauguggauacua

SEQ ID NO: 214409 - RNA, 19 nt, Artificial Sequence
  Description of Artificial Sequence: Synthetic oligonucleotide
  Antisense strand to SEQ ID NO: 214408
uaguauccacauuugugca

SEQ ID NO: 214410 - RNA, 19 nt, Artificial Sequence
  Description of Artificial Sequence: Synthetic oligonucleotide
  Sense strand starting at position 3506 of SEQ ID NO: 2761
cuugcugaguucucccaau

SEQ ID NO: 214411 - RNA, 19 nt, Artificial Sequence
  Description of Artificial Sequence: Synthetic oligonucleotide
  Antisense strand to SEQ ID NO: 214410
auugggagaacucagcaag

SEQ ID NO: 214412 - RNA, 19 nt, Artificial Sequence
  Description of Artificial Sequence: Synthetic oligonucleotide
  Sense strand starting at position 3785 of SEQ ID NO: 2761
acugcuucuucggugagau

SEQ ID NO: 214413 - RNA, 19 nt, Artificial Sequence
  Description of Artificial Sequence: Synthetic oligonucleotide
  Antisense strand to SEQ ID NO: 214412
aucucaccgaagaagcagu

SEQ ID NO: 214414 - RNA, 19 nt, Artificial Sequence
  Description of Artificial Sequence: Synthetic oligonucleotide
  Sense strand starting at position 3786 of SEQ ID NO: 2761
cugcuucuucggugagauc

SEQ ID NO: 214415 - RNA, 19 nt, Artificial Sequence
  Description of Artificial Sequence: Synthetic oligonucleotide
  Antisense strand to SEQ ID NO: 214414
gaucucaccgaagaagcag

SEQ ID NO: 214416 - RNA, 19 nt, Artificial Sequence
  Description of Artificial Sequence: Synthetic oligonucleotide
  Sense strand starting at position 3926 of SEQ ID NO: 2761
uuuauagauugucuagacu

SEQ ID NO: 214417 - RNA, 19 nt, Artificial Sequence
  Description of Artificial Sequence: Synthetic oligonucleotide
  Antisense strand to SEQ ID NO: 214416
agucuagacaaucuauaaa

SEQ ID NO: 214418 - RNA, 19 nt, Artificial Sequence
  Description of Artificial Sequence: Synthetic oligonucleotide
  Sense strand starting at position 3934 of SEQ ID NO: 2761
uugucuagacucuagauua

SEQ ID NO: 214419 - RNA, 19 nt, Artificial Sequence
  Description of Artificial Sequence: Synthetic oligonucleotide
  Antisense strand to SEQ ID NO: 214418
uaaucuagagucuagacaa

SEQ ID NO: 214420 - RNA, 19 nt, Artificial Sequence
  Description of Artificial Sequence: Synthetic oligonucleotide
  Sense strand starting at position 3977 of SEQ ID NO: 2761
ggcacaccugagugugaau

SEQ ID NO: 214421 - RNA, 19 nt, Artificial Sequence
  Description of Artificial Sequence: Synthetic oligonucleotide
  Antisense strand to SEQ ID NO: 214420
auucacacucaggugugcc

SEQ ID NO: 214422 - RNA, 19 nt, Artificial Sequence
  Description of Artificial Sequence: Synthetic oligonucleotide
  Sense strand starting at position 3980 of SEQ ID NO: 2761
acaccugagugugaauuua

SEQ ID NO: 214423 - RNA, 19 nt, Artificial Sequence
  Description of Artificial Sequence: Synthetic oligonucleotide
  Antisense strand to SEQ ID NO: 214422
uaaauucacacucaggugu

SEQ ID NO: 214424 - RNA, 19 nt, Artificial Sequence
  Description of Artificial Sequence: Synthetic oligonucleotide
  Sense strand starting at position 437 of SEQ ID NO: 2762
auggcacaagcuuaucaaa

SEQ ID NO: 214425 - RNA, 19 nt, Artificial Sequence
  Description of Artificial Sequence: Synthetic oligonucleotide
  Antisense strand to SEQ ID NO: 214424
uuugauaagcuugugccau

SEQ ID NO: 214426 - RNA, 19 nt, Artificial Sequence
  Description of Artificial Sequence: Synthetic oligonucleotide
  Sense strand starting at position 525 of SEQ ID NO: 2762
ucuguucucucaccuauga

SEQ ID NO: 214427 - RNA, 19 nt, Artificial Sequence
  Description of Artificial Sequence: Synthetic oligonucleotide
  Antisense strand to SEQ ID NO: 214426
ucauaggugagagaacaga

SEQ ID NO: 214428 - RNA, 19 nt, Artificial Sequence
  Description of Artificial Sequence: Synthetic oligonucleotide
  Sense strand starting at position 606 of SEQ ID NO: 2762
cagguagugcuuugcauuu

SEQ ID NO: 214429 - RNA, 19 nt, Artificial Sequence
  Description of Artificial Sequence: Synthetic oligonucleotide
  Antisense strand to SEQ ID NO: 214428
aaaugcaaagcacuaccug

SEQ ID NO: 214430 - RNA, 19 nt, Artificial Sequence
  Description of Artificial Sequence: Synthetic oligonucleotide
  Sense strand starting at position 612 of SEQ ID NO: 2762
gugcuuugcauuugggaga

SEQ ID NO: 214431 - RNA, 19 nt, Artificial Sequence
  Description of Artificial Sequence: Synthetic oligonucleotide
  Antisense strand to SEQ ID NO: 214430
ucucccaaaugcaaagcac

SEQ ID NO: 214432 - RNA, 19 nt, Artificial Sequence
  Description of Artificial Sequence: Synthetic oligonucleotide
  Sense strand starting at position 655 of SEQ ID NO: 2762
agagauauugugggucuga

SEQ ID NO: 214433 - RNA, 19 nt, Artificial Sequence
  Description of Artificial Sequence: Synthetic oligonucleotide
  Antisense strand to SEQ ID NO: 214432
ucagacccacaauaucucu

SEQ ID NO: 214434 - RNA, 19 nt, Artificial Sequence
  Description of Artificial Sequence: Synthetic oligonucleotide
  Sense strand starting at position 656 of SEQ ID NO: 2762
gagauauugugggucugac

SEQ ID NO: 214435 - RNA, 19 nt, Artificial Sequence
  Description of Artificial Sequence: Synthetic oligonucleotide
  Antisense strand to SEQ ID NO: 214434
gucagacccacaauaucuc

SEQ ID NO: 214436 - RNA, 19 nt, Artificial Sequence
  Description of Artificial Sequence: Synthetic oligonucleotide
  Sense strand starting at position 695 of SEQ ID NO: 2762
aguuauguccuugagcaug

SEQ ID NO: 214437 - RNA, 19 nt, Artificial Sequence
  Description of Artificial Sequence: Synthetic oligonucleotide
  Antisense strand to SEQ ID NO: 214436
caugcucaaggacauaacu

SEQ ID NO: 214438 - RNA, 19 nt, Artificial Sequence
  Description of Artificial Sequence: Synthetic oligonucleotide
  Sense strand starting at position 975 of SEQ ID NO: 2762
acccaauguuacuuagaag

SEQ ID NO: 214439 - RNA, 19 nt, Artificial Sequence
  Description of Artificial Sequence: Synthetic oligonucleotide
  Antisense strand to SEQ ID NO: 214438
cuucuaaguaacauugggu

SEQ ID NO: 214440 - RNA, 19 nt, Artificial Sequence
  Description of Artificial Sequence: Synthetic oligonucleotide
  Sense strand starting at position 1099 of SEQ ID NO: 2762
gguaaauccuaguucucuc

SEQ ID NO: 214441 - RNA, 19 nt, Artificial Sequence
  Description of Artificial Sequence: Synthetic oligonucleotide
  Antisense strand to SEQ ID NO: 214440
gagagaacuaggauuuacc

SEQ ID NO: 214442 - RNA, 19 nt, Artificial Sequence
  Description of Artificial Sequence: Synthetic oligonucleotide
  Sense strand starting at position 1236 of SEQ ID NO: 2762
gacacaguccaguaaguuc

SEQ ID NO: 214443 - RNA, 19 nt, Artificial Sequence
  Description of Artificial Sequence: Synthetic oligonucleotide
  Antisense strand to SEQ ID NO: 214442
gaacuuacuggacuguguc

SEQ ID NO: 214444 - RNA, 19 nt, Artificial Sequence
  Description of Artificial Sequence: Synthetic oligonucleotide
  Sense strand starting at position 2610 of SEQ ID NO: 2762
cagguaaaucuuggacaau

SEQ ID NO: 214445 - RNA, 19 nt, Artificial Sequence
  Description of Artificial Sequence: Synthetic oligonucleotide
  Antisense strand to SEQ ID NO: 214444
auuguccaagauuuaccug

SEQ ID NO: 214446 - RNA, 19 nt, Artificial Sequence
  Description of Artificial Sequence: Synthetic oligonucleotide
  Sense strand starting at position 2802 of SEQ ID NO: 2762
ugcacaaauguggauacua

SEQ ID NO: 214447 - RNA, 19 nt, Artificial Sequence
  Description of Artificial Sequence: Synthetic oligonucleotide
  Antisense strand to SEQ ID NO: 214446
uaguauccacauuugugca

SEQ ID NO: 214448 - RNA, 19 nt, Artificial Sequence
  Description of Artificial Sequence: Synthetic oligonucleotide
  Sense strand starting at position 3258 of SEQ ID NO: 2762
uuuauagauugucuagacu

SEQ ID NO: 214449 - RNA, 19 nt, Artificial Sequence
  Description of Artificial Sequence: Synthetic oligonucleotide
  Antisense strand to SEQ ID NO: 214448
agucuagacaaucuauaaa

SEQ ID NO: 214450 - RNA, 19 nt, Artificial Sequence
  Description of Artificial Sequence: Synthetic oligonucleotide
  Sense strand starting at position 3266 of SEQ ID NO: 2762
uugucuagacucuagauua

SEQ ID NO: 214451 - RNA, 19 nt, Artificial Sequence
  Description of Artificial Sequence: Synthetic oligonucleotide
  Antisense strand to SEQ ID NO: 214450
uaaucuagagucuagacaa

SEQ ID NO: 214452 - RNA, 19 nt, Artificial Sequence
  Description of Artificial Sequence: Synthetic oligonucleotide
  Sense strand starting at position 3309 of SEQ ID NO: 2762
ggcacaccugagugugaau

SEQ ID NO: 214453 - RNA, 19 nt, Artificial Sequence
  Description of Artificial Sequence: Synthetic oligonucleotide
  Antisense strand to SEQ ID NO: 214452
auucacacucaggugugcc

SEQ ID NO: 214454 - RNA, 19 nt, Artificial Sequence
  Description of Artificial Sequence: Synthetic oligonucleotide
  Sense strand starting at position 3312 of SEQ ID NO: 2762
acaccugagugugaauuua

SEQ ID NO: 214455 - RNA, 19 nt, Artificial Sequence
  Description of Artificial Sequence: Synthetic oligonucleotide
  Antisense strand to SEQ ID NO: 214454
uaaauucacacucaggugu

SEQ ID NO: 214456 - RNA, 19 nt, Artificial Sequence
  Description of Artificial Sequence: Synthetic oligonucleotide
  Sense strand starting at position 3320 of SEQ ID NO: 2762
gugugaauuuacuuagcuu

SEQ ID NO: 214457 - RNA, 19 nt, Artificial Sequence
  Description of Artificial Sequence: Synthetic oligonucleotide
  Antisense strand to SEQ ID NO: 214456
aagcuaaguaaauucacac

SEQ ID NO: 214458 - RNA, 19 nt, Artificial Sequence
  Description of Artificial Sequence: Synthetic oligonucleotide
  Sense strand starting at position 3340 of SEQ ID NO: 2762
gcaguuacuaauugugaug

SEQ ID NO: 214459 - RNA, 19 nt, Artificial Sequence
  Description of Artificial Sequence: Synthetic oligonucleotide
  Antisense strand to SEQ ID NO: 214458
caucacaauuaguaacugc

SEQ ID NO: 214460 - RNA, 19 nt, Artificial Sequence
  Description of Artificial Sequence: Synthetic oligonucleotide
  Sense strand starting at position 3354 of SEQ ID NO: 2762
ugaugucuugggcacauua

SEQ ID NO: 214461 - RNA, 19 nt, Artificial Sequence
  Description of Artificial Sequence: Synthetic oligonucleotide
  Antisense strand to SEQ ID NO: 214460
uaaugugcccaagacauca

SEQ ID NO: 214462 - RNA, 19 nt, Artificial Sequence
  Description of Artificial Sequence: Synthetic oligonucleotide
  Sense strand starting at position 3356 of SEQ ID NO: 2762
augucuugggcacauuaau

SEQ ID NO: 214463 - RNA, 19 nt, Artificial Sequence
  Description of Artificial Sequence: Synthetic oligonucleotide
  Antisense strand to SEQ ID NO: 214462
auuaaugugcccaagacau

SEQ ID NO: 214464 - RNA, 19 nt, Artificial Sequence
  Description of Artificial Sequence: Synthetic oligonucleotide
  Sense strand starting at position 3417 of SEQ ID NO: 2762
auuugucucauguaguguu

SEQ ID NO: 214465 - RNA, 19 nt, Artificial Sequence
  Description of Artificial Sequence: Synthetic oligonucleotide
  Antisense strand to SEQ ID NO: 214464
aacacuacaugagacaaau

SEQ ID NO: 214466 - RNA, 19 nt, Artificial Sequence
  Description of Artificial Sequence: Synthetic oligonucleotide
  Sense strand starting at position 3432 of SEQ ID NO: 2762
uguuguaagaauuaguaag

SEQ ID NO: 214467 - RNA, 19 nt, Artificial Sequence
  Description of Artificial Sequence: Synthetic oligonucleotide
  Antisense strand to SEQ ID NO: 214466
cuuacuaauucuuacaaca

SEQ ID NO: 214468 - RNA, 19 nt, Artificial Sequence
  Description of Artificial Sequence: Synthetic oligonucleotide
  Sense strand starting at position 3466 of SEQ ID NO: 2762
agcuauugugaggaugugu

SEQ ID NO: 214469 - RNA, 19 nt, Artificial Sequence
  Description of Artificial Sequence: Synthetic oligonucleotide
  Antisense strand to SEQ ID NO: 214468
acacauccucacaauagcu

SEQ ID NO: 214470 - RNA, 19 nt, Artificial Sequence
  Description of Artificial Sequence: Synthetic oligonucleotide
  Sense strand starting at position 3474 of SEQ ID NO: 2762
ugaggauguguuuggcuaa

SEQ ID NO: 214471 - RNA, 19 nt, Artificial Sequence
  Description of Artificial Sequence: Synthetic oligonucleotide
  Antisense strand to SEQ ID NO: 214470
uuagccaaacacauccuca

SEQ ID NO: 214472 - RNA, 19 nt, Artificial Sequence
  Description of Artificial Sequence: Synthetic oligonucleotide
  Sense strand starting at position 3477 of SEQ ID NO: 2762
ggauguguuuggcuaacug

SEQ ID NO: 214473 - RNA, 19 nt, Artificial Sequence
  Description of Artificial Sequence: Synthetic oligonucleotide
  Antisense strand to SEQ ID NO: 214472
caguuagccaaacacaucc

SEQ ID NO: 214474 - RNA, 19 nt, Artificial Sequence
  Description of Artificial Sequence: Synthetic oligonucleotide
  Sense strand starting at position 3514 of SEQ ID NO: 2762
aacacuuagcaggguuauu

SEQ ID NO: 214475 - RNA, 19 nt, Artificial Sequence
  Description of Artificial Sequence: Synthetic oligonucleotide
  Antisense strand to SEQ ID NO: 214474
aauaacccugcuaaguguu

SEQ ID NO: 214476 - RNA, 19 nt, Artificial Sequence
  Description of Artificial Sequence: Synthetic oligonucleotide
  Sense strand starting at position 3551 of SEQ ID NO: 2762
cagggcauauugucugaca

SEQ ID NO: 214477 - RNA, 19 nt, Artificial Sequence
  Description of Artificial Sequence: Synthetic oligonucleotide
  Antisense strand to SEQ ID NO: 214476
ugucagacaauaugcccug

SEQ ID NO: 214478 - RNA, 19 nt, Artificial Sequence
  Description of Artificial Sequence: Synthetic oligonucleotide
  Sense strand starting at position 3573 of SEQ ID NO: 2762
aggagacucccuggagcau

SEQ ID NO: 214479 - RNA, 19 nt, Artificial Sequence
  Description of Artificial Sequence: Synthetic oligonucleotide
  Antisense strand to SEQ ID NO: 214478
augcuccagggagucuccu

SEQ ID NO: 214480 - RNA, 19 nt, Artificial Sequence
  Description of Artificial Sequence: Synthetic oligonucleotide
  Sense strand starting at position 3574 of SEQ ID NO: 2762
ggagacucccuggagcauu

SEQ ID NO: 214481 - RNA, 19 nt, Artificial Sequence
  Description of Artificial Sequence: Synthetic oligonucleotide
  Antisense strand to SEQ ID NO: 214480
aaugcuccagggagucucc

SEQ ID NO: 214482 - RNA, 19 nt, Artificial Sequence
  Description of Artificial Sequence: Synthetic oligonucleotide
  Sense strand starting at position 3590 of SEQ ID NO: 2762
auuuacaccugggauacau

SEQ ID NO: 214483 - RNA, 19 nt, Artificial Sequence
  Description of Artificial Sequence: Synthetic oligonucleotide
  Antisense strand to SEQ ID NO: 214482
auguaucccagguguaaau

SEQ ID NO: 214484 - RNA, 19 nt, Artificial Sequence
  Description of Artificial Sequence: Synthetic oligonucleotide
  Sense strand starting at position 3607 of SEQ ID NO: 2762
auauuagagugggcuggau

SEQ ID NO: 214485 - RNA, 19 nt, Artificial Sequence
  Description of Artificial Sequence: Synthetic oligonucleotide
  Antisense strand to SEQ ID NO: 214484
auccagcccacucuaauau

SEQ ID NO: 214486 - RNA, 19 nt, Artificial Sequence
  Description of Artificial Sequence: Synthetic oligonucleotide
  Sense strand starting at position 3619 of SEQ ID NO: 2762
gcuggaugguggucacaca

SEQ ID NO: 214487 - RNA, 19 nt, Artificial Sequence
  Description of Artificial Sequence: Synthetic oligonucleotide
  Antisense strand to SEQ ID NO: 214486
ugugugaccaccauccagc

SEQ ID NO: 214488 - RNA, 19 nt, Artificial Sequence
  Description of Artificial Sequence: Synthetic oligonucleotide
  Sense strand starting at position 3788 of SEQ ID NO: 2762
agcugcuuugccuagagaa

SEQ ID NO: 214489 - RNA, 19 nt, Artificial Sequence
  Description of Artificial Sequence: Synthetic oligonucleotide
  Antisense strand to SEQ ID NO: 214488
uucucuaggcaaagcagcu

SEQ ID NO: 214490 - RNA, 19 nt, Artificial Sequence
  Description of Artificial Sequence: Synthetic oligonucleotide
  Sense strand starting at position 3790 of SEQ ID NO: 2762
cugcuuugccuagagaaag

SEQ ID NO: 214491 - RNA, 19 nt, Artificial Sequence
  Description of Artificial Sequence: Synthetic oligonucleotide
  Antisense strand to SEQ ID NO: 214490
cuuucucuaggcaaagcag

SEQ ID NO: 214492 - RNA, 19 nt, Artificial Sequence
  Description of Artificial Sequence: Synthetic oligonucleotide
  Sense strand starting at position 3819 of SEQ ID NO: 2762
uucuaauaugcauaaaggu

SEQ ID NO: 214493 - RNA, 19 nt, Artificial Sequence
  Description of Artificial Sequence: Synthetic oligonucleotide
  Antisense strand to SEQ ID NO: 214492
accuuuaugcauauuagaa

SEQ ID NO: 214494 - RNA, 19 nt, Artificial Sequence
  Description of Artificial Sequence: Synthetic oligonucleotide
  Sense strand starting at position 3845 of SEQ ID NO: 2762
gggcuaguggcccaguaua

SEQ ID NO: 214495 - RNA, 19 nt, Artificial Sequence
  Description of Artificial Sequence: Synthetic oligonucleotide
  Antisense strand to SEQ ID NO: 214494
uauacugggccacuagccc

SEQ ID NO: 214496 - RNA, 19 nt, Artificial Sequence
  Description of Artificial Sequence: Synthetic oligonucleotide
  Sense strand starting at position 3855 of SEQ ID NO: 2762
cccaguauaaugggaguaa

SEQ ID NO: 214497 - RNA, 19 nt, Artificial Sequence
  Description of Artificial Sequence: Synthetic oligonucleotide
  Antisense strand to SEQ ID NO: 214496
uuacucccauuauacuggg

SEQ ID NO: 214498 - RNA, 19 nt, Artificial Sequence
  Description of Artificial Sequence: Synthetic oligonucleotide
  Sense strand starting at position 3888 of SEQ ID NO: 2762
ugcagcaagaguuacagaa

SEQ ID NO: 214499 - RNA, 19 nt, Artificial Sequence
  Description of Artificial Sequence: Synthetic oligonucleotide
  Antisense strand to SEQ ID NO: 214498
uucuguaacucuugcugca

SEQ ID NO: 214500 - RNA, 19 nt, Artificial Sequence
  Description of Artificial Sequence: Synthetic oligonucleotide
  Sense strand starting at position 3913 of SEQ ID NO: 2762
agaggagagugagcucuau

SEQ ID NO: 214501 - RNA, 19 nt, Artificial Sequence
  Description of Artificial Sequence: Synthetic oligonucleotide
  Antisense strand to SEQ ID NO: 214500
auagagcucacucuccucu

SEQ ID NO: 214502 - RNA, 19 nt, Artificial Sequence
  Description of Artificial Sequence: Synthetic oligonucleotide
  Sense strand starting at position 3959 of SEQ ID NO: 2762
ggagaauuguaggugagug

SEQ ID NO: 214503 - RNA, 19 nt, Artificial Sequence
  Description of Artificial Sequence: Synthetic oligonucleotide
  Antisense strand to SEQ ID NO: 214502
cacucaccuacaauucucc

SEQ ID NO: 214504 - RNA, 19 nt, Artificial Sequence
  Description of Artificial Sequence: Synthetic oligonucleotide
  Sense strand starting at position 84 of SEQ ID NO: 2763
ccucauggagauugacauu

SEQ ID NO: 214505 - RNA, 19 nt, Artificial Sequence
  Description of Artificial Sequence: Synthetic oligonucleotide
  Antisense strand to SEQ ID NO: 214504
aaugucaaucuccaugagg

SEQ ID NO: 214506 - RNA, 19 nt, Artificial Sequence
  Description of Artificial Sequence: Synthetic oligonucleotide
  Sense strand starting at position 138 of SEQ ID NO: 2763
agugauaugccguaagaaa

SEQ ID NO: 214507 - RNA, 19 nt, Artificial Sequence
  Description of Artificial Sequence: Synthetic oligonucleotide
  Antisense strand to SEQ ID NO: 214506
uuucuuacggcauaucacu

SEQ ID NO: 214508 - RNA, 19 nt, Artificial Sequence
  Description of Artificial Sequence: Synthetic oligonucleotide
  Sense strand starting at position 162 of SEQ ID NO: 2763
caaugaagugcuugagauu

SEQ ID NO: 214509 - RNA, 19 nt, Artificial Sequence
  Description of Artificial Sequence: Synthetic oligonucleotide
  Antisense strand to SEQ ID NO: 214508
aaucucaagcacuucauug

SEQ ID NO: 214510 - RNA, 19 nt, Artificial Sequence
  Description of Artificial Sequence: Synthetic oligonucleotide
  Sense strand starting at position 163 of SEQ ID NO: 2763
aaugaagugcuugagauuc

SEQ ID NO: 214511 - RNA, 19 nt, Artificial Sequence
  Description of Artificial Sequence: Synthetic oligonucleotide
  Antisense strand to SEQ ID NO: 214510
gaaucucaagcacuucauu

SEQ ID NO: 214512 - RNA, 19 nt, Artificial Sequence
  Description of Artificial Sequence: Synthetic oligonucleotide
  Sense strand starting at position 371 of SEQ ID NO: 2763
uuuguauuuguauguagga

SEQ ID NO: 214513 - RNA, 19 nt, Artificial Sequence
  Description of Artificial Sequence: Synthetic oligonucleotide
  Antisense strand to SEQ ID NO: 214512
uccuacauacaaauacaaa

SEQ ID NO: 214514 - RNA, 19 nt, Artificial Sequence
  Description of Artificial Sequence: Synthetic oligonucleotide
  Sense strand starting at position 428 of SEQ ID NO: 2763
uuacuagucccauggauca

SEQ ID NO: 214515 - RNA, 19 nt, Artificial Sequence
  Description of Artificial Sequence: Synthetic oligonucleotide
  Antisense strand to SEQ ID NO: 214514
ugauccaugggacuaguaa

SEQ ID NO: 214516 - RNA, 19 nt, Artificial Sequence
  Description of Artificial Sequence: Synthetic oligonucleotide
  Sense strand starting at position 433 of SEQ ID NO: 2763
agucccauggaucauuauu

SEQ ID NO: 214517 - RNA, 19 nt, Artificial Sequence
  Description of Artificial Sequence: Synthetic oligonucleotide
  Antisense strand to SEQ ID NO: 214516
aauaaugauccaugggacu

SEQ ID NO: 214518 - RNA, 19 nt, Artificial Sequence
  Description of Artificial Sequence: Synthetic oligonucleotide
  Sense strand starting at position 738 of SEQ ID NO: 2763
uuugguuagcaauaaccaa

SEQ ID NO: 214519 - RNA, 19 nt, Artificial Sequence
  Description of Artificial Sequence: Synthetic oligonucleotide
  Antisense strand to SEQ ID NO: 214518
uugguuauugcuaaccaaa

SEQ ID NO: 214520 - RNA, 19 nt, Artificial Sequence
  Description of Artificial Sequence: Synthetic oligonucleotide
  Sense strand starting at position 771 of SEQ ID NO: 2763
ucuuaaggauguuuacauu

SEQ ID NO: 214521 - RNA, 19 nt, Artificial Sequence
  Description of Artificial Sequence: Synthetic oligonucleotide
  Antisense strand to SEQ ID NO: 214520
aauguaaacauccuuaaga

SEQ ID NO: 214522 - RNA, 19 nt, Artificial Sequence
  Description of Artificial Sequence: Synthetic oligonucleotide
  Sense strand starting at position 777 of SEQ ID NO: 2763
ggauguuuacauuaaagca

SEQ ID NO: 214523 - RNA, 19 nt, Artificial Sequence
  Description of Artificial Sequence: Synthetic oligonucleotide
  Antisense strand to SEQ ID NO: 214522
ugcuuuaauguaaacaucc

SEQ ID NO: 214524 - RNA, 19 nt, Artificial Sequence
  Description of Artificial Sequence: Synthetic oligonucleotide
  Sense strand starting at position 1155 of SEQ ID NO: 2763
gggauucaggaugguguuu

SEQ ID NO: 214525 - RNA, 19 nt, Artificial Sequence
  Description of Artificial Sequence: Synthetic oligonucleotide
  Antisense strand to SEQ ID NO: 214524
aaacaccauccugaauccc

SEQ ID NO: 214526 - RNA, 19 nt, Artificial Sequence
  Description of Artificial Sequence: Synthetic oligonucleotide
  Sense strand starting at position 1366 of SEQ ID NO: 2763
gagagaguuuaguuaugau

SEQ ID NO: 214527 - RNA, 19 nt, Artificial Sequence
  Description of Artificial Sequence: Synthetic oligonucleotide
  Antisense strand to SEQ ID NO: 214526
aucauaacuaaacucucuc

SEQ ID NO: 214528 - RNA, 19 nt, Artificial Sequence
  Description of Artificial Sequence: Synthetic oligonucleotide
  Sense strand starting at position 1437 of SEQ ID NO: 2763
uuauuagaauucuccugga

SEQ ID NO: 214529 - RNA, 19 nt, Artificial Sequence
  Description of Artificial Sequence: Synthetic oligonucleotide
  Antisense strand to SEQ ID NO: 214528
uccaggagaauucuaauaa

SEQ ID NO: 214530 - RNA, 19 nt, Artificial Sequence
  Description of Artificial Sequence: Synthetic oligonucleotide
  Sense strand starting at position 1441 of SEQ ID NO: 2763
uagaauucuccuggagcag

SEQ ID NO: 214531 - RNA, 19 nt, Artificial Sequence
  Description of Artificial Sequence: Synthetic oligonucleotide
  Antisense strand to SEQ ID NO: 214530
cugcuccaggagaauucua

SEQ ID NO: 214532 - RNA, 19 nt, Artificial Sequence
  Description of Artificial Sequence: Synthetic oligonucleotide
  Sense strand starting at position 1442 of SEQ ID NO: 2763
agaauucuccuggagcagu

SEQ ID NO: 214533 - RNA, 19 nt, Artificial Sequence
  Description of Artificial Sequence: Synthetic oligonucleotide
  Antisense strand to SEQ ID NO: 214532
acugcuccaggagaauucu

SEQ ID NO: 214534 - RNA, 19 nt, Artificial Sequence
  Description of Artificial Sequence: Synthetic oligonucleotide
  Sense strand starting at position 1458 of SEQ ID NO: 2763
aguaaagggacuuguuaac

SEQ ID NO: 214535 - RNA, 19 nt, Artificial Sequence
  Description of Artificial Sequence: Synthetic oligonucleotide
  Antisense strand to SEQ ID NO: 214534
guuaacaagucccuuuacu

SEQ ID NO: 214536 - RNA, 19 nt, Artificial Sequence
  Description of Artificial Sequence: Synthetic oligonucleotide
  Sense strand starting at position 1464 of SEQ ID NO: 2763
gggacuuguuaacuccauu

SEQ ID NO: 214537 - RNA, 19 nt, Artificial Sequence
  Description of Artificial Sequence: Synthetic oligonucleotide
  Antisense strand to SEQ ID NO: 214536
aauggaguuaacaaguccc

SEQ ID NO: 214538 - RNA, 19 nt, Artificial Sequence
  Description of Artificial Sequence: Synthetic oligonucleotide
  Sense strand starting at position 1467 of SEQ ID NO: 2763
acuuguuaacuccauugua

SEQ ID NO: 214539 - RNA, 19 nt, Artificial Sequence
  Description of Artificial Sequence: Synthetic oligonucleotide
  Antisense strand to SEQ ID NO: 214538
uacaauggaguuaacaagu

SEQ ID NO: 214540 - RNA, 19 nt, Artificial Sequence
  Description of Artificial Sequence: Synthetic oligonucleotide
  Sense strand starting at position 1479 of SEQ ID NO: 2763
cauuguaugugauuauaag

SEQ ID NO: 214541 - RNA, 19 nt, Artificial Sequence
  Description of Artificial Sequence: Synthetic oligonucleotide
  Antisense strand to SEQ ID NO: 214540
cuuauaaucacauacaaug

SEQ ID NO: 214542 - RNA, 19 nt, Artificial Sequence
  Description of Artificial Sequence: Synthetic oligonucleotide
  Sense strand starting at position 1587 of SEQ ID NO: 2763
gaguguucagagggaugag

SEQ ID NO: 214543 - RNA, 19 nt, Artificial Sequence
  Description of Artificial Sequence: Synthetic oligonucleotide
  Antisense strand to SEQ ID NO: 214542
cucaucccucugaacacuc

SEQ ID NO: 214544 - RNA, 19 nt, Artificial Sequence
  Description of Artificial Sequence: Synthetic oligonucleotide
  Sense strand starting at position 1647 of SEQ ID NO: 2763
ucuugaagucuuugaccag

SEQ ID NO: 214545 - RNA, 19 nt, Artificial Sequence
  Description of Artificial Sequence: Synthetic oligonucleotide
  Antisense strand to SEQ ID NO: 214544
cuggucaaagacuucaaga

SEQ ID NO: 214546 - RNA, 19 nt, Artificial Sequence
  Description of Artificial Sequence: Synthetic oligonucleotide
  Sense strand starting at position 1827 of SEQ ID NO: 2763
gcacuuuagccucaaagga

SEQ ID NO: 214547 - RNA, 19 nt, Artificial Sequence
  Description of Artificial Sequence: Synthetic oligonucleotide
  Antisense strand to SEQ ID NO: 214546
uccuuugaggcuaaagugc

SEQ ID NO: 214548 - RNA, 19 nt, Artificial Sequence
  Description of Artificial Sequence: Synthetic oligonucleotide
  Sense strand starting at position 2053 of SEQ ID NO: 2763
ccuguuugugggagcgaca

SEQ ID NO: 214549 - RNA, 19 nt, Artificial Sequence
  Description of Artificial Sequence: Synthetic oligonucleotide
  Antisense strand to SEQ ID NO: 214548
ugucgcucccacaaacagg

SEQ ID NO: 214550 - RNA, 19 nt, Artificial Sequence
  Description of Artificial Sequence: Synthetic oligonucleotide
  Sense strand starting at position 2160 of SEQ ID NO: 2763
uugacaagcugaguaugaa

SEQ ID NO: 214551 - RNA, 19 nt, Artificial Sequence
  Description of Artificial Sequence: Synthetic oligonucleotide
  Antisense strand to SEQ ID NO: 214550
uucauacucagcuugucaa

SEQ ID NO: 214552 - RNA, 19 nt, Artificial Sequence
  Description of Artificial Sequence: Synthetic oligonucleotide
  Sense strand starting at position 2170 of SEQ ID NO: 2763
gaguaugaacugcauuaua

SEQ ID NO: 214553 - RNA, 19 nt, Artificial Sequence
  Description of Artificial Sequence: Synthetic oligonucleotide
  Antisense strand to SEQ ID NO: 214552
uauaaugcaguucauacuc

SEQ ID NO: 214554 - RNA, 19 nt, Artificial Sequence
  Description of Artificial Sequence: Synthetic oligonucleotide
  Sense strand starting at position 2251 of SEQ ID NO: 2763
uuuaaauggugagcaaacu

SEQ ID NO: 214555 - RNA, 19 nt, Artificial Sequence
  Description of Artificial Sequence: Synthetic oligonucleotide
  Antisense strand to SEQ ID NO: 214554
aguuugcucaccauuuaaa

SEQ ID NO: 214556 - RNA, 19 nt, Artificial Sequence
  Description of Artificial Sequence: Synthetic oligonucleotide
  Sense strand starting at position 2623 of SEQ ID NO: 2763
gaaccauuagcuggagcaa

SEQ ID NO: 214557 - RNA, 19 nt, Artificial Sequence
  Description of Artificial Sequence: Synthetic oligonucleotide
  Antisense strand to SEQ ID NO: 214556
uugcuccagcuaaugguuc

SEQ ID NO: 214558 - RNA, 19 nt, Artificial Sequence
  Description of Artificial Sequence: Synthetic oligonucleotide
  Sense strand starting at position 2668 of SEQ ID NO: 2763
ucaagcgaagaguaauuau

SEQ ID NO: 214559 - RNA, 19 nt, Artificial Sequence
  Description of Artificial Sequence: Synthetic oligonucleotide
  Antisense strand to SEQ ID NO: 214558
auaauuacucuucgcuuga

SEQ ID NO: 214560 - RNA, 19 nt, Artificial Sequence
  Description of Artificial Sequence: Synthetic oligonucleotide
  Sense strand starting at position 2836 of SEQ ID NO: 2763
guuaguaauuucucagucu

SEQ ID NO: 214561 - RNA, 19 nt, Artificial Sequence
  Description of Artificial Sequence: Synthetic oligonucleotide
  Antisense strand to SEQ ID NO: 214560
agacugagaaauuacuaac

SEQ ID NO: 214562 - RNA, 19 nt, Artificial Sequence
  Description of Artificial Sequence: Synthetic oligonucleotide
  Sense strand starting at position 3113 of SEQ ID NO: 2763
uuguuuaaacugugggaga

SEQ ID NO: 214563 - RNA, 19 nt, Artificial Sequence
  Description of Artificial Sequence: Synthetic oligonucleotide
  Antisense strand to SEQ ID NO: 214562
ucucccacaguuuaaacaa

SEQ ID NO: 214564 - RNA, 19 nt, Artificial Sequence
  Description of Artificial Sequence: Synthetic oligonucleotide
  Sense strand starting at position 3115 of SEQ ID NO: 2763
guuuaaacugugggagauc

SEQ ID NO: 214565 - RNA, 19 nt, Artificial Sequence
  Description of Artificial Sequence: Synthetic oligonucleotide
  Antisense strand to SEQ ID NO: 214564
gaucucccacaguuuaaac

SEQ ID NO: 214566 - RNA, 19 nt, Artificial Sequence
  Description of Artificial Sequence: Synthetic oligonucleotide
  Sense strand starting at position 3371 of SEQ ID NO: 2763
uagaaaccauguucugaag

SEQ ID NO: 214567 - RNA, 19 nt, Artificial Sequence
  Description of Artificial Sequence: Synthetic oligonucleotide
  Antisense strand to SEQ ID NO: 214566
cuucagaacaugguuucua

SEQ ID NO: 214568 - RNA, 19 nt, Artificial Sequence
  Description of Artificial Sequence: Synthetic oligonucleotide
  Sense strand starting at position 3535 of SEQ ID NO: 2763
gcagcuaguguuccguaau

SEQ ID NO: 214569 - RNA, 19 nt, Artificial Sequence
  Description of Artificial Sequence: Synthetic oligonucleotide
  Antisense strand to SEQ ID NO: 214568
auuacggaacacuagcugc

SEQ ID NO: 214570 - RNA, 19 nt, Artificial Sequence
  Description of Artificial Sequence: Synthetic oligonucleotide
  Sense strand starting at position 3709 of SEQ ID NO: 2763
ccucaauuacuuggugaac

SEQ ID NO: 214571 - RNA, 19 nt, Artificial Sequence
  Description of Artificial Sequence: Synthetic oligonucleotide
  Antisense strand to SEQ ID NO: 214570
guucaccaaguaauugagg

SEQ ID NO: 214572 - RNA, 19 nt, Artificial Sequence
  Description of Artificial Sequence: Synthetic oligonucleotide
  Sense strand starting at position 3710 of SEQ ID NO: 2763
cucaauuacuuggugaaca

SEQ ID NO: 214573 - RNA, 19 nt, Artificial Sequence
  Description of Artificial Sequence: Synthetic oligonucleotide
  Antisense strand to SEQ ID NO: 214572
uguucaccaaguaauugag

SEQ ID NO: 214574 - RNA, 19 nt, Artificial Sequence
  Description of Artificial Sequence: Synthetic oligonucleotide
  Sense strand starting at position 3723 of SEQ ID NO: 2763
ugaacaaugugucuacuga

SEQ ID NO: 214575 - RNA, 19 nt, Artificial Sequence
  Description of Artificial Sequence: Synthetic oligonucleotide
  Antisense strand to SEQ ID NO: 214574
ucaguagacacauuguuca

SEQ ID NO: 214576 - RNA, 19 nt, Artificial Sequence
  Description of Artificial Sequence: Synthetic oligonucleotide
  Sense strand starting at position 3754 of SEQ ID NO: 2763
cagaauagaggcugguaaa

SEQ ID NO: 214577 - RNA, 19 nt, Artificial Sequence
  Description of Artificial Sequence: Synthetic oligonucleotide
  Antisense strand to SEQ ID NO: 214576
uuuaccagccucuauucug

SEQ ID NO: 214578 - RNA, 19 nt, Artificial Sequence
  Description of Artificial Sequence: Synthetic oligonucleotide
  Sense strand starting at position 3892 of SEQ ID NO: 2763
uccagaaauguggagucuu

SEQ ID NO: 214579 - RNA, 19 nt, Artificial Sequence
  Description of Artificial Sequence: Synthetic oligonucleotide
  Antisense strand to SEQ ID NO: 214578
aagacuccacauuucugga

SEQ ID NO: 214580 - RNA, 19 nt, Artificial Sequence
  Description of Artificial Sequence: Synthetic oligonucleotide
  Sense strand starting at position 3946 of SEQ ID NO: 2763
gaauaaaggcuuugagcaa

SEQ ID NO: 214581 - RNA, 19 nt, Artificial Sequence
  Description of Artificial Sequence: Synthetic oligonucleotide
  Antisense strand to SEQ ID NO: 214580
uugcucaaagccuuuauuc

SEQ ID NO: 214582 - RNA, 19 nt, Artificial Sequence
  Description of Artificial Sequence: Synthetic oligonucleotide
  Sense strand starting at position 3964 of SEQ ID NO: 2763
accaaagcccguuaagacu

SEQ ID NO: 214583 - RNA, 19 nt, Artificial Sequence
  Description of Artificial Sequence: Synthetic oligonucleotide
  Antisense strand to SEQ ID NO: 214582
agucuuaacgggcuuuggu

SEQ ID NO: 214584 - RNA, 19 nt, Artificial Sequence
  Description of Artificial Sequence: Synthetic oligonucleotide
  Sense strand starting at position 64 of SEQ ID NO: 2764
gcaggaugcucacugcaca

SEQ ID NO: 214585 - RNA, 19 nt, Artificial Sequence
  Description of Artificial Sequence: Synthetic oligonucleotide
  Antisense strand to SEQ ID NO: 214584
ugugcagugagcauccugc

SEQ ID NO: 214586 - RNA, 19 nt, Artificial Sequence
  Description of Artificial Sequence: Synthetic oligonucleotide
  Sense strand starting at position 95 of SEQ ID NO: 2764
uuauuucuacugugagcau

SEQ ID NO: 214587 - RNA, 19 nt, Artificial Sequence
  Description of Artificial Sequence: Synthetic oligonucleotide
  Antisense strand to SEQ ID NO: 214586
augcucacaguagaaauaa

SEQ ID NO: 214588 - RNA, 19 nt, Artificial Sequence
  Description of Artificial Sequence: Synthetic oligonucleotide
  Sense strand starting at position 98 of SEQ ID NO: 2764
uuucuacugugagcauaga

SEQ ID NO: 214589 - RNA, 19 nt, Artificial Sequence
  Description of Artificial Sequence: Synthetic oligonucleotide
  Antisense strand to SEQ ID NO: 214588
ucuaugcucacaguagaaa

SEQ ID NO: 214590 - RNA, 19 nt, Artificial Sequence
  Description of Artificial Sequence: Synthetic oligonucleotide
  Sense strand starting at position 115 of SEQ ID NO: 2764
gacgauuugugucuguacu

SEQ ID NO: 214591 - RNA, 19 nt, Artificial Sequence
  Description of Artificial Sequence: Synthetic oligonucleotide
  Antisense strand to SEQ ID NO: 214590
aguacagacacaaaucguc

SEQ ID NO: 214592 - RNA, 19 nt, Artificial Sequence
  Description of Artificial Sequence: Synthetic oligonucleotide
  Sense strand starting at position 116 of SEQ ID NO: 2764
acgauuugugucuguacug

SEQ ID NO: 214593 - RNA, 19 nt, Artificial Sequence
  Description of Artificial Sequence: Synthetic oligonucleotide
  Antisense strand to SEQ ID NO: 214592
caguacagacacaaaucgu

SEQ ID NO: 214594 - RNA, 19 nt, Artificial Sequence
  Description of Artificial Sequence: Synthetic oligonucleotide
  Sense strand starting at position 117 of SEQ ID NO: 2764
cgauuugugucuguacugu

SEQ ID NO: 214595 - RNA, 19 nt, Artificial Sequence
  Description of Artificial Sequence: Synthetic oligonucleotide
  Antisense strand to SEQ ID NO: 214594
acaguacagacacaaaucg

SEQ ID NO: 214596 - RNA, 19 nt, Artificial Sequence
  Description of Artificial Sequence: Synthetic oligonucleotide
  Sense strand starting at position 309 of SEQ ID NO: 2764
ccuggagaacaguguccaa

SEQ ID NO: 214597 - RNA, 19 nt, Artificial Sequence
  Description of Artificial Sequence: Synthetic oligonucleotide
  Antisense strand to SEQ ID NO: 214596
uuggacacuguucuccagg

SEQ ID NO: 214598 - RNA, 19 nt, Artificial Sequence
  Description of Artificial Sequence: Synthetic oligonucleotide
  Sense strand starting at position 333 of SEQ ID NO: 2764
acgggaucuccaugcagaa

SEQ ID NO: 214599 - RNA, 19 nt, Artificial Sequence
  Description of Artificial Sequence: Synthetic oligonucleotide
  Antisense strand to SEQ ID NO: 214598
uucugcauggagaucccgu

SEQ ID NO: 214600 - RNA, 19 nt, Artificial Sequence
  Description of Artificial Sequence: Synthetic oligonucleotide
  Sense strand starting at position 705 of SEQ ID NO: 2764
ggcauucuuacgugcucua

SEQ ID NO: 214601 - RNA, 19 nt, Artificial Sequence
  Description of Artificial Sequence: Synthetic oligonucleotide
  Antisense strand to SEQ ID NO: 214600
uagagcacguaagaaugcc

SEQ ID NO: 214602 - RNA, 19 nt, Artificial Sequence
  Description of Artificial Sequence: Synthetic oligonucleotide
  Sense strand starting at position 706 of SEQ ID NO: 2764
gcauucuuacgugcucuau

SEQ ID NO: 214603 - RNA, 19 nt, Artificial Sequence
  Description of Artificial Sequence: Synthetic oligonucleotide
  Antisense strand to SEQ ID NO: 214602
auagagcacguaagaaugc

SEQ ID NO: 214604 - RNA, 19 nt, Artificial Sequence
  Description of Artificial Sequence: Synthetic oligonucleotide
  Sense strand starting at position 1251 of SEQ ID NO: 2764
gccucugaagugugucaca

SEQ ID NO: 214605 - RNA, 19 nt, Artificial Sequence
  Description of Artificial Sequence: Synthetic oligonucleotide
  Antisense strand to SEQ ID NO: 214604
ugugacacacuucagaggc

SEQ ID NO: 214606 - RNA, 19 nt, Artificial Sequence
  Description of Artificial Sequence: Synthetic oligonucleotide
  Sense strand starting at position 1254 of SEQ ID NO: 2764
ucugaagugugucacagau

SEQ ID NO: 214607 - RNA, 19 nt, Artificial Sequence
  Description of Artificial Sequence: Synthetic oligonucleotide
  Antisense strand to SEQ ID NO: 214606
aucugugacacacuucaga

SEQ ID NO: 214608 - RNA, 19 nt, Artificial Sequence
  Description of Artificial Sequence: Synthetic oligonucleotide
  Sense strand starting at position 1879 of SEQ ID NO: 2764
ggugucuucccuuaccaca

SEQ ID NO: 214609 - RNA, 19 nt, Artificial Sequence
  Description of Artificial Sequence: Synthetic oligonucleotide
  Antisense strand to SEQ ID NO: 214608
ugugguaagggaagacacc

SEQ ID NO: 214610 - RNA, 19 nt, Artificial Sequence
  Description of Artificial Sequence: Synthetic oligonucleotide
  Sense strand starting at position 2425 of SEQ ID NO: 2764
ccaagaaagcuccagaguu

SEQ ID NO: 214611 - RNA, 19 nt, Artificial Sequence
  Description of Artificial Sequence: Synthetic oligonucleotide
  Antisense strand to SEQ ID NO: 214610
aacucuggagcuuucuugg

SEQ ID NO: 214612 - RNA, 19 nt, Artificial Sequence
  Description of Artificial Sequence: Synthetic oligonucleotide
  Sense strand starting at position 2427 of SEQ ID NO: 2764
aagaaagcuccagaguugu

SEQ ID NO: 214613 - RNA, 19 nt, Artificial Sequence
  Description of Artificial Sequence: Synthetic oligonucleotide
  Antisense strand to SEQ ID NO: 214612
acaacucuggagcuuucuu

SEQ ID NO: 214614 - RNA, 19 nt, Artificial Sequence
  Description of Artificial Sequence: Synthetic oligonucleotide
  Sense strand starting at position 2435 of SEQ ID NO: 2764
uccagaguuguuuccgugu

SEQ ID NO: 214615 - RNA, 19 nt, Artificial Sequence
  Description of Artificial Sequence: Synthetic oligonucleotide
  Antisense strand to SEQ ID NO: 214614
acacggaaacaacucugga

SEQ ID NO: 214616 - RNA, 19 nt, Artificial Sequence
  Description of Artificial Sequence: Synthetic oligonucleotide
  Sense strand starting at position 2437 of SEQ ID NO: 2764
cagaguuguuuccguguau

SEQ ID NO: 214617 - RNA, 19 nt, Artificial Sequence
  Description of Artificial Sequence: Synthetic oligonucleotide
  Antisense strand to SEQ ID NO: 214616
auacacggaaacaacucug

SEQ ID NO: 214618 - RNA, 19 nt, Artificial Sequence
  Description of Artificial Sequence: Synthetic oligonucleotide
  Sense strand starting at position 2438 of SEQ ID NO: 2764
agaguuguuuccguguauu

SEQ ID NO: 214619 - RNA, 19 nt, Artificial Sequence
  Description of Artificial Sequence: Synthetic oligonucleotide
  Antisense strand to SEQ ID NO: 214618
aauacacggaaacaacucu

SEQ ID NO: 214620 - RNA, 19 nt, Artificial Sequence
  Description of Artificial Sequence: Synthetic oligonucleotide
  Sense strand starting at position 2440 of SEQ ID NO: 2764
aguuguuuccguguauuau

SEQ ID NO: 214621 - RNA, 19 nt, Artificial Sequence
  Description of Artificial Sequence: Synthetic oligonucleotide
  Antisense strand to SEQ ID NO: 214620
auaauacacggaaacaacu

SEQ ID NO: 214622 - RNA, 19 nt, Artificial Sequence
  Description of Artificial Sequence: Synthetic oligonucleotide
  Sense strand starting at position 2441 of SEQ ID NO: 2764
guuguuuccguguauuaua

SEQ ID NO: 214623 - RNA, 19 nt, Artificial Sequence
  Description of Artificial Sequence: Synthetic oligonucleotide
  Antisense strand to SEQ ID NO: 214622
uauaauacacggaaacaac

SEQ ID NO: 214624 - RNA, 19 nt, Artificial Sequence
  Description of Artificial Sequence: Synthetic oligonucleotide
  Sense strand starting at position 2444 of SEQ ID NO: 2764
guuuccguguauuauaaau

SEQ ID NO: 214625 - RNA, 19 nt, Artificial Sequence
  Description of Artificial Sequence: Synthetic oligonucleotide
  Antisense strand to SEQ ID NO: 214624
auuuauaauacacggaaac

SEQ ID NO: 214626 - RNA, 19 nt, Artificial Sequence
  Description of Artificial Sequence: Synthetic oligonucleotide
  Sense strand starting at position 2978 of SEQ ID NO: 2764
gaaacucacuccugaguug

SEQ ID NO: 214627 - RNA, 19 nt, Artificial Sequence
  Description of Artificial Sequence: Synthetic oligonucleotide
  Antisense strand to SEQ ID NO: 214626
caacucaggagugaguuuc

SEQ ID NO: 214628 - RNA, 19 nt, Artificial Sequence
  Description of Artificial Sequence: Synthetic oligonucleotide
  Sense strand starting at position 2981 of SEQ ID NO: 2764
acucacuccugaguugaaa

SEQ ID NO: 214629 - RNA, 19 nt, Artificial Sequence
  Description of Artificial Sequence: Synthetic oligonucleotide
  Antisense strand to SEQ ID NO: 214628
uuucaacucaggagugagu

SEQ ID NO: 214630 - RNA, 19 nt, Artificial Sequence
  Description of Artificial Sequence: Synthetic oligonucleotide
  Sense strand starting at position 3309 of SEQ ID NO: 2764
ggaccuaccucaugaaagu

SEQ ID NO: 214631 - RNA, 19 nt, Artificial Sequence
  Description of Artificial Sequence: Synthetic oligonucleotide
  Antisense strand to SEQ ID NO: 214630
acuuucaugagguaggucc

SEQ ID NO: 214632 - RNA, 19 nt, Artificial Sequence
  Description of Artificial Sequence: Synthetic oligonucleotide
  Sense strand starting at position 3562 of SEQ ID NO: 2764
cggagaaguuaagcaguaa

SEQ ID NO: 214633 - RNA, 19 nt, Artificial Sequence
  Description of Artificial Sequence: Synthetic oligonucleotide
  Antisense strand to SEQ ID NO: 214632
uuacugcuuaacuucuccg

SEQ ID NO: 214634 - RNA, 19 nt, Artificial Sequence
  Description of Artificial Sequence: Synthetic oligonucleotide
  Sense strand starting at position 3594 of SEQ ID NO: 2764
aucucuguuugacacugau

SEQ ID NO: 214635 - RNA, 19 nt, Artificial Sequence
  Description of Artificial Sequence: Synthetic oligonucleotide
  Antisense strand to SEQ ID NO: 214634
aucagugucaaacagagau

SEQ ID NO: 214636 - RNA, 19 nt, Artificial Sequence
  Description of Artificial Sequence: Synthetic oligonucleotide
  Sense strand starting at position 3782 of SEQ ID NO: 2764
gcgucauuaccguuggcuu

SEQ ID NO: 214637 - RNA, 19 nt, Artificial Sequence
  Description of Artificial Sequence: Synthetic oligonucleotide
  Antisense strand to SEQ ID NO: 214636
aagccaacgguaaugacgc

SEQ ID NO: 214638 - RNA, 19 nt, Artificial Sequence
  Description of Artificial Sequence: Synthetic oligonucleotide
  Sense strand starting at position 37 of SEQ ID NO: 2765
ggugucuuagccugagaug

SEQ ID NO: 214639 - RNA, 19 nt, Artificial Sequence
  Description of Artificial Sequence: Synthetic oligonucleotide
  Antisense strand to SEQ ID NO: 214638
caucucaggcuaagacacc

SEQ ID NO: 214640 - RNA, 19 nt, Artificial Sequence
  Description of Artificial Sequence: Synthetic oligonucleotide
  Sense strand starting at position 631 of SEQ ID NO: 2765
uagucauaauagcgacuaa

SEQ ID NO: 214641 - RNA, 19 nt, Artificial Sequence
  Description of Artificial Sequence: Synthetic oligonucleotide
  Antisense strand to SEQ ID NO: 214640
uuagucgcuauuaugacua

SEQ ID NO: 214642 - RNA, 19 nt, Artificial Sequence
  Description of Artificial Sequence: Synthetic oligonucleotide
  Sense strand starting at position 638 of SEQ ID NO: 2765
aauagcgacuaauguguua

SEQ ID NO: 214643 - RNA, 19 nt, Artificial Sequence
  Description of Artificial Sequence: Synthetic oligonucleotide
  Antisense strand to SEQ ID NO: 214642
uaacacauuagucgcuauu

SEQ ID NO: 214644 - RNA, 19 nt, Artificial Sequence
  Description of Artificial Sequence: Synthetic oligonucleotide
  Sense strand starting at position 1589 of SEQ ID NO: 2765
cggcuuaccagggagauga

SEQ ID NO: 214645 - RNA, 19 nt, Artificial Sequence
  Description of Artificial Sequence: Synthetic oligonucleotide
  Antisense strand to SEQ ID NO: 214644
ucaucucccugguaagccg

SEQ ID NO: 214646 - RNA, 19 nt, Artificial Sequence
  Description of Artificial Sequence: Synthetic oligonucleotide
  Sense strand starting at position 1902 of SEQ ID NO: 2765
ggcugagauuccuuugugu

SEQ ID NO: 214647 - RNA, 19 nt, Artificial Sequence
  Description of Artificial Sequence: Synthetic oligonucleotide
  Antisense strand to SEQ ID NO: 214646
acacaaaggaaucucagcc

SEQ ID NO: 214648 - RNA, 19 nt, Artificial Sequence
  Description of Artificial Sequence: Synthetic oligonucleotide
  Sense strand starting at position 1904 of SEQ ID NO: 2765
cugagauuccuuugugucc

SEQ ID NO: 214649 - RNA, 19 nt, Artificial Sequence
  Description of Artificial Sequence: Synthetic oligonucleotide
  Antisense strand to SEQ ID NO: 214648
ggacacaaaggaaucucag

SEQ ID NO: 214650 - RNA, 19 nt, Artificial Sequence
  Description of Artificial Sequence: Synthetic oligonucleotide
  Sense strand starting at position 1906 of SEQ ID NO: 2765
gagauuccuuuguguccca

SEQ ID NO: 214651 - RNA, 19 nt, Artificial Sequence
  Description of Artificial Sequence: Synthetic oligonucleotide
  Antisense strand to SEQ ID NO: 214650
ugggacacaaaggaaucuc

SEQ ID NO: 214652 - RNA, 19 nt, Artificial Sequence
  Description of Artificial Sequence: Synthetic oligonucleotide
  Sense strand starting at position 2045 of SEQ ID NO: 2765
augggcucugggugucaua

SEQ ID NO: 214653 - RNA, 19 nt, Artificial Sequence
  Description of Artificial Sequence: Synthetic oligonucleotide
  Antisense strand to SEQ ID NO: 214652
uaugacacccagagcccau

SEQ ID NO: 214654 - RNA, 19 nt, Artificial Sequence
  Description of Artificial Sequence: Synthetic oligonucleotide
  Sense strand starting at position 2048 of SEQ ID NO: 2765
ggcucugggugucauauaa

SEQ ID NO: 214655 - RNA, 19 nt, Artificial Sequence
  Description of Artificial Sequence: Synthetic oligonucleotide
  Antisense strand to SEQ ID NO: 214654
uuauaugacacccagagcc

SEQ ID NO: 214656 - RNA, 19 nt, Artificial Sequence
  Description of Artificial Sequence: Synthetic oligonucleotide
  Sense strand starting at position 2148 of SEQ ID NO: 2765
ucagcuguuccaggaugga

SEQ ID NO: 214657 - RNA, 19 nt, Artificial Sequence
  Description of Artificial Sequence: Synthetic oligonucleotide
  Antisense strand to SEQ ID NO: 214656
uccauccuggaacagcuga

SEQ ID NO: 214658 - RNA, 19 nt, Artificial Sequence
  Description of Artificial Sequence: Synthetic oligonucleotide
  Sense strand starting at position 3057 of SEQ ID NO: 2765
guuuccuucucacuucuga

SEQ ID NO: 214659 - RNA, 19 nt, Artificial Sequence
  Description of Artificial Sequence: Synthetic oligonucleotide
  Antisense strand to SEQ ID NO: 214658
ucagaagugagaaggaaac

SEQ ID NO: 214660 - RNA, 19 nt, Artificial Sequence
  Description of Artificial Sequence: Synthetic oligonucleotide
  Sense strand starting at position 3070 of SEQ ID NO: 2765
uucugagagccuugccuuu

SEQ ID NO: 214661 - RNA, 19 nt, Artificial Sequence
  Description of Artificial Sequence: Synthetic oligonucleotide
  Antisense strand to SEQ ID NO: 214660
aaaggcaaggcucucagaa

SEQ ID NO: 214662 - RNA, 19 nt, Artificial Sequence
  Description of Artificial Sequence: Synthetic oligonucleotide
  Sense strand starting at position 3279 of SEQ ID NO: 2765
cuuucucugcucugggaga

SEQ ID NO: 214663 - RNA, 19 nt, Artificial Sequence
  Description of Artificial Sequence: Synthetic oligonucleotide
  Antisense strand to SEQ ID NO: 214662
ucucccagagcagagaaag

SEQ ID NO: 214664 - RNA, 19 nt, Artificial Sequence
  Description of Artificial Sequence: Synthetic oligonucleotide
  Sense strand starting at position 3281 of SEQ ID NO: 2765
uucucugcucugggagaga

SEQ ID NO: 214665 - RNA, 19 nt, Artificial Sequence
  Description of Artificial Sequence: Synthetic oligonucleotide
  Antisense strand to SEQ ID NO: 214664
ucucucccagagcagagaa

SEQ ID NO: 214666 - RNA, 19 nt, Artificial Sequence
  Description of Artificial Sequence: Synthetic oligonucleotide
  Sense strand starting at position 3319 of SEQ ID NO: 2765
guguucuccgaaggguaaa

SEQ ID NO: 214667 - RNA, 19 nt, Artificial Sequence
  Description of Artificial Sequence: Synthetic oligonucleotide
  Antisense strand to SEQ ID NO: 214666
uuuacccuucggagaacac

SEQ ID NO: 214668 - RNA, 19 nt, Artificial Sequence
  Description of Artificial Sequence: Synthetic oligonucleotide
  Sense strand starting at position 3320 of SEQ ID NO: 2765
uguucuccgaaggguaaau

SEQ ID NO: 214669 - RNA, 19 nt, Artificial Sequence
  Description of Artificial Sequence: Synthetic oligonucleotide
  Antisense strand to SEQ ID NO: 214668
auuuacccuucggagaaca

SEQ ID NO: 214670 - RNA, 19 nt, Artificial Sequence
  Description of Artificial Sequence: Synthetic oligonucleotide
  Sense strand starting at position 3409 of SEQ ID NO: 2765
ucuguagaauugucuaaca

SEQ ID NO: 214671 - RNA, 19 nt, Artificial Sequence
  Description of Artificial Sequence: Synthetic oligonucleotide
  Antisense strand to SEQ ID NO: 214670
uguuagacaauucuacaga

SEQ ID NO: 214672 - RNA, 19 nt, Artificial Sequence
  Description of Artificial Sequence: Synthetic oligonucleotide
  Sense strand starting at position 3411 of SEQ ID NO: 2765
uguagaauugucuaacacu

SEQ ID NO: 214673 - RNA, 19 nt, Artificial Sequence
  Description of Artificial Sequence: Synthetic oligonucleotide
  Antisense strand to SEQ ID NO: 214672
aguguuagacaauucuaca

SEQ ID NO: 214674 - RNA, 19 nt, Artificial Sequence
  Description of Artificial Sequence: Synthetic oligonucleotide
  Sense strand starting at position 3438 of SEQ ID NO: 2765
uuugccacccucuguuaua

SEQ ID NO: 214675 - RNA, 19 nt, Artificial Sequence
  Description of Artificial Sequence: Synthetic oligonucleotide
  Antisense strand to SEQ ID NO: 214674
uauaacagaggguggcaaa

SEQ ID NO: 214676 - RNA, 19 nt, Artificial Sequence
  Description of Artificial Sequence: Synthetic oligonucleotide
  Sense strand starting at position 3450 of SEQ ID NO: 2765
uguuauaauggcugguaga

SEQ ID NO: 214677 - RNA, 19 nt, Artificial Sequence
  Description of Artificial Sequence: Synthetic oligonucleotide
  Antisense strand to SEQ ID NO: 214676
ucuaccagccauuauaaca

SEQ ID NO: 214678 - RNA, 19 nt, Artificial Sequence
  Description of Artificial Sequence: Synthetic oligonucleotide
  Sense strand starting at position 3451 of SEQ ID NO: 2765
guuauaauggcugguagag

SEQ ID NO: 214679 - RNA, 19 nt, Artificial Sequence
  Description of Artificial Sequence: Synthetic oligonucleotide
  Antisense strand to SEQ ID NO: 214678
cucuaccagccauuauaac

SEQ ID NO: 214680 - RNA, 19 nt, Artificial Sequence
  Description of Artificial Sequence: Synthetic oligonucleotide
  Sense strand starting at position 3502 of SEQ ID NO: 2765
aggcuagccaugugauguu

SEQ ID NO: 214681 - RNA, 19 nt, Artificial Sequence
  Description of Artificial Sequence: Synthetic oligonucleotide
  Antisense strand to SEQ ID NO: 214680
aacaucacauggcuagccu

SEQ ID NO: 214682 - RNA, 19 nt, Artificial Sequence
  Description of Artificial Sequence: Synthetic oligonucleotide
  Sense strand starting at position 3531 of SEQ ID NO: 2765
ggaugucuacuggagcuuu

SEQ ID NO: 214683 - RNA, 19 nt, Artificial Sequence
  Description of Artificial Sequence: Synthetic oligonucleotide
  Antisense strand to SEQ ID NO: 214682
aaagcuccaguagacaucc

SEQ ID NO: 214684 - RNA, 19 nt, Artificial Sequence
  Description of Artificial Sequence: Synthetic oligonucleotide
  Sense strand starting at position 3921 of SEQ ID NO: 2765
gaacauaggugcuaagugu

SEQ ID NO: 214685 - RNA, 19 nt, Artificial Sequence
  Description of Artificial Sequence: Synthetic oligonucleotide
  Antisense strand to SEQ ID NO: 214684
acacuuagcaccuauguuc

SEQ ID NO: 214686 - RNA, 19 nt, Artificial Sequence
  Description of Artificial Sequence: Synthetic oligonucleotide
  Sense strand starting at position 40 of SEQ ID NO: 2766
uccuauuauguugauugaa

SEQ ID NO: 214687 - RNA, 19 nt, Artificial Sequence
  Description of Artificial Sequence: Synthetic oligonucleotide
  Antisense strand to SEQ ID NO: 214686
uucaaucaacauaauagga

SEQ ID NO: 214688 - RNA, 19 nt, Artificial Sequence
  Description of Artificial Sequence: Synthetic oligonucleotide
  Sense strand starting at position 42 of SEQ ID NO: 2766
cuauuauguugauugaaag

SEQ ID NO: 214689 - RNA, 19 nt, Artificial Sequence
  Description of Artificial Sequence: Synthetic oligonucleotide
  Antisense strand to SEQ ID NO: 214688
cuuucaaucaacauaauag

SEQ ID NO: 214690 - RNA, 19 nt, Artificial Sequence
  Description of Artificial Sequence: Synthetic oligonucleotide
  Sense strand starting at position 300 of SEQ ID NO: 2766
ucuguaauacaaugguaag

SEQ ID NO: 214691 - RNA, 19 nt, Artificial Sequence
  Description of Artificial Sequence: Synthetic oligonucleotide
  Antisense strand to SEQ ID NO: 214690
cuuaccauuguauuacaga

SEQ ID NO: 214692 - RNA, 19 nt, Artificial Sequence
  Description of Artificial Sequence: Synthetic oligonucleotide
  Sense strand starting at position 358 of SEQ ID NO: 2766
aagguaguauagucuuaug

SEQ ID NO: 214693 - RNA, 19 nt, Artificial Sequence
  Description of Artificial Sequence: Synthetic oligonucleotide
  Antisense strand to SEQ ID NO: 214692
cauaagacuauacuaccuu

SEQ ID NO: 214694 - RNA, 19 nt, Artificial Sequence
  Description of Artificial Sequence: Synthetic oligonucleotide
  Sense strand starting at position 396 of SEQ ID NO: 2766
gguccaucauuguuagaaa

SEQ ID NO: 214695 - RNA, 19 nt, Artificial Sequence
  Description of Artificial Sequence: Synthetic oligonucleotide
  Antisense strand to SEQ ID NO: 214694
uuucuaacaaugauggacc

SEQ ID NO: 214696 - RNA, 19 nt, Artificial Sequence
  Description of Artificial Sequence: Synthetic oligonucleotide
  Sense strand starting at position 446 of SEQ ID NO: 2766
ccagguuauccagaagugu

SEQ ID NO: 214697 - RNA, 19 nt, Artificial Sequence
  Description of Artificial Sequence: Synthetic oligonucleotide
  Antisense strand to SEQ ID NO: 214696
acacuucuggauaaccugg

SEQ ID NO: 214698 - RNA, 19 nt, Artificial Sequence
  Description of Artificial Sequence: Synthetic oligonucleotide
  Sense strand starting at position 450 of SEQ ID NO: 2766
guuauccagaaguguauga

SEQ ID NO: 214699 - RNA, 19 nt, Artificial Sequence
  Description of Artificial Sequence: Synthetic oligonucleotide
  Antisense strand to SEQ ID NO: 214698
ucauacacuucuggauaac

SEQ ID NO: 214700 - RNA, 19 nt, Artificial Sequence
  Description of Artificial Sequence: Synthetic oligonucleotide
  Sense strand starting at position 613 of SEQ ID NO: 2766
gccugugauguuuacaaau

SEQ ID NO: 214701 - RNA, 19 nt, Artificial Sequence
  Description of Artificial Sequence: Synthetic oligonucleotide
  Antisense strand to SEQ ID NO: 214700
auuuguaaacaucacaggc

SEQ ID NO: 214702 - RNA, 19 nt, Artificial Sequence
  Description of Artificial Sequence: Synthetic oligonucleotide
  Sense strand starting at position 758 of SEQ ID NO: 2766
uuccaauucugagccaaga

SEQ ID NO: 214703 - RNA, 19 nt, Artificial Sequence
  Description of Artificial Sequence: Synthetic oligonucleotide
  Antisense strand to SEQ ID NO: 214702
ucuuggcucagaauuggaa

SEQ ID NO: 214704 - RNA, 19 nt, Artificial Sequence
  Description of Artificial Sequence: Synthetic oligonucleotide
  Sense strand starting at position 872 of SEQ ID NO: 2766
ggaggaggugguugguuau

SEQ ID NO: 214705 - RNA, 19 nt, Artificial Sequence
  Description of Artificial Sequence: Synthetic oligonucleotide
  Antisense strand to SEQ ID NO: 214704
auaaccaaccaccuccucc

SEQ ID NO: 214706 - RNA, 19 nt, Artificial Sequence
  Description of Artificial Sequence: Synthetic oligonucleotide
  Sense strand starting at position 878 of SEQ ID NO: 2766
ggugguugguuaucagaga

SEQ ID NO: 214707 - RNA, 19 nt, Artificial Sequence
  Description of Artificial Sequence: Synthetic oligonucleotide
  Antisense strand to SEQ ID NO: 214706
ucucugauaaccaaccacc

SEQ ID NO: 214708 - RNA, 19 nt, Artificial Sequence
  Description of Artificial Sequence: Synthetic oligonucleotide
  Sense strand starting at position 1516 of SEQ ID NO: 2766
gcauaauuaacgcgaggaa

SEQ ID NO: 214709 - RNA, 19 nt, Artificial Sequence
  Description of Artificial Sequence: Synthetic oligonucleotide
  Antisense strand to SEQ ID NO: 214708
uuccucgcguuaauuaugc

SEQ ID NO: 214710 - RNA, 19 nt, Artificial Sequence
  Description of Artificial Sequence: Synthetic oligonucleotide
  Sense strand starting at position 2407 of SEQ ID NO: 2766
gacguucuauucuuuaaag

SEQ ID NO: 214711 - RNA, 19 nt, Artificial Sequence
  Description of Artificial Sequence: Synthetic oligonucleotide
  Antisense strand to SEQ ID NO: 214710
cuuuaaagaauagaacguc

SEQ ID NO: 214712 - RNA, 19 nt, Artificial Sequence
  Description of Artificial Sequence: Synthetic oligonucleotide
  Sense strand starting at position 2408 of SEQ ID NO: 2766
acguucuauucuuuaaaga

SEQ ID NO: 214713 - RNA, 19 nt, Artificial Sequence
  Description of Artificial Sequence: Synthetic oligonucleotide
  Antisense strand to SEQ ID NO: 214712
ucuuuaaagaauagaacgu

SEQ ID NO: 214714 - RNA, 19 nt, Artificial Sequence
  Description of Artificial Sequence: Synthetic oligonucleotide
  Sense strand starting at position 2409 of SEQ ID NO: 2766
cguucuauucuuuaaagaa

SEQ ID NO: 214715 - RNA, 19 nt, Artificial Sequence
  Description of Artificial Sequence: Synthetic oligonucleotide
  Antisense strand to SEQ ID NO: 214714
uucuuuaaagaauagaacg

SEQ ID NO: 214716 - RNA, 19 nt, Artificial Sequence
  Description of Artificial Sequence: Synthetic oligonucleotide
  Sense strand starting at position 2468 of SEQ ID NO: 2766
gguacaguggauuaacgaa

SEQ ID NO: 214717 - RNA, 19 nt, Artificial Sequence
  Description of Artificial Sequence: Synthetic oligonucleotide
  Antisense strand to SEQ ID NO: 214716
uucguuaauccacuguacc

SEQ ID NO: 214718 - RNA, 19 nt, Artificial Sequence
  Description of Artificial Sequence: Synthetic oligonucleotide
  Sense strand starting at position 2551 of SEQ ID NO: 2766
auggauaaggccugaguca

SEQ ID NO: 214719 - RNA, 19 nt, Artificial Sequence
  Description of Artificial Sequence: Synthetic oligonucleotide
  Antisense strand to SEQ ID NO: 214718
ugacucaggccuuauccau

SEQ ID NO: 214720 - RNA, 19 nt, Artificial Sequence
  Description of Artificial Sequence: Synthetic oligonucleotide
  Sense strand starting at position 2632 of SEQ ID NO: 2766
ccuacauguuuguuaacua

SEQ ID NO: 214721 - RNA, 19 nt, Artificial Sequence
  Description of Artificial Sequence: Synthetic oligonucleotide
  Antisense strand to SEQ ID NO: 214720
uaguuaacaaacauguagg

SEQ ID NO: 214722 - RNA, 19 nt, Artificial Sequence
  Description of Artificial Sequence: Synthetic oligonucleotide
  Sense strand starting at position 2640 of SEQ ID NO: 2766
uuuguuaacuacccgacua

SEQ ID NO: 214723 - RNA, 19 nt, Artificial Sequence
  Description of Artificial Sequence: Synthetic oligonucleotide
  Antisense strand to SEQ ID NO: 214722
uagucggguaguuaacaaa

SEQ ID NO: 214724 - RNA, 19 nt, Artificial Sequence
  Description of Artificial Sequence: Synthetic oligonucleotide
  Sense strand starting at position 2642 of SEQ ID NO: 2766
uguuaacuacccgacuaua

SEQ ID NO: 214725 - RNA, 19 nt, Artificial Sequence
  Description of Artificial Sequence: Synthetic oligonucleotide
  Antisense strand to SEQ ID NO: 214724
uauagucggguaguuaaca

SEQ ID NO: 214726 - RNA, 19 nt, Artificial Sequence
  Description of Artificial Sequence: Synthetic oligonucleotide
  Sense strand starting at position 2660 of SEQ ID NO: 2766
aucugugucuauuuagcaa

SEQ ID NO: 214727 - RNA, 19 nt, Artificial Sequence
  Description of Artificial Sequence: Synthetic oligonucleotide
  Antisense strand to SEQ ID NO: 214726
uugcuaaauagacacagau

SEQ ID NO: 214728 - RNA, 19 nt, Artificial Sequence
  Description of Artificial Sequence: Synthetic oligonucleotide
  Sense strand starting at position 2687 of SEQ ID NO: 2766
aauagauacguguauguau

SEQ ID NO: 214729 - RNA, 19 nt, Artificial Sequence
  Description of Artificial Sequence: Synthetic oligonucleotide
  Antisense strand to SEQ ID NO: 214728
auacauacacguaucuauu

SEQ ID NO: 214730 - RNA, 19 nt, Artificial Sequence
  Description of Artificial Sequence: Synthetic oligonucleotide
  Sense strand starting at position 2690 of SEQ ID NO: 2766
agauacguguauguauaca

SEQ ID NO: 214731 - RNA, 19 nt, Artificial Sequence
  Description of Artificial Sequence: Synthetic oligonucleotide
  Antisense strand to SEQ ID NO: 214730
uguauacauacacguaucu

SEQ ID NO: 214732 - RNA, 19 nt, Artificial Sequence
  Description of Artificial Sequence: Synthetic oligonucleotide
  Sense strand starting at position 2787 of SEQ ID NO: 2766
uugguucccuccuuaauga

SEQ ID NO: 214733 - RNA, 19 nt, Artificial Sequence
  Description of Artificial Sequence: Synthetic oligonucleotide
  Antisense strand to SEQ ID NO: 214732
ucauuaaggagggaaccaa

SEQ ID NO: 214734 - RNA, 19 nt, Artificial Sequence
  Description of Artificial Sequence: Synthetic oligonucleotide
  Sense strand starting at position 2860 of SEQ ID NO: 2766
cuaaucaugguuuaaaggu

SEQ ID NO: 214735 - RNA, 19 nt, Artificial Sequence
  Description of Artificial Sequence: Synthetic oligonucleotide
  Antisense strand to SEQ ID NO: 214734
accuuuaaaccaugauuag

SEQ ID NO: 214736 - RNA, 19 nt, Artificial Sequence
  Description of Artificial Sequence: Synthetic oligonucleotide
  Sense strand starting at position 2891 of SEQ ID NO: 2766
gcagaagacguuuacugag

SEQ ID NO: 214737 - RNA, 19 nt, Artificial Sequence
  Description of Artificial Sequence: Synthetic oligonucleotide
  Antisense strand to SEQ ID NO: 214736
cucaguaaacgucuucugc

SEQ ID NO: 214738 - RNA, 19 nt, Artificial Sequence
  Description of Artificial Sequence: Synthetic oligonucleotide
  Sense strand starting at position 2921 of SEQ ID NO: 2766
ggcccugugguugagauga

SEQ ID NO: 214739 - RNA, 19 nt, Artificial Sequence
  Description of Artificial Sequence: Synthetic oligonucleotide
  Antisense strand to SEQ ID NO: 214738
ucaucucaaccacagggcc

SEQ ID NO: 214740 - RNA, 19 nt, Artificial Sequence
  Description of Artificial Sequence: Synthetic oligonucleotide
  Sense strand starting at position 2945 of SEQ ID NO: 2766
uggguuucccuuugaggau

SEQ ID NO: 214741 - RNA, 19 nt, Artificial Sequence
  Description of Artificial Sequence: Synthetic oligonucleotide
  Antisense strand to SEQ ID NO: 214740
auccucaaagggaaaccca

SEQ ID NO: 214742 - RNA, 19 nt, Artificial Sequence
  Description of Artificial Sequence: Synthetic oligonucleotide
  Sense strand starting at position 2954 of SEQ ID NO: 2766
cuuugaggauuugaaucga

SEQ ID NO: 214743 - RNA, 19 nt, Artificial Sequence
  Description of Artificial Sequence: Synthetic oligonucleotide
  Antisense strand to SEQ ID NO: 214742
ucgauucaaauccucaaag

SEQ ID NO: 214744 - RNA, 19 nt, Artificial Sequence
  Description of Artificial Sequence: Synthetic oligonucleotide
  Sense strand starting at position 3008 of SEQ ID NO: 2766
gaagcuuggaugugaugca

SEQ ID NO: 214745 - RNA, 19 nt, Artificial Sequence
  Description of Artificial Sequence: Synthetic oligonucleotide
  Antisense strand to SEQ ID NO: 214744
ugcaucacauccaagcuuc

SEQ ID NO: 214746 - RNA, 19 nt, Artificial Sequence
  Description of Artificial Sequence: Synthetic oligonucleotide
  Sense strand starting at position 3013 of SEQ ID NO: 2766
uuggaugugaugcagcaua

SEQ ID NO: 214747 - RNA, 19 nt, Artificial Sequence
  Description of Artificial Sequence: Synthetic oligonucleotide
  Antisense strand to SEQ ID NO: 214746
uaugcugcaucacauccaa

SEQ ID NO: 214748 - RNA, 19 nt, Artificial Sequence
  Description of Artificial Sequence: Synthetic oligonucleotide
  Sense strand starting at position 3047 of SEQ ID NO: 2766
ggaucaaggcucugggaau

SEQ ID NO: 214749 - RNA, 19 nt, Artificial Sequence
  Description of Artificial Sequence: Synthetic oligonucleotide
  Antisense strand to SEQ ID NO: 214748
auucccagagccuugaucc

SEQ ID NO: 214750 - RNA, 19 nt, Artificial Sequence
  Description of Artificial Sequence: Synthetic oligonucleotide
  Sense strand starting at position 3061 of SEQ ID NO: 2766
ggaaucagaccacguggau

SEQ ID NO: 214751 - RNA, 19 nt, Artificial Sequence
  Description of Artificial Sequence: Synthetic oligonucleotide
  Antisense strand to SEQ ID NO: 214750
auccacguggucugauucc

SEQ ID NO: 214752 - RNA, 19 nt, Artificial Sequence
  Description of Artificial Sequence: Synthetic oligonucleotide
  Sense strand starting at position 3103 of SEQ ID NO: 2766
gacuguugaccuugucaca

SEQ ID NO: 214753 - RNA, 19 nt, Artificial Sequence
  Description of Artificial Sequence: Synthetic oligonucleotide
  Antisense strand to SEQ ID NO: 214752
ugugacaaggucaacaguc

SEQ ID NO: 214754 - RNA, 19 nt, Artificial Sequence
  Description of Artificial Sequence: Synthetic oligonucleotide
  Sense strand starting at position 3531 of SEQ ID NO: 2766
aguaguaaacacugcaaca

SEQ ID NO: 214755 - RNA, 19 nt, Artificial Sequence
  Description of Artificial Sequence: Synthetic oligonucleotide
  Antisense strand to SEQ ID NO: 214754
uguugcaguguuuacuacu

SEQ ID NO: 214756 - RNA, 19 nt, Artificial Sequence
  Description of Artificial Sequence: Synthetic oligonucleotide
  Sense strand starting at position 3555 of SEQ ID NO: 2766
acacuauugucacuguuau

SEQ ID NO: 214757 - RNA, 19 nt, Artificial Sequence
  Description of Artificial Sequence: Synthetic oligonucleotide
  Antisense strand to SEQ ID NO: 214756
auaacagugacaauagugu

SEQ ID NO: 214758 - RNA, 19 nt, Artificial Sequence
  Description of Artificial Sequence: Synthetic oligonucleotide
  Sense strand starting at position 3607 of SEQ ID NO: 2766
aaagauggaguuuguucua

SEQ ID NO: 214759 - RNA, 19 nt, Artificial Sequence
  Description of Artificial Sequence: Synthetic oligonucleotide
  Antisense strand to SEQ ID NO: 214758
uagaacaaacuccaucuuu

SEQ ID NO: 214760 - RNA, 19 nt, Artificial Sequence
  Description of Artificial Sequence: Synthetic oligonucleotide
  Sense strand starting at position 3610 of SEQ ID NO: 2766
gauggaguuuguucuagag

SEQ ID NO: 214761 - RNA, 19 nt, Artificial Sequence
  Description of Artificial Sequence: Synthetic oligonucleotide
  Antisense strand to SEQ ID NO: 214760
cucuagaacaaacuccauc

SEQ ID NO: 214762 - RNA, 19 nt, Artificial Sequence
  Description of Artificial Sequence: Synthetic oligonucleotide
  Sense strand starting at position 3614 of SEQ ID NO: 2766
gaguuuguucuagaggcuu

SEQ ID NO: 214763 - RNA, 19 nt, Artificial Sequence
  Description of Artificial Sequence: Synthetic oligonucleotide
  Antisense strand to SEQ ID NO: 214762
aagccucuagaacaaacuc

SEQ ID NO: 214764 - RNA, 19 nt, Artificial Sequence
  Description of Artificial Sequence: Synthetic oligonucleotide
  Sense strand starting at position 3620 of SEQ ID NO: 2766
guucuagaggcuuacacau

SEQ ID NO: 214765 - RNA, 19 nt, Artificial Sequence
  Description of Artificial Sequence: Synthetic oligonucleotide
  Antisense strand to SEQ ID NO: 214764
auguguaagccucuagaac

SEQ ID NO: 214766 - RNA, 19 nt, Artificial Sequence
  Description of Artificial Sequence: Synthetic oligonucleotide
  Sense strand starting at position 187 of SEQ ID NO: 2767
gagcccuucccacaagagu

SEQ ID NO: 214767 - RNA, 19 nt, Artificial Sequence
  Description of Artificial Sequence: Synthetic oligonucleotide
  Antisense strand to SEQ ID NO: 214766
acucuugugggaagggcuc

SEQ ID NO: 214768 - RNA, 19 nt, Artificial Sequence
  Description of Artificial Sequence: Synthetic oligonucleotide
  Sense strand starting at position 512 of SEQ ID NO: 2767
gugguuacacacugugaaa

SEQ ID NO: 214769 - RNA, 19 nt, Artificial Sequence
  Description of Artificial Sequence: Synthetic oligonucleotide
  Antisense strand to SEQ ID NO: 214768
uuucacaguguguaaccac

SEQ ID NO: 214770 - RNA, 19 nt, Artificial Sequence
  Description of Artificial Sequence: Synthetic oligonucleotide
  Sense strand starting at position 892 of SEQ ID NO: 2767
gggcuagcacuggaaucaa

SEQ ID NO: 214771 - RNA, 19 nt, Artificial Sequence
  Description of Artificial Sequence: Synthetic oligonucleotide
  Antisense strand to SEQ ID NO: 214770
uugauuccagugcuagccc

SEQ ID NO: 214772 - RNA, 19 nt, Artificial Sequence
  Description of Artificial Sequence: Synthetic oligonucleotide
  Sense strand starting at position 966 of SEQ ID NO: 2767
gaaucuacuucgucuggaa

SEQ ID NO: 214773 - RNA, 19 nt, Artificial Sequence
  Description of Artificial Sequence: Synthetic oligonucleotide
  Antisense strand to SEQ ID NO: 214772
uuccagacgaaguagauuc

SEQ ID NO: 214774 - RNA, 19 nt, Artificial Sequence
  Description of Artificial Sequence: Synthetic oligonucleotide
  Sense strand starting at position 970 of SEQ ID NO: 2767
cuacuucgucuggaagcuu

SEQ ID NO: 214775 - RNA, 19 nt, Artificial Sequence
  Description of Artificial Sequence: Synthetic oligonucleotide
  Antisense strand to SEQ ID NO: 214774
aagcuuccagacgaaguag

SEQ ID NO: 214776 - RNA, 19 nt, Artificial Sequence
  Description of Artificial Sequence: Synthetic oligonucleotide
  Sense strand starting at position 1345 of SEQ ID NO: 2767
cccaaugcccucgggauaa

SEQ ID NO: 214777 - RNA, 19 nt, Artificial Sequence
  Description of Artificial Sequence: Synthetic oligonucleotide
  Antisense strand to SEQ ID NO: 214776
uuaucccgagggcauuggg

SEQ ID NO: 214778 - RNA, 19 nt, Artificial Sequence
  Description of Artificial Sequence: Synthetic oligonucleotide
  Sense strand starting at position 1501 of SEQ ID NO: 2767
gcagacuucuuugccugua

SEQ ID NO: 214779 - RNA, 19 nt, Artificial Sequence
  Description of Artificial Sequence: Synthetic oligonucleotide
  Antisense strand to SEQ ID NO: 214778
uacaggcaaagaagucugc

SEQ ID NO: 214780 - RNA, 19 nt, Artificial Sequence
  Description of Artificial Sequence: Synthetic oligonucleotide
  Sense strand starting at position 1503 of SEQ ID NO: 2767
agacuucuuugccuguaaa

SEQ ID NO: 214781 - RNA, 19 nt, Artificial Sequence
  Description of Artificial Sequence: Synthetic oligonucleotide
  Antisense strand to SEQ ID NO: 214780
uuuacaggcaaagaagucu

SEQ ID NO: 214782 - RNA, 19 nt, Artificial Sequence
  Description of Artificial Sequence: Synthetic oligonucleotide
  Sense strand starting at position 1504 of SEQ ID NO: 2767
gacuucuuugccuguaaag

SEQ ID NO: 214783 - RNA, 19 nt, Artificial Sequence
  Description of Artificial Sequence: Synthetic oligonucleotide
  Antisense strand to SEQ ID NO: 214782
cuuuacaggcaaagaaguc

SEQ ID NO: 214784 - RNA, 19 nt, Artificial Sequence
  Description of Artificial Sequence: Synthetic oligonucleotide
  Sense strand starting at position 2425 of SEQ ID NO: 2767
gggucuuugcucuagcagu

SEQ ID NO: 214785 - RNA, 19 nt, Artificial Sequence
  Description of Artificial Sequence: Synthetic oligonucleotide
  Antisense strand to SEQ ID NO: 214784
acugcuagagcaaagaccc

SEQ ID NO: 214786 - RNA, 19 nt, Artificial Sequence
  Description of Artificial Sequence: Synthetic oligonucleotide
  Sense strand starting at position 3050 of SEQ ID NO: 2767
gacagaauguguucuggcu

SEQ ID NO: 214787 - RNA, 19 nt, Artificial Sequence
  Description of Artificial Sequence: Synthetic oligonucleotide
  Antisense strand to SEQ ID NO: 214786
agccagaacacauucuguc

SEQ ID NO: 214788 - RNA, 19 nt, Artificial Sequence
  Description of Artificial Sequence: Synthetic oligonucleotide
  Sense strand starting at position 3056 of SEQ ID NO: 2767
auguguucuggcugaagca

SEQ ID NO: 214789 - RNA, 19 nt, Artificial Sequence
  Description of Artificial Sequence: Synthetic oligonucleotide
  Antisense strand to SEQ ID NO: 214788
ugcuucagccagaacacau

SEQ ID NO: 214790 - RNA, 19 nt, Artificial Sequence
  Description of Artificial Sequence: Synthetic oligonucleotide
  Sense strand starting at position 3086 of SEQ ID NO: 2767
ggaccagacacuugguuga

SEQ ID NO: 214791 - RNA, 19 nt, Artificial Sequence
  Description of Artificial Sequence: Synthetic oligonucleotide
  Antisense strand to SEQ ID NO: 214790
ucaaccaagugucuggucc

SEQ ID NO: 214792 - RNA, 19 nt, Artificial Sequence
  Description of Artificial Sequence: Synthetic oligonucleotide
  Sense strand starting at position 3115 of SEQ ID NO: 2767
cccauaacugccugguguu

SEQ ID NO: 214793 - RNA, 19 nt, Artificial Sequence
  Description of Artificial Sequence: Synthetic oligonucleotide
  Antisense strand to SEQ ID NO: 214792
aacaccaggcaguuauggg

SEQ ID NO: 214794 - RNA, 19 nt, Artificial Sequence
  Description of Artificial Sequence: Synthetic oligonucleotide
  Sense strand starting at position 3242 of SEQ ID NO: 2767
uaggauucugcuggaggaa

SEQ ID NO: 214795 - RNA, 19 nt, Artificial Sequence
  Description of Artificial Sequence: Synthetic oligonucleotide
  Antisense strand to SEQ ID NO: 214794
uuccuccagcagaauccua

SEQ ID NO: 214796 - RNA, 19 nt, Artificial Sequence
  Description of Artificial Sequence: Synthetic oligonucleotide
  Sense strand starting at position 3255 of SEQ ID NO: 2767
gaggaaggacgcuguguau

SEQ ID NO: 214797 - RNA, 19 nt, Artificial Sequence
  Description of Artificial Sequence: Synthetic oligonucleotide
  Antisense strand to SEQ ID NO: 214796
auacacagcguccuuccuc

SEQ ID NO: 214798 - RNA, 19 nt, Artificial Sequence
  Description of Artificial Sequence: Synthetic oligonucleotide
  Sense strand starting at position 3281 of SEQ ID NO: 2767
agauaagggugcuagguau

SEQ ID NO: 214799 - RNA, 19 nt, Artificial Sequence
  Description of Artificial Sequence: Synthetic oligonucleotide
  Antisense strand to SEQ ID NO: 214798
auaccuagcacccuuaucu

SEQ ID NO: 214800 - RNA, 19 nt, Artificial Sequence
  Description of Artificial Sequence: Synthetic oligonucleotide
  Sense strand starting at position 3285 of SEQ ID NO: 2767
aagggugcuagguaucaca

SEQ ID NO: 214801 - RNA, 19 nt, Artificial Sequence
  Description of Artificial Sequence: Synthetic oligonucleotide
  Antisense strand to SEQ ID NO: 214800
ugugauaccuagcacccuu

SEQ ID NO: 214802 - RNA, 19 nt, Artificial Sequence
  Description of Artificial Sequence: Synthetic oligonucleotide
  Sense strand starting at position 3317 of SEQ ID NO: 2767
uucuaaggauccugugaaa

SEQ ID NO: 214803 - RNA, 19 nt, Artificial Sequence
  Description of Artificial Sequence: Synthetic oligonucleotide
  Antisense strand to SEQ ID NO: 214802
uuucacaggauccuuagaa

SEQ ID NO: 214804 - RNA, 19 nt, Artificial Sequence
  Description of Artificial Sequence: Synthetic oligonucleotide
  Sense strand starting at position 3320 of SEQ ID NO: 2767
uaaggauccugugaaauac

SEQ ID NO: 214805 - RNA, 19 nt, Artificial Sequence
  Description of Artificial Sequence: Synthetic oligonucleotide
  Antisense strand to SEQ ID NO: 214804
guauuucacaggauccuua

SEQ ID NO: 214806 - RNA, 19 nt, Artificial Sequence
  Description of Artificial Sequence: Synthetic oligonucleotide
  Sense strand starting at position 3357 of SEQ ID NO: 2767
cagacugauuaauggagaa

SEQ ID NO: 214807 - RNA, 19 nt, Artificial Sequence
  Description of Artificial Sequence: Synthetic oligonucleotide
  Antisense strand to SEQ ID NO: 214806
uucuccauuaaucagucug

SEQ ID NO: 214808 - RNA, 19 nt, Artificial Sequence
  Description of Artificial Sequence: Synthetic oligonucleotide
  Sense strand starting at position 3411 of SEQ ID NO: 2767
aucuuagaguucuauggua

SEQ ID NO: 214809 - RNA, 19 nt, Artificial Sequence
  Description of Artificial Sequence: Synthetic oligonucleotide
  Antisense strand to SEQ ID NO: 214808
uaccauagaacucuaagau

SEQ ID NO: 214810 - RNA, 19 nt, Artificial Sequence
  Description of Artificial Sequence: Synthetic oligonucleotide
  Sense strand starting at position 3419 of SEQ ID NO: 2767
guucuaugguaaucggaug

SEQ ID NO: 214811 - RNA, 19 nt, Artificial Sequence
  Description of Artificial Sequence: Synthetic oligonucleotide
  Antisense strand to SEQ ID NO: 214810
cauccgauuaccauagaac

SEQ ID NO: 214812 - RNA, 19 nt, Artificial Sequence
  Description of Artificial Sequence: Synthetic oligonucleotide
  Sense strand starting at position 3424 of SEQ ID NO: 2767
augguaaucggaugcguau

SEQ ID NO: 214813 - RNA, 19 nt, Artificial Sequence
  Description of Artificial Sequence: Synthetic oligonucleotide
  Antisense strand to SEQ ID NO: 214812
auacgcauccgauuaccau

SEQ ID NO: 214814 - RNA, 19 nt, Artificial Sequence
  Description of Artificial Sequence: Synthetic oligonucleotide
  Sense strand starting at position 3426 of SEQ ID NO: 2767
gguaaucggaugcguauua

SEQ ID NO: 214815 - RNA, 19 nt, Artificial Sequence
  Description of Artificial Sequence: Synthetic oligonucleotide
  Antisense strand to SEQ ID NO: 214814
uaauacgcauccgauuacc

SEQ ID NO: 214816 - RNA, 19 nt, Artificial Sequence
  Description of Artificial Sequence: Synthetic oligonucleotide
  Sense strand starting at position 3433 of SEQ ID NO: 2767
ggaugcguauuagagaaga

SEQ ID NO: 214817 - RNA, 19 nt, Artificial Sequence
  Description of Artificial Sequence: Synthetic oligonucleotide
  Antisense strand to SEQ ID NO: 214816
ucuucucuaauacgcaucc

SEQ ID NO: 214818 - RNA, 19 nt, Artificial Sequence
  Description of Artificial Sequence: Synthetic oligonucleotide
  Sense strand starting at position 3534 of SEQ ID NO: 2767
ccauuauaggugugccuga

SEQ ID NO: 214819 - RNA, 19 nt, Artificial Sequence
  Description of Artificial Sequence: Synthetic oligonucleotide
  Antisense strand to SEQ ID NO: 214818
ucaggcacaccuauaaugg

SEQ ID NO: 214820 - RNA, 19 nt, Artificial Sequence
  Description of Artificial Sequence: Synthetic oligonucleotide
  Sense strand starting at position 3646 of SEQ ID NO: 2767
ccauucuugucuccaguaa

SEQ ID NO: 214821 - RNA, 19 nt, Artificial Sequence
  Description of Artificial Sequence: Synthetic oligonucleotide
  Antisense strand to SEQ ID NO: 214820
uuacuggagacaagaaugg

SEQ ID NO: 214822 - RNA, 19 nt, Artificial Sequence
  Description of Artificial Sequence: Synthetic oligonucleotide
  Sense strand starting at position 3734 of SEQ ID NO: 2767
cccaaacaguccuuaguaa

SEQ ID NO: 214823 - RNA, 19 nt, Artificial Sequence
  Description of Artificial Sequence: Synthetic oligonucleotide
  Antisense strand to SEQ ID NO: 214822
uuacuaaggacuguuuggg

SEQ ID NO: 214824 - RNA, 19 nt, Artificial Sequence
  Description of Artificial Sequence: Synthetic oligonucleotide
  Sense strand starting at position 3784 of SEQ ID NO: 2767
agccaucuugaaggucuua

SEQ ID NO: 214825 - RNA, 19 nt, Artificial Sequence
  Description of Artificial Sequence: Synthetic oligonucleotide
  Antisense strand to SEQ ID NO: 214824
uaagaccuucaagauggcu

SEQ ID NO: 214826 - RNA, 19 nt, Artificial Sequence
  Description of Artificial Sequence: Synthetic oligonucleotide
  Sense strand starting at position 3796 of SEQ ID NO: 2767
ggucuuauauccucucugu

SEQ ID NO: 214827 - RNA, 19 nt, Artificial Sequence
  Description of Artificial Sequence: Synthetic oligonucleotide
  Antisense strand to SEQ ID NO: 214826
acagagaggauauaagacc

SEQ ID NO: 214828 - RNA, 19 nt, Artificial Sequence
  Description of Artificial Sequence: Synthetic oligonucleotide
  Sense strand starting at position 3800 of SEQ ID NO: 2767
uuauauccucucugugcua

SEQ ID NO: 214829 - RNA, 19 nt, Artificial Sequence
  Description of Artificial Sequence: Synthetic oligonucleotide
  Antisense strand to SEQ ID NO: 214828
uagcacagagaggauauaa

SEQ ID NO: 214830 - RNA, 19 nt, Artificial Sequence
  Description of Artificial Sequence: Synthetic oligonucleotide
  Sense strand starting at position 3816 of SEQ ID NO: 2767
cuauccugucugugcuauu

SEQ ID NO: 214831 - RNA, 19 nt, Artificial Sequence
  Description of Artificial Sequence: Synthetic oligonucleotide
  Antisense strand to SEQ ID NO: 214830
aauagcacagacaggauag

SEQ ID NO: 214832 - RNA, 19 nt, Artificial Sequence
  Description of Artificial Sequence: Synthetic oligonucleotide
  Sense strand starting at position 3829 of SEQ ID NO: 2767
gcuauucccuggcugugau

SEQ ID NO: 214833 - RNA, 19 nt, Artificial Sequence
  Description of Artificial Sequence: Synthetic oligonucleotide
  Antisense strand to SEQ ID NO: 214832
aucacagccagggaauagc

SEQ ID NO: 214834 - RNA, 19 nt, Artificial Sequence
  Description of Artificial Sequence: Synthetic oligonucleotide
  Sense strand starting at position 3844 of SEQ ID NO: 2767
ugaugcauuccagauguuu

SEQ ID NO: 214835 - RNA, 19 nt, Artificial Sequence
  Description of Artificial Sequence: Synthetic oligonucleotide
  Antisense strand to SEQ ID NO: 214834
aaacaucuggaaugcauca

SEQ ID NO: 214836 - RNA, 19 nt, Artificial Sequence
  Description of Artificial Sequence: Synthetic oligonucleotide
  Sense strand starting at position 3889 of SEQ ID NO: 2767
cuguuagauaucugcgugu

SEQ ID NO: 214837 - RNA, 19 nt, Artificial Sequence
  Description of Artificial Sequence: Synthetic oligonucleotide
  Antisense strand to SEQ ID NO: 214836
acacgcagauaucuaacag

SEQ ID NO: 214838 - RNA, 19 nt, Artificial Sequence
  Description of Artificial Sequence: Synthetic oligonucleotide
  Sense strand starting at position 3891 of SEQ ID NO: 2767
guuagauaucugcguguua

SEQ ID NO: 214839 - RNA, 19 nt, Artificial Sequence
  Description of Artificial Sequence: Synthetic oligonucleotide
  Antisense strand to SEQ ID NO: 214838
uaacacgcagauaucuaac

SEQ ID NO: 214840 - RNA, 19 nt, Artificial Sequence
  Description of Artificial Sequence: Synthetic oligonucleotide
  Sense strand starting at position 3892 of SEQ ID NO: 2767
uuagauaucugcguguuac

SEQ ID NO: 214841 - RNA, 19 nt, Artificial Sequence
  Description of Artificial Sequence: Synthetic oligonucleotide
  Antisense strand to SEQ ID NO: 214840
guaacacgcagauaucuaa

SEQ ID NO: 214842 - RNA, 19 nt, Artificial Sequence
  Description of Artificial Sequence: Synthetic oligonucleotide
  Sense strand starting at position 3893 of SEQ ID NO: 2767
uagauaucugcguguuacc

SEQ ID NO: 214843 - RNA, 19 nt, Artificial Sequence
  Description of Artificial Sequence: Synthetic oligonucleotide
  Antisense strand to SEQ ID NO: 214842
gguaacacgcagauaucua

SEQ ID NO: 214844 - RNA, 19 nt, Artificial Sequence
  Description of Artificial Sequence: Synthetic oligonucleotide
  Sense strand starting at position 3904 of SEQ ID NO: 2767
guguuaccuccugaagaau

SEQ ID NO: 214845 - RNA, 19 nt, Artificial Sequence
  Description of Artificial Sequence: Synthetic oligonucleotide
  Antisense strand to SEQ ID NO: 214844
auucuucaggagguaacac

SEQ ID NO: 214846 - RNA, 19 nt, Artificial Sequence
  Description of Artificial Sequence: Synthetic oligonucleotide
  Sense strand starting at position 80 of SEQ ID NO: 2768
acuuaugacugagaaccau

SEQ ID NO: 214847 - RNA, 19 nt, Artificial Sequence
  Description of Artificial Sequence: Synthetic oligonucleotide
  Antisense strand to SEQ ID NO: 214846
augguucucagucauaagu

SEQ ID NO: 214848 - RNA, 19 nt, Artificial Sequence
  Description of Artificial Sequence: Synthetic oligonucleotide
  Sense strand starting at position 190 of SEQ ID NO: 2768
agagguuauauggguagua

SEQ ID NO: 214849 - RNA, 19 nt, Artificial Sequence
  Description of Artificial Sequence: Synthetic oligonucleotide
  Antisense strand to SEQ ID NO: 214848
uacuacccauauaaccucu

SEQ ID NO: 214850 - RNA, 19 nt, Artificial Sequence
  Description of Artificial Sequence: Synthetic oligonucleotide
  Sense strand starting at position 213 of SEQ ID NO: 2768
augggucauuuggaguuau

SEQ ID NO: 214851 - RNA, 19 nt, Artificial Sequence
  Description of Artificial Sequence: Synthetic oligonucleotide
  Antisense strand to SEQ ID NO: 214850
auaacuccaaaugacccau

SEQ ID NO: 214852 - RNA, 19 nt, Artificial Sequence
  Description of Artificial Sequence: Synthetic oligonucleotide
  Sense strand starting at position 283 of SEQ ID NO: 2768
aaacaaugucacuggguga

SEQ ID NO: 214853 - RNA, 19 nt, Artificial Sequence
  Description of Artificial Sequence: Synthetic oligonucleotide
  Antisense strand to SEQ ID NO: 214852
ucacccagugacauuguuu

SEQ ID NO: 214854 - RNA, 19 nt, Artificial Sequence
  Description of Artificial Sequence: Synthetic oligonucleotide
  Sense strand starting at position 344 of SEQ ID NO: 2768
ucauuugugccuggagagu

SEQ ID NO: 214855 - RNA, 19 nt, Artificial Sequence
  Description of Artificial Sequence: Synthetic oligonucleotide
  Antisense strand to SEQ ID NO: 214854
acucuccaggcacaaauga

SEQ ID NO: 214856 - RNA, 19 nt, Artificial Sequence
  Description of Artificial Sequence: Synthetic oligonucleotide
  Sense strand starting at position 493 of SEQ ID NO: 2768
gaaagugucuuggugagcu

SEQ ID NO: 214857 - RNA, 19 nt, Artificial Sequence
  Description of Artificial Sequence: Synthetic oligonucleotide
  Antisense strand to SEQ ID NO: 214856
agcucaccaagacacuuuc

SEQ ID NO: 214858 - RNA, 19 nt, Artificial Sequence
  Description of Artificial Sequence: Synthetic oligonucleotide
  Sense strand starting at position 918 of SEQ ID NO: 2768
gcuccaugauccucugaag

SEQ ID NO: 214859 - RNA, 19 nt, Artificial Sequence
  Description of Artificial Sequence: Synthetic oligonucleotide
  Antisense strand to SEQ ID NO: 214858
cuucagaggaucauggagc

SEQ ID NO: 214860 - RNA, 19 nt, Artificial Sequence
  Description of Artificial Sequence: Synthetic oligonucleotide
  Sense strand starting at position 921 of SEQ ID NO: 2768
ccaugauccucugaagaaa

SEQ ID NO: 214861 - RNA, 19 nt, Artificial Sequence
  Description of Artificial Sequence: Synthetic oligonucleotide
  Antisense strand to SEQ ID NO: 214860
uuucuucagaggaucaugg

SEQ ID NO: 214862 - RNA, 19 nt, Artificial Sequence
  Description of Artificial Sequence: Synthetic oligonucleotide
  Sense strand starting at position 1117 of SEQ ID NO: 2768
gcuguauuagggcaagaau

SEQ ID NO: 214863 - RNA, 19 nt, Artificial Sequence
  Description of Artificial Sequence: Synthetic oligonucleotide
  Antisense strand to SEQ ID NO: 214862
auucuugcccuaauacagc

SEQ ID NO: 214864 - RNA, 19 nt, Artificial Sequence
  Description of Artificial Sequence: Synthetic oligonucleotide
  Sense strand starting at position 1386 of SEQ ID NO: 2768
aggaaauggugcucuuucu

SEQ ID NO: 214865 - RNA, 19 nt, Artificial Sequence
  Description of Artificial Sequence: Synthetic oligonucleotide
  Antisense strand to SEQ ID NO: 214864
agaaagagcaccauuuccu

SEQ ID NO: 214866 - RNA, 19 nt, Artificial Sequence
  Description of Artificial Sequence: Synthetic oligonucleotide
  Sense strand starting at position 1515 of SEQ ID NO: 2768
aagguaaccuuagagaucu

SEQ ID NO: 214867 - RNA, 19 nt, Artificial Sequence
  Description of Artificial Sequence: Synthetic oligonucleotide
  Antisense strand to SEQ ID NO: 214866
agaucucuaagguuaccuu

SEQ ID NO: 214868 - RNA, 19 nt, Artificial Sequence
  Description of Artificial Sequence: Synthetic oligonucleotide
  Sense strand starting at position 1588 of SEQ ID NO: 2768
ccugguaaacucuagagca

SEQ ID NO: 214869 - RNA, 19 nt, Artificial Sequence
  Description of Artificial Sequence: Synthetic oligonucleotide
  Antisense strand to SEQ ID NO: 214868
ugcucuagaguuuaccagg

SEQ ID NO: 214870 - RNA, 19 nt, Artificial Sequence
  Description of Artificial Sequence: Synthetic oligonucleotide
  Sense strand starting at position 2091 of SEQ ID NO: 2768
cugaguuacugaguuggca

SEQ ID NO: 214871 - RNA, 19 nt, Artificial Sequence
  Description of Artificial Sequence: Synthetic oligonucleotide
  Antisense strand to SEQ ID NO: 214870
ugccaacucaguaacucag

SEQ ID NO: 214872 - RNA, 19 nt, Artificial Sequence
  Description of Artificial Sequence: Synthetic oligonucleotide
  Sense strand starting at position 2093 of SEQ ID NO: 2768
gaguuacugaguuggcaaa

SEQ ID NO: 214873 - RNA, 19 nt, Artificial Sequence
  Description of Artificial Sequence: Synthetic oligonucleotide
  Antisense strand to SEQ ID NO: 214872
uuugccaacucaguaacuc

SEQ ID NO: 214874 - RNA, 19 nt, Artificial Sequence
  Description of Artificial Sequence: Synthetic oligonucleotide
  Sense strand starting at position 2095 of SEQ ID NO: 2768
guuacugaguuggcaaaga

SEQ ID NO: 214875 - RNA, 19 nt, Artificial Sequence
  Description of Artificial Sequence: Synthetic oligonucleotide
  Antisense strand to SEQ ID NO: 214874
ucuuugccaacucaguaac

SEQ ID NO: 214876 - RNA, 19 nt, Artificial Sequence
  Description of Artificial Sequence: Synthetic oligonucleotide
  Sense strand starting at position 2141 of SEQ ID NO: 2768
cugaguugcugaguuagca

SEQ ID NO: 214877 - RNA, 19 nt, Artificial Sequence
  Description of Artificial Sequence: Synthetic oligonucleotide
  Antisense strand to SEQ ID NO: 214876
ugcuaacucagcaacucag

SEQ ID NO: 214878 - RNA, 19 nt, Artificial Sequence
  Description of Artificial Sequence: Synthetic oligonucleotide
  Sense strand starting at position 2145 of SEQ ID NO: 2768
guugcugaguuagcaaaga

SEQ ID NO: 214879 - RNA, 19 nt, Artificial Sequence
  Description of Artificial Sequence: Synthetic oligonucleotide
  Antisense strand to SEQ ID NO: 214878
ucuuugcuaacucagcaac

SEQ ID NO: 214880 - RNA, 19 nt, Artificial Sequence
  Description of Artificial Sequence: Synthetic oligonucleotide
  Sense strand starting at position 2150 of SEQ ID NO: 2768
ugaguuagcaaagaagcaa

SEQ ID NO: 214881 - RNA, 19 nt, Artificial Sequence
  Description of Artificial Sequence: Synthetic oligonucleotide
  Antisense strand to SEQ ID NO: 214880
uugcuucuuugcuaacuca

SEQ ID NO: 214882 - RNA, 19 nt, Artificial Sequence
  Description of Artificial Sequence: Synthetic oligonucleotide
  Sense strand starting at position 2365 of SEQ ID NO: 2768
augauaaucaugggauugu

SEQ ID NO: 214883 - RNA, 19 nt, Artificial Sequence
  Description of Artificial Sequence: Synthetic oligonucleotide
  Antisense strand to SEQ ID NO: 214882
acaaucccaugauuaucau

SEQ ID NO: 214884 - RNA, 19 nt, Artificial Sequence
  Description of Artificial Sequence: Synthetic oligonucleotide
  Sense strand starting at position 2381 of SEQ ID NO: 2768
uguugugaggauugacgaa

SEQ ID NO: 214885 - RNA, 19 nt, Artificial Sequence
  Description of Artificial Sequence: Synthetic oligonucleotide
  Antisense strand to SEQ ID NO: 214884
uucgucaauccucacaaca

SEQ ID NO: 214886 - RNA, 19 nt, Artificial Sequence
  Description of Artificial Sequence: Synthetic oligonucleotide
  Sense strand starting at position 2409 of SEQ ID NO: 2768
uaaugucaggcacauagua

SEQ ID NO: 214887 - RNA, 19 nt, Artificial Sequence
  Description of Artificial Sequence: Synthetic oligonucleotide
  Antisense strand to SEQ ID NO: 214886
uacuaugugccugacauua

SEQ ID NO: 214888 - RNA, 19 nt, Artificial Sequence
  Description of Artificial Sequence: Synthetic oligonucleotide
  Sense strand starting at position 2980 of SEQ ID NO: 2768
cgaaauauaucagcauaga

SEQ ID NO: 214889 - RNA, 19 nt, Artificial Sequence
  Description of Artificial Sequence: Synthetic oligonucleotide
  Antisense strand to SEQ ID NO: 214888
ucuaugcugauauauuucg

SEQ ID NO: 214890 - RNA, 19 nt, Artificial Sequence
  Description of Artificial Sequence: Synthetic oligonucleotide
  Sense strand starting at position 3132 of SEQ ID NO: 2768
agauguguucaggguguag

SEQ ID NO: 214891 - RNA, 19 nt, Artificial Sequence
  Description of Artificial Sequence: Synthetic oligonucleotide
  Antisense strand to SEQ ID NO: 214890
cuacacccugaacacaucu

SEQ ID NO: 214892 - RNA, 19 nt, Artificial Sequence
  Description of Artificial Sequence: Synthetic oligonucleotide
  Sense strand starting at position 3261 of SEQ ID NO: 2768
cucuuucugugaucuccua

SEQ ID NO: 214893 - RNA, 19 nt, Artificial Sequence
  Description of Artificial Sequence: Synthetic oligonucleotide
  Antisense strand to SEQ ID NO: 214892
uaggagaucacagaaagag

SEQ ID NO: 214894 - RNA, 19 nt, Artificial Sequence
  Description of Artificial Sequence: Synthetic oligonucleotide
  Sense strand starting at position 3430 of SEQ ID NO: 2768
cuggucuccuuguucuaga

SEQ ID NO: 214895 - RNA, 19 nt, Artificial Sequence
  Description of Artificial Sequence: Synthetic oligonucleotide
  Antisense strand to SEQ ID NO: 214894
ucuagaacaaggagaccag

SEQ ID NO: 214896 - RNA, 19 nt, Artificial Sequence
  Description of Artificial Sequence: Synthetic oligonucleotide
  Sense strand starting at position 3431 of SEQ ID NO: 2768
uggucuccuuguucuagaa

SEQ ID NO: 214897 - RNA, 19 nt, Artificial Sequence
  Description of Artificial Sequence: Synthetic oligonucleotide
  Antisense strand to SEQ ID NO: 214896
uucuagaacaaggagacca

SEQ ID NO: 214898 - RNA, 19 nt, Artificial Sequence
  Description of Artificial Sequence: Synthetic oligonucleotide
  Sense strand starting at position 3457 of SEQ ID NO: 2768
ucccuaugcucuccugagu

SEQ ID NO: 214899 - RNA, 19 nt, Artificial Sequence
  Description of Artificial Sequence: Synthetic oligonucleotide
  Antisense strand to SEQ ID NO: 214898
acucaggagagcauaggga

SEQ ID NO: 214900 - RNA, 19 nt, Artificial Sequence
  Description of Artificial Sequence: Synthetic oligonucleotide
  Sense strand starting at position 3460 of SEQ ID NO: 2768
cuaugcucuccugaguaaa

SEQ ID NO: 214901 - RNA, 19 nt, Artificial Sequence
  Description of Artificial Sequence: Synthetic oligonucleotide
  Antisense strand to SEQ ID NO: 214900
uuuacucaggagagcauag

SEQ ID NO: 214902 - RNA, 19 nt, Artificial Sequence
  Description of Artificial Sequence: Synthetic oligonucleotide
  Sense strand starting at position 3462 of SEQ ID NO: 2768
augcucuccugaguaaaca

SEQ ID NO: 214903 - RNA, 19 nt, Artificial Sequence
  Description of Artificial Sequence: Synthetic oligonucleotide
  Antisense strand to SEQ ID NO: 214902
uguuuacucaggagagcau

SEQ ID NO: 214904 - RNA, 19 nt, Artificial Sequence
  Description of Artificial Sequence: Synthetic oligonucleotide
  Sense strand starting at position 3463 of SEQ ID NO: 2768
ugcucuccugaguaaacau

SEQ ID NO: 214905 - RNA, 19 nt, Artificial Sequence
  Description of Artificial Sequence: Synthetic oligonucleotide
  Antisense strand to SEQ ID NO: 214904
auguuuacucaggagagca

SEQ ID NO: 214906 - RNA, 19 nt, Artificial Sequence
  Description of Artificial Sequence: Synthetic oligonucleotide
  Sense strand starting at position 3482 of SEQ ID NO: 2768
cccagugauucucugauga

SEQ ID NO: 214907 - RNA, 19 nt, Artificial Sequence
  Description of Artificial Sequence: Synthetic oligonucleotide
  Antisense strand to SEQ ID NO: 214906
ucaucagagaaucacuggg

SEQ ID NO: 214908 - RNA, 19 nt, Artificial Sequence
  Description of Artificial Sequence: Synthetic oligonucleotide
  Sense strand starting at position 3621 of SEQ ID NO: 2768
guagaauauccacagugug

SEQ ID NO: 214909 - RNA, 19 nt, Artificial Sequence
  Description of Artificial Sequence: Synthetic oligonucleotide
  Antisense strand to SEQ ID NO: 214908
cacacuguggauauucuac

SEQ ID NO: 214910 - RNA, 19 nt, Artificial Sequence
  Description of Artificial Sequence: Synthetic oligonucleotide
  Sense strand starting at position 3648 of SEQ ID NO: 2768
uuggcuugacccugggaga

SEQ ID NO: 214911 - RNA, 19 nt, Artificial Sequence
  Description of Artificial Sequence: Synthetic oligonucleotide
  Antisense strand to SEQ ID NO: 214910
ucucccagggucaagccaa

SEQ ID NO: 214912 - RNA, 19 nt, Artificial Sequence
  Description of Artificial Sequence: Synthetic oligonucleotide
  Sense strand starting at position 3751 of SEQ ID NO: 2768
agaaaugugugcucaccac

SEQ ID NO: 214913 - RNA, 19 nt, Artificial Sequence
  Description of Artificial Sequence: Synthetic oligonucleotide
  Antisense strand to SEQ ID NO: 214912
guggugagcacacauuucu

SEQ ID NO: 214914 - RNA, 19 nt, Artificial Sequence
  Description of Artificial Sequence: Synthetic oligonucleotide
  Sense strand starting at position 3848 of SEQ ID NO: 2768
cagaguuacgaguguuuag

SEQ ID NO: 214915 - RNA, 19 nt, Artificial Sequence
  Description of Artificial Sequence: Synthetic oligonucleotide
  Antisense strand to SEQ ID NO: 214914
cuaaacacucguaacucug

SEQ ID NO: 214916 - RNA, 19 nt, Artificial Sequence
  Description of Artificial Sequence: Synthetic oligonucleotide
  Sense strand starting at position 3851 of SEQ ID NO: 2768
aguuacgaguguuuagaag

SEQ ID NO: 214917 - RNA, 19 nt, Artificial Sequence
  Description of Artificial Sequence: Synthetic oligonucleotide
  Antisense strand to SEQ ID NO: 214916
cuucuaaacacucguaacu

SEQ ID NO: 214918 - RNA, 19 nt, Artificial Sequence
  Description of Artificial Sequence: Synthetic oligonucleotide
  Sense strand starting at position 3855 of SEQ ID NO: 2768
acgaguguuuagaagagga

SEQ ID NO: 214919 - RNA, 19 nt, Artificial Sequence
  Description of Artificial Sequence: Synthetic oligonucleotide
  Antisense strand to SEQ ID NO: 214918
uccucuucuaaacacucgu

SEQ ID NO: 214920 - RNA, 19 nt, Artificial Sequence
  Description of Artificial Sequence: Synthetic oligonucleotide
  Sense strand starting at position 3911 of SEQ ID NO: 2768
gcauuuaaguugcuguuau

SEQ ID NO: 214921 - RNA, 19 nt, Artificial Sequence
  Description of Artificial Sequence: Synthetic oligonucleotide
  Antisense strand to SEQ ID NO: 214920
auaacagcaacuuaaaugc

SEQ ID NO: 214922 - RNA, 19 nt, Artificial Sequence
  Description of Artificial Sequence: Synthetic oligonucleotide
  Sense strand starting at position 3944 of SEQ ID NO: 2768
gaacaugggcucugaaauc

SEQ ID NO: 214923 - RNA, 19 nt, Artificial Sequence
  Description of Artificial Sequence: Synthetic oligonucleotide
  Antisense strand to SEQ ID NO: 214922
gauuucagagcccauguuc

SEQ ID NO: 214924 - RNA, 19 nt, Artificial Sequence
  Description of Artificial Sequence: Synthetic oligonucleotide
  Sense strand starting at position 3973 of SEQ ID NO: 2768
ggcagcaucucuucuuacu

SEQ ID NO: 214925 - RNA, 19 nt, Artificial Sequence
  Description of Artificial Sequence: Synthetic oligonucleotide
  Antisense strand to SEQ ID NO: 214924
aguaagaagagaugcugcc

SEQ ID NO: 214926 - RNA, 19 nt, Artificial Sequence
  Description of Artificial Sequence: Synthetic oligonucleotide
  Sense strand starting at position 54 of SEQ ID NO: 2769
acaaguauaucccugugaa

SEQ ID NO: 214927 - RNA, 19 nt, Artificial Sequence
  Description of Artificial Sequence: Synthetic oligonucleotide
  Antisense strand to SEQ ID NO: 214926
uucacagggauauacuugu

SEQ ID NO: 214928 - RNA, 19 nt, Artificial Sequence
  Description of Artificial Sequence: Synthetic oligonucleotide
  Sense strand starting at position 57 of SEQ ID NO: 2769
aguauaucccugugaaacc

SEQ ID NO: 214929 - RNA, 19 nt, Artificial Sequence
  Description of Artificial Sequence: Synthetic oligonucleotide
  Antisense strand to SEQ ID NO: 214928
gguuucacagggauauacu

SEQ ID NO: 214930 - RNA, 19 nt, Artificial Sequence
  Description of Artificial Sequence: Synthetic oligonucleotide
  Sense strand starting at position 182 of SEQ ID NO: 2769
guuaauaaagaaugcuaga

SEQ ID NO: 214931 - RNA, 19 nt, Artificial Sequence
  Description of Artificial Sequence: Synthetic oligonucleotide
  Antisense strand to SEQ ID NO: 214930
ucuagcauucuuuauuaac

SEQ ID NO: 214932 - RNA, 19 nt, Artificial Sequence
  Description of Artificial Sequence: Synthetic oligonucleotide
  Sense strand starting at position 222 of SEQ ID NO: 2769
aguguuaacuaucuagaaa

SEQ ID NO: 214933 - RNA, 19 nt, Artificial Sequence
  Description of Artificial Sequence: Synthetic oligonucleotide
  Antisense strand to SEQ ID NO: 214932
uuucuagauaguuaacacu

SEQ ID NO: 214934 - RNA, 19 nt, Artificial Sequence
  Description of Artificial Sequence: Synthetic oligonucleotide
  Sense strand starting at position 234 of SEQ ID NO: 2769
cuagaaaggucugcuaauc

SEQ ID NO: 214935 - RNA, 19 nt, Artificial Sequence
  Description of Artificial Sequence: Synthetic oligonucleotide
  Antisense strand to SEQ ID NO: 214934
gauuagcagaccuuucuag

SEQ ID NO: 214936 - RNA, 19 nt, Artificial Sequence
  Description of Artificial Sequence: Synthetic oligonucleotide
  Sense strand starting at position 353 of SEQ ID NO: 2769
agaagaauguagguucuaa

SEQ ID NO: 214937 - RNA, 19 nt, Artificial Sequence
  Description of Artificial Sequence: Synthetic oligonucleotide
  Antisense strand to SEQ ID NO: 214936
uuagaaccuacauucuucu

SEQ ID NO: 214938 - RNA, 19 nt, Artificial Sequence
  Description of Artificial Sequence: Synthetic oligonucleotide
  Sense strand starting at position 363 of SEQ ID NO: 2769
agguucuaagccuauaacu

SEQ ID NO: 214939 - RNA, 19 nt, Artificial Sequence
  Description of Artificial Sequence: Synthetic oligonucleotide
  Antisense strand to SEQ ID NO: 214938
aguuauaggcuuagaaccu

SEQ ID NO: 214940 - RNA, 19 nt, Artificial Sequence
  Description of Artificial Sequence: Synthetic oligonucleotide
  Sense strand starting at position 745 of SEQ ID NO: 2769
uuaaucagguguuccagau

SEQ ID NO: 214941 - RNA, 19 nt, Artificial Sequence
  Description of Artificial Sequence: Synthetic oligonucleotide
  Antisense strand to SEQ ID NO: 214940
aucuggaacaccugauuaa

SEQ ID NO: 214942 - RNA, 19 nt, Artificial Sequence
  Description of Artificial Sequence: Synthetic oligonucleotide
  Sense strand starting at position 749 of SEQ ID NO: 2769
ucagguguuccagauccua

SEQ ID NO: 214943 - RNA, 19 nt, Artificial Sequence
  Description of Artificial Sequence: Synthetic oligonucleotide
  Antisense strand to SEQ ID NO: 214942
uaggaucuggaacaccuga

SEQ ID NO: 214944 - RNA, 19 nt, Artificial Sequence
  Description of Artificial Sequence: Synthetic oligonucleotide
  Sense strand starting at position 765 of SEQ ID NO: 2769
cuaguucugguacaacauu

SEQ ID NO: 214945 - RNA, 19 nt, Artificial Sequence
  Description of Artificial Sequence: Synthetic oligonucleotide
  Antisense strand to SEQ ID NO: 214944
aauguuguaccagaacuag

SEQ ID NO: 214946 - RNA, 19 nt, Artificial Sequence
  Description of Artificial Sequence: Synthetic oligonucleotide
  Sense strand starting at position 803 of SEQ ID NO: 2769
uggcaaauuuguuuccuca

SEQ ID NO: 214947 - RNA, 19 nt, Artificial Sequence
  Description of Artificial Sequence: Synthetic oligonucleotide
  Antisense strand to SEQ ID NO: 214946
ugaggaaacaaauuugcca

SEQ ID NO: 214948 - RNA, 19 nt, Artificial Sequence
  Description of Artificial Sequence: Synthetic oligonucleotide
  Sense strand starting at position 843 of SEQ ID NO: 2769
gcuggaugauuaccaaaga

SEQ ID NO: 214949 - RNA, 19 nt, Artificial Sequence
  Description of Artificial Sequence: Synthetic oligonucleotide
  Antisense strand to SEQ ID NO: 214948
ucuuugguaaucauccagc

SEQ ID NO: 214950 - RNA, 19 nt, Artificial Sequence
  Description of Artificial Sequence: Synthetic oligonucleotide
  Sense strand starting at position 971 of SEQ ID NO: 2769
uggucuagaagugagagua

SEQ ID NO: 214951 - RNA, 19 nt, Artificial Sequence
  Description of Artificial Sequence: Synthetic oligonucleotide
  Antisense strand to SEQ ID NO: 214950
uacucucacuucuagacca

SEQ ID NO: 214952 - RNA, 19 nt, Artificial Sequence
  Description of Artificial Sequence: Synthetic oligonucleotide
  Sense strand starting at position 986 of SEQ ID NO: 2769
aguauauagcaguaucuca

SEQ ID NO: 214953 - RNA, 19 nt, Artificial Sequence
  Description of Artificial Sequence: Synthetic oligonucleotide
  Antisense strand to SEQ ID NO: 214952
ugagauacugcuauauacu

SEQ ID NO: 214954 - RNA, 19 nt, Artificial Sequence
  Description of Artificial Sequence: Synthetic oligonucleotide
  Sense strand starting at position 994 of SEQ ID NO: 2769
gcaguaucucaucaccuca

SEQ ID NO: 214955 - RNA, 19 nt, Artificial Sequence
  Description of Artificial Sequence: Synthetic oligonucleotide
  Antisense strand to SEQ ID NO: 214954
ugaggugaugagauacugc

SEQ ID NO: 214956 - RNA, 19 nt, Artificial Sequence
  Description of Artificial Sequence: Synthetic oligonucleotide
  Sense strand starting at position 1255 of SEQ ID NO: 2769
aagugacugcucgaauaac

SEQ ID NO: 214957 - RNA, 19 nt, Artificial Sequence
  Description of Artificial Sequence: Synthetic oligonucleotide
  Antisense strand to SEQ ID NO: 214956
guuauucgagcagucacuu

SEQ ID NO: 214958 - RNA, 19 nt, Artificial Sequence
  Description of Artificial Sequence: Synthetic oligonucleotide
  Sense strand starting at position 1360 of SEQ ID NO: 2769
cugguagaccuguaauuau

SEQ ID NO: 214959 - RNA, 19 nt, Artificial Sequence
  Description of Artificial Sequence: Synthetic oligonucleotide
  Antisense strand to SEQ ID NO: 214958
auaauuacaggucuaccag

SEQ ID NO: 214960 - RNA, 19 nt, Artificial Sequence
  Description of Artificial Sequence: Synthetic oligonucleotide
  Sense strand starting at position 1417 of SEQ ID NO: 2769
gacacuagauuauuaggua

SEQ ID NO: 214961 - RNA, 19 nt, Artificial Sequence
  Description of Artificial Sequence: Synthetic oligonucleotide
  Antisense strand to SEQ ID NO: 214960
uaccuaauaaucuaguguc

SEQ ID NO: 214962 - RNA, 19 nt, Artificial Sequence
  Description of Artificial Sequence: Synthetic oligonucleotide
  Sense strand starting at position 1447 of SEQ ID NO: 2769
gaucuaucuuaaguaaacg

SEQ ID NO: 214963 - RNA, 19 nt, Artificial Sequence
  Description of Artificial Sequence: Synthetic oligonucleotide
  Antisense strand to SEQ ID NO: 214962
cguuuacuuaagauagauc

SEQ ID NO: 214964 - RNA, 19 nt, Artificial Sequence
  Description of Artificial Sequence: Synthetic oligonucleotide
  Sense strand starting at position 1598 of SEQ ID NO: 2769
cauucuggccgacaaagau

SEQ ID NO: 214965 - RNA, 19 nt, Artificial Sequence
  Description of Artificial Sequence: Synthetic oligonucleotide
  Antisense strand to SEQ ID NO: 214964
aucuuugucggccagaaug

SEQ ID NO: 214966 - RNA, 19 nt, Artificial Sequence
  Description of Artificial Sequence: Synthetic oligonucleotide
  Sense strand starting at position 1710 of SEQ ID NO: 2769
gggcuuuaggccuagagaa

SEQ ID NO: 214967 - RNA, 19 nt, Artificial Sequence
  Description of Artificial Sequence: Synthetic oligonucleotide
  Antisense strand to SEQ ID NO: 214966
uucucuaggccuaaagccc

SEQ ID NO: 214968 - RNA, 19 nt, Artificial Sequence
  Description of Artificial Sequence: Synthetic oligonucleotide
  Sense strand starting at position 1881 of SEQ ID NO: 2769
caugaaguuggcgaaggau

SEQ ID NO: 214969 - RNA, 19 nt, Artificial Sequence
  Description of Artificial Sequence: Synthetic oligonucleotide
  Antisense strand to SEQ ID NO: 214968
auccuucgccaacuucaug

SEQ ID NO: 214970 - RNA, 19 nt, Artificial Sequence
  Description of Artificial Sequence: Synthetic oligonucleotide
  Sense strand starting at position 2386 of SEQ ID NO: 2769
cguaguaugcuugcgagaa

SEQ ID NO: 214971 - RNA, 19 nt, Artificial Sequence
  Description of Artificial Sequence: Synthetic oligonucleotide
  Antisense strand to SEQ ID NO: 214970
uucucgcaagcauacuacg

SEQ ID NO: 214972 - RNA, 19 nt, Artificial Sequence
  Description of Artificial Sequence: Synthetic oligonucleotide
  Sense strand starting at position 2409 of SEQ ID NO: 2769
acaauaugauguuucugaa

SEQ ID NO: 214973 - RNA, 19 nt, Artificial Sequence
  Description of Artificial Sequence: Synthetic oligonucleotide
  Antisense strand to SEQ ID NO: 214972
uucagaaacaucauauugu

SEQ ID NO: 214974 - RNA, 19 nt, Artificial Sequence
  Description of Artificial Sequence: Synthetic oligonucleotide
  Sense strand starting at position 2463 of SEQ ID NO: 2769
gacagacagcucugcaaga

SEQ ID NO: 214975 - RNA, 19 nt, Artificial Sequence
  Description of Artificial Sequence: Synthetic oligonucleotide
  Antisense strand to SEQ ID NO: 214974
ucuugcagagcugucuguc

SEQ ID NO: 214976 - RNA, 19 nt, Artificial Sequence
  Description of Artificial Sequence: Synthetic oligonucleotide
  Sense strand starting at position 2464 of SEQ ID NO: 2769
acagacagcucugcaagaa

SEQ ID NO: 214977 - RNA, 19 nt, Artificial Sequence
  Description of Artificial Sequence: Synthetic oligonucleotide
  Antisense strand to SEQ ID NO: 214976
uucuugcagagcugucugu

SEQ ID NO: 214978 - RNA, 19 nt, Artificial Sequence
  Description of Artificial Sequence: Synthetic oligonucleotide
  Sense strand starting at position 2559 of SEQ ID NO: 2769
cgaauacgcguuaggaguu

SEQ ID NO: 214979 - RNA, 19 nt, Artificial Sequence
  Description of Artificial Sequence: Synthetic oligonucleotide
  Antisense strand to SEQ ID NO: 214978
aacuccuaacgcguauucg

SEQ ID NO: 214980 - RNA, 19 nt, Artificial Sequence
  Description of Artificial Sequence: Synthetic oligonucleotide
  Sense strand starting at position 2768 of SEQ ID NO: 2769
ucucuaucaggguaauguu

SEQ ID NO: 214981 - RNA, 19 nt, Artificial Sequence
  Description of Artificial Sequence: Synthetic oligonucleotide
  Antisense strand to SEQ ID NO: 214980
aacauuacccugauagaga

SEQ ID NO: 214982 - RNA, 19 nt, Artificial Sequence
  Description of Artificial Sequence: Synthetic oligonucleotide
  Sense strand starting at position 3101 of SEQ ID NO: 2769
cgaauaagccuuuaugaga

SEQ ID NO: 214983 - RNA, 19 nt, Artificial Sequence
  Description of Artificial Sequence: Synthetic oligonucleotide
  Antisense strand to SEQ ID NO: 214982
ucucauaaaggcuuauucg

SEQ ID NO: 214984 - RNA, 19 nt, Artificial Sequence
  Description of Artificial Sequence: Synthetic oligonucleotide
  Sense strand starting at position 3264 of SEQ ID NO: 2769
gcagaaggcauagguaaga

SEQ ID NO: 214985 - RNA, 19 nt, Artificial Sequence
  Description of Artificial Sequence: Synthetic oligonucleotide
  Antisense strand to SEQ ID NO: 214984
ucuuaccuaugccuucugc

SEQ ID NO: 214986 - RNA, 19 nt, Artificial Sequence
  Description of Artificial Sequence: Synthetic oligonucleotide
  Sense strand starting at position 3285 of SEQ ID NO: 2769
gagauuaaauagucugcca

SEQ ID NO: 214987 - RNA, 19 nt, Artificial Sequence
  Description of Artificial Sequence: Synthetic oligonucleotide
  Antisense strand to SEQ ID NO: 214986
uggcagacuauuuaaucuc

SEQ ID NO: 214988 - RNA, 19 nt, Artificial Sequence
  Description of Artificial Sequence: Synthetic oligonucleotide
  Sense strand starting at position 3288 of SEQ ID NO: 2769
auuaaauagucugccaaag

SEQ ID NO: 214989 - RNA, 19 nt, Artificial Sequence
  Description of Artificial Sequence: Synthetic oligonucleotide
  Antisense strand to SEQ ID NO: 214988
cuuuggcagacuauuuaau

SEQ ID NO: 214990 - RNA, 19 nt, Artificial Sequence
  Description of Artificial Sequence: Synthetic oligonucleotide
  Sense strand starting at position 3605 of SEQ ID NO: 2769
gugucuguucuggcagcaa

SEQ ID NO: 214991 - RNA, 19 nt, Artificial Sequence
  Description of Artificial Sequence: Synthetic oligonucleotide
  Antisense strand to SEQ ID NO: 214990
uugcugccagaacagacac

SEQ ID NO: 214992 - RNA, 19 nt, Artificial Sequence
  Description of Artificial Sequence: Synthetic oligonucleotide
  Sense strand starting at position 3641 of SEQ ID NO: 2769
guucuauuauaagugaaga

SEQ ID NO: 214993 - RNA, 19 nt, Artificial Sequence
  Description of Artificial Sequence: Synthetic oligonucleotide
  Antisense strand to SEQ ID NO: 214992
ucuucacuuauaauagaac

SEQ ID NO: 214994 - RNA, 19 nt, Artificial Sequence
  Description of Artificial Sequence: Synthetic oligonucleotide
  Sense strand starting at position 3735 of SEQ ID NO: 2769
augugaacuuucuccuaga

SEQ ID NO: 214995 - RNA, 19 nt, Artificial Sequence
  Description of Artificial Sequence: Synthetic oligonucleotide
  Antisense strand to SEQ ID NO: 214994
ucuaggagaaaguucacau

SEQ ID NO: 214996 - RNA, 19 nt, Artificial Sequence
  Description of Artificial Sequence: Synthetic oligonucleotide
  Sense strand starting at position 3736 of SEQ ID NO: 2769
ugugaacuuucuccuagaa

SEQ ID NO: 214997 - RNA, 19 nt, Artificial Sequence
  Description of Artificial Sequence: Synthetic oligonucleotide
  Antisense strand to SEQ ID NO: 214996
uucuaggagaaaguucaca

SEQ ID NO: 214998 - RNA, 19 nt, Artificial Sequence
  Description of Artificial Sequence: Synthetic oligonucleotide
  Sense strand starting at position 3873 of SEQ ID NO: 2769
ucuuccuuccuuugaggaa

SEQ ID NO: 214999 - RNA, 19 nt, Artificial Sequence
  Description of Artificial Sequence: Synthetic oligonucleotide
  Antisense strand to SEQ ID NO: 214998
uuccucaaaggaaggaaga

SEQ ID NO: 215000 - RNA, 19 nt, Artificial Sequence
  Description of Artificial Sequence: Synthetic oligonucleotide
  Sense strand starting at position 3888 of SEQ ID NO: 2769
ggaaguacugggcacguaa

SEQ ID NO: 215001 - RNA, 19 nt, Artificial Sequence
  Description of Artificial Sequence: Synthetic oligonucleotide
  Antisense strand to SEQ ID NO: 215000
uuacgugcccaguacuucc

SEQ ID NO: 215002 - RNA, 19 nt, Artificial Sequence
  Description of Artificial Sequence: Synthetic oligonucleotide
  Sense strand starting at position 3977 of SEQ ID NO: 2769
aggaucucauuguccagua

SEQ ID NO: 215003 - RNA, 19 nt, Artificial Sequence
  Description of Artificial Sequence: Synthetic oligonucleotide
  Antisense strand to SEQ ID NO: 215002
uacuggacaaugagauccu

SEQ ID NO: 215004 - RNA, 19 nt, Artificial Sequence
  Description of Artificial Sequence: Synthetic oligonucleotide
  Sense strand starting at position 3978 of SEQ ID NO: 2769
ggaucucauuguccaguaa

SEQ ID NO: 215005 - RNA, 19 nt, Artificial Sequence
  Description of Artificial Sequence: Synthetic oligonucleotide
  Antisense strand to SEQ ID NO: 215004
uuacuggacaaugagaucc

SEQ ID NO: 215006 - RNA, 19 nt, Artificial Sequence
  Description of Artificial Sequence: Synthetic oligonucleotide
  Sense strand starting at position 16 of SEQ ID NO: 2770
ucccuaguccuauaaaugu

SEQ ID NO: 215007 - RNA, 19 nt, Artificial Sequence
  Description of Artificial Sequence: Synthetic oligonucleotide
  Antisense strand to SEQ ID NO: 215006
acauuuauaggacuaggga

SEQ ID NO: 215008 - RNA, 19 nt, Artificial Sequence
  Description of Artificial Sequence: Synthetic oligonucleotide
  Sense strand starting at position 756 of SEQ ID NO: 2770
auacuauggugacuuucua

SEQ ID NO: 215009 - RNA, 19 nt, Artificial Sequence
  Description of Artificial Sequence: Synthetic oligonucleotide
  Antisense strand to SEQ ID NO: 215008
uagaaagucaccauaguau

SEQ ID NO: 215010 - RNA, 19 nt, Artificial Sequence
  Description of Artificial Sequence: Synthetic oligonucleotide
  Sense strand starting at position 944 of SEQ ID NO: 2770
gggaguagguggcuagaaa

SEQ ID NO: 215011 - RNA, 19 nt, Artificial Sequence
  Description of Artificial Sequence: Synthetic oligonucleotide
  Antisense strand to SEQ ID NO: 215010
uuucuagccaccuacuccc

SEQ ID NO: 215012 - RNA, 19 nt, Artificial Sequence
  Description of Artificial Sequence: Synthetic oligonucleotide
  Sense strand starting at position 974 of SEQ ID NO: 2770
aaauaaugaugugaaggaa

SEQ ID NO: 215013 - RNA, 19 nt, Artificial Sequence
  Description of Artificial Sequence: Synthetic oligonucleotide
  Antisense strand to SEQ ID NO: 215012
uuccuucacaucauuauuu

SEQ ID NO: 215014 - RNA, 19 nt, Artificial Sequence
  Description of Artificial Sequence: Synthetic oligonucleotide
  Sense strand starting at position 1058 of SEQ ID NO: 2770
cucucugaugcucauguau

SEQ ID NO: 215015 - RNA, 19 nt, Artificial Sequence
  Description of Artificial Sequence: Synthetic oligonucleotide
  Antisense strand to SEQ ID NO: 215014
auacaugagcaucagagag

SEQ ID NO: 215016 - RNA, 19 nt, Artificial Sequence
  Description of Artificial Sequence: Synthetic oligonucleotide
  Sense strand starting at position 1069 of SEQ ID NO: 2770
ucauguaucuauccuuaga

SEQ ID NO: 215017 - RNA, 19 nt, Artificial Sequence
  Description of Artificial Sequence: Synthetic oligonucleotide
  Antisense strand to SEQ ID NO: 215016
ucuaaggauagauacauga

SEQ ID NO: 215018 - RNA, 19 nt, Artificial Sequence
  Description of Artificial Sequence: Synthetic oligonucleotide
  Sense strand starting at position 1071 of SEQ ID NO: 2770
auguaucuauccuuagaga

SEQ ID NO: 215019 - RNA, 19 nt, Artificial Sequence
  Description of Artificial Sequence: Synthetic oligonucleotide
  Antisense strand to SEQ ID NO: 215018
ucucuaaggauagauacau

SEQ ID NO: 215020 - RNA, 19 nt, Artificial Sequence
  Description of Artificial Sequence: Synthetic oligonucleotide
  Sense strand starting at position 1072 of SEQ ID NO: 2770
uguaucuauccuuagagac

SEQ ID NO: 215021 - RNA, 19 nt, Artificial Sequence
  Description of Artificial Sequence: Synthetic oligonucleotide
  Antisense strand to SEQ ID NO: 215020
gucucuaaggauagauaca

SEQ ID NO: 215022 - RNA, 19 nt, Artificial Sequence
  Description of Artificial Sequence: Synthetic oligonucleotide
  Sense strand starting at position 1211 of SEQ ID NO: 2770
aucuuuaaagcuuguuaug

SEQ ID NO: 215023 - RNA, 19 nt, Artificial Sequence
  Description of Artificial Sequence: Synthetic oligonucleotide
  Antisense strand to SEQ ID NO: 215022
cauaacaagcuuuaaagau

SEQ ID NO: 215024 - RNA, 19 nt, Artificial Sequence
  Description of Artificial Sequence: Synthetic oligonucleotide
  Sense strand starting at position 1217 of SEQ ID NO: 2770
aaagcuuguuauguaaagu

SEQ ID NO: 215025 - RNA, 19 nt, Artificial Sequence
  Description of Artificial Sequence: Synthetic oligonucleotide
  Antisense strand to SEQ ID NO: 215024
acuuuacauaacaagcuuu

SEQ ID NO: 215026 - RNA, 19 nt, Artificial Sequence
  Description of Artificial Sequence: Synthetic oligonucleotide
  Sense strand starting at position 1289 of SEQ ID NO: 2770
gcguaucuuggagaaagug

SEQ ID NO: 215027 - RNA, 19 nt, Artificial Sequence
  Description of Artificial Sequence: Synthetic oligonucleotide
  Antisense strand to SEQ ID NO: 215026
cacuuucuccaagauacgc

SEQ ID NO: 215028 - RNA, 19 nt, Artificial Sequence
  Description of Artificial Sequence: Synthetic oligonucleotide
  Sense strand starting at position 1305 of SEQ ID NO: 2770
guggcaucugagcaggagu

SEQ ID NO: 215029 - RNA, 19 nt, Artificial Sequence
  Description of Artificial Sequence: Synthetic oligonucleotide
  Antisense strand to SEQ ID NO: 215028
acuccugcucagaugccac

SEQ ID NO: 215030 - RNA, 19 nt, Artificial Sequence
  Description of Artificial Sequence: Synthetic oligonucleotide
  Sense strand starting at position 1307 of SEQ ID NO: 2770
ggcaucugagcaggaguau

SEQ ID NO: 215031 - RNA, 19 nt, Artificial Sequence
  Description of Artificial Sequence: Synthetic oligonucleotide
  Antisense strand to SEQ ID NO: 215030
auacuccugcucagaugcc

SEQ ID NO: 215032 - RNA, 19 nt, Artificial Sequence
  Description of Artificial Sequence: Synthetic oligonucleotide
  Sense strand starting at position 1308 of SEQ ID NO: 2770
gcaucugagcaggaguauu

SEQ ID NO: 215033 - RNA, 19 nt, Artificial Sequence
  Description of Artificial Sequence: Synthetic oligonucleotide
  Antisense strand to SEQ ID NO: 215032
aauacuccugcucagaugc

SEQ ID NO: 215034 - RNA, 19 nt, Artificial Sequence
  Description of Artificial Sequence: Synthetic oligonucleotide
  Sense strand starting at position 1558 of SEQ ID NO: 2770
cuucccacugcuggugaaa

SEQ ID NO: 215035 - RNA, 19 nt, Artificial Sequence
  Description of Artificial Sequence: Synthetic oligonucleotide
  Antisense strand to SEQ ID NO: 215034
uuucaccagcagugggaag

SEQ ID NO: 215036 - RNA, 19 nt, Artificial Sequence
  Description of Artificial Sequence: Synthetic oligonucleotide
  Sense strand starting at position 1843 of SEQ ID NO: 2770
guuccaacgccugagaaua

SEQ ID NO: 215037 - RNA, 19 nt, Artificial Sequence
  Description of Artificial Sequence: Synthetic oligonucleotide
  Antisense strand to SEQ ID NO: 215036
uauucucaggcguuggaac

SEQ ID NO: 215038 - RNA, 19 nt, Artificial Sequence
  Description of Artificial Sequence: Synthetic oligonucleotide
  Sense strand starting at position 2103 of SEQ ID NO: 2770
gggcccuuugauuggaaga

SEQ ID NO: 215039 - RNA, 19 nt, Artificial Sequence
  Description of Artificial Sequence: Synthetic oligonucleotide
  Antisense strand to SEQ ID NO: 215038
ucuuccaaucaaagggccc

SEQ ID NO: 215040 - RNA, 19 nt, Artificial Sequence
  Description of Artificial Sequence: Synthetic oligonucleotide
  Sense strand starting at position 2104 of SEQ ID NO: 2770
ggcccuuugauuggaagaa

SEQ ID NO: 215041 - RNA, 19 nt, Artificial Sequence
  Description of Artificial Sequence: Synthetic oligonucleotide
  Antisense strand to SEQ ID NO: 215040
uucuuccaaucaaagggcc

SEQ ID NO: 215042 - RNA, 19 nt, Artificial Sequence
  Description of Artificial Sequence: Synthetic oligonucleotide
  Sense strand starting at position 2408 of SEQ ID NO: 2770
gaggacauaugggucuuau

SEQ ID NO: 215043 - RNA, 19 nt, Artificial Sequence
  Description of Artificial Sequence: Synthetic oligonucleotide
  Antisense strand to SEQ ID NO: 215042
auaagacccauauguccuc

SEQ ID NO: 215044 - RNA, 19 nt, Artificial Sequence
  Description of Artificial Sequence: Synthetic oligonucleotide
  Sense strand starting at position 2556 of SEQ ID NO: 2770
gguauuaaguacccucaca

SEQ ID NO: 215045 - RNA, 19 nt, Artificial Sequence
  Description of Artificial Sequence: Synthetic oligonucleotide
  Antisense strand to SEQ ID NO: 215044
ugugaggguacuuaauacc

SEQ ID NO: 215046 - RNA, 19 nt, Artificial Sequence
  Description of Artificial Sequence: Synthetic oligonucleotide
  Sense strand starting at position 2725 of SEQ ID NO: 2770
ggugccauauaaguagaau

SEQ ID NO: 215047 - RNA, 19 nt, Artificial Sequence
  Description of Artificial Sequence: Synthetic oligonucleotide
  Antisense strand to SEQ ID NO: 215046
auucuacuuauauggcacc

SEQ ID NO: 215048 - RNA, 19 nt, Artificial Sequence
  Description of Artificial Sequence: Synthetic oligonucleotide
  Sense strand starting at position 2728 of SEQ ID NO: 2770
gccauauaaguagaaucau

SEQ ID NO: 215049 - RNA, 19 nt, Artificial Sequence
  Description of Artificial Sequence: Synthetic oligonucleotide
  Antisense strand to SEQ ID NO: 215048
augauucuacuuauauggc

SEQ ID NO: 215050 - RNA, 19 nt, Artificial Sequence
  Description of Artificial Sequence: Synthetic oligonucleotide
  Sense strand starting at position 2851 of SEQ ID NO: 2770
gcauuucguuguguggaga

SEQ ID NO: 215051 - RNA, 19 nt, Artificial Sequence
  Description of Artificial Sequence: Synthetic oligonucleotide
  Antisense strand to SEQ ID NO: 215050
ucuccacacaacgaaaugc

SEQ ID NO: 215052 - RNA, 19 nt, Artificial Sequence
  Description of Artificial Sequence: Synthetic oligonucleotide
  Sense strand starting at position 2852 of SEQ ID NO: 2770
cauuucguuguguggagau

SEQ ID NO: 215053 - RNA, 19 nt, Artificial Sequence
  Description of Artificial Sequence: Synthetic oligonucleotide
  Antisense strand to SEQ ID NO: 215052
aucuccacacaacgaaaug

SEQ ID NO: 215054 - RNA, 19 nt, Artificial Sequence
  Description of Artificial Sequence: Synthetic oligonucleotide
  Sense strand starting at position 3014 of SEQ ID NO: 2770
agugguauuguuggaucaa

SEQ ID NO: 215055 - RNA, 19 nt, Artificial Sequence
  Description of Artificial Sequence: Synthetic oligonucleotide
  Antisense strand to SEQ ID NO: 215054
uugauccaacaauaccacu

SEQ ID NO: 215056 - RNA, 19 nt, Artificial Sequence
  Description of Artificial Sequence: Synthetic oligonucleotide
  Sense strand starting at position 3023 of SEQ ID NO: 2770
guuggaucaaacggcaauu

SEQ ID NO: 215057 - RNA, 19 nt, Artificial Sequence
  Description of Artificial Sequence: Synthetic oligonucleotide
  Antisense strand to SEQ ID NO: 215056
aauugccguuugauccaac

SEQ ID NO: 215058 - RNA, 19 nt, Artificial Sequence
  Description of Artificial Sequence: Synthetic oligonucleotide
  Sense strand starting at position 3082 of SEQ ID NO: 2770
ggugaucucuuguucaagg

SEQ ID NO: 215059 - RNA, 19 nt, Artificial Sequence
  Description of Artificial Sequence: Synthetic oligonucleotide
  Antisense strand to SEQ ID NO: 215058
ccuugaacaagagaucacc

SEQ ID NO: 215060 - RNA, 19 nt, Artificial Sequence
  Description of Artificial Sequence: Synthetic oligonucleotide
  Sense strand starting at position 3116 of SEQ ID NO: 2770
accugaucagcugacuaua

SEQ ID NO: 215061 - RNA, 19 nt, Artificial Sequence
  Description of Artificial Sequence: Synthetic oligonucleotide
  Antisense strand to SEQ ID NO: 215060
uauagucagcugaucaggu

SEQ ID NO: 215062 - RNA, 19 nt, Artificial Sequence
  Description of Artificial Sequence: Synthetic oligonucleotide
  Sense strand starting at position 3203 of SEQ ID NO: 2770
uguccugaaucccuagaca

SEQ ID NO: 215063 - RNA, 19 nt, Artificial Sequence
  Description of Artificial Sequence: Synthetic oligonucleotide
  Antisense strand to SEQ ID NO: 215062
ugucuagggauucaggaca

SEQ ID NO: 215064 - RNA, 19 nt, Artificial Sequence
  Description of Artificial Sequence: Synthetic oligonucleotide
  Sense strand starting at position 3361 of SEQ ID NO: 2770
ggagaagucguguguggag

SEQ ID NO: 215065 - RNA, 19 nt, Artificial Sequence
  Description of Artificial Sequence: Synthetic oligonucleotide
  Antisense strand to SEQ ID NO: 215064
cuccacacacgacuucucc

SEQ ID NO: 215066 - RNA, 19 nt, Artificial Sequence
  Description of Artificial Sequence: Synthetic oligonucleotide
  Sense strand starting at position 3465 of SEQ ID NO: 2770
ucucuuuagccguaaauag

SEQ ID NO: 215067 - RNA, 19 nt, Artificial Sequence
  Description of Artificial Sequence: Synthetic oligonucleotide
  Antisense strand to SEQ ID NO: 215066
cuauuuacggcuaaagaga

SEQ ID NO: 215068 - RNA, 19 nt, Artificial Sequence
  Description of Artificial Sequence: Synthetic oligonucleotide
  Sense strand starting at position 3497 of SEQ ID NO: 2770
gagccaggguuucuggauu

SEQ ID NO: 215069 - RNA, 19 nt, Artificial Sequence
  Description of Artificial Sequence: Synthetic oligonucleotide
  Antisense strand to SEQ ID NO: 215068
aauccagaaacccuggcuc

SEQ ID NO: 215070 - RNA, 19 nt, Artificial Sequence
  Description of Artificial Sequence: Synthetic oligonucleotide
  Sense strand starting at position 3643 of SEQ ID NO: 2770
uuggucuuuguagaaucua

SEQ ID NO: 215071 - RNA, 19 nt, Artificial Sequence
  Description of Artificial Sequence: Synthetic oligonucleotide
  Antisense strand to SEQ ID NO: 215070
uagauucuacaaagaccaa

SEQ ID NO: 215072 - RNA, 19 nt, Artificial Sequence
  Description of Artificial Sequence: Synthetic oligonucleotide
  Sense strand starting at position 3652 of SEQ ID NO: 2770
guagaaucuaggugguuga

SEQ ID NO: 215073 - RNA, 19 nt, Artificial Sequence
  Description of Artificial Sequence: Synthetic oligonucleotide
  Antisense strand to SEQ ID NO: 215072
ucaaccaccuagauucuac

SEQ ID NO: 215074 - RNA, 19 nt, Artificial Sequence
  Description of Artificial Sequence: Synthetic oligonucleotide
  Sense strand starting at position 3653 of SEQ ID NO: 2770
uagaaucuaggugguugaa

SEQ ID NO: 215075 - RNA, 19 nt, Artificial Sequence
  Description of Artificial Sequence: Synthetic oligonucleotide
  Antisense strand to SEQ ID NO: 215074
uucaaccaccuagauucua

SEQ ID NO: 215076 - RNA, 19 nt, Artificial Sequence
  Description of Artificial Sequence: Synthetic oligonucleotide
  Sense strand starting at position 3675 of SEQ ID NO: 2770
augucaguuguagaaguca

SEQ ID NO: 215077 - RNA, 19 nt, Artificial Sequence
  Description of Artificial Sequence: Synthetic oligonucleotide
  Antisense strand to SEQ ID NO: 215076
ugacuucuacaacugacau

SEQ ID NO: 215078 - RNA, 19 nt, Artificial Sequence
  Description of Artificial Sequence: Synthetic oligonucleotide
  Sense strand starting at position 3687 of SEQ ID NO: 2770
gaagucaccuugccugaua

SEQ ID NO: 215079 - RNA, 19 nt, Artificial Sequence
  Description of Artificial Sequence: Synthetic oligonucleotide
  Antisense strand to SEQ ID NO: 215078
uaucaggcaaggugacuuc

SEQ ID NO: 215080 - RNA, 19 nt, Artificial Sequence
  Description of Artificial Sequence: Synthetic oligonucleotide
  Sense strand starting at position 3689 of SEQ ID NO: 2770
agucaccuugccugauauc

SEQ ID NO: 215081 - RNA, 19 nt, Artificial Sequence
  Description of Artificial Sequence: Synthetic oligonucleotide
  Antisense strand to SEQ ID NO: 215080
gauaucaggcaaggugacu

SEQ ID NO: 215082 - RNA, 19 nt, Artificial Sequence
  Description of Artificial Sequence: Synthetic oligonucleotide
  Sense strand starting at position 3870 of SEQ ID NO: 2770
aguccuuuggagcaacaua

SEQ ID NO: 215083 - RNA, 19 nt, Artificial Sequence
  Description of Artificial Sequence: Synthetic oligonucleotide
  Antisense strand to SEQ ID NO: 215082
uauguugcuccaaaggacu

SEQ ID NO: 215084 - RNA, 19 nt, Artificial Sequence
  Description of Artificial Sequence: Synthetic oligonucleotide
  Sense strand starting at position 3920 of SEQ ID NO: 2770
uggguauuugacggucuau

SEQ ID NO: 215085 - RNA, 19 nt, Artificial Sequence
  Description of Artificial Sequence: Synthetic oligonucleotide
  Antisense strand to SEQ ID NO: 215084
auagaccgucaaauaccca

SEQ ID NO: 215086 - RNA, 19 nt, Artificial Sequence
  Description of Artificial Sequence: Synthetic oligonucleotide
  Sense strand starting at position 40 of SEQ ID NO: 2771
gcaaguucccaucaucuga

SEQ ID NO: 215087 - RNA, 19 nt, Artificial Sequence
  Description of Artificial Sequence: Synthetic oligonucleotide
  Antisense strand to SEQ ID NO: 215086
ucagaugaugggaacuugc

SEQ ID NO: 215088 - RNA, 19 nt, Artificial Sequence
  Description of Artificial Sequence: Synthetic oligonucleotide
  Sense strand starting at position 170 of SEQ ID NO: 2771
aguggaaucuguggguuaa

SEQ ID NO: 215089 - RNA, 19 nt, Artificial Sequence
  Description of Artificial Sequence: Synthetic oligonucleotide
  Antisense strand to SEQ ID NO: 215088
uuaacccacagauuccacu

SEQ ID NO: 215090 - RNA, 19 nt, Artificial Sequence
  Description of Artificial Sequence: Synthetic oligonucleotide
  Sense strand starting at position 171 of SEQ ID NO: 2771
guggaaucuguggguuaau

SEQ ID NO: 215091 - RNA, 19 nt, Artificial Sequence
  Description of Artificial Sequence: Synthetic oligonucleotide
  Antisense strand to SEQ ID NO: 215090
auuaacccacagauuccac

SEQ ID NO: 215092 - RNA, 19 nt, Artificial Sequence
  Description of Artificial Sequence: Synthetic oligonucleotide
  Sense strand starting at position 172 of SEQ ID NO: 2771
uggaaucuguggguuaauu

SEQ ID NO: 215093 - RNA, 19 nt, Artificial Sequence
  Description of Artificial Sequence: Synthetic oligonucleotide
  Antisense strand to SEQ ID NO: 215092
aauuaacccacagauucca

SEQ ID NO: 215094 - RNA, 19 nt, Artificial Sequence
  Description of Artificial Sequence: Synthetic oligonucleotide
  Sense strand starting at position 344 of SEQ ID NO: 2771
gaguccugacuuugguuaa

SEQ ID NO: 215095 - RNA, 19 nt, Artificial Sequence
  Description of Artificial Sequence: Synthetic oligonucleotide
  Antisense strand to SEQ ID NO: 215094
uuaaccaaagucaggacuc

SEQ ID NO: 215096 - RNA, 19 nt, Artificial Sequence
  Description of Artificial Sequence: Synthetic oligonucleotide
  Sense strand starting at position 358 of SEQ ID NO: 2771
guuaaccuuaccugggaga

SEQ ID NO: 215097 - RNA, 19 nt, Artificial Sequence
  Description of Artificial Sequence: Synthetic oligonucleotide
  Antisense strand to SEQ ID NO: 215096
ucucccagguaagguuaac

SEQ ID NO: 215098 - RNA, 19 nt, Artificial Sequence
  Description of Artificial Sequence: Synthetic oligonucleotide
  Sense strand starting at position 612 of SEQ ID NO: 2771
uaucuauauggucgcaaca

SEQ ID NO: 215099 - RNA, 19 nt, Artificial Sequence
  Description of Artificial Sequence: Synthetic oligonucleotide
  Antisense strand to SEQ ID NO: 215098
uguugcgaccauauagaua

SEQ ID NO: 215100 - RNA, 19 nt, Artificial Sequence
  Description of Artificial Sequence: Synthetic oligonucleotide
  Sense strand starting at position 614 of SEQ ID NO: 2771
ucuauauggucgcaacauc

SEQ ID NO: 215101 - RNA, 19 nt, Artificial Sequence
  Description of Artificial Sequence: Synthetic oligonucleotide
  Antisense strand to SEQ ID NO: 215100
gauguugcgaccauauaga

SEQ ID NO: 215102 - RNA, 19 nt, Artificial Sequence
  Description of Artificial Sequence: Synthetic oligonucleotide
  Sense strand starting at position 645 of SEQ ID NO: 2771
cucccaaucccuugaugag

SEQ ID NO: 215103 - RNA, 19 nt, Artificial Sequence
  Description of Artificial Sequence: Synthetic oligonucleotide
  Antisense strand to SEQ ID NO: 215102
cucaucaagggauugggag

SEQ ID NO: 215104 - RNA, 19 nt, Artificial Sequence
  Description of Artificial Sequence: Synthetic oligonucleotide
  Sense strand starting at position 687 of SEQ ID NO: 2771
cccucauaucgagagguca

SEQ ID NO: 215105 - RNA, 19 nt, Artificial Sequence
  Description of Artificial Sequence: Synthetic oligonucleotide
  Antisense strand to SEQ ID NO: 215104
ugaccucucgauaugaggg

SEQ ID NO: 215106 - RNA, 19 nt, Artificial Sequence
  Description of Artificial Sequence: Synthetic oligonucleotide
  Sense strand starting at position 689 of SEQ ID NO: 2771
cucauaucgagaggucagu

SEQ ID NO: 215107 - RNA, 19 nt, Artificial Sequence
  Description of Artificial Sequence: Synthetic oligonucleotide
  Antisense strand to SEQ ID NO: 215106
acugaccucucgauaugag

SEQ ID NO: 215108 - RNA, 19 nt, Artificial Sequence
  Description of Artificial Sequence: Synthetic oligonucleotide
  Sense strand starting at position 699 of SEQ ID NO: 2771
gaggucaguuaccgucgua

SEQ ID NO: 215109 - RNA, 19 nt, Artificial Sequence
  Description of Artificial Sequence: Synthetic oligonucleotide
  Antisense strand to SEQ ID NO: 215108
uacgacgguaacugaccuc

SEQ ID NO: 215110 - RNA, 19 nt, Artificial Sequence
  Description of Artificial Sequence: Synthetic oligonucleotide
  Sense strand starting at position 702 of SEQ ID NO: 2771
gucaguuaccgucguaaau

SEQ ID NO: 215111 - RNA, 19 nt, Artificial Sequence
  Description of Artificial Sequence: Synthetic oligonucleotide
  Antisense strand to SEQ ID NO: 215110
auuuacgacgguaacugac

SEQ ID NO: 215112 - RNA, 19 nt, Artificial Sequence
  Description of Artificial Sequence: Synthetic oligonucleotide
  Sense strand starting at position 704 of SEQ ID NO: 2771
caguuaccgucguaaauaa

SEQ ID NO: 215113 - RNA, 19 nt, Artificial Sequence
  Description of Artificial Sequence: Synthetic oligonucleotide
  Antisense strand to SEQ ID NO: 215112
uuauuuacgacgguaacug

SEQ ID NO: 215114 - RNA, 19 nt, Artificial Sequence
  Description of Artificial Sequence: Synthetic oligonucleotide
  Sense strand starting at position 711 of SEQ ID NO: 2771
cgucguaaauaaucguagu

SEQ ID NO: 215115 - RNA, 19 nt, Artificial Sequence
  Description of Artificial Sequence: Synthetic oligonucleotide
  Antisense strand to SEQ ID NO: 215114
acuacgauuauuuacgacg

SEQ ID NO: 215116 - RNA, 19 nt, Artificial Sequence
  Description of Artificial Sequence: Synthetic oligonucleotide
  Sense strand starting at position 712 of SEQ ID NO: 2771
gucguaaauaaucguagua

SEQ ID NO: 215117 - RNA, 19 nt, Artificial Sequence
  Description of Artificial Sequence: Synthetic oligonucleotide
  Antisense strand to SEQ ID NO: 215116
uacuacgauuauuuacgac

SEQ ID NO: 215118 - RNA, 19 nt, Artificial Sequence
  Description of Artificial Sequence: Synthetic oligonucleotide
  Sense strand starting at position 714 of SEQ ID NO: 2771
cguaaauaaucguaguaau

SEQ ID NO: 215119 - RNA, 19 nt, Artificial Sequence
  Description of Artificial Sequence: Synthetic oligonucleotide
  Antisense strand to SEQ ID NO: 215118
auuacuacgauuauuuacg

SEQ ID NO: 215120 - RNA, 19 nt, Artificial Sequence
  Description of Artificial Sequence: Synthetic oligonucleotide
  Sense strand starting at position 741 of SEQ ID NO: 2771
uuucuaaugccagaauuga

SEQ ID NO: 215121 - RNA, 19 nt, Artificial Sequence
  Description of Artificial Sequence: Synthetic oligonucleotide
  Antisense strand to SEQ ID NO: 215120
ucaauucuggcauuagaaa

SEQ ID NO: 215122 - RNA, 19 nt, Artificial Sequence
  Description of Artificial Sequence: Synthetic oligonucleotide
  Sense strand starting at position 791 of SEQ ID NO: 2771
gguacauggcggcaugaaa

SEQ ID NO: 215123 - RNA, 19 nt, Artificial Sequence
  Description of Artificial Sequence: Synthetic oligonucleotide
  Antisense strand to SEQ ID NO: 215122
uuucaugccgccauguacc

SEQ ID NO: 215124 - RNA, 19 nt, Artificial Sequence
  Description of Artificial Sequence: Synthetic oligonucleotide
  Sense strand starting at position 819 of SEQ ID NO: 2771
gcuucugacucuucugcau

SEQ ID NO: 215125 - RNA, 19 nt, Artificial Sequence
  Description of Artificial Sequence: Synthetic oligonucleotide
  Antisense strand to SEQ ID NO: 215124
augcagaagagucagaagc

SEQ ID NO: 215126 - RNA, 19 nt, Artificial Sequence
  Description of Artificial Sequence: Synthetic oligonucleotide
  Sense strand starting at position 865 of SEQ ID NO: 2771
ugaagcucucauugccaca

SEQ ID NO: 215127 - RNA, 19 nt, Artificial Sequence
  Description of Artificial Sequence: Synthetic oligonucleotide
  Antisense strand to SEQ ID NO: 215126
uguggcaaugagagcuuca

SEQ ID NO: 215128 - RNA, 19 nt, Artificial Sequence
  Description of Artificial Sequence: Synthetic oligonucleotide
  Sense strand starting at position 913 of SEQ ID NO: 2771
gcucacagguucuacgaau

SEQ ID NO: 215129 - RNA, 19 nt, Artificial Sequence
  Description of Artificial Sequence: Synthetic oligonucleotide
  Antisense strand to SEQ ID NO: 215128
auucguagaaccugugagc

SEQ ID NO: 215130 - RNA, 19 nt, Artificial Sequence
  Description of Artificial Sequence: Synthetic oligonucleotide
  Sense strand starting at position 920 of SEQ ID NO: 2771
gguucuacgaauggucagu

SEQ ID NO: 215131 - RNA, 19 nt, Artificial Sequence
  Description of Artificial Sequence: Synthetic oligonucleotide
  Antisense strand to SEQ ID NO: 215130
acugaccauucguagaacc

SEQ ID NO: 215132 - RNA, 19 nt, Artificial Sequence
  Description of Artificial Sequence: Synthetic oligonucleotide
  Sense strand starting at position 922 of SEQ ID NO: 2771
uucuacgaauggucaguau

SEQ ID NO: 215133 - RNA, 19 nt, Artificial Sequence
  Description of Artificial Sequence: Synthetic oligonucleotide
  Antisense strand to SEQ ID NO: 215132
auacugaccauucguagaa

SEQ ID NO: 215134 - RNA, 19 nt, Artificial Sequence
  Description of Artificial Sequence: Synthetic oligonucleotide
  Sense strand starting at position 1138 of SEQ ID NO: 2771
uucgauuagcuccauugua

SEQ ID NO: 215135 - RNA, 19 nt, Artificial Sequence
  Description of Artificial Sequence: Synthetic oligonucleotide
  Antisense strand to SEQ ID NO: 215134
uacaauggagcuaaucgaa

SEQ ID NO: 215136 - RNA, 19 nt, Artificial Sequence
  Description of Artificial Sequence: Synthetic oligonucleotide
  Sense strand starting at position 1198 of SEQ ID NO: 2771
cagagcgucucugccaaua

SEQ ID NO: 215137 - RNA, 19 nt, Artificial Sequence
  Description of Artificial Sequence: Synthetic oligonucleotide
  Antisense strand to SEQ ID NO: 215136
uauuggcagagacgcucug

SEQ ID NO: 215138 - RNA, 19 nt, Artificial Sequence
  Description of Artificial Sequence: Synthetic oligonucleotide
  Sense strand starting at position 1254 of SEQ ID NO: 2771
ggcuuaacucagcacuugu

SEQ ID NO: 215139 - RNA, 19 nt, Artificial Sequence
  Description of Artificial Sequence: Synthetic oligonucleotide
  Antisense strand to SEQ ID NO: 215138
acaagugcugaguuaagcc

SEQ ID NO: 215140 - RNA, 19 nt, Artificial Sequence
  Description of Artificial Sequence: Synthetic oligonucleotide
  Sense strand starting at position 1685 of SEQ ID NO: 2771
gcgaccuacugguuggaua

SEQ ID NO: 215141 - RNA, 19 nt, Artificial Sequence
  Description of Artificial Sequence: Synthetic oligonucleotide
  Antisense strand to SEQ ID NO: 215140
uauccaaccaguaggucgc

SEQ ID NO: 215142 - RNA, 19 nt, Artificial Sequence
  Description of Artificial Sequence: Synthetic oligonucleotide
  Sense strand starting at position 1686 of SEQ ID NO: 2771
cgaccuacugguuggauaa

SEQ ID NO: 215143 - RNA, 19 nt, Artificial Sequence
  Description of Artificial Sequence: Synthetic oligonucleotide
  Antisense strand to SEQ ID NO: 215142
uuauccaaccaguaggucg

SEQ ID NO: 215144 - RNA, 19 nt, Artificial Sequence
  Description of Artificial Sequence: Synthetic oligonucleotide
  Sense strand starting at position 1687 of SEQ ID NO: 2771
gaccuacugguuggauaaa

SEQ ID NO: 215145 - RNA, 19 nt, Artificial Sequence
  Description of Artificial Sequence: Synthetic oligonucleotide
  Antisense strand to SEQ ID NO: 215144
uuuauccaaccaguagguc

SEQ ID NO: 215146 - RNA, 19 nt, Artificial Sequence
  Description of Artificial Sequence: Synthetic oligonucleotide
  Sense strand starting at position 514 of SEQ ID NO: 2772
gaugauuguggugaugguu

SEQ ID NO: 215147 - RNA, 19 nt, Artificial Sequence
  Description of Artificial Sequence: Synthetic oligonucleotide
  Antisense strand to SEQ ID NO: 215146
aaccaucaccacaaucauc

SEQ ID NO: 215148 - RNA, 19 nt, Artificial Sequence
  Description of Artificial Sequence: Synthetic oligonucleotide
  Sense strand starting at position 624 of SEQ ID NO: 2772
uuaucucuuucugugagga

SEQ ID NO: 215149 - RNA, 19 nt, Artificial Sequence
  Description of Artificial Sequence: Synthetic oligonucleotide
  Antisense strand to SEQ ID NO: 215148
uccucacagaaagagauaa

SEQ ID NO: 215150 - RNA, 19 nt, Artificial Sequence
  Description of Artificial Sequence: Synthetic oligonucleotide
  Sense strand starting at position 625 of SEQ ID NO: 2772
uaucucuuucugugaggau

SEQ ID NO: 215151 - RNA, 19 nt, Artificial Sequence
  Description of Artificial Sequence: Synthetic oligonucleotide
  Antisense strand to SEQ ID NO: 215150
auccucacagaaagagaua

SEQ ID NO: 215152 - RNA, 19 nt, Artificial Sequence
  Description of Artificial Sequence: Synthetic oligonucleotide
  Sense strand starting at position 766 of SEQ ID NO: 2772
aaagguaaaugcccaguaa

SEQ ID NO: 215153 - RNA, 19 nt, Artificial Sequence
  Description of Artificial Sequence: Synthetic oligonucleotide
  Antisense strand to SEQ ID NO: 215152
uuacugggcauuuaccuuu

SEQ ID NO: 215154 - RNA, 19 nt, Artificial Sequence
  Description of Artificial Sequence: Synthetic oligonucleotide
  Sense strand starting at position 767 of SEQ ID NO: 2772
aagguaaaugcccaguaau

SEQ ID NO: 215155 - RNA, 19 nt, Artificial Sequence
  Description of Artificial Sequence: Synthetic oligonucleotide
  Antisense strand to SEQ ID NO: 215154
auuacugggcauuuaccuu

SEQ ID NO: 215156 - RNA, 19 nt, Artificial Sequence
  Description of Artificial Sequence: Synthetic oligonucleotide
  Sense strand starting at position 835 of SEQ ID NO: 2772
ugcuguugaacugagacau

SEQ ID NO: 215157 - RNA, 19 nt, Artificial Sequence
  Description of Artificial Sequence: Synthetic oligonucleotide
  Antisense strand to SEQ ID NO: 215156
augucucaguucaacagca

SEQ ID NO: 215158 - RNA, 19 nt, Artificial Sequence
  Description of Artificial Sequence: Synthetic oligonucleotide
  Sense strand starting at position 960 of SEQ ID NO: 2772
caggguuucccucaugaac

SEQ ID NO: 215159 - RNA, 19 nt, Artificial Sequence
  Description of Artificial Sequence: Synthetic oligonucleotide
  Antisense strand to SEQ ID NO: 215158
guucaugagggaaacccug

SEQ ID NO: 215160 - RNA, 19 nt, Artificial Sequence
  Description of Artificial Sequence: Synthetic oligonucleotide
  Sense strand starting at position 1014 of SEQ ID NO: 2772
cuuuaucuguucccaggga

SEQ ID NO: 215161 - RNA, 19 nt, Artificial Sequence
  Description of Artificial Sequence: Synthetic oligonucleotide
  Antisense strand to SEQ ID NO: 215160
ucccugggaacagauaaag

SEQ ID NO: 215162 - RNA, 19 nt, Artificial Sequence
  Description of Artificial Sequence: Synthetic oligonucleotide
  Sense strand starting at position 1118 of SEQ ID NO: 2772
ggacuuugugcugaaagga

SEQ ID NO: 215163 - RNA, 19 nt, Artificial Sequence
  Description of Artificial Sequence: Synthetic oligonucleotide
  Antisense strand to SEQ ID NO: 215162
uccuuucagcacaaagucc

SEQ ID NO: 215164 - RNA, 19 nt, Artificial Sequence
  Description of Artificial Sequence: Synthetic oligonucleotide
  Sense strand starting at position 1181 of SEQ ID NO: 2772
caaagagagucacaagaga

SEQ ID NO: 215165 - RNA, 19 nt, Artificial Sequence
  Description of Artificial Sequence: Synthetic oligonucleotide
  Antisense strand to SEQ ID NO: 215164
ucucuugugacucucuuug

SEQ ID NO: 215166 - RNA, 19 nt, Artificial Sequence
  Description of Artificial Sequence: Synthetic oligonucleotide
  Sense strand starting at position 1305 of SEQ ID NO: 2772
ggcaguguccaaggugaga

SEQ ID NO: 215167 - RNA, 19 nt, Artificial Sequence
  Description of Artificial Sequence: Synthetic oligonucleotide
  Antisense strand to SEQ ID NO: 215166
ucucaccuuggacacugcc

SEQ ID NO: 215168 - RNA, 19 nt, Artificial Sequence
  Description of Artificial Sequence: Synthetic oligonucleotide
  Sense strand starting at position 1481 of SEQ ID NO: 2772
gcuagauguggauauggua

SEQ ID NO: 215169 - RNA, 19 nt, Artificial Sequence
  Description of Artificial Sequence: Synthetic oligonucleotide
  Antisense strand to SEQ ID NO: 215168
uaccauauccacaucuagc

SEQ ID NO: 215170 - RNA, 19 nt, Artificial Sequence
  Description of Artificial Sequence: Synthetic oligonucleotide
  Sense strand starting at position 1875 of SEQ ID NO: 2772
gggagacacacugguuauc

SEQ ID NO: 215171 - RNA, 19 nt, Artificial Sequence
  Description of Artificial Sequence: Synthetic oligonucleotide
  Antisense strand to SEQ ID NO: 215170
gauaaccagugugucuccc

SEQ ID NO: 215172 - RNA, 19 nt, Artificial Sequence
  Description of Artificial Sequence: Synthetic oligonucleotide
  Sense strand starting at position 1884 of SEQ ID NO: 2772
acugguuaucugugcagaa

SEQ ID NO: 215173 - RNA, 19 nt, Artificial Sequence
  Description of Artificial Sequence: Synthetic oligonucleotide
  Antisense strand to SEQ ID NO: 215172
uucugcacagauaaccagu

SEQ ID NO: 215174 - RNA, 19 nt, Artificial Sequence
  Description of Artificial Sequence: Synthetic oligonucleotide
  Sense strand starting at position 1885 of SEQ ID NO: 2772
cugguuaucugugcagaag

SEQ ID NO: 215175 - RNA, 19 nt, Artificial Sequence
  Description of Artificial Sequence: Synthetic oligonucleotide
  Antisense strand to SEQ ID NO: 215174
cuucugcacagauaaccag

SEQ ID NO: 215176 - RNA, 19 nt, Artificial Sequence
  Description of Artificial Sequence: Synthetic oligonucleotide
  Sense strand starting at position 2065 of SEQ ID NO: 2772
cugccugacucugcagaaa

SEQ ID NO: 215177 - RNA, 19 nt, Artificial Sequence
  Description of Artificial Sequence: Synthetic oligonucleotide
  Antisense strand to SEQ ID NO: 215176
uuucugcagagucaggcag

SEQ ID NO: 215178 - RNA, 19 nt, Artificial Sequence
  Description of Artificial Sequence: Synthetic oligonucleotide
  Sense strand starting at position 2367 of SEQ ID NO: 2772
gucagugcggccgauauuu

SEQ ID NO: 215179 - RNA, 19 nt, Artificial Sequence
  Description of Artificial Sequence: Synthetic oligonucleotide
  Antisense strand to SEQ ID NO: 215178
aaauaucggccgcacugac

SEQ ID NO: 215180 - RNA, 19 nt, Artificial Sequence
  Description of Artificial Sequence: Synthetic oligonucleotide
  Sense strand starting at position 2451 of SEQ ID NO: 2772
ggaggaugugcggagguua

SEQ ID NO: 215181 - RNA, 19 nt, Artificial Sequence
  Description of Artificial Sequence: Synthetic oligonucleotide
  Antisense strand to SEQ ID NO: 215180
uaaccuccgcacauccucc

SEQ ID NO: 215182 - RNA, 19 nt, Artificial Sequence
  Description of Artificial Sequence: Synthetic oligonucleotide
  Sense strand starting at position 2453 of SEQ ID NO: 2772
aggaugugcggagguuaua

SEQ ID NO: 215183 - RNA, 19 nt, Artificial Sequence
  Description of Artificial Sequence: Synthetic oligonucleotide
  Antisense strand to SEQ ID NO: 215182
uauaaccuccgcacauccu

SEQ ID NO: 215184 - RNA, 19 nt, Artificial Sequence
  Description of Artificial Sequence: Synthetic oligonucleotide
  Sense strand starting at position 2456 of SEQ ID NO: 2772
augugcggagguuauauaa

SEQ ID NO: 215185 - RNA, 19 nt, Artificial Sequence
  Description of Artificial Sequence: Synthetic oligonucleotide
  Antisense strand to SEQ ID NO: 215184
uuauauaaccuccgcacau

SEQ ID NO: 215186 - RNA, 19 nt, Artificial Sequence
  Description of Artificial Sequence: Synthetic oligonucleotide
  Sense strand starting at position 2492 of SEQ ID NO: 2772
guacaagggacuugagcau

SEQ ID NO: 215187 - RNA, 19 nt, Artificial Sequence
  Description of Artificial Sequence: Synthetic oligonucleotide
  Antisense strand to SEQ ID NO: 215186
augcucaagucccuuguac

SEQ ID NO: 215188 - RNA, 19 nt, Artificial Sequence
  Description of Artificial Sequence: Synthetic oligonucleotide
  Sense strand starting at position 2632 of SEQ ID NO: 2772
uagaguuuccugggugaca

SEQ ID NO: 215189 - RNA, 19 nt, Artificial Sequence
  Description of Artificial Sequence: Synthetic oligonucleotide
  Antisense strand to SEQ ID NO: 215188
ugucacccaggaaacucua

SEQ ID NO: 215190 - RNA, 19 nt, Artificial Sequence
  Description of Artificial Sequence: Synthetic oligonucleotide
  Sense strand starting at position 2766 of SEQ ID NO: 2772
gaccaaacaugggauuaga

SEQ ID NO: 215191 - RNA, 19 nt, Artificial Sequence
  Description of Artificial Sequence: Synthetic oligonucleotide
  Antisense strand to SEQ ID NO: 215190
ucuaaucccauguuugguc

SEQ ID NO: 215192 - RNA, 19 nt, Artificial Sequence
  Description of Artificial Sequence: Synthetic oligonucleotide
  Sense strand starting at position 2900 of SEQ ID NO: 2772
gagcuuagggauuggugau

SEQ ID NO: 215193 - RNA, 19 nt, Artificial Sequence
  Description of Artificial Sequence: Synthetic oligonucleotide
  Antisense strand to SEQ ID NO: 215192
aucaccaaucccuaagcuc

SEQ ID NO: 215194 - RNA, 19 nt, Artificial Sequence
  Description of Artificial Sequence: Synthetic oligonucleotide
  Sense strand starting at position 2906 of SEQ ID NO: 2772
agggauuggugauccacau

SEQ ID NO: 215195 - RNA, 19 nt, Artificial Sequence
  Description of Artificial Sequence: Synthetic oligonucleotide
  Antisense strand to SEQ ID NO: 215194
auguggaucaccaaucccu

SEQ ID NO: 215196 - RNA, 19 nt, Artificial Sequence
  Description of Artificial Sequence: Synthetic oligonucleotide
  Sense strand starting at position 2910 of SEQ ID NO: 2772
auuggugauccacaugcca

SEQ ID NO: 215197 - RNA, 19 nt, Artificial Sequence
  Description of Artificial Sequence: Synthetic oligonucleotide
  Antisense strand to SEQ ID NO: 215196
uggcauguggaucaccaau

SEQ ID NO: 215198 - RNA, 19 nt, Artificial Sequence
  Description of Artificial Sequence: Synthetic oligonucleotide
  Sense strand starting at position 2934 of SEQ ID NO: 2772
gugucaugcccugacucca

SEQ ID NO: 215199 - RNA, 19 nt, Artificial Sequence
  Description of Artificial Sequence: Synthetic oligonucleotide
  Antisense strand to SEQ ID NO: 215198
uggagucagggcaugacac

SEQ ID NO: 215200 - RNA, 19 nt, Artificial Sequence
  Description of Artificial Sequence: Synthetic oligonucleotide
  Sense strand starting at position 3178 of SEQ ID NO: 2772
guacgaucauaagucaaug

SEQ ID NO: 215201 - RNA, 19 nt, Artificial Sequence
  Description of Artificial Sequence: Synthetic oligonucleotide
  Antisense strand to SEQ ID NO: 215200
cauugacuuaugaucguac

SEQ ID NO: 215202 - RNA, 19 nt, Artificial Sequence
  Description of Artificial Sequence: Synthetic oligonucleotide
  Sense strand starting at position 3216 of SEQ ID NO: 2772
acaagugauccucaguucu

SEQ ID NO: 215203 - RNA, 19 nt, Artificial Sequence
  Description of Artificial Sequence: Synthetic oligonucleotide
  Antisense strand to SEQ ID NO: 215202
agaacugaggaucacuugu

SEQ ID NO: 215204 - RNA, 19 nt, Artificial Sequence
  Description of Artificial Sequence: Synthetic oligonucleotide
  Sense strand starting at position 3473 of SEQ ID NO: 2772
uguaguugaccaggcagaa

SEQ ID NO: 215205 - RNA, 19 nt, Artificial Sequence
  Description of Artificial Sequence: Synthetic oligonucleotide
  Antisense strand to SEQ ID NO: 215204
uucugccuggucaacuaca

SEQ ID NO: 215206 - RNA, 19 nt, Artificial Sequence
  Description of Artificial Sequence: Synthetic oligonucleotide
  Sense strand starting at position 3549 of SEQ ID NO: 2772
gaggccuuacccugugaga

SEQ ID NO: 215207 - RNA, 19 nt, Artificial Sequence
  Description of Artificial Sequence: Synthetic oligonucleotide
  Antisense strand to SEQ ID NO: 215206
ucucacaggguaaggccuc

SEQ ID NO: 215208 - RNA, 19 nt, Artificial Sequence
  Description of Artificial Sequence: Synthetic oligonucleotide
  Sense strand starting at position 3551 of SEQ ID NO: 2772
ggccuuacccugugagauc

SEQ ID NO: 215209 - RNA, 19 nt, Artificial Sequence
  Description of Artificial Sequence: Synthetic oligonucleotide
  Antisense strand to SEQ ID NO: 215208
gaucucacaggguaaggcc

SEQ ID NO: 215210 - RNA, 19 nt, Artificial Sequence
  Description of Artificial Sequence: Synthetic oligonucleotide
  Sense strand starting at position 3571 of SEQ ID NO: 2772
gugcuaacucuggaaguua

SEQ ID NO: 215211 - RNA, 19 nt, Artificial Sequence
  Description of Artificial Sequence: Synthetic oligonucleotide
  Antisense strand to SEQ ID NO: 215210
uaacuuccagaguuagcac

SEQ ID NO: 215212 - RNA, 19 nt, Artificial Sequence
  Description of Artificial Sequence: Synthetic oligonucleotide
  Sense strand starting at position 3589 of SEQ ID NO: 2772
aguguuagaaucuguuuga

SEQ ID NO: 215213 - RNA, 19 nt, Artificial Sequence
  Description of Artificial Sequence: Synthetic oligonucleotide
  Antisense strand to SEQ ID NO: 215212
ucaaacagauucuaacacu

SEQ ID NO: 215214 - RNA, 19 nt, Artificial Sequence
  Description of Artificial Sequence: Synthetic oligonucleotide
  Sense strand starting at position 3592 of SEQ ID NO: 2772
guuagaaucuguuugaauu

SEQ ID NO: 215215 - RNA, 19 nt, Artificial Sequence
  Description of Artificial Sequence: Synthetic oligonucleotide
  Antisense strand to SEQ ID NO: 215214
aauucaaacagauucuaac

SEQ ID NO: 215216 - RNA, 19 nt, Artificial Sequence
  Description of Artificial Sequence: Synthetic oligonucleotide
  Sense strand starting at position 3593 of SEQ ID NO: 2772
uuagaaucuguuugaauug

SEQ ID NO: 215217 - RNA, 19 nt, Artificial Sequence
  Description of Artificial Sequence: Synthetic oligonucleotide
  Antisense strand to SEQ ID NO: 215216
caauucaaacagauucuaa

SEQ ID NO: 215218 - RNA, 19 nt, Artificial Sequence
  Description of Artificial Sequence: Synthetic oligonucleotide
  Sense strand starting at position 3598 of SEQ ID NO: 2772
aucuguuugaauuguugga

SEQ ID NO: 215219 - RNA, 19 nt, Artificial Sequence
  Description of Artificial Sequence: Synthetic oligonucleotide
  Antisense strand to SEQ ID NO: 215218
uccaacaauucaaacagau

SEQ ID NO: 215220 - RNA, 19 nt, Artificial Sequence
  Description of Artificial Sequence: Synthetic oligonucleotide
  Sense strand starting at position 3632 of SEQ ID NO: 2772
agagaaucggcugguguca

SEQ ID NO: 215221 - RNA, 19 nt, Artificial Sequence
  Description of Artificial Sequence: Synthetic oligonucleotide
  Antisense strand to SEQ ID NO: 215220
ugacaccagccgauucucu

SEQ ID NO: 215222 - RNA, 19 nt, Artificial Sequence
  Description of Artificial Sequence: Synthetic oligonucleotide
  Sense strand starting at position 3705 of SEQ ID NO: 2772
ccaacuuuagcugauugga

SEQ ID NO: 215223 - RNA, 19 nt, Artificial Sequence
  Description of Artificial Sequence: Synthetic oligonucleotide
  Antisense strand to SEQ ID NO: 215222
uccaaucagcuaaaguugg

SEQ ID NO: 215224 - RNA, 19 nt, Artificial Sequence
  Description of Artificial Sequence: Synthetic oligonucleotide
  Sense strand starting at position 3866 of SEQ ID NO: 2772
ugggccuagcauuagaaga

SEQ ID NO: 215225 - RNA, 19 nt, Artificial Sequence
  Description of Artificial Sequence: Synthetic oligonucleotide
  Antisense strand to SEQ ID NO: 215224
ucuucuaaugcuaggccca

SEQ ID NO: 215226 - RNA, 19 nt, Artificial Sequence
  Description of Artificial Sequence: Synthetic oligonucleotide
  Sense strand starting at position 15 of SEQ ID NO: 2774
uggccuuagugacuggaga

SEQ ID NO: 215227 - RNA, 19 nt, Artificial Sequence
  Description of Artificial Sequence: Synthetic oligonucleotide
  Antisense strand to SEQ ID NO: 215226
ucuccagucacuaaggcca

SEQ ID NO: 215228 - RNA, 19 nt, Artificial Sequence
  Description of Artificial Sequence: Synthetic oligonucleotide
  Sense strand starting at position 16 of SEQ ID NO: 2774
ggccuuagugacuggagaa

SEQ ID NO: 215229 - RNA, 19 nt, Artificial Sequence
  Description of Artificial Sequence: Synthetic oligonucleotide
  Antisense strand to SEQ ID NO: 215228
uucuccagucacuaaggcc

SEQ ID NO: 215230 - RNA, 19 nt, Artificial Sequence
  Description of Artificial Sequence: Synthetic oligonucleotide
  Sense strand starting at position 17 of SEQ ID NO: 2774
gccuuagugacuggagaaa

SEQ ID NO: 215231 - RNA, 19 nt, Artificial Sequence
  Description of Artificial Sequence: Synthetic oligonucleotide
  Antisense strand to SEQ ID NO: 215230
uuucuccagucacuaaggc

SEQ ID NO: 215232 - RNA, 19 nt, Artificial Sequence
  Description of Artificial Sequence: Synthetic oligonucleotide
  Sense strand starting at position 91 of SEQ ID NO: 2774
gggccuguccauuagagau

SEQ ID NO: 215233 - RNA, 19 nt, Artificial Sequence
  Description of Artificial Sequence: Synthetic oligonucleotide
  Antisense strand to SEQ ID NO: 215232
aucucuaauggacaggccc

SEQ ID NO: 215234 - RNA, 19 nt, Artificial Sequence
  Description of Artificial Sequence: Synthetic oligonucleotide
  Sense strand starting at position 97 of SEQ ID NO: 2774
guccauuagagauguugag

SEQ ID NO: 215235 - RNA, 19 nt, Artificial Sequence
  Description of Artificial Sequence: Synthetic oligonucleotide
  Antisense strand to SEQ ID NO: 215234
cucaacaucucuaauggac

SEQ ID NO: 215236 - RNA, 19 nt, Artificial Sequence
  Description of Artificial Sequence: Synthetic oligonucleotide
  Sense strand starting at position 103 of SEQ ID NO: 2774
uagagauguugaguagaua

SEQ ID NO: 215237 - RNA, 19 nt, Artificial Sequence
  Description of Artificial Sequence: Synthetic oligonucleotide
  Antisense strand to SEQ ID NO: 215236
uaucuacucaacaucucua

SEQ ID NO: 215238 - RNA, 19 nt, Artificial Sequence
  Description of Artificial Sequence: Synthetic oligonucleotide
  Sense strand starting at position 111 of SEQ ID NO: 2774
uugaguagauagcuggaua

SEQ ID NO: 215239 - RNA, 19 nt, Artificial Sequence
  Description of Artificial Sequence: Synthetic oligonucleotide
  Antisense strand to SEQ ID NO: 215238
uauccagcuaucuacucaa

SEQ ID NO: 215240 - RNA, 19 nt, Artificial Sequence
  Description of Artificial Sequence: Synthetic oligonucleotide
  Sense strand starting at position 112 of SEQ ID NO: 2774
ugaguagauagcuggauau

SEQ ID NO: 215241 - RNA, 19 nt, Artificial Sequence
  Description of Artificial Sequence: Synthetic oligonucleotide
  Antisense strand to SEQ ID NO: 215240
auauccagcuaucuacuca

SEQ ID NO: 215242 - RNA, 19 nt, Artificial Sequence
  Description of Artificial Sequence: Synthetic oligonucleotide
  Sense strand starting at position 114 of SEQ ID NO: 2774
aguagauagcuggauaugu

SEQ ID NO: 215243 - RNA, 19 nt, Artificial Sequence
  Description of Artificial Sequence: Synthetic oligonucleotide
  Antisense strand to SEQ ID NO: 215242
acauauccagcuaucuacu

SEQ ID NO: 215244 - RNA, 19 nt, Artificial Sequence
  Description of Artificial Sequence: Synthetic oligonucleotide
  Sense strand starting at position 132 of SEQ ID NO: 2774
ugaagaugaaguugugaca

SEQ ID NO: 215245 - RNA, 19 nt, Artificial Sequence
  Description of Artificial Sequence: Synthetic oligonucleotide
  Antisense strand to SEQ ID NO: 215244
ugucacaacuucaucuuca

SEQ ID NO: 215246 - RNA, 19 nt, Artificial Sequence
  Description of Artificial Sequence: Synthetic oligonucleotide
  Sense strand starting at position 144 of SEQ ID NO: 2774
ugugacauaucugugacau

SEQ ID NO: 215247 - RNA, 19 nt, Artificial Sequence
  Description of Artificial Sequence: Synthetic oligonucleotide
  Antisense strand to SEQ ID NO: 215246
augucacagauaugucaca

SEQ ID NO: 215248 - RNA, 19 nt, Artificial Sequence
  Description of Artificial Sequence: Synthetic oligonucleotide
  Sense strand starting at position 145 of SEQ ID NO: 2774
gugacauaucugugacaua

SEQ ID NO: 215249 - RNA, 19 nt, Artificial Sequence
  Description of Artificial Sequence: Synthetic oligonucleotide
  Antisense strand to SEQ ID NO: 215248
uaugucacagauaugucac

SEQ ID NO: 215250 - RNA, 19 nt, Artificial Sequence
  Description of Artificial Sequence: Synthetic oligonucleotide
  Sense strand starting at position 157 of SEQ ID NO: 2774
ugacauaucuggucugaca

SEQ ID NO: 215251 - RNA, 19 nt, Artificial Sequence
  Description of Artificial Sequence: Synthetic oligonucleotide
  Antisense strand to SEQ ID NO: 215250
ugucagaccagauauguca

SEQ ID NO: 215252 - RNA, 19 nt, Artificial Sequence
  Description of Artificial Sequence: Synthetic oligonucleotide
  Sense strand starting at position 159 of SEQ ID NO: 2774
acauaucuggucugacaga

SEQ ID NO: 215253 - RNA, 19 nt, Artificial Sequence
  Description of Artificial Sequence: Synthetic oligonucleotide
  Antisense strand to SEQ ID NO: 215252
ucugucagaccagauaugu

SEQ ID NO: 215254 - RNA, 19 nt, Artificial Sequence
  Description of Artificial Sequence: Synthetic oligonucleotide
  Sense strand starting at position 164 of SEQ ID NO: 2774
ucuggucugacagauaagu

SEQ ID NO: 215255 - RNA, 19 nt, Artificial Sequence
  Description of Artificial Sequence: Synthetic oligonucleotide
  Antisense strand to SEQ ID NO: 215254
acuuaucugucagaccaga

SEQ ID NO: 215256 - RNA, 19 nt, Artificial Sequence
  Description of Artificial Sequence: Synthetic oligonucleotide
  Sense strand starting at position 166 of SEQ ID NO: 2774
uggucugacagauaaguuu

SEQ ID NO: 215257 - RNA, 19 nt, Artificial Sequence
  Description of Artificial Sequence: Synthetic oligonucleotide
  Antisense strand to SEQ ID NO: 215256
aaacuuaucugucagacca

SEQ ID NO: 215258 - RNA, 19 nt, Artificial Sequence
  Description of Artificial Sequence: Synthetic oligonucleotide
  Sense strand starting at position 284 of SEQ ID NO: 2774
gggauacuccaugguuaga

SEQ ID NO: 215259 - RNA, 19 nt, Artificial Sequence
  Description of Artificial Sequence: Synthetic oligonucleotide
  Antisense strand to SEQ ID NO: 215258
ucuaaccauggaguauccc

SEQ ID NO: 215260 - RNA, 19 nt, Artificial Sequence
  Description of Artificial Sequence: Synthetic oligonucleotide
  Sense strand starting at position 373 of SEQ ID NO: 2774
aggugaagucuuugaaagg

SEQ ID NO: 215261 - RNA, 19 nt, Artificial Sequence
  Description of Artificial Sequence: Synthetic oligonucleotide
  Antisense strand to SEQ ID NO: 215260
ccuuucaaagacuucaccu

SEQ ID NO: 215262 - RNA, 19 nt, Artificial Sequence
  Description of Artificial Sequence: Synthetic oligonucleotide
  Sense strand starting at position 481 of SEQ ID NO: 2774
ggucauuagugaccauuac

SEQ ID NO: 215263 - RNA, 19 nt, Artificial Sequence
  Description of Artificial Sequence: Synthetic oligonucleotide
  Antisense strand to SEQ ID NO: 215262
guaauggucacuaaugacc

SEQ ID NO: 215264 - RNA, 19 nt, Artificial Sequence
  Description of Artificial Sequence: Synthetic oligonucleotide
  Sense strand starting at position 482 of SEQ ID NO: 2774
gucauuagugaccauuaca

SEQ ID NO: 215265 - RNA, 19 nt, Artificial Sequence
  Description of Artificial Sequence: Synthetic oligonucleotide
  Antisense strand to SEQ ID NO: 215264
uguaauggucacuaaugac

SEQ ID NO: 215266 - RNA, 19 nt, Artificial Sequence
  Description of Artificial Sequence: Synthetic oligonucleotide
  Sense strand starting at position 502 of SEQ ID NO: 2774
gagcuauccgaucagaaug

SEQ ID NO: 215267 - RNA, 19 nt, Artificial Sequence
  Description of Artificial Sequence: Synthetic oligonucleotide
  Antisense strand to SEQ ID NO: 215266
cauucugaucggauagcuc

SEQ ID NO: 215268 - RNA, 19 nt, Artificial Sequence
  Description of Artificial Sequence: Synthetic oligonucleotide
  Sense strand starting at position 1048 of SEQ ID NO: 2774
uguagaguaauggguuuag

SEQ ID NO: 215269 - RNA, 19 nt, Artificial Sequence
  Description of Artificial Sequence: Synthetic oligonucleotide
  Antisense strand to SEQ ID NO: 215268
cuaaacccauuacucuaca

SEQ ID NO: 215270 - RNA, 19 nt, Artificial Sequence
  Description of Artificial Sequence: Synthetic oligonucleotide
  Sense strand starting at position 1052 of SEQ ID NO: 2774
gaguaauggguuuagcaga

SEQ ID NO: 215271 - RNA, 19 nt, Artificial Sequence
  Description of Artificial Sequence: Synthetic oligonucleotide
  Antisense strand to SEQ ID NO: 215270
ucugcuaaacccauuacuc

SEQ ID NO: 215272 - RNA, 19 nt, Artificial Sequence
  Description of Artificial Sequence: Synthetic oligonucleotide
  Sense strand starting at position 1092 of SEQ ID NO: 2774
ggcugaaugucauucuaag

SEQ ID NO: 215273 - RNA, 19 nt, Artificial Sequence
  Description of Artificial Sequence: Synthetic oligonucleotide
  Antisense strand to SEQ ID NO: 215272
cuuagaaugacauucagcc

SEQ ID NO: 215274 - RNA, 19 nt, Artificial Sequence
  Description of Artificial Sequence: Synthetic oligonucleotide
  Sense strand starting at position 1122 of SEQ ID NO: 2774
guauccugaaggugaggua

SEQ ID NO: 215275 - RNA, 19 nt, Artificial Sequence
  Description of Artificial Sequence: Synthetic oligonucleotide
  Antisense strand to SEQ ID NO: 215274
uaccucaccuucaggauac

SEQ ID NO: 215276 - RNA, 19 nt, Artificial Sequence
  Description of Artificial Sequence: Synthetic oligonucleotide
  Sense strand starting at position 1190 of SEQ ID NO: 2774
uagugaagguggguuagaa

SEQ ID NO: 215277 - RNA, 19 nt, Artificial Sequence
  Description of Artificial Sequence: Synthetic oligonucleotide
  Antisense strand to SEQ ID NO: 215276
uucuaacccaccuucacua

SEQ ID NO: 215278 - RNA, 19 nt, Artificial Sequence
  Description of Artificial Sequence: Synthetic oligonucleotide
  Sense strand starting at position 1344 of SEQ ID NO: 2774
ugguuuguggaguggagaa

SEQ ID NO: 215279 - RNA, 19 nt, Artificial Sequence
  Description of Artificial Sequence: Synthetic oligonucleotide
  Antisense strand to SEQ ID NO: 215278
uucuccacuccacaaacca

SEQ ID NO: 215280 - RNA, 19 nt, Artificial Sequence
  Description of Artificial Sequence: Synthetic oligonucleotide
  Sense strand starting at position 1369 of SEQ ID NO: 2774
gggagaacuugcuucuaau

SEQ ID NO: 215281 - RNA, 19 nt, Artificial Sequence
  Description of Artificial Sequence: Synthetic oligonucleotide
  Antisense strand to SEQ ID NO: 215280
auuagaagcaaguucuccc

SEQ ID NO: 215282 - RNA, 19 nt, Artificial Sequence
  Description of Artificial Sequence: Synthetic oligonucleotide
  Sense strand starting at position 1839 of SEQ ID NO: 2774
gcuuaacauuugcucuagu

SEQ ID NO: 215283 - RNA, 19 nt, Artificial Sequence
  Description of Artificial Sequence: Synthetic oligonucleotide
  Antisense strand to SEQ ID NO: 215282
acuagagcaaauguuaagc

SEQ ID NO: 215284 - RNA, 19 nt, Artificial Sequence
  Description of Artificial Sequence: Synthetic oligonucleotide
  Sense strand starting at position 1952 of SEQ ID NO: 2774
agugcuuagagauaguaac

SEQ ID NO: 215285 - RNA, 19 nt, Artificial Sequence
  Description of Artificial Sequence: Synthetic oligonucleotide
  Antisense strand to SEQ ID NO: 215284
guuacuaucucuaagcacu

SEQ ID NO: 215286 - RNA, 19 nt, Artificial Sequence
  Description of Artificial Sequence: Synthetic oligonucleotide
  Sense strand starting at position 2002 of SEQ ID NO: 2774
ggacaaguaguccaaggua

SEQ ID NO: 215287 - RNA, 19 nt, Artificial Sequence
  Description of Artificial Sequence: Synthetic oligonucleotide
  Antisense strand to SEQ ID NO: 215286
uaccuuggacuacuugucc

SEQ ID NO: 215288 - RNA, 19 nt, Artificial Sequence
  Description of Artificial Sequence: Synthetic oligonucleotide
  Sense strand starting at position 2005 of SEQ ID NO: 2774
caaguaguccaagguagaa

SEQ ID NO: 215289 - RNA, 19 nt, Artificial Sequence
  Description of Artificial Sequence: Synthetic oligonucleotide
  Antisense strand to SEQ ID NO: 215288
uucuaccuuggacuacuug

SEQ ID NO: 215290 - RNA, 19 nt, Artificial Sequence
  Description of Artificial Sequence: Synthetic oligonucleotide
  Sense strand starting at position 2646 of SEQ ID NO: 2774
gaccaugauuccgaauuug

SEQ ID NO: 215291 - RNA, 19 nt, Artificial Sequence
  Description of Artificial Sequence: Synthetic oligonucleotide
  Antisense strand to SEQ ID NO: 215290
caaauucggaaucaugguc

SEQ ID NO: 215292 - RNA, 19 nt, Artificial Sequence
  Description of Artificial Sequence: Synthetic oligonucleotide
  Sense strand starting at position 2681 of SEQ ID NO: 2774
cuuugaaaugaguaccuuu

SEQ ID NO: 215293 - RNA, 19 nt, Artificial Sequence
  Description of Artificial Sequence: Synthetic oligonucleotide
  Antisense strand to SEQ ID NO: 215292
aaagguacucauuucaaag

SEQ ID NO: 215294 - RNA, 19 nt, Artificial Sequence
  Description of Artificial Sequence: Synthetic oligonucleotide
  Sense strand starting at position 3235 of SEQ ID NO: 2774
cacaauagacauuggugau

SEQ ID NO: 215295 - RNA, 19 nt, Artificial Sequence
  Description of Artificial Sequence: Synthetic oligonucleotide
  Antisense strand to SEQ ID NO: 215294
aucaccaaugucuauugug

SEQ ID NO: 215296 - RNA, 19 nt, Artificial Sequence
  Description of Artificial Sequence: Synthetic oligonucleotide
  Sense strand starting at position 3257 of SEQ ID NO: 2774
ggagcacaguaccuagauu

SEQ ID NO: 215297 - RNA, 19 nt, Artificial Sequence
  Description of Artificial Sequence: Synthetic oligonucleotide
  Antisense strand to SEQ ID NO: 215296
aaucuagguacugugcucc

SEQ ID NO: 215298 - RNA, 19 nt, Artificial Sequence
  Description of Artificial Sequence: Synthetic oligonucleotide
  Sense strand starting at position 3273 of SEQ ID NO: 2774
auuggaauccuugaggugu

SEQ ID NO: 215299 - RNA, 19 nt, Artificial Sequence
  Description of Artificial Sequence: Synthetic oligonucleotide
  Antisense strand to SEQ ID NO: 215298
acaccucaaggauuccaau

SEQ ID NO: 215300 - RNA, 19 nt, Artificial Sequence
  Description of Artificial Sequence: Synthetic oligonucleotide
  Sense strand starting at position 3656 of SEQ ID NO: 2774
uguaaagauuuagaaccau

SEQ ID NO: 215301 - RNA, 19 nt, Artificial Sequence
  Description of Artificial Sequence: Synthetic oligonucleotide
  Antisense strand to SEQ ID NO: 215300
augguucuaaaucuuuaca

SEQ ID NO: 215302 - RNA, 19 nt, Artificial Sequence
  Description of Artificial Sequence: Synthetic oligonucleotide
  Sense strand starting at position 3738 of SEQ ID NO: 2774
accuuauaagucuggagca

SEQ ID NO: 215303 - RNA, 19 nt, Artificial Sequence
  Description of Artificial Sequence: Synthetic oligonucleotide
  Antisense strand to SEQ ID NO: 215302
ugcuccagacuuauaaggu

SEQ ID NO: 215304 - RNA, 19 nt, Artificial Sequence
  Description of Artificial Sequence: Synthetic oligonucleotide
  Sense strand starting at position 3740 of SEQ ID NO: 2774
cuuauaagucuggagcaca

SEQ ID NO: 215305 - RNA, 19 nt, Artificial Sequence
  Description of Artificial Sequence: Synthetic oligonucleotide
  Antisense strand to SEQ ID NO: 215304
ugugcuccagacuuauaag

SEQ ID NO: 215306 - RNA, 19 nt, Artificial Sequence
  Description of Artificial Sequence: Synthetic oligonucleotide
  Sense strand starting at position 34 of SEQ ID NO: 2773
gggauacuccaugguuaga

SEQ ID NO: 215307 - RNA, 19 nt, Artificial Sequence
  Description of Artificial Sequence: Synthetic oligonucleotide
  Antisense strand to SEQ ID NO: 215306
ucuaaccauggaguauccc

SEQ ID NO: 215308 - RNA, 19 nt, Artificial Sequence
  Description of Artificial Sequence: Synthetic oligonucleotide
  Sense strand starting at position 123 of SEQ ID NO: 2773
aggugaagucuuugaaagg

SEQ ID NO: 215309 - RNA, 19 nt, Artificial Sequence
  Description of Artificial Sequence: Synthetic oligonucleotide
  Antisense strand to SEQ ID NO: 215308
ccuuucaaagacuucaccu

SEQ ID NO: 215310 - RNA, 19 nt, Artificial Sequence
  Description of Artificial Sequence: Synthetic oligonucleotide
  Sense strand starting at position 160 of SEQ ID NO: 2773
augagcaacugugucaaau

SEQ ID NO: 215311 - RNA, 19 nt, Artificial Sequence
  Description of Artificial Sequence: Synthetic oligonucleotide
  Antisense strand to SEQ ID NO: 215310
auuugacacaguugcucau

SEQ ID NO: 215312 - RNA, 19 nt, Artificial Sequence
  Description of Artificial Sequence: Synthetic oligonucleotide
  Sense strand starting at position 231 of SEQ ID NO: 2773
ggucauuagugaccauuac

SEQ ID NO: 215313 - RNA, 19 nt, Artificial Sequence
  Description of Artificial Sequence: Synthetic oligonucleotide
  Antisense strand to SEQ ID NO: 215312
guaauggucacuaaugacc

SEQ ID NO: 215314 - RNA, 19 nt, Artificial Sequence
  Description of Artificial Sequence: Synthetic oligonucleotide
  Sense strand starting at position 232 of SEQ ID NO: 2773
gucauuagugaccauuaca

SEQ ID NO: 215315 - RNA, 19 nt, Artificial Sequence
  Description of Artificial Sequence: Synthetic oligonucleotide
  Antisense strand to SEQ ID NO: 215314
uguaauggucacuaaugac

SEQ ID NO: 215316 - RNA, 19 nt, Artificial Sequence
  Description of Artificial Sequence: Synthetic oligonucleotide
  Sense strand starting at position 252 of SEQ ID NO: 2773
gagcuauccgaucagaaug

SEQ ID NO: 215317 - RNA, 19 nt, Artificial Sequence
  Description of Artificial Sequence: Synthetic oligonucleotide
  Antisense strand to SEQ ID NO: 215316
cauucugaucggauagcuc

SEQ ID NO: 215318 - RNA, 19 nt, Artificial Sequence
  Description of Artificial Sequence: Synthetic oligonucleotide
  Sense strand starting at position 798 of SEQ ID NO: 2773
uguagaguaauggguuuag

SEQ ID NO: 215319 - RNA, 19 nt, Artificial Sequence
  Description of Artificial Sequence: Synthetic oligonucleotide
  Antisense strand to SEQ ID NO: 215318
cuaaacccauuacucuaca

SEQ ID NO: 215320 - RNA, 19 nt, Artificial Sequence
  Description of Artificial Sequence: Synthetic oligonucleotide
  Sense strand starting at position 802 of SEQ ID NO: 2773
gaguaauggguuuagcaga

SEQ ID NO: 215321 - RNA, 19 nt, Artificial Sequence
  Description of Artificial Sequence: Synthetic oligonucleotide
  Antisense strand to SEQ ID NO: 215320
ucugcuaaacccauuacuc

SEQ ID NO: 215322 - RNA, 19 nt, Artificial Sequence
  Description of Artificial Sequence: Synthetic oligonucleotide
  Sense strand starting at position 813 of SEQ ID NO: 2773
uuagcagauuagguuguaa

SEQ ID NO: 215323 - RNA, 19 nt, Artificial Sequence
  Description of Artificial Sequence: Synthetic oligonucleotide
  Antisense strand to SEQ ID NO: 215322
uuacaaccuaaucugcuaa

SEQ ID NO: 215324 - RNA, 19 nt, Artificial Sequence
  Description of Artificial Sequence: Synthetic oligonucleotide
  Sense strand starting at position 817 of SEQ ID NO: 2773
cagauuagguuguaaggaa

SEQ ID NO: 215325 - RNA, 19 nt, Artificial Sequence
  Description of Artificial Sequence: Synthetic oligonucleotide
  Antisense strand to SEQ ID NO: 215324
uuccuuacaaccuaaucug

SEQ ID NO: 215326 - RNA, 19 nt, Artificial Sequence
  Description of Artificial Sequence: Synthetic oligonucleotide
  Sense strand starting at position 842 of SEQ ID NO: 2773
ggcugaaugucauucuaag

SEQ ID NO: 215327 - RNA, 19 nt, Artificial Sequence
  Description of Artificial Sequence: Synthetic oligonucleotide
  Antisense strand to SEQ ID NO: 215326
cuuagaaugacauucagcc

SEQ ID NO: 215328 - RNA, 19 nt, Artificial Sequence
  Description of Artificial Sequence: Synthetic oligonucleotide
  Sense strand starting at position 872 of SEQ ID NO: 2773
guauccugaaggugaggua

SEQ ID NO: 215329 - RNA, 19 nt, Artificial Sequence
  Description of Artificial Sequence: Synthetic oligonucleotide
  Antisense strand to SEQ ID NO: 215328
uaccucaccuucaggauac

SEQ ID NO: 215330 - RNA, 19 nt, Artificial Sequence
  Description of Artificial Sequence: Synthetic oligonucleotide
  Sense strand starting at position 940 of SEQ ID NO: 2773
uagugaagguggguuagaa

SEQ ID NO: 215331 - RNA, 19 nt, Artificial Sequence
  Description of Artificial Sequence: Synthetic oligonucleotide
  Antisense strand to SEQ ID NO: 215330
uucuaacccaccuucacua

SEQ ID NO: 215332 - RNA, 19 nt, Artificial Sequence
  Description of Artificial Sequence: Synthetic oligonucleotide
  Sense strand starting at position 1094 of SEQ ID NO: 2773
ugguuuguggaguggagaa

SEQ ID NO: 215333 - RNA, 19 nt, Artificial Sequence
  Description of Artificial Sequence: Synthetic oligonucleotide
  Antisense strand to SEQ ID NO: 215332
uucuccacuccacaaacca

SEQ ID NO: 215334 - RNA, 19 nt, Artificial Sequence
  Description of Artificial Sequence: Synthetic oligonucleotide
  Sense strand starting at position 1119 of SEQ ID NO: 2773
gggagaacuugcuucuaau

SEQ ID NO: 215335 - RNA, 19 nt, Artificial Sequence
  Description of Artificial Sequence: Synthetic oligonucleotide
  Antisense strand to SEQ ID NO: 215334
auuagaagcaaguucuccc

SEQ ID NO: 215336 - RNA, 19 nt, Artificial Sequence
  Description of Artificial Sequence: Synthetic oligonucleotide
  Sense strand starting at position 1139 of SEQ ID NO: 2773
ggccuccuugccggaagaa

SEQ ID NO: 215337 - RNA, 19 nt, Artificial Sequence
  Description of Artificial Sequence: Synthetic oligonucleotide
  Antisense strand to SEQ ID NO: 215336
uucuuccggcaaggaggcc

SEQ ID NO: 215338 - RNA, 19 nt, Artificial Sequence
  Description of Artificial Sequence: Synthetic oligonucleotide
  Sense strand starting at position 1305 of SEQ ID NO: 2773
cauauuaaagcgugucaca

SEQ ID NO: 215339 - RNA, 19 nt, Artificial Sequence
  Description of Artificial Sequence: Synthetic oligonucleotide
  Antisense strand to SEQ ID NO: 215338
ugugacacgcuuuaauaug

SEQ ID NO: 215340 - RNA, 19 nt, Artificial Sequence
  Description of Artificial Sequence: Synthetic oligonucleotide
  Sense strand starting at position 1589 of SEQ ID NO: 2773
gcuuaacauuugcucuagu

SEQ ID NO: 215341 - RNA, 19 nt, Artificial Sequence
  Description of Artificial Sequence: Synthetic oligonucleotide
  Antisense strand to SEQ ID NO: 215340
acuagagcaaauguuaagc

SEQ ID NO: 215342 - RNA, 19 nt, Artificial Sequence
  Description of Artificial Sequence: Synthetic oligonucleotide
  Sense strand starting at position 1695 of SEQ ID NO: 2773
cgacuucagugcuuagaga

SEQ ID NO: 215343 - RNA, 19 nt, Artificial Sequence
  Description of Artificial Sequence: Synthetic oligonucleotide
  Antisense strand to SEQ ID NO: 215342
ucucuaagcacugaagucg

SEQ ID NO: 215344 - RNA, 19 nt, Artificial Sequence
  Description of Artificial Sequence: Synthetic oligonucleotide
  Sense strand starting at position 1702 of SEQ ID NO: 2773
agugcuuagagauaguaac

SEQ ID NO: 215345 - RNA, 19 nt, Artificial Sequence
  Description of Artificial Sequence: Synthetic oligonucleotide
  Antisense strand to SEQ ID NO: 215344
guuacuaucucuaagcacu

SEQ ID NO: 215346 - RNA, 19 nt, Artificial Sequence
  Description of Artificial Sequence: Synthetic oligonucleotide
  Sense strand starting at position 1752 of SEQ ID NO: 2773
ggacaaguaguccaaggua

SEQ ID NO: 215347 - RNA, 19 nt, Artificial Sequence
  Description of Artificial Sequence: Synthetic oligonucleotide
  Antisense strand to SEQ ID NO: 215346
uaccuuggacuacuugucc

SEQ ID NO: 215348 - RNA, 19 nt, Artificial Sequence
  Description of Artificial Sequence: Synthetic oligonucleotide
  Sense strand starting at position 1755 of SEQ ID NO: 2773
caaguaguccaagguagaa

SEQ ID NO: 215349 - RNA, 19 nt, Artificial Sequence
  Description of Artificial Sequence: Synthetic oligonucleotide
  Antisense strand to SEQ ID NO: 215348
uucuaccuuggacuacuug

SEQ ID NO: 215350 - RNA, 19 nt, Artificial Sequence
  Description of Artificial Sequence: Synthetic oligonucleotide
  Sense strand starting at position 2395 of SEQ ID NO: 2773
agaccaugauuccgaauuu

SEQ ID NO: 215351 - RNA, 19 nt, Artificial Sequence
  Description of Artificial Sequence: Synthetic oligonucleotide
  Antisense strand to SEQ ID NO: 215350
aaauucggaaucauggucu

SEQ ID NO: 215352 - RNA, 19 nt, Artificial Sequence
  Description of Artificial Sequence: Synthetic oligonucleotide
  Sense strand starting at position 2396 of SEQ ID NO: 2773
gaccaugauuccgaauuug

SEQ ID NO: 215353 - RNA, 19 nt, Artificial Sequence
  Description of Artificial Sequence: Synthetic oligonucleotide
  Antisense strand to SEQ ID NO: 215352
caaauucggaaucaugguc

SEQ ID NO: 215354 - RNA, 19 nt, Artificial Sequence
  Description of Artificial Sequence: Synthetic oligonucleotide
  Sense strand starting at position 2431 of SEQ ID NO: 2773
cuuugaaaugaguaccuuu

SEQ ID NO: 215355 - RNA, 19 nt, Artificial Sequence
  Description of Artificial Sequence: Synthetic oligonucleotide
  Antisense strand to SEQ ID NO: 215354
aaagguacucauuucaaag

SEQ ID NO: 215356 - RNA, 19 nt, Artificial Sequence
  Description of Artificial Sequence: Synthetic oligonucleotide
  Sense strand starting at position 2513 of SEQ ID NO: 2773
gguuccagcuaguuaguua

SEQ ID NO: 215357 - RNA, 19 nt, Artificial Sequence
  Description of Artificial Sequence: Synthetic oligonucleotide
  Antisense strand to SEQ ID NO: 215356
uaacuaacuagcuggaacc

SEQ ID NO: 215358 - RNA, 19 nt, Artificial Sequence
  Description of Artificial Sequence: Synthetic oligonucleotide
  Sense strand starting at position 2514 of SEQ ID NO: 2773
guuccagcuaguuaguuaa

SEQ ID NO: 215359 - RNA, 19 nt, Artificial Sequence
  Description of Artificial Sequence: Synthetic oligonucleotide
  Antisense strand to SEQ ID NO: 215358
uuaacuaacuagcuggaac

SEQ ID NO: 215360 - RNA, 19 nt, Artificial Sequence
  Description of Artificial Sequence: Synthetic oligonucleotide
  Sense strand starting at position 2672 of SEQ ID NO: 2773
gguaauaggucucucgagu

SEQ ID NO: 215361 - RNA, 19 nt, Artificial Sequence
  Description of Artificial Sequence: Synthetic oligonucleotide
  Antisense strand to SEQ ID NO: 215360
acucgagagaccuauuacc

SEQ ID NO: 215362 - RNA, 19 nt, Artificial Sequence
  Description of Artificial Sequence: Synthetic oligonucleotide
  Sense strand starting at position 2749 of SEQ ID NO: 2773
gcuguaguuccuuaaugug

SEQ ID NO: 215363 - RNA, 19 nt, Artificial Sequence
  Description of Artificial Sequence: Synthetic oligonucleotide
  Antisense strand to SEQ ID NO: 215362
cacauuaaggaacuacagc

SEQ ID NO: 215364 - RNA, 19 nt, Artificial Sequence
  Description of Artificial Sequence: Synthetic oligonucleotide
  Sense strand starting at position 2755 of SEQ ID NO: 2773
guuccuuaauguguaacca

SEQ ID NO: 215365 - RNA, 19 nt, Artificial Sequence
  Description of Artificial Sequence: Synthetic oligonucleotide
  Antisense strand to SEQ ID NO: 215364
ugguuacacauuaaggaac

SEQ ID NO: 215366 - RNA, 19 nt, Artificial Sequence
  Description of Artificial Sequence: Synthetic oligonucleotide
  Sense strand starting at position 2985 of SEQ ID NO: 2773
cacaauagacauuggugau

SEQ ID NO: 215367 - RNA, 19 nt, Artificial Sequence
  Description of Artificial Sequence: Synthetic oligonucleotide
  Antisense strand to SEQ ID NO: 215366
aucaccaaugucuauugug

SEQ ID NO: 215368 - RNA, 19 nt, Artificial Sequence
  Description of Artificial Sequence: Synthetic oligonucleotide
  Sense strand starting at position 3007 of SEQ ID NO: 2773
ggagcacaguaccuagauu

SEQ ID NO: 215369 - RNA, 19 nt, Artificial Sequence
  Description of Artificial Sequence: Synthetic oligonucleotide
  Antisense strand to SEQ ID NO: 215368
aaucuagguacugugcucc

SEQ ID NO: 215370 - RNA, 19 nt, Artificial Sequence
  Description of Artificial Sequence: Synthetic oligonucleotide
  Sense strand starting at position 3023 of SEQ ID NO: 2773
auuggaauccuugaggugu

SEQ ID NO: 215371 - RNA, 19 nt, Artificial Sequence
  Description of Artificial Sequence: Synthetic oligonucleotide
  Antisense strand to SEQ ID NO: 215370
acaccucaaggauuccaau

SEQ ID NO: 215372 - RNA, 19 nt, Artificial Sequence
  Description of Artificial Sequence: Synthetic oligonucleotide
  Sense strand starting at position 3036 of SEQ ID NO: 2773
agguguauuucacuugcgu

SEQ ID NO: 215373 - RNA, 19 nt, Artificial Sequence
  Description of Artificial Sequence: Synthetic oligonucleotide
  Antisense strand to SEQ ID NO: 215372
acgcaagugaaauacaccu

SEQ ID NO: 215374 - RNA, 19 nt, Artificial Sequence
  Description of Artificial Sequence: Synthetic oligonucleotide
  Sense strand starting at position 3332 of SEQ ID NO: 2773
auugguauuacagguguca

SEQ ID NO: 215375 - RNA, 19 nt, Artificial Sequence
  Description of Artificial Sequence: Synthetic oligonucleotide
  Antisense strand to SEQ ID NO: 215374
ugacaccuguaauaccaau

SEQ ID NO: 215376 - RNA, 19 nt, Artificial Sequence
  Description of Artificial Sequence: Synthetic oligonucleotide
  Sense strand starting at position 3406 of SEQ ID NO: 2773
uguaaagauuuagaaccau

SEQ ID NO: 215377 - RNA, 19 nt, Artificial Sequence
  Description of Artificial Sequence: Synthetic oligonucleotide
  Antisense strand to SEQ ID NO: 215376
augguucuaaaucuuuaca

SEQ ID NO: 215378 - RNA, 19 nt, Artificial Sequence
  Description of Artificial Sequence: Synthetic oligonucleotide
  Sense strand starting at position 3442 of SEQ ID NO: 2773
ggcuuauugucagccuuua

SEQ ID NO: 215379 - RNA, 19 nt, Artificial Sequence
  Description of Artificial Sequence: Synthetic oligonucleotide
  Antisense strand to SEQ ID NO: 215378
uaaaggcugacaauaagcc

SEQ ID NO: 215380 - RNA, 19 nt, Artificial Sequence
  Description of Artificial Sequence: Synthetic oligonucleotide
  Sense strand starting at position 3488 of SEQ ID NO: 2773
accuuauaagucuggagca

SEQ ID NO: 215381 - RNA, 19 nt, Artificial Sequence
  Description of Artificial Sequence: Synthetic oligonucleotide
  Antisense strand to SEQ ID NO: 215380
ugcuccagacuuauaaggu

SEQ ID NO: 215382 - RNA, 19 nt, Artificial Sequence
  Description of Artificial Sequence: Synthetic oligonucleotide
  Sense strand starting at position 3490 of SEQ ID NO: 2773
cuuauaagucuggagcaca

SEQ ID NO: 215383 - RNA, 19 nt, Artificial Sequence
  Description of Artificial Sequence: Synthetic oligonucleotide
  Antisense strand to SEQ ID NO: 215382
ugugcuccagacuuauaag

SEQ ID NO: 215384 - RNA, 19 nt, Artificial Sequence
  Description of Artificial Sequence: Synthetic oligonucleotide
  Sense strand starting at position 3970 of SEQ ID NO: 2773
auggcauucgaauagcagu

SEQ ID NO: 215385 - RNA, 19 nt, Artificial Sequence
  Description of Artificial Sequence: Synthetic oligonucleotide
  Antisense strand to SEQ ID NO: 215384
acugcuauucgaaugccau

SEQ ID NO: 215386 - RNA, 19 nt, Artificial Sequence
  Description of Artificial Sequence: Synthetic oligonucleotide
  Sense strand starting at position 81 of SEQ ID NO: 2776
ccaucaagacuguggaauu

SEQ ID NO: 215387 - RNA, 19 nt, Artificial Sequence
  Description of Artificial Sequence: Synthetic oligonucleotide
  Antisense strand to SEQ ID NO: 215386
aauuccacagucuugaugg

SEQ ID NO: 215388 - RNA, 19 nt, Artificial Sequence
  Description of Artificial Sequence: Synthetic oligonucleotide
  Sense strand starting at position 566 of SEQ ID NO: 2776
ucugguaaagacuguuauc

SEQ ID NO: 215389 - RNA, 19 nt, Artificial Sequence
  Description of Artificial Sequence: Synthetic oligonucleotide
  Antisense strand to SEQ ID NO: 215388
gauaacagucuuuaccaga

SEQ ID NO: 215390 - RNA, 19 nt, Artificial Sequence
  Description of Artificial Sequence: Synthetic oligonucleotide
  Sense strand starting at position 866 of SEQ ID NO: 2776
uuauaaguccucuguggaa

SEQ ID NO: 215391 - RNA, 19 nt, Artificial Sequence
  Description of Artificial Sequence: Synthetic oligonucleotide
  Antisense strand to SEQ ID NO: 215390
uuccacagaggacuuauaa

SEQ ID NO: 215392 - RNA, 19 nt, Artificial Sequence
  Description of Artificial Sequence: Synthetic oligonucleotide
  Sense strand starting at position 868 of SEQ ID NO: 2776
auaaguccucuguggaaca

SEQ ID NO: 215393 - RNA, 19 nt, Artificial Sequence
  Description of Artificial Sequence: Synthetic oligonucleotide
  Antisense strand to SEQ ID NO: 215392
uguuccacagaggacuuau

SEQ ID NO: 215394 - RNA, 19 nt, Artificial Sequence
  Description of Artificial Sequence: Synthetic oligonucleotide
  Sense strand starting at position 881 of SEQ ID NO: 2776
ggaacaucacuuggcaguu

SEQ ID NO: 215395 - RNA, 19 nt, Artificial Sequence
  Description of Artificial Sequence: Synthetic oligonucleotide
  Antisense strand to SEQ ID NO: 215394
aacugccaagugauguucc

SEQ ID NO: 215396 - RNA, 19 nt, Artificial Sequence
  Description of Artificial Sequence: Synthetic oligonucleotide
  Sense strand starting at position 974 of SEQ ID NO: 2776
aacuuauguccacacgaga

SEQ ID NO: 215397 - RNA, 19 nt, Artificial Sequence
  Description of Artificial Sequence: Synthetic oligonucleotide
  Antisense strand to SEQ ID NO: 215396
ucucguguggacauaaguu

SEQ ID NO: 215398 - RNA, 19 nt, Artificial Sequence
  Description of Artificial Sequence: Synthetic oligonucleotide
  Sense strand starting at position 1052 of SEQ ID NO: 2776
agacauuccucaguaagug

SEQ ID NO: 215399 - RNA, 19 nt, Artificial Sequence
  Description of Artificial Sequence: Synthetic oligonucleotide
  Antisense strand to SEQ ID NO: 215398
cacuuacugaggaaugucu

SEQ ID NO: 215400 - RNA, 19 nt, Artificial Sequence
  Description of Artificial Sequence: Synthetic oligonucleotide
  Sense strand starting at position 1053 of SEQ ID NO: 2776
gacauuccucaguaaguga

SEQ ID NO: 215401 - RNA, 19 nt, Artificial Sequence
  Description of Artificial Sequence: Synthetic oligonucleotide
  Antisense strand to SEQ ID NO: 215400
ucacuuacugaggaauguc

SEQ ID NO: 215402 - RNA, 19 nt, Artificial Sequence
  Description of Artificial Sequence: Synthetic oligonucleotide
  Sense strand starting at position 1133 of SEQ ID NO: 2776
gagcuaucaggccaugaac

SEQ ID NO: 215403 - RNA, 19 nt, Artificial Sequence
  Description of Artificial Sequence: Synthetic oligonucleotide
  Antisense strand to SEQ ID NO: 215402
guucauggccugauagcuc

SEQ ID NO: 215404 - RNA, 19 nt, Artificial Sequence
  Description of Artificial Sequence: Synthetic oligonucleotide
  Sense strand starting at position 1135 of SEQ ID NO: 2776
gcuaucaggccaugaacaa

SEQ ID NO: 215405 - RNA, 19 nt, Artificial Sequence
  Description of Artificial Sequence: Synthetic oligonucleotide
  Antisense strand to SEQ ID NO: 215404
uuguucauggccugauagc

SEQ ID NO: 215406 - RNA, 19 nt, Artificial Sequence
  Description of Artificial Sequence: Synthetic oligonucleotide
  Sense strand starting at position 1171 of SEQ ID NO: 2776
gcauauuguuaagugaaga

SEQ ID NO: 215407 - RNA, 19 nt, Artificial Sequence
  Description of Artificial Sequence: Synthetic oligonucleotide
  Antisense strand to SEQ ID NO: 215406
ucuucacuuaacaauaugc

SEQ ID NO: 215408 - RNA, 19 nt, Artificial Sequence
  Description of Artificial Sequence: Synthetic oligonucleotide
  Sense strand starting at position 1176 of SEQ ID NO: 2776
uuguuaagugaagaagcua

SEQ ID NO: 215409 - RNA, 19 nt, Artificial Sequence
  Description of Artificial Sequence: Synthetic oligonucleotide
  Antisense strand to SEQ ID NO: 215408
uagcuucuucacuuaacaa

SEQ ID NO: 215410 - RNA, 19 nt, Artificial Sequence
  Description of Artificial Sequence: Synthetic oligonucleotide
  Sense strand starting at position 1241 of SEQ ID NO: 2776
gguugucagggcugggaaa

SEQ ID NO: 215411 - RNA, 19 nt, Artificial Sequence
  Description of Artificial Sequence: Synthetic oligonucleotide
  Antisense strand to SEQ ID NO: 215410
uuucccagcccugacaacc

SEQ ID NO: 215412 - RNA, 19 nt, Artificial Sequence
  Description of Artificial Sequence: Synthetic oligonucleotide
  Sense strand starting at position 1327 of SEQ ID NO: 2776
uaccguaaggguggacaua

SEQ ID NO: 215413 - RNA, 19 nt, Artificial Sequence
  Description of Artificial Sequence: Synthetic oligonucleotide
  Antisense strand to SEQ ID NO: 215412
uauguccacccuuacggua

SEQ ID NO: 215414 - RNA, 19 nt, Artificial Sequence
  Description of Artificial Sequence: Synthetic oligonucleotide
  Sense strand starting at position 1340 of SEQ ID NO: 2776
gacauacgacauuaugcau

SEQ ID NO: 215415 - RNA, 19 nt, Artificial Sequence
  Description of Artificial Sequence: Synthetic oligonucleotide
  Antisense strand to SEQ ID NO: 215414
augcauaaugucguauguc

SEQ ID NO: 215416 - RNA, 19 nt, Artificial Sequence
  Description of Artificial Sequence: Synthetic oligonucleotide
  Sense strand starting at position 1515 of SEQ ID NO: 2776
ugaacugacuuucugauca

SEQ ID NO: 215417 - RNA, 19 nt, Artificial Sequence
  Description of Artificial Sequence: Synthetic oligonucleotide
  Antisense strand to SEQ ID NO: 215416
ugaucagaaagucaguuca

SEQ ID NO: 215418 - RNA, 19 nt, Artificial Sequence
  Description of Artificial Sequence: Synthetic oligonucleotide
  Sense strand starting at position 1528 of SEQ ID NO: 2776
ugaucauuccauuacguac

SEQ ID NO: 215419 - RNA, 19 nt, Artificial Sequence
  Description of Artificial Sequence: Synthetic oligonucleotide
  Antisense strand to SEQ ID NO: 215418
guacguaauggaaugauca

SEQ ID NO: 215420 - RNA, 19 nt, Artificial Sequence
  Description of Artificial Sequence: Synthetic oligonucleotide
  Sense strand starting at position 1654 of SEQ ID NO: 2776
ucaccucugccuuagcaga

SEQ ID NO: 215421 - RNA, 19 nt, Artificial Sequence
  Description of Artificial Sequence: Synthetic oligonucleotide
  Antisense strand to SEQ ID NO: 215420
ucugcuaaggcagagguga

SEQ ID NO: 215422 - RNA, 19 nt, Artificial Sequence
  Description of Artificial Sequence: Synthetic oligonucleotide
  Sense strand starting at position 1656 of SEQ ID NO: 2776
accucugccuuagcagaaa

SEQ ID NO: 215423 - RNA, 19 nt, Artificial Sequence
  Description of Artificial Sequence: Synthetic oligonucleotide
  Antisense strand to SEQ ID NO: 215422
uuucugcuaaggcagaggu

SEQ ID NO: 215424 - RNA, 19 nt, Artificial Sequence
  Description of Artificial Sequence: Synthetic oligonucleotide
  Sense strand starting at position 1659 of SEQ ID NO: 2776
ucugccuuagcagaaauga

SEQ ID NO: 215425 - RNA, 19 nt, Artificial Sequence
  Description of Artificial Sequence: Synthetic oligonucleotide
  Antisense strand to SEQ ID NO: 215424
ucauuucugcuaaggcaga

SEQ ID NO: 215426 - RNA, 19 nt, Artificial Sequence
  Description of Artificial Sequence: Synthetic oligonucleotide
  Sense strand starting at position 1691 of SEQ ID NO: 2776
gcuguauggacaggagauu

SEQ ID NO: 215427 - RNA, 19 nt, Artificial Sequence
  Description of Artificial Sequence: Synthetic oligonucleotide
  Antisense strand to SEQ ID NO: 215426
aaucuccuguccauacagc

SEQ ID NO: 215428 - RNA, 19 nt, Artificial Sequence
  Description of Artificial Sequence: Synthetic oligonucleotide
  Sense strand starting at position 2137 of SEQ ID NO: 2776
aaaguagcccaggaaguuu

SEQ ID NO: 215429 - RNA, 19 nt, Artificial Sequence
  Description of Artificial Sequence: Synthetic oligonucleotide
  Antisense strand to SEQ ID NO: 215428
aaacuuccugggcuacuuu

SEQ ID NO: 215430 - RNA, 19 nt, Artificial Sequence
  Description of Artificial Sequence: Synthetic oligonucleotide
  Sense strand starting at position 2161 of SEQ ID NO: 2776
gacucagagucacugucaa

SEQ ID NO: 215431 - RNA, 19 nt, Artificial Sequence
  Description of Artificial Sequence: Synthetic oligonucleotide
  Antisense strand to SEQ ID NO: 215430
uugacagugacucugaguc

SEQ ID NO: 215432 - RNA, 19 nt, Artificial Sequence
  Description of Artificial Sequence: Synthetic oligonucleotide
  Sense strand starting at position 2217 of SEQ ID NO: 2776
gggcuccuucuauaucagu

SEQ ID NO: 215433 - RNA, 19 nt, Artificial Sequence
  Description of Artificial Sequence: Synthetic oligonucleotide
  Antisense strand to SEQ ID NO: 215432
acugauauagaaggagccc

SEQ ID NO: 215434 - RNA, 19 nt, Artificial Sequence
  Description of Artificial Sequence: Synthetic oligonucleotide
  Sense strand starting at position 2324 of SEQ ID NO: 2776
acugaugucguggagucua

SEQ ID NO: 215435 - RNA, 19 nt, Artificial Sequence
  Description of Artificial Sequence: Synthetic oligonucleotide
  Antisense strand to SEQ ID NO: 215434
uagacuccacgacaucagu

SEQ ID NO: 215436 - RNA, 19 nt, Artificial Sequence
  Description of Artificial Sequence: Synthetic oligonucleotide
  Sense strand starting at position 2329 of SEQ ID NO: 2776
ugucguggagucuaugaga

SEQ ID NO: 215437 - RNA, 19 nt, Artificial Sequence
  Description of Artificial Sequence: Synthetic oligonucleotide
  Antisense strand to SEQ ID NO: 215436
ucucauagacuccacgaca

SEQ ID NO: 215438 - RNA, 19 nt, Artificial Sequence
  Description of Artificial Sequence: Synthetic oligonucleotide
  Sense strand starting at position 2534 of SEQ ID NO: 2776
gggugucuuugacuaauga

SEQ ID NO: 215439 - RNA, 19 nt, Artificial Sequence
  Description of Artificial Sequence: Synthetic oligonucleotide
  Antisense strand to SEQ ID NO: 215438
ucauuagucaaagacaccc

SEQ ID NO: 215440 - RNA, 19 nt, Artificial Sequence
  Description of Artificial Sequence: Synthetic oligonucleotide
  Sense strand starting at position 2535 of SEQ ID NO: 2776
ggugucuuugacuaaugag

SEQ ID NO: 215441 - RNA, 19 nt, Artificial Sequence
  Description of Artificial Sequence: Synthetic oligonucleotide
  Antisense strand to SEQ ID NO: 215440
cucauuagucaaagacacc

SEQ ID NO: 215442 - RNA, 19 nt, Artificial Sequence
  Description of Artificial Sequence: Synthetic oligonucleotide
  Sense strand starting at position 2590 of SEQ ID NO: 2776
ucugacacgcucuaaagaa

SEQ ID NO: 215443 - RNA, 19 nt, Artificial Sequence
  Description of Artificial Sequence: Synthetic oligonucleotide
  Antisense strand to SEQ ID NO: 215442
uucuuuagagcgugucaga

SEQ ID NO: 215444 - RNA, 19 nt, Artificial Sequence
  Description of Artificial Sequence: Synthetic oligonucleotide
  Sense strand starting at position 2730 of SEQ ID NO: 2776
uguggcaagucuuuggaaa

SEQ ID NO: 215445 - RNA, 19 nt, Artificial Sequence
  Description of Artificial Sequence: Synthetic oligonucleotide
  Antisense strand to SEQ ID NO: 215444
uuuccaaagacuugccaca

SEQ ID NO: 215446 - RNA, 19 nt, Artificial Sequence
  Description of Artificial Sequence: Synthetic oligonucleotide
  Sense strand starting at position 2731 of SEQ ID NO: 2776
guggcaagucuuuggaaag

SEQ ID NO: 215447 - RNA, 19 nt, Artificial Sequence
  Description of Artificial Sequence: Synthetic oligonucleotide
  Antisense strand to SEQ ID NO: 215446
cuuuccaaagacuugccac

SEQ ID NO: 215448 - RNA, 19 nt, Artificial Sequence
  Description of Artificial Sequence: Synthetic oligonucleotide
  Sense strand starting at position 2965 of SEQ ID NO: 2776
aguuauuagggucauauau

SEQ ID NO: 215449 - RNA, 19 nt, Artificial Sequence
  Description of Artificial Sequence: Synthetic oligonucleotide
  Antisense strand to SEQ ID NO: 215448
auauaugacccuaauaacu

SEQ ID NO: 215450 - RNA, 19 nt, Artificial Sequence
  Description of Artificial Sequence: Synthetic oligonucleotide
  Sense strand starting at position 3257 of SEQ ID NO: 2776
guguuaauggcauaaagaa

SEQ ID NO: 215451 - RNA, 19 nt, Artificial Sequence
  Description of Artificial Sequence: Synthetic oligonucleotide
  Antisense strand to SEQ ID NO: 215450
uucuuuaugccauuaacac

SEQ ID NO: 215452 - RNA, 19 nt, Artificial Sequence
  Description of Artificial Sequence: Synthetic oligonucleotide
  Sense strand starting at position 3292 of SEQ ID NO: 2776
gagguaucacucuguggag

SEQ ID NO: 215453 - RNA, 19 nt, Artificial Sequence
  Description of Artificial Sequence: Synthetic oligonucleotide
  Antisense strand to SEQ ID NO: 215452
cuccacagagugauaccuc

SEQ ID NO: 215454 - RNA, 19 nt, Artificial Sequence
  Description of Artificial Sequence: Synthetic oligonucleotide
  Sense strand starting at position 3385 of SEQ ID NO: 2776
agaucacagucucuauuga

SEQ ID NO: 215455 - RNA, 19 nt, Artificial Sequence
  Description of Artificial Sequence: Synthetic oligonucleotide
  Antisense strand to SEQ ID NO: 215454
ucaauagagacugugaucu

SEQ ID NO: 215456 - RNA, 19 nt, Artificial Sequence
  Description of Artificial Sequence: Synthetic oligonucleotide
  Sense strand starting at position 3430 of SEQ ID NO: 2776
ugccuaugaugagugacuu

SEQ ID NO: 215457 - RNA, 19 nt, Artificial Sequence
  Description of Artificial Sequence: Synthetic oligonucleotide
  Antisense strand to SEQ ID NO: 215456
aagucacucaucauaggca

SEQ ID NO: 215458 - RNA, 19 nt, Artificial Sequence
  Description of Artificial Sequence: Synthetic oligonucleotide
  Sense strand starting at position 3470 of SEQ ID NO: 2776
gaacgugaauucucaguca

SEQ ID NO: 215459 - RNA, 19 nt, Artificial Sequence
  Description of Artificial Sequence: Synthetic oligonucleotide
  Antisense strand to SEQ ID NO: 215458
ugacugagaauucacguuc

SEQ ID NO: 215460 - RNA, 19 nt, Artificial Sequence
  Description of Artificial Sequence: Synthetic oligonucleotide
  Sense strand starting at position 3755 of SEQ ID NO: 2776
ugacucagcugugugaaga

SEQ ID NO: 215461 - RNA, 19 nt, Artificial Sequence
  Description of Artificial Sequence: Synthetic oligonucleotide
  Antisense strand to SEQ ID NO: 215460
ucuucacacagcugaguca

SEQ ID NO: 215462 - RNA, 19 nt, Artificial Sequence
  Description of Artificial Sequence: Synthetic oligonucleotide
  Sense strand starting at position 3756 of SEQ ID NO: 2776
gacucagcugugugaagaa

SEQ ID NO: 215463 - RNA, 19 nt, Artificial Sequence
  Description of Artificial Sequence: Synthetic oligonucleotide
  Antisense strand to SEQ ID NO: 215462
uucuucacacagcugaguc

SEQ ID NO: 215464 - RNA, 19 nt, Artificial Sequence
  Description of Artificial Sequence: Synthetic oligonucleotide
  Sense strand starting at position 3837 of SEQ ID NO: 2776
agagcuuugcuauacagca

SEQ ID NO: 215465 - RNA, 19 nt, Artificial Sequence
  Description of Artificial Sequence: Synthetic oligonucleotide
  Antisense strand to SEQ ID NO: 215464
ugcuguauagcaaagcucu

SEQ ID NO: 215466 - RNA, 19 nt, Artificial Sequence
  Description of Artificial Sequence: Synthetic oligonucleotide
  Sense strand starting at position 195 of SEQ ID NO: 2775
uaccauauuggguaaugca

SEQ ID NO: 215467 - RNA, 19 nt, Artificial Sequence
  Description of Artificial Sequence: Synthetic oligonucleotide
  Antisense strand to SEQ ID NO: 215466
ugcauuacccaauauggua

SEQ ID NO: 215468 - RNA, 19 nt, Artificial Sequence
  Description of Artificial Sequence: Synthetic oligonucleotide
  Sense strand starting at position 275 of SEQ ID NO: 2775
gcucacucuccagaugaga

SEQ ID NO: 215469 - RNA, 19 nt, Artificial Sequence
  Description of Artificial Sequence: Synthetic oligonucleotide
  Antisense strand to SEQ ID NO: 215468
ucucaucuggagagugagc

SEQ ID NO: 215470 - RNA, 19 nt, Artificial Sequence
  Description of Artificial Sequence: Synthetic oligonucleotide
  Sense strand starting at position 414 of SEQ ID NO: 2775
gaguuugagguuugaacag

SEQ ID NO: 215471 - RNA, 19 nt, Artificial Sequence
  Description of Artificial Sequence: Synthetic oligonucleotide
  Antisense strand to SEQ ID NO: 215470
cuguucaaaccucaaacuc

SEQ ID NO: 215472 - RNA, 19 nt, Artificial Sequence
  Description of Artificial Sequence: Synthetic oligonucleotide
  Sense strand starting at position 501 of SEQ ID NO: 2775
guugucauaagcuaugaga

SEQ ID NO: 215473 - RNA, 19 nt, Artificial Sequence
  Description of Artificial Sequence: Synthetic oligonucleotide
  Antisense strand to SEQ ID NO: 215472
ucucauagcuuaugacaac

SEQ ID NO: 215474 - RNA, 19 nt, Artificial Sequence
  Description of Artificial Sequence: Synthetic oligonucleotide
  Sense strand starting at position 503 of SEQ ID NO: 2775
ugucauaagcuaugagaga

SEQ ID NO: 215475 - RNA, 19 nt, Artificial Sequence
  Description of Artificial Sequence: Synthetic oligonucleotide
  Antisense strand to SEQ ID NO: 215474
ucucucauagcuuaugaca

SEQ ID NO: 215476 - RNA, 19 nt, Artificial Sequence
  Description of Artificial Sequence: Synthetic oligonucleotide
  Sense strand starting at position 556 of SEQ ID NO: 2775
ugggacuguaugugguaaa

SEQ ID NO: 215477 - RNA, 19 nt, Artificial Sequence
  Description of Artificial Sequence: Synthetic oligonucleotide
  Antisense strand to SEQ ID NO: 215476
uuuaccacauacaguccca

SEQ ID NO: 215478 - RNA, 19 nt, Artificial Sequence
  Description of Artificial Sequence: Synthetic oligonucleotide
  Sense strand starting at position 603 of SEQ ID NO: 2775
auagaauaccaugggcuaa

SEQ ID NO: 215479 - RNA, 19 nt, Artificial Sequence
  Description of Artificial Sequence: Synthetic oligonucleotide
  Antisense strand to SEQ ID NO: 215478
uuagcccaugguauucuau

SEQ ID NO: 215480 - RNA, 19 nt, Artificial Sequence
  Description of Artificial Sequence: Synthetic oligonucleotide
  Sense strand starting at position 614 of SEQ ID NO: 2775
ugggcuaaaucuucuacaa

SEQ ID NO: 215481 - RNA, 19 nt, Artificial Sequence
  Description of Artificial Sequence: Synthetic oligonucleotide
  Antisense strand to SEQ ID NO: 215480
uuguagaagauuuagccca

SEQ ID NO: 215482 - RNA, 19 nt, Artificial Sequence
  Description of Artificial Sequence: Synthetic oligonucleotide
  Sense strand starting at position 750 of SEQ ID NO: 2775
ccaggaugguucuccaaca

SEQ ID NO: 215483 - RNA, 19 nt, Artificial Sequence
  Description of Artificial Sequence: Synthetic oligonucleotide
  Antisense strand to SEQ ID NO: 215482
uguuggagaaccauccugg

SEQ ID NO: 215484 - RNA, 19 nt, Artificial Sequence
  Description of Artificial Sequence: Synthetic oligonucleotide
  Sense strand starting at position 751 of SEQ ID NO: 2775
caggaugguucuccaacau

SEQ ID NO: 215485 - RNA, 19 nt, Artificial Sequence
  Description of Artificial Sequence: Synthetic oligonucleotide
  Antisense strand to SEQ ID NO: 215484
auguuggagaaccauccug

SEQ ID NO: 215486 - RNA, 19 nt, Artificial Sequence
  Description of Artificial Sequence: Synthetic oligonucleotide
  Sense strand starting at position 845 of SEQ ID NO: 2775
cgugauccugugcuguuua

SEQ ID NO: 215487 - RNA, 19 nt, Artificial Sequence
  Description of Artificial Sequence: Synthetic oligonucleotide
  Antisense strand to SEQ ID NO: 215486
uaaacagcacaggaucacg

SEQ ID NO: 215488 - RNA, 19 nt, Artificial Sequence
  Description of Artificial Sequence: Synthetic oligonucleotide
  Sense strand starting at position 861 of SEQ ID NO: 2775
uuagacgacucacuuuaaa

SEQ ID NO: 215489 - RNA, 19 nt, Artificial Sequence
  Description of Artificial Sequence: Synthetic oligonucleotide
  Antisense strand to SEQ ID NO: 215488
uuuaaagugagucgucuaa

SEQ ID NO: 215490 - RNA, 19 nt, Artificial Sequence
  Description of Artificial Sequence: Synthetic oligonucleotide
  Sense strand starting at position 873 of SEQ ID NO: 2775
cuuuaaauugugcacaaga

SEQ ID NO: 215491 - RNA, 19 nt, Artificial Sequence
  Description of Artificial Sequence: Synthetic oligonucleotide
  Antisense strand to SEQ ID NO: 215490
ucuugugcacaauuuaaag

SEQ ID NO: 215492 - RNA, 19 nt, Artificial Sequence
  Description of Artificial Sequence: Synthetic oligonucleotide
  Sense strand starting at position 875 of SEQ ID NO: 2775
uuaaauugugcacaagauu

SEQ ID NO: 215493 - RNA, 19 nt, Artificial Sequence
  Description of Artificial Sequence: Synthetic oligonucleotide
  Antisense strand to SEQ ID NO: 215492
aaucuugugcacaauuuaa

SEQ ID NO: 215494 - RNA, 19 nt, Artificial Sequence
  Description of Artificial Sequence: Synthetic oligonucleotide
  Sense strand starting at position 929 of SEQ ID NO: 2775
aauuuaagugcuggcggau

SEQ ID NO: 215495 - RNA, 19 nt, Artificial Sequence
  Description of Artificial Sequence: Synthetic oligonucleotide
  Antisense strand to SEQ ID NO: 215494
auccgccagcacuuaaauu

SEQ ID NO: 215496 - RNA, 19 nt, Artificial Sequence
  Description of Artificial Sequence: Synthetic oligonucleotide
  Sense strand starting at position 942 of SEQ ID NO: 2775
gcggauguuccugaggaag

SEQ ID NO: 215497 - RNA, 19 nt, Artificial Sequence
  Description of Artificial Sequence: Synthetic oligonucleotide
  Antisense strand to SEQ ID NO: 215496
cuuccucaggaacauccgc

SEQ ID NO: 215498 - RNA, 19 nt, Artificial Sequence
  Description of Artificial Sequence: Synthetic oligonucleotide
  Sense strand starting at position 953 of SEQ ID NO: 2775
ugaggaagguguuuacuga

SEQ ID NO: 215499 - RNA, 19 nt, Artificial Sequence
  Description of Artificial Sequence: Synthetic oligonucleotide
  Antisense strand to SEQ ID NO: 215498
ucaguaaacaccuuccuca

SEQ ID NO: 215500 - RNA, 19 nt, Artificial Sequence
  Description of Artificial Sequence: Synthetic oligonucleotide
  Sense strand starting at position 1051 of SEQ ID NO: 2775
guuauugucccauaggaac

SEQ ID NO: 215501 - RNA, 19 nt, Artificial Sequence
  Description of Artificial Sequence: Synthetic oligonucleotide
  Antisense strand to SEQ ID NO: 215500
guuccuaugggacaauaac

SEQ ID NO: 215502 - RNA, 19 nt, Artificial Sequence
  Description of Artificial Sequence: Synthetic oligonucleotide
  Sense strand starting at position 1073 of SEQ ID NO: 2775
auccucugauacguaucaa

SEQ ID NO: 215503 - RNA, 19 nt, Artificial Sequence
  Description of Artificial Sequence: Synthetic oligonucleotide
  Antisense strand to SEQ ID NO: 215502
uugauacguaucagaggau

SEQ ID NO: 215504 - RNA, 19 nt, Artificial Sequence
  Description of Artificial Sequence: Synthetic oligonucleotide
  Sense strand starting at position 2534 of SEQ ID NO: 2775
acaagaaagcguuacugga

SEQ ID NO: 215505 - RNA, 19 nt, Artificial Sequence
  Description of Artificial Sequence: Synthetic oligonucleotide
  Antisense strand to SEQ ID NO: 215504
uccaguaacgcuuucuugu

SEQ ID NO: 215506 - RNA, 19 nt, Artificial Sequence
  Description of Artificial Sequence: Synthetic oligonucleotide
  Sense strand starting at position 2612 of SEQ ID NO: 2775
uggagacaacaguguuaca

SEQ ID NO: 215507 - RNA, 19 nt, Artificial Sequence
  Description of Artificial Sequence: Synthetic oligonucleotide
  Antisense strand to SEQ ID NO: 215506
uguaacacuguugucucca

SEQ ID NO: 215508 - RNA, 19 nt, Artificial Sequence
  Description of Artificial Sequence: Synthetic oligonucleotide
  Sense strand starting at position 2714 of SEQ ID NO: 2775
acagauguugaaugaacgu

SEQ ID NO: 215509 - RNA, 19 nt, Artificial Sequence
  Description of Artificial Sequence: Synthetic oligonucleotide
  Antisense strand to SEQ ID NO: 215508
acguucauucaacaucugu

SEQ ID NO: 215510 - RNA, 19 nt, Artificial Sequence
  Description of Artificial Sequence: Synthetic oligonucleotide
  Sense strand starting at position 3075 of SEQ ID NO: 2775
uaggcuacuccugauauga

SEQ ID NO: 215511 - RNA, 19 nt, Artificial Sequence
  Description of Artificial Sequence: Synthetic oligonucleotide
  Antisense strand to SEQ ID NO: 215510
ucauaucaggaguagccua

SEQ ID NO: 215512 - RNA, 19 nt, Artificial Sequence
  Description of Artificial Sequence: Synthetic oligonucleotide
  Sense strand starting at position 3085 of SEQ ID NO: 2775
cugauaugaccuggucaca

SEQ ID NO: 215513 - RNA, 19 nt, Artificial Sequence
  Description of Artificial Sequence: Synthetic oligonucleotide
  Antisense strand to SEQ ID NO: 215512
ugugaccaggucauaucag

SEQ ID NO: 215514 - RNA, 19 nt, Artificial Sequence
  Description of Artificial Sequence: Synthetic oligonucleotide
  Sense strand starting at position 3125 of SEQ ID NO: 2775
agggauucucuuggaugca

SEQ ID NO: 215515 - RNA, 19 nt, Artificial Sequence
  Description of Artificial Sequence: Synthetic oligonucleotide
  Antisense strand to SEQ ID NO: 215514
ugcauccaagagaaucccu

SEQ ID NO: 215516 - RNA, 19 nt, Artificial Sequence
  Description of Artificial Sequence: Synthetic oligonucleotide
  Sense strand starting at position 3164 of SEQ ID NO: 2775
ucuuaaaugugauuaucag

SEQ ID NO: 215517 - RNA, 19 nt, Artificial Sequence
  Description of Artificial Sequence: Synthetic oligonucleotide
  Antisense strand to SEQ ID NO: 215516
cugauaaucacauuuaaga

SEQ ID NO: 215518 - RNA, 19 nt, Artificial Sequence
  Description of Artificial Sequence: Synthetic oligonucleotide
  Sense strand starting at position 3288 of SEQ ID NO: 2775
gucacaucacauuguugaa

SEQ ID NO: 215519 - RNA, 19 nt, Artificial Sequence
  Description of Artificial Sequence: Synthetic oligonucleotide
  Antisense strand to SEQ ID NO: 215518
uucaacaaugugaugugac

SEQ ID NO: 215520 - RNA, 19 nt, Artificial Sequence
  Description of Artificial Sequence: Synthetic oligonucleotide
  Sense strand starting at position 3412 of SEQ ID NO: 2775
agugcucucagagauaaug

SEQ ID NO: 215521 - RNA, 19 nt, Artificial Sequence
  Description of Artificial Sequence: Synthetic oligonucleotide
  Antisense strand to SEQ ID NO: 215520
cauuaucucugagagcacu

SEQ ID NO: 215522 - RNA, 19 nt, Artificial Sequence
  Description of Artificial Sequence: Synthetic oligonucleotide
  Sense strand starting at position 3610 of SEQ ID NO: 2775
cauaaagaucuguguguaa

SEQ ID NO: 215523 - RNA, 19 nt, Artificial Sequence
  Description of Artificial Sequence: Synthetic oligonucleotide
  Antisense strand to SEQ ID NO: 215522
uuacacacagaucuuuaug

SEQ ID NO: 215524 - RNA, 19 nt, Artificial Sequence
  Description of Artificial Sequence: Synthetic oligonucleotide
  Sense strand starting at position 3612 of SEQ ID NO: 2775
uaaagaucuguguguaaca

SEQ ID NO: 215525 - RNA, 19 nt, Artificial Sequence
  Description of Artificial Sequence: Synthetic oligonucleotide
  Antisense strand to SEQ ID NO: 215524
uguuacacacagaucuuua

SEQ ID NO: 215526 - RNA, 19 nt, Artificial Sequence
  Description of Artificial Sequence: Synthetic oligonucleotide
  Sense strand starting at position 3614 of SEQ ID NO: 2775
aagaucuguguguaacaga

SEQ ID NO: 215527 - RNA, 19 nt, Artificial Sequence
  Description of Artificial Sequence: Synthetic oligonucleotide
  Antisense strand to SEQ ID NO: 215526
ucuguuacacacagaucuu

SEQ ID NO: 215528 - RNA, 19 nt, Artificial Sequence
  Description of Artificial Sequence: Synthetic oligonucleotide
  Sense strand starting at position 3705 of SEQ ID NO: 2775
ccacuauuaguaggugaca

SEQ ID NO: 215529 - RNA, 19 nt, Artificial Sequence
  Description of Artificial Sequence: Synthetic oligonucleotide
  Antisense strand to SEQ ID NO: 215528
ugucaccuacuaauagugg

SEQ ID NO: 215530 - RNA, 19 nt, Artificial Sequence
  Description of Artificial Sequence: Synthetic oligonucleotide
  Sense strand starting at position 3706 of SEQ ID NO: 2775
cacuauuaguaggugacaa

SEQ ID NO: 215531 - RNA, 19 nt, Artificial Sequence
  Description of Artificial Sequence: Synthetic oligonucleotide
  Antisense strand to SEQ ID NO: 215530
uugucaccuacuaauagug

SEQ ID NO: 215532 - RNA, 19 nt, Artificial Sequence
  Description of Artificial Sequence: Synthetic oligonucleotide
  Sense strand starting at position 3707 of SEQ ID NO: 2775
acuauuaguaggugacaag

SEQ ID NO: 215533 - RNA, 19 nt, Artificial Sequence
  Description of Artificial Sequence: Synthetic oligonucleotide
  Antisense strand to SEQ ID NO: 215532
cuugucaccuacuaauagu

SEQ ID NO: 215534 - RNA, 19 nt, Artificial Sequence
  Description of Artificial Sequence: Synthetic oligonucleotide
  Sense strand starting at position 3731 of SEQ ID NO: 2775
gcuagcucaguuguucuua

SEQ ID NO: 215535 - RNA, 19 nt, Artificial Sequence
  Description of Artificial Sequence: Synthetic oligonucleotide
  Antisense strand to SEQ ID NO: 215534
uaagaacaacugagcuagc

SEQ ID NO: 215536 - RNA, 19 nt, Artificial Sequence
  Description of Artificial Sequence: Synthetic oligonucleotide
  Sense strand starting at position 3895 of SEQ ID NO: 2775
acguuacuucuuuauacca

SEQ ID NO: 215537 - RNA, 19 nt, Artificial Sequence
  Description of Artificial Sequence: Synthetic oligonucleotide
  Antisense strand to SEQ ID NO: 215536
ugguauaaagaaguaacgu

SEQ ID NO: 215538 - RNA, 19 nt, Artificial Sequence
  Description of Artificial Sequence: Synthetic oligonucleotide
  Sense strand starting at position 3950 of SEQ ID NO: 2775
ccuagaauaccucgugaca

SEQ ID NO: 215539 - RNA, 19 nt, Artificial Sequence
  Description of Artificial Sequence: Synthetic oligonucleotide
  Antisense strand to SEQ ID NO: 215538
ugucacgagguauucuagg

SEQ ID NO: 215540 - RNA, 19 nt, Artificial Sequence
  Description of Artificial Sequence: Synthetic oligonucleotide
  Sense strand starting at position 3953 of SEQ ID NO: 2775
agaauaccucgugacauac

SEQ ID NO: 215541 - RNA, 19 nt, Artificial Sequence
  Description of Artificial Sequence: Synthetic oligonucleotide
  Antisense strand to SEQ ID NO: 215540
guaugucacgagguauucu

SEQ ID NO: 215542 - RNA, 19 nt, Artificial Sequence
  Description of Artificial Sequence: Synthetic oligonucleotide
  Sense strand starting at position 3974 of SEQ ID NO: 2775
gcuuuagaaccagguauug

SEQ ID NO: 215543 - RNA, 19 nt, Artificial Sequence
  Description of Artificial Sequence: Synthetic oligonucleotide
  Antisense strand to SEQ ID NO: 215542
caauaccugguucuaaagc

SEQ ID NO: 215544 - RNA, 19 nt, Artificial Sequence
  Description of Artificial Sequence: Synthetic oligonucleotide
  Sense strand starting at position 3983 of SEQ ID NO: 2775
ccagguauugcccaguuaa

SEQ ID NO: 215545 - RNA, 19 nt, Artificial Sequence
  Description of Artificial Sequence: Synthetic oligonucleotide
  Antisense strand to SEQ ID NO: 215544
uuaacugggcaauaccugg

SEQ ID NO: 215546 - RNA, 19 nt, Artificial Sequence
  Description of Artificial Sequence: Synthetic oligonucleotide
  Sense strand starting at position 107 of SEQ ID NO: 2777
acgugaaacacacgucauu

SEQ ID NO: 215547 - RNA, 19 nt, Artificial Sequence
  Description of Artificial Sequence: Synthetic oligonucleotide
  Antisense strand to SEQ ID NO: 215546
aaugacguguguuucacgu

SEQ ID NO: 215548 - RNA, 19 nt, Artificial Sequence
  Description of Artificial Sequence: Synthetic oligonucleotide
  Sense strand starting at position 129 of SEQ ID NO: 2777
cccguuuaaacguguacca

SEQ ID NO: 215549 - RNA, 19 nt, Artificial Sequence
  Description of Artificial Sequence: Synthetic oligonucleotide
  Antisense strand to SEQ ID NO: 215548
ugguacacguuuaaacggg

SEQ ID NO: 215550 - RNA, 19 nt, Artificial Sequence
  Description of Artificial Sequence: Synthetic oligonucleotide
  Sense strand starting at position 131 of SEQ ID NO: 2777
cguuuaaacguguaccaga

SEQ ID NO: 215551 - RNA, 19 nt, Artificial Sequence
  Description of Artificial Sequence: Synthetic oligonucleotide
  Antisense strand to SEQ ID NO: 215550
ucugguacacguuuaaacg

SEQ ID NO: 215552 - RNA, 19 nt, Artificial Sequence
  Description of Artificial Sequence: Synthetic oligonucleotide
  Sense strand starting at position 136 of SEQ ID NO: 2777
aaacguguaccagaaacua

SEQ ID NO: 215553 - RNA, 19 nt, Artificial Sequence
  Description of Artificial Sequence: Synthetic oligonucleotide
  Antisense strand to SEQ ID NO: 215552
uaguuucugguacacguuu

SEQ ID NO: 215554 - RNA, 19 nt, Artificial Sequence
  Description of Artificial Sequence: Synthetic oligonucleotide
  Sense strand starting at position 202 of SEQ ID NO: 2777
uacugauuacugcaaacgu

SEQ ID NO: 215555 - RNA, 19 nt, Artificial Sequence
  Description of Artificial Sequence: Synthetic oligonucleotide
  Antisense strand to SEQ ID NO: 215554
acguuugcaguaaucagua

SEQ ID NO: 215556 - RNA, 19 nt, Artificial Sequence
  Description of Artificial Sequence: Synthetic oligonucleotide
  Sense strand starting at position 211 of SEQ ID NO: 2777
cugcaaacguaaucagagu

SEQ ID NO: 215557 - RNA, 19 nt, Artificial Sequence
  Description of Artificial Sequence: Synthetic oligonucleotide
  Antisense strand to SEQ ID NO: 215556
acucugauuacguuugcag

SEQ ID NO: 215558 - RNA, 19 nt, Artificial Sequence
  Description of Artificial Sequence: Synthetic oligonucleotide
  Sense strand starting at position 212 of SEQ ID NO: 2777
ugcaaacguaaucagaguu

SEQ ID NO: 215559 - RNA, 19 nt, Artificial Sequence
  Description of Artificial Sequence: Synthetic oligonucleotide
  Antisense strand to SEQ ID NO: 215558
aacucugauuacguuugca

SEQ ID NO: 215560 - RNA, 19 nt, Artificial Sequence
  Description of Artificial Sequence: Synthetic oligonucleotide
  Sense strand starting at position 227 of SEQ ID NO: 2777
aguuauaucugaguugcug

SEQ ID NO: 215561 - RNA, 19 nt, Artificial Sequence
  Description of Artificial Sequence: Synthetic oligonucleotide
  Antisense strand to SEQ ID NO: 215560
cagcaacucagauauaacu

SEQ ID NO: 215562 - RNA, 19 nt, Artificial Sequence
  Description of Artificial Sequence: Synthetic oligonucleotide
  Sense strand starting at position 233 of SEQ ID NO: 2777
aucugaguugcugacagaa

SEQ ID NO: 215563 - RNA, 19 nt, Artificial Sequence
  Description of Artificial Sequence: Synthetic oligonucleotide
  Antisense strand to SEQ ID NO: 215562
uucugucagcaacucagau

SEQ ID NO: 215564 - RNA, 19 nt, Artificial Sequence
  Description of Artificial Sequence: Synthetic oligonucleotide
  Sense strand starting at position 235 of SEQ ID NO: 2777
cugaguugcugacagaauc

SEQ ID NO: 215565 - RNA, 19 nt, Artificial Sequence
  Description of Artificial Sequence: Synthetic oligonucleotide
  Antisense strand to SEQ ID NO: 215564
gauucugucagcaacucag

SEQ ID NO: 215566 - RNA, 19 nt, Artificial Sequence
  Description of Artificial Sequence: Synthetic oligonucleotide
  Sense strand starting at position 298 of SEQ ID NO: 2777
ggacuuuaaucacacacga

SEQ ID NO: 215567 - RNA, 19 nt, Artificial Sequence
  Description of Artificial Sequence: Synthetic oligonucleotide
  Antisense strand to SEQ ID NO: 215566
ucgugugugauuaaagucc

SEQ ID NO: 215568 - RNA, 19 nt, Artificial Sequence
  Description of Artificial Sequence: Synthetic oligonucleotide
  Sense strand starting at position 398 of SEQ ID NO: 2777
uccuaaacgcaauguuaac

SEQ ID NO: 215569 - RNA, 19 nt, Artificial Sequence
  Description of Artificial Sequence: Synthetic oligonucleotide
  Antisense strand to SEQ ID NO: 215568
guuaacauugcguuuagga

SEQ ID NO: 215570 - RNA, 19 nt, Artificial Sequence
  Description of Artificial Sequence: Synthetic oligonucleotide
  Sense strand starting at position 453 of SEQ ID NO: 2777
ucagaaaugcuucgagcaa

SEQ ID NO: 215571 - RNA, 19 nt, Artificial Sequence
  Description of Artificial Sequence: Synthetic oligonucleotide
  Antisense strand to SEQ ID NO: 215570
uugcucgaagcauuucuga

SEQ ID NO: 215572 - RNA, 19 nt, Artificial Sequence
  Description of Artificial Sequence: Synthetic oligonucleotide
  Sense strand starting at position 454 of SEQ ID NO: 2777
cagaaaugcuucgagcaaa

SEQ ID NO: 215573 - RNA, 19 nt, Artificial Sequence
  Description of Artificial Sequence: Synthetic oligonucleotide
  Antisense strand to SEQ ID NO: 215572
uuugcucgaagcauuucug

SEQ ID NO: 215574 - RNA, 19 nt, Artificial Sequence
  Description of Artificial Sequence: Synthetic oligonucleotide
  Sense strand starting at position 563 of SEQ ID NO: 2777
ugugucuuccgcuacaauu

SEQ ID NO: 215575 - RNA, 19 nt, Artificial Sequence
  Description of Artificial Sequence: Synthetic oligonucleotide
  Antisense strand to SEQ ID NO: 215574
aauuguagcggaagacaca

SEQ ID NO: 215576 - RNA, 19 nt, Artificial Sequence
  Description of Artificial Sequence: Synthetic oligonucleotide
  Sense strand starting at position 634 of SEQ ID NO: 2777
ucgugacacuaauaacuau

SEQ ID NO: 215577 - RNA, 19 nt, Artificial Sequence
  Description of Artificial Sequence: Synthetic oligonucleotide
  Antisense strand to SEQ ID NO: 215576
auaguuauuagugucacga

SEQ ID NO: 215578 - RNA, 19 nt, Artificial Sequence
  Description of Artificial Sequence: Synthetic oligonucleotide
  Sense strand starting at position 678 of SEQ ID NO: 2777
ggaccagccugaguauaau

SEQ ID NO: 215579 - RNA, 19 nt, Artificial Sequence
  Description of Artificial Sequence: Synthetic oligonucleotide
  Antisense strand to SEQ ID NO: 215578
auuauacucaggcuggucc

SEQ ID NO: 215580 - RNA, 19 nt, Artificial Sequence
  Description of Artificial Sequence: Synthetic oligonucleotide
  Sense strand starting at position 1098 of SEQ ID NO: 2777
gccagcuuaauauggugaa

SEQ ID NO: 215581 - RNA, 19 nt, Artificial Sequence
  Description of Artificial Sequence: Synthetic oligonucleotide
  Antisense strand to SEQ ID NO: 215580
uucaccauauuaagcuggc

SEQ ID NO: 215582 - RNA, 19 nt, Artificial Sequence
  Description of Artificial Sequence: Synthetic oligonucleotide
  Sense strand starting at position 1102 of SEQ ID NO: 2777
gcuuaauauggugaaacuc

SEQ ID NO: 215583 - RNA, 19 nt, Artificial Sequence
  Description of Artificial Sequence: Synthetic oligonucleotide
  Antisense strand to SEQ ID NO: 215582
gaguuucaccauauuaagc

SEQ ID NO: 215584 - RNA, 19 nt, Artificial Sequence
  Description of Artificial Sequence: Synthetic oligonucleotide
  Sense strand starting at position 1465 of SEQ ID NO: 2777
cgauguuuacgccgacacu

SEQ ID NO: 215585 - RNA, 19 nt, Artificial Sequence
  Description of Artificial Sequence: Synthetic oligonucleotide
  Antisense strand to SEQ ID NO: 215584
agugucggcguaaacaucg

SEQ ID NO: 215586 - RNA, 19 nt, Artificial Sequence
  Description of Artificial Sequence: Synthetic oligonucleotide
  Sense strand starting at position 1466 of SEQ ID NO: 2777
gauguuuacgccgacacuu

SEQ ID NO: 215587 - RNA, 19 nt, Artificial Sequence
  Description of Artificial Sequence: Synthetic oligonucleotide
  Antisense strand to SEQ ID NO: 215586
aagugucggcguaaacauc

SEQ ID NO: 215588 - RNA, 19 nt, Artificial Sequence
  Description of Artificial Sequence: Synthetic oligonucleotide
  Sense strand starting at position 1520 of SEQ ID NO: 2777
ccgucucuuucuccacuua

SEQ ID NO: 215589 - RNA, 19 nt, Artificial Sequence
  Description of Artificial Sequence: Synthetic oligonucleotide
  Antisense strand to SEQ ID NO: 215588
uaaguggagaaagagacgg

SEQ ID NO: 215590 - RNA, 19 nt, Artificial Sequence
  Description of Artificial Sequence: Synthetic oligonucleotide
  Sense strand starting at position 2115 of SEQ ID NO: 2777
cgucgagacucgucucgaa

SEQ ID NO: 215591 - RNA, 19 nt, Artificial Sequence
  Description of Artificial Sequence: Synthetic oligonucleotide
  Antisense strand to SEQ ID NO: 215590
uucgagacgagucucgacg

SEQ ID NO: 215592 - RNA, 19 nt, Artificial Sequence
  Description of Artificial Sequence: Synthetic oligonucleotide
  Sense strand starting at position 2334 of SEQ ID NO: 2777
aggaacaacuugugaacaa

SEQ ID NO: 215593 - RNA, 19 nt, Artificial Sequence
  Description of Artificial Sequence: Synthetic oligonucleotide
  Antisense strand to SEQ ID NO: 215592
uuguucacaaguuguuccu

SEQ ID NO: 215594 - RNA, 19 nt, Artificial Sequence
  Description of Artificial Sequence: Synthetic oligonucleotide
  Sense strand starting at position 2383 of SEQ ID NO: 2777
gcauguacccuguuagcga

SEQ ID NO: 215595 - RNA, 19 nt, Artificial Sequence
  Description of Artificial Sequence: Synthetic oligonucleotide
  Antisense strand to SEQ ID NO: 215594
ucgcuaacaggguacaugc

SEQ ID NO: 215596 - RNA, 19 nt, Artificial Sequence
  Description of Artificial Sequence: Synthetic oligonucleotide
  Sense strand starting at position 2391 of SEQ ID NO: 2777
ccuguuagcgaccacuaaa

SEQ ID NO: 215597 - RNA, 19 nt, Artificial Sequence
  Description of Artificial Sequence: Synthetic oligonucleotide
  Antisense strand to SEQ ID NO: 215596
uuuaguggucgcuaacagg

SEQ ID NO: 215598 - RNA, 19 nt, Artificial Sequence
  Description of Artificial Sequence: Synthetic oligonucleotide
  Sense strand starting at position 2579 of SEQ ID NO: 2777
agcgucagauggcuucaaa

SEQ ID NO: 215599 - RNA, 19 nt, Artificial Sequence
  Description of Artificial Sequence: Synthetic oligonucleotide
  Antisense strand to SEQ ID NO: 215598
uuugaagccaucugacgcu

SEQ ID NO: 215600 - RNA, 19 nt, Artificial Sequence
  Description of Artificial Sequence: Synthetic oligonucleotide
  Sense strand starting at position 2593 of SEQ ID NO: 2777
ucaaauuacuaaugggauc

SEQ ID NO: 215601 - RNA, 19 nt, Artificial Sequence
  Description of Artificial Sequence: Synthetic oligonucleotide
  Antisense strand to SEQ ID NO: 215600
gaucccauuaguaauuuga

SEQ ID NO: 215602 - RNA, 19 nt, Artificial Sequence
  Description of Artificial Sequence: Synthetic oligonucleotide
  Sense strand starting at position 2693 of SEQ ID NO: 2777
ccucccugucuaugauacu

SEQ ID NO: 215603 - RNA, 19 nt, Artificial Sequence
  Description of Artificial Sequence: Synthetic oligonucleotide
  Antisense strand to SEQ ID NO: 215602
aguaucauagacagggagg

SEQ ID NO: 215604 - RNA, 19 nt, Artificial Sequence
  Description of Artificial Sequence: Synthetic oligonucleotide
  Sense strand starting at position 2767 of SEQ ID NO: 2777
agggaaggccagcguuaaa

SEQ ID NO: 215605 - RNA, 19 nt, Artificial Sequence
  Description of Artificial Sequence: Synthetic oligonucleotide
  Antisense strand to SEQ ID NO: 215604
uuuaacgcuggccuucccu

SEQ ID NO: 215606 - RNA, 19 nt, Artificial Sequence
  Description of Artificial Sequence: Synthetic oligonucleotide
  Sense strand starting at position 2770 of SEQ ID NO: 2777
gaaggccagcguuaaagau

SEQ ID NO: 215607 - RNA, 19 nt, Artificial Sequence
  Description of Artificial Sequence: Synthetic oligonucleotide
  Antisense strand to SEQ ID NO: 215606
aucuuuaacgcuggccuuc

SEQ ID NO: 215608 - RNA, 19 nt, Artificial Sequence
  Description of Artificial Sequence: Synthetic oligonucleotide
  Sense strand starting at position 2816 of SEQ ID NO: 2777
gggcuuuauguccagccua

SEQ ID NO: 215609 - RNA, 19 nt, Artificial Sequence
  Description of Artificial Sequence: Synthetic oligonucleotide
  Antisense strand to SEQ ID NO: 215608
uaggcuggacauaaagccc

SEQ ID NO: 215610 - RNA, 19 nt, Artificial Sequence
  Description of Artificial Sequence: Synthetic oligonucleotide
  Sense strand starting at position 2830 of SEQ ID NO: 2777
gccuaagaccuacagaagu

SEQ ID NO: 215611 - RNA, 19 nt, Artificial Sequence
  Description of Artificial Sequence: Synthetic oligonucleotide
  Antisense strand to SEQ ID NO: 215610
acuucuguaggucuuaggc

SEQ ID NO: 215612 - RNA, 19 nt, Artificial Sequence
  Description of Artificial Sequence: Synthetic oligonucleotide
  Sense strand starting at position 2948 of SEQ ID NO: 2777
auguuaagauguucccaua

SEQ ID NO: 215613 - RNA, 19 nt, Artificial Sequence
  Description of Artificial Sequence: Synthetic oligonucleotide
  Antisense strand to SEQ ID NO: 215612
uaugggaacaucuuaacau

SEQ ID NO: 215614 - RNA, 19 nt, Artificial Sequence
  Description of Artificial Sequence: Synthetic oligonucleotide
  Sense strand starting at position 2951 of SEQ ID NO: 2777
uuaagauguucccauaaug

SEQ ID NO: 215615 - RNA, 19 nt, Artificial Sequence
  Description of Artificial Sequence: Synthetic oligonucleotide
  Antisense strand to SEQ ID NO: 215614
cauuaugggaacaucuuaa

SEQ ID NO: 215616 - RNA, 19 nt, Artificial Sequence
  Description of Artificial Sequence: Synthetic oligonucleotide
  Sense strand starting at position 2993 of SEQ ID NO: 2777
gcagaauguggugguaguu

SEQ ID NO: 215617 - RNA, 19 nt, Artificial Sequence
  Description of Artificial Sequence: Synthetic oligonucleotide
  Antisense strand to SEQ ID NO: 215616
aacuaccaccacauucugc

SEQ ID NO: 215618 - RNA, 19 nt, Artificial Sequence
  Description of Artificial Sequence: Synthetic oligonucleotide
  Sense strand starting at position 3299 of SEQ ID NO: 2777
gcacuuucucccggcagaa

SEQ ID NO: 215619 - RNA, 19 nt, Artificial Sequence
  Description of Artificial Sequence: Synthetic oligonucleotide
  Antisense strand to SEQ ID NO: 215618
uucugccgggagaaagugc

SEQ ID NO: 215620 - RNA, 19 nt, Artificial Sequence
  Description of Artificial Sequence: Synthetic oligonucleotide
  Sense strand starting at position 3301 of SEQ ID NO: 2777
acuuucucccggcagaaua

SEQ ID NO: 215621 - RNA, 19 nt, Artificial Sequence
  Description of Artificial Sequence: Synthetic oligonucleotide
  Antisense strand to SEQ ID NO: 215620
uauucugccgggagaaagu

SEQ ID NO: 215622 - RNA, 19 nt, Artificial Sequence
  Description of Artificial Sequence: Synthetic oligonucleotide
  Sense strand starting at position 3569 of SEQ ID NO: 2777
aguggcagaguuuagaaua

SEQ ID NO: 215623 - RNA, 19 nt, Artificial Sequence
  Description of Artificial Sequence: Synthetic oligonucleotide
  Antisense strand to SEQ ID NO: 215622
uauucuaaacucugccacu

SEQ ID NO: 215624 - RNA, 19 nt, Artificial Sequence
  Description of Artificial Sequence: Synthetic oligonucleotide
  Sense strand starting at position 3983 of SEQ ID NO: 2777
auguaaagucauuaguaug

SEQ ID NO: 215625 - RNA, 19 nt, Artificial Sequence
  Description of Artificial Sequence: Synthetic oligonucleotide
  Antisense strand to SEQ ID NO: 215624
cauacuaaugacuuuacau

SEQ ID NO: 215626 - RNA, 19 nt, Artificial Sequence
  Description of Artificial Sequence: Synthetic oligonucleotide
  Sense strand starting at position 19 of SEQ ID NO: 2778
uacugauuacugcaaacgu

SEQ ID NO: 215627 - RNA, 19 nt, Artificial Sequence
  Description of Artificial Sequence: Synthetic oligonucleotide
  Antisense strand to SEQ ID NO: 215626
acguuugcaguaaucagua

SEQ ID NO: 215628 - RNA, 19 nt, Artificial Sequence
  Description of Artificial Sequence: Synthetic oligonucleotide
  Sense strand starting at position 28 of SEQ ID NO: 2778
cugcaaacguaaucagagu

SEQ ID NO: 215629 - RNA, 19 nt, Artificial Sequence
  Description of Artificial Sequence: Synthetic oligonucleotide
  Antisense strand to SEQ ID NO: 215628
acucugauuacguuugcag

SEQ ID NO: 215630 - RNA, 19 nt, Artificial Sequence
  Description of Artificial Sequence: Synthetic oligonucleotide
  Sense strand starting at position 29 of SEQ ID NO: 2778
ugcaaacguaaucagaguu

SEQ ID NO: 215631 - RNA, 19 nt, Artificial Sequence
  Description of Artificial Sequence: Synthetic oligonucleotide
  Antisense strand to SEQ ID NO: 215630
aacucugauuacguuugca

SEQ ID NO: 215632 - RNA, 19 nt, Artificial Sequence
  Description of Artificial Sequence: Synthetic oligonucleotide
  Sense strand starting at position 44 of SEQ ID NO: 2778
aguuauaucugaguugcug

SEQ ID NO: 215633 - RNA, 19 nt, Artificial Sequence
  Description of Artificial Sequence: Synthetic oligonucleotide
  Antisense strand to SEQ ID NO: 215632
cagcaacucagauauaacu

SEQ ID NO: 215634 - RNA, 19 nt, Artificial Sequence
  Description of Artificial Sequence: Synthetic oligonucleotide
  Sense strand starting at position 50 of SEQ ID NO: 2778
aucugaguugcugacagaa

SEQ ID NO: 215635 - RNA, 19 nt, Artificial Sequence
  Description of Artificial Sequence: Synthetic oligonucleotide
  Antisense strand to SEQ ID NO: 215634
uucugucagcaacucagau

SEQ ID NO: 215636 - RNA, 19 nt, Artificial Sequence
  Description of Artificial Sequence: Synthetic oligonucleotide
  Sense strand starting at position 52 of SEQ ID NO: 2778
cugaguugcugacagaauc

SEQ ID NO: 215637 - RNA, 19 nt, Artificial Sequence
  Description of Artificial Sequence: Synthetic oligonucleotide
  Antisense strand to SEQ ID NO: 215636
gauucugucagcaacucag

SEQ ID NO: 215638 - RNA, 19 nt, Artificial Sequence
  Description of Artificial Sequence: Synthetic oligonucleotide
  Sense strand starting at position 115 of SEQ ID NO: 2778
ggacuuuaaucacacacga

SEQ ID NO: 215639 - RNA, 19 nt, Artificial Sequence
  Description of Artificial Sequence: Synthetic oligonucleotide
  Antisense strand to SEQ ID NO: 215638
ucgugugugauuaaagucc

SEQ ID NO: 215640 - RNA, 19 nt, Artificial Sequence
  Description of Artificial Sequence: Synthetic oligonucleotide
  Sense strand starting at position 215 of SEQ ID NO: 2778
uccuaaacgcaauguuaac

SEQ ID NO: 215641 - RNA, 19 nt, Artificial Sequence
  Description of Artificial Sequence: Synthetic oligonucleotide
  Antisense strand to SEQ ID NO: 215640
guuaacauugcguuuagga

SEQ ID NO: 215642 - RNA, 19 nt, Artificial Sequence
  Description of Artificial Sequence: Synthetic oligonucleotide
  Sense strand starting at position 270 of SEQ ID NO: 2778
ucagaaaugcuucgagcaa

SEQ ID NO: 215643 - RNA, 19 nt, Artificial Sequence
  Description of Artificial Sequence: Synthetic oligonucleotide
  Antisense strand to SEQ ID NO: 215642
uugcucgaagcauuucuga

SEQ ID NO: 215644 - RNA, 19 nt, Artificial Sequence
  Description of Artificial Sequence: Synthetic oligonucleotide
  Sense strand starting at position 271 of SEQ ID NO: 2778
cagaaaugcuucgagcaaa

SEQ ID NO: 215645 - RNA, 19 nt, Artificial Sequence
  Description of Artificial Sequence: Synthetic oligonucleotide
  Antisense strand to SEQ ID NO: 215644
uuugcucgaagcauuucug

SEQ ID NO: 215646 - RNA, 19 nt, Artificial Sequence
  Description of Artificial Sequence: Synthetic oligonucleotide
  Sense strand starting at position 380 of SEQ ID NO: 2778
ugugucuuccgcuacaauu

SEQ ID NO: 215647 - RNA, 19 nt, Artificial Sequence
  Description of Artificial Sequence: Synthetic oligonucleotide
  Antisense strand to SEQ ID NO: 215646
aauuguagcggaagacaca

SEQ ID NO: 215648 - RNA, 19 nt, Artificial Sequence
  Description of Artificial Sequence: Synthetic oligonucleotide
  Sense strand starting at position 451 of SEQ ID NO: 2778
ucgugacacuaauaacuau

SEQ ID NO: 215649 - RNA, 19 nt, Artificial Sequence
  Description of Artificial Sequence: Synthetic oligonucleotide
  Antisense strand to SEQ ID NO: 215648
auaguuauuagugucacga

SEQ ID NO: 215650 - RNA, 19 nt, Artificial Sequence
  Description of Artificial Sequence: Synthetic oligonucleotide
  Sense strand starting at position 495 of SEQ ID NO: 2778
ggaccagccugaguauaau

SEQ ID NO: 215651 - RNA, 19 nt, Artificial Sequence
  Description of Artificial Sequence: Synthetic oligonucleotide
  Antisense strand to SEQ ID NO: 215650
auuauacucaggcuggucc

SEQ ID NO: 215652 - RNA, 19 nt, Artificial Sequence
  Description of Artificial Sequence: Synthetic oligonucleotide
  Sense strand starting at position 915 of SEQ ID NO: 2778
gccagcuuaauauggugaa

SEQ ID NO: 215653 - RNA, 19 nt, Artificial Sequence
  Description of Artificial Sequence: Synthetic oligonucleotide
  Antisense strand to SEQ ID NO: 215652
uucaccauauuaagcuggc

SEQ ID NO: 215654 - RNA, 19 nt, Artificial Sequence
  Description of Artificial Sequence: Synthetic oligonucleotide
  Sense strand starting at position 916 of SEQ ID NO: 2778
ccagcuuaauauggugaaa

SEQ ID NO: 215655 - RNA, 19 nt, Artificial Sequence
  Description of Artificial Sequence: Synthetic oligonucleotide
  Antisense strand to SEQ ID NO: 215654
uuucaccauauuaagcugg

SEQ ID NO: 215656 - RNA, 19 nt, Artificial Sequence
  Description of Artificial Sequence: Synthetic oligonucleotide
  Sense strand starting at position 919 of SEQ ID NO: 2778
gcuuaauauggugaaacuc

SEQ ID NO: 215657 - RNA, 19 nt, Artificial Sequence
  Description of Artificial Sequence: Synthetic oligonucleotide
  Antisense strand to SEQ ID NO: 215656
gaguuucaccauauuaagc

SEQ ID NO: 215658 - RNA, 19 nt, Artificial Sequence
  Description of Artificial Sequence: Synthetic oligonucleotide
  Sense strand starting at position 1175 of SEQ ID NO: 2778
ucaccugacuucugucaca

SEQ ID NO: 215659 - RNA, 19 nt, Artificial Sequence
  Description of Artificial Sequence: Synthetic oligonucleotide
  Antisense strand to SEQ ID NO: 215658
ugugacagaagucagguga

SEQ ID NO: 215660 - RNA, 19 nt, Artificial Sequence
  Description of Artificial Sequence: Synthetic oligonucleotide
  Sense strand starting at position 1282 of SEQ ID NO: 2778
cgauguuuacgccgacacu

SEQ ID NO: 215661 - RNA, 19 nt, Artificial Sequence
  Description of Artificial Sequence: Synthetic oligonucleotide
  Antisense strand to SEQ ID NO: 215660
agugucggcguaaacaucg

SEQ ID NO: 215662 - RNA, 19 nt, Artificial Sequence
  Description of Artificial Sequence: Synthetic oligonucleotide
  Sense strand starting at position 1283 of SEQ ID NO: 2778
gauguuuacgccgacacuu

SEQ ID NO: 215663 - RNA, 19 nt, Artificial Sequence
  Description of Artificial Sequence: Synthetic oligonucleotide
  Antisense strand to SEQ ID NO: 215662
aagugucggcguaaacauc

SEQ ID NO: 215664 - RNA, 19 nt, Artificial Sequence
  Description of Artificial Sequence: Synthetic oligonucleotide
  Sense strand starting at position 1337 of SEQ ID NO: 2778
ccgucucuuucuccacuua

SEQ ID NO: 215665 - RNA, 19 nt, Artificial Sequence
  Description of Artificial Sequence: Synthetic oligonucleotide
  Antisense strand to SEQ ID NO: 215664
uaaguggagaaagagacgg

SEQ ID NO: 215666 - RNA, 19 nt, Artificial Sequence
  Description of Artificial Sequence: Synthetic oligonucleotide
  Sense strand starting at position 1849 of SEQ ID NO: 2778
agacaaagcuuguaacgca

SEQ ID NO: 215667 - RNA, 19 nt, Artificial Sequence
  Description of Artificial Sequence: Synthetic oligonucleotide
  Antisense strand to SEQ ID NO: 215666
ugcguuacaagcuuugucu

SEQ ID NO: 215668 - RNA, 19 nt, Artificial Sequence
  Description of Artificial Sequence: Synthetic oligonucleotide
  Sense strand starting at position 1932 of SEQ ID NO: 2778
cgucgagacucgucucgaa

SEQ ID NO: 215669 - RNA, 19 nt, Artificial Sequence
  Description of Artificial Sequence: Synthetic oligonucleotide
  Antisense strand to SEQ ID NO: 215668
uucgagacgagucucgacg

SEQ ID NO: 215670 - RNA, 19 nt, Artificial Sequence
  Description of Artificial Sequence: Synthetic oligonucleotide
  Sense strand starting at position 2151 of SEQ ID NO: 2778
aggaacaacuugugaacaa

SEQ ID NO: 215671 - RNA, 19 nt, Artificial Sequence
  Description of Artificial Sequence: Synthetic oligonucleotide
  Antisense strand to SEQ ID NO: 215670
uuguucacaaguuguuccu

SEQ ID NO: 215672 - RNA, 19 nt, Artificial Sequence
  Description of Artificial Sequence: Synthetic oligonucleotide
  Sense strand starting at position 2200 of SEQ ID NO: 2778
gcauguacccuguuagcga

SEQ ID NO: 215673 - RNA, 19 nt, Artificial Sequence
  Description of Artificial Sequence: Synthetic oligonucleotide
  Antisense strand to SEQ ID NO: 215672
ucgcuaacaggguacaugc

SEQ ID NO: 215674 - RNA, 19 nt, Artificial Sequence
  Description of Artificial Sequence: Synthetic oligonucleotide
  Sense strand starting at position 2208 of SEQ ID NO: 2778
ccuguuagcgaccacuaaa

SEQ ID NO: 215675 - RNA, 19 nt, Artificial Sequence
  Description of Artificial Sequence: Synthetic oligonucleotide
  Antisense strand to SEQ ID NO: 215674
uuuaguggucgcuaacagg

SEQ ID NO: 215676 - RNA, 19 nt, Artificial Sequence
  Description of Artificial Sequence: Synthetic oligonucleotide
  Sense strand starting at position 2396 of SEQ ID NO: 2778
agcgucagauggcuucaaa

SEQ ID NO: 215677 - RNA, 19 nt, Artificial Sequence
  Description of Artificial Sequence: Synthetic oligonucleotide
  Antisense strand to SEQ ID NO: 215676
uuugaagccaucugacgcu

SEQ ID NO: 215678 - RNA, 19 nt, Artificial Sequence
  Description of Artificial Sequence: Synthetic oligonucleotide
  Sense strand starting at position 2410 of SEQ ID NO: 2778
ucaaauuacuaaugggauc

SEQ ID NO: 215679 - RNA, 19 nt, Artificial Sequence
  Description of Artificial Sequence: Synthetic oligonucleotide
  Antisense strand to SEQ ID NO: 215678
gaucccauuaguaauuuga

SEQ ID NO: 215680 - RNA, 19 nt, Artificial Sequence
  Description of Artificial Sequence: Synthetic oligonucleotide
  Sense strand starting at position 2510 of SEQ ID NO: 2778
ccucccugucuaugauacu

SEQ ID NO: 215681 - RNA, 19 nt, Artificial Sequence
  Description of Artificial Sequence: Synthetic oligonucleotide
  Antisense strand to SEQ ID NO: 215680
aguaucauagacagggagg

SEQ ID NO: 215682 - RNA, 19 nt, Artificial Sequence
  Description of Artificial Sequence: Synthetic oligonucleotide
  Sense strand starting at position 2511 of SEQ ID NO: 2778
cucccugucuaugauacuu

SEQ ID NO: 215683 - RNA, 19 nt, Artificial Sequence
  Description of Artificial Sequence: Synthetic oligonucleotide
  Antisense strand to SEQ ID NO: 215682
aaguaucauagacagggag

SEQ ID NO: 215684 - RNA, 19 nt, Artificial Sequence
  Description of Artificial Sequence: Synthetic oligonucleotide
  Sense strand starting at position 2584 of SEQ ID NO: 2778
agggaaggccagcguuaaa

SEQ ID NO: 215685 - RNA, 19 nt, Artificial Sequence
  Description of Artificial Sequence: Synthetic oligonucleotide
  Antisense strand to SEQ ID NO: 215684
uuuaacgcuggccuucccu

SEQ ID NO: 215686 - RNA, 19 nt, Artificial Sequence
  Description of Artificial Sequence: Synthetic oligonucleotide
  Sense strand starting at position 2587 of SEQ ID NO: 2778
gaaggccagcguuaaagau

SEQ ID NO: 215687 - RNA, 19 nt, Artificial Sequence
  Description of Artificial Sequence: Synthetic oligonucleotide
  Antisense strand to SEQ ID NO: 215686
aucuuuaacgcuggccuuc

SEQ ID NO: 215688 - RNA, 19 nt, Artificial Sequence
  Description of Artificial Sequence: Synthetic oligonucleotide
  Sense strand starting at position 2633 of SEQ ID NO: 2778
gggcuuuauguccagccua

SEQ ID NO: 215689 - RNA, 19 nt, Artificial Sequence
  Description of Artificial Sequence: Synthetic oligonucleotide
  Antisense strand to SEQ ID NO: 215688
uaggcuggacauaaagccc

SEQ ID NO: 215690 - RNA, 19 nt, Artificial Sequence
  Description of Artificial Sequence: Synthetic oligonucleotide
  Sense strand starting at position 2647 of SEQ ID NO: 2778
gccuaagaccuacagaagu

SEQ ID NO: 215691 - RNA, 19 nt, Artificial Sequence
  Description of Artificial Sequence: Synthetic oligonucleotide
  Antisense strand to SEQ ID NO: 215690
acuucuguaggucuuaggc

SEQ ID NO: 215692 - RNA, 19 nt, Artificial Sequence
  Description of Artificial Sequence: Synthetic oligonucleotide
  Sense strand starting at position 2765 of SEQ ID NO: 2778
auguuaagauguucccaua

SEQ ID NO: 215693 - RNA, 19 nt, Artificial Sequence
  Description of Artificial Sequence: Synthetic oligonucleotide
  Antisense strand to SEQ ID NO: 215692
uaugggaacaucuuaacau

SEQ ID NO: 215694 - RNA, 19 nt, Artificial Sequence
  Description of Artificial Sequence: Synthetic oligonucleotide
  Sense strand starting at position 2768 of SEQ ID NO: 2778
uuaagauguucccauaaug

SEQ ID NO: 215695 - RNA, 19 nt, Artificial Sequence
  Description of Artificial Sequence: Synthetic oligonucleotide
  Antisense strand to SEQ ID NO: 215694
cauuaugggaacaucuuaa

SEQ ID NO: 215696 - RNA, 19 nt, Artificial Sequence
  Description of Artificial Sequence: Synthetic oligonucleotide
  Sense strand starting at position 2810 of SEQ ID NO: 2778
gcagaauguggugguaguu

SEQ ID NO: 215697 - RNA, 19 nt, Artificial Sequence
  Description of Artificial Sequence: Synthetic oligonucleotide
  Antisense strand to SEQ ID NO: 215696
aacuaccaccacauucugc

SEQ ID NO: 215698 - RNA, 19 nt, Artificial Sequence
  Description of Artificial Sequence: Synthetic oligonucleotide
  Sense strand starting at position 3116 of SEQ ID NO: 2778
gcacuuucucccggcagaa

SEQ ID NO: 215699 - RNA, 19 nt, Artificial Sequence
  Description of Artificial Sequence: Synthetic oligonucleotide
  Antisense strand to SEQ ID NO: 215698
uucugccgggagaaagugc

SEQ ID NO: 215700 - RNA, 19 nt, Artificial Sequence
  Description of Artificial Sequence: Synthetic oligonucleotide
  Sense strand starting at position 3118 of SEQ ID NO: 2778
acuuucucccggcagaaua

SEQ ID NO: 215701 - RNA, 19 nt, Artificial Sequence
  Description of Artificial Sequence: Synthetic oligonucleotide
  Antisense strand to SEQ ID NO: 215700
uauucugccgggagaaagu

SEQ ID NO: 215702 - RNA, 19 nt, Artificial Sequence
  Description of Artificial Sequence: Synthetic oligonucleotide
  Sense strand starting at position 3386 of SEQ ID NO: 2778
aguggcagaguuuagaaua

SEQ ID NO: 215703 - RNA, 19 nt, Artificial Sequence
  Description of Artificial Sequence: Synthetic oligonucleotide
  Antisense strand to SEQ ID NO: 215702
uauucuaaacucugccacu

SEQ ID NO: 215704 - RNA, 19 nt, Artificial Sequence
  Description of Artificial Sequence: Synthetic oligonucleotide
  Sense strand starting at position 3800 of SEQ ID NO: 2778
auguaaagucauuaguaug

SEQ ID NO: 215705 - RNA, 19 nt, Artificial Sequence
  Description of Artificial Sequence: Synthetic oligonucleotide
  Antisense strand to SEQ ID NO: 215704
cauacuaaugacuuuacau

SEQ ID NO: 215706 - RNA, 19 nt, Artificial Sequence
  Description of Artificial Sequence: Synthetic oligonucleotide
  Sense strand starting at position 86 of SEQ ID NO: 2779
ugggaacacugucucacaa

SEQ ID NO: 215707 - RNA, 19 nt, Artificial Sequence
  Description of Artificial Sequence: Synthetic oligonucleotide
  Antisense strand to SEQ ID NO: 215706
uugugagacaguguuccca

SEQ ID NO: 215708 - RNA, 19 nt, Artificial Sequence
  Description of Artificial Sequence: Synthetic oligonucleotide
  Sense strand starting at position 365 of SEQ ID NO: 2779
ugccaaucucugugaacug

SEQ ID NO: 215709 - RNA, 19 nt, Artificial Sequence
  Description of Artificial Sequence: Synthetic oligonucleotide
  Antisense strand to SEQ ID NO: 215708
caguucacagagauuggca

SEQ ID NO: 215710 - RNA, 19 nt, Artificial Sequence
  Description of Artificial Sequence: Synthetic oligonucleotide
  Sense strand starting at position 493 of SEQ ID NO: 2779
uuuaaauacacgugguuga

SEQ ID NO: 215711 - RNA, 19 nt, Artificial Sequence
  Description of Artificial Sequence: Synthetic oligonucleotide
  Antisense strand to SEQ ID NO: 215710
ucaaccacguguauuuaaa

SEQ ID NO: 215712 - RNA, 19 nt, Artificial Sequence
  Description of Artificial Sequence: Synthetic oligonucleotide
  Sense strand starting at position 671 of SEQ ID NO: 2779
ugagucagauguuuccuua

SEQ ID NO: 215713 - RNA, 19 nt, Artificial Sequence
  Description of Artificial Sequence: Synthetic oligonucleotide
  Antisense strand to SEQ ID NO: 215712
uaaggaaacaucugacuca

SEQ ID NO: 215714 - RNA, 19 nt, Artificial Sequence
  Description of Artificial Sequence: Synthetic oligonucleotide
  Sense strand starting at position 674 of SEQ ID NO: 2779
gucagauguuuccuuaauc

SEQ ID NO: 215715 - RNA, 19 nt, Artificial Sequence
  Description of Artificial Sequence: Synthetic oligonucleotide
  Antisense strand to SEQ ID NO: 215714
gauuaaggaaacaucugac

SEQ ID NO: 215716 - RNA, 19 nt, Artificial Sequence
  Description of Artificial Sequence: Synthetic oligonucleotide
  Sense strand starting at position 711 of SEQ ID NO: 2779
gggaauuguacaugucaaa

SEQ ID NO: 215717 - RNA, 19 nt, Artificial Sequence
  Description of Artificial Sequence: Synthetic oligonucleotide
  Antisense strand to SEQ ID NO: 215716
uuugacauguacaauuccc

SEQ ID NO: 215718 - RNA, 19 nt, Artificial Sequence
  Description of Artificial Sequence: Synthetic oligonucleotide
  Sense strand starting at position 718 of SEQ ID NO: 2779
guacaugucaaagggcaaa

SEQ ID NO: 215719 - RNA, 19 nt, Artificial Sequence
  Description of Artificial Sequence: Synthetic oligonucleotide
  Antisense strand to SEQ ID NO: 215718
uuugcccuuugacauguac

SEQ ID NO: 215720 - RNA, 19 nt, Artificial Sequence
  Description of Artificial Sequence: Synthetic oligonucleotide
  Sense strand starting at position 736 of SEQ ID NO: 2779
aacuuagaguaguugagua

SEQ ID NO: 215721 - RNA, 19 nt, Artificial Sequence
  Description of Artificial Sequence: Synthetic oligonucleotide
  Antisense strand to SEQ ID NO: 215720
uacucaacuacucuaaguu

SEQ ID NO: 215722 - RNA, 19 nt, Artificial Sequence
  Description of Artificial Sequence: Synthetic oligonucleotide
  Sense strand starting at position 738 of SEQ ID NO: 2779
cuuagaguaguugaguaac

SEQ ID NO: 215723 - RNA, 19 nt, Artificial Sequence
  Description of Artificial Sequence: Synthetic oligonucleotide
  Antisense strand to SEQ ID NO: 215722
guuacucaacuacucuaag

SEQ ID NO: 215724 - RNA, 19 nt, Artificial Sequence
  Description of Artificial Sequence: Synthetic oligonucleotide
  Sense strand starting at position 740 of SEQ ID NO: 2779
uagaguaguugaguaaccu

SEQ ID NO: 215725 - RNA, 19 nt, Artificial Sequence
  Description of Artificial Sequence: Synthetic oligonucleotide
  Antisense strand to SEQ ID NO: 215724
agguuacucaacuacucua

SEQ ID NO: 215726 - RNA, 19 nt, Artificial Sequence
  Description of Artificial Sequence: Synthetic oligonucleotide
  Sense strand starting at position 750 of SEQ ID NO: 2779
gaguaaccugcacaagguu

SEQ ID NO: 215727 - RNA, 19 nt, Artificial Sequence
  Description of Artificial Sequence: Synthetic oligonucleotide
  Antisense strand to SEQ ID NO: 215726
aaccuugugcagguuacuc

SEQ ID NO: 215728 - RNA, 19 nt, Artificial Sequence
  Description of Artificial Sequence: Synthetic oligonucleotide
  Sense strand starting at position 771 of SEQ ID NO: 2779
uggccagucgguagguaaa

SEQ ID NO: 215729 - RNA, 19 nt, Artificial Sequence
  Description of Artificial Sequence: Synthetic oligonucleotide
  Antisense strand to SEQ ID NO: 215728
uuuaccuaccgacuggcca

SEQ ID NO: 215730 - RNA, 19 nt, Artificial Sequence
  Description of Artificial Sequence: Synthetic oligonucleotide
  Sense strand starting at position 855 of SEQ ID NO: 2779
cuugaauggugaucaucag

SEQ ID NO: 215731 - RNA, 19 nt, Artificial Sequence
  Description of Artificial Sequence: Synthetic oligonucleotide
  Antisense strand to SEQ ID NO: 215730
cugaugaucaccauucaag

SEQ ID NO: 215732 - RNA, 19 nt, Artificial Sequence
  Description of Artificial Sequence: Synthetic oligonucleotide
  Sense strand starting at position 861 of SEQ ID NO: 2779
uggugaucaucagcaaaua

SEQ ID NO: 215733 - RNA, 19 nt, Artificial Sequence
  Description of Artificial Sequence: Synthetic oligonucleotide
  Antisense strand to SEQ ID NO: 215732
uauuugcugaugaucacca

SEQ ID NO: 215734 - RNA, 19 nt, Artificial Sequence
  Description of Artificial Sequence: Synthetic oligonucleotide
  Sense strand starting at position 1007 of SEQ ID NO: 2779
guuggaagauccuugcaaa

SEQ ID NO: 215735 - RNA, 19 nt, Artificial Sequence
  Description of Artificial Sequence: Synthetic oligonucleotide
  Antisense strand to SEQ ID NO: 215734
uuugcaaggaucuuccaac

SEQ ID NO: 215736 - RNA, 19 nt, Artificial Sequence
  Description of Artificial Sequence: Synthetic oligonucleotide
  Sense strand starting at position 1008 of SEQ ID NO: 2779
uuggaagauccuugcaaac

SEQ ID NO: 215737 - RNA, 19 nt, Artificial Sequence
  Description of Artificial Sequence: Synthetic oligonucleotide
  Antisense strand to SEQ ID NO: 215736
guuugcaaggaucuuccaa

SEQ ID NO: 215738 - RNA, 19 nt, Artificial Sequence
  Description of Artificial Sequence: Synthetic oligonucleotide
  Sense strand starting at position 1139 of SEQ ID NO: 2779
ccaguucucuggucugaag

SEQ ID NO: 215739 - RNA, 19 nt, Artificial Sequence
  Description of Artificial Sequence: Synthetic oligonucleotide
  Antisense strand to SEQ ID NO: 215738
cuucagaccagagaacugg

SEQ ID NO: 215740 - RNA, 19 nt, Artificial Sequence
  Description of Artificial Sequence: Synthetic oligonucleotide
  Sense strand starting at position 2481 of SEQ ID NO: 2779
ccucuaauccugcagagcu

SEQ ID NO: 215741 - RNA, 19 nt, Artificial Sequence
  Description of Artificial Sequence: Synthetic oligonucleotide
  Antisense strand to SEQ ID NO: 215740
agcucugcaggauuagagg

SEQ ID NO: 215742 - RNA, 19 nt, Artificial Sequence
  Description of Artificial Sequence: Synthetic oligonucleotide
  Sense strand starting at position 2669 of SEQ ID NO: 2779
ggaagugucgcccagauug

SEQ ID NO: 215743 - RNA, 19 nt, Artificial Sequence
  Description of Artificial Sequence: Synthetic oligonucleotide
  Antisense strand to SEQ ID NO: 215742
caaucugggcgacacuucc

SEQ ID NO: 215744 - RNA, 19 nt, Artificial Sequence
  Description of Artificial Sequence: Synthetic oligonucleotide
  Sense strand starting at position 2719 of SEQ ID NO: 2779
ugaaguuuccugcacuaag

SEQ ID NO: 215745 - RNA, 19 nt, Artificial Sequence
  Description of Artificial Sequence: Synthetic oligonucleotide
  Antisense strand to SEQ ID NO: 215744
cuuagugcaggaaacuuca

SEQ ID NO: 215746 - RNA, 19 nt, Artificial Sequence
  Description of Artificial Sequence: Synthetic oligonucleotide
  Sense strand starting at position 2804 of SEQ ID NO: 2779
aguguaacugccuaacagu

SEQ ID NO: 215747 - RNA, 19 nt, Artificial Sequence
  Description of Artificial Sequence: Synthetic oligonucleotide
  Antisense strand to SEQ ID NO: 215746
acuguuaggcaguuacacu

SEQ ID NO: 215748 - RNA, 19 nt, Artificial Sequence
  Description of Artificial Sequence: Synthetic oligonucleotide
  Sense strand starting at position 2833 of SEQ ID NO: 2779
uugcgcaguuauuuggaua

SEQ ID NO: 215749 - RNA, 19 nt, Artificial Sequence
  Description of Artificial Sequence: Synthetic oligonucleotide
  Antisense strand to SEQ ID NO: 215748
uauccaaauaacugcgcaa

SEQ ID NO: 215750 - RNA, 19 nt, Artificial Sequence
  Description of Artificial Sequence: Synthetic oligonucleotide
  Sense strand starting at position 2834 of SEQ ID NO: 2779
ugcgcaguuauuuggauau

SEQ ID NO: 215751 - RNA, 19 nt, Artificial Sequence
  Description of Artificial Sequence: Synthetic oligonucleotide
  Antisense strand to SEQ ID NO: 215750
auauccaaauaacugcgca

SEQ ID NO: 215752 - RNA, 19 nt, Artificial Sequence
  Description of Artificial Sequence: Synthetic oligonucleotide
  Sense strand starting at position 2836 of SEQ ID NO: 2779
cgcaguuauuuggauauuu

SEQ ID NO: 215753 - RNA, 19 nt, Artificial Sequence
  Description of Artificial Sequence: Synthetic oligonucleotide
  Antisense strand to SEQ ID NO: 215752
aaauauccaaauaacugcg

SEQ ID NO: 215754 - RNA, 19 nt, Artificial Sequence
  Description of Artificial Sequence: Synthetic oligonucleotide
  Sense strand starting at position 2854 of SEQ ID NO: 2779
uuauucuguguuuacucau

SEQ ID NO: 215755 - RNA, 19 nt, Artificial Sequence
  Description of Artificial Sequence: Synthetic oligonucleotide
  Antisense strand to SEQ ID NO: 215754
augaguaaacacagaauaa

SEQ ID NO: 215756 - RNA, 19 nt, Artificial Sequence
  Description of Artificial Sequence: Synthetic oligonucleotide
  Sense strand starting at position 2860 of SEQ ID NO: 2779
uguguuuacucauuaacug

SEQ ID NO: 215757 - RNA, 19 nt, Artificial Sequence
  Description of Artificial Sequence: Synthetic oligonucleotide
  Antisense strand to SEQ ID NO: 215756
caguuaaugaguaaacaca

SEQ ID NO: 215758 - RNA, 19 nt, Artificial Sequence
  Description of Artificial Sequence: Synthetic oligonucleotide
  Sense strand starting at position 2861 of SEQ ID NO: 2779
guguuuacucauuaacuga

SEQ ID NO: 215759 - RNA, 19 nt, Artificial Sequence
  Description of Artificial Sequence: Synthetic oligonucleotide
  Antisense strand to SEQ ID NO: 215758
ucaguuaaugaguaaacac

SEQ ID NO: 215760 - RNA, 19 nt, Artificial Sequence
  Description of Artificial Sequence: Synthetic oligonucleotide
  Sense strand starting at position 3083 of SEQ ID NO: 2779
gaaauauagauaggugguu

SEQ ID NO: 215761 - RNA, 19 nt, Artificial Sequence
  Description of Artificial Sequence: Synthetic oligonucleotide
  Antisense strand to SEQ ID NO: 215760
aaccaccuaucuauauuuc

SEQ ID NO: 215762 - RNA, 19 nt, Artificial Sequence
  Description of Artificial Sequence: Synthetic oligonucleotide
  Sense strand starting at position 3099 of SEQ ID NO: 2779
guuggaguguggguuaaua

SEQ ID NO: 215763 - RNA, 19 nt, Artificial Sequence
  Description of Artificial Sequence: Synthetic oligonucleotide
  Antisense strand to SEQ ID NO: 215762
uauuaacccacacuccaac

SEQ ID NO: 215764 - RNA, 19 nt, Artificial Sequence
  Description of Artificial Sequence: Synthetic oligonucleotide
  Sense strand starting at position 3107 of SEQ ID NO: 2779
guggguuaauaggcuaaga

SEQ ID NO: 215765 - RNA, 19 nt, Artificial Sequence
  Description of Artificial Sequence: Synthetic oligonucleotide
  Antisense strand to SEQ ID NO: 215764
ucuuagccuauuaacccac

SEQ ID NO: 215766 - RNA, 19 nt, Artificial Sequence
  Description of Artificial Sequence: Synthetic oligonucleotide
  Sense strand starting at position 3227 of SEQ ID NO: 2779
gugguuucacguguaugua

SEQ ID NO: 215767 - RNA, 19 nt, Artificial Sequence
  Description of Artificial Sequence: Synthetic oligonucleotide
  Antisense strand to SEQ ID NO: 215766
uacauacacgugaaaccac

SEQ ID NO: 215768 - RNA, 19 nt, Artificial Sequence
  Description of Artificial Sequence: Synthetic oligonucleotide
  Sense strand starting at position 3237 of SEQ ID NO: 2779
guguauguaguauauggaa

SEQ ID NO: 215769 - RNA, 19 nt, Artificial Sequence
  Description of Artificial Sequence: Synthetic oligonucleotide
  Antisense strand to SEQ ID NO: 215768
uuccauauacuacauacac

SEQ ID NO: 215770 - RNA, 19 nt, Artificial Sequence
  Description of Artificial Sequence: Synthetic oligonucleotide
  Sense strand starting at position 3239 of SEQ ID NO: 2779
guauguaguauauggaagu

SEQ ID NO: 215771 - RNA, 19 nt, Artificial Sequence
  Description of Artificial Sequence: Synthetic oligonucleotide
  Antisense strand to SEQ ID NO: 215770
acuuccauauacuacauac

SEQ ID NO: 215772 - RNA, 19 nt, Artificial Sequence
  Description of Artificial Sequence: Synthetic oligonucleotide
  Sense strand starting at position 3254 of SEQ ID NO: 2779
aaguaagagucuucuaguu

SEQ ID NO: 215773 - RNA, 19 nt, Artificial Sequence
  Description of Artificial Sequence: Synthetic oligonucleotide
  Antisense strand to SEQ ID NO: 215772
aacuagaagacucuuacuu

SEQ ID NO: 215774 - RNA, 19 nt, Artificial Sequence
  Description of Artificial Sequence: Synthetic oligonucleotide
  Sense strand starting at position 3349 of SEQ ID NO: 2779
gauguauuagucuauccug

SEQ ID NO: 215775 - RNA, 19 nt, Artificial Sequence
  Description of Artificial Sequence: Synthetic oligonucleotide
  Antisense strand to SEQ ID NO: 215774
caggauagacuaauacauc

SEQ ID NO: 215776 - RNA, 19 nt, Artificial Sequence
  Description of Artificial Sequence: Synthetic oligonucleotide
  Sense strand starting at position 3491 of SEQ ID NO: 2779
ucucuuucuagcgugcaga

SEQ ID NO: 215777 - RNA, 19 nt, Artificial Sequence
  Description of Artificial Sequence: Synthetic oligonucleotide
  Antisense strand to SEQ ID NO: 215776
ucugcacgcuagaaagaga

SEQ ID NO: 215778 - RNA, 19 nt, Artificial Sequence
  Description of Artificial Sequence: Synthetic oligonucleotide
  Sense strand starting at position 3684 of SEQ ID NO: 2779
acagucauacugugaggca

SEQ ID NO: 215779 - RNA, 19 nt, Artificial Sequence
  Description of Artificial Sequence: Synthetic oligonucleotide
  Antisense strand to SEQ ID NO: 215778
ugccucacaguaugacugu

SEQ ID NO: 215780 - RNA, 19 nt, Artificial Sequence
  Description of Artificial Sequence: Synthetic oligonucleotide
  Sense strand starting at position 3758 of SEQ ID NO: 2779
ccacauaucuggguuagua

SEQ ID NO: 215781 - RNA, 19 nt, Artificial Sequence
  Description of Artificial Sequence: Synthetic oligonucleotide
  Antisense strand to SEQ ID NO: 215780
uacuaacccagauaugugg

SEQ ID NO: 215782 - RNA, 19 nt, Artificial Sequence
  Description of Artificial Sequence: Synthetic oligonucleotide
  Sense strand starting at position 3800 of SEQ ID NO: 2779
ggcuauuuguauccucgga

SEQ ID NO: 215783 - RNA, 19 nt, Artificial Sequence
  Description of Artificial Sequence: Synthetic oligonucleotide
  Antisense strand to SEQ ID NO: 215782
uccgaggauacaaauagcc

SEQ ID NO: 215784 - RNA, 19 nt, Artificial Sequence
  Description of Artificial Sequence: Synthetic oligonucleotide
  Sense strand starting at position 3804 of SEQ ID NO: 2779
auuuguauccucggaccuu

SEQ ID NO: 215785 - RNA, 19 nt, Artificial Sequence
  Description of Artificial Sequence: Synthetic oligonucleotide
  Antisense strand to SEQ ID NO: 215784
aagguccgaggauacaaau

SEQ ID NO: 215786 - RNA, 19 nt, Artificial Sequence
  Description of Artificial Sequence: Synthetic oligonucleotide
  Sense strand starting at position 60 of SEQ ID NO: 2780
cccaccagcuuagugaaau

SEQ ID NO: 215787 - RNA, 19 nt, Artificial Sequence
  Description of Artificial Sequence: Synthetic oligonucleotide
  Antisense strand to SEQ ID NO: 215786
auuucacuaagcugguggg

SEQ ID NO: 215788 - RNA, 19 nt, Artificial Sequence
  Description of Artificial Sequence: Synthetic oligonucleotide
  Sense strand starting at position 119 of SEQ ID NO: 2780
gggacucuggcguagaaga

SEQ ID NO: 215789 - RNA, 19 nt, Artificial Sequence
  Description of Artificial Sequence: Synthetic oligonucleotide
  Antisense strand to SEQ ID NO: 215788
ucuucuacgccagaguccc

SEQ ID NO: 215790 - RNA, 19 nt, Artificial Sequence
  Description of Artificial Sequence: Synthetic oligonucleotide
  Sense strand starting at position 204 of SEQ ID NO: 2780
caugaauucucagcgugaa

SEQ ID NO: 215791 - RNA, 19 nt, Artificial Sequence
  Description of Artificial Sequence: Synthetic oligonucleotide
  Antisense strand to SEQ ID NO: 215790
uucacgcugagaauucaug

SEQ ID NO: 215792 - RNA, 19 nt, Artificial Sequence
  Description of Artificial Sequence: Synthetic oligonucleotide
  Sense strand starting at position 205 of SEQ ID NO: 2780
augaauucucagcgugaac

SEQ ID NO: 215793 - RNA, 19 nt, Artificial Sequence
  Description of Artificial Sequence: Synthetic oligonucleotide
  Antisense strand to SEQ ID NO: 215792
guucacgcugagaauucau

SEQ ID NO: 215794 - RNA, 19 nt, Artificial Sequence
  Description of Artificial Sequence: Synthetic oligonucleotide
  Sense strand starting at position 656 of SEQ ID NO: 2780
ccgcucaguagggagauua

SEQ ID NO: 215795 - RNA, 19 nt, Artificial Sequence
  Description of Artificial Sequence: Synthetic oligonucleotide
  Antisense strand to SEQ ID NO: 215794
uaaucucccuacugagcgg

SEQ ID NO: 215796 - RNA, 19 nt, Artificial Sequence
  Description of Artificial Sequence: Synthetic oligonucleotide
  Sense strand starting at position 892 of SEQ ID NO: 2780
cgagaucccgggugugauu

SEQ ID NO: 215797 - RNA, 19 nt, Artificial Sequence
  Description of Artificial Sequence: Synthetic oligonucleotide
  Antisense strand to SEQ ID NO: 215796
aaucacacccgggaucucg

SEQ ID NO: 215798 - RNA, 19 nt, Artificial Sequence
  Description of Artificial Sequence: Synthetic oligonucleotide
  Sense strand starting at position 1299 of SEQ ID NO: 2780
gcugugggacgugaguaaa

SEQ ID NO: 215799 - RNA, 19 nt, Artificial Sequence
  Description of Artificial Sequence: Synthetic oligonucleotide
  Antisense strand to SEQ ID NO: 215798
uuuacucacgucccacagc

SEQ ID NO: 215800 - RNA, 19 nt, Artificial Sequence
  Description of Artificial Sequence: Synthetic oligonucleotide
  Sense strand starting at position 2014 of SEQ ID NO: 2780
ggguuugaaguuuaaaggu

SEQ ID NO: 215801 - RNA, 19 nt, Artificial Sequence
  Description of Artificial Sequence: Synthetic oligonucleotide
  Antisense strand to SEQ ID NO: 215800
accuuuaaacuucaaaccc

SEQ ID NO: 215802 - RNA, 19 nt, Artificial Sequence
  Description of Artificial Sequence: Synthetic oligonucleotide
  Sense strand starting at position 2307 of SEQ ID NO: 2780
guguacuuccaagaacaca

SEQ ID NO: 215803 - RNA, 19 nt, Artificial Sequence
  Description of Artificial Sequence: Synthetic oligonucleotide
  Antisense strand to SEQ ID NO: 215802
uguguucuuggaaguacac

SEQ ID NO: 215804 - RNA, 19 nt, Artificial Sequence
  Description of Artificial Sequence: Synthetic oligonucleotide
  Sense strand starting at position 2453 of SEQ ID NO: 2780
guuccagguucucuugacu

SEQ ID NO: 215805 - RNA, 19 nt, Artificial Sequence
  Description of Artificial Sequence: Synthetic oligonucleotide
  Antisense strand to SEQ ID NO: 215804
agucaagagaaccuggaac

SEQ ID NO: 215806 - RNA, 19 nt, Artificial Sequence
  Description of Artificial Sequence: Synthetic oligonucleotide
  Sense strand starting at position 2456 of SEQ ID NO: 2780
ccagguucucuugacugau

SEQ ID NO: 215807 - RNA, 19 nt, Artificial Sequence
  Description of Artificial Sequence: Synthetic oligonucleotide
  Antisense strand to SEQ ID NO: 215806
aucagucaagagaaccugg

SEQ ID NO: 215808 - RNA, 19 nt, Artificial Sequence
  Description of Artificial Sequence: Synthetic oligonucleotide
  Sense strand starting at position 2525 of SEQ ID NO: 2780
accagagcuucucugagga

SEQ ID NO: 215809 - RNA, 19 nt, Artificial Sequence
  Description of Artificial Sequence: Synthetic oligonucleotide
  Antisense strand to SEQ ID NO: 215808
uccucagagaagcucuggu

SEQ ID NO: 215810 - RNA, 19 nt, Artificial Sequence
  Description of Artificial Sequence: Synthetic oligonucleotide
  Sense strand starting at position 2572 of SEQ ID NO: 2780
cuuaucaaaucgccuguua

SEQ ID NO: 215811 - RNA, 19 nt, Artificial Sequence
  Description of Artificial Sequence: Synthetic oligonucleotide
  Antisense strand to SEQ ID NO: 215810
uaacaggcgauuugauaag

SEQ ID NO: 215812 - RNA, 19 nt, Artificial Sequence
  Description of Artificial Sequence: Synthetic oligonucleotide
  Sense strand starting at position 2601 of SEQ ID NO: 2780
uuaucuuuagaaggcuuaa

SEQ ID NO: 215813 - RNA, 19 nt, Artificial Sequence
  Description of Artificial Sequence: Synthetic oligonucleotide
  Antisense strand to SEQ ID NO: 215812
uuaagccuucuaaagauaa

SEQ ID NO: 215814 - RNA, 19 nt, Artificial Sequence
  Description of Artificial Sequence: Synthetic oligonucleotide
  Sense strand starting at position 2650 of SEQ ID NO: 2780
agagaugaaguguauguuu

SEQ ID NO: 215815 - RNA, 19 nt, Artificial Sequence
  Description of Artificial Sequence: Synthetic oligonucleotide
  Antisense strand to SEQ ID NO: 215814
aaacauacacuucaucucu

SEQ ID NO: 215816 - RNA, 19 nt, Artificial Sequence
  Description of Artificial Sequence: Synthetic oligonucleotide
  Sense strand starting at position 2786 of SEQ ID NO: 2780
ggcuuagucguucagauuc

SEQ ID NO: 215817 - RNA, 19 nt, Artificial Sequence
  Description of Artificial Sequence: Synthetic oligonucleotide
  Antisense strand to SEQ ID NO: 215816
gaaucugaacgacuaagcc

SEQ ID NO: 215818 - RNA, 19 nt, Artificial Sequence
  Description of Artificial Sequence: Synthetic oligonucleotide
  Sense strand starting at position 2962 of SEQ ID NO: 2780
agaugagacuuugccucau

SEQ ID NO: 215819 - RNA, 19 nt, Artificial Sequence
  Description of Artificial Sequence: Synthetic oligonucleotide
  Antisense strand to SEQ ID NO: 215818
augaggcaaagucucaucu

SEQ ID NO: 215820 - RNA, 19 nt, Artificial Sequence
  Description of Artificial Sequence: Synthetic oligonucleotide
  Sense strand starting at position 2966 of SEQ ID NO: 2780
gagacuuugccucauugag

SEQ ID NO: 215821 - RNA, 19 nt, Artificial Sequence
  Description of Artificial Sequence: Synthetic oligonucleotide
  Antisense strand to SEQ ID NO: 215820
cucaaugaggcaaagucuc

SEQ ID NO: 215822 - RNA, 19 nt, Artificial Sequence
  Description of Artificial Sequence: Synthetic oligonucleotide
  Sense strand starting at position 2968 of SEQ ID NO: 2780
gacuuugccucauugagga

SEQ ID NO: 215823 - RNA, 19 nt, Artificial Sequence
  Description of Artificial Sequence: Synthetic oligonucleotide
  Antisense strand to SEQ ID NO: 215822
uccucaaugaggcaaaguc

SEQ ID NO: 215824 - RNA, 19 nt, Artificial Sequence
  Description of Artificial Sequence: Synthetic oligonucleotide
  Sense strand starting at position 2994 of SEQ ID NO: 2780
auucuuauuccagggaauc

SEQ ID NO: 215825 - RNA, 19 nt, Artificial Sequence
  Description of Artificial Sequence: Synthetic oligonucleotide
  Antisense strand to SEQ ID NO: 215824
gauucccuggaauaagaau

SEQ ID NO: 215826 - RNA, 19 nt, Artificial Sequence
  Description of Artificial Sequence: Synthetic oligonucleotide
  Sense strand starting at position 2995 of SEQ ID NO: 2780
uucuuauuccagggaaucu

SEQ ID NO: 215827 - RNA, 19 nt, Artificial Sequence
  Description of Artificial Sequence: Synthetic oligonucleotide
  Antisense strand to SEQ ID NO: 215826
agauucccuggaauaagaa

SEQ ID NO: 215828 - RNA, 19 nt, Artificial Sequence
  Description of Artificial Sequence: Synthetic oligonucleotide
  Sense strand starting at position 3012 of SEQ ID NO: 2780
cuccacgugccucaauuau

SEQ ID NO: 215829 - RNA, 19 nt, Artificial Sequence
  Description of Artificial Sequence: Synthetic oligonucleotide
  Antisense strand to SEQ ID NO: 215828
auaauugaggcacguggag

SEQ ID NO: 215830 - RNA, 19 nt, Artificial Sequence
  Description of Artificial Sequence: Synthetic oligonucleotide
  Sense strand starting at position 3046 of SEQ ID NO: 2780
ucaguuguuaugugcauuu

SEQ ID NO: 215831 - RNA, 19 nt, Artificial Sequence
  Description of Artificial Sequence: Synthetic oligonucleotide
  Antisense strand to SEQ ID NO: 215830
aaaugcacauaacaacuga

SEQ ID NO: 215832 - RNA, 19 nt, Artificial Sequence
  Description of Artificial Sequence: Synthetic oligonucleotide
  Sense strand starting at position 3071 of SEQ ID NO: 2780
uaguucucauugucaggaa

SEQ ID NO: 215833 - RNA, 19 nt, Artificial Sequence
  Description of Artificial Sequence: Synthetic oligonucleotide
  Antisense strand to SEQ ID NO: 215832
uuccugacaaugagaacua

SEQ ID NO: 215834 - RNA, 19 nt, Artificial Sequence
  Description of Artificial Sequence: Synthetic oligonucleotide
  Sense strand starting at position 3146 of SEQ ID NO: 2780
cuggcuuguccucagggaa

SEQ ID NO: 215835 - RNA, 19 nt, Artificial Sequence
  Description of Artificial Sequence: Synthetic oligonucleotide
  Antisense strand to SEQ ID NO: 215834
uucccugaggacaagccag

SEQ ID NO: 215836 - RNA, 19 nt, Artificial Sequence
  Description of Artificial Sequence: Synthetic oligonucleotide
  Sense strand starting at position 3186 of SEQ ID NO: 2780
uucuguuguccagaaacau

SEQ ID NO: 215837 - RNA, 19 nt, Artificial Sequence
  Description of Artificial Sequence: Synthetic oligonucleotide
  Antisense strand to SEQ ID NO: 215836
auguuucuggacaacagaa

SEQ ID NO: 215838 - RNA, 19 nt, Artificial Sequence
  Description of Artificial Sequence: Synthetic oligonucleotide
  Sense strand starting at position 3243 of SEQ ID NO: 2780
guaaauaguagugaucaug

SEQ ID NO: 215839 - RNA, 19 nt, Artificial Sequence
  Description of Artificial Sequence: Synthetic oligonucleotide
  Antisense strand to SEQ ID NO: 215838
caugaucacuacuauuuac

SEQ ID NO: 215840 - RNA, 19 nt, Artificial Sequence
  Description of Artificial Sequence: Synthetic oligonucleotide
  Sense strand starting at position 3295 of SEQ ID NO: 2780
cuuggacuuuguuucugaa

SEQ ID NO: 215841 - RNA, 19 nt, Artificial Sequence
  Description of Artificial Sequence: Synthetic oligonucleotide
  Antisense strand to SEQ ID NO: 215840
uucagaaacaaaguccaag

SEQ ID NO: 215842 - RNA, 19 nt, Artificial Sequence
  Description of Artificial Sequence: Synthetic oligonucleotide
  Sense strand starting at position 3297 of SEQ ID NO: 2780
uggacuuuguuucugaaau

SEQ ID NO: 215843 - RNA, 19 nt, Artificial Sequence
  Description of Artificial Sequence: Synthetic oligonucleotide
  Antisense strand to SEQ ID NO: 215842
auuucagaaacaaagucca

SEQ ID NO: 215844 - RNA, 19 nt, Artificial Sequence
  Description of Artificial Sequence: Synthetic oligonucleotide
  Sense strand starting at position 3381 of SEQ ID NO: 2780
guguccugagucugaugaa

SEQ ID NO: 215845 - RNA, 19 nt, Artificial Sequence
  Description of Artificial Sequence: Synthetic oligonucleotide
  Antisense strand to SEQ ID NO: 215844
uucaucagacucaggacac

SEQ ID NO: 215846 - RNA, 19 nt, Artificial Sequence
  Description of Artificial Sequence: Synthetic oligonucleotide
  Sense strand starting at position 3402 of SEQ ID NO: 2780
gagauagaguguuuagcac

SEQ ID NO: 215847 - RNA, 19 nt, Artificial Sequence
  Description of Artificial Sequence: Synthetic oligonucleotide
  Antisense strand to SEQ ID NO: 215846
gugcuaaacacucuaucuc

SEQ ID NO: 215848 - RNA, 19 nt, Artificial Sequence
  Description of Artificial Sequence: Synthetic oligonucleotide
  Sense strand starting at position 3408 of SEQ ID NO: 2780
gaguguuuagcacagaaau

SEQ ID NO: 215849 - RNA, 19 nt, Artificial Sequence
  Description of Artificial Sequence: Synthetic oligonucleotide
  Antisense strand to SEQ ID NO: 215848
auuucugugcuaaacacuc

SEQ ID NO: 215850 - RNA, 19 nt, Artificial Sequence
  Description of Artificial Sequence: Synthetic oligonucleotide
  Sense strand starting at position 3447 of SEQ ID NO: 2780
gggaaugauguauguggca

SEQ ID NO: 215851 - RNA, 19 nt, Artificial Sequence
  Description of Artificial Sequence: Synthetic oligonucleotide
  Antisense strand to SEQ ID NO: 215850
ugccacauacaucauuccc

SEQ ID NO: 215852 - RNA, 19 nt, Artificial Sequence
  Description of Artificial Sequence: Synthetic oligonucleotide
  Sense strand starting at position 3461 of SEQ ID NO: 2780
uggcaauaguuaucauuga

SEQ ID NO: 215853 - RNA, 19 nt, Artificial Sequence
  Description of Artificial Sequence: Synthetic oligonucleotide
  Antisense strand to SEQ ID NO: 215852
ucaaugauaacuauugcca

SEQ ID NO: 215854 - RNA, 19 nt, Artificial Sequence
  Description of Artificial Sequence: Synthetic oligonucleotide
  Sense strand starting at position 3479 of SEQ ID NO: 2780
aagaacuuugggugucuga

SEQ ID NO: 215855 - RNA, 19 nt, Artificial Sequence
  Description of Artificial Sequence: Synthetic oligonucleotide
  Antisense strand to SEQ ID NO: 215854
ucagacacccaaaguucuu

SEQ ID NO: 215856 - RNA, 19 nt, Artificial Sequence
  Description of Artificial Sequence: Synthetic oligonucleotide
  Sense strand starting at position 3548 of SEQ ID NO: 2780
ggauguaucugugaauuug

SEQ ID NO: 215857 - RNA, 19 nt, Artificial Sequence
  Description of Artificial Sequence: Synthetic oligonucleotide
  Antisense strand to SEQ ID NO: 215856
caaauucacagauacaucc

SEQ ID NO: 215858 - RNA, 19 nt, Artificial Sequence
  Description of Artificial Sequence: Synthetic oligonucleotide
  Sense strand starting at position 3556 of SEQ ID NO: 2780
cugugaauuugccugcaaa

SEQ ID NO: 215859 - RNA, 19 nt, Artificial Sequence
  Description of Artificial Sequence: Synthetic oligonucleotide
  Antisense strand to SEQ ID NO: 215858
uuugcaggcaaauucacag

SEQ ID NO: 215860 - RNA, 19 nt, Artificial Sequence
  Description of Artificial Sequence: Synthetic oligonucleotide
  Sense strand starting at position 3626 of SEQ ID NO: 2780
gcccaaugcucacucaaug

SEQ ID NO: 215861 - RNA, 19 nt, Artificial Sequence
  Description of Artificial Sequence: Synthetic oligonucleotide
  Antisense strand to SEQ ID NO: 215860
cauugagugagcauugggc

SEQ ID NO: 215862 - RNA, 19 nt, Artificial Sequence
  Description of Artificial Sequence: Synthetic oligonucleotide
  Sense strand starting at position 3758 of SEQ ID NO: 2780
aaauuagugggaugcucua

SEQ ID NO: 215863 - RNA, 19 nt, Artificial Sequence
  Description of Artificial Sequence: Synthetic oligonucleotide
  Antisense strand to SEQ ID NO: 215862
uagagcaucccacuaauuu

SEQ ID NO: 215864 - RNA, 19 nt, Artificial Sequence
  Description of Artificial Sequence: Synthetic oligonucleotide
  Sense strand starting at position 3780 of SEQ ID NO: 2780
ggcccauggcacuaagaga

SEQ ID NO: 215865 - RNA, 19 nt, Artificial Sequence
  Description of Artificial Sequence: Synthetic oligonucleotide
  Antisense strand to SEQ ID NO: 215864
ucucuuagugccaugggcc

SEQ ID NO: 215866 - RNA, 19 nt, Artificial Sequence
  Description of Artificial Sequence: Synthetic oligonucleotide
  Sense strand starting at position 149 of SEQ ID NO: 2781
gagacuaagucagcauaaa

SEQ ID NO: 215867 - RNA, 19 nt, Artificial Sequence
  Description of Artificial Sequence: Synthetic oligonucleotide
  Antisense strand to SEQ ID NO: 215866
uuuaugcugacuuagucuc

SEQ ID NO: 215868 - RNA, 19 nt, Artificial Sequence
  Description of Artificial Sequence: Synthetic oligonucleotide
  Sense strand starting at position 157 of SEQ ID NO: 2781
gucagcauaaauggaguua

SEQ ID NO: 215869 - RNA, 19 nt, Artificial Sequence
  Description of Artificial Sequence: Synthetic oligonucleotide
  Antisense strand to SEQ ID NO: 215868
uaacuccauuuaugcugac

SEQ ID NO: 215870 - RNA, 19 nt, Artificial Sequence
  Description of Artificial Sequence: Synthetic oligonucleotide
  Sense strand starting at position 182 of SEQ ID NO: 2781
gugaaagcaaaguguuaag

SEQ ID NO: 215871 - RNA, 19 nt, Artificial Sequence
  Description of Artificial Sequence: Synthetic oligonucleotide
  Antisense strand to SEQ ID NO: 215870
cuuaacacuuugcuuucac

SEQ ID NO: 215872 - RNA, 19 nt, Artificial Sequence
  Description of Artificial Sequence: Synthetic oligonucleotide
  Sense strand starting at position 193 of SEQ ID NO: 2781
guguuaaguuucccugacu

SEQ ID NO: 215873 - RNA, 19 nt, Artificial Sequence
  Description of Artificial Sequence: Synthetic oligonucleotide
  Antisense strand to SEQ ID NO: 215872
agucagggaaacuuaacac

SEQ ID NO: 215874 - RNA, 19 nt, Artificial Sequence
  Description of Artificial Sequence: Synthetic oligonucleotide
  Sense strand starting at position 206 of SEQ ID NO: 2781
cugacuuuaccgcagauaa

SEQ ID NO: 215875 - RNA, 19 nt, Artificial Sequence
  Description of Artificial Sequence: Synthetic oligonucleotide
  Antisense strand to SEQ ID NO: 215874
uuaucugcgguaaagucag

SEQ ID NO: 215876 - RNA, 19 nt, Artificial Sequence
  Description of Artificial Sequence: Synthetic oligonucleotide
  Sense strand starting at position 268 of SEQ ID NO: 2781
ccuuaagaaugcucugaag

SEQ ID NO: 215877 - RNA, 19 nt, Artificial Sequence
  Description of Artificial Sequence: Synthetic oligonucleotide
  Antisense strand to SEQ ID NO: 215876
cuucagagcauucuuaagg

SEQ ID NO: 215878 - RNA, 19 nt, Artificial Sequence
  Description of Artificial Sequence: Synthetic oligonucleotide
  Sense strand starting at position 270 of SEQ ID NO: 2781
uuaagaaugcucugaagga

SEQ ID NO: 215879 - RNA, 19 nt, Artificial Sequence
  Description of Artificial Sequence: Synthetic oligonucleotide
  Antisense strand to SEQ ID NO: 215878
uccuucagagcauucuuaa

SEQ ID NO: 215880 - RNA, 19 nt, Artificial Sequence
  Description of Artificial Sequence: Synthetic oligonucleotide
  Sense strand starting at position 271 of SEQ ID NO: 2781
uaagaaugcucugaaggaa

SEQ ID NO: 215881 - RNA, 19 nt, Artificial Sequence
  Description of Artificial Sequence: Synthetic oligonucleotide
  Antisense strand to SEQ ID NO: 215880
uuccuucagagcauucuua

SEQ ID NO: 215882 - RNA, 19 nt, Artificial Sequence
  Description of Artificial Sequence: Synthetic oligonucleotide
  Sense strand starting at position 290 of SEQ ID NO: 2781
acauuacagguccagucaa

SEQ ID NO: 215883 - RNA, 19 nt, Artificial Sequence
  Description of Artificial Sequence: Synthetic oligonucleotide
  Antisense strand to SEQ ID NO: 215882
uugacuggaccuguaaugu

SEQ ID NO: 215884 - RNA, 19 nt, Artificial Sequence
  Description of Artificial Sequence: Synthetic oligonucleotide
  Sense strand starting at position 312 of SEQ ID NO: 2781
gauauuacaugugugcaca

SEQ ID NO: 215885 - RNA, 19 nt, Artificial Sequence
  Description of Artificial Sequence: Synthetic oligonucleotide
  Antisense strand to SEQ ID NO: 215884
ugugcacacauguaauauc

SEQ ID NO: 215886 - RNA, 19 nt, Artificial Sequence
  Description of Artificial Sequence: Synthetic oligonucleotide
  Sense strand starting at position 348 of SEQ ID NO: 2781
ccuggagacuaccaucuuu

SEQ ID NO: 215887 - RNA, 19 nt, Artificial Sequence
  Description of Artificial Sequence: Synthetic oligonucleotide
  Antisense strand to SEQ ID NO: 215886
aaagaugguagucuccagg

SEQ ID NO: 215888 - RNA, 19 nt, Artificial Sequence
  Description of Artificial Sequence: Synthetic oligonucleotide
  Sense strand starting at position 365 of SEQ ID NO: 2781
uuucuauguucuucuaguu

SEQ ID NO: 215889 - RNA, 19 nt, Artificial Sequence
  Description of Artificial Sequence: Synthetic oligonucleotide
  Antisense strand to SEQ ID NO: 215888
aacuagaagaacauagaaa

SEQ ID NO: 215890 - RNA, 19 nt, Artificial Sequence
  Description of Artificial Sequence: Synthetic oligonucleotide
  Sense strand starting at position 370 of SEQ ID NO: 2781
auguucuucuaguuucuau

SEQ ID NO: 215891 - RNA, 19 nt, Artificial Sequence
  Description of Artificial Sequence: Synthetic oligonucleotide
  Antisense strand to SEQ ID NO: 215890
auagaaacuagaagaacau

SEQ ID NO: 215892 - RNA, 19 nt, Artificial Sequence
  Description of Artificial Sequence: Synthetic oligonucleotide
  Sense strand starting at position 523 of SEQ ID NO: 2781
uaaaguguucgcugucuaa

SEQ ID NO: 215893 - RNA, 19 nt, Artificial Sequence
  Description of Artificial Sequence: Synthetic oligonucleotide
  Antisense strand to SEQ ID NO: 215892
uuagacagcgaacacuuua

SEQ ID NO: 215894 - RNA, 19 nt, Artificial Sequence
  Description of Artificial Sequence: Synthetic oligonucleotide
  Sense strand starting at position 527 of SEQ ID NO: 2781
guguucgcugucuaaagga

SEQ ID NO: 215895 - RNA, 19 nt, Artificial Sequence
  Description of Artificial Sequence: Synthetic oligonucleotide
  Antisense strand to SEQ ID NO: 215894
uccuuuagacagcgaacac

SEQ ID NO: 215896 - RNA, 19 nt, Artificial Sequence
  Description of Artificial Sequence: Synthetic oligonucleotide
  Sense strand starting at position 556 of SEQ ID NO: 2781
ucugaucgauggccuuuaa

SEQ ID NO: 215897 - RNA, 19 nt, Artificial Sequence
  Description of Artificial Sequence: Synthetic oligonucleotide
  Antisense strand to SEQ ID NO: 215896
uuaaaggccaucgaucaga

SEQ ID NO: 215898 - RNA, 19 nt, Artificial Sequence
  Description of Artificial Sequence: Synthetic oligonucleotide
  Sense strand starting at position 560 of SEQ ID NO: 2781
aucgauggccuuuaaguau

SEQ ID NO: 215899 - RNA, 19 nt, Artificial Sequence
  Description of Artificial Sequence: Synthetic oligonucleotide
  Antisense strand to SEQ ID NO: 215898
auacuuaaaggccaucgau

SEQ ID NO: 215900 - RNA, 19 nt, Artificial Sequence
  Description of Artificial Sequence: Synthetic oligonucleotide
  Sense strand starting at position 669 of SEQ ID NO: 2781
ccagaaggcuuccauaacu

SEQ ID NO: 215901 - RNA, 19 nt, Artificial Sequence
  Description of Artificial Sequence: Synthetic oligonucleotide
  Antisense strand to SEQ ID NO: 215900
aguuauggaagccuucugg

SEQ ID NO: 215902 - RNA, 19 nt, Artificial Sequence
  Description of Artificial Sequence: Synthetic oligonucleotide
  Sense strand starting at position 744 of SEQ ID NO: 2781
ggccguuaccucgcuugaa

SEQ ID NO: 215903 - RNA, 19 nt, Artificial Sequence
  Description of Artificial Sequence: Synthetic oligonucleotide
  Antisense strand to SEQ ID NO: 215902
uucaagcgagguaacggcc

SEQ ID NO: 215904 - RNA, 19 nt, Artificial Sequence
  Description of Artificial Sequence: Synthetic oligonucleotide
  Sense strand starting at position 2328 of SEQ ID NO: 2781
cgagccaauucucugggaa

SEQ ID NO: 215905 - RNA, 19 nt, Artificial Sequence
  Description of Artificial Sequence: Synthetic oligonucleotide
  Antisense strand to SEQ ID NO: 215904
uucccagagaauuggcucg

SEQ ID NO: 215906 - RNA, 19 nt, Artificial Sequence
  Description of Artificial Sequence: Synthetic oligonucleotide
  Sense strand starting at position 2331 of SEQ ID NO: 2781
gccaauucucugggaaguu

SEQ ID NO: 215907 - RNA, 19 nt, Artificial Sequence
  Description of Artificial Sequence: Synthetic oligonucleotide
  Antisense strand to SEQ ID NO: 215906
aacuucccagagaauuggc

SEQ ID NO: 215908 - RNA, 19 nt, Artificial Sequence
  Description of Artificial Sequence: Synthetic oligonucleotide
  Sense strand starting at position 2418 of SEQ ID NO: 2781
gacugaaaugugcgagaca

SEQ ID NO: 215909 - RNA, 19 nt, Artificial Sequence
  Description of Artificial Sequence: Synthetic oligonucleotide
  Antisense strand to SEQ ID NO: 215908
ugucucgcacauuucaguc

SEQ ID NO: 215910 - RNA, 19 nt, Artificial Sequence
  Description of Artificial Sequence: Synthetic oligonucleotide
  Sense strand starting at position 2421 of SEQ ID NO: 2781
ugaaaugugcgagacaugu

SEQ ID NO: 215911 - RNA, 19 nt, Artificial Sequence
  Description of Artificial Sequence: Synthetic oligonucleotide
  Antisense strand to SEQ ID NO: 215910
acaugucucgcacauuuca

SEQ ID NO: 215912 - RNA, 19 nt, Artificial Sequence
  Description of Artificial Sequence: Synthetic oligonucleotide
  Sense strand starting at position 2499 of SEQ ID NO: 2781
ggcuaagagggcugaaaua

SEQ ID NO: 215913 - RNA, 19 nt, Artificial Sequence
  Description of Artificial Sequence: Synthetic oligonucleotide
  Antisense strand to SEQ ID NO: 215912
uauuucagcccucuuagcc

SEQ ID NO: 215914 - RNA, 19 nt, Artificial Sequence
  Description of Artificial Sequence: Synthetic oligonucleotide
  Sense strand starting at position 2536 of SEQ ID NO: 2781
ccgggagguuuaagguuua

SEQ ID NO: 215915 - RNA, 19 nt, Artificial Sequence
  Description of Artificial Sequence: Synthetic oligonucleotide
  Antisense strand to SEQ ID NO: 215914
uaaaccuuaaaccucccgg

SEQ ID NO: 215916 - RNA, 19 nt, Artificial Sequence
  Description of Artificial Sequence: Synthetic oligonucleotide
  Sense strand starting at position 2684 of SEQ ID NO: 2781
gcuaccucaggugguuaau

SEQ ID NO: 215917 - RNA, 19 nt, Artificial Sequence
  Description of Artificial Sequence: Synthetic oligonucleotide
  Antisense strand to SEQ ID NO: 215916
auuaaccaccugagguagc

SEQ ID NO: 215918 - RNA, 19 nt, Artificial Sequence
  Description of Artificial Sequence: Synthetic oligonucleotide
  Sense strand starting at position 2686 of SEQ ID NO: 2781
uaccucaggugguuaauau

SEQ ID NO: 215919 - RNA, 19 nt, Artificial Sequence
  Description of Artificial Sequence: Synthetic oligonucleotide
  Antisense strand to SEQ ID NO: 215918
auauuaaccaccugaggua

SEQ ID NO: 215920 - RNA, 19 nt, Artificial Sequence
  Description of Artificial Sequence: Synthetic oligonucleotide
  Sense strand starting at position 2690 of SEQ ID NO: 2781
ucaggugguuaauaucuaa

SEQ ID NO: 215921 - RNA, 19 nt, Artificial Sequence
  Description of Artificial Sequence: Synthetic oligonucleotide
  Antisense strand to SEQ ID NO: 215920
uuagauauuaaccaccuga

SEQ ID NO: 215922 - RNA, 19 nt, Artificial Sequence
  Description of Artificial Sequence: Synthetic oligonucleotide
  Sense strand starting at position 2693 of SEQ ID NO: 2781
ggugguuaauaucuaacag

SEQ ID NO: 215923 - RNA, 19 nt, Artificial Sequence
  Description of Artificial Sequence: Synthetic oligonucleotide
  Antisense strand to SEQ ID NO: 215922
cuguuagauauuaaccacc

SEQ ID NO: 215924 - RNA, 19 nt, Artificial Sequence
  Description of Artificial Sequence: Synthetic oligonucleotide
  Sense strand starting at position 2809 of SEQ ID NO: 2781
caguucugucaggaauuac

SEQ ID NO: 215925 - RNA, 19 nt, Artificial Sequence
  Description of Artificial Sequence: Synthetic oligonucleotide
  Antisense strand to SEQ ID NO: 215924
guaauuccugacagaacug

SEQ ID NO: 215926 - RNA, 19 nt, Artificial Sequence
  Description of Artificial Sequence: Synthetic oligonucleotide
  Sense strand starting at position 2853 of SEQ ID NO: 2781
agcucaccgcugggagaau

SEQ ID NO: 215927 - RNA, 19 nt, Artificial Sequence
  Description of Artificial Sequence: Synthetic oligonucleotide
  Antisense strand to SEQ ID NO: 215926
auucucccagcggugagcu

SEQ ID NO: 215928 - RNA, 19 nt, Artificial Sequence
  Description of Artificial Sequence: Synthetic oligonucleotide
  Sense strand starting at position 2901 of SEQ ID NO: 2781
agaggauccucacugcuga

SEQ ID NO: 215929 - RNA, 19 nt, Artificial Sequence
  Description of Artificial Sequence: Synthetic oligonucleotide
  Antisense strand to SEQ ID NO: 215928
ucagcagugaggauccucu

SEQ ID NO: 215930 - RNA, 19 nt, Artificial Sequence
  Description of Artificial Sequence: Synthetic oligonucleotide
  Sense strand starting at position 2902 of SEQ ID NO: 2781
gaggauccucacugcugaa

SEQ ID NO: 215931 - RNA, 19 nt, Artificial Sequence
  Description of Artificial Sequence: Synthetic oligonucleotide
  Antisense strand to SEQ ID NO: 215930
uucagcagugaggauccuc

SEQ ID NO: 215932 - RNA, 19 nt, Artificial Sequence
  Description of Artificial Sequence: Synthetic oligonucleotide
  Sense strand starting at position 2942 of SEQ ID NO: 2781
gucuguugacaguauggaa

SEQ ID NO: 215933 - RNA, 19 nt, Artificial Sequence
  Description of Artificial Sequence: Synthetic oligonucleotide
  Antisense strand to SEQ ID NO: 215932
uuccauacugucaacagac

SEQ ID NO: 215934 - RNA, 19 nt, Artificial Sequence
  Description of Artificial Sequence: Synthetic oligonucleotide
  Sense strand starting at position 2975 of SEQ ID NO: 2781
cagauaugaucuguaugug

SEQ ID NO: 215935 - RNA, 19 nt, Artificial Sequence
  Description of Artificial Sequence: Synthetic oligonucleotide
  Antisense strand to SEQ ID NO: 215934
cacauacagaucauaucug

SEQ ID NO: 215936 - RNA, 19 nt, Artificial Sequence
  Description of Artificial Sequence: Synthetic oligonucleotide
  Sense strand starting at position 2978 of SEQ ID NO: 2781
auaugaucuguaugugauu

SEQ ID NO: 215937 - RNA, 19 nt, Artificial Sequence
  Description of Artificial Sequence: Synthetic oligonucleotide
  Antisense strand to SEQ ID NO: 215936
aaucacauacagaucauau

SEQ ID NO: 215938 - RNA, 19 nt, Artificial Sequence
  Description of Artificial Sequence: Synthetic oligonucleotide
  Sense strand starting at position 2983 of SEQ ID NO: 2781
aucuguaugugauuggaag

SEQ ID NO: 215939 - RNA, 19 nt, Artificial Sequence
  Description of Artificial Sequence: Synthetic oligonucleotide
  Antisense strand to SEQ ID NO: 215938
cuuccaaucacauacagau

SEQ ID NO: 215940 - RNA, 19 nt, Artificial Sequence
  Description of Artificial Sequence: Synthetic oligonucleotide
  Sense strand starting at position 2985 of SEQ ID NO: 2781
cuguaugugauuggaagga

SEQ ID NO: 215941 - RNA, 19 nt, Artificial Sequence
  Description of Artificial Sequence: Synthetic oligonucleotide
  Antisense strand to SEQ ID NO: 215940
uccuuccaaucacauacag

SEQ ID NO: 215942 - RNA, 19 nt, Artificial Sequence
  Description of Artificial Sequence: Synthetic oligonucleotide
  Sense strand starting at position 3111 of SEQ ID NO: 2781
ugacuuacugcacauguca

SEQ ID NO: 215943 - RNA, 19 nt, Artificial Sequence
  Description of Artificial Sequence: Synthetic oligonucleotide
  Antisense strand to SEQ ID NO: 215942
ugacaugugcaguaaguca

SEQ ID NO: 215944 - RNA, 19 nt, Artificial Sequence
  Description of Artificial Sequence: Synthetic oligonucleotide
  Sense strand starting at position 3167 of SEQ ID NO: 2781
uugcuaugucaugaaagua

SEQ ID NO: 215945 - RNA, 19 nt, Artificial Sequence
  Description of Artificial Sequence: Synthetic oligonucleotide
  Antisense strand to SEQ ID NO: 215944
uacuuucaugacauagcaa

SEQ ID NO: 215946 - RNA, 19 nt, Artificial Sequence
  Description of Artificial Sequence: Synthetic oligonucleotide
  Sense strand starting at position 257 of SEQ ID NO: 2782
gggagcgaguaugucuuau

SEQ ID NO: 215947 - RNA, 19 nt, Artificial Sequence
  Description of Artificial Sequence: Synthetic oligonucleotide
  Antisense strand to SEQ ID NO: 215946
auaagacauacucgcuccc

SEQ ID NO: 215948 - RNA, 19 nt, Artificial Sequence
  Description of Artificial Sequence: Synthetic oligonucleotide
  Sense strand starting at position 259 of SEQ ID NO: 2782
gagcgaguaugucuuauuc

SEQ ID NO: 215949 - RNA, 19 nt, Artificial Sequence
  Description of Artificial Sequence: Synthetic oligonucleotide
  Antisense strand to SEQ ID NO: 215948
gaauaagacauacucgcuc

SEQ ID NO: 215950 - RNA, 19 nt, Artificial Sequence
  Description of Artificial Sequence: Synthetic oligonucleotide
  Sense strand starting at position 261 of SEQ ID NO: 2782
gcgaguaugucuuauucag

SEQ ID NO: 215951 - RNA, 19 nt, Artificial Sequence
  Description of Artificial Sequence: Synthetic oligonucleotide
  Antisense strand to SEQ ID NO: 215950
cugaauaagacauacucgc

SEQ ID NO: 215952 - RNA, 19 nt, Artificial Sequence
  Description of Artificial Sequence: Synthetic oligonucleotide
  Sense strand starting at position 319 of SEQ ID NO: 2782
acggcagacacuugagaau

SEQ ID NO: 215953 - RNA, 19 nt, Artificial Sequence
  Description of Artificial Sequence: Synthetic oligonucleotide
  Antisense strand to SEQ ID NO: 215952
auucucaagugucugccgu

SEQ ID NO: 215954 - RNA, 19 nt, Artificial Sequence
  Description of Artificial Sequence: Synthetic oligonucleotide
  Sense strand starting at position 326 of SEQ ID NO: 2782
acacuugagaaugggucua

SEQ ID NO: 215955 - RNA, 19 nt, Artificial Sequence
  Description of Artificial Sequence: Synthetic oligonucleotide
  Antisense strand to SEQ ID NO: 215954
uagacccauucucaagugu

SEQ ID NO: 215956 - RNA, 19 nt, Artificial Sequence
  Description of Artificial Sequence: Synthetic oligonucleotide
  Sense strand starting at position 482 of SEQ ID NO: 2782
ggaacuacaucuggccuua

SEQ ID NO: 215957 - RNA, 19 nt, Artificial Sequence
  Description of Artificial Sequence: Synthetic oligonucleotide
  Antisense strand to SEQ ID NO: 215956
uaaggccagauguaguucc

SEQ ID NO: 215958 - RNA, 19 nt, Artificial Sequence
  Description of Artificial Sequence: Synthetic oligonucleotide
  Sense strand starting at position 2400 of SEQ ID NO: 2782
aaggaaaccugagggcuua

SEQ ID NO: 215959 - RNA, 19 nt, Artificial Sequence
  Description of Artificial Sequence: Synthetic oligonucleotide
  Antisense strand to SEQ ID NO: 215958
uaagcccucagguuuccuu

SEQ ID NO: 215960 - RNA, 19 nt, Artificial Sequence
  Description of Artificial Sequence: Synthetic oligonucleotide
  Sense strand starting at position 2457 of SEQ ID NO: 2782
ccuccucacugcugagauu

SEQ ID NO: 215961 - RNA, 19 nt, Artificial Sequence
  Description of Artificial Sequence: Synthetic oligonucleotide
  Antisense strand to SEQ ID NO: 215960
aaucucagcagugaggagg

SEQ ID NO: 215962 - RNA, 19 nt, Artificial Sequence
  Description of Artificial Sequence: Synthetic oligonucleotide
  Sense strand starting at position 2531 of SEQ ID NO: 2782
cgacgaugcuuccaucaac

SEQ ID NO: 215963 - RNA, 19 nt, Artificial Sequence
  Description of Artificial Sequence: Synthetic oligonucleotide
  Antisense strand to SEQ ID NO: 215962
guugauggaagcaucgucg

SEQ ID NO: 215964 - RNA, 19 nt, Artificial Sequence
  Description of Artificial Sequence: Synthetic oligonucleotide
  Sense strand starting at position 2552 of SEQ ID NO: 2782
guggcugccugauguggaa

SEQ ID NO: 215965 - RNA, 19 nt, Artificial Sequence
  Description of Artificial Sequence: Synthetic oligonucleotide
  Antisense strand to SEQ ID NO: 215964
uuccacaucaggcagccac

SEQ ID NO: 215966 - RNA, 19 nt, Artificial Sequence
  Description of Artificial Sequence: Synthetic oligonucleotide
  Sense strand starting at position 2685 of SEQ ID NO: 2782
uguucuaggcucugacaau

SEQ ID NO: 215967 - RNA, 19 nt, Artificial Sequence
  Description of Artificial Sequence: Synthetic oligonucleotide
  Antisense strand to SEQ ID NO: 215966
auugucagagccuagaaca

SEQ ID NO: 215968 - RNA, 19 nt, Artificial Sequence
  Description of Artificial Sequence: Synthetic oligonucleotide
  Sense strand starting at position 2686 of SEQ ID NO: 2782
guucuaggcucugacaaua

SEQ ID NO: 215969 - RNA, 19 nt, Artificial Sequence
  Description of Artificial Sequence: Synthetic oligonucleotide
  Antisense strand to SEQ ID NO: 215968
uauugucagagccuagaac

SEQ ID NO: 215970 - RNA, 19 nt, Artificial Sequence
  Description of Artificial Sequence: Synthetic oligonucleotide
  Sense strand starting at position 2699 of SEQ ID NO: 2782
acaauagagcagugaacaa

SEQ ID NO: 215971 - RNA, 19 nt, Artificial Sequence
  Description of Artificial Sequence: Synthetic oligonucleotide
  Antisense strand to SEQ ID NO: 215970
uuguucacugcucuauugu

SEQ ID NO: 215972 - RNA, 19 nt, Artificial Sequence
  Description of Artificial Sequence: Synthetic oligonucleotide
  Sense strand starting at position 2810 of SEQ ID NO: 2782
cccucagaguuaguagaau

SEQ ID NO: 215973 - RNA, 19 nt, Artificial Sequence
  Description of Artificial Sequence: Synthetic oligonucleotide
  Antisense strand to SEQ ID NO: 215972
auucuacuaacucugaggg

SEQ ID NO: 215974 - RNA, 19 nt, Artificial Sequence
  Description of Artificial Sequence: Synthetic oligonucleotide
  Sense strand starting at position 2936 of SEQ ID NO: 2782
agagcauuacuucgcuaag

SEQ ID NO: 215975 - RNA, 19 nt, Artificial Sequence
  Description of Artificial Sequence: Synthetic oligonucleotide
  Antisense strand to SEQ ID NO: 215974
cuuagcgaaguaaugcucu

SEQ ID NO: 215976 - RNA, 19 nt, Artificial Sequence
  Description of Artificial Sequence: Synthetic oligonucleotide
  Sense strand starting at position 2937 of SEQ ID NO: 2782
gagcauuacuucgcuaagc

SEQ ID NO: 215977 - RNA, 19 nt, Artificial Sequence
  Description of Artificial Sequence: Synthetic oligonucleotide
  Antisense strand to SEQ ID NO: 215976
gcuuagcgaaguaaugcuc

SEQ ID NO: 215978 - RNA, 19 nt, Artificial Sequence
  Description of Artificial Sequence: Synthetic oligonucleotide
  Sense strand starting at position 2938 of SEQ ID NO: 2782
agcauuacuucgcuaagcu

SEQ ID NO: 215979 - RNA, 19 nt, Artificial Sequence
  Description of Artificial Sequence: Synthetic oligonucleotide
  Antisense strand to SEQ ID NO: 215978
agcuuagcgaaguaaugcu

SEQ ID NO: 215980 - RNA, 19 nt, Artificial Sequence
  Description of Artificial Sequence: Synthetic oligonucleotide
  Sense strand starting at position 2939 of SEQ ID NO: 2782
gcauuacuucgcuaagcuu

SEQ ID NO: 215981 - RNA, 19 nt, Artificial Sequence
  Description of Artificial Sequence: Synthetic oligonucleotide
  Antisense strand to SEQ ID NO: 215980
aagcuuagcgaaguaaugc

SEQ ID NO: 215982 - RNA, 19 nt, Artificial Sequence
  Description of Artificial Sequence: Synthetic oligonucleotide
  Sense strand starting at position 3001 of SEQ ID NO: 2782
uuagaauauucuuuggcua

SEQ ID NO: 215983 - RNA, 19 nt, Artificial Sequence
  Description of Artificial Sequence: Synthetic oligonucleotide
  Antisense strand to SEQ ID NO: 215982
uagccaaagaauauucuaa

SEQ ID NO: 215984 - RNA, 19 nt, Artificial Sequence
  Description of Artificial Sequence: Synthetic oligonucleotide
  Sense strand starting at position 3004 of SEQ ID NO: 2782
gaauauucuuuggcuaggu

SEQ ID NO: 215985 - RNA, 19 nt, Artificial Sequence
  Description of Artificial Sequence: Synthetic oligonucleotide
  Antisense strand to SEQ ID NO: 215984
accuagccaaagaauauuc

SEQ ID NO: 215986 - RNA, 19 nt, Artificial Sequence
  Description of Artificial Sequence: Synthetic oligonucleotide
  Sense strand starting at position 3005 of SEQ ID NO: 2782
aauauucuuuggcuaggua

SEQ ID NO: 215987 - RNA, 19 nt, Artificial Sequence
  Description of Artificial Sequence: Synthetic oligonucleotide
  Antisense strand to SEQ ID NO: 215986
uaccuagccaaagaauauu

SEQ ID NO: 215988 - RNA, 19 nt, Artificial Sequence
  Description of Artificial Sequence: Synthetic oligonucleotide
  Sense strand starting at position 3008 of SEQ ID NO: 2782
auucuuuggcuagguagua

SEQ ID NO: 215989 - RNA, 19 nt, Artificial Sequence
  Description of Artificial Sequence: Synthetic oligonucleotide
  Antisense strand to SEQ ID NO: 215988
uacuaccuagccaaagaau

SEQ ID NO: 215990 - RNA, 19 nt, Artificial Sequence
  Description of Artificial Sequence: Synthetic oligonucleotide
  Sense strand starting at position 3064 of SEQ ID NO: 2782
cccaaauuguggugauuga

SEQ ID NO: 215991 - RNA, 19 nt, Artificial Sequence
  Description of Artificial Sequence: Synthetic oligonucleotide
  Antisense strand to SEQ ID NO: 215990
ucaaucaccacaauuuggg

SEQ ID NO: 215992 - RNA, 19 nt, Artificial Sequence
  Description of Artificial Sequence: Synthetic oligonucleotide
  Sense strand starting at position 3065 of SEQ ID NO: 2782
ccaaauuguggugauugau

SEQ ID NO: 215993 - RNA, 19 nt, Artificial Sequence
  Description of Artificial Sequence: Synthetic oligonucleotide
  Antisense strand to SEQ ID NO: 215992
aucaaucaccacaauuugg

SEQ ID NO: 215994 - RNA, 19 nt, Artificial Sequence
  Description of Artificial Sequence: Synthetic oligonucleotide
  Sense strand starting at position 3127 of SEQ ID NO: 2782
gugggccuaucccugaaau

SEQ ID NO: 215995 - RNA, 19 nt, Artificial Sequence
  Description of Artificial Sequence: Synthetic oligonucleotide
  Antisense strand to SEQ ID NO: 215994
auuucagggauaggcccac

SEQ ID NO: 215996 - RNA, 19 nt, Artificial Sequence
  Description of Artificial Sequence: Synthetic oligonucleotide
  Sense strand starting at position 3128 of SEQ ID NO: 2782
ugggccuaucccugaaaug

SEQ ID NO: 215997 - RNA, 19 nt, Artificial Sequence
  Description of Artificial Sequence: Synthetic oligonucleotide
  Antisense strand to SEQ ID NO: 215996
cauuucagggauaggccca

SEQ ID NO: 215998 - RNA, 19 nt, Artificial Sequence
  Description of Artificial Sequence: Synthetic oligonucleotide
  Sense strand starting at position 3140 of SEQ ID NO: 2782
ugaaaugacugcuuccuga

SEQ ID NO: 215999 - RNA, 19 nt, Artificial Sequence
  Description of Artificial Sequence: Synthetic oligonucleotide
  Antisense strand to SEQ ID NO: 215998
ucaggaagcagucauuuca

SEQ ID NO: 216000 - RNA, 19 nt, Artificial Sequence
  Description of Artificial Sequence: Synthetic oligonucleotide
  Sense strand starting at position 3173 of SEQ ID NO: 2782
gugucaguaggguguauaa

SEQ ID NO: 216001 - RNA, 19 nt, Artificial Sequence
  Description of Artificial Sequence: Synthetic oligonucleotide
  Antisense strand to SEQ ID NO: 216000
uuauacacccuacugacac

SEQ ID NO: 216002 - RNA, 19 nt, Artificial Sequence
  Description of Artificial Sequence: Synthetic oligonucleotide
  Sense strand starting at position 3389 of SEQ ID NO: 2782
ugguguaauguuugcuaau

SEQ ID NO: 216003 - RNA, 19 nt, Artificial Sequence
  Description of Artificial Sequence: Synthetic oligonucleotide
  Antisense strand to SEQ ID NO: 216002
auuagcaaacauuacacca

SEQ ID NO: 216004 - RNA, 19 nt, Artificial Sequence
  Description of Artificial Sequence: Synthetic oligonucleotide
  Sense strand starting at position 3390 of SEQ ID NO: 2782
gguguaauguuugcuaaua

SEQ ID NO: 216005 - RNA, 19 nt, Artificial Sequence
  Description of Artificial Sequence: Synthetic oligonucleotide
  Antisense strand to SEQ ID NO: 216004
uauuagcaaacauuacacc

SEQ ID NO: 216006 - RNA, 19 nt, Artificial Sequence
  Description of Artificial Sequence: Synthetic oligonucleotide
  Sense strand starting at position 3391 of SEQ ID NO: 2782
guguaauguuugcuaauaa

SEQ ID NO: 216007 - RNA, 19 nt, Artificial Sequence
  Description of Artificial Sequence: Synthetic oligonucleotide
  Antisense strand to SEQ ID NO: 216006
uuauuagcaaacauuacac

SEQ ID NO: 216008 - RNA, 19 nt, Artificial Sequence
  Description of Artificial Sequence: Synthetic oligonucleotide
  Sense strand starting at position 3411 of SEQ ID NO: 2782
agcagcaaucaguaccaaa

SEQ ID NO: 216009 - RNA, 19 nt, Artificial Sequence
  Description of Artificial Sequence: Synthetic oligonucleotide
  Antisense strand to SEQ ID NO: 216008
uuugguacugauugcugcu

SEQ ID NO: 216010 - RNA, 19 nt, Artificial Sequence
  Description of Artificial Sequence: Synthetic oligonucleotide
  Sense strand starting at position 3507 of SEQ ID NO: 2782
agcccuguuagcugggauu

SEQ ID NO: 216011 - RNA, 19 nt, Artificial Sequence
  Description of Artificial Sequence: Synthetic oligonucleotide
  Antisense strand to SEQ ID NO: 216010
aaucccagcuaacagggcu

SEQ ID NO: 216012 - RNA, 19 nt, Artificial Sequence
  Description of Artificial Sequence: Synthetic oligonucleotide
  Sense strand starting at position 3509 of SEQ ID NO: 2782
cccuguuagcugggauuga

SEQ ID NO: 216013 - RNA, 19 nt, Artificial Sequence
  Description of Artificial Sequence: Synthetic oligonucleotide
  Antisense strand to SEQ ID NO: 216012
ucaaucccagcuaacaggg

SEQ ID NO: 216014 - RNA, 19 nt, Artificial Sequence
  Description of Artificial Sequence: Synthetic oligonucleotide
  Sense strand starting at position 3522 of SEQ ID NO: 2782
gauugaggguucuguaaac

SEQ ID NO: 216015 - RNA, 19 nt, Artificial Sequence
  Description of Artificial Sequence: Synthetic oligonucleotide
  Antisense strand to SEQ ID NO: 216014
guuuacagaacccucaauc

SEQ ID NO: 216016 - RNA, 19 nt, Artificial Sequence
  Description of Artificial Sequence: Synthetic oligonucleotide
  Sense strand starting at position 3552 of SEQ ID NO: 2782
ggagaaguauguugcuagu

SEQ ID NO: 216017 - RNA, 19 nt, Artificial Sequence
  Description of Artificial Sequence: Synthetic oligonucleotide
  Antisense strand to SEQ ID NO: 216016
acuagcaacauacuucucc

SEQ ID NO: 216018 - RNA, 19 nt, Artificial Sequence
  Description of Artificial Sequence: Synthetic oligonucleotide
  Sense strand starting at position 3554 of SEQ ID NO: 2782
agaaguauguugcuaguag

SEQ ID NO: 216019 - RNA, 19 nt, Artificial Sequence
  Description of Artificial Sequence: Synthetic oligonucleotide
  Antisense strand to SEQ ID NO: 216018
cuacuagcaacauacuucu

SEQ ID NO: 216020 - RNA, 19 nt, Artificial Sequence
  Description of Artificial Sequence: Synthetic oligonucleotide
  Sense strand starting at position 3717 of SEQ ID NO: 2782
ggaagagcuaccugaauug

SEQ ID NO: 216021 - RNA, 19 nt, Artificial Sequence
  Description of Artificial Sequence: Synthetic oligonucleotide
  Antisense strand to SEQ ID NO: 216020
caauucagguagcucuucc

SEQ ID NO: 216022 - RNA, 19 nt, Artificial Sequence
  Description of Artificial Sequence: Synthetic oligonucleotide
  Sense strand starting at position 3727 of SEQ ID NO: 2782
ccugaauugccucaaagca

SEQ ID NO: 216023 - RNA, 19 nt, Artificial Sequence
  Description of Artificial Sequence: Synthetic oligonucleotide
  Antisense strand to SEQ ID NO: 216022
ugcuuugaggcaauucagg

SEQ ID NO: 216024 - RNA, 19 nt, Artificial Sequence
  Description of Artificial Sequence: Synthetic oligonucleotide
  Sense strand starting at position 3983 of SEQ ID NO: 2782
cacugagucuaaugacaga

SEQ ID NO: 216025 - RNA, 19 nt, Artificial Sequence
  Description of Artificial Sequence: Synthetic oligonucleotide
  Antisense strand to SEQ ID NO: 216024
ucugucauuagacucagug

SEQ ID NO: 216026 - RNA, 19 nt, Artificial Sequence
  Description of Artificial Sequence: Synthetic oligonucleotide
  Sense strand starting at position 303 of SEQ ID NO: 2783
ccacaaaccuguguuacau

SEQ ID NO: 216027 - RNA, 19 nt, Artificial Sequence
  Description of Artificial Sequence: Synthetic oligonucleotide
  Antisense strand to SEQ ID NO: 216026
auguaacacagguuugugg

SEQ ID NO: 216028 - RNA, 19 nt, Artificial Sequence
  Description of Artificial Sequence: Synthetic oligonucleotide
  Sense strand starting at position 336 of SEQ ID NO: 2783
gucacaagcuucuuagaag

SEQ ID NO: 216029 - RNA, 19 nt, Artificial Sequence
  Description of Artificial Sequence: Synthetic oligonucleotide
  Antisense strand to SEQ ID NO: 216028
cuucuaagaagcuugugac

SEQ ID NO: 216030 - RNA, 19 nt, Artificial Sequence
  Description of Artificial Sequence: Synthetic oligonucleotide
  Sense strand starting at position 343 of SEQ ID NO: 2783
gcuucuuagaagcagguua

SEQ ID NO: 216031 - RNA, 19 nt, Artificial Sequence
  Description of Artificial Sequence: Synthetic oligonucleotide
  Antisense strand to SEQ ID NO: 216030
uaaccugcuucuaagaagc

SEQ ID NO: 216032 - RNA, 19 nt, Artificial Sequence
  Description of Artificial Sequence: Synthetic oligonucleotide
  Sense strand starting at position 542 of SEQ ID NO: 2783
agccuugacucacuguaua

SEQ ID NO: 216033 - RNA, 19 nt, Artificial Sequence
  Description of Artificial Sequence: Synthetic oligonucleotide
  Antisense strand to SEQ ID NO: 216032
uauacagugagucaaggcu

SEQ ID NO: 216034 - RNA, 19 nt, Artificial Sequence
  Description of Artificial Sequence: Synthetic oligonucleotide
  Sense strand starting at position 569 of SEQ ID NO: 2783
uaccuauacugguuaagga

SEQ ID NO: 216035 - RNA, 19 nt, Artificial Sequence
  Description of Artificial Sequence: Synthetic oligonucleotide
  Antisense strand to SEQ ID NO: 216034
uccuuaaccaguauaggua

SEQ ID NO: 216036 - RNA, 19 nt, Artificial Sequence
  Description of Artificial Sequence: Synthetic oligonucleotide
  Sense strand starting at position 577 of SEQ ID NO: 2783
cugguuaaggaauguaaga

SEQ ID NO: 216037 - RNA, 19 nt, Artificial Sequence
  Description of Artificial Sequence: Synthetic oligonucleotide
  Antisense strand to SEQ ID NO: 216036
ucuuacauuccuuaaccag

SEQ ID NO: 216038 - RNA, 19 nt, Artificial Sequence
  Description of Artificial Sequence: Synthetic oligonucleotide
  Sense strand starting at position 593 of SEQ ID NO: 2783
agaucaagcuguuuccuau

SEQ ID NO: 216039 - RNA, 19 nt, Artificial Sequence
  Description of Artificial Sequence: Synthetic oligonucleotide
  Antisense strand to SEQ ID NO: 216038
auaggaaacagcuugaucu

SEQ ID NO: 216040 - RNA, 19 nt, Artificial Sequence
  Description of Artificial Sequence: Synthetic oligonucleotide
  Sense strand starting at position 838 of SEQ ID NO: 2783
acguaugcacuuuacauaa

SEQ ID NO: 216041 - RNA, 19 nt, Artificial Sequence
  Description of Artificial Sequence: Synthetic oligonucleotide
  Antisense strand to SEQ ID NO: 216040
uuauguaaagugcauacgu

SEQ ID NO: 216042 - RNA, 19 nt, Artificial Sequence
  Description of Artificial Sequence: Synthetic oligonucleotide
  Sense strand starting at position 848 of SEQ ID NO: 2783
uuuacauaauguccaguaa

SEQ ID NO: 216043 - RNA, 19 nt, Artificial Sequence
  Description of Artificial Sequence: Synthetic oligonucleotide
  Antisense strand to SEQ ID NO: 216042
uuacuggacauuauguaaa

SEQ ID NO: 216044 - RNA, 19 nt, Artificial Sequence
  Description of Artificial Sequence: Synthetic oligonucleotide
  Sense strand starting at position 944 of SEQ ID NO: 2783
gcggcugcaaagucuuuaa

SEQ ID NO: 216045 - RNA, 19 nt, Artificial Sequence
  Description of Artificial Sequence: Synthetic oligonucleotide
  Antisense strand to SEQ ID NO: 216044
uuaaagacuuugcagccgc

SEQ ID NO: 216046 - RNA, 19 nt, Artificial Sequence
  Description of Artificial Sequence: Synthetic oligonucleotide
  Sense strand starting at position 963 of SEQ ID NO: 2783
gguguuucauguguauuuc

SEQ ID NO: 216047 - RNA, 19 nt, Artificial Sequence
  Description of Artificial Sequence: Synthetic oligonucleotide
  Antisense strand to SEQ ID NO: 216046
gaaauacacaugaaacacc

SEQ ID NO: 216048 - RNA, 19 nt, Artificial Sequence
  Description of Artificial Sequence: Synthetic oligonucleotide
  Sense strand starting at position 1110 of SEQ ID NO: 2783
aaccguauuugagacacua

SEQ ID NO: 216049 - RNA, 19 nt, Artificial Sequence
  Description of Artificial Sequence: Synthetic oligonucleotide
  Antisense strand to SEQ ID NO: 216048
uagugucucaaauacgguu

SEQ ID NO: 216050 - RNA, 19 nt, Artificial Sequence
  Description of Artificial Sequence: Synthetic oligonucleotide
  Sense strand starting at position 1219 of SEQ ID NO: 2783
ccucuccauucuuuagagu

SEQ ID NO: 216051 - RNA, 19 nt, Artificial Sequence
  Description of Artificial Sequence: Synthetic oligonucleotide
  Antisense strand to SEQ ID NO: 216050
acucuaaagaauggagagg

SEQ ID NO: 216052 - RNA, 19 nt, Artificial Sequence
  Description of Artificial Sequence: Synthetic oligonucleotide
  Sense strand starting at position 1220 of SEQ ID NO: 2783
cucuccauucuuuagaguu

SEQ ID NO: 216053 - RNA, 19 nt, Artificial Sequence
  Description of Artificial Sequence: Synthetic oligonucleotide
  Antisense strand to SEQ ID NO: 216052
aacucuaaagaauggagag

SEQ ID NO: 216054 - RNA, 19 nt, Artificial Sequence
  Description of Artificial Sequence: Synthetic oligonucleotide
  Sense strand starting at position 1350 of SEQ ID NO: 2783
uggaaagcugcggaaucua

SEQ ID NO: 216055 - RNA, 19 nt, Artificial Sequence
  Description of Artificial Sequence: Synthetic oligonucleotide
  Antisense strand to SEQ ID NO: 216054
uagauuccgcagcuuucca

SEQ ID NO: 216056 - RNA, 19 nt, Artificial Sequence
  Description of Artificial Sequence: Synthetic oligonucleotide
  Sense strand starting at position 2327 of SEQ ID NO: 2783
caguaagugcugucuacgu

SEQ ID NO: 216057 - RNA, 19 nt, Artificial Sequence
  Description of Artificial Sequence: Synthetic oligonucleotide
  Antisense strand to SEQ ID NO: 216056
acguagacagcacuuacug

SEQ ID NO: 216058 - RNA, 19 nt, Artificial Sequence
  Description of Artificial Sequence: Synthetic oligonucleotide
  Sense strand starting at position 2343 of SEQ ID NO: 2783
cguuauuauuuggaagaau

SEQ ID NO: 216059 - RNA, 19 nt, Artificial Sequence
  Description of Artificial Sequence: Synthetic oligonucleotide
  Antisense strand to SEQ ID NO: 216058
auucuuccaaauaauaacg

SEQ ID NO: 216060 - RNA, 19 nt, Artificial Sequence
  Description of Artificial Sequence: Synthetic oligonucleotide
  Sense strand starting at position 2389 of SEQ ID NO: 2783
auauaacauccguaaguau

SEQ ID NO: 216061 - RNA, 19 nt, Artificial Sequence
  Description of Artificial Sequence: Synthetic oligonucleotide
  Antisense strand to SEQ ID NO: 216060
auacuuacggauguuauau

SEQ ID NO: 216062 - RNA, 19 nt, Artificial Sequence
  Description of Artificial Sequence: Synthetic oligonucleotide
  Sense strand starting at position 2613 of SEQ ID NO: 2783
ucacauaaccacgguuaau

SEQ ID NO: 216063 - RNA, 19 nt, Artificial Sequence
  Description of Artificial Sequence: Synthetic oligonucleotide
  Antisense strand to SEQ ID NO: 216062
auuaaccgugguuauguga

SEQ ID NO: 216064 - RNA, 19 nt, Artificial Sequence
  Description of Artificial Sequence: Synthetic oligonucleotide
  Sense strand starting at position 2637 of SEQ ID NO: 2783
gucuuacacucauugcaga

SEQ ID NO: 216065 - RNA, 19 nt, Artificial Sequence
  Description of Artificial Sequence: Synthetic oligonucleotide
  Antisense strand to SEQ ID NO: 216064
ucugcaaugaguguaagac

SEQ ID NO: 216066 - RNA, 19 nt, Artificial Sequence
  Description of Artificial Sequence: Synthetic oligonucleotide
  Sense strand starting at position 2704 of SEQ ID NO: 2783
uuaacaugauuucgagaac

SEQ ID NO: 216067 - RNA, 19 nt, Artificial Sequence
  Description of Artificial Sequence: Synthetic oligonucleotide
  Antisense strand to SEQ ID NO: 216066
guucucgaaaucauguuaa

SEQ ID NO: 216068 - RNA, 19 nt, Artificial Sequence
  Description of Artificial Sequence: Synthetic oligonucleotide
  Sense strand starting at position 2715 of SEQ ID NO: 2783
ucgagaacaugucuccagu

SEQ ID NO: 216069 - RNA, 19 nt, Artificial Sequence
  Description of Artificial Sequence: Synthetic oligonucleotide
  Antisense strand to SEQ ID NO: 216068
acuggagacauguucucga

SEQ ID NO: 216070 - RNA, 19 nt, Artificial Sequence
  Description of Artificial Sequence: Synthetic oligonucleotide
  Sense strand starting at position 2717 of SEQ ID NO: 2783
gagaacaugucuccaguua

SEQ ID NO: 216071 - RNA, 19 nt, Artificial Sequence
  Description of Artificial Sequence: Synthetic oligonucleotide
  Antisense strand to SEQ ID NO: 216070
uaacuggagacauguucuc

SEQ ID NO: 216072 - RNA, 19 nt, Artificial Sequence
  Description of Artificial Sequence: Synthetic oligonucleotide
  Sense strand starting at position 2718 of SEQ ID NO: 2783
agaacaugucuccaguuaa

SEQ ID NO: 216073 - RNA, 19 nt, Artificial Sequence
  Description of Artificial Sequence: Synthetic oligonucleotide
  Antisense strand to SEQ ID NO: 216072
uuaacuggagacauguucu

SEQ ID NO: 216074 - RNA, 19 nt, Artificial Sequence
  Description of Artificial Sequence: Synthetic oligonucleotide
  Sense strand starting at position 2774 of SEQ ID NO: 2783
cuuagauugcccuagggca

SEQ ID NO: 216075 - RNA, 19 nt, Artificial Sequence
  Description of Artificial Sequence: Synthetic oligonucleotide
  Antisense strand to SEQ ID NO: 216074
ugcccuagggcaaucuaag

SEQ ID NO: 216076 - RNA, 19 nt, Artificial Sequence
  Description of Artificial Sequence: Synthetic oligonucleotide
  Sense strand starting at position 2804 of SEQ ID NO: 2783
cacuuagcugugcauuaga

SEQ ID NO: 216077 - RNA, 19 nt, Artificial Sequence
  Description of Artificial Sequence: Synthetic oligonucleotide
  Antisense strand to SEQ ID NO: 216076
ucuaaugcacagcuaagug

SEQ ID NO: 216078 - RNA, 19 nt, Artificial Sequence
  Description of Artificial Sequence: Synthetic oligonucleotide
  Sense strand starting at position 2807 of SEQ ID NO: 2783
uuagcugugcauuagaaac

SEQ ID NO: 216079 - RNA, 19 nt, Artificial Sequence
  Description of Artificial Sequence: Synthetic oligonucleotide
  Antisense strand to SEQ ID NO: 216078
guuucuaaugcacagcuaa

SEQ ID NO: 216080 - RNA, 19 nt, Artificial Sequence
  Description of Artificial Sequence: Synthetic oligonucleotide
  Sense strand starting at position 2862 of SEQ ID NO: 2783
cagagaugcugauugagau

SEQ ID NO: 216081 - RNA, 19 nt, Artificial Sequence
  Description of Artificial Sequence: Synthetic oligonucleotide
  Antisense strand to SEQ ID NO: 216080
aucucaaucagcaucucug

SEQ ID NO: 216082 - RNA, 19 nt, Artificial Sequence
  Description of Artificial Sequence: Synthetic oligonucleotide
  Sense strand starting at position 2916 of SEQ ID NO: 2783
uguagucugggcugagaac

SEQ ID NO: 216083 - RNA, 19 nt, Artificial Sequence
  Description of Artificial Sequence: Synthetic oligonucleotide
  Antisense strand to SEQ ID NO: 216082
guucucagcccagacuaca

SEQ ID NO: 216084 - RNA, 19 nt, Artificial Sequence
  Description of Artificial Sequence: Synthetic oligonucleotide
  Sense strand starting at position 2977 of SEQ ID NO: 2783
cagaaacguacgcguauuu

SEQ ID NO: 216085 - RNA, 19 nt, Artificial Sequence
  Description of Artificial Sequence: Synthetic oligonucleotide
  Antisense strand to SEQ ID NO: 216084
aaauacgcguacguuucug

SEQ ID NO: 216086 - RNA, 19 nt, Artificial Sequence
  Description of Artificial Sequence: Synthetic oligonucleotide
  Sense strand starting at position 2990 of SEQ ID NO: 2783
guauuucgccagugauuac

SEQ ID NO: 216087 - RNA, 19 nt, Artificial Sequence
  Description of Artificial Sequence: Synthetic oligonucleotide
  Antisense strand to SEQ ID NO: 216086
guaaucacuggcgaaauac

SEQ ID NO: 216088 - RNA, 19 nt, Artificial Sequence
  Description of Artificial Sequence: Synthetic oligonucleotide
  Sense strand starting at position 3000 of SEQ ID NO: 2783
agugauuaccaccagcgau

SEQ ID NO: 216089 - RNA, 19 nt, Artificial Sequence
  Description of Artificial Sequence: Synthetic oligonucleotide
  Antisense strand to SEQ ID NO: 216088
aucgcuggugguaaucacu

SEQ ID NO: 216090 - RNA, 19 nt, Artificial Sequence
  Description of Artificial Sequence: Synthetic oligonucleotide
  Sense strand starting at position 3020 of SEQ ID NO: 2783
cuaauuaucuaguuaagag

SEQ ID NO: 216091 - RNA, 19 nt, Artificial Sequence
  Description of Artificial Sequence: Synthetic oligonucleotide
  Antisense strand to SEQ ID NO: 216090
cucuuaacuagauaauuag

SEQ ID NO: 216092 - RNA, 19 nt, Artificial Sequence
  Description of Artificial Sequence: Synthetic oligonucleotide
  Sense strand starting at position 3744 of SEQ ID NO: 2783
guguaauauuugguuugcu

SEQ ID NO: 216093 - RNA, 19 nt, Artificial Sequence
  Description of Artificial Sequence: Synthetic oligonucleotide
  Antisense strand to SEQ ID NO: 216092
agcaaaccaaauauuacac

SEQ ID NO: 216094 - RNA, 19 nt, Artificial Sequence
  Description of Artificial Sequence: Synthetic oligonucleotide
  Sense strand starting at position 3791 of SEQ ID NO: 2783
agagaaauugcugggucaa

SEQ ID NO: 216095 - RNA, 19 nt, Artificial Sequence
  Description of Artificial Sequence: Synthetic oligonucleotide
  Antisense strand to SEQ ID NO: 216094
uugacccagcaauuucucu

SEQ ID NO: 216096 - RNA, 19 nt, Artificial Sequence
  Description of Artificial Sequence: Synthetic oligonucleotide
  Sense strand starting at position 3792 of SEQ ID NO: 2783
gagaaauugcugggucaac

SEQ ID NO: 216097 - RNA, 19 nt, Artificial Sequence
  Description of Artificial Sequence: Synthetic oligonucleotide
  Antisense strand to SEQ ID NO: 216096
guugacccagcaauuucuc

SEQ ID NO: 216098 - RNA, 19 nt, Artificial Sequence
  Description of Artificial Sequence: Synthetic oligonucleotide
  Sense strand starting at position 3793 of SEQ ID NO: 2783
agaaauugcugggucaaca

SEQ ID NO: 216099 - RNA, 19 nt, Artificial Sequence
  Description of Artificial Sequence: Synthetic oligonucleotide
  Antisense strand to SEQ ID NO: 216098
uguugacccagcaauuucu

SEQ ID NO: 216100 - RNA, 19 nt, Artificial Sequence
  Description of Artificial Sequence: Synthetic oligonucleotide
  Sense strand starting at position 3802 of SEQ ID NO: 2783
ugggucaacaggugugaua

SEQ ID NO: 216101 - RNA, 19 nt, Artificial Sequence
  Description of Artificial Sequence: Synthetic oligonucleotide
  Antisense strand to SEQ ID NO: 216100
uaucacaccuguugaccca

SEQ ID NO: 216102 - RNA, 19 nt, Artificial Sequence
  Description of Artificial Sequence: Synthetic oligonucleotide
  Sense strand starting at position 3804 of SEQ ID NO: 2783
ggucaacaggugugauauc

SEQ ID NO: 216103 - RNA, 19 nt, Artificial Sequence
  Description of Artificial Sequence: Synthetic oligonucleotide
  Antisense strand to SEQ ID NO: 216102
gauaucacaccuguugacc

SEQ ID NO: 216104 - RNA, 19 nt, Artificial Sequence
  Description of Artificial Sequence: Synthetic oligonucleotide
  Sense strand starting at position 3903 of SEQ ID NO: 2783
gcagauauaaugugguaac

SEQ ID NO: 216105 - RNA, 19 nt, Artificial Sequence
  Description of Artificial Sequence: Synthetic oligonucleotide
  Antisense strand to SEQ ID NO: 216104
guuaccacauuauaucugc

SEQ ID NO: 216106 - RNA, 19 nt, Artificial Sequence
  Description of Artificial Sequence: Synthetic oligonucleotide
  Sense strand starting at position 626 of SEQ ID NO: 2784
acauauuucuucuggaguc

SEQ ID NO: 216107 - RNA, 19 nt, Artificial Sequence
  Description of Artificial Sequence: Synthetic oligonucleotide
  Antisense strand to SEQ ID NO: 216106
gacuccagaagaaauaugu

SEQ ID NO: 216108 - RNA, 19 nt, Artificial Sequence
  Description of Artificial Sequence: Synthetic oligonucleotide
  Sense strand starting at position 672 of SEQ ID NO: 2784
ggagcaguucgacagcaau

SEQ ID NO: 216109 - RNA, 19 nt, Artificial Sequence
  Description of Artificial Sequence: Synthetic oligonucleotide
  Antisense strand to SEQ ID NO: 216108
auugcugucgaacugcucc

SEQ ID NO: 216110 - RNA, 19 nt, Artificial Sequence
  Description of Artificial Sequence: Synthetic oligonucleotide
  Sense strand starting at position 684 of SEQ ID NO: 2784
cagcaaugucugcaaggga

SEQ ID NO: 216111 - RNA, 19 nt, Artificial Sequence
  Description of Artificial Sequence: Synthetic oligonucleotide
  Antisense strand to SEQ ID NO: 216110
ucccuugcagacauugcug

SEQ ID NO: 216112 - RNA, 19 nt, Artificial Sequence
  Description of Artificial Sequence: Synthetic oligonucleotide
  Sense strand starting at position 764 of SEQ ID NO: 2784
gcagaagacccagaucugu

SEQ ID NO: 216113 - RNA, 19 nt, Artificial Sequence
  Description of Artificial Sequence: Synthetic oligonucleotide
  Antisense strand to SEQ ID NO: 216112
acagaucugggucuucugc

SEQ ID NO: 216114 - RNA, 19 nt, Artificial Sequence
  Description of Artificial Sequence: Synthetic oligonucleotide
  Sense strand starting at position 877 of SEQ ID NO: 2784
agcucauucuaacaggaaa

SEQ ID NO: 216115 - RNA, 19 nt, Artificial Sequence
  Description of Artificial Sequence: Synthetic oligonucleotide
  Antisense strand to SEQ ID NO: 216114
uuuccuguuagaaugagcu

SEQ ID NO: 216116 - RNA, 19 nt, Artificial Sequence
  Description of Artificial Sequence: Synthetic oligonucleotide
  Sense strand starting at position 925 of SEQ ID NO: 2784
agauuuaucugucacugcu

SEQ ID NO: 216117 - RNA, 19 nt, Artificial Sequence
  Description of Artificial Sequence: Synthetic oligonucleotide
  Antisense strand to SEQ ID NO: 216116
agcagugacagauaaaucu

SEQ ID NO: 216118 - RNA, 19 nt, Artificial Sequence
  Description of Artificial Sequence: Synthetic oligonucleotide
  Sense strand starting at position 946 of SEQ ID NO: 2784
ucaucuguggcauaaacau

SEQ ID NO: 216119 - RNA, 19 nt, Artificial Sequence
  Description of Artificial Sequence: Synthetic oligonucleotide
  Antisense strand to SEQ ID NO: 216118
auguuuaugccacagauga

SEQ ID NO: 216120 - RNA, 19 nt, Artificial Sequence
  Description of Artificial Sequence: Synthetic oligonucleotide
  Sense strand starting at position 955 of SEQ ID NO: 2784
gcauaaacaugccuuguuu

SEQ ID NO: 216121 - RNA, 19 nt, Artificial Sequence
  Description of Artificial Sequence: Synthetic oligonucleotide
  Antisense strand to SEQ ID NO: 216120
aaacaaggcauguuuaugc

SEQ ID NO: 216122 - RNA, 19 nt, Artificial Sequence
  Description of Artificial Sequence: Synthetic oligonucleotide
  Sense strand starting at position 979 of SEQ ID NO: 2784
gggaacauaugauggauau

SEQ ID NO: 216123 - RNA, 19 nt, Artificial Sequence
  Description of Artificial Sequence: Synthetic oligonucleotide
  Antisense strand to SEQ ID NO: 216122
auauccaucauauguuccc

SEQ ID NO: 216124 - RNA, 19 nt, Artificial Sequence
  Description of Artificial Sequence: Synthetic oligonucleotide
  Sense strand starting at position 1030 of SEQ ID NO: 2784
aagagugauuuguauagau

SEQ ID NO: 216125 - RNA, 19 nt, Artificial Sequence
  Description of Artificial Sequence: Synthetic oligonucleotide
  Antisense strand to SEQ ID NO: 216124
aucuauacaaaucacucuu

SEQ ID NO: 216126 - RNA, 19 nt, Artificial Sequence
  Description of Artificial Sequence: Synthetic oligonucleotide
  Sense strand starting at position 1121 of SEQ ID NO: 2784
guaccaacgagcuagcaau

SEQ ID NO: 216127 - RNA, 19 nt, Artificial Sequence
  Description of Artificial Sequence: Synthetic oligonucleotide
  Antisense strand to SEQ ID NO: 216126
auugcuagcucguugguac

SEQ ID NO: 216128 - RNA, 19 nt, Artificial Sequence
  Description of Artificial Sequence: Synthetic oligonucleotide
  Sense strand starting at position 1128 of SEQ ID NO: 2784
cgagcuagcaaugaagaga

SEQ ID NO: 216129 - RNA, 19 nt, Artificial Sequence
  Description of Artificial Sequence: Synthetic oligonucleotide
  Antisense strand to SEQ ID NO: 216128
ucucuucauugcuagcucg

SEQ ID NO: 216130 - RNA, 19 nt, Artificial Sequence
  Description of Artificial Sequence: Synthetic oligonucleotide
  Sense strand starting at position 1300 of SEQ ID NO: 2784
aguagagccuccuucggau

SEQ ID NO: 216131 - RNA, 19 nt, Artificial Sequence
  Description of Artificial Sequence: Synthetic oligonucleotide
  Antisense strand to SEQ ID NO: 216130
auccgaaggaggcucuacu

SEQ ID NO: 216132 - RNA, 19 nt, Artificial Sequence
  Description of Artificial Sequence: Synthetic oligonucleotide
  Sense strand starting at position 1333 of SEQ ID NO: 2784
ucugguguccugggaggaa

SEQ ID NO: 216133 - RNA, 19 nt, Artificial Sequence
  Description of Artificial Sequence: Synthetic oligonucleotide
  Antisense strand to SEQ ID NO: 216132
uuccucccaggacaccaga

SEQ ID NO: 216134 - RNA, 19 nt, Artificial Sequence
  Description of Artificial Sequence: Synthetic oligonucleotide
  Sense strand starting at position 1561 of SEQ ID NO: 2784
gggagaaguucuccgagaa

SEQ ID NO: 216135 - RNA, 19 nt, Artificial Sequence
  Description of Artificial Sequence: Synthetic oligonucleotide
  Antisense strand to SEQ ID NO: 216134
uucucggagaacuucuccc

SEQ ID NO: 216136 - RNA, 19 nt, Artificial Sequence
  Description of Artificial Sequence: Synthetic oligonucleotide
  Sense strand starting at position 1562 of SEQ ID NO: 2784
ggagaaguucuccgagaag

SEQ ID NO: 216137 - RNA, 19 nt, Artificial Sequence
  Description of Artificial Sequence: Synthetic oligonucleotide
  Antisense strand to SEQ ID NO: 216136
cuucucggagaacuucucc

SEQ ID NO: 216138 - RNA, 19 nt, Artificial Sequence
  Description of Artificial Sequence: Synthetic oligonucleotide
  Sense strand starting at position 2394 of SEQ ID NO: 2784
cguagcaauggagaaguua

SEQ ID NO: 216139 - RNA, 19 nt, Artificial Sequence
  Description of Artificial Sequence: Synthetic oligonucleotide
  Antisense strand to SEQ ID NO: 216138
uaacuucuccauugcuacg

SEQ ID NO: 216140 - RNA, 19 nt, Artificial Sequence
  Description of Artificial Sequence: Synthetic oligonucleotide
  Sense strand starting at position 2405 of SEQ ID NO: 2784
agaaguuaaugugaauaag

SEQ ID NO: 216141 - RNA, 19 nt, Artificial Sequence
  Description of Artificial Sequence: Synthetic oligonucleotide
  Antisense strand to SEQ ID NO: 216140
cuuauucacauuaacuucu

SEQ ID NO: 216142 - RNA, 19 nt, Artificial Sequence
  Description of Artificial Sequence: Synthetic oligonucleotide
  Sense strand starting at position 2411 of SEQ ID NO: 2784
uaaugugaauaagacgaaa

SEQ ID NO: 216143 - RNA, 19 nt, Artificial Sequence
  Description of Artificial Sequence: Synthetic oligonucleotide
  Antisense strand to SEQ ID NO: 216142
uuucgucuuauucacauua

SEQ ID NO: 216144 - RNA, 19 nt, Artificial Sequence
  Description of Artificial Sequence: Synthetic oligonucleotide
  Sense strand starting at position 2436 of SEQ ID NO: 2784
acaggaaguuguucccagu

SEQ ID NO: 216145 - RNA, 19 nt, Artificial Sequence
  Description of Artificial Sequence: Synthetic oligonucleotide
  Antisense strand to SEQ ID NO: 216144
acugggaacaacuuccugu

SEQ ID NO: 216146 - RNA, 19 nt, Artificial Sequence
  Description of Artificial Sequence: Synthetic oligonucleotide
  Sense strand starting at position 2482 of SEQ ID NO: 2784
cucagcaaugcauaugaaa

SEQ ID NO: 216147 - RNA, 19 nt, Artificial Sequence
  Description of Artificial Sequence: Synthetic oligonucleotide
  Antisense strand to SEQ ID NO: 216146
uuucauaugcauugcugag

SEQ ID NO: 216148 - RNA, 19 nt, Artificial Sequence
  Description of Artificial Sequence: Synthetic oligonucleotide
  Sense strand starting at position 2554 of SEQ ID NO: 2784
agagaaacucaggguguuu

SEQ ID NO: 216149 - RNA, 19 nt, Artificial Sequence
  Description of Artificial Sequence: Synthetic oligonucleotide
  Antisense strand to SEQ ID NO: 216148
aaacacccugaguuucucu

SEQ ID NO: 216150 - RNA, 19 nt, Artificial Sequence
  Description of Artificial Sequence: Synthetic oligonucleotide
  Sense strand starting at position 2614 of SEQ ID NO: 2784
ugaggaaauucugugaucu

SEQ ID NO: 216151 - RNA, 19 nt, Artificial Sequence
  Description of Artificial Sequence: Synthetic oligonucleotide
  Antisense strand to SEQ ID NO: 216150
agaucacagaauuuccuca

SEQ ID NO: 216152 - RNA, 19 nt, Artificial Sequence
  Description of Artificial Sequence: Synthetic oligonucleotide
  Sense strand starting at position 2618 of SEQ ID NO: 2784
gaaauucugugaucuuaag

SEQ ID NO: 216153 - RNA, 19 nt, Artificial Sequence
  Description of Artificial Sequence: Synthetic oligonucleotide
  Antisense strand to SEQ ID NO: 216152
cuuaagaucacagaauuuc

SEQ ID NO: 216154 - RNA, 19 nt, Artificial Sequence
  Description of Artificial Sequence: Synthetic oligonucleotide
  Sense strand starting at position 2624 of SEQ ID NO: 2784
cugugaucuuaagcgaaug

SEQ ID NO: 216155 - RNA, 19 nt, Artificial Sequence
  Description of Artificial Sequence: Synthetic oligonucleotide
  Antisense strand to SEQ ID NO: 216154
cauucgcuuaagaucacag

SEQ ID NO: 216156 - RNA, 19 nt, Artificial Sequence
  Description of Artificial Sequence: Synthetic oligonucleotide
  Sense strand starting at position 2625 of SEQ ID NO: 2784
ugugaucuuaagcgaaugu

SEQ ID NO: 216157 - RNA, 19 nt, Artificial Sequence
  Description of Artificial Sequence: Synthetic oligonucleotide
  Antisense strand to SEQ ID NO: 216156
acauucgcuuaagaucaca

SEQ ID NO: 216158 - RNA, 19 nt, Artificial Sequence
  Description of Artificial Sequence: Synthetic oligonucleotide
  Sense strand starting at position 2626 of SEQ ID NO: 2784
gugaucuuaagcgaaugua

SEQ ID NO: 216159 - RNA, 19 nt, Artificial Sequence
  Description of Artificial Sequence: Synthetic oligonucleotide
  Antisense strand to SEQ ID NO: 216158
uacauucgcuuaagaucac

SEQ ID NO: 216160 - RNA, 19 nt, Artificial Sequence
  Description of Artificial Sequence: Synthetic oligonucleotide
  Sense strand starting at position 2727 of SEQ ID NO: 2784
ccgaucucaugcuugagua

SEQ ID NO: 216161 - RNA, 19 nt, Artificial Sequence
  Description of Artificial Sequence: Synthetic oligonucleotide
  Antisense strand to SEQ ID NO: 216160
uacucaagcaugagaucgg

SEQ ID NO: 216162 - RNA, 19 nt, Artificial Sequence
  Description of Artificial Sequence: Synthetic oligonucleotide
  Sense strand starting at position 2728 of SEQ ID NO: 2784
cgaucucaugcuugaguag

SEQ ID NO: 216163 - RNA, 19 nt, Artificial Sequence
  Description of Artificial Sequence: Synthetic oligonucleotide
  Antisense strand to SEQ ID NO: 216162
cuacucaagcaugagaucg

SEQ ID NO: 216164 - RNA, 19 nt, Artificial Sequence
  Description of Artificial Sequence: Synthetic oligonucleotide
  Sense strand starting at position 2760 of SEQ ID NO: 2784
gaagcuccgauauguggaa

SEQ ID NO: 216165 - RNA, 19 nt, Artificial Sequence
  Description of Artificial Sequence: Synthetic oligonucleotide
  Antisense strand to SEQ ID NO: 216164
uuccacauaucggagcuuc

SEQ ID NO: 216166 - RNA, 19 nt, Artificial Sequence
  Description of Artificial Sequence: Synthetic oligonucleotide
  Sense strand starting at position 2779 of SEQ ID NO: 2784
gugggaaaguuuaaggaga

SEQ ID NO: 216167 - RNA, 19 nt, Artificial Sequence
  Description of Artificial Sequence: Synthetic oligonucleotide
  Antisense strand to SEQ ID NO: 216166
ucuccuuaaacuuucccac

SEQ ID NO: 216168 - RNA, 19 nt, Artificial Sequence
  Description of Artificial Sequence: Synthetic oligonucleotide
  Sense strand starting at position 2781 of SEQ ID NO: 2784
gggaaaguuuaaggagaua

SEQ ID NO: 216169 - RNA, 19 nt, Artificial Sequence
  Description of Artificial Sequence: Synthetic oligonucleotide
  Antisense strand to SEQ ID NO: 216168
uaucuccuuaaacuuuccc

SEQ ID NO: 216170 - RNA, 19 nt, Artificial Sequence
  Description of Artificial Sequence: Synthetic oligonucleotide
  Sense strand starting at position 2862 of SEQ ID NO: 2784
guguuuguuuacccacuga

SEQ ID NO: 216171 - RNA, 19 nt, Artificial Sequence
  Description of Artificial Sequence: Synthetic oligonucleotide
  Antisense strand to SEQ ID NO: 216170
ucaguggguaaacaaacac

SEQ ID NO: 216172 - RNA, 19 nt, Artificial Sequence
  Description of Artificial Sequence: Synthetic oligonucleotide
  Sense strand starting at position 2907 of SEQ ID NO: 2784
guugaggguugguugagua

SEQ ID NO: 216173 - RNA, 19 nt, Artificial Sequence
  Description of Artificial Sequence: Synthetic oligonucleotide
  Antisense strand to SEQ ID NO: 216172
uacucaaccaacccucaac

SEQ ID NO: 216174 - RNA, 19 nt, Artificial Sequence
  Description of Artificial Sequence: Synthetic oligonucleotide
  Sense strand starting at position 2910 of SEQ ID NO: 2784
gaggguugguugaguaaug

SEQ ID NO: 216175 - RNA, 19 nt, Artificial Sequence
  Description of Artificial Sequence: Synthetic oligonucleotide
  Antisense strand to SEQ ID NO: 216174
cauuacucaaccaacccuc

SEQ ID NO: 216176 - RNA, 19 nt, Artificial Sequence
  Description of Artificial Sequence: Synthetic oligonucleotide
  Sense strand starting at position 3777 of SEQ ID NO: 2784
cugacauccgcuugaauug

SEQ ID NO: 216177 - RNA, 19 nt, Artificial Sequence
  Description of Artificial Sequence: Synthetic oligonucleotide
  Antisense strand to SEQ ID NO: 216176
caauucaagcggaugucag

SEQ ID NO: 216178 - RNA, 19 nt, Artificial Sequence
  Description of Artificial Sequence: Synthetic oligonucleotide
  Sense strand starting at position 3807 of SEQ ID NO: 2784
cuaucucugagucgugagu

SEQ ID NO: 216179 - RNA, 19 nt, Artificial Sequence
  Description of Artificial Sequence: Synthetic oligonucleotide
  Antisense strand to SEQ ID NO: 216178
acucacgacucagagauag

SEQ ID NO: 216180 - RNA, 19 nt, Artificial Sequence
  Description of Artificial Sequence: Synthetic oligonucleotide
  Sense strand starting at position 3878 of SEQ ID NO: 2784
uucugagauggaugcauga

SEQ ID NO: 216181 - RNA, 19 nt, Artificial Sequence
  Description of Artificial Sequence: Synthetic oligonucleotide
  Antisense strand to SEQ ID NO: 216180
ucaugcauccaucucagaa

SEQ ID NO: 216182 - RNA, 19 nt, Artificial Sequence
  Description of Artificial Sequence: Synthetic oligonucleotide
  Sense strand starting at position 3888 of SEQ ID NO: 2784
gaugcaugagccugucuca

SEQ ID NO: 216183 - RNA, 19 nt, Artificial Sequence
  Description of Artificial Sequence: Synthetic oligonucleotide
  Antisense strand to SEQ ID NO: 216182
ugagacaggcucaugcauc

SEQ ID NO: 216184 - RNA, 19 nt, Artificial Sequence
  Description of Artificial Sequence: Synthetic oligonucleotide
  Sense strand starting at position 3926 of SEQ ID NO: 2784
ccugucucucccuaagguu

SEQ ID NO: 216185 - RNA, 19 nt, Artificial Sequence
  Description of Artificial Sequence: Synthetic oligonucleotide
  Antisense strand to SEQ ID NO: 216184
aaccuuagggagagacagg

SEQ ID NO: 216186 - RNA, 19 nt, Artificial Sequence
  Description of Artificial Sequence: Synthetic oligonucleotide
  Sense strand starting at position 73 of SEQ ID NO: 2785
gugagaauaaagggugcau

SEQ ID NO: 216187 - RNA, 19 nt, Artificial Sequence
  Description of Artificial Sequence: Synthetic oligonucleotide
  Antisense strand to SEQ ID NO: 216186
augcacccuuuauucucac

SEQ ID NO: 216188 - RNA, 19 nt, Artificial Sequence
  Description of Artificial Sequence: Synthetic oligonucleotide
  Sense strand starting at position 250 of SEQ ID NO: 2785
cgcaauaaugcccaccaua

SEQ ID NO: 216189 - RNA, 19 nt, Artificial Sequence
  Description of Artificial Sequence: Synthetic oligonucleotide
  Antisense strand to SEQ ID NO: 216188
uauggugggcauuauugcg

SEQ ID NO: 216190 - RNA, 19 nt, Artificial Sequence
  Description of Artificial Sequence: Synthetic oligonucleotide
  Sense strand starting at position 279 of SEQ ID NO: 2785
acaauaaaugcugguuuau

SEQ ID NO: 216191 - RNA, 19 nt, Artificial Sequence
  Description of Artificial Sequence: Synthetic oligonucleotide
  Antisense strand to SEQ ID NO: 216190
auaaaccagcauuuauugu

SEQ ID NO: 216192 - RNA, 19 nt, Artificial Sequence
  Description of Artificial Sequence: Synthetic oligonucleotide
  Sense strand starting at position 313 of SEQ ID NO: 2785
uagacuuugguagguagaa

SEQ ID NO: 216193 - RNA, 19 nt, Artificial Sequence
  Description of Artificial Sequence: Synthetic oligonucleotide
  Antisense strand to SEQ ID NO: 216192
uucuaccuaccaaagucua

SEQ ID NO: 216194 - RNA, 19 nt, Artificial Sequence
  Description of Artificial Sequence: Synthetic oligonucleotide
  Sense strand starting at position 314 of SEQ ID NO: 2785
agacuuugguagguagaaa

SEQ ID NO: 216195 - RNA, 19 nt, Artificial Sequence
  Description of Artificial Sequence: Synthetic oligonucleotide
  Antisense strand to SEQ ID NO: 216194
uuucuaccuaccaaagucu

SEQ ID NO: 216196 - RNA, 19 nt, Artificial Sequence
  Description of Artificial Sequence: Synthetic oligonucleotide
  Sense strand starting at position 429 of SEQ ID NO: 2785
gcggucgcuggcaagaaau

SEQ ID NO: 216197 - RNA, 19 nt, Artificial Sequence
  Description of Artificial Sequence: Synthetic oligonucleotide
  Antisense strand to SEQ ID NO: 216196
auuucuugccagcgaccgc

SEQ ID NO: 216198 - RNA, 19 nt, Artificial Sequence
  Description of Artificial Sequence: Synthetic oligonucleotide
  Sense strand starting at position 441 of SEQ ID NO: 2785
aagaaaucgucccugccau

SEQ ID NO: 216199 - RNA, 19 nt, Artificial Sequence
  Description of Artificial Sequence: Synthetic oligonucleotide
  Antisense strand to SEQ ID NO: 216198
auggcagggacgauuucuu

SEQ ID NO: 216200 - RNA, 19 nt, Artificial Sequence
  Description of Artificial Sequence: Synthetic oligonucleotide
  Sense strand starting at position 914 of SEQ ID NO: 2785
ggcuucuugucacugauuu

SEQ ID NO: 216201 - RNA, 19 nt, Artificial Sequence
  Description of Artificial Sequence: Synthetic oligonucleotide
  Antisense strand to SEQ ID NO: 216200
aaaucagugacaagaagcc

SEQ ID NO: 216202 - RNA, 19 nt, Artificial Sequence
  Description of Artificial Sequence: Synthetic oligonucleotide
  Sense strand starting at position 1179 of SEQ ID NO: 2785
cagcgugcuggguuuaauc

SEQ ID NO: 216203 - RNA, 19 nt, Artificial Sequence
  Description of Artificial Sequence: Synthetic oligonucleotide
  Antisense strand to SEQ ID NO: 216202
gauuaaacccagcacgcug

SEQ ID NO: 216204 - RNA, 19 nt, Artificial Sequence
  Description of Artificial Sequence: Synthetic oligonucleotide
  Sense strand starting at position 1977 of SEQ ID NO: 2785
accgcuagccggugauuua

SEQ ID NO: 216205 - RNA, 19 nt, Artificial Sequence
  Description of Artificial Sequence: Synthetic oligonucleotide
  Antisense strand to SEQ ID NO: 216204
uaaaucaccggcuagcggu

SEQ ID NO: 216206 - RNA, 19 nt, Artificial Sequence
  Description of Artificial Sequence: Synthetic oligonucleotide
  Sense strand starting at position 1978 of SEQ ID NO: 2785
ccgcuagccggugauuuaa

SEQ ID NO: 216207 - RNA, 19 nt, Artificial Sequence
  Description of Artificial Sequence: Synthetic oligonucleotide
  Antisense strand to SEQ ID NO: 216206
uuaaaucaccggcuagcgg

SEQ ID NO: 216208 - RNA, 19 nt, Artificial Sequence
  Description of Artificial Sequence: Synthetic oligonucleotide
  Sense strand starting at position 1980 of SEQ ID NO: 2785
gcuagccggugauuuaaau

SEQ ID NO: 216209 - RNA, 19 nt, Artificial Sequence
  Description of Artificial Sequence: Synthetic oligonucleotide
  Antisense strand to SEQ ID NO: 216208
auuuaaaucaccggcuagc

SEQ ID NO: 216210 - RNA, 19 nt, Artificial Sequence
  Description of Artificial Sequence: Synthetic oligonucleotide
  Sense strand starting at position 2007 of SEQ ID NO: 2785
auaugagucuuuccaaagc

SEQ ID NO: 216211 - RNA, 19 nt, Artificial Sequence
  Description of Artificial Sequence: Synthetic oligonucleotide
  Antisense strand to SEQ ID NO: 216210
gcuuuggaaagacucauau

SEQ ID NO: 216212 - RNA, 19 nt, Artificial Sequence
  Description of Artificial Sequence: Synthetic oligonucleotide
  Sense strand starting at position 2225 of SEQ ID NO: 2785
uuugaagggugagcuauua

SEQ ID NO: 216213 - RNA, 19 nt, Artificial Sequence
  Description of Artificial Sequence: Synthetic oligonucleotide
  Antisense strand to SEQ ID NO: 216212
uaauagcucacccuucaaa

SEQ ID NO: 216214 - RNA, 19 nt, Artificial Sequence
  Description of Artificial Sequence: Synthetic oligonucleotide
  Sense strand starting at position 2304 of SEQ ID NO: 2785
ugggaugggucaaaggauu

SEQ ID NO: 216215 - RNA, 19 nt, Artificial Sequence
  Description of Artificial Sequence: Synthetic oligonucleotide
  Antisense strand to SEQ ID NO: 216214
aauccuuugacccauccca

SEQ ID NO: 216216 - RNA, 19 nt, Artificial Sequence
  Description of Artificial Sequence: Synthetic oligonucleotide
  Sense strand starting at position 2365 of SEQ ID NO: 2785
cauauuaagcgugauuaga

SEQ ID NO: 216217 - RNA, 19 nt, Artificial Sequence
  Description of Artificial Sequence: Synthetic oligonucleotide
  Antisense strand to SEQ ID NO: 216216
ucuaaucacgcuuaauaug

SEQ ID NO: 216218 - RNA, 19 nt, Artificial Sequence
  Description of Artificial Sequence: Synthetic oligonucleotide
  Sense strand starting at position 2367 of SEQ ID NO: 2785
uauuaagcgugauuagaca

SEQ ID NO: 216219 - RNA, 19 nt, Artificial Sequence
  Description of Artificial Sequence: Synthetic oligonucleotide
  Antisense strand to SEQ ID NO: 216218
ugucuaaucacgcuuaaua

SEQ ID NO: 216220 - RNA, 19 nt, Artificial Sequence
  Description of Artificial Sequence: Synthetic oligonucleotide
  Sense strand starting at position 2462 of SEQ ID NO: 2785
aauggcuucccggagcaga

SEQ ID NO: 216221 - RNA, 19 nt, Artificial Sequence
  Description of Artificial Sequence: Synthetic oligonucleotide
  Antisense strand to SEQ ID NO: 216220
ucugcuccgggaagccauu

SEQ ID NO: 216222 - RNA, 19 nt, Artificial Sequence
  Description of Artificial Sequence: Synthetic oligonucleotide
  Sense strand starting at position 2527 of SEQ ID NO: 2785
gggagcacaccugggaaau

SEQ ID NO: 216223 - RNA, 19 nt, Artificial Sequence
  Description of Artificial Sequence: Synthetic oligonucleotide
  Antisense strand to SEQ ID NO: 216222
auuucccaggugugcuccc

SEQ ID NO: 216224 - RNA, 19 nt, Artificial Sequence
  Description of Artificial Sequence: Synthetic oligonucleotide
  Sense strand starting at position 2655 of SEQ ID NO: 2785
auauguaauauggguguuu

SEQ ID NO: 216225 - RNA, 19 nt, Artificial Sequence
  Description of Artificial Sequence: Synthetic oligonucleotide
  Antisense strand to SEQ ID NO: 216224
aaacacccauauuacauau

SEQ ID NO: 216226 - RNA, 19 nt, Artificial Sequence
  Description of Artificial Sequence: Synthetic oligonucleotide
  Sense strand starting at position 2656 of SEQ ID NO: 2785
uauguaauauggguguuua

SEQ ID NO: 216227 - RNA, 19 nt, Artificial Sequence
  Description of Artificial Sequence: Synthetic oligonucleotide
  Antisense strand to SEQ ID NO: 216226
uaaacacccauauuacaua

SEQ ID NO: 216228 - RNA, 19 nt, Artificial Sequence
  Description of Artificial Sequence: Synthetic oligonucleotide
  Sense strand starting at position 2657 of SEQ ID NO: 2785
auguaauauggguguuuau

SEQ ID NO: 216229 - RNA, 19 nt, Artificial Sequence
  Description of Artificial Sequence: Synthetic oligonucleotide
  Antisense strand to SEQ ID NO: 216228
auaaacacccauauuacau

SEQ ID NO: 216230 - RNA, 19 nt, Artificial Sequence
  Description of Artificial Sequence: Synthetic oligonucleotide
  Sense strand starting at position 2792 of SEQ ID NO: 2785
aaugaaauauagguugcau

SEQ ID NO: 216231 - RNA, 19 nt, Artificial Sequence
  Description of Artificial Sequence: Synthetic oligonucleotide
  Antisense strand to SEQ ID NO: 216230
augcaaccuauauuucauu

SEQ ID NO: 216232 - RNA, 19 nt, Artificial Sequence
  Description of Artificial Sequence: Synthetic oligonucleotide
  Sense strand starting at position 2847 of SEQ ID NO: 2785
gugggauggcugggaaaca

SEQ ID NO: 216233 - RNA, 19 nt, Artificial Sequence
  Description of Artificial Sequence: Synthetic oligonucleotide
  Antisense strand to SEQ ID NO: 216232
uguuucccagccaucccac

SEQ ID NO: 216234 - RNA, 19 nt, Artificial Sequence
  Description of Artificial Sequence: Synthetic oligonucleotide
  Sense strand starting at position 2950 of SEQ ID NO: 2785
uccagaaaucguuguugaa

SEQ ID NO: 216235 - RNA, 19 nt, Artificial Sequence
  Description of Artificial Sequence: Synthetic oligonucleotide
  Antisense strand to SEQ ID NO: 216234
uucaacaacgauuucugga

SEQ ID NO: 216236 - RNA, 19 nt, Artificial Sequence
  Description of Artificial Sequence: Synthetic oligonucleotide
  Sense strand starting at position 2952 of SEQ ID NO: 2785
cagaaaucguuguugaauu

SEQ ID NO: 216237 - RNA, 19 nt, Artificial Sequence
  Description of Artificial Sequence: Synthetic oligonucleotide
  Antisense strand to SEQ ID NO: 216236
aauucaacaacgauuucug

SEQ ID NO: 216238 - RNA, 19 nt, Artificial Sequence
  Description of Artificial Sequence: Synthetic oligonucleotide
  Sense strand starting at position 2954 of SEQ ID NO: 2785
gaaaucguuguugaauuga

SEQ ID NO: 216239 - RNA, 19 nt, Artificial Sequence
  Description of Artificial Sequence: Synthetic oligonucleotide
  Antisense strand to SEQ ID NO: 216238
ucaauucaacaacgauuuc

SEQ ID NO: 216240 - RNA, 19 nt, Artificial Sequence
  Description of Artificial Sequence: Synthetic oligonucleotide
  Sense strand starting at position 2963 of SEQ ID NO: 2785
guugaauugacuuacgguu

SEQ ID NO: 216241 - RNA, 19 nt, Artificial Sequence
  Description of Artificial Sequence: Synthetic oligonucleotide
  Antisense strand to SEQ ID NO: 216240
aaccguaagucaauucaac

SEQ ID NO: 216242 - RNA, 19 nt, Artificial Sequence
  Description of Artificial Sequence: Synthetic oligonucleotide
  Sense strand starting at position 2987 of SEQ ID NO: 2785
cuuaaucauguccauaugu

SEQ ID NO: 216243 - RNA, 19 nt, Artificial Sequence
  Description of Artificial Sequence: Synthetic oligonucleotide
  Antisense strand to SEQ ID NO: 216242
acauauggacaugauuaag

SEQ ID NO: 216244 - RNA, 19 nt, Artificial Sequence
  Description of Artificial Sequence: Synthetic oligonucleotide
  Sense strand starting at position 2992 of SEQ ID NO: 2785
ucauguccauauguaaauu

SEQ ID NO: 216245 - RNA, 19 nt, Artificial Sequence
  Description of Artificial Sequence: Synthetic oligonucleotide
  Antisense strand to SEQ ID NO: 216244
aauuuacauauggacauga

SEQ ID NO: 216246 - RNA, 19 nt, Artificial Sequence
  Description of Artificial Sequence: Synthetic oligonucleotide
  Sense strand starting at position 3028 of SEQ ID NO: 2785
uuaauuagauccuugcgau

SEQ ID NO: 216247 - RNA, 19 nt, Artificial Sequence
  Description of Artificial Sequence: Synthetic oligonucleotide
  Antisense strand to SEQ ID NO: 216246
aucgcaaggaucuaauuaa

SEQ ID NO: 216248 - RNA, 19 nt, Artificial Sequence
  Description of Artificial Sequence: Synthetic oligonucleotide
  Sense strand starting at position 3182 of SEQ ID NO: 2785
cuuaauguugguuauuaug

SEQ ID NO: 216249 - RNA, 19 nt, Artificial Sequence
  Description of Artificial Sequence: Synthetic oligonucleotide
  Antisense strand to SEQ ID NO: 216248
cauaauaaccaacauuaag

SEQ ID NO: 216250 - RNA, 19 nt, Artificial Sequence
  Description of Artificial Sequence: Synthetic oligonucleotide
  Sense strand starting at position 3190 of SEQ ID NO: 2785
ugguuauuaugguuuauga

SEQ ID NO: 216251 - RNA, 19 nt, Artificial Sequence
  Description of Artificial Sequence: Synthetic oligonucleotide
  Antisense strand to SEQ ID NO: 216250
ucauaaaccauaauaacca

SEQ ID NO: 216252 - RNA, 19 nt, Artificial Sequence
  Description of Artificial Sequence: Synthetic oligonucleotide
  Sense strand starting at position 3192 of SEQ ID NO: 2785
guuauuaugguuuaugagu

SEQ ID NO: 216253 - RNA, 19 nt, Artificial Sequence
  Description of Artificial Sequence: Synthetic oligonucleotide
  Antisense strand to SEQ ID NO: 216252
acucauaaaccauaauaac

SEQ ID NO: 216254 - RNA, 19 nt, Artificial Sequence
  Description of Artificial Sequence: Synthetic oligonucleotide
  Sense strand starting at position 3198 of SEQ ID NO: 2785
augguuuaugaguagugga

SEQ ID NO: 216255 - RNA, 19 nt, Artificial Sequence
  Description of Artificial Sequence: Synthetic oligonucleotide
  Antisense strand to SEQ ID NO: 216254
uccacuacucauaaaccau

SEQ ID NO: 216256 - RNA, 19 nt, Artificial Sequence
  Description of Artificial Sequence: Synthetic oligonucleotide
  Sense strand starting at position 3215 of SEQ ID NO: 2785
gaaagagggugaguaucuu

SEQ ID NO: 216257 - RNA, 19 nt, Artificial Sequence
  Description of Artificial Sequence: Synthetic oligonucleotide
  Antisense strand to SEQ ID NO: 216256
aagauacucacccucuuuc

SEQ ID NO: 216258 - RNA, 19 nt, Artificial Sequence
  Description of Artificial Sequence: Synthetic oligonucleotide
  Sense strand starting at position 3317 of SEQ ID NO: 2785
cuuccaccuguguaucaaa

SEQ ID NO: 216259 - RNA, 19 nt, Artificial Sequence
  Description of Artificial Sequence: Synthetic oligonucleotide
  Antisense strand to SEQ ID NO: 216258
uuugauacacagguggaag

SEQ ID NO: 216260 - RNA, 19 nt, Artificial Sequence
  Description of Artificial Sequence: Synthetic oligonucleotide
  Sense strand starting at position 3338 of SEQ ID NO: 2785
gagcauuggaccuggagga

SEQ ID NO: 216261 - RNA, 19 nt, Artificial Sequence
  Description of Artificial Sequence: Synthetic oligonucleotide
  Antisense strand to SEQ ID NO: 216260
uccuccagguccaaugcuc

SEQ ID NO: 216262 - RNA, 19 nt, Artificial Sequence
  Description of Artificial Sequence: Synthetic oligonucleotide
  Sense strand starting at position 3339 of SEQ ID NO: 2785
agcauuggaccuggaggau

SEQ ID NO: 216263 - RNA, 19 nt, Artificial Sequence
  Description of Artificial Sequence: Synthetic oligonucleotide
  Antisense strand to SEQ ID NO: 216262
auccuccagguccaaugcu

SEQ ID NO: 216264 - RNA, 19 nt, Artificial Sequence
  Description of Artificial Sequence: Synthetic oligonucleotide
  Sense strand starting at position 3960 of SEQ ID NO: 2785
agaauugaaugaggaaaug

SEQ ID NO: 216265 - RNA, 19 nt, Artificial Sequence
  Description of Artificial Sequence: Synthetic oligonucleotide
  Antisense strand to SEQ ID NO: 216264
cauuuccucauucaauucu

SEQ ID NO: 216266 - RNA, 19 nt, Artificial Sequence
  Description of Artificial Sequence: Synthetic oligonucleotide
  Sense strand starting at position 185 of SEQ ID NO: 2786
uuuggauacucccuuagag

SEQ ID NO: 216267 - RNA, 19 nt, Artificial Sequence
  Description of Artificial Sequence: Synthetic oligonucleotide
  Antisense strand to SEQ ID NO: 216266
cucuaagggaguauccaaa

SEQ ID NO: 216268 - RNA, 19 nt, Artificial Sequence
  Description of Artificial Sequence: Synthetic oligonucleotide
  Sense strand starting at position 205 of SEQ ID NO: 2786
ggaugaucccuuuagccuu

SEQ ID NO: 216269 - RNA, 19 nt, Artificial Sequence
  Description of Artificial Sequence: Synthetic oligonucleotide
  Antisense strand to SEQ ID NO: 216268
aaggcuaaagggaucaucc

SEQ ID NO: 216270 - RNA, 19 nt, Artificial Sequence
  Description of Artificial Sequence: Synthetic oligonucleotide
  Sense strand starting at position 216 of SEQ ID NO: 2786
uuagccuuccuguagaaca

SEQ ID NO: 216271 - RNA, 19 nt, Artificial Sequence
  Description of Artificial Sequence: Synthetic oligonucleotide
  Antisense strand to SEQ ID NO: 216270
uguucuacaggaaggcuaa

SEQ ID NO: 216272 - RNA, 19 nt, Artificial Sequence
  Description of Artificial Sequence: Synthetic oligonucleotide
  Sense strand starting at position 241 of SEQ ID NO: 2786
uuaauacaaucgguauaag

SEQ ID NO: 216273 - RNA, 19 nt, Artificial Sequence
  Description of Artificial Sequence: Synthetic oligonucleotide
  Antisense strand to SEQ ID NO: 216272
cuuauaccgauuguauuaa

SEQ ID NO: 216274 - RNA, 19 nt, Artificial Sequence
  Description of Artificial Sequence: Synthetic oligonucleotide
  Sense strand starting at position 252 of SEQ ID NO: 2786
gguauaaggcauuaugacu

SEQ ID NO: 216275 - RNA, 19 nt, Artificial Sequence
  Description of Artificial Sequence: Synthetic oligonucleotide
  Antisense strand to SEQ ID NO: 216274
agucauaaugccuuauacc

SEQ ID NO: 216276 - RNA, 19 nt, Artificial Sequence
  Description of Artificial Sequence: Synthetic oligonucleotide
  Sense strand starting at position 362 of SEQ ID NO: 2786
uugucuucccuugagacau

SEQ ID NO: 216277 - RNA, 19 nt, Artificial Sequence
  Description of Artificial Sequence: Synthetic oligonucleotide
  Antisense strand to SEQ ID NO: 216276
augucucaagggaagacaa

SEQ ID NO: 216278 - RNA, 19 nt, Artificial Sequence
  Description of Artificial Sequence: Synthetic oligonucleotide
  Sense strand starting at position 436 of SEQ ID NO: 2786
guagaaaggucccuaugug

SEQ ID NO: 216279 - RNA, 19 nt, Artificial Sequence
  Description of Artificial Sequence: Synthetic oligonucleotide
  Antisense strand to SEQ ID NO: 216278
cacauagggaccuuucuac

SEQ ID NO: 216280 - RNA, 19 nt, Artificial Sequence
  Description of Artificial Sequence: Synthetic oligonucleotide
  Sense strand starting at position 440 of SEQ ID NO: 2786
aaaggucccuaugugguaa

SEQ ID NO: 216281 - RNA, 19 nt, Artificial Sequence
  Description of Artificial Sequence: Synthetic oligonucleotide
  Antisense strand to SEQ ID NO: 216280
uuaccacauagggaccuuu

SEQ ID NO: 216282 - RNA, 19 nt, Artificial Sequence
  Description of Artificial Sequence: Synthetic oligonucleotide
  Sense strand starting at position 525 of SEQ ID NO: 2786
guuccaauauggguaauau

SEQ ID NO: 216283 - RNA, 19 nt, Artificial Sequence
  Description of Artificial Sequence: Synthetic oligonucleotide
  Antisense strand to SEQ ID NO: 216282
auauuacccauauuggaac

SEQ ID NO: 216284 - RNA, 19 nt, Artificial Sequence
  Description of Artificial Sequence: Synthetic oligonucleotide
  Sense strand starting at position 576 of SEQ ID NO: 2786
ggagcaagcccagaaacuu

SEQ ID NO: 216285 - RNA, 19 nt, Artificial Sequence
  Description of Artificial Sequence: Synthetic oligonucleotide
  Antisense strand to SEQ ID NO: 216284
aaguuucugggcuugcucc

SEQ ID NO: 216286 - RNA, 19 nt, Artificial Sequence
  Description of Artificial Sequence: Synthetic oligonucleotide
  Sense strand starting at position 712 of SEQ ID NO: 2786
aggaauugagccugaaccu

SEQ ID NO: 216287 - RNA, 19 nt, Artificial Sequence
  Description of Artificial Sequence: Synthetic oligonucleotide
  Antisense strand to SEQ ID NO: 216286
agguucaggcucaauuccu

SEQ ID NO: 216288 - RNA, 19 nt, Artificial Sequence
  Description of Artificial Sequence: Synthetic oligonucleotide
  Sense strand starting at position 729 of SEQ ID NO: 2786
cucucauagcuccagagau

SEQ ID NO: 216289 - RNA, 19 nt, Artificial Sequence
  Description of Artificial Sequence: Synthetic oligonucleotide
  Antisense strand to SEQ ID NO: 216288
aucucuggagcuaugagag

SEQ ID NO: 216290 - RNA, 19 nt, Artificial Sequence
  Description of Artificial Sequence: Synthetic oligonucleotide
  Sense strand starting at position 762 of SEQ ID NO: 2786
cggacuggauucuuuaaau

SEQ ID NO: 216291 - RNA, 19 nt, Artificial Sequence
  Description of Artificial Sequence: Synthetic oligonucleotide
  Antisense strand to SEQ ID NO: 216290
auuuaaagaauccaguccg

SEQ ID NO: 216292 - RNA, 19 nt, Artificial Sequence
  Description of Artificial Sequence: Synthetic oligonucleotide
  Sense strand starting at position 813 of SEQ ID NO: 2786
aggcuucuugccuauuaaa

SEQ ID NO: 216293 - RNA, 19 nt, Artificial Sequence
  Description of Artificial Sequence: Synthetic oligonucleotide
  Antisense strand to SEQ ID NO: 216292
uuuaauaggcaagaagccu

SEQ ID NO: 216294 - RNA, 19 nt, Artificial Sequence
  Description of Artificial Sequence: Synthetic oligonucleotide
  Sense strand starting at position 852 of SEQ ID NO: 2786
gagguuagagcuuggacga

SEQ ID NO: 216295 - RNA, 19 nt, Artificial Sequence
  Description of Artificial Sequence: Synthetic oligonucleotide
  Antisense strand to SEQ ID NO: 216294
ucguccaagcucuaaccuc

SEQ ID NO: 216296 - RNA, 19 nt, Artificial Sequence
  Description of Artificial Sequence: Synthetic oligonucleotide
  Sense strand starting at position 972 of SEQ ID NO: 2786
uugaucuugugguuaacaa

SEQ ID NO: 216297 - RNA, 19 nt, Artificial Sequence
  Description of Artificial Sequence: Synthetic oligonucleotide
  Antisense strand to SEQ ID NO: 216296
uuguuaaccacaagaucaa

SEQ ID NO: 216298 - RNA, 19 nt, Artificial Sequence
  Description of Artificial Sequence: Synthetic oligonucleotide
  Sense strand starting at position 973 of SEQ ID NO: 2786
ugaucuugugguuaacaac

SEQ ID NO: 216299 - RNA, 19 nt, Artificial Sequence
  Description of Artificial Sequence: Synthetic oligonucleotide
  Antisense strand to SEQ ID NO: 216298
guuguuaaccacaagauca

SEQ ID NO: 216300 - RNA, 19 nt, Artificial Sequence
  Description of Artificial Sequence: Synthetic oligonucleotide
  Sense strand starting at position 1330 of SEQ ID NO: 2786
ugaacuuugcgauaacgga

SEQ ID NO: 216301 - RNA, 19 nt, Artificial Sequence
  Description of Artificial Sequence: Synthetic oligonucleotide
  Antisense strand to SEQ ID NO: 216300
uccguuaucgcaaaguuca

SEQ ID NO: 216302 - RNA, 19 nt, Artificial Sequence
  Description of Artificial Sequence: Synthetic oligonucleotide
  Sense strand starting at position 1355 of SEQ ID NO: 2786
gaggaaauccagcacgguu

SEQ ID NO: 216303 - RNA, 19 nt, Artificial Sequence
  Description of Artificial Sequence: Synthetic oligonucleotide
  Antisense strand to SEQ ID NO: 216302
aaccgugcuggauuuccuc

SEQ ID NO: 216304 - RNA, 19 nt, Artificial Sequence
  Description of Artificial Sequence: Synthetic oligonucleotide
  Sense strand starting at position 1401 of SEQ ID NO: 2786
ggaugguuggagugaugga

SEQ ID NO: 216305 - RNA, 19 nt, Artificial Sequence
  Description of Artificial Sequence: Synthetic oligonucleotide
  Antisense strand to SEQ ID NO: 216304
uccaucacuccaaccaucc

SEQ ID NO: 216306 - RNA, 19 nt, Artificial Sequence
  Description of Artificial Sequence: Synthetic oligonucleotide
  Sense strand starting at position 1490 of SEQ ID NO: 2786
uugauugucuuucugaaug

SEQ ID NO: 216307 - RNA, 19 nt, Artificial Sequence
  Description of Artificial Sequence: Synthetic oligonucleotide
  Antisense strand to SEQ ID NO: 216306
cauucagaaagacaaucaa

SEQ ID NO: 216308 - RNA, 19 nt, Artificial Sequence
  Description of Artificial Sequence: Synthetic oligonucleotide
  Sense strand starting at position 2292 of SEQ ID NO: 2786
gcuaauaggaguugcaaga

SEQ ID NO: 216309 - RNA, 19 nt, Artificial Sequence
  Description of Artificial Sequence: Synthetic oligonucleotide
  Antisense strand to SEQ ID NO: 216308
ucuugcaacuccuauuagc

SEQ ID NO: 216310 - RNA, 19 nt, Artificial Sequence
  Description of Artificial Sequence: Synthetic oligonucleotide
  Sense strand starting at position 2326 of SEQ ID NO: 2786
gagggaauuucccacggaa

SEQ ID NO: 216311 - RNA, 19 nt, Artificial Sequence
  Description of Artificial Sequence: Synthetic oligonucleotide
  Antisense strand to SEQ ID NO: 216310
uuccgugggaaauucccuc

SEQ ID NO: 216312 - RNA, 19 nt, Artificial Sequence
  Description of Artificial Sequence: Synthetic oligonucleotide
  Sense strand starting at position 2339 of SEQ ID NO: 2786
acggaaagcuuuguaauga

SEQ ID NO: 216313 - RNA, 19 nt, Artificial Sequence
  Description of Artificial Sequence: Synthetic oligonucleotide
  Antisense strand to SEQ ID NO: 216312
ucauuacaaagcuuuccgu

SEQ ID NO: 216314 - RNA, 19 nt, Artificial Sequence
  Description of Artificial Sequence: Synthetic oligonucleotide
  Sense strand starting at position 2440 of SEQ ID NO: 2786
cucguucccaaaugggaaa

SEQ ID NO: 216315 - RNA, 19 nt, Artificial Sequence
  Description of Artificial Sequence: Synthetic oligonucleotide
  Antisense strand to SEQ ID NO: 216314
uuucccauuugggaacgag

SEQ ID NO: 216316 - RNA, 19 nt, Artificial Sequence
  Description of Artificial Sequence: Synthetic oligonucleotide
  Sense strand starting at position 2469 of SEQ ID NO: 2786
ucucgauaggaucgggauu

SEQ ID NO: 216317 - RNA, 19 nt, Artificial Sequence
  Description of Artificial Sequence: Synthetic oligonucleotide
  Antisense strand to SEQ ID NO: 216316
aaucccgauccuaucgaga

SEQ ID NO: 216318 - RNA, 19 nt, Artificial Sequence
  Description of Artificial Sequence: Synthetic oligonucleotide
  Sense strand starting at position 2602 of SEQ ID NO: 2786
gcguugcuucgggcaagua

SEQ ID NO: 216319 - RNA, 19 nt, Artificial Sequence
  Description of Artificial Sequence: Synthetic oligonucleotide
  Antisense strand to SEQ ID NO: 216318
uacuugcccgaagcaacgc

SEQ ID NO: 216320 - RNA, 19 nt, Artificial Sequence
  Description of Artificial Sequence: Synthetic oligonucleotide
  Sense strand starting at position 2703 of SEQ ID NO: 2786
gggugugguagugaugaga

SEQ ID NO: 216321 - RNA, 19 nt, Artificial Sequence
  Description of Artificial Sequence: Synthetic oligonucleotide
  Antisense strand to SEQ ID NO: 216320
ucucaucacuaccacaccc

SEQ ID NO: 216322 - RNA, 19 nt, Artificial Sequence
  Description of Artificial Sequence: Synthetic oligonucleotide
  Sense strand starting at position 2813 of SEQ ID NO: 2786
uuugguuucuuucuagaca

SEQ ID NO: 216323 - RNA, 19 nt, Artificial Sequence
  Description of Artificial Sequence: Synthetic oligonucleotide
  Antisense strand to SEQ ID NO: 216322
ugucuagaaagaaaccaaa

SEQ ID NO: 216324 - RNA, 19 nt, Artificial Sequence
  Description of Artificial Sequence: Synthetic oligonucleotide
  Sense strand starting at position 2866 of SEQ ID NO: 2786
ucuaguauauaucuggaaa

SEQ ID NO: 216325 - RNA, 19 nt, Artificial Sequence
  Description of Artificial Sequence: Synthetic oligonucleotide
  Antisense strand to SEQ ID NO: 216324
uuuccagauauauacuaga

SEQ ID NO: 216326 - RNA, 19 nt, Artificial Sequence
  Description of Artificial Sequence: Synthetic oligonucleotide
  Sense strand starting at position 2920 of SEQ ID NO: 2786
uuuauuggaagcugucaga

SEQ ID NO: 216327 - RNA, 19 nt, Artificial Sequence
  Description of Artificial Sequence: Synthetic oligonucleotide
  Antisense strand to SEQ ID NO: 216326
ucugacagcuuccaauaaa

SEQ ID NO: 216328 - RNA, 19 nt, Artificial Sequence
  Description of Artificial Sequence: Synthetic oligonucleotide
  Sense strand starting at position 2962 of SEQ ID NO: 2786
gagggaccauaaugauuua

SEQ ID NO: 216329 - RNA, 19 nt, Artificial Sequence
  Description of Artificial Sequence: Synthetic oligonucleotide
  Antisense strand to SEQ ID NO: 216328
uaaaucauuauggucccuc

SEQ ID NO: 216330 - RNA, 19 nt, Artificial Sequence
  Description of Artificial Sequence: Synthetic oligonucleotide
  Sense strand starting at position 3000 of SEQ ID NO: 2786
uuaaguuaggguugaugaa

SEQ ID NO: 216331 - RNA, 19 nt, Artificial Sequence
  Description of Artificial Sequence: Synthetic oligonucleotide
  Antisense strand to SEQ ID NO: 216330
uucaucaacccuaacuuaa

SEQ ID NO: 216332 - RNA, 19 nt, Artificial Sequence
  Description of Artificial Sequence: Synthetic oligonucleotide
  Sense strand starting at position 3256 of SEQ ID NO: 2786
cuggauuagugaccucauu

SEQ ID NO: 216333 - RNA, 19 nt, Artificial Sequence
  Description of Artificial Sequence: Synthetic oligonucleotide
  Antisense strand to SEQ ID NO: 216332
aaugaggucacuaauccag

SEQ ID NO: 216334 - RNA, 19 nt, Artificial Sequence
  Description of Artificial Sequence: Synthetic oligonucleotide
  Sense strand starting at position 3361 of SEQ ID NO: 2786
uuauguaagucacuagauu

SEQ ID NO: 216335 - RNA, 19 nt, Artificial Sequence
  Description of Artificial Sequence: Synthetic oligonucleotide
  Antisense strand to SEQ ID NO: 216334
aaucuagugacuuacauaa

SEQ ID NO: 216336 - RNA, 19 nt, Artificial Sequence
  Description of Artificial Sequence: Synthetic oligonucleotide
  Sense strand starting at position 3369 of SEQ ID NO: 2786
gucacuagauuccugagca

SEQ ID NO: 216337 - RNA, 19 nt, Artificial Sequence
  Description of Artificial Sequence: Synthetic oligonucleotide
  Antisense strand to SEQ ID NO: 216336
ugcucaggaaucuagugac

SEQ ID NO: 216338 - RNA, 19 nt, Artificial Sequence
  Description of Artificial Sequence: Synthetic oligonucleotide
  Sense strand starting at position 3373 of SEQ ID NO: 2786
cuagauuccugagcaaacu

SEQ ID NO: 216339 - RNA, 19 nt, Artificial Sequence
  Description of Artificial Sequence: Synthetic oligonucleotide
  Antisense strand to SEQ ID NO: 216338
aguuugcucaggaaucuag

SEQ ID NO: 216340 - RNA, 19 nt, Artificial Sequence
  Description of Artificial Sequence: Synthetic oligonucleotide
  Sense strand starting at position 3688 of SEQ ID NO: 2786
ggaauacacugagccauua

SEQ ID NO: 216341 - RNA, 19 nt, Artificial Sequence
  Description of Artificial Sequence: Synthetic oligonucleotide
  Antisense strand to SEQ ID NO: 216340
uaauggcucaguguauucc

SEQ ID NO: 216342 - RNA, 19 nt, Artificial Sequence
  Description of Artificial Sequence: Synthetic oligonucleotide
  Sense strand starting at position 3842 of SEQ ID NO: 2786
acuuaucugguguauauca

SEQ ID NO: 216343 - RNA, 19 nt, Artificial Sequence
  Description of Artificial Sequence: Synthetic oligonucleotide
  Antisense strand to SEQ ID NO: 216342
ugauauacaccagauaagu

SEQ ID NO: 216344 - RNA, 19 nt, Artificial Sequence
  Description of Artificial Sequence: Synthetic oligonucleotide
  Sense strand starting at position 3844 of SEQ ID NO: 2786
uuaucugguguauaucauu

SEQ ID NO: 216345 - RNA, 19 nt, Artificial Sequence
  Description of Artificial Sequence: Synthetic oligonucleotide
  Antisense strand to SEQ ID NO: 216344
aaugauauacaccagauaa

SEQ ID NO: 216346 - RNA, 19 nt, Artificial Sequence
  Description of Artificial Sequence: Synthetic oligonucleotide
  Sense strand starting at position 31 of SEQ ID NO: 2787
gcuuucuauacuggagaga

SEQ ID NO: 216347 - RNA, 19 nt, Artificial Sequence
  Description of Artificial Sequence: Synthetic oligonucleotide
  Antisense strand to SEQ ID NO: 216346
ucucuccaguauagaaagc

SEQ ID NO: 216348 - RNA, 19 nt, Artificial Sequence
  Description of Artificial Sequence: Synthetic oligonucleotide
  Sense strand starting at position 102 of SEQ ID NO: 2787
acauguuugcuguaucaac

SEQ ID NO: 216349 - RNA, 19 nt, Artificial Sequence
  Description of Artificial Sequence: Synthetic oligonucleotide
  Antisense strand to SEQ ID NO: 216348
guugauacagcaaacaugu

SEQ ID NO: 216350 - RNA, 19 nt, Artificial Sequence
  Description of Artificial Sequence: Synthetic oligonucleotide
  Sense strand starting at position 843 of SEQ ID NO: 2787
aaggaaguugggcgagaua

SEQ ID NO: 216351 - RNA, 19 nt, Artificial Sequence
  Description of Artificial Sequence: Synthetic oligonucleotide
  Antisense strand to SEQ ID NO: 216350
uaucucgcccaacuuccuu

SEQ ID NO: 216352 - RNA, 19 nt, Artificial Sequence
  Description of Artificial Sequence: Synthetic oligonucleotide
  Sense strand starting at position 846 of SEQ ID NO: 2787
gaaguugggcgagauaauc

SEQ ID NO: 216353 - RNA, 19 nt, Artificial Sequence
  Description of Artificial Sequence: Synthetic oligonucleotide
  Antisense strand to SEQ ID NO: 216352
gauuaucucgcccaacuuc

SEQ ID NO: 216354 - RNA, 19 nt, Artificial Sequence
  Description of Artificial Sequence: Synthetic oligonucleotide
  Sense strand starting at position 854 of SEQ ID NO: 2787
gcgagauaaucucuuaaau

SEQ ID NO: 216355 - RNA, 19 nt, Artificial Sequence
  Description of Artificial Sequence: Synthetic oligonucleotide
  Antisense strand to SEQ ID NO: 216354
auuuaagagauuaucucgc

SEQ ID NO: 216356 - RNA, 19 nt, Artificial Sequence
  Description of Artificial Sequence: Synthetic oligonucleotide
  Sense strand starting at position 896 of SEQ ID NO: 2787
gacauugggaggcgagaau

SEQ ID NO: 216357 - RNA, 19 nt, Artificial Sequence
  Description of Artificial Sequence: Synthetic oligonucleotide
  Antisense strand to SEQ ID NO: 216356
auucucgccucccaauguc

SEQ ID NO: 216358 - RNA, 19 nt, Artificial Sequence
  Description of Artificial Sequence: Synthetic oligonucleotide
  Sense strand starting at position 909 of SEQ ID NO: 2787
gagaauggcugacugcuaa

SEQ ID NO: 216359 - RNA, 19 nt, Artificial Sequence
  Description of Artificial Sequence: Synthetic oligonucleotide
  Antisense strand to SEQ ID NO: 216358
uuagcagucagccauucuc

SEQ ID NO: 216360 - RNA, 19 nt, Artificial Sequence
  Description of Artificial Sequence: Synthetic oligonucleotide
  Sense strand starting at position 941 of SEQ ID NO: 2787
aacaaauugugacucggua

SEQ ID NO: 216361 - RNA, 19 nt, Artificial Sequence
  Description of Artificial Sequence: Synthetic oligonucleotide
  Antisense strand to SEQ ID NO: 216360
uaccgagucacaauuuguu

SEQ ID NO: 216362 - RNA, 19 nt, Artificial Sequence
  Description of Artificial Sequence: Synthetic oligonucleotide
  Sense strand starting at position 943 of SEQ ID NO: 2787
caaauugugacucgguaga

SEQ ID NO: 216363 - RNA, 19 nt, Artificial Sequence
  Description of Artificial Sequence: Synthetic oligonucleotide
  Antisense strand to SEQ ID NO: 216362
ucuaccgagucacaauuug

SEQ ID NO: 216364 - RNA, 19 nt, Artificial Sequence
  Description of Artificial Sequence: Synthetic oligonucleotide
  Sense strand starting at position 945 of SEQ ID NO: 2787
aauugugacucgguagaaa

SEQ ID NO: 216365 - RNA, 19 nt, Artificial Sequence
  Description of Artificial Sequence: Synthetic oligonucleotide
  Antisense strand to SEQ ID NO: 216364
uuucuaccgagucacaauu

SEQ ID NO: 216366 - RNA, 19 nt, Artificial Sequence
  Description of Artificial Sequence: Synthetic oligonucleotide
  Sense strand starting at position 1306 of SEQ ID NO: 2787
ugcagagaacuguaacuca

SEQ ID NO: 216367 - RNA, 19 nt, Artificial Sequence
  Description of Artificial Sequence: Synthetic oligonucleotide
  Antisense strand to SEQ ID NO: 216366
ugaguuacaguucucugca

SEQ ID NO: 216368 - RNA, 19 nt, Artificial Sequence
  Description of Artificial Sequence: Synthetic oligonucleotide
  Sense strand starting at position 1418 of SEQ ID NO: 2787
uuacgcaacucucuggaau

SEQ ID NO: 216369 - RNA, 19 nt, Artificial Sequence
  Description of Artificial Sequence: Synthetic oligonucleotide
  Antisense strand to SEQ ID NO: 216368
auuccagagaguugcguaa

SEQ ID NO: 216370 - RNA, 19 nt, Artificial Sequence
  Description of Artificial Sequence: Synthetic oligonucleotide
  Sense strand starting at position 1421 of SEQ ID NO: 2787
cgcaacucucuggaaucau

SEQ ID NO: 216371 - RNA, 19 nt, Artificial Sequence
  Description of Artificial Sequence: Synthetic oligonucleotide
  Antisense strand to SEQ ID NO: 216370
augauuccagagaguugcg

SEQ ID NO: 216372 - RNA, 19 nt, Artificial Sequence
  Description of Artificial Sequence: Synthetic oligonucleotide
  Sense strand starting at position 1527 of SEQ ID NO: 2787
caauaaaggcuucgugaac

SEQ ID NO: 216373 - RNA, 19 nt, Artificial Sequence
  Description of Artificial Sequence: Synthetic oligonucleotide
  Antisense strand to SEQ ID NO: 216372
guucacgaagccuuuauug

SEQ ID NO: 216374 - RNA, 19 nt, Artificial Sequence
  Description of Artificial Sequence: Synthetic oligonucleotide
  Sense strand starting at position 1528 of SEQ ID NO: 2787
aauaaaggcuucgugaacu

SEQ ID NO: 216375 - RNA, 19 nt, Artificial Sequence
  Description of Artificial Sequence: Synthetic oligonucleotide
  Antisense strand to SEQ ID NO: 216374
aguucacgaagccuuuauu

SEQ ID NO: 216376 - RNA, 19 nt, Artificial Sequence
  Description of Artificial Sequence: Synthetic oligonucleotide
  Sense strand starting at position 1539 of SEQ ID NO: 2787
cgugaacugaaauggguua

SEQ ID NO: 216377 - RNA, 19 nt, Artificial Sequence
  Description of Artificial Sequence: Synthetic oligonucleotide
  Antisense strand to SEQ ID NO: 216376
uaacccauuucaguucacg

SEQ ID NO: 216378 - RNA, 19 nt, Artificial Sequence
  Description of Artificial Sequence: Synthetic oligonucleotide
  Sense strand starting at position 1587 of SEQ ID NO: 2787
uaucguuaucuccgauuua

SEQ ID NO: 216379 - RNA, 19 nt, Artificial Sequence
  Description of Artificial Sequence: Synthetic oligonucleotide
  Antisense strand to SEQ ID NO: 216378
uaaaucggagauaacgaua

SEQ ID NO: 216380 - RNA, 19 nt, Artificial Sequence
  Description of Artificial Sequence: Synthetic oligonucleotide
  Sense strand starting at position 2375 of SEQ ID NO: 2787
uuacauuugcaucguagau

SEQ ID NO: 216381 - RNA, 19 nt, Artificial Sequence
  Description of Artificial Sequence: Synthetic oligonucleotide
  Antisense strand to SEQ ID NO: 216380
aucuacgaugcaaauguaa

SEQ ID NO: 216382 - RNA, 19 nt, Artificial Sequence
  Description of Artificial Sequence: Synthetic oligonucleotide
  Sense strand starting at position 2381 of SEQ ID NO: 2787
uugcaucguagauaaagaa

SEQ ID NO: 216383 - RNA, 19 nt, Artificial Sequence
  Description of Artificial Sequence: Synthetic oligonucleotide
  Antisense strand to SEQ ID NO: 216382
uucuuuaucuacgaugcaa

SEQ ID NO: 216384 - RNA, 19 nt, Artificial Sequence
  Description of Artificial Sequence: Synthetic oligonucleotide
  Sense strand starting at position 2434 of SEQ ID NO: 2787
gugggauguaggcauacua

SEQ ID NO: 216385 - RNA, 19 nt, Artificial Sequence
  Description of Artificial Sequence: Synthetic oligonucleotide
  Antisense strand to SEQ ID NO: 216384
uaguaugccuacaucccac

SEQ ID NO: 216386 - RNA, 19 nt, Artificial Sequence
  Description of Artificial Sequence: Synthetic oligonucleotide
  Sense strand starting at position 2693 of SEQ ID NO: 2787
ugaacuauuccggauguaa

SEQ ID NO: 216387 - RNA, 19 nt, Artificial Sequence
  Description of Artificial Sequence: Synthetic oligonucleotide
  Antisense strand to SEQ ID NO: 216386
uuacauccggaauaguuca

SEQ ID NO: 216388 - RNA, 19 nt, Artificial Sequence
  Description of Artificial Sequence: Synthetic oligonucleotide
  Sense strand starting at position 2713 of SEQ ID NO: 2787
acacuagggaucggaguuu

SEQ ID NO: 216389 - RNA, 19 nt, Artificial Sequence
  Description of Artificial Sequence: Synthetic oligonucleotide
  Antisense strand to SEQ ID NO: 216388
aaacuccgaucccuagugu

SEQ ID NO: 216390 - RNA, 19 nt, Artificial Sequence
  Description of Artificial Sequence: Synthetic oligonucleotide
  Sense strand starting at position 2749 of SEQ ID NO: 2787
ucauucuagugaccgagaa

SEQ ID NO: 216391 - RNA, 19 nt, Artificial Sequence
  Description of Artificial Sequence: Synthetic oligonucleotide
  Antisense strand to SEQ ID NO: 216390
uucucggucacuagaauga

SEQ ID NO: 216392 - RNA, 19 nt, Artificial Sequence
  Description of Artificial Sequence: Synthetic oligonucleotide
  Sense strand starting at position 2753 of SEQ ID NO: 2787
ucuagugaccgagaagcuu

SEQ ID NO: 216393 - RNA, 19 nt, Artificial Sequence
  Description of Artificial Sequence: Synthetic oligonucleotide
  Antisense strand to SEQ ID NO: 216392
aagcuucucggucacuaga

SEQ ID NO: 216394 - RNA, 19 nt, Artificial Sequence
  Description of Artificial Sequence: Synthetic oligonucleotide
  Sense strand starting at position 2786 of SEQ ID NO: 2787
gauggaucugugugaauag

SEQ ID NO: 216395 - RNA, 19 nt, Artificial Sequence
  Description of Artificial Sequence: Synthetic oligonucleotide
  Antisense strand to SEQ ID NO: 216394
cuauucacacagauccauc

SEQ ID NO: 216396 - RNA, 19 nt, Artificial Sequence
  Description of Artificial Sequence: Synthetic oligonucleotide
  Sense strand starting at position 2883 of SEQ ID NO: 2787
ugguuaagagcacggaauu

SEQ ID NO: 216397 - RNA, 19 nt, Artificial Sequence
  Description of Artificial Sequence: Synthetic oligonucleotide
  Antisense strand to SEQ ID NO: 216396
aauuccgugcucuuaacca

SEQ ID NO: 216398 - RNA, 19 nt, Artificial Sequence
  Description of Artificial Sequence: Synthetic oligonucleotide
  Sense strand starting at position 2929 of SEQ ID NO: 2787
aucacuauccucggaguca

SEQ ID NO: 216399 - RNA, 19 nt, Artificial Sequence
  Description of Artificial Sequence: Synthetic oligonucleotide
  Antisense strand to SEQ ID NO: 216398
ugacuccgaggauagugau

SEQ ID NO: 216400 - RNA, 19 nt, Artificial Sequence
  Description of Artificial Sequence: Synthetic oligonucleotide
  Sense strand starting at position 2993 of SEQ ID NO: 2787
ggauaaguguuauuaggug

SEQ ID NO: 216401 - RNA, 19 nt, Artificial Sequence
  Description of Artificial Sequence: Synthetic oligonucleotide
  Antisense strand to SEQ ID NO: 216400
caccuaauaacacuuaucc

SEQ ID NO: 216402 - RNA, 19 nt, Artificial Sequence
  Description of Artificial Sequence: Synthetic oligonucleotide
  Sense strand starting at position 2999 of SEQ ID NO: 2787
guguuauuaggugauucag

SEQ ID NO: 216403 - RNA, 19 nt, Artificial Sequence
  Description of Artificial Sequence: Synthetic oligonucleotide
  Antisense strand to SEQ ID NO: 216402
cugaaucaccuaauaacac

SEQ ID NO: 216404 - RNA, 19 nt, Artificial Sequence
  Description of Artificial Sequence: Synthetic oligonucleotide
  Sense strand starting at position 3225 of SEQ ID NO: 2787
uucuuccaucuaggaagau

SEQ ID NO: 216405 - RNA, 19 nt, Artificial Sequence
  Description of Artificial Sequence: Synthetic oligonucleotide
  Antisense strand to SEQ ID NO: 216404
aucuuccuagauggaagaa

SEQ ID NO: 216406 - RNA, 19 nt, Artificial Sequence
  Description of Artificial Sequence: Synthetic oligonucleotide
  Sense strand starting at position 3524 of SEQ ID NO: 2787
aaguguguuuaucugagau

SEQ ID NO: 216407 - RNA, 19 nt, Artificial Sequence
  Description of Artificial Sequence: Synthetic oligonucleotide
  Antisense strand to SEQ ID NO: 216406
aucucagauaaacacacuu

SEQ ID NO: 216408 - RNA, 19 nt, Artificial Sequence
  Description of Artificial Sequence: Synthetic oligonucleotide
  Sense strand starting at position 3556 of SEQ ID NO: 2787
gaguguuucugauuagauu

SEQ ID NO: 216409 - RNA, 19 nt, Artificial Sequence
  Description of Artificial Sequence: Synthetic oligonucleotide
  Antisense strand to SEQ ID NO: 216408
aaucuaaucagaaacacuc

SEQ ID NO: 216410 - RNA, 19 nt, Artificial Sequence
  Description of Artificial Sequence: Synthetic oligonucleotide
  Sense strand starting at position 3587 of SEQ ID NO: 2787
uguguugugggucagaauc

SEQ ID NO: 216411 - RNA, 19 nt, Artificial Sequence
  Description of Artificial Sequence: Synthetic oligonucleotide
  Antisense strand to SEQ ID NO: 216410
gauucugacccacaacaca

SEQ ID NO: 216412 - RNA, 19 nt, Artificial Sequence
  Description of Artificial Sequence: Synthetic oligonucleotide
  Sense strand starting at position 3709 of SEQ ID NO: 2787
guaaacuguuacccuagga

SEQ ID NO: 216413 - RNA, 19 nt, Artificial Sequence
  Description of Artificial Sequence: Synthetic oligonucleotide
  Antisense strand to SEQ ID NO: 216412
uccuaggguaacaguuuac

SEQ ID NO: 216414 - RNA, 19 nt, Artificial Sequence
  Description of Artificial Sequence: Synthetic oligonucleotide
  Sense strand starting at position 3713 of SEQ ID NO: 2787
acuguuacccuaggacauu

SEQ ID NO: 216415 - RNA, 19 nt, Artificial Sequence
  Description of Artificial Sequence: Synthetic oligonucleotide
  Antisense strand to SEQ ID NO: 216414
aauguccuaggguaacagu

SEQ ID NO: 216416 - RNA, 19 nt, Artificial Sequence
  Description of Artificial Sequence: Synthetic oligonucleotide
  Sense strand starting at position 3784 of SEQ ID NO: 2787
acccaaaugucagcugacu

SEQ ID NO: 216417 - RNA, 19 nt, Artificial Sequence
  Description of Artificial Sequence: Synthetic oligonucleotide
  Antisense strand to SEQ ID NO: 216416
agucagcugacauuugggu

SEQ ID NO: 216418 - RNA, 19 nt, Artificial Sequence
  Description of Artificial Sequence: Synthetic oligonucleotide
  Sense strand starting at position 3841 of SEQ ID NO: 2787
gcaaauccacagugagaau

SEQ ID NO: 216419 - RNA, 19 nt, Artificial Sequence
  Description of Artificial Sequence: Synthetic oligonucleotide
  Antisense strand to SEQ ID NO: 216418
auucucacuguggauuugc

SEQ ID NO: 216420 - RNA, 19 nt, Artificial Sequence
  Description of Artificial Sequence: Synthetic oligonucleotide
  Sense strand starting at position 3935 of SEQ ID NO: 2787
gguguugaaguggguaaga

SEQ ID NO: 216421 - RNA, 19 nt, Artificial Sequence
  Description of Artificial Sequence: Synthetic oligonucleotide
  Antisense strand to SEQ ID NO: 216420
ucuuacccacuucaacacc

SEQ ID NO: 216422 - RNA, 19 nt, Artificial Sequence
  Description of Artificial Sequence: Synthetic oligonucleotide
  Sense strand starting at position 3937 of SEQ ID NO: 2787
uguugaaguggguaagaua

SEQ ID NO: 216423 - RNA, 19 nt, Artificial Sequence
  Description of Artificial Sequence: Synthetic oligonucleotide
  Antisense strand to SEQ ID NO: 216422
uaucuuacccacuucaaca

SEQ ID NO: 216424 - RNA, 19 nt, Artificial Sequence
  Description of Artificial Sequence: Synthetic oligonucleotide
  Sense strand starting at position 3977 of SEQ ID NO: 2787
gcaccuuaacuggacuuaa

SEQ ID NO: 216425 - RNA, 19 nt, Artificial Sequence
  Description of Artificial Sequence: Synthetic oligonucleotide
  Antisense strand to SEQ ID NO: 216424
uuaaguccaguuaaggugc

SEQ ID NO: 216426 - RNA, 19 nt, Artificial Sequence
  Description of Artificial Sequence: Synthetic oligonucleotide
  Sense strand starting at position 27 of SEQ ID NO: 2789
aagaguaaagucugaaggu

SEQ ID NO: 216427 - RNA, 19 nt, Artificial Sequence
  Description of Artificial Sequence: Synthetic oligonucleotide
  Antisense strand to SEQ ID NO: 216426
accuucagacuuuacucuu

SEQ ID NO: 216428 - RNA, 19 nt, Artificial Sequence
  Description of Artificial Sequence: Synthetic oligonucleotide
  Sense strand starting at position 36 of SEQ ID NO: 2789
gucugaagguucuuacuac

SEQ ID NO: 216429 - RNA, 19 nt, Artificial Sequence
  Description of Artificial Sequence: Synthetic oligonucleotide
  Antisense strand to SEQ ID NO: 216428
guaguaagaaccuucagac

SEQ ID NO: 216430 - RNA, 19 nt, Artificial Sequence
  Description of Artificial Sequence: Synthetic oligonucleotide
  Sense strand starting at position 42 of SEQ ID NO: 2789
agguucuuacuacaguuau

SEQ ID NO: 216431 - RNA, 19 nt, Artificial Sequence
  Description of Artificial Sequence: Synthetic oligonucleotide
  Antisense strand to SEQ ID NO: 216430
auaacuguaguaagaaccu

SEQ ID NO: 216432 - RNA, 19 nt, Artificial Sequence
  Description of Artificial Sequence: Synthetic oligonucleotide
  Sense strand starting at position 139 of SEQ ID NO: 2789
gugacuucugaacacccau

SEQ ID NO: 216433 - RNA, 19 nt, Artificial Sequence
  Description of Artificial Sequence: Synthetic oligonucleotide
  Antisense strand to SEQ ID NO: 216432
auggguguucagaagucac

SEQ ID NO: 216434 - RNA, 19 nt, Artificial Sequence
  Description of Artificial Sequence: Synthetic oligonucleotide
  Sense strand starting at position 168 of SEQ ID NO: 2789
ugugaaagcagguauguuu

SEQ ID NO: 216435 - RNA, 19 nt, Artificial Sequence
  Description of Artificial Sequence: Synthetic oligonucleotide
  Antisense strand to SEQ ID NO: 216434
aaacauaccugcuuucaca

SEQ ID NO: 216436 - RNA, 19 nt, Artificial Sequence
  Description of Artificial Sequence: Synthetic oligonucleotide
  Sense strand starting at position 331 of SEQ ID NO: 2789
uuaggaaccuugcuuguau

SEQ ID NO: 216437 - RNA, 19 nt, Artificial Sequence
  Description of Artificial Sequence: Synthetic oligonucleotide
  Antisense strand to SEQ ID NO: 216436
auacaagcaagguuccuaa

SEQ ID NO: 216438 - RNA, 19 nt, Artificial Sequence
  Description of Artificial Sequence: Synthetic oligonucleotide
  Sense strand starting at position 393 of SEQ ID NO: 2789
gugagaauauaugucagga

SEQ ID NO: 216439 - RNA, 19 nt, Artificial Sequence
  Description of Artificial Sequence: Synthetic oligonucleotide
  Antisense strand to SEQ ID NO: 216438
uccugacauauauucucac

SEQ ID NO: 216440 - RNA, 19 nt, Artificial Sequence
  Description of Artificial Sequence: Synthetic oligonucleotide
  Sense strand starting at position 395 of SEQ ID NO: 2789
gagaauauaugucaggaua

SEQ ID NO: 216441 - RNA, 19 nt, Artificial Sequence
  Description of Artificial Sequence: Synthetic oligonucleotide
  Antisense strand to SEQ ID NO: 216440
uauccugacauauauucuc

SEQ ID NO: 216442 - RNA, 19 nt, Artificial Sequence
  Description of Artificial Sequence: Synthetic oligonucleotide
  Sense strand starting at position 475 of SEQ ID NO: 2789
gaguaauauuugcagaaag

SEQ ID NO: 216443 - RNA, 19 nt, Artificial Sequence
  Description of Artificial Sequence: Synthetic oligonucleotide
  Antisense strand to SEQ ID NO: 216442
cuuucugcaaauauuacuc

SEQ ID NO: 216444 - RNA, 19 nt, Artificial Sequence
  Description of Artificial Sequence: Synthetic oligonucleotide
  Sense strand starting at position 532 of SEQ ID NO: 2789
cuacauguuuccucuaugu

SEQ ID NO: 216445 - RNA, 19 nt, Artificial Sequence
  Description of Artificial Sequence: Synthetic oligonucleotide
  Antisense strand to SEQ ID NO: 216444
acauagaggaaacauguag

SEQ ID NO: 216446 - RNA, 19 nt, Artificial Sequence
  Description of Artificial Sequence: Synthetic oligonucleotide
  Sense strand starting at position 578 of SEQ ID NO: 2789
uagucauguugcuuugaga

SEQ ID NO: 216447 - RNA, 19 nt, Artificial Sequence
  Description of Artificial Sequence: Synthetic oligonucleotide
  Antisense strand to SEQ ID NO: 216446
ucucaaagcaacaugacua

SEQ ID NO: 216448 - RNA, 19 nt, Artificial Sequence
  Description of Artificial Sequence: Synthetic oligonucleotide
  Sense strand starting at position 599 of SEQ ID NO: 2789
uuuccauguuuccucuaga

SEQ ID NO: 216449 - RNA, 19 nt, Artificial Sequence
  Description of Artificial Sequence: Synthetic oligonucleotide
  Antisense strand to SEQ ID NO: 216448
ucuagaggaaacauggaaa

SEQ ID NO: 216450 - RNA, 19 nt, Artificial Sequence
  Description of Artificial Sequence: Synthetic oligonucleotide
  Sense strand starting at position 600 of SEQ ID NO: 2789
uuccauguuuccucuagac

SEQ ID NO: 216451 - RNA, 19 nt, Artificial Sequence
  Description of Artificial Sequence: Synthetic oligonucleotide
  Antisense strand to SEQ ID NO: 216450
gucuagaggaaacauggaa

SEQ ID NO: 216452 - RNA, 19 nt, Artificial Sequence
  Description of Artificial Sequence: Synthetic oligonucleotide
  Sense strand starting at position 602 of SEQ ID NO: 2789
ccauguuuccucuagacag

SEQ ID NO: 216453 - RNA, 19 nt, Artificial Sequence
  Description of Artificial Sequence: Synthetic oligonucleotide
  Antisense strand to SEQ ID NO: 216452
cugucuagaggaaacaugg

SEQ ID NO: 216454 - RNA, 19 nt, Artificial Sequence
  Description of Artificial Sequence: Synthetic oligonucleotide
  Sense strand starting at position 630 of SEQ ID NO: 2789
uucgcauggucucugauga

SEQ ID NO: 216455 - RNA, 19 nt, Artificial Sequence
  Description of Artificial Sequence: Synthetic oligonucleotide
  Antisense strand to SEQ ID NO: 216454
ucaucagagaccaugcgaa

SEQ ID NO: 216456 - RNA, 19 nt, Artificial Sequence
  Description of Artificial Sequence: Synthetic oligonucleotide
  Sense strand starting at position 631 of SEQ ID NO: 2789
ucgcauggucucugaugaa

SEQ ID NO: 216457 - RNA, 19 nt, Artificial Sequence
  Description of Artificial Sequence: Synthetic oligonucleotide
  Antisense strand to SEQ ID NO: 216456
uucaucagagaccaugcga

SEQ ID NO: 216458 - RNA, 19 nt, Artificial Sequence
  Description of Artificial Sequence: Synthetic oligonucleotide
  Sense strand starting at position 672 of SEQ ID NO: 2789
uaaggaaacgccugucaug

SEQ ID NO: 216459 - RNA, 19 nt, Artificial Sequence
  Description of Artificial Sequence: Synthetic oligonucleotide
  Antisense strand to SEQ ID NO: 216458
caugacaggcguuuccuua

SEQ ID NO: 216460 - RNA, 19 nt, Artificial Sequence
  Description of Artificial Sequence: Synthetic oligonucleotide
  Sense strand starting at position 797 of SEQ ID NO: 2789
ucguauucucauuagggca

SEQ ID NO: 216461 - RNA, 19 nt, Artificial Sequence
  Description of Artificial Sequence: Synthetic oligonucleotide
  Antisense strand to SEQ ID NO: 216460
ugcccuaaugagaauacga

SEQ ID NO: 216462 - RNA, 19 nt, Artificial Sequence
  Description of Artificial Sequence: Synthetic oligonucleotide
  Sense strand starting at position 899 of SEQ ID NO: 2789
cgaguuuccuacuugagaa

SEQ ID NO: 216463 - RNA, 19 nt, Artificial Sequence
  Description of Artificial Sequence: Synthetic oligonucleotide
  Antisense strand to SEQ ID NO: 216462
uucucaaguaggaaacucg

SEQ ID NO: 216464 - RNA, 19 nt, Artificial Sequence
  Description of Artificial Sequence: Synthetic oligonucleotide
  Sense strand starting at position 1000 of SEQ ID NO: 2789
accuguucucauuacuguu

SEQ ID NO: 216465 - RNA, 19 nt, Artificial Sequence
  Description of Artificial Sequence: Synthetic oligonucleotide
  Antisense strand to SEQ ID NO: 216464
aacaguaaugagaacaggu

SEQ ID NO: 216466 - RNA, 19 nt, Artificial Sequence
  Description of Artificial Sequence: Synthetic oligonucleotide
  Sense strand starting at position 1140 of SEQ ID NO: 2789
aaaguagaguuguuugcaa

SEQ ID NO: 216467 - RNA, 19 nt, Artificial Sequence
  Description of Artificial Sequence: Synthetic oligonucleotide
  Antisense strand to SEQ ID NO: 216466
uugcaaacaacucuacuuu

SEQ ID NO: 216468 - RNA, 19 nt, Artificial Sequence
  Description of Artificial Sequence: Synthetic oligonucleotide
  Sense strand starting at position 1142 of SEQ ID NO: 2789
aguagaguuguuugcaauc

SEQ ID NO: 216469 - RNA, 19 nt, Artificial Sequence
  Description of Artificial Sequence: Synthetic oligonucleotide
  Antisense strand to SEQ ID NO: 216468
gauugcaaacaacucuacu

SEQ ID NO: 216470 - RNA, 19 nt, Artificial Sequence
  Description of Artificial Sequence: Synthetic oligonucleotide
  Sense strand starting at position 1159 of SEQ ID NO: 2789
ucugauuugcgcuggguuu

SEQ ID NO: 216471 - RNA, 19 nt, Artificial Sequence
  Description of Artificial Sequence: Synthetic oligonucleotide
  Antisense strand to SEQ ID NO: 216470
aaacccagcgcaaaucaga

SEQ ID NO: 216472 - RNA, 19 nt, Artificial Sequence
  Description of Artificial Sequence: Synthetic oligonucleotide
  Sense strand starting at position 1436 of SEQ ID NO: 2789
aagggucccuuuguuacaa

SEQ ID NO: 216473 - RNA, 19 nt, Artificial Sequence
  Description of Artificial Sequence: Synthetic oligonucleotide
  Antisense strand to SEQ ID NO: 216472
uuguaacaaagggacccuu

SEQ ID NO: 216474 - RNA, 19 nt, Artificial Sequence
  Description of Artificial Sequence: Synthetic oligonucleotide
  Sense strand starting at position 1437 of SEQ ID NO: 2789
agggucccuuuguuacaau

SEQ ID NO: 216475 - RNA, 19 nt, Artificial Sequence
  Description of Artificial Sequence: Synthetic oligonucleotide
  Antisense strand to SEQ ID NO: 216474
auuguaacaaagggacccu

SEQ ID NO: 216476 - RNA, 19 nt, Artificial Sequence
  Description of Artificial Sequence: Synthetic oligonucleotide
  Sense strand starting at position 2071 of SEQ ID NO: 2789
ggguuuacuggguagccau

SEQ ID NO: 216477 - RNA, 19 nt, Artificial Sequence
  Description of Artificial Sequence: Synthetic oligonucleotide
  Antisense strand to SEQ ID NO: 216476
auggcuacccaguaaaccc

SEQ ID NO: 216478 - RNA, 19 nt, Artificial Sequence
  Description of Artificial Sequence: Synthetic oligonucleotide
  Sense strand starting at position 2887 of SEQ ID NO: 2789
gcggaaugcggucagaaac

SEQ ID NO: 216479 - RNA, 19 nt, Artificial Sequence
  Description of Artificial Sequence: Synthetic oligonucleotide
  Antisense strand to SEQ ID NO: 216478
guuucugaccgcauuccgc

SEQ ID NO: 216480 - RNA, 19 nt, Artificial Sequence
  Description of Artificial Sequence: Synthetic oligonucleotide
  Sense strand starting at position 3099 of SEQ ID NO: 2789
cuauaacagcucugacaug

SEQ ID NO: 216481 - RNA, 19 nt, Artificial Sequence
  Description of Artificial Sequence: Synthetic oligonucleotide
  Antisense strand to SEQ ID NO: 216480
caugucagagcuguuauag

SEQ ID NO: 216482 - RNA, 19 nt, Artificial Sequence
  Description of Artificial Sequence: Synthetic oligonucleotide
  Sense strand starting at position 3123 of SEQ ID NO: 2789
uggacaacaguaugucuaa

SEQ ID NO: 216483 - RNA, 19 nt, Artificial Sequence
  Description of Artificial Sequence: Synthetic oligonucleotide
  Antisense strand to SEQ ID NO: 216482
uuagacauacuguugucca

SEQ ID NO: 216484 - RNA, 19 nt, Artificial Sequence
  Description of Artificial Sequence: Synthetic oligonucleotide
  Sense strand starting at position 3124 of SEQ ID NO: 2789
ggacaacaguaugucuaau

SEQ ID NO: 216485 - RNA, 19 nt, Artificial Sequence
  Description of Artificial Sequence: Synthetic oligonucleotide
  Antisense strand to SEQ ID NO: 216484
auuagacauacuguugucc

SEQ ID NO: 216486 - RNA, 19 nt, Artificial Sequence
  Description of Artificial Sequence: Synthetic oligonucleotide
  Sense strand starting at position 3126 of SEQ ID NO: 2789
acaacaguaugucuaauga

SEQ ID NO: 216487 - RNA, 19 nt, Artificial Sequence
  Description of Artificial Sequence: Synthetic oligonucleotide
  Antisense strand to SEQ ID NO: 216486
ucauuagacauacuguugu

SEQ ID NO: 216488 - RNA, 19 nt, Artificial Sequence
  Description of Artificial Sequence: Synthetic oligonucleotide
  Sense strand starting at position 3222 of SEQ ID NO: 2789
agcugugugcuuguuugua

SEQ ID NO: 216489 - RNA, 19 nt, Artificial Sequence
  Description of Artificial Sequence: Synthetic oligonucleotide
  Antisense strand to SEQ ID NO: 216488
uacaaacaagcacacagcu

SEQ ID NO: 216490 - RNA, 19 nt, Artificial Sequence
  Description of Artificial Sequence: Synthetic oligonucleotide
  Sense strand starting at position 3256 of SEQ ID NO: 2789
gugcaugcccuuuagauga

SEQ ID NO: 216491 - RNA, 19 nt, Artificial Sequence
  Description of Artificial Sequence: Synthetic oligonucleotide
  Antisense strand to SEQ ID NO: 216490
ucaucuaaagggcaugcac

SEQ ID NO: 216492 - RNA, 19 nt, Artificial Sequence
  Description of Artificial Sequence: Synthetic oligonucleotide
  Sense strand starting at position 3531 of SEQ ID NO: 2789
ggauuaaacugauggagag

SEQ ID NO: 216493 - RNA, 19 nt, Artificial Sequence
  Description of Artificial Sequence: Synthetic oligonucleotide
  Antisense strand to SEQ ID NO: 216492
cucuccaucaguuuaaucc

SEQ ID NO: 216494 - RNA, 19 nt, Artificial Sequence
  Description of Artificial Sequence: Synthetic oligonucleotide
  Sense strand starting at position 3604 of SEQ ID NO: 2789
guaauaaaccuguguuagc

SEQ ID NO: 216495 - RNA, 19 nt, Artificial Sequence
  Description of Artificial Sequence: Synthetic oligonucleotide
  Antisense strand to SEQ ID NO: 216494
gcuaacacagguuuauuac

SEQ ID NO: 216496 - RNA, 19 nt, Artificial Sequence
  Description of Artificial Sequence: Synthetic oligonucleotide
  Sense strand starting at position 3614 of SEQ ID NO: 2789
uguguuagccacugauaga

SEQ ID NO: 216497 - RNA, 19 nt, Artificial Sequence
  Description of Artificial Sequence: Synthetic oligonucleotide
  Antisense strand to SEQ ID NO: 216496
ucuaucaguggcuaacaca

SEQ ID NO: 216498 - RNA, 19 nt, Artificial Sequence
  Description of Artificial Sequence: Synthetic oligonucleotide
  Sense strand starting at position 3615 of SEQ ID NO: 2789
guguuagccacugauagaa

SEQ ID NO: 216499 - RNA, 19 nt, Artificial Sequence
  Description of Artificial Sequence: Synthetic oligonucleotide
  Antisense strand to SEQ ID NO: 216498
uucuaucaguggcuaacac

SEQ ID NO: 216500 - RNA, 19 nt, Artificial Sequence
  Description of Artificial Sequence: Synthetic oligonucleotide
  Sense strand starting at position 3632 of SEQ ID NO: 2789
aauaacauuuggcagguau

SEQ ID NO: 216501 - RNA, 19 nt, Artificial Sequence
  Description of Artificial Sequence: Synthetic oligonucleotide
  Antisense strand to SEQ ID NO: 216500
auaccugccaaauguuauu

SEQ ID NO: 216502 - RNA, 19 nt, Artificial Sequence
  Description of Artificial Sequence: Synthetic oligonucleotide
  Sense strand starting at position 3674 of SEQ ID NO: 2789
uccuuuaguugguuaucca

SEQ ID NO: 216503 - RNA, 19 nt, Artificial Sequence
  Description of Artificial Sequence: Synthetic oligonucleotide
  Antisense strand to SEQ ID NO: 216502
uggauaaccaacuaaagga

SEQ ID NO: 216504 - RNA, 19 nt, Artificial Sequence
  Description of Artificial Sequence: Synthetic oligonucleotide
  Sense strand starting at position 3675 of SEQ ID NO: 2789
ccuuuaguugguuauccau

SEQ ID NO: 216505 - RNA, 19 nt, Artificial Sequence
  Description of Artificial Sequence: Synthetic oligonucleotide
  Antisense strand to SEQ ID NO: 216504
auggauaaccaacuaaagg

SEQ ID NO: 216506 - RNA, 19 nt, Artificial Sequence
  Description of Artificial Sequence: Synthetic oligonucleotide
  Sense strand starting at position 41 of SEQ ID NO: 2788
gaaugcucguauucucauu

SEQ ID NO: 216507 - RNA, 19 nt, Artificial Sequence
  Description of Artificial Sequence: Synthetic oligonucleotide
  Antisense strand to SEQ ID NO: 216506
aaugagaauacgagcauuc

SEQ ID NO: 216508 - RNA, 19 nt, Artificial Sequence
  Description of Artificial Sequence: Synthetic oligonucleotide
  Sense strand starting at position 47 of SEQ ID NO: 2788
ucguauucucauuagggca

SEQ ID NO: 216509 - RNA, 19 nt, Artificial Sequence
  Description of Artificial Sequence: Synthetic oligonucleotide
  Antisense strand to SEQ ID NO: 216508
ugcccuaaugagaauacga

SEQ ID NO: 216510 - RNA, 19 nt, Artificial Sequence
  Description of Artificial Sequence: Synthetic oligonucleotide
  Sense strand starting at position 149 of SEQ ID NO: 2788
cgaguuuccuacuugagaa

SEQ ID NO: 216511 - RNA, 19 nt, Artificial Sequence
  Description of Artificial Sequence: Synthetic oligonucleotide
  Antisense strand to SEQ ID NO: 216510
uucucaaguaggaaacucg

SEQ ID NO: 216512 - RNA, 19 nt, Artificial Sequence
  Description of Artificial Sequence: Synthetic oligonucleotide
  Sense strand starting at position 250 of SEQ ID NO: 2788
accuguucucauuacuguu

SEQ ID NO: 216513 - RNA, 19 nt, Artificial Sequence
  Description of Artificial Sequence: Synthetic oligonucleotide
  Antisense strand to SEQ ID NO: 216512
aacaguaaugagaacaggu

SEQ ID NO: 216514 - RNA, 19 nt, Artificial Sequence
  Description of Artificial Sequence: Synthetic oligonucleotide
  Sense strand starting at position 390 of SEQ ID NO: 2788
aaaguagaguuguuugcaa

SEQ ID NO: 216515 - RNA, 19 nt, Artificial Sequence
  Description of Artificial Sequence: Synthetic oligonucleotide
  Antisense strand to SEQ ID NO: 216514
uugcaaacaacucuacuuu

SEQ ID NO: 216516 - RNA, 19 nt, Artificial Sequence
  Description of Artificial Sequence: Synthetic oligonucleotide
  Sense strand starting at position 392 of SEQ ID NO: 2788
aguagaguuguuugcaauc

SEQ ID NO: 216517 - RNA, 19 nt, Artificial Sequence
  Description of Artificial Sequence: Synthetic oligonucleotide
  Antisense strand to SEQ ID NO: 216516
gauugcaaacaacucuacu

SEQ ID NO: 216518 - RNA, 19 nt, Artificial Sequence
  Description of Artificial Sequence: Synthetic oligonucleotide
  Sense strand starting at position 409 of SEQ ID NO: 2788
ucugauuugcgcuggguuu

SEQ ID NO: 216519 - RNA, 19 nt, Artificial Sequence
  Description of Artificial Sequence: Synthetic oligonucleotide
  Antisense strand to SEQ ID NO: 216518
aaacccagcgcaaaucaga

SEQ ID NO: 216520 - RNA, 19 nt, Artificial Sequence
  Description of Artificial Sequence: Synthetic oligonucleotide
  Sense strand starting at position 686 of SEQ ID NO: 2788
aagggucccuuuguuacaa

SEQ ID NO: 216521 - RNA, 19 nt, Artificial Sequence
  Description of Artificial Sequence: Synthetic oligonucleotide
  Antisense strand to SEQ ID NO: 216520
uuguaacaaagggacccuu

SEQ ID NO: 216522 - RNA, 19 nt, Artificial Sequence
  Description of Artificial Sequence: Synthetic oligonucleotide
  Sense strand starting at position 687 of SEQ ID NO: 2788
agggucccuuuguuacaau

SEQ ID NO: 216523 - RNA, 19 nt, Artificial Sequence
  Description of Artificial Sequence: Synthetic oligonucleotide
  Antisense strand to SEQ ID NO: 216522
auuguaacaaagggacccu

SEQ ID NO: 216524 - RNA, 19 nt, Artificial Sequence
  Description of Artificial Sequence: Synthetic oligonucleotide
  Sense strand starting at position 1321 of SEQ ID NO: 2788
ggguuuacuggguagccau

SEQ ID NO: 216525 - RNA, 19 nt, Artificial Sequence
  Description of Artificial Sequence: Synthetic oligonucleotide
  Antisense strand to SEQ ID NO: 216524
auggcuacccaguaaaccc

SEQ ID NO: 216526 - RNA, 19 nt, Artificial Sequence
  Description of Artificial Sequence: Synthetic oligonucleotide
  Sense strand starting at position 2137 of SEQ ID NO: 2788
gcggaaugcggucagaaac

SEQ ID NO: 216527 - RNA, 19 nt, Artificial Sequence
  Description of Artificial Sequence: Synthetic oligonucleotide
  Antisense strand to SEQ ID NO: 216526
guuucugaccgcauuccgc

SEQ ID NO: 216528 - RNA, 19 nt, Artificial Sequence
  Description of Artificial Sequence: Synthetic oligonucleotide
  Sense strand starting at position 2349 of SEQ ID NO: 2788
cuauaacagcucugacaug

SEQ ID NO: 216529 - RNA, 19 nt, Artificial Sequence
  Description of Artificial Sequence: Synthetic oligonucleotide
  Antisense strand to SEQ ID NO: 216528
caugucagagcuguuauag

SEQ ID NO: 216530 - RNA, 19 nt, Artificial Sequence
  Description of Artificial Sequence: Synthetic oligonucleotide
  Sense strand starting at position 2373 of SEQ ID NO: 2788
uggacaacaguaugucuaa

SEQ ID NO: 216531 - RNA, 19 nt, Artificial Sequence
  Description of Artificial Sequence: Synthetic oligonucleotide
  Antisense strand to SEQ ID NO: 216530
uuagacauacuguugucca

SEQ ID NO: 216532 - RNA, 19 nt, Artificial Sequence
  Description of Artificial Sequence: Synthetic oligonucleotide
  Sense strand starting at position 2374 of SEQ ID NO: 2788
ggacaacaguaugucuaau

SEQ ID NO: 216533 - RNA, 19 nt, Artificial Sequence
  Description of Artificial Sequence: Synthetic oligonucleotide
  Antisense strand to SEQ ID NO: 216532
auuagacauacuguugucc

SEQ ID NO: 216534 - RNA, 19 nt, Artificial Sequence
  Description of Artificial Sequence: Synthetic oligonucleotide
  Sense strand starting at position 2376 of SEQ ID NO: 2788
acaacaguaugucuaauga

SEQ ID NO: 216535 - RNA, 19 nt, Artificial Sequence
  Description of Artificial Sequence: Synthetic oligonucleotide
  Antisense strand to SEQ ID NO: 216534
ucauuagacauacuguugu

SEQ ID NO: 216536 - RNA, 19 nt, Artificial Sequence
  Description of Artificial Sequence: Synthetic oligonucleotide
  Sense strand starting at position 2472 of SEQ ID NO: 2788
agcugugugcuuguuugua

SEQ ID NO: 216537 - RNA, 19 nt, Artificial Sequence
  Description of Artificial Sequence: Synthetic oligonucleotide
  Antisense strand to SEQ ID NO: 216536
uacaaacaagcacacagcu

SEQ ID NO: 216538 - RNA, 19 nt, Artificial Sequence
  Description of Artificial Sequence: Synthetic oligonucleotide
  Sense strand starting at position 2506 of SEQ ID NO: 2788
gugcaugcccuuuagauga

SEQ ID NO: 216539 - RNA, 19 nt, Artificial Sequence
  Description of Artificial Sequence: Synthetic oligonucleotide
  Antisense strand to SEQ ID NO: 216538
ucaucuaaagggcaugcac

SEQ ID NO: 216540 - RNA, 19 nt, Artificial Sequence
  Description of Artificial Sequence: Synthetic oligonucleotide
  Sense strand starting at position 2781 of SEQ ID NO: 2788
ggauuaaacugauggagag

SEQ ID NO: 216541 - RNA, 19 nt, Artificial Sequence
  Description of Artificial Sequence: Synthetic oligonucleotide
  Antisense strand to SEQ ID NO: 216540
cucuccaucaguuuaaucc

SEQ ID NO: 216542 - RNA, 19 nt, Artificial Sequence
  Description of Artificial Sequence: Synthetic oligonucleotide
  Sense strand starting at position 2854 of SEQ ID NO: 2788
guaauaaaccuguguuagc

SEQ ID NO: 216543 - RNA, 19 nt, Artificial Sequence
  Description of Artificial Sequence: Synthetic oligonucleotide
  Antisense strand to SEQ ID NO: 216542
gcuaacacagguuuauuac

SEQ ID NO: 216544 - RNA, 19 nt, Artificial Sequence
  Description of Artificial Sequence: Synthetic oligonucleotide
  Sense strand starting at position 2864 of SEQ ID NO: 2788
uguguuagccacugauaga

SEQ ID NO: 216545 - RNA, 19 nt, Artificial Sequence
  Description of Artificial Sequence: Synthetic oligonucleotide
  Antisense strand to SEQ ID NO: 216544
ucuaucaguggcuaacaca

SEQ ID NO: 216546 - RNA, 19 nt, Artificial Sequence
  Description of Artificial Sequence: Synthetic oligonucleotide
  Sense strand starting at position 2865 of SEQ ID NO: 2788
guguuagccacugauagaa

SEQ ID NO: 216547 - RNA, 19 nt, Artificial Sequence
  Description of Artificial Sequence: Synthetic oligonucleotide
  Antisense strand to SEQ ID NO: 216546
uucuaucaguggcuaacac

SEQ ID NO: 216548 - RNA, 19 nt, Artificial Sequence
  Description of Artificial Sequence: Synthetic oligonucleotide
  Sense strand starting at position 2882 of SEQ ID NO: 2788
aauaacauuuggcagguau

SEQ ID NO: 216549 - RNA, 19 nt, Artificial Sequence
  Description of Artificial Sequence: Synthetic oligonucleotide
  Antisense strand to SEQ ID NO: 216548
auaccugccaaauguuauu

SEQ ID NO: 216550 - RNA, 19 nt, Artificial Sequence
  Description of Artificial Sequence: Synthetic oligonucleotide
  Sense strand starting at position 2924 of SEQ ID NO: 2788
uccuuuaguugguuaucca

SEQ ID NO: 216551 - RNA, 19 nt, Artificial Sequence
  Description of Artificial Sequence: Synthetic oligonucleotide
  Antisense strand to SEQ ID NO: 216550
uggauaaccaacuaaagga

SEQ ID NO: 216552 - RNA, 19 nt, Artificial Sequence
  Description of Artificial Sequence: Synthetic oligonucleotide
  Sense strand starting at position 2925 of SEQ ID NO: 2788
ccuuuaguugguuauccau

SEQ ID NO: 216553 - RNA, 19 nt, Artificial Sequence
  Description of Artificial Sequence: Synthetic oligonucleotide
  Antisense strand to SEQ ID NO: 216552
auggauaaccaacuaaagg

SEQ ID NO: 216554 - RNA, 19 nt, Artificial Sequence
  Description of Artificial Sequence: Synthetic oligonucleotide
  Sense strand starting at position 2932 of SEQ ID NO: 2788
uugguuauccauugcagca

SEQ ID NO: 216555 - RNA, 19 nt, Artificial Sequence
  Description of Artificial Sequence: Synthetic oligonucleotide
  Antisense strand to SEQ ID NO: 216554
ugcugcaauggauaaccaa

SEQ ID NO: 216556 - RNA, 19 nt, Artificial Sequence
  Description of Artificial Sequence: Synthetic oligonucleotide
  Sense strand starting at position 3234 of SEQ ID NO: 2788
ugaauacagagcugugcaa

SEQ ID NO: 216557 - RNA, 19 nt, Artificial Sequence
  Description of Artificial Sequence: Synthetic oligonucleotide
  Antisense strand to SEQ ID NO: 216556
uugcacagcucuguauuca

SEQ ID NO: 216558 - RNA, 19 nt, Artificial Sequence
  Description of Artificial Sequence: Synthetic oligonucleotide
  Sense strand starting at position 3283 of SEQ ID NO: 2788
gcaaauauugaguaacagu

SEQ ID NO: 216559 - RNA, 19 nt, Artificial Sequence
  Description of Artificial Sequence: Synthetic oligonucleotide
  Antisense strand to SEQ ID NO: 216558
acuguuacucaauauuugc

SEQ ID NO: 216560 - RNA, 19 nt, Artificial Sequence
  Description of Artificial Sequence: Synthetic oligonucleotide
  Sense strand starting at position 3408 of SEQ ID NO: 2788
caguaagauuaggcuaauc

SEQ ID NO: 216561 - RNA, 19 nt, Artificial Sequence
  Description of Artificial Sequence: Synthetic oligonucleotide
  Antisense strand to SEQ ID NO: 216560
gauuagccuaaucuuacug

SEQ ID NO: 216562 - RNA, 19 nt, Artificial Sequence
  Description of Artificial Sequence: Synthetic oligonucleotide
  Sense strand starting at position 3410 of SEQ ID NO: 2788
guaagauuaggcuaaucuu

SEQ ID NO: 216563 - RNA, 19 nt, Artificial Sequence
  Description of Artificial Sequence: Synthetic oligonucleotide
  Antisense strand to SEQ ID NO: 216562
aagauuagccuaaucuuac

SEQ ID NO: 216564 - RNA, 19 nt, Artificial Sequence
  Description of Artificial Sequence: Synthetic oligonucleotide
  Sense strand starting at position 3413 of SEQ ID NO: 2788
agauuaggcuaaucuuagu

SEQ ID NO: 216565 - RNA, 19 nt, Artificial Sequence
  Description of Artificial Sequence: Synthetic oligonucleotide
  Antisense strand to SEQ ID NO: 216564
acuaagauuagccuaaucu

SEQ ID NO: 216566 - RNA, 19 nt, Artificial Sequence
  Description of Artificial Sequence: Synthetic oligonucleotide
  Sense strand starting at position 3418 of SEQ ID NO: 2788
aggcuaaucuuagucauaa

SEQ ID NO: 216567 - RNA, 19 nt, Artificial Sequence
  Description of Artificial Sequence: Synthetic oligonucleotide
  Antisense strand to SEQ ID NO: 216566
uuaugacuaagauuagccu

SEQ ID NO: 216568 - RNA, 19 nt, Artificial Sequence
  Description of Artificial Sequence: Synthetic oligonucleotide
  Sense strand starting at position 3419 of SEQ ID NO: 2788
ggcuaaucuuagucauaaa

SEQ ID NO: 216569 - RNA, 19 nt, Artificial Sequence
  Description of Artificial Sequence: Synthetic oligonucleotide
  Antisense strand to SEQ ID NO: 216568
uuuaugacuaagauuagcc

SEQ ID NO: 216570 - RNA, 19 nt, Artificial Sequence
  Description of Artificial Sequence: Synthetic oligonucleotide
  Sense strand starting at position 3513 of SEQ ID NO: 2788
gggagaacuauaugcucca

SEQ ID NO: 216571 - RNA, 19 nt, Artificial Sequence
  Description of Artificial Sequence: Synthetic oligonucleotide
  Antisense strand to SEQ ID NO: 216570
uggagcauauaguucuccc

SEQ ID NO: 216572 - RNA, 19 nt, Artificial Sequence
  Description of Artificial Sequence: Synthetic oligonucleotide
  Sense strand starting at position 3538 of SEQ ID NO: 2788
ggaaauuagguaugacccu

SEQ ID NO: 216573 - RNA, 19 nt, Artificial Sequence
  Description of Artificial Sequence: Synthetic oligonucleotide
  Antisense strand to SEQ ID NO: 216572
agggucauaccuaauuucc

SEQ ID NO: 216574 - RNA, 19 nt, Artificial Sequence
  Description of Artificial Sequence: Synthetic oligonucleotide
  Sense strand starting at position 3593 of SEQ ID NO: 2788
augcuuuauuuccugguga

SEQ ID NO: 216575 - RNA, 19 nt, Artificial Sequence
  Description of Artificial Sequence: Synthetic oligonucleotide
  Antisense strand to SEQ ID NO: 216574
ucaccaggaaauaaagcau

SEQ ID NO: 216576 - RNA, 19 nt, Artificial Sequence
  Description of Artificial Sequence: Synthetic oligonucleotide
  Sense strand starting at position 3612 of SEQ ID NO: 2788
aauuacugccaguguuuga

SEQ ID NO: 216577 - RNA, 19 nt, Artificial Sequence
  Description of Artificial Sequence: Synthetic oligonucleotide
  Antisense strand to SEQ ID NO: 216576
ucaaacacuggcaguaauu

SEQ ID NO: 216578 - RNA, 19 nt, Artificial Sequence
  Description of Artificial Sequence: Synthetic oligonucleotide
  Sense strand starting at position 3736 of SEQ ID NO: 2788
uggagagucccaggaccua

SEQ ID NO: 216579 - RNA, 19 nt, Artificial Sequence
  Description of Artificial Sequence: Synthetic oligonucleotide
  Antisense strand to SEQ ID NO: 216578
uagguccugggacucucca

SEQ ID NO: 216580 - RNA, 19 nt, Artificial Sequence
  Description of Artificial Sequence: Synthetic oligonucleotide
  Sense strand starting at position 3857 of SEQ ID NO: 2788
cacuguagccagugauuag

SEQ ID NO: 216581 - RNA, 19 nt, Artificial Sequence
  Description of Artificial Sequence: Synthetic oligonucleotide
  Antisense strand to SEQ ID NO: 216580
cuaaucacuggcuacagug

SEQ ID NO: 216582 - RNA, 19 nt, Artificial Sequence
  Description of Artificial Sequence: Synthetic oligonucleotide
  Sense strand starting at position 3861 of SEQ ID NO: 2788
guagccagugauuagcaaa

SEQ ID NO: 216583 - RNA, 19 nt, Artificial Sequence
  Description of Artificial Sequence: Synthetic oligonucleotide
  Antisense strand to SEQ ID NO: 216582
uuugcuaaucacuggcuac

SEQ ID NO: 216584 - RNA, 19 nt, Artificial Sequence
  Description of Artificial Sequence: Synthetic oligonucleotide
  Sense strand starting at position 3936 of SEQ ID NO: 2788
gaaggagucuuguuccugu

SEQ ID NO: 216585 - RNA, 19 nt, Artificial Sequence
  Description of Artificial Sequence: Synthetic oligonucleotide
  Antisense strand to SEQ ID NO: 216584
acaggaacaagacuccuuc

SEQ ID NO: 216586 - RNA, 19 nt, Artificial Sequence
  Description of Artificial Sequence: Synthetic oligonucleotide
  Sense strand starting at position 265 of SEQ ID NO: 2790
guagcaucuccugggaaga

SEQ ID NO: 216587 - RNA, 19 nt, Artificial Sequence
  Description of Artificial Sequence: Synthetic oligonucleotide
  Antisense strand to SEQ ID NO: 216586
ucuucccaggagaugcuac

SEQ ID NO: 216588 - RNA, 19 nt, Artificial Sequence
  Description of Artificial Sequence: Synthetic oligonucleotide
  Sense strand starting at position 630 of SEQ ID NO: 2790
uguccaugggcugaauaua

SEQ ID NO: 216589 - RNA, 19 nt, Artificial Sequence
  Description of Artificial Sequence: Synthetic oligonucleotide
  Antisense strand to SEQ ID NO: 216588
uauauucagcccauggaca

SEQ ID NO: 216590 - RNA, 19 nt, Artificial Sequence
  Description of Artificial Sequence: Synthetic oligonucleotide
  Sense strand starting at position 700 of SEQ ID NO: 2790
auguauuagcuaugaggac

SEQ ID NO: 216591 - RNA, 19 nt, Artificial Sequence
  Description of Artificial Sequence: Synthetic oligonucleotide
  Antisense strand to SEQ ID NO: 216590
guccucauagcuaauacau

SEQ ID NO: 216592 - RNA, 19 nt, Artificial Sequence
  Description of Artificial Sequence: Synthetic oligonucleotide
  Sense strand starting at position 786 of SEQ ID NO: 2790
guuuaaauguaaccauguu

SEQ ID NO: 216593 - RNA, 19 nt, Artificial Sequence
  Description of Artificial Sequence: Synthetic oligonucleotide
  Antisense strand to SEQ ID NO: 216592
aacaugguuacauuuaaac

SEQ ID NO: 216594 - RNA, 19 nt, Artificial Sequence
  Description of Artificial Sequence: Synthetic oligonucleotide
  Sense strand starting at position 792 of SEQ ID NO: 2790
auguaaccauguuuaguua

SEQ ID NO: 216595 - RNA, 19 nt, Artificial Sequence
  Description of Artificial Sequence: Synthetic oligonucleotide
  Antisense strand to SEQ ID NO: 216594
uaacuaaacaugguuacau

SEQ ID NO: 216596 - RNA, 19 nt, Artificial Sequence
  Description of Artificial Sequence: Synthetic oligonucleotide
  Sense strand starting at position 882 of SEQ ID NO: 2790
ggaaguuuguauuccaauu

SEQ ID NO: 216597 - RNA, 19 nt, Artificial Sequence
  Description of Artificial Sequence: Synthetic oligonucleotide
  Antisense strand to SEQ ID NO: 216596
aauuggaauacaaacuucc

SEQ ID NO: 216598 - RNA, 19 nt, Artificial Sequence
  Description of Artificial Sequence: Synthetic oligonucleotide
  Sense strand starting at position 1140 of SEQ ID NO: 2790
aacguagaauauguggaaa

SEQ ID NO: 216599 - RNA, 19 nt, Artificial Sequence
  Description of Artificial Sequence: Synthetic oligonucleotide
  Antisense strand to SEQ ID NO: 216598
uuuccacauauucuacguu

SEQ ID NO: 216600 - RNA, 19 nt, Artificial Sequence
  Description of Artificial Sequence: Synthetic oligonucleotide
  Sense strand starting at position 1250 of SEQ ID NO: 2790
gcaguuugaucccuuugaa

SEQ ID NO: 216601 - RNA, 19 nt, Artificial Sequence
  Description of Artificial Sequence: Synthetic oligonucleotide
  Antisense strand to SEQ ID NO: 216600
uucaaagggaucaaacugc

SEQ ID NO: 216602 - RNA, 19 nt, Artificial Sequence
  Description of Artificial Sequence: Synthetic oligonucleotide
  Sense strand starting at position 1253 of SEQ ID NO: 2790
guuugaucccuuugaagaa

SEQ ID NO: 216603 - RNA, 19 nt, Artificial Sequence
  Description of Artificial Sequence: Synthetic oligonucleotide
  Antisense strand to SEQ ID NO: 216602
uucuucaaagggaucaaac

SEQ ID NO: 216604 - RNA, 19 nt, Artificial Sequence
  Description of Artificial Sequence: Synthetic oligonucleotide
  Sense strand starting at position 1260 of SEQ ID NO: 2790
cccuuugaagaauguuuau

SEQ ID NO: 216605 - RNA, 19 nt, Artificial Sequence
  Description of Artificial Sequence: Synthetic oligonucleotide
  Antisense strand to SEQ ID NO: 216604
auaaacauucuucaaaggg

SEQ ID NO: 216606 - RNA, 19 nt, Artificial Sequence
  Description of Artificial Sequence: Synthetic oligonucleotide
  Sense strand starting at position 1269 of SEQ ID NO: 2790
gaauguuuauagguaucuu

SEQ ID NO: 216607 - RNA, 19 nt, Artificial Sequence
  Description of Artificial Sequence: Synthetic oligonucleotide
  Antisense strand to SEQ ID NO: 216606
aagauaccuauaaacauuc

SEQ ID NO: 216608 - RNA, 19 nt, Artificial Sequence
  Description of Artificial Sequence: Synthetic oligonucleotide
  Sense strand starting at position 1318 of SEQ ID NO: 2790
uucugauaaugcguagaau

SEQ ID NO: 216609 - RNA, 19 nt, Artificial Sequence
  Description of Artificial Sequence: Synthetic oligonucleotide
  Antisense strand to SEQ ID NO: 216608
auucuacgcauuaucagaa

SEQ ID NO: 216610 - RNA, 19 nt, Artificial Sequence
  Description of Artificial Sequence: Synthetic oligonucleotide
  Sense strand starting at position 1319 of SEQ ID NO: 2790
ucugauaaugcguagaauc

SEQ ID NO: 216611 - RNA, 19 nt, Artificial Sequence
  Description of Artificial Sequence: Synthetic oligonucleotide
  Antisense strand to SEQ ID NO: 216610
gauucuacgcauuaucaga

SEQ ID NO: 216612 - RNA, 19 nt, Artificial Sequence
  Description of Artificial Sequence: Synthetic oligonucleotide
  Sense strand starting at position 1321 of SEQ ID NO: 2790
ugauaaugcguagaaucuu

SEQ ID NO: 216613 - RNA, 19 nt, Artificial Sequence
  Description of Artificial Sequence: Synthetic oligonucleotide
  Antisense strand to SEQ ID NO: 216612
aagauucuacgcauuauca

SEQ ID NO: 216614 - RNA, 19 nt, Artificial Sequence
  Description of Artificial Sequence: Synthetic oligonucleotide
  Sense strand starting at position 1329 of SEQ ID NO: 2790
cguagaaucuuccuuuaga

SEQ ID NO: 216615 - RNA, 19 nt, Artificial Sequence
  Description of Artificial Sequence: Synthetic oligonucleotide
  Antisense strand to SEQ ID NO: 216614
ucuaaaggaagauucuacg

SEQ ID NO: 216616 - RNA, 19 nt, Artificial Sequence
  Description of Artificial Sequence: Synthetic oligonucleotide
  Sense strand starting at position 1330 of SEQ ID NO: 2790
guagaaucuuccuuuagac

SEQ ID NO: 216617 - RNA, 19 nt, Artificial Sequence
  Description of Artificial Sequence: Synthetic oligonucleotide
  Antisense strand to SEQ ID NO: 216616
gucuaaaggaagauucuac

SEQ ID NO: 216618 - RNA, 19 nt, Artificial Sequence
  Description of Artificial Sequence: Synthetic oligonucleotide
  Sense strand starting at position 2014 of SEQ ID NO: 2790
uugcuuuggccuuaaauag

SEQ ID NO: 216619 - RNA, 19 nt, Artificial Sequence
  Description of Artificial Sequence: Synthetic oligonucleotide
  Antisense strand to SEQ ID NO: 216618
cuauuuaaggccaaagcaa

SEQ ID NO: 216620 - RNA, 19 nt, Artificial Sequence
  Description of Artificial Sequence: Synthetic oligonucleotide
  Sense strand starting at position 2178 of SEQ ID NO: 2790
guuuguaugcaucugcuua

SEQ ID NO: 216621 - RNA, 19 nt, Artificial Sequence
  Description of Artificial Sequence: Synthetic oligonucleotide
  Antisense strand to SEQ ID NO: 216620
uaagcagaugcauacaaac

SEQ ID NO: 216622 - RNA, 19 nt, Artificial Sequence
  Description of Artificial Sequence: Synthetic oligonucleotide
  Sense strand starting at position 2256 of SEQ ID NO: 2790
auagaaaugcucugccuug

SEQ ID NO: 216623 - RNA, 19 nt, Artificial Sequence
  Description of Artificial Sequence: Synthetic oligonucleotide
  Antisense strand to SEQ ID NO: 216622
caaggcagagcauuucuau

SEQ ID NO: 216624 - RNA, 19 nt, Artificial Sequence
  Description of Artificial Sequence: Synthetic oligonucleotide
  Sense strand starting at position 2523 of SEQ ID NO: 2790
gguccuagaaguuaaguuu

SEQ ID NO: 216625 - RNA, 19 nt, Artificial Sequence
  Description of Artificial Sequence: Synthetic oligonucleotide
  Antisense strand to SEQ ID NO: 216624
aaacuuaacuucuaggacc

SEQ ID NO: 216626 - RNA, 19 nt, Artificial Sequence
  Description of Artificial Sequence: Synthetic oligonucleotide
  Sense strand starting at position 2597 of SEQ ID NO: 2790
guuagauacuuaucuauag

SEQ ID NO: 216627 - RNA, 19 nt, Artificial Sequence
  Description of Artificial Sequence: Synthetic oligonucleotide
  Antisense strand to SEQ ID NO: 216626
cuauagauaaguaucuaac

SEQ ID NO: 216628 - RNA, 19 nt, Artificial Sequence
  Description of Artificial Sequence: Synthetic oligonucleotide
  Sense strand starting at position 2680 of SEQ ID NO: 2790
uuaugcugccugggaaaga

SEQ ID NO: 216629 - RNA, 19 nt, Artificial Sequence
  Description of Artificial Sequence: Synthetic oligonucleotide
  Antisense strand to SEQ ID NO: 216628
ucuuucccaggcagcauaa

SEQ ID NO: 216630 - RNA, 19 nt, Artificial Sequence
  Description of Artificial Sequence: Synthetic oligonucleotide
  Sense strand starting at position 2798 of SEQ ID NO: 2790
accagagaaaguggucauu

SEQ ID NO: 216631 - RNA, 19 nt, Artificial Sequence
  Description of Artificial Sequence: Synthetic oligonucleotide
  Antisense strand to SEQ ID NO: 216630
aaugaccacuuucucuggu

SEQ ID NO: 216632 - RNA, 19 nt, Artificial Sequence
  Description of Artificial Sequence: Synthetic oligonucleotide
  Sense strand starting at position 2869 of SEQ ID NO: 2790
uguguauacuuuccagauc

SEQ ID NO: 216633 - RNA, 19 nt, Artificial Sequence
  Description of Artificial Sequence: Synthetic oligonucleotide
  Antisense strand to SEQ ID NO: 216632
gaucuggaaaguauacaca

SEQ ID NO: 216634 - RNA, 19 nt, Artificial Sequence
  Description of Artificial Sequence: Synthetic oligonucleotide
  Sense strand starting at position 2918 of SEQ ID NO: 2790
ggaucuaucuaagcaguaa

SEQ ID NO: 216635 - RNA, 19 nt, Artificial Sequence
  Description of Artificial Sequence: Synthetic oligonucleotide
  Antisense strand to SEQ ID NO: 216634
uuacugcuuagauagaucc

SEQ ID NO: 216636 - RNA, 19 nt, Artificial Sequence
  Description of Artificial Sequence: Synthetic oligonucleotide
  Sense strand starting at position 2941 of SEQ ID NO: 2790
ugugucauauuugaaagag

SEQ ID NO: 216637 - RNA, 19 nt, Artificial Sequence
  Description of Artificial Sequence: Synthetic oligonucleotide
  Antisense strand to SEQ ID NO: 216636
cucuuucaaauaugacaca

SEQ ID NO: 216638 - RNA, 19 nt, Artificial Sequence
  Description of Artificial Sequence: Synthetic oligonucleotide
  Sense strand starting at position 2984 of SEQ ID NO: 2790
ugauaaaucucugcaggaa

SEQ ID NO: 216639 - RNA, 19 nt, Artificial Sequence
  Description of Artificial Sequence: Synthetic oligonucleotide
  Antisense strand to SEQ ID NO: 216638
uuccugcagagauuuauca

SEQ ID NO: 216640 - RNA, 19 nt, Artificial Sequence
  Description of Artificial Sequence: Synthetic oligonucleotide
  Sense strand starting at position 3017 of SEQ ID NO: 2790
acaguauaaggcuauaucu

SEQ ID NO: 216641 - RNA, 19 nt, Artificial Sequence
  Description of Artificial Sequence: Synthetic oligonucleotide
  Antisense strand to SEQ ID NO: 216640
agauauagccuuauacugu

SEQ ID NO: 216642 - RNA, 19 nt, Artificial Sequence
  Description of Artificial Sequence: Synthetic oligonucleotide
  Sense strand starting at position 3029 of SEQ ID NO: 2790
uauaucuggcaauggagau

SEQ ID NO: 216643 - RNA, 19 nt, Artificial Sequence
  Description of Artificial Sequence: Synthetic oligonucleotide
  Antisense strand to SEQ ID NO: 216642
aucuccauugccagauaua

SEQ ID NO: 216644 - RNA, 19 nt, Artificial Sequence
  Description of Artificial Sequence: Synthetic oligonucleotide
  Sense strand starting at position 3030 of SEQ ID NO: 2790
auaucuggcaauggagaua

SEQ ID NO: 216645 - RNA, 19 nt, Artificial Sequence
  Description of Artificial Sequence: Synthetic oligonucleotide
  Antisense strand to SEQ ID NO: 216644
uaucuccauugccagauau

SEQ ID NO: 216646 - RNA, 19 nt, Artificial Sequence
  Description of Artificial Sequence: Synthetic oligonucleotide
  Sense strand starting at position 3042 of SEQ ID NO: 2790
ggagauaucucuuuacacc

SEQ ID NO: 216647 - RNA, 19 nt, Artificial Sequence
  Description of Artificial Sequence: Synthetic oligonucleotide
  Antisense strand to SEQ ID NO: 216646
gguguaaagagauaucucc

SEQ ID NO: 216648 - RNA, 19 nt, Artificial Sequence
  Description of Artificial Sequence: Synthetic oligonucleotide
  Sense strand starting at position 3092 of SEQ ID NO: 2790
cucuauaaucuacggugga

SEQ ID NO: 216649 - RNA, 19 nt, Artificial Sequence
  Description of Artificial Sequence: Synthetic oligonucleotide
  Antisense strand to SEQ ID NO: 216648
uccaccguagauuauagag

SEQ ID NO: 216650 - RNA, 19 nt, Artificial Sequence
  Description of Artificial Sequence: Synthetic oligonucleotide
  Sense strand starting at position 3095 of SEQ ID NO: 2790
uauaaucuacgguggacau

SEQ ID NO: 216651 - RNA, 19 nt, Artificial Sequence
  Description of Artificial Sequence: Synthetic oligonucleotide
  Antisense strand to SEQ ID NO: 216650
auguccaccguagauuaua

SEQ ID NO: 216652 - RNA, 19 nt, Artificial Sequence
  Description of Artificial Sequence: Synthetic oligonucleotide
  Sense strand starting at position 3096 of SEQ ID NO: 2790
auaaucuacgguggacauu

SEQ ID NO: 216653 - RNA, 19 nt, Artificial Sequence
  Description of Artificial Sequence: Synthetic oligonucleotide
  Antisense strand to SEQ ID NO: 216652
aauguccaccguagauuau

SEQ ID NO: 216654 - RNA, 19 nt, Artificial Sequence
  Description of Artificial Sequence: Synthetic oligonucleotide
  Sense strand starting at position 3354 of SEQ ID NO: 2790
uucccagguguacaugaau

SEQ ID NO: 216655 - RNA, 19 nt, Artificial Sequence
  Description of Artificial Sequence: Synthetic oligonucleotide
  Antisense strand to SEQ ID NO: 216654
auucauguacaccugggaa

SEQ ID NO: 216656 - RNA, 19 nt, Artificial Sequence
  Description of Artificial Sequence: Synthetic oligonucleotide
  Sense strand starting at position 3365 of SEQ ID NO: 2790
acaugaauccuguaagcau

SEQ ID NO: 216657 - RNA, 19 nt, Artificial Sequence
  Description of Artificial Sequence: Synthetic oligonucleotide
  Antisense strand to SEQ ID NO: 216656
augcuuacaggauucaugu

SEQ ID NO: 216658 - RNA, 19 nt, Artificial Sequence
  Description of Artificial Sequence: Synthetic oligonucleotide
  Sense strand starting at position 3733 of SEQ ID NO: 2790
augacaucauuugaugaca

SEQ ID NO: 216659 - RNA, 19 nt, Artificial Sequence
  Description of Artificial Sequence: Synthetic oligonucleotide
  Antisense strand to SEQ ID NO: 216658
ugucaucaaaugaugucau

SEQ ID NO: 216660 - RNA, 19 nt, Artificial Sequence
  Description of Artificial Sequence: Synthetic oligonucleotide
  Sense strand starting at position 3838 of SEQ ID NO: 2790
aacuguugagaauggucau

SEQ ID NO: 216661 - RNA, 19 nt, Artificial Sequence
  Description of Artificial Sequence: Synthetic oligonucleotide
  Antisense strand to SEQ ID NO: 216660
augaccauucucaacaguu

SEQ ID NO: 216662 - RNA, 19 nt, Artificial Sequence
  Description of Artificial Sequence: Synthetic oligonucleotide
  Sense strand starting at position 3841 of SEQ ID NO: 2790
uguugagaauggucaugaa

SEQ ID NO: 216663 - RNA, 19 nt, Artificial Sequence
  Description of Artificial Sequence: Synthetic oligonucleotide
  Antisense strand to SEQ ID NO: 216662
uucaugaccauucucaaca

SEQ ID NO: 216664 - RNA, 19 nt, Artificial Sequence
  Description of Artificial Sequence: Synthetic oligonucleotide
  Sense strand starting at position 3934 of SEQ ID NO: 2790
aucuuuguccuguacacaa

SEQ ID NO: 216665 - RNA, 19 nt, Artificial Sequence
  Description of Artificial Sequence: Synthetic oligonucleotide
  Antisense strand to SEQ ID NO: 216664
uuguguacaggacaaagau

SEQ ID NO: 216666 - RNA, 19 nt, Artificial Sequence
  Description of Artificial Sequence: Synthetic oligonucleotide
  Sense strand starting at position 61 of SEQ ID NO: 2791
ucaggcugauccucacaua

SEQ ID NO: 216667 - RNA, 19 nt, Artificial Sequence
  Description of Artificial Sequence: Synthetic oligonucleotide
  Antisense strand to SEQ ID NO: 216666
uaugugaggaucagccuga

SEQ ID NO: 216668 - RNA, 19 nt, Artificial Sequence
  Description of Artificial Sequence: Synthetic oligonucleotide
  Sense strand starting at position 213 of SEQ ID NO: 2791
auuuauuuguccugguuaa

SEQ ID NO: 216669 - RNA, 19 nt, Artificial Sequence
  Description of Artificial Sequence: Synthetic oligonucleotide
  Antisense strand to SEQ ID NO: 216668
uuaaccaggacaaauaaau

SEQ ID NO: 216670 - RNA, 19 nt, Artificial Sequence
  Description of Artificial Sequence: Synthetic oligonucleotide
  Sense strand starting at position 281 of SEQ ID NO: 2791
uuaaauaccuggucuggga

SEQ ID NO: 216671 - RNA, 19 nt, Artificial Sequence
  Description of Artificial Sequence: Synthetic oligonucleotide
  Antisense strand to SEQ ID NO: 216670
ucccagaccagguauuuaa

SEQ ID NO: 216672 - RNA, 19 nt, Artificial Sequence
  Description of Artificial Sequence: Synthetic oligonucleotide
  Sense strand starting at position 283 of SEQ ID NO: 2791
aaauaccuggucugggaau

SEQ ID NO: 216673 - RNA, 19 nt, Artificial Sequence
  Description of Artificial Sequence: Synthetic oligonucleotide
  Antisense strand to SEQ ID NO: 216672
auucccagaccagguauuu

SEQ ID NO: 216674 - RNA, 19 nt, Artificial Sequence
  Description of Artificial Sequence: Synthetic oligonucleotide
  Sense strand starting at position 368 of SEQ ID NO: 2791
uguccuuuagaaugugaaa

SEQ ID NO: 216675 - RNA, 19 nt, Artificial Sequence
  Description of Artificial Sequence: Synthetic oligonucleotide
  Antisense strand to SEQ ID NO: 216674
uuucacauucuaaaggaca

SEQ ID NO: 216676 - RNA, 19 nt, Artificial Sequence
  Description of Artificial Sequence: Synthetic oligonucleotide
  Sense strand starting at position 445 of SEQ ID NO: 2791
gugaaauacugugcaacaa

SEQ ID NO: 216677 - RNA, 19 nt, Artificial Sequence
  Description of Artificial Sequence: Synthetic oligonucleotide
  Antisense strand to SEQ ID NO: 216676
uuguugcacaguauuucac

SEQ ID NO: 216678 - RNA, 19 nt, Artificial Sequence
  Description of Artificial Sequence: Synthetic oligonucleotide
  Sense strand starting at position 777 of SEQ ID NO: 2791
ccuauaugugaccauaggu

SEQ ID NO: 216679 - RNA, 19 nt, Artificial Sequence
  Description of Artificial Sequence: Synthetic oligonucleotide
  Antisense strand to SEQ ID NO: 216678
accuauggucacauauagg

SEQ ID NO: 216680 - RNA, 19 nt, Artificial Sequence
  Description of Artificial Sequence: Synthetic oligonucleotide
  Sense strand starting at position 782 of SEQ ID NO: 2791
augugaccauagguucuaa

SEQ ID NO: 216681 - RNA, 19 nt, Artificial Sequence
  Description of Artificial Sequence: Synthetic oligonucleotide
  Antisense strand to SEQ ID NO: 216680
uuagaaccuauggucacau

SEQ ID NO: 216682 - RNA, 19 nt, Artificial Sequence
  Description of Artificial Sequence: Synthetic oligonucleotide
  Sense strand starting at position 827 of SEQ ID NO: 2791
uauuuaugugaccguuaau

SEQ ID NO: 216683 - RNA, 19 nt, Artificial Sequence
  Description of Artificial Sequence: Synthetic oligonucleotide
  Antisense strand to SEQ ID NO: 216682
auuaacggucacauaaaua

SEQ ID NO: 216684 - RNA, 19 nt, Artificial Sequence
  Description of Artificial Sequence: Synthetic oligonucleotide
  Sense strand starting at position 883 of SEQ ID NO: 2791
aucugcucauccuuggaaa

SEQ ID NO: 216685 - RNA, 19 nt, Artificial Sequence
  Description of Artificial Sequence: Synthetic oligonucleotide
  Antisense strand to SEQ ID NO: 216684
uuuccaaggaugagcagau

SEQ ID NO: 216686 - RNA, 19 nt, Artificial Sequence
  Description of Artificial Sequence: Synthetic oligonucleotide
  Sense strand starting at position 903 of SEQ ID NO: 2791
gaaauuuccuaugccacgu

SEQ ID NO: 216687 - RNA, 19 nt, Artificial Sequence
  Description of Artificial Sequence: Synthetic oligonucleotide
  Antisense strand to SEQ ID NO: 216686
acguggcauaggaaauuuc

SEQ ID NO: 216688 - RNA, 19 nt, Artificial Sequence
  Description of Artificial Sequence: Synthetic oligonucleotide
  Sense strand starting at position 1005 of SEQ ID NO: 2791
gagucaacucuaggaggca

SEQ ID NO: 216689 - RNA, 19 nt, Artificial Sequence
  Description of Artificial Sequence: Synthetic oligonucleotide
  Antisense strand to SEQ ID NO: 216688
ugccuccuagaguugacuc

SEQ ID NO: 216690 - RNA, 19 nt, Artificial Sequence
  Description of Artificial Sequence: Synthetic oligonucleotide
  Sense strand starting at position 1048 of SEQ ID NO: 2791
ucuauuuaauggcaaagaa

SEQ ID NO: 216691 - RNA, 19 nt, Artificial Sequence
  Description of Artificial Sequence: Synthetic oligonucleotide
  Antisense strand to SEQ ID NO: 216690
uucuuugccauuaaauaga

SEQ ID NO: 216692 - RNA, 19 nt, Artificial Sequence
  Description of Artificial Sequence: Synthetic oligonucleotide
  Sense strand starting at position 1067 of SEQ ID NO: 2791
uaagaaauaugggauggau

SEQ ID NO: 216693 - RNA, 19 nt, Artificial Sequence
  Description of Artificial Sequence: Synthetic oligonucleotide
  Antisense strand to SEQ ID NO: 216692
auccaucccauauuucuua

SEQ ID NO: 216694 - RNA, 19 nt, Artificial Sequence
  Description of Artificial Sequence: Synthetic oligonucleotide
  Sense strand starting at position 1154 of SEQ ID NO: 2791
auucuaaccugaguucgau

SEQ ID NO: 216695 - RNA, 19 nt, Artificial Sequence
  Description of Artificial Sequence: Synthetic oligonucleotide
  Antisense strand to SEQ ID NO: 216694
aucgaacucagguuagaau

SEQ ID NO: 216696 - RNA, 19 nt, Artificial Sequence
  Description of Artificial Sequence: Synthetic oligonucleotide
  Sense strand starting at position 1361 of SEQ ID NO: 2791
gggccaagcugcuugauuu

SEQ ID NO: 216697 - RNA, 19 nt, Artificial Sequence
  Description of Artificial Sequence: Synthetic oligonucleotide
  Antisense strand to SEQ ID NO: 216696
aaaucaagcagcuuggccc

SEQ ID NO: 216698 - RNA, 19 nt, Artificial Sequence
  Description of Artificial Sequence: Synthetic oligonucleotide
  Sense strand starting at position 1414 of SEQ ID NO: 2791
cgguguucucacguaucau

SEQ ID NO: 216699 - RNA, 19 nt, Artificial Sequence
  Description of Artificial Sequence: Synthetic oligonucleotide
  Antisense strand to SEQ ID NO: 216698
augauacgugagaacaccg

SEQ ID NO: 216700 - RNA, 19 nt, Artificial Sequence
  Description of Artificial Sequence: Synthetic oligonucleotide
  Sense strand starting at position 3042 of SEQ ID NO: 2791
auuagacuguuucucagaa

SEQ ID NO: 216701 - RNA, 19 nt, Artificial Sequence
  Description of Artificial Sequence: Synthetic oligonucleotide
  Antisense strand to SEQ ID NO: 216700
uucugagaaacagucuaau

SEQ ID NO: 216702 - RNA, 19 nt, Artificial Sequence
  Description of Artificial Sequence: Synthetic oligonucleotide
  Sense strand starting at position 3043 of SEQ ID NO: 2791
uuagacuguuucucagaag

SEQ ID NO: 216703 - RNA, 19 nt, Artificial Sequence
  Description of Artificial Sequence: Synthetic oligonucleotide
  Antisense strand to SEQ ID NO: 216702
cuucugagaaacagucuaa

SEQ ID NO: 216704 - RNA, 19 nt, Artificial Sequence
  Description of Artificial Sequence: Synthetic oligonucleotide
  Sense strand starting at position 3049 of SEQ ID NO: 2791
uguuucucagaagaauguu

SEQ ID NO: 216705 - RNA, 19 nt, Artificial Sequence
  Description of Artificial Sequence: Synthetic oligonucleotide
  Antisense strand to SEQ ID NO: 216704
aacauucuucugagaaaca

SEQ ID NO: 216706 - RNA, 19 nt, Artificial Sequence
  Description of Artificial Sequence: Synthetic oligonucleotide
  Sense strand starting at position 3128 of SEQ ID NO: 2791
uccucaagucgugauauag

SEQ ID NO: 216707 - RNA, 19 nt, Artificial Sequence
  Description of Artificial Sequence: Synthetic oligonucleotide
  Antisense strand to SEQ ID NO: 216706
cuauaucacgacuugagga

SEQ ID NO: 216708 - RNA, 19 nt, Artificial Sequence
  Description of Artificial Sequence: Synthetic oligonucleotide
  Sense strand starting at position 3138 of SEQ ID NO: 2791
gugauauaguaacuaacac

SEQ ID NO: 216709 - RNA, 19 nt, Artificial Sequence
  Description of Artificial Sequence: Synthetic oligonucleotide
  Antisense strand to SEQ ID NO: 216708
guguuaguuacuauaucac

SEQ ID NO: 216710 - RNA, 19 nt, Artificial Sequence
  Description of Artificial Sequence: Synthetic oligonucleotide
  Sense strand starting at position 3155 of SEQ ID NO: 2791
acaggugcaucaucauuau

SEQ ID NO: 216711 - RNA, 19 nt, Artificial Sequence
  Description of Artificial Sequence: Synthetic oligonucleotide
  Antisense strand to SEQ ID NO: 216710
auaaugaugaugcaccugu

SEQ ID NO: 216712 - RNA, 19 nt, Artificial Sequence
  Description of Artificial Sequence: Synthetic oligonucleotide
  Sense strand starting at position 3203 of SEQ ID NO: 2791
ccgauuaagcaacaguaau

SEQ ID NO: 216713 - RNA, 19 nt, Artificial Sequence
  Description of Artificial Sequence: Synthetic oligonucleotide
  Antisense strand to SEQ ID NO: 216712
auuacuguugcuuaaucgg

SEQ ID NO: 216714 - RNA, 19 nt, Artificial Sequence
  Description of Artificial Sequence: Synthetic oligonucleotide
  Sense strand starting at position 3229 of SEQ ID NO: 2791
uagugaugucugcaaaugg

SEQ ID NO: 216715 - RNA, 19 nt, Artificial Sequence
  Description of Artificial Sequence: Synthetic oligonucleotide
  Antisense strand to SEQ ID NO: 216714
ccauuugcagacaucacua

SEQ ID NO: 216716 - RNA, 19 nt, Artificial Sequence
  Description of Artificial Sequence: Synthetic oligonucleotide
  Sense strand starting at position 3296 of SEQ ID NO: 2791
gggugcaaauuaucaagaa

SEQ ID NO: 216717 - RNA, 19 nt, Artificial Sequence
  Description of Artificial Sequence: Synthetic oligonucleotide
  Antisense strand to SEQ ID NO: 216716
uucuugauaauuugcaccc

SEQ ID NO: 216718 - RNA, 19 nt, Artificial Sequence
  Description of Artificial Sequence: Synthetic oligonucleotide
  Sense strand starting at position 3417 of SEQ ID NO: 2791
gugaguuuccuauacagau

SEQ ID NO: 216719 - RNA, 19 nt, Artificial Sequence
  Description of Artificial Sequence: Synthetic oligonucleotide
  Antisense strand to SEQ ID NO: 216718
aucuguauaggaaacucac

SEQ ID NO: 216720 - RNA, 19 nt, Artificial Sequence
  Description of Artificial Sequence: Synthetic oligonucleotide
  Sense strand starting at position 3440 of SEQ ID NO: 2791
ugaauuccauccucagguu

SEQ ID NO: 216721 - RNA, 19 nt, Artificial Sequence
  Description of Artificial Sequence: Synthetic oligonucleotide
  Antisense strand to SEQ ID NO: 216720
aaccugaggauggaauuca

SEQ ID NO: 216722 - RNA, 19 nt, Artificial Sequence
  Description of Artificial Sequence: Synthetic oligonucleotide
  Sense strand starting at position 3484 of SEQ ID NO: 2791
ugcugauauuugcugcaau

SEQ ID NO: 216723 - RNA, 19 nt, Artificial Sequence
  Description of Artificial Sequence: Synthetic oligonucleotide
  Antisense strand to SEQ ID NO: 216722
auugcagcaaauaucagca

SEQ ID NO: 216724 - RNA, 19 nt, Artificial Sequence
  Description of Artificial Sequence: Synthetic oligonucleotide
  Sense strand starting at position 3526 of SEQ ID NO: 2791
caugcaguuggucacugau

SEQ ID NO: 216725 - RNA, 19 nt, Artificial Sequence
  Description of Artificial Sequence: Synthetic oligonucleotide
  Antisense strand to SEQ ID NO: 216724
aucagugaccaacugcaug

SEQ ID NO: 216726 - RNA, 19 nt, Artificial Sequence
  Description of Artificial Sequence: Synthetic oligonucleotide
  Sense strand starting at position 3528 of SEQ ID NO: 2791
ugcaguuggucacugauuu

SEQ ID NO: 216727 - RNA, 19 nt, Artificial Sequence
  Description of Artificial Sequence: Synthetic oligonucleotide
  Antisense strand to SEQ ID NO: 216726
aaaucagugaccaacugca

SEQ ID NO: 216728 - RNA, 19 nt, Artificial Sequence
  Description of Artificial Sequence: Synthetic oligonucleotide
  Sense strand starting at position 3566 of SEQ ID NO: 2791
aguuaaauuugggaucuau

SEQ ID NO: 216729 - RNA, 19 nt, Artificial Sequence
  Description of Artificial Sequence: Synthetic oligonucleotide
  Antisense strand to SEQ ID NO: 216728
auagaucccaaauuuaacu

SEQ ID NO: 216730 - RNA, 19 nt, Artificial Sequence
  Description of Artificial Sequence: Synthetic oligonucleotide
  Sense strand starting at position 3574 of SEQ ID NO: 2791
uugggaucuauugguaucu

SEQ ID NO: 216731 - RNA, 19 nt, Artificial Sequence
  Description of Artificial Sequence: Synthetic oligonucleotide
  Antisense strand to SEQ ID NO: 216730
agauaccaauagaucccaa

SEQ ID NO: 216732 - RNA, 19 nt, Artificial Sequence
  Description of Artificial Sequence: Synthetic oligonucleotide
  Sense strand starting at position 3575 of SEQ ID NO: 2791
ugggaucuauugguaucuu

SEQ ID NO: 216733 - RNA, 19 nt, Artificial Sequence
  Description of Artificial Sequence: Synthetic oligonucleotide
  Antisense strand to SEQ ID NO: 216732
aagauaccaauagauccca

SEQ ID NO: 216734 - RNA, 19 nt, Artificial Sequence
  Description of Artificial Sequence: Synthetic oligonucleotide
  Sense strand starting at position 3579 of SEQ ID NO: 2791
aucuauugguaucuuagaa

SEQ ID NO: 216735 - RNA, 19 nt, Artificial Sequence
  Description of Artificial Sequence: Synthetic oligonucleotide
  Antisense strand to SEQ ID NO: 216734
uucuaagauaccaauagau

SEQ ID NO: 216736 - RNA, 19 nt, Artificial Sequence
  Description of Artificial Sequence: Synthetic oligonucleotide
  Sense strand starting at position 3665 of SEQ ID NO: 2791
uugacuauagcaugaaucu

SEQ ID NO: 216737 - RNA, 19 nt, Artificial Sequence
  Description of Artificial Sequence: Synthetic oligonucleotide
  Antisense strand to SEQ ID NO: 216736
agauucaugcuauagucaa

SEQ ID NO: 216738 - RNA, 19 nt, Artificial Sequence
  Description of Artificial Sequence: Synthetic oligonucleotide
  Sense strand starting at position 3666 of SEQ ID NO: 2791
ugacuauagcaugaaucuu

SEQ ID NO: 216739 - RNA, 19 nt, Artificial Sequence
  Description of Artificial Sequence: Synthetic oligonucleotide
  Antisense strand to SEQ ID NO: 216738
aagauucaugcuauaguca

SEQ ID NO: 216740 - RNA, 19 nt, Artificial Sequence
  Description of Artificial Sequence: Synthetic oligonucleotide
  Sense strand starting at position 3733 of SEQ ID NO: 2791
gcauuagaaucuuugggag

SEQ ID NO: 216741 - RNA, 19 nt, Artificial Sequence
  Description of Artificial Sequence: Synthetic oligonucleotide
  Antisense strand to SEQ ID NO: 216740
cucccaaagauucuaaugc

SEQ ID NO: 216742 - RNA, 19 nt, Artificial Sequence
  Description of Artificial Sequence: Synthetic oligonucleotide
  Sense strand starting at position 3901 of SEQ ID NO: 2791
uaggauauauucuuaguag

SEQ ID NO: 216743 - RNA, 19 nt, Artificial Sequence
  Description of Artificial Sequence: Synthetic oligonucleotide
  Antisense strand to SEQ ID NO: 216742
cuacuaagaauauauccua

SEQ ID NO: 216744 - RNA, 19 nt, Artificial Sequence
  Description of Artificial Sequence: Synthetic oligonucleotide
  Sense strand starting at position 3959 of SEQ ID NO: 2791
uugggaacacugcggaauu

SEQ ID NO: 216745 - RNA, 19 nt, Artificial Sequence
  Description of Artificial Sequence: Synthetic oligonucleotide
  Antisense strand to SEQ ID NO: 216744
aauuccgcaguguucccaa

SEQ ID NO: 216746 - RNA, 19 nt, Artificial Sequence
  Description of Artificial Sequence: Synthetic oligonucleotide
  Sense strand starting at position 14 of SEQ ID NO: 2792
cugcgauauggucauaaau

SEQ ID NO: 216747 - RNA, 19 nt, Artificial Sequence
  Description of Artificial Sequence: Synthetic oligonucleotide
  Antisense strand to SEQ ID NO: 216746
auuuaugaccauaucgcag

SEQ ID NO: 216748 - RNA, 19 nt, Artificial Sequence
  Description of Artificial Sequence: Synthetic oligonucleotide
  Sense strand starting at position 45 of SEQ ID NO: 2792
ccaaguuguaaugaagagu

SEQ ID NO: 216749 - RNA, 19 nt, Artificial Sequence
  Description of Artificial Sequence: Synthetic oligonucleotide
  Antisense strand to SEQ ID NO: 216748
acucuucauuacaacuugg

SEQ ID NO: 216750 - RNA, 19 nt, Artificial Sequence
  Description of Artificial Sequence: Synthetic oligonucleotide
  Sense strand starting at position 48 of SEQ ID NO: 2792
aguuguaaugaagaguuua

SEQ ID NO: 216751 - RNA, 19 nt, Artificial Sequence
  Description of Artificial Sequence: Synthetic oligonucleotide
  Antisense strand to SEQ ID NO: 216750
uaaacucuucauuacaacu

SEQ ID NO: 216752 - RNA, 19 nt, Artificial Sequence
  Description of Artificial Sequence: Synthetic oligonucleotide
  Sense strand starting at position 160 of SEQ ID NO: 2792
cuugauugugcaugggaau

SEQ ID NO: 216753 - RNA, 19 nt, Artificial Sequence
  Description of Artificial Sequence: Synthetic oligonucleotide
  Antisense strand to SEQ ID NO: 216752
auucccaugcacaaucaag

SEQ ID NO: 216754 - RNA, 19 nt, Artificial Sequence
  Description of Artificial Sequence: Synthetic oligonucleotide
  Sense strand starting at position 224 of SEQ ID NO: 2792
uggaauggucuggguagca

SEQ ID NO: 216755 - RNA, 19 nt, Artificial Sequence
  Description of Artificial Sequence: Synthetic oligonucleotide
  Antisense strand to SEQ ID NO: 216754
ugcuacccagaccauucca

SEQ ID NO: 216756 - RNA, 19 nt, Artificial Sequence
  Description of Artificial Sequence: Synthetic oligonucleotide
  Sense strand starting at position 273 of SEQ ID NO: 2792
gcacaacgauaguugagaa

SEQ ID NO: 216757 - RNA, 19 nt, Artificial Sequence
  Description of Artificial Sequence: Synthetic oligonucleotide
  Antisense strand to SEQ ID NO: 216756
uucucaacuaucguugugc

SEQ ID NO: 216758 - RNA, 19 nt, Artificial Sequence
  Description of Artificial Sequence: Synthetic oligonucleotide
  Sense strand starting at position 283 of SEQ ID NO: 2792
aguugagaaucacuggcau

SEQ ID NO: 216759 - RNA, 19 nt, Artificial Sequence
  Description of Artificial Sequence: Synthetic oligonucleotide
  Antisense strand to SEQ ID NO: 216758
augccagugauucucaacu

SEQ ID NO: 216760 - RNA, 19 nt, Artificial Sequence
  Description of Artificial Sequence: Synthetic oligonucleotide
  Sense strand starting at position 468 of SEQ ID NO: 2792
ugaccaacugcaugaucau

SEQ ID NO: 216761 - RNA, 19 nt, Artificial Sequence
  Description of Artificial Sequence: Synthetic oligonucleotide
  Antisense strand to SEQ ID NO: 216760
augaucaugcaguugguca

SEQ ID NO: 216762 - RNA, 19 nt, Artificial Sequence
  Description of Artificial Sequence: Synthetic oligonucleotide
  Sense strand starting at position 500 of SEQ ID NO: 2792
agccaauugcagcaaauau

SEQ ID NO: 216763 - RNA, 19 nt, Artificial Sequence
  Description of Artificial Sequence: Synthetic oligonucleotide
  Antisense strand to SEQ ID NO: 216762
auauuugcugcaauuggcu

SEQ ID NO: 216764 - RNA, 19 nt, Artificial Sequence
  Description of Artificial Sequence: Synthetic oligonucleotide
  Sense strand starting at position 559 of SEQ ID NO: 2792
uggaauucaggugaucugu

SEQ ID NO: 216765 - RNA, 19 nt, Artificial Sequence
  Description of Artificial Sequence: Synthetic oligonucleotide
  Antisense strand to SEQ ID NO: 216764
acagaucaccugaauucca

SEQ ID NO: 216766 - RNA, 19 nt, Artificial Sequence
  Description of Artificial Sequence: Synthetic oligonucleotide
  Sense strand starting at position 565 of SEQ ID NO: 2792
ucaggugaucuguauagga

SEQ ID NO: 216767 - RNA, 19 nt, Artificial Sequence
  Description of Artificial Sequence: Synthetic oligonucleotide
  Antisense strand to SEQ ID NO: 216766
uccuauacagaucaccuga

SEQ ID NO: 216768 - RNA, 19 nt, Artificial Sequence
  Description of Artificial Sequence: Synthetic oligonucleotide
  Sense strand starting at position 569 of SEQ ID NO: 2792
gugaucuguauaggaaacu

SEQ ID NO: 216769 - RNA, 19 nt, Artificial Sequence
  Description of Artificial Sequence: Synthetic oligonucleotide
  Antisense strand to SEQ ID NO: 216768
aguuuccuauacagaucac

SEQ ID NO: 216770 - RNA, 19 nt, Artificial Sequence
  Description of Artificial Sequence: Synthetic oligonucleotide
  Sense strand starting at position 578 of SEQ ID NO: 2792
auaggaaacucacauagga

SEQ ID NO: 216771 - RNA, 19 nt, Artificial Sequence
  Description of Artificial Sequence: Synthetic oligonucleotide
  Antisense strand to SEQ ID NO: 216770
uccuaugugaguuuccuau

SEQ ID NO: 216772 - RNA, 19 nt, Artificial Sequence
  Description of Artificial Sequence: Synthetic oligonucleotide
  Sense strand starting at position 642 of SEQ ID NO: 2792
acauguccuucccuuauga

SEQ ID NO: 216773 - RNA, 19 nt, Artificial Sequence
  Description of Artificial Sequence: Synthetic oligonucleotide
  Antisense strand to SEQ ID NO: 216772
ucauaagggaaggacaugu

SEQ ID NO: 216774 - RNA, 19 nt, Artificial Sequence
  Description of Artificial Sequence: Synthetic oligonucleotide
  Sense strand starting at position 669 of SEQ ID NO: 2792
aacagagcacaguaguauu

SEQ ID NO: 216775 - RNA, 19 nt, Artificial Sequence
  Description of Artificial Sequence: Synthetic oligonucleotide
  Antisense strand to SEQ ID NO: 216774
aauacuacugugcucuguu

SEQ ID NO: 216776 - RNA, 19 nt, Artificial Sequence
  Description of Artificial Sequence: Synthetic oligonucleotide
  Sense strand starting at position 686 of SEQ ID NO: 2792
uuggcaguucuugauaauu

SEQ ID NO: 216777 - RNA, 19 nt, Artificial Sequence
  Description of Artificial Sequence: Synthetic oligonucleotide
  Antisense strand to SEQ ID NO: 216776
aauuaucaagaacugccaa

SEQ ID NO: 216778 - RNA, 19 nt, Artificial Sequence
  Description of Artificial Sequence: Synthetic oligonucleotide
  Sense strand starting at position 776 of SEQ ID NO: 2792
cuacuuugacauuacuguu

SEQ ID NO: 216779 - RNA, 19 nt, Artificial Sequence
  Description of Artificial Sequence: Synthetic oligonucleotide
  Antisense strand to SEQ ID NO: 216778
aacaguaaugucaaaguag

SEQ ID NO: 216780 - RNA, 19 nt, Artificial Sequence
  Description of Artificial Sequence: Synthetic oligonucleotide
  Sense strand starting at position 877 of SEQ ID NO: 2792
ggacuuccauaauugcauu

SEQ ID NO: 216781 - RNA, 19 nt, Artificial Sequence
  Description of Artificial Sequence: Synthetic oligonucleotide
  Antisense strand to SEQ ID NO: 216780
aaugcaauuauggaagucc

SEQ ID NO: 216782 - RNA, 19 nt, Artificial Sequence
  Description of Artificial Sequence: Synthetic oligonucleotide
  Sense strand starting at position 959 of SEQ ID NO: 2792
gucuaauugcuuuaccaga

SEQ ID NO: 216783 - RNA, 19 nt, Artificial Sequence
  Description of Artificial Sequence: Synthetic oligonucleotide
  Antisense strand to SEQ ID NO: 216782
ucugguaaagcaauuagac

SEQ ID NO: 216784 - RNA, 19 nt, Artificial Sequence
  Description of Artificial Sequence: Synthetic oligonucleotide
  Sense strand starting at position 1100 of SEQ ID NO: 2792
cccugcauuuccgcagaua

SEQ ID NO: 216785 - RNA, 19 nt, Artificial Sequence
  Description of Artificial Sequence: Synthetic oligonucleotide
  Antisense strand to SEQ ID NO: 216784
uaucugcggaaaugcaggg

SEQ ID NO: 216786 - RNA, 19 nt, Artificial Sequence
  Description of Artificial Sequence: Synthetic oligonucleotide
  Sense strand starting at position 1150 of SEQ ID NO: 2792
ggagaauaagaugggcuuu

SEQ ID NO: 216787 - RNA, 19 nt, Artificial Sequence
  Description of Artificial Sequence: Synthetic oligonucleotide
  Antisense strand to SEQ ID NO: 216786
aaagcccaucuuauucucc

SEQ ID NO: 216788 - RNA, 19 nt, Artificial Sequence
  Description of Artificial Sequence: Synthetic oligonucleotide
  Sense strand starting at position 2524 of SEQ ID NO: 2792
gccuccagaggucaguaaa

SEQ ID NO: 216789 - RNA, 19 nt, Artificial Sequence
  Description of Artificial Sequence: Synthetic oligonucleotide
  Antisense strand to SEQ ID NO: 216788
uuuacugaccucuggaggc

SEQ ID NO: 216790 - RNA, 19 nt, Artificial Sequence
  Description of Artificial Sequence: Synthetic oligonucleotide
  Sense strand starting at position 2557 of SEQ ID NO: 2792
cauagauaaucgccaggga

SEQ ID NO: 216791 - RNA, 19 nt, Artificial Sequence
  Description of Artificial Sequence: Synthetic oligonucleotide
  Antisense strand to SEQ ID NO: 216790
ucccuggcgauuaucuaug

SEQ ID NO: 216792 - RNA, 19 nt, Artificial Sequence
  Description of Artificial Sequence: Synthetic oligonucleotide
  Sense strand starting at position 2560 of SEQ ID NO: 2792
agauaaucgccagggauga

SEQ ID NO: 216793 - RNA, 19 nt, Artificial Sequence
  Description of Artificial Sequence: Synthetic oligonucleotide
  Antisense strand to SEQ ID NO: 216792
ucaucccuggcgauuaucu

SEQ ID NO: 216794 - RNA, 19 nt, Artificial Sequence
  Description of Artificial Sequence: Synthetic oligonucleotide
  Sense strand starting at position 2561 of SEQ ID NO: 2792
gauaaucgccagggaugau

SEQ ID NO: 216795 - RNA, 19 nt, Artificial Sequence
  Description of Artificial Sequence: Synthetic oligonucleotide
  Antisense strand to SEQ ID NO: 216794
aucaucccuggcgauuauc

SEQ ID NO: 216796 - RNA, 19 nt, Artificial Sequence
  Description of Artificial Sequence: Synthetic oligonucleotide
  Sense strand starting at position 2571 of SEQ ID NO: 2792
agggaugauacgugagaac

SEQ ID NO: 216797 - RNA, 19 nt, Artificial Sequence
  Description of Artificial Sequence: Synthetic oligonucleotide
  Antisense strand to SEQ ID NO: 216796
guucucacguaucaucccu

SEQ ID NO: 216798 - RNA, 19 nt, Artificial Sequence
  Description of Artificial Sequence: Synthetic oligonucleotide
  Sense strand starting at position 2864 of SEQ ID NO: 2792
aucugacacuuugauuuga

SEQ ID NO: 216799 - RNA, 19 nt, Artificial Sequence
  Description of Artificial Sequence: Synthetic oligonucleotide
  Antisense strand to SEQ ID NO: 216798
ucaaaucaaagugucagau

SEQ ID NO: 216800 - RNA, 19 nt, Artificial Sequence
  Description of Artificial Sequence: Synthetic oligonucleotide
  Sense strand starting at position 2957 of SEQ ID NO: 2792
agaaauugauuguccucaa

SEQ ID NO: 216801 - RNA, 19 nt, Artificial Sequence
  Description of Artificial Sequence: Synthetic oligonucleotide
  Antisense strand to SEQ ID NO: 216800
uugaggacaaucaauuucu

SEQ ID NO: 216802 - RNA, 19 nt, Artificial Sequence
  Description of Artificial Sequence: Synthetic oligonucleotide
  Sense strand starting at position 2992 of SEQ ID NO: 2792
agaguugacucacuugauu

SEQ ID NO: 216803 - RNA, 19 nt, Artificial Sequence
  Description of Artificial Sequence: Synthetic oligonucleotide
  Antisense strand to SEQ ID NO: 216802
aaucaagugagucaacucu

SEQ ID NO: 216804 - RNA, 19 nt, Artificial Sequence
  Description of Artificial Sequence: Synthetic oligonucleotide
  Sense strand starting at position 3156 of SEQ ID NO: 2792
uuggaaauuaacggucaca

SEQ ID NO: 216805 - RNA, 19 nt, Artificial Sequence
  Description of Artificial Sequence: Synthetic oligonucleotide
  Antisense strand to SEQ ID NO: 216804
ugugaccguuaauuuccaa

SEQ ID NO: 216806 - RNA, 19 nt, Artificial Sequence
  Description of Artificial Sequence: Synthetic oligonucleotide
  Sense strand starting at position 3218 of SEQ ID NO: 2792
ggucacauauagguucuau

SEQ ID NO: 216807 - RNA, 19 nt, Artificial Sequence
  Description of Artificial Sequence: Synthetic oligonucleotide
  Antisense strand to SEQ ID NO: 216806
auagaaccuauaugugacc

SEQ ID NO: 216808 - RNA, 19 nt, Artificial Sequence
  Description of Artificial Sequence: Synthetic oligonucleotide
  Sense strand starting at position 3270 of SEQ ID NO: 2792
gcagacauuauaggugaaa

SEQ ID NO: 216809 - RNA, 19 nt, Artificial Sequence
  Description of Artificial Sequence: Synthetic oligonucleotide
  Antisense strand to SEQ ID NO: 216808
uuucaccuauaaugucugc

SEQ ID NO: 216810 - RNA, 19 nt, Artificial Sequence
  Description of Artificial Sequence: Synthetic oligonucleotide
  Sense strand starting at position 3330 of SEQ ID NO: 2792
cuugucuuccaagaggugu

SEQ ID NO: 216811 - RNA, 19 nt, Artificial Sequence
  Description of Artificial Sequence: Synthetic oligonucleotide
  Antisense strand to SEQ ID NO: 216810
acaccucuuggaagacaag

SEQ ID NO: 216812 - RNA, 19 nt, Artificial Sequence
  Description of Artificial Sequence: Synthetic oligonucleotide
  Sense strand starting at position 3500 of SEQ ID NO: 2792
caguccaugucaguauuua

SEQ ID NO: 216813 - RNA, 19 nt, Artificial Sequence
  Description of Artificial Sequence: Synthetic oligonucleotide
  Antisense strand to SEQ ID NO: 216812
uaaauacugacauggacug

SEQ ID NO: 216814 - RNA, 19 nt, Artificial Sequence
  Description of Artificial Sequence: Synthetic oligonucleotide
  Sense strand starting at position 3689 of SEQ ID NO: 2792
cuuugcauacauuaggaau

SEQ ID NO: 216815 - RNA, 19 nt, Artificial Sequence
  Description of Artificial Sequence: Synthetic oligonucleotide
  Antisense strand to SEQ ID NO: 216814
auuccuaauguaugcaaag

SEQ ID NO: 216816 - RNA, 19 nt, Artificial Sequence
  Description of Artificial Sequence: Synthetic oligonucleotide
  Sense strand starting at position 3728 of SEQ ID NO: 2792
ugcuacuaggcaugauaga

SEQ ID NO: 216817 - RNA, 19 nt, Artificial Sequence
  Description of Artificial Sequence: Synthetic oligonucleotide
  Antisense strand to SEQ ID NO: 216816
ucuaucaugccuaguagca

SEQ ID NO: 216818 - RNA, 19 nt, Artificial Sequence
  Description of Artificial Sequence: Synthetic oligonucleotide
  Sense strand starting at position 3729 of SEQ ID NO: 2792
gcuacuaggcaugauagau

SEQ ID NO: 216819 - RNA, 19 nt, Artificial Sequence
  Description of Artificial Sequence: Synthetic oligonucleotide
  Antisense strand to SEQ ID NO: 216818
aucuaucaugccuaguagc

SEQ ID NO: 216820 - RNA, 19 nt, Artificial Sequence
  Description of Artificial Sequence: Synthetic oligonucleotide
  Sense strand starting at position 3915 of SEQ ID NO: 2792
gaagaauuguacuuaugug

SEQ ID NO: 216821 - RNA, 19 nt, Artificial Sequence
  Description of Artificial Sequence: Synthetic oligonucleotide
  Antisense strand to SEQ ID NO: 216820
cacauaaguacaauucuuc

SEQ ID NO: 216822 - RNA, 19 nt, Artificial Sequence
  Description of Artificial Sequence: Synthetic oligonucleotide
  Sense strand starting at position 3919 of SEQ ID NO: 2792
aauuguacuuaugugagga

SEQ ID NO: 216823 - RNA, 19 nt, Artificial Sequence
  Description of Artificial Sequence: Synthetic oligonucleotide
  Antisense strand to SEQ ID NO: 216822
uccucacauaaguacaauu

SEQ ID NO: 216824 - RNA, 19 nt, Artificial Sequence
  Description of Artificial Sequence: Synthetic oligonucleotide
  Sense strand starting at position 3920 of SEQ ID NO: 2792
auuguacuuaugugaggau

SEQ ID NO: 216825 - RNA, 19 nt, Artificial Sequence
  Description of Artificial Sequence: Synthetic oligonucleotide
  Antisense strand to SEQ ID NO: 216824
auccucacauaaguacaau

SEQ ID NO: 216826 - RNA, 19 nt, Artificial Sequence
  Description of Artificial Sequence: Synthetic oligonucleotide
  Sense strand starting at position 114 of SEQ ID NO: 2793
cuguucuuucuagagucaa

SEQ ID NO: 216827 - RNA, 19 nt, Artificial Sequence
  Description of Artificial Sequence: Synthetic oligonucleotide
  Antisense strand to SEQ ID NO: 216826
uugacucuagaaagaacag

SEQ ID NO: 216828 - RNA, 19 nt, Artificial Sequence
  Description of Artificial Sequence: Synthetic oligonucleotide
  Sense strand starting at position 353 of SEQ ID NO: 2793
ccugacagauuguuggaua

SEQ ID NO: 216829 - RNA, 19 nt, Artificial Sequence
  Description of Artificial Sequence: Synthetic oligonucleotide
  Antisense strand to SEQ ID NO: 216828
uauccaacaaucugucagg

SEQ ID NO: 216830 - RNA, 19 nt, Artificial Sequence
  Description of Artificial Sequence: Synthetic oligonucleotide
  Sense strand starting at position 558 of SEQ ID NO: 2793
aagguuaaugaauguccaa

SEQ ID NO: 216831 - RNA, 19 nt, Artificial Sequence
  Description of Artificial Sequence: Synthetic oligonucleotide
  Antisense strand to SEQ ID NO: 216830
uuggacauucauuaaccuu

SEQ ID NO: 216832 - RNA, 19 nt, Artificial Sequence
  Description of Artificial Sequence: Synthetic oligonucleotide
  Sense strand starting at position 561 of SEQ ID NO: 2793
guuaaugaauguccaaagu

SEQ ID NO: 216833 - RNA, 19 nt, Artificial Sequence
  Description of Artificial Sequence: Synthetic oligonucleotide
  Antisense strand to SEQ ID NO: 216832
acuuuggacauucauuaac

SEQ ID NO: 216834 - RNA, 19 nt, Artificial Sequence
  Description of Artificial Sequence: Synthetic oligonucleotide
  Sense strand starting at position 645 of SEQ ID NO: 2793
ggaguacaugucuguauuu

SEQ ID NO: 216835 - RNA, 19 nt, Artificial Sequence
  Description of Artificial Sequence: Synthetic oligonucleotide
  Antisense strand to SEQ ID NO: 216834
aaauacagacauguacucc

SEQ ID NO: 216836 - RNA, 19 nt, Artificial Sequence
  Description of Artificial Sequence: Synthetic oligonucleotide
  Sense strand starting at position 801 of SEQ ID NO: 2793
aaauguggucaccaggcaa

SEQ ID NO: 216837 - RNA, 19 nt, Artificial Sequence
  Description of Artificial Sequence: Synthetic oligonucleotide
  Antisense strand to SEQ ID NO: 216836
uugccuggugaccacauuu

SEQ ID NO: 216838 - RNA, 19 nt, Artificial Sequence
  Description of Artificial Sequence: Synthetic oligonucleotide
  Sense strand starting at position 805 of SEQ ID NO: 2793
guggucaccaggcaagauu

SEQ ID NO: 216839 - RNA, 19 nt, Artificial Sequence
  Description of Artificial Sequence: Synthetic oligonucleotide
  Antisense strand to SEQ ID NO: 216838
aaucuugccuggugaccac

SEQ ID NO: 216840 - RNA, 19 nt, Artificial Sequence
  Description of Artificial Sequence: Synthetic oligonucleotide
  Sense strand starting at position 1019 of SEQ ID NO: 2793
agccucugucauggagaaa

SEQ ID NO: 216841 - RNA, 19 nt, Artificial Sequence
  Description of Artificial Sequence: Synthetic oligonucleotide
  Antisense strand to SEQ ID NO: 216840
uuucuccaugacagaggcu

SEQ ID NO: 216842 - RNA, 19 nt, Artificial Sequence
  Description of Artificial Sequence: Synthetic oligonucleotide
  Sense strand starting at position 1020 of SEQ ID NO: 2793
gccucugucauggagaaac

SEQ ID NO: 216843 - RNA, 19 nt, Artificial Sequence
  Description of Artificial Sequence: Synthetic oligonucleotide
  Antisense strand to SEQ ID NO: 216842
guuucuccaugacagaggc

SEQ ID NO: 216844 - RNA, 19 nt, Artificial Sequence
  Description of Artificial Sequence: Synthetic oligonucleotide
  Sense strand starting at position 1552 of SEQ ID NO: 2793
cuuccugaggcuuaacauu

SEQ ID NO: 216845 - RNA, 19 nt, Artificial Sequence
  Description of Artificial Sequence: Synthetic oligonucleotide
  Antisense strand to SEQ ID NO: 216844
aauguuaagccucaggaag

SEQ ID NO: 216846 - RNA, 19 nt, Artificial Sequence
  Description of Artificial Sequence: Synthetic oligonucleotide
  Sense strand starting at position 1580 of SEQ ID NO: 2793
ucccaaaccgugcaauaaa

SEQ ID NO: 216847 - RNA, 19 nt, Artificial Sequence
  Description of Artificial Sequence: Synthetic oligonucleotide
  Antisense strand to SEQ ID NO: 216846
uuuauugcacgguuuggga

SEQ ID NO: 216848 - RNA, 19 nt, Artificial Sequence
  Description of Artificial Sequence: Synthetic oligonucleotide
  Sense strand starting at position 1657 of SEQ ID NO: 2793
ugagacaaauugcccuaau

SEQ ID NO: 216849 - RNA, 19 nt, Artificial Sequence
  Description of Artificial Sequence: Synthetic oligonucleotide
  Antisense strand to SEQ ID NO: 216848
auuagggcaauuugucuca

SEQ ID NO: 216850 - RNA, 19 nt, Artificial Sequence
  Description of Artificial Sequence: Synthetic oligonucleotide
  Sense strand starting at position 1732 of SEQ ID NO: 2793
auauuagacauguggguuc

SEQ ID NO: 216851 - RNA, 19 nt, Artificial Sequence
  Description of Artificial Sequence: Synthetic oligonucleotide
  Antisense strand to SEQ ID NO: 216850
gaacccacaugucuaauau

SEQ ID NO: 216852 - RNA, 19 nt, Artificial Sequence
  Description of Artificial Sequence: Synthetic oligonucleotide
  Sense strand starting at position 1743 of SEQ ID NO: 2793
guggguucuccugagagug

SEQ ID NO: 216853 - RNA, 19 nt, Artificial Sequence
  Description of Artificial Sequence: Synthetic oligonucleotide
  Antisense strand to SEQ ID NO: 216852
cacucucaggagaacccac

SEQ ID NO: 216854 - RNA, 19 nt, Artificial Sequence
  Description of Artificial Sequence: Synthetic oligonucleotide
  Sense strand starting at position 1768 of SEQ ID NO: 2793
agauucugagguuauugua

SEQ ID NO: 216855 - RNA, 19 nt, Artificial Sequence
  Description of Artificial Sequence: Synthetic oligonucleotide
  Antisense strand to SEQ ID NO: 216854
uacaauaaccucagaaucu

SEQ ID NO: 216856 - RNA, 19 nt, Artificial Sequence
  Description of Artificial Sequence: Synthetic oligonucleotide
  Sense strand starting at position 1994 of SEQ ID NO: 2793
aacggucugauugauggua

SEQ ID NO: 216857 - RNA, 19 nt, Artificial Sequence
  Description of Artificial Sequence: Synthetic oligonucleotide
  Antisense strand to SEQ ID NO: 216856
uaccaucaaucagaccguu

SEQ ID NO: 216858 - RNA, 19 nt, Artificial Sequence
  Description of Artificial Sequence: Synthetic oligonucleotide
  Sense strand starting at position 2412 of SEQ ID NO: 2793
uagaauguugcccagguaa

SEQ ID NO: 216859 - RNA, 19 nt, Artificial Sequence
  Description of Artificial Sequence: Synthetic oligonucleotide
  Antisense strand to SEQ ID NO: 216858
uuaccugggcaacauucua

SEQ ID NO: 216860 - RNA, 19 nt, Artificial Sequence
  Description of Artificial Sequence: Synthetic oligonucleotide
  Sense strand starting at position 2423 of SEQ ID NO: 2793
ccagguaaaguccagguua

SEQ ID NO: 216861 - RNA, 19 nt, Artificial Sequence
  Description of Artificial Sequence: Synthetic oligonucleotide
  Antisense strand to SEQ ID NO: 216860
uaaccuggacuuuaccugg

SEQ ID NO: 216862 - RNA, 19 nt, Artificial Sequence
  Description of Artificial Sequence: Synthetic oligonucleotide
  Sense strand starting at position 2425 of SEQ ID NO: 2793
agguaaaguccagguuaga

SEQ ID NO: 216863 - RNA, 19 nt, Artificial Sequence
  Description of Artificial Sequence: Synthetic oligonucleotide
  Antisense strand to SEQ ID NO: 216862
ucuaaccuggacuuuaccu

SEQ ID NO: 216864 - RNA, 19 nt, Artificial Sequence
  Description of Artificial Sequence: Synthetic oligonucleotide
  Sense strand starting at position 2552 of SEQ ID NO: 2793
ccucuugucccagagaguu

SEQ ID NO: 216865 - RNA, 19 nt, Artificial Sequence
  Description of Artificial Sequence: Synthetic oligonucleotide
  Antisense strand to SEQ ID NO: 216864
aacucucugggacaagagg

SEQ ID NO: 216866 - RNA, 19 nt, Artificial Sequence
  Description of Artificial Sequence: Synthetic oligonucleotide
  Sense strand starting at position 2612 of SEQ ID NO: 2793
ugggaaguacucuaccuuu

SEQ ID NO: 216867 - RNA, 19 nt, Artificial Sequence
  Description of Artificial Sequence: Synthetic oligonucleotide
  Antisense strand to SEQ ID NO: 216866
aaagguagaguacuuccca

SEQ ID NO: 216868 - RNA, 19 nt, Artificial Sequence
  Description of Artificial Sequence: Synthetic oligonucleotide
  Sense strand starting at position 2615 of SEQ ID NO: 2793
gaaguacucuaccuuugga

SEQ ID NO: 216869 - RNA, 19 nt, Artificial Sequence
  Description of Artificial Sequence: Synthetic oligonucleotide
  Antisense strand to SEQ ID NO: 216868
uccaaagguagaguacuuc

SEQ ID NO: 216870 - RNA, 19 nt, Artificial Sequence
  Description of Artificial Sequence: Synthetic oligonucleotide
  Sense strand starting at position 2618 of SEQ ID NO: 2793
guacucuaccuuuggauga

SEQ ID NO: 216871 - RNA, 19 nt, Artificial Sequence
  Description of Artificial Sequence: Synthetic oligonucleotide
  Antisense strand to SEQ ID NO: 216870
ucauccaaagguagaguac

SEQ ID NO: 216872 - RNA, 19 nt, Artificial Sequence
  Description of Artificial Sequence: Synthetic oligonucleotide
  Sense strand starting at position 2745 of SEQ ID NO: 2793
gggcuuuacccugaccagu

SEQ ID NO: 216873 - RNA, 19 nt, Artificial Sequence
  Description of Artificial Sequence: Synthetic oligonucleotide
  Antisense strand to SEQ ID NO: 216872
acuggucaggguaaagccc

SEQ ID NO: 216874 - RNA, 19 nt, Artificial Sequence
  Description of Artificial Sequence: Synthetic oligonucleotide
  Sense strand starting at position 2835 of SEQ ID NO: 2793
aaagcagauggugguauua

SEQ ID NO: 216875 - RNA, 19 nt, Artificial Sequence
  Description of Artificial Sequence: Synthetic oligonucleotide
  Antisense strand to SEQ ID NO: 216874
uaauaccaccaucugcuuu

SEQ ID NO: 216876 - RNA, 19 nt, Artificial Sequence
  Description of Artificial Sequence: Synthetic oligonucleotide
  Sense strand starting at position 2857 of SEQ ID NO: 2793
gcuuuaagccagcuuugca

SEQ ID NO: 216877 - RNA, 19 nt, Artificial Sequence
  Description of Artificial Sequence: Synthetic oligonucleotide
  Antisense strand to SEQ ID NO: 216876
ugcaaagcuggcuuaaagc

SEQ ID NO: 216878 - RNA, 19 nt, Artificial Sequence
  Description of Artificial Sequence: Synthetic oligonucleotide
  Sense strand starting at position 3003 of SEQ ID NO: 2793
ccuugagucucccuagaau

SEQ ID NO: 216879 - RNA, 19 nt, Artificial Sequence
  Description of Artificial Sequence: Synthetic oligonucleotide
  Antisense strand to SEQ ID NO: 216878
auucuagggagacucaagg

SEQ ID NO: 216880 - RNA, 19 nt, Artificial Sequence
  Description of Artificial Sequence: Synthetic oligonucleotide
  Sense strand starting at position 3031 of SEQ ID NO: 2793
uguucuauacaauacaagu

SEQ ID NO: 216881 - RNA, 19 nt, Artificial Sequence
  Description of Artificial Sequence: Synthetic oligonucleotide
  Antisense strand to SEQ ID NO: 216880
acuuguauuguauagaaca

SEQ ID NO: 216882 - RNA, 19 nt, Artificial Sequence
  Description of Artificial Sequence: Synthetic oligonucleotide
  Sense strand starting at position 3157 of SEQ ID NO: 2793
gaacauauguagguguuga

SEQ ID NO: 216883 - RNA, 19 nt, Artificial Sequence
  Description of Artificial Sequence: Synthetic oligonucleotide
  Antisense strand to SEQ ID NO: 216882
ucaacaccuacauauguuc

SEQ ID NO: 216884 - RNA, 19 nt, Artificial Sequence
  Description of Artificial Sequence: Synthetic oligonucleotide
  Sense strand starting at position 3220 of SEQ ID NO: 2793
uaaauaugugagggaugca

SEQ ID NO: 216885 - RNA, 19 nt, Artificial Sequence
  Description of Artificial Sequence: Synthetic oligonucleotide
  Antisense strand to SEQ ID NO: 216884
ugcaucccucacauauuua

SEQ ID NO: 216886 - RNA, 19 nt, Artificial Sequence
  Description of Artificial Sequence: Synthetic oligonucleotide
  Sense strand starting at position 3223 of SEQ ID NO: 2793
auaugugagggaugcauua

SEQ ID NO: 216887 - RNA, 19 nt, Artificial Sequence
  Description of Artificial Sequence: Synthetic oligonucleotide
  Antisense strand to SEQ ID NO: 216886
uaaugcaucccucacauau

SEQ ID NO: 216888 - RNA, 19 nt, Artificial Sequence
  Description of Artificial Sequence: Synthetic oligonucleotide
  Sense strand starting at position 3236 of SEQ ID NO: 2793
gcauuaagcccggagaaag

SEQ ID NO: 216889 - RNA, 19 nt, Artificial Sequence
  Description of Artificial Sequence: Synthetic oligonucleotide
  Antisense strand to SEQ ID NO: 216888
cuuucuccgggcuuaaugc

SEQ ID NO: 216890 - RNA, 19 nt, Artificial Sequence
  Description of Artificial Sequence: Synthetic oligonucleotide
  Sense strand starting at position 3357 of SEQ ID NO: 2793
uaaauauuccaguggaggu

SEQ ID NO: 216891 - RNA, 19 nt, Artificial Sequence
  Description of Artificial Sequence: Synthetic oligonucleotide
  Antisense strand to SEQ ID NO: 216890
accuccacuggaauauuua

SEQ ID NO: 216892 - RNA, 19 nt, Artificial Sequence
  Description of Artificial Sequence: Synthetic oligonucleotide
  Sense strand starting at position 3493 of SEQ ID NO: 2793
ccacuuaaugaaugggcua

SEQ ID NO: 216893 - RNA, 19 nt, Artificial Sequence
  Description of Artificial Sequence: Synthetic oligonucleotide
  Antisense strand to SEQ ID NO: 216892
uagcccauucauuaagugg

SEQ ID NO: 216894 - RNA, 19 nt, Artificial Sequence
  Description of Artificial Sequence: Synthetic oligonucleotide
  Sense strand starting at position 3663 of SEQ ID NO: 2793
ccuauucuaccaugaggca

SEQ ID NO: 216895 - RNA, 19 nt, Artificial Sequence
  Description of Artificial Sequence: Synthetic oligonucleotide
  Antisense strand to SEQ ID NO: 216894
ugccucaugguagaauagg

SEQ ID NO: 216896 - RNA, 19 nt, Artificial Sequence
  Description of Artificial Sequence: Synthetic oligonucleotide
  Sense strand starting at position 3664 of SEQ ID NO: 2793
cuauucuaccaugaggcaa

SEQ ID NO: 216897 - RNA, 19 nt, Artificial Sequence
  Description of Artificial Sequence: Synthetic oligonucleotide
  Antisense strand to SEQ ID NO: 216896
uugccucaugguagaauag

SEQ ID NO: 216898 - RNA, 19 nt, Artificial Sequence
  Description of Artificial Sequence: Synthetic oligonucleotide
  Sense strand starting at position 3797 of SEQ ID NO: 2793
agauccuaugcuggagaua

SEQ ID NO: 216899 - RNA, 19 nt, Artificial Sequence
  Description of Artificial Sequence: Synthetic oligonucleotide
  Antisense strand to SEQ ID NO: 216898
uaucuccagcauaggaucu

SEQ ID NO: 216900 - RNA, 19 nt, Artificial Sequence
  Description of Artificial Sequence: Synthetic oligonucleotide
  Sense strand starting at position 3821 of SEQ ID NO: 2793
augauuaggcaagauugca

SEQ ID NO: 216901 - RNA, 19 nt, Artificial Sequence
  Description of Artificial Sequence: Synthetic oligonucleotide
  Antisense strand to SEQ ID NO: 216900
ugcaaucuugccuaaucau

SEQ ID NO: 216902 - RNA, 19 nt, Artificial Sequence
  Description of Artificial Sequence: Synthetic oligonucleotide
  Sense strand starting at position 3829 of SEQ ID NO: 2793
gcaagauugcaggacuugu

SEQ ID NO: 216903 - RNA, 19 nt, Artificial Sequence
  Description of Artificial Sequence: Synthetic oligonucleotide
  Antisense strand to SEQ ID NO: 216902
acaaguccugcaaucuugc

SEQ ID NO: 216904 - RNA, 19 nt, Artificial Sequence
  Description of Artificial Sequence: Synthetic oligonucleotide
  Sense strand starting at position 3879 of SEQ ID NO: 2793
ugcucagaucaguaguuua

SEQ ID NO: 216905 - RNA, 19 nt, Artificial Sequence
  Description of Artificial Sequence: Synthetic oligonucleotide
  Antisense strand to SEQ ID NO: 216904
uaaacuacugaucugagca

SEQ ID NO: 216906 - RNA, 19 nt, Artificial Sequence
  Description of Artificial Sequence: Synthetic oligonucleotide
  Sense strand starting at position 73 of SEQ ID NO: 2794
cgguauuccggucacggaa

SEQ ID NO: 216907 - RNA, 19 nt, Artificial Sequence
  Description of Artificial Sequence: Synthetic oligonucleotide
  Antisense strand to SEQ ID NO: 216906
uuccgugaccggaauaccg

SEQ ID NO: 216908 - RNA, 19 nt, Artificial Sequence
  Description of Artificial Sequence: Synthetic oligonucleotide
  Sense strand starting at position 128 of SEQ ID NO: 2794
cucgguucauugguagagu

SEQ ID NO: 216909 - RNA, 19 nt, Artificial Sequence
  Description of Artificial Sequence: Synthetic oligonucleotide
  Antisense strand to SEQ ID NO: 216908
acucuaccaaugaaccgag

SEQ ID NO: 216910 - RNA, 19 nt, Artificial Sequence
  Description of Artificial Sequence: Synthetic oligonucleotide
  Sense strand starting at position 131 of SEQ ID NO: 2794
gguucauugguagagucuu

SEQ ID NO: 216911 - RNA, 19 nt, Artificial Sequence
  Description of Artificial Sequence: Synthetic oligonucleotide
  Antisense strand to SEQ ID NO: 216910
aagacucuaccaaugaacc

SEQ ID NO: 216912 - RNA, 19 nt, Artificial Sequence
  Description of Artificial Sequence: Synthetic oligonucleotide
  Sense strand starting at position 143 of SEQ ID NO: 2794
gagucuuagugagcccaaa

SEQ ID NO: 216913 - RNA, 19 nt, Artificial Sequence
  Description of Artificial Sequence: Synthetic oligonucleotide
  Antisense strand to SEQ ID NO: 216912
uuugggcucacuaagacuc

SEQ ID NO: 216914 - RNA, 19 nt, Artificial Sequence
  Description of Artificial Sequence: Synthetic oligonucleotide
  Sense strand starting at position 168 of SEQ ID NO: 2794
uucccaacgagaugugagu

SEQ ID NO: 216915 - RNA, 19 nt, Artificial Sequence
  Description of Artificial Sequence: Synthetic oligonucleotide
  Antisense strand to SEQ ID NO: 216914
acucacaucucguugggaa

SEQ ID NO: 216916 - RNA, 19 nt, Artificial Sequence
  Description of Artificial Sequence: Synthetic oligonucleotide
  Sense strand starting at position 170 of SEQ ID NO: 2794
cccaacgagaugugaguua

SEQ ID NO: 216917 - RNA, 19 nt, Artificial Sequence
  Description of Artificial Sequence: Synthetic oligonucleotide
  Antisense strand to SEQ ID NO: 216916
uaacucacaucucguuggg

SEQ ID NO: 216918 - RNA, 19 nt, Artificial Sequence
  Description of Artificial Sequence: Synthetic oligonucleotide
  Sense strand starting at position 324 of SEQ ID NO: 2794
aggaaacuacugcaucagu

SEQ ID NO: 216919 - RNA, 19 nt, Artificial Sequence
  Description of Artificial Sequence: Synthetic oligonucleotide
  Antisense strand to SEQ ID NO: 216918
acugaugcaguaguuuccu

SEQ ID NO: 216920 - RNA, 19 nt, Artificial Sequence
  Description of Artificial Sequence: Synthetic oligonucleotide
  Sense strand starting at position 444 of SEQ ID NO: 2794
uuugcuuaggagcaaugua

SEQ ID NO: 216921 - RNA, 19 nt, Artificial Sequence
  Description of Artificial Sequence: Synthetic oligonucleotide
  Antisense strand to SEQ ID NO: 216920
uacauugcuccuaagcaaa

SEQ ID NO: 216922 - RNA, 19 nt, Artificial Sequence
  Description of Artificial Sequence: Synthetic oligonucleotide
  Sense strand starting at position 452 of SEQ ID NO: 2794
ggagcaauguaacuuugau

SEQ ID NO: 216923 - RNA, 19 nt, Artificial Sequence
  Description of Artificial Sequence: Synthetic oligonucleotide
  Antisense strand to SEQ ID NO: 216922
aucaaaguuacauugcucc

SEQ ID NO: 216924 - RNA, 19 nt, Artificial Sequence
  Description of Artificial Sequence: Synthetic oligonucleotide
  Sense strand starting at position 886 of SEQ ID NO: 2794
guccauccucagcaagaga

SEQ ID NO: 216925 - RNA, 19 nt, Artificial Sequence
  Description of Artificial Sequence: Synthetic oligonucleotide
  Antisense strand to SEQ ID NO: 216924
ucucuugcugaggauggac

SEQ ID NO: 216926 - RNA, 19 nt, Artificial Sequence
  Description of Artificial Sequence: Synthetic oligonucleotide
  Sense strand starting at position 1195 of SEQ ID NO: 2794
gcaccagaguuacuccaau

SEQ ID NO: 216927 - RNA, 19 nt, Artificial Sequence
  Description of Artificial Sequence: Synthetic oligonucleotide
  Antisense strand to SEQ ID NO: 216926
auuggaguaacucuggugc

SEQ ID NO: 216928 - RNA, 19 nt, Artificial Sequence
  Description of Artificial Sequence: Synthetic oligonucleotide
  Sense strand starting at position 1357 of SEQ ID NO: 2794
gagcuaugcuaguccucag

SEQ ID NO: 216929 - RNA, 19 nt, Artificial Sequence
  Description of Artificial Sequence: Synthetic oligonucleotide
  Antisense strand to SEQ ID NO: 216928
cugaggacuagcauagcuc

SEQ ID NO: 216930 - RNA, 19 nt, Artificial Sequence
  Description of Artificial Sequence: Synthetic oligonucleotide
  Sense strand starting at position 1360 of SEQ ID NO: 2794
cuaugcuaguccucagcaa

SEQ ID NO: 216931 - RNA, 19 nt, Artificial Sequence
  Description of Artificial Sequence: Synthetic oligonucleotide
  Antisense strand to SEQ ID NO: 216930
uugcugaggacuagcauag

SEQ ID NO: 216932 - RNA, 19 nt, Artificial Sequence
  Description of Artificial Sequence: Synthetic oligonucleotide
  Sense strand starting at position 1423 of SEQ ID NO: 2794
gcggcaguaacuuaaauaa

SEQ ID NO: 216933 - RNA, 19 nt, Artificial Sequence
  Description of Artificial Sequence: Synthetic oligonucleotide
  Antisense strand to SEQ ID NO: 216932
uuauuuaaguuacugccgc

SEQ ID NO: 216934 - RNA, 19 nt, Artificial Sequence
  Description of Artificial Sequence: Synthetic oligonucleotide
  Sense strand starting at position 1437 of SEQ ID NO: 2794
aauaaaucaugggccgaaa

SEQ ID NO: 216935 - RNA, 19 nt, Artificial Sequence
  Description of Artificial Sequence: Synthetic oligonucleotide
  Antisense strand to SEQ ID NO: 216934
uuucggcccaugauuuauu

SEQ ID NO: 216936 - RNA, 19 nt, Artificial Sequence
  Description of Artificial Sequence: Synthetic oligonucleotide
  Sense strand starting at position 1439 of SEQ ID NO: 2794
uaaaucaugggccgaaaca

SEQ ID NO: 216937 - RNA, 19 nt, Artificial Sequence
  Description of Artificial Sequence: Synthetic oligonucleotide
  Antisense strand to SEQ ID NO: 216936
uguuucggcccaugauuua

SEQ ID NO: 216938 - RNA, 19 nt, Artificial Sequence
  Description of Artificial Sequence: Synthetic oligonucleotide
  Sense strand starting at position 1555 of SEQ ID NO: 2794
aggaaaucccauugccaua

SEQ ID NO: 216939 - RNA, 19 nt, Artificial Sequence
  Description of Artificial Sequence: Synthetic oligonucleotide
  Antisense strand to SEQ ID NO: 216938
uauggcaaugggauuuccu

SEQ ID NO: 216940 - RNA, 19 nt, Artificial Sequence
  Description of Artificial Sequence: Synthetic oligonucleotide
  Sense strand starting at position 2271 of SEQ ID NO: 2794
uuggaauuucuucgugggu

SEQ ID NO: 216941 - RNA, 19 nt, Artificial Sequence
  Description of Artificial Sequence: Synthetic oligonucleotide
  Antisense strand to SEQ ID NO: 216940
acccacgaagaaauuccaa

SEQ ID NO: 216942 - RNA, 19 nt, Artificial Sequence
  Description of Artificial Sequence: Synthetic oligonucleotide
  Sense strand starting at position 2272 of SEQ ID NO: 2794
uggaauuucuucgugggua

SEQ ID NO: 216943 - RNA, 19 nt, Artificial Sequence
  Description of Artificial Sequence: Synthetic oligonucleotide
  Antisense strand to SEQ ID NO: 216942
uacccacgaagaaauucca

SEQ ID NO: 216944 - RNA, 19 nt, Artificial Sequence
  Description of Artificial Sequence: Synthetic oligonucleotide
  Sense strand starting at position 2274 of SEQ ID NO: 2794
gaauuucuucguggguauc

SEQ ID NO: 216945 - RNA, 19 nt, Artificial Sequence
  Description of Artificial Sequence: Synthetic oligonucleotide
  Antisense strand to SEQ ID NO: 216944
gauacccacgaagaaauuc

SEQ ID NO: 216946 - RNA, 19 nt, Artificial Sequence
  Description of Artificial Sequence: Synthetic oligonucleotide
  Sense strand starting at position 2550 of SEQ ID NO: 2794
cgcuuauaggcccauucua

SEQ ID NO: 216947 - RNA, 19 nt, Artificial Sequence
  Description of Artificial Sequence: Synthetic oligonucleotide
  Antisense strand to SEQ ID NO: 216946
uagaaugggccuauaagcg

SEQ ID NO: 216948 - RNA, 19 nt, Artificial Sequence
  Description of Artificial Sequence: Synthetic oligonucleotide
  Sense strand starting at position 2558 of SEQ ID NO: 2794
ggcccauucuaggcacaga

SEQ ID NO: 216949 - RNA, 19 nt, Artificial Sequence
  Description of Artificial Sequence: Synthetic oligonucleotide
  Antisense strand to SEQ ID NO: 216948
ucugugccuagaaugggcc

SEQ ID NO: 216950 - RNA, 19 nt, Artificial Sequence
  Description of Artificial Sequence: Synthetic oligonucleotide
  Sense strand starting at position 2599 of SEQ ID NO: 2794
uugccaaagcuucgggaaa

SEQ ID NO: 216951 - RNA, 19 nt, Artificial Sequence
  Description of Artificial Sequence: Synthetic oligonucleotide
  Antisense strand to SEQ ID NO: 216950
uuucccgaagcuuuggcaa

SEQ ID NO: 216952 - RNA, 19 nt, Artificial Sequence
  Description of Artificial Sequence: Synthetic oligonucleotide
  Sense strand starting at position 2626 of SEQ ID NO: 2794
guaagaacuucuguuucua

SEQ ID NO: 216953 - RNA, 19 nt, Artificial Sequence
  Description of Artificial Sequence: Synthetic oligonucleotide
  Antisense strand to SEQ ID NO: 216952
uagaaacagaaguucuuac

SEQ ID NO: 216954 - RNA, 19 nt, Artificial Sequence
  Description of Artificial Sequence: Synthetic oligonucleotide
  Sense strand starting at position 2641 of SEQ ID NO: 2794
ucuagaaagcuuugcacau

SEQ ID NO: 216955 - RNA, 19 nt, Artificial Sequence
  Description of Artificial Sequence: Synthetic oligonucleotide
  Antisense strand to SEQ ID NO: 216954
augugcaaagcuuucuaga

SEQ ID NO: 216956 - RNA, 19 nt, Artificial Sequence
  Description of Artificial Sequence: Synthetic oligonucleotide
  Sense strand starting at position 2642 of SEQ ID NO: 2794
cuagaaagcuuugcacauu

SEQ ID NO: 216957 - RNA, 19 nt, Artificial Sequence
  Description of Artificial Sequence: Synthetic oligonucleotide
  Antisense strand to SEQ ID NO: 216956
aaugugcaaagcuuucuag

SEQ ID NO: 216958 - RNA, 19 nt, Artificial Sequence
  Description of Artificial Sequence: Synthetic oligonucleotide
  Sense strand starting at position 2749 of SEQ ID NO: 2794
gugaaauuguggucccauu

SEQ ID NO: 216959 - RNA, 19 nt, Artificial Sequence
  Description of Artificial Sequence: Synthetic oligonucleotide
  Antisense strand to SEQ ID NO: 216958
aaugggaccacaauuucac

SEQ ID NO: 216960 - RNA, 19 nt, Artificial Sequence
  Description of Artificial Sequence: Synthetic oligonucleotide
  Sense strand starting at position 3201 of SEQ ID NO: 2794
gugacaucgucauugucca

SEQ ID NO: 216961 - RNA, 19 nt, Artificial Sequence
  Description of Artificial Sequence: Synthetic oligonucleotide
  Antisense strand to SEQ ID NO: 216960
uggacaaugacgaugucac

SEQ ID NO: 216962 - RNA, 19 nt, Artificial Sequence
  Description of Artificial Sequence: Synthetic oligonucleotide
  Sense strand starting at position 3214 of SEQ ID NO: 2794
uguccagucuggguuagua

SEQ ID NO: 216963 - RNA, 19 nt, Artificial Sequence
  Description of Artificial Sequence: Synthetic oligonucleotide
  Antisense strand to SEQ ID NO: 216962
uacuaacccagacuggaca

SEQ ID NO: 216964 - RNA, 19 nt, Artificial Sequence
  Description of Artificial Sequence: Synthetic oligonucleotide
  Sense strand starting at position 3224 of SEQ ID NO: 2794
ggguuaguaacagagcuca

SEQ ID NO: 216965 - RNA, 19 nt, Artificial Sequence
  Description of Artificial Sequence: Synthetic oligonucleotide
  Antisense strand to SEQ ID NO: 216964
ugagcucuguuacuaaccc

SEQ ID NO: 216966 - RNA, 19 nt, Artificial Sequence
  Description of Artificial Sequence: Synthetic oligonucleotide
  Sense strand starting at position 3287 of SEQ ID NO: 2794
cccaucaugugguccuuau

SEQ ID NO: 216967 - RNA, 19 nt, Artificial Sequence
  Description of Artificial Sequence: Synthetic oligonucleotide
  Antisense strand to SEQ ID NO: 216966
auaaggaccacaugauggg

SEQ ID NO: 216968 - RNA, 19 nt, Artificial Sequence
  Description of Artificial Sequence: Synthetic oligonucleotide
  Sense strand starting at position 3291 of SEQ ID NO: 2794
ucaugugguccuuaugaaa

SEQ ID NO: 216969 - RNA, 19 nt, Artificial Sequence
  Description of Artificial Sequence: Synthetic oligonucleotide
  Antisense strand to SEQ ID NO: 216968
uuucauaaggaccacauga

SEQ ID NO: 216970 - RNA, 19 nt, Artificial Sequence
  Description of Artificial Sequence: Synthetic oligonucleotide
  Sense strand starting at position 3426 of SEQ ID NO: 2794
ccuccaauuuagggaagaa

SEQ ID NO: 216971 - RNA, 19 nt, Artificial Sequence
  Description of Artificial Sequence: Synthetic oligonucleotide
  Antisense strand to SEQ ID NO: 216970
uucuucccuaaauuggagg

SEQ ID NO: 216972 - RNA, 19 nt, Artificial Sequence
  Description of Artificial Sequence: Synthetic oligonucleotide
  Sense strand starting at position 3621 of SEQ ID NO: 2794
agaggcuccgaguauagaa

SEQ ID NO: 216973 - RNA, 19 nt, Artificial Sequence
  Description of Artificial Sequence: Synthetic oligonucleotide
  Antisense strand to SEQ ID NO: 216972
uucuauacucggagccucu

SEQ ID NO: 216974 - RNA, 19 nt, Artificial Sequence
  Description of Artificial Sequence: Synthetic oligonucleotide
  Sense strand starting at position 3777 of SEQ ID NO: 2794
ugguuagagucugcaacuu

SEQ ID NO: 216975 - RNA, 19 nt, Artificial Sequence
  Description of Artificial Sequence: Synthetic oligonucleotide
  Antisense strand to SEQ ID NO: 216974
aaguugcagacucuaacca

SEQ ID NO: 216976 - RNA, 19 nt, Artificial Sequence
  Description of Artificial Sequence: Synthetic oligonucleotide
  Sense strand starting at position 3822 of SEQ ID NO: 2794
agaacauugucugcugcga

SEQ ID NO: 216977 - RNA, 19 nt, Artificial Sequence
  Description of Artificial Sequence: Synthetic oligonucleotide
  Antisense strand to SEQ ID NO: 216976
ucgcagcagacaauguucu

SEQ ID NO: 216978 - RNA, 19 nt, Artificial Sequence
  Description of Artificial Sequence: Synthetic oligonucleotide
  Sense strand starting at position 3978 of SEQ ID NO: 2794
gcagaugcauuccuuggua

SEQ ID NO: 216979 - RNA, 19 nt, Artificial Sequence
  Description of Artificial Sequence: Synthetic oligonucleotide
  Antisense strand to SEQ ID NO: 216978
uaccaaggaaugcaucugc

SEQ ID NO: 216980 - RNA, 19 nt, Artificial Sequence
  Description of Artificial Sequence: Synthetic oligonucleotide
  Sense strand starting at position 3980 of SEQ ID NO: 2794
agaugcauuccuugguauu

SEQ ID NO: 216981 - RNA, 19 nt, Artificial Sequence
  Description of Artificial Sequence: Synthetic oligonucleotide
  Antisense strand to SEQ ID NO: 216980
aauaccaaggaaugcaucu

SEQ ID NO: 216982 - RNA, 19 nt, Artificial Sequence
  Description of Artificial Sequence: Synthetic oligonucleotide
  Sense strand starting at position 3981 of SEQ ID NO: 2794
gaugcauuccuugguauug

SEQ ID NO: 216983 - RNA, 19 nt, Artificial Sequence
  Description of Artificial Sequence: Synthetic oligonucleotide
  Antisense strand to SEQ ID NO: 216982
caauaccaaggaaugcauc

SEQ ID NO: 216984 - RNA, 19 nt, Artificial Sequence
  Description of Artificial Sequence: Synthetic oligonucleotide
  Sense strand starting at position 3982 of SEQ ID NO: 2794
augcauuccuugguauuga

SEQ ID NO: 216985 - RNA, 19 nt, Artificial Sequence
  Description of Artificial Sequence: Synthetic oligonucleotide
  Antisense strand to SEQ ID NO: 216984
ucaauaccaaggaaugcau

SEQ ID NO: 216986 - RNA, 19 nt, Artificial Sequence
  Description of Artificial Sequence: Synthetic oligonucleotide
  Sense strand starting at position 141 of SEQ ID NO: 2795
ggguuaaacguggaauccu

SEQ ID NO: 216987 - RNA, 19 nt, Artificial Sequence
  Description of Artificial Sequence: Synthetic oligonucleotide
  Antisense strand to SEQ ID NO: 216986
aggauuccacguuuaaccc

SEQ ID NO: 216988 - RNA, 19 nt, Artificial Sequence
  Description of Artificial Sequence: Synthetic oligonucleotide
  Sense strand starting at position 150 of SEQ ID NO: 2795
guggaauccugagaggaaa

SEQ ID NO: 216989 - RNA, 19 nt, Artificial Sequence
  Description of Artificial Sequence: Synthetic oligonucleotide
  Antisense strand to SEQ ID NO: 216988
uuuccucucaggauuccac

SEQ ID NO: 216990 - RNA, 19 nt, Artificial Sequence
  Description of Artificial Sequence: Synthetic oligonucleotide
  Sense strand starting at position 631 of SEQ ID NO: 2795
ugaggagguuccucucacu

SEQ ID NO: 216991 - RNA, 19 nt, Artificial Sequence
  Description of Artificial Sequence: Synthetic oligonucleotide
  Antisense strand to SEQ ID NO: 216990
agugagaggaaccuccuca

SEQ ID NO: 216992 - RNA, 19 nt, Artificial Sequence
  Description of Artificial Sequence: Synthetic oligonucleotide
  Sense strand starting at position 751 of SEQ ID NO: 2795
gcuucuuaccaagagcaca

SEQ ID NO: 216993 - RNA, 19 nt, Artificial Sequence
  Description of Artificial Sequence: Synthetic oligonucleotide
  Antisense strand to SEQ ID NO: 216992
ugugcucuugguaagaagc

SEQ ID NO: 216994 - RNA, 19 nt, Artificial Sequence
  Description of Artificial Sequence: Synthetic oligonucleotide
  Sense strand starting at position 821 of SEQ ID NO: 2795
accggugugcucucuucua

SEQ ID NO: 216995 - RNA, 19 nt, Artificial Sequence
  Description of Artificial Sequence: Synthetic oligonucleotide
  Antisense strand to SEQ ID NO: 216994
uagaagagagcacaccggu

SEQ ID NO: 216996 - RNA, 19 nt, Artificial Sequence
  Description of Artificial Sequence: Synthetic oligonucleotide
  Sense strand starting at position 872 of SEQ ID NO: 2795
aucgaauagcugugaaaga

SEQ ID NO: 216997 - RNA, 19 nt, Artificial Sequence
  Description of Artificial Sequence: Synthetic oligonucleotide
  Antisense strand to SEQ ID NO: 216996
ucuuucacagcuauucgau

SEQ ID NO: 216998 - RNA, 19 nt, Artificial Sequence
  Description of Artificial Sequence: Synthetic oligonucleotide
  Sense strand starting at position 873 of SEQ ID NO: 2795
ucgaauagcugugaaagau

SEQ ID NO: 216999 - RNA, 19 nt, Artificial Sequence
  Description of Artificial Sequence: Synthetic oligonucleotide
  Antisense strand to SEQ ID NO: 216998
aucuuucacagcuauucga

SEQ ID NO: 217000 - RNA, 19 nt, Artificial Sequence
  Description of Artificial Sequence: Synthetic oligonucleotide
  Sense strand starting at position 944 of SEQ ID NO: 2795
uccagcuaugcacaugaga

SEQ ID NO: 217001 - RNA, 19 nt, Artificial Sequence
  Description of Artificial Sequence: Synthetic oligonucleotide
  Antisense strand to SEQ ID NO: 217000
ucucaugugcauagcugga

SEQ ID NO: 217002 - RNA, 19 nt, Artificial Sequence
  Description of Artificial Sequence: Synthetic oligonucleotide
  Sense strand starting at position 957 of SEQ ID NO: 2795
augagauggcuuuaaacgu

SEQ ID NO: 217003 - RNA, 19 nt, Artificial Sequence
  Description of Artificial Sequence: Synthetic oligonucleotide
  Antisense strand to SEQ ID NO: 217002
acguuuaaagccaucucau

SEQ ID NO: 217004 - RNA, 19 nt, Artificial Sequence
  Description of Artificial Sequence: Synthetic oligonucleotide
  Sense strand starting at position 1141 of SEQ ID NO: 2795
aaagucuuucccuggaaag

SEQ ID NO: 217005 - RNA, 19 nt, Artificial Sequence
  Description of Artificial Sequence: Synthetic oligonucleotide
  Antisense strand to SEQ ID NO: 217004
cuuuccagggaaagacuuu

SEQ ID NO: 217006 - RNA, 19 nt, Artificial Sequence
  Description of Artificial Sequence: Synthetic oligonucleotide
  Sense strand starting at position 1142 of SEQ ID NO: 2795
aagucuuucccuggaaagu

SEQ ID NO: 217007 - RNA, 19 nt, Artificial Sequence
  Description of Artificial Sequence: Synthetic oligonucleotide
  Antisense strand to SEQ ID NO: 217006
acuuuccagggaaagacuu

SEQ ID NO: 217008 - RNA, 19 nt, Artificial Sequence
  Description of Artificial Sequence: Synthetic oligonucleotide
  Sense strand starting at position 1143 of SEQ ID NO: 2795
agucuuucccuggaaaguu

SEQ ID NO: 217009 - RNA, 19 nt, Artificial Sequence
  Description of Artificial Sequence: Synthetic oligonucleotide
  Antisense strand to SEQ ID NO: 217008
aacuuuccagggaaagacu

SEQ ID NO: 217010 - RNA, 19 nt, Artificial Sequence
  Description of Artificial Sequence: Synthetic oligonucleotide
  Sense strand starting at position 1287 of SEQ ID NO: 2795
caggaacaaucgucagguu

SEQ ID NO: 217011 - RNA, 19 nt, Artificial Sequence
  Description of Artificial Sequence: Synthetic oligonucleotide
  Antisense strand to SEQ ID NO: 217010
aaccugacgauuguuccug

SEQ ID NO: 217012 - RNA, 19 nt, Artificial Sequence
  Description of Artificial Sequence: Synthetic oligonucleotide
  Sense strand starting at position 1326 of SEQ ID NO: 2795
gcgguuuggaauuagcgaa

SEQ ID NO: 217013 - RNA, 19 nt, Artificial Sequence
  Description of Artificial Sequence: Synthetic oligonucleotide
  Antisense strand to SEQ ID NO: 217012
uucgcuaauuccaaaccgc

SEQ ID NO: 217014 - RNA, 19 nt, Artificial Sequence
  Description of Artificial Sequence: Synthetic oligonucleotide
  Sense strand starting at position 1330 of SEQ ID NO: 2795
uuuggaauuagcgaagacu

SEQ ID NO: 217015 - RNA, 19 nt, Artificial Sequence
  Description of Artificial Sequence: Synthetic oligonucleotide
  Antisense strand to SEQ ID NO: 217014
agucuucgcuaauuccaaa

SEQ ID NO: 217016 - RNA, 19 nt, Artificial Sequence
  Description of Artificial Sequence: Synthetic oligonucleotide
  Sense strand starting at position 1333 of SEQ ID NO: 2795
ggaauuagcgaagacuguu

SEQ ID NO: 217017 - RNA, 19 nt, Artificial Sequence
  Description of Artificial Sequence: Synthetic oligonucleotide
  Antisense strand to SEQ ID NO: 217016
aacagucuucgcuaauucc

SEQ ID NO: 217018 - RNA, 19 nt, Artificial Sequence
  Description of Artificial Sequence: Synthetic oligonucleotide
  Sense strand starting at position 1428 of SEQ ID NO: 2795
cggaucccaucucaucaau

SEQ ID NO: 217019 - RNA, 19 nt, Artificial Sequence
  Description of Artificial Sequence: Synthetic oligonucleotide
  Antisense strand to SEQ ID NO: 217018
auugaugagaugggauccg

SEQ ID NO: 217020 - RNA, 19 nt, Artificial Sequence
  Description of Artificial Sequence: Synthetic oligonucleotide
  Sense strand starting at position 1441 of SEQ ID NO: 2795
aucaauaggcuccacgaau

SEQ ID NO: 217021 - RNA, 19 nt, Artificial Sequence
  Description of Artificial Sequence: Synthetic oligonucleotide
  Antisense strand to SEQ ID NO: 217020
auucguggagccuauugau

SEQ ID NO: 217022 - RNA, 19 nt, Artificial Sequence
  Description of Artificial Sequence: Synthetic oligonucleotide
  Sense strand starting at position 1486 of SEQ ID NO: 2795
gaacucuggugccagauuu

SEQ ID NO: 217023 - RNA, 19 nt, Artificial Sequence
  Description of Artificial Sequence: Synthetic oligonucleotide
  Antisense strand to SEQ ID NO: 217022
aaaucuggcaccagaguuc

SEQ ID NO: 217024 - RNA, 19 nt, Artificial Sequence
  Description of Artificial Sequence: Synthetic oligonucleotide
  Sense strand starting at position 2038 of SEQ ID NO: 2795
aagcaugacuacuguggaa

SEQ ID NO: 217025 - RNA, 19 nt, Artificial Sequence
  Description of Artificial Sequence: Synthetic oligonucleotide
  Antisense strand to SEQ ID NO: 217024
uuccacaguagucaugcuu

SEQ ID NO: 217026 - RNA, 19 nt, Artificial Sequence
  Description of Artificial Sequence: Synthetic oligonucleotide
  Sense strand starting at position 2040 of SEQ ID NO: 2795
gcaugacuacuguggaaau

SEQ ID NO: 217027 - RNA, 19 nt, Artificial Sequence
  Description of Artificial Sequence: Synthetic oligonucleotide
  Antisense strand to SEQ ID NO: 217026
auuuccacaguagucaugc

SEQ ID NO: 217028 - RNA, 19 nt, Artificial Sequence
  Description of Artificial Sequence: Synthetic oligonucleotide
  Sense strand starting at position 2041 of SEQ ID NO: 2795
caugacuacuguggaaauu

SEQ ID NO: 217029 - RNA, 19 nt, Artificial Sequence
  Description of Artificial Sequence: Synthetic oligonucleotide
  Antisense strand to SEQ ID NO: 217028
aauuuccacaguagucaug

SEQ ID NO: 217030 - RNA, 19 nt, Artificial Sequence
  Description of Artificial Sequence: Synthetic oligonucleotide
  Sense strand starting at position 2348 of SEQ ID NO: 2795
agcggaaccuucuuuaaga

SEQ ID NO: 217031 - RNA, 19 nt, Artificial Sequence
  Description of Artificial Sequence: Synthetic oligonucleotide
  Antisense strand to SEQ ID NO: 217030
ucuuaaagaagguuccgcu

SEQ ID NO: 217032 - RNA, 19 nt, Artificial Sequence
  Description of Artificial Sequence: Synthetic oligonucleotide
  Sense strand starting at position 2349 of SEQ ID NO: 2795
gcggaaccuucuuuaagaa

SEQ ID NO: 217033 - RNA, 19 nt, Artificial Sequence
  Description of Artificial Sequence: Synthetic oligonucleotide
  Antisense strand to SEQ ID NO: 217032
uucuuaaagaagguuccgc

SEQ ID NO: 217034 - RNA, 19 nt, Artificial Sequence
  Description of Artificial Sequence: Synthetic oligonucleotide
  Sense strand starting at position 2682 of SEQ ID NO: 2795
gccagaugguuucacagga

SEQ ID NO: 217035 - RNA, 19 nt, Artificial Sequence
  Description of Artificial Sequence: Synthetic oligonucleotide
  Antisense strand to SEQ ID NO: 217034
uccugugaaaccaucuggc

SEQ ID NO: 217036 - RNA, 19 nt, Artificial Sequence
  Description of Artificial Sequence: Synthetic oligonucleotide
  Sense strand starting at position 2798 of SEQ ID NO: 2795
aguugauuauuacccugau

SEQ ID NO: 217037 - RNA, 19 nt, Artificial Sequence
  Description of Artificial Sequence: Synthetic oligonucleotide
  Antisense strand to SEQ ID NO: 217036
aucaggguaauaaucaacu

SEQ ID NO: 217038 - RNA, 19 nt, Artificial Sequence
  Description of Artificial Sequence: Synthetic oligonucleotide
  Sense strand starting at position 2799 of SEQ ID NO: 2795
guugauuauuacccugaua

SEQ ID NO: 217039 - RNA, 19 nt, Artificial Sequence
  Description of Artificial Sequence: Synthetic oligonucleotide
  Antisense strand to SEQ ID NO: 217038
uaucaggguaauaaucaac

SEQ ID NO: 217040 - RNA, 19 nt, Artificial Sequence
  Description of Artificial Sequence: Synthetic oligonucleotide
  Sense strand starting at position 2954 of SEQ ID NO: 2795
ggguuucauccaggaaugu

SEQ ID NO: 217041 - RNA, 19 nt, Artificial Sequence
  Description of Artificial Sequence: Synthetic oligonucleotide
  Antisense strand to SEQ ID NO: 217040
acauuccuggaugaaaccc

SEQ ID NO: 217042 - RNA, 19 nt, Artificial Sequence
  Description of Artificial Sequence: Synthetic oligonucleotide
  Sense strand starting at position 2955 of SEQ ID NO: 2795
gguuucauccaggaaugug

SEQ ID NO: 217043 - RNA, 19 nt, Artificial Sequence
  Description of Artificial Sequence: Synthetic oligonucleotide
  Antisense strand to SEQ ID NO: 217042
cacauuccuggaugaaacc

SEQ ID NO: 217044 - RNA, 19 nt, Artificial Sequence
  Description of Artificial Sequence: Synthetic oligonucleotide
  Sense strand starting at position 2969 of SEQ ID NO: 2795
augugaggcuaugucaaua

SEQ ID NO: 217045 - RNA, 19 nt, Artificial Sequence
  Description of Artificial Sequence: Synthetic oligonucleotide
  Antisense strand to SEQ ID NO: 217044
uauugacauagccucacau

SEQ ID NO: 217046 - RNA, 19 nt, Artificial Sequence
  Description of Artificial Sequence: Synthetic oligonucleotide
  Sense strand starting at position 3142 of SEQ ID NO: 2795
uaaagagcaucugucaaag

SEQ ID NO: 217047 - RNA, 19 nt, Artificial Sequence
  Description of Artificial Sequence: Synthetic oligonucleotide
  Antisense strand to SEQ ID NO: 217046
cuuugacagaugcucuuua

SEQ ID NO: 217048 - RNA, 19 nt, Artificial Sequence
  Description of Artificial Sequence: Synthetic oligonucleotide
  Sense strand starting at position 3199 of SEQ ID NO: 2795
uggaauguuuccuuccuga

SEQ ID NO: 217049 - RNA, 19 nt, Artificial Sequence
  Description of Artificial Sequence: Synthetic oligonucleotide
  Antisense strand to SEQ ID NO: 217048
ucaggaaggaaacauucca

SEQ ID NO: 217050 - RNA, 19 nt, Artificial Sequence
  Description of Artificial Sequence: Synthetic oligonucleotide
  Sense strand starting at position 3204 of SEQ ID NO: 2795
uguuuccuuccugagauca

SEQ ID NO: 217051 - RNA, 19 nt, Artificial Sequence
  Description of Artificial Sequence: Synthetic oligonucleotide
  Antisense strand to SEQ ID NO: 217050
ugaucucaggaaggaaaca

SEQ ID NO: 217052 - RNA, 19 nt, Artificial Sequence
  Description of Artificial Sequence: Synthetic oligonucleotide
  Sense strand starting at position 3357 of SEQ ID NO: 2795
augacaugguugucuacuu

SEQ ID NO: 217053 - RNA, 19 nt, Artificial Sequence
  Description of Artificial Sequence: Synthetic oligonucleotide
  Antisense strand to SEQ ID NO: 217052
aaguagacaaccaugucau

SEQ ID NO: 217054 - RNA, 19 nt, Artificial Sequence
  Description of Artificial Sequence: Synthetic oligonucleotide
  Sense strand starting at position 3358 of SEQ ID NO: 2795
ugacaugguugucuacuua

SEQ ID NO: 217055 - RNA, 19 nt, Artificial Sequence
  Description of Artificial Sequence: Synthetic oligonucleotide
  Antisense strand to SEQ ID NO: 217054
uaaguagacaaccauguca

SEQ ID NO: 217056 - RNA, 19 nt, Artificial Sequence
  Description of Artificial Sequence: Synthetic oligonucleotide
  Sense strand starting at position 3412 of SEQ ID NO: 2795
cuauuaaaucagugugaca

SEQ ID NO: 217057 - RNA, 19 nt, Artificial Sequence
  Description of Artificial Sequence: Synthetic oligonucleotide
  Antisense strand to SEQ ID NO: 217056
ugucacacugauuuaauag

SEQ ID NO: 217058 - RNA, 19 nt, Artificial Sequence
  Description of Artificial Sequence: Synthetic oligonucleotide
  Sense strand starting at position 3688 of SEQ ID NO: 2795
ggugcagugaguugagguu

SEQ ID NO: 217059 - RNA, 19 nt, Artificial Sequence
  Description of Artificial Sequence: Synthetic oligonucleotide
  Antisense strand to SEQ ID NO: 217058
aaccucaacucacugcacc

SEQ ID NO: 217060 - RNA, 19 nt, Artificial Sequence
  Description of Artificial Sequence: Synthetic oligonucleotide
  Sense strand starting at position 3855 of SEQ ID NO: 2795
aaggaauacuuagguguaa

SEQ ID NO: 217061 - RNA, 19 nt, Artificial Sequence
  Description of Artificial Sequence: Synthetic oligonucleotide
  Antisense strand to SEQ ID NO: 217060
uuacaccuaaguauuccuu

SEQ ID NO: 217062 - RNA, 19 nt, Artificial Sequence
  Description of Artificial Sequence: Synthetic oligonucleotide
  Sense strand starting at position 3856 of SEQ ID NO: 2795
aggaauacuuagguguaaa

SEQ ID NO: 217063 - RNA, 19 nt, Artificial Sequence
  Description of Artificial Sequence: Synthetic oligonucleotide
  Antisense strand to SEQ ID NO: 217062
uuuacaccuaaguauuccu

SEQ ID NO: 217064 - RNA, 19 nt, Artificial Sequence
  Description of Artificial Sequence: Synthetic oligonucleotide
  Sense strand starting at position 3857 of SEQ ID NO: 2795
ggaauacuuagguguaaau

SEQ ID NO: 217065 - RNA, 19 nt, Artificial Sequence
  Description of Artificial Sequence: Synthetic oligonucleotide
  Antisense strand to SEQ ID NO: 217064
auuuacaccuaaguauucc

SEQ ID NO: 217066 - RNA, 19 nt, Artificial Sequence
  Description of Artificial Sequence: Synthetic oligonucleotide
  Sense strand starting at position 103 of SEQ ID NO: 2796
cuggccuuccucggugaga

SEQ ID NO: 217067 - RNA, 19 nt, Artificial Sequence
  Description of Artificial Sequence: Synthetic oligonucleotide
  Antisense strand to SEQ ID NO: 217066
ucucaccgaggaaggccag

SEQ ID NO: 217068 - RNA, 19 nt, Artificial Sequence
  Description of Artificial Sequence: Synthetic oligonucleotide
  Sense strand starting at position 104 of SEQ ID NO: 2796
uggccuuccucggugagau

SEQ ID NO: 217069 - RNA, 19 nt, Artificial Sequence
  Description of Artificial Sequence: Synthetic oligonucleotide
  Antisense strand to SEQ ID NO: 217068
aucucaccgaggaaggcca

SEQ ID NO: 217070 - RNA, 19 nt, Artificial Sequence
  Description of Artificial Sequence: Synthetic oligonucleotide
  Sense strand starting at position 105 of SEQ ID NO: 2796
ggccuuccucggugagauc

SEQ ID NO: 217071 - RNA, 19 nt, Artificial Sequence
  Description of Artificial Sequence: Synthetic oligonucleotide
  Antisense strand to SEQ ID NO: 217070
gaucucaccgaggaaggcc

SEQ ID NO: 217072 - RNA, 19 nt, Artificial Sequence
  Description of Artificial Sequence: Synthetic oligonucleotide
  Sense strand starting at position 117 of SEQ ID NO: 2796
ugagaucaguaaggagaga

SEQ ID NO: 217073 - RNA, 19 nt, Artificial Sequence
  Description of Artificial Sequence: Synthetic oligonucleotide
  Antisense strand to SEQ ID NO: 217072
ucucuccuuacugaucuca

SEQ ID NO: 217074 - RNA, 19 nt, Artificial Sequence
  Description of Artificial Sequence: Synthetic oligonucleotide
  Sense strand starting at position 197 of SEQ ID NO: 2796
gggugucauggacaucuga

SEQ ID NO: 217075 - RNA, 19 nt, Artificial Sequence
  Description of Artificial Sequence: Synthetic oligonucleotide
  Antisense strand to SEQ ID NO: 217074
ucagauguccaugacaccc

SEQ ID NO: 217076 - RNA, 19 nt, Artificial Sequence
  Description of Artificial Sequence: Synthetic oligonucleotide
  Sense strand starting at position 237 of SEQ ID NO: 2796
cgugcugaccucuuuguuu

SEQ ID NO: 217077 - RNA, 19 nt, Artificial Sequence
  Description of Artificial Sequence: Synthetic oligonucleotide
  Antisense strand to SEQ ID NO: 217076
aaacaaagaggucagcacg

SEQ ID NO: 217078 - RNA, 19 nt, Artificial Sequence
  Description of Artificial Sequence: Synthetic oligonucleotide
  Sense strand starting at position 391 of SEQ ID NO: 2796
ggugaaaccgcaugucuuc

SEQ ID NO: 217079 - RNA, 19 nt, Artificial Sequence
  Description of Artificial Sequence: Synthetic oligonucleotide
  Antisense strand to SEQ ID NO: 217078
gaagacaugcgguuucacc

SEQ ID NO: 217080 - RNA, 19 nt, Artificial Sequence
  Description of Artificial Sequence: Synthetic oligonucleotide
  Sense strand starting at position 837 of SEQ ID NO: 2796
gcagccuuucguuugguua

SEQ ID NO: 217081 - RNA, 19 nt, Artificial Sequence
  Description of Artificial Sequence: Synthetic oligonucleotide
  Antisense strand to SEQ ID NO: 217080
uaaccaaacgaaaggcugc

SEQ ID NO: 217082 - RNA, 19 nt, Artificial Sequence
  Description of Artificial Sequence: Synthetic oligonucleotide
  Sense strand starting at position 838 of SEQ ID NO: 2796
cagccuuucguuugguuaa

SEQ ID NO: 217083 - RNA, 19 nt, Artificial Sequence
  Description of Artificial Sequence: Synthetic oligonucleotide
  Antisense strand to SEQ ID NO: 217082
uuaaccaaacgaaaggcug

SEQ ID NO: 217084 - RNA, 19 nt, Artificial Sequence
  Description of Artificial Sequence: Synthetic oligonucleotide
  Sense strand starting at position 841 of SEQ ID NO: 2796
ccuuucguuugguuaauca

SEQ ID NO: 217085 - RNA, 19 nt, Artificial Sequence
  Description of Artificial Sequence: Synthetic oligonucleotide
  Antisense strand to SEQ ID NO: 217084
ugauuaaccaaacgaaagg

SEQ ID NO: 217086 - RNA, 19 nt, Artificial Sequence
  Description of Artificial Sequence: Synthetic oligonucleotide
  Sense strand starting at position 943 of SEQ ID NO: 2796
uuauuccuauuggaagaga

SEQ ID NO: 217087 - RNA, 19 nt, Artificial Sequence
  Description of Artificial Sequence: Synthetic oligonucleotide
  Antisense strand to SEQ ID NO: 217086
ucucuuccaauaggaauaa

SEQ ID NO: 217088 - RNA, 19 nt, Artificial Sequence
  Description of Artificial Sequence: Synthetic oligonucleotide
  Sense strand starting at position 1105 of SEQ ID NO: 2796
cagagaaagccuugaggca

SEQ ID NO: 217089 - RNA, 19 nt, Artificial Sequence
  Description of Artificial Sequence: Synthetic oligonucleotide
  Antisense strand to SEQ ID NO: 217088
ugccucaaggcuuucucug

SEQ ID NO: 217090 - RNA, 19 nt, Artificial Sequence
  Description of Artificial Sequence: Synthetic oligonucleotide
  Sense strand starting at position 1211 of SEQ ID NO: 2796
gguugcucuguaugagaca

SEQ ID NO: 217091 - RNA, 19 nt, Artificial Sequence
  Description of Artificial Sequence: Synthetic oligonucleotide
  Antisense strand to SEQ ID NO: 217090
ugucucauacagagcaacc

SEQ ID NO: 217092 - RNA, 19 nt, Artificial Sequence
  Description of Artificial Sequence: Synthetic oligonucleotide
  Sense strand starting at position 1272 of SEQ ID NO: 2796
gcucuugagacgggacuua

SEQ ID NO: 217093 - RNA, 19 nt, Artificial Sequence
  Description of Artificial Sequence: Synthetic oligonucleotide
  Antisense strand to SEQ ID NO: 217092
uaagucccgucucaagagc

SEQ ID NO: 217094 - RNA, 19 nt, Artificial Sequence
  Description of Artificial Sequence: Synthetic oligonucleotide
  Sense strand starting at position 1401 of SEQ ID NO: 2796
ggaugcagucuggaagcaa

SEQ ID NO: 217095 - RNA, 19 nt, Artificial Sequence
  Description of Artificial Sequence: Synthetic oligonucleotide
  Antisense strand to SEQ ID NO: 217094
uugcuuccagacugcaucc

SEQ ID NO: 217096 - RNA, 19 nt, Artificial Sequence
  Description of Artificial Sequence: Synthetic oligonucleotide
  Sense strand starting at position 1435 of SEQ ID NO: 2796
cugaucaguuaugugggaa

SEQ ID NO: 217097 - RNA, 19 nt, Artificial Sequence
  Description of Artificial Sequence: Synthetic oligonucleotide
  Antisense strand to SEQ ID NO: 217096
uucccacauaacugaucag

SEQ ID NO: 217098 - RNA, 19 nt, Artificial Sequence
  Description of Artificial Sequence: Synthetic oligonucleotide
  Sense strand starting at position 1436 of SEQ ID NO: 2796
ugaucaguuaugugggaaa

SEQ ID NO: 217099 - RNA, 19 nt, Artificial Sequence
  Description of Artificial Sequence: Synthetic oligonucleotide
  Antisense strand to SEQ ID NO: 217098
uuucccacauaacugauca

SEQ ID NO: 217100 - RNA, 19 nt, Artificial Sequence
  Description of Artificial Sequence: Synthetic oligonucleotide
  Sense strand starting at position 1438 of SEQ ID NO: 2796
aucaguuaugugggaaaug

SEQ ID NO: 217101 - RNA, 19 nt, Artificial Sequence
  Description of Artificial Sequence: Synthetic oligonucleotide
  Antisense strand to SEQ ID NO: 217100
cauuucccacauaacugau

SEQ ID NO: 217102 - RNA, 19 nt, Artificial Sequence
  Description of Artificial Sequence: Synthetic oligonucleotide
  Sense strand starting at position 1439 of SEQ ID NO: 2796
ucaguuaugugggaaauga

SEQ ID NO: 217103 - RNA, 19 nt, Artificial Sequence
  Description of Artificial Sequence: Synthetic oligonucleotide
  Antisense strand to SEQ ID NO: 217102
ucauuucccacauaacuga

SEQ ID NO: 217104 - RNA, 19 nt, Artificial Sequence
  Description of Artificial Sequence: Synthetic oligonucleotide
  Sense strand starting at position 1573 of SEQ ID NO: 2796
uuccgagucugagacacua

SEQ ID NO: 217105 - RNA, 19 nt, Artificial Sequence
  Description of Artificial Sequence: Synthetic oligonucleotide
  Antisense strand to SEQ ID NO: 217104
uagugucucagacucggaa

SEQ ID NO: 217106 - RNA, 19 nt, Artificial Sequence
  Description of Artificial Sequence: Synthetic oligonucleotide
  Sense strand starting at position 1575 of SEQ ID NO: 2796
ccgagucugagacacuaua

SEQ ID NO: 217107 - RNA, 19 nt, Artificial Sequence
  Description of Artificial Sequence: Synthetic oligonucleotide
  Antisense strand to SEQ ID NO: 217106
uauagugucucagacucgg

SEQ ID NO: 217108 - RNA, 19 nt, Artificial Sequence
  Description of Artificial Sequence: Synthetic oligonucleotide
  Sense strand starting at position 1588 of SEQ ID NO: 2796
acuauagacuccuauguga

SEQ ID NO: 217109 - RNA, 19 nt, Artificial Sequence
  Description of Artificial Sequence: Synthetic oligonucleotide
  Antisense strand to SEQ ID NO: 217108
ucacauaggagucuauagu

SEQ ID NO: 217110 - RNA, 19 nt, Artificial Sequence
  Description of Artificial Sequence: Synthetic oligonucleotide
  Sense strand starting at position 1775 of SEQ ID NO: 2796
ccgugagagcccugcuaca

SEQ ID NO: 217111 - RNA, 19 nt, Artificial Sequence
  Description of Artificial Sequence: Synthetic oligonucleotide
  Antisense strand to SEQ ID NO: 217110
uguagcagggcucucacgg

SEQ ID NO: 217112 - RNA, 19 nt, Artificial Sequence
  Description of Artificial Sequence: Synthetic oligonucleotide
  Sense strand starting at position 1803 of SEQ ID NO: 2796
ggagggugguccggacaga

SEQ ID NO: 217113 - RNA, 19 nt, Artificial Sequence
  Description of Artificial Sequence: Synthetic oligonucleotide
  Antisense strand to SEQ ID NO: 217112
ucuguccggaccacccucc

SEQ ID NO: 217114 - RNA, 19 nt, Artificial Sequence
  Description of Artificial Sequence: Synthetic oligonucleotide
  Sense strand starting at position 1804 of SEQ ID NO: 2796
gagggugguccggacagau

SEQ ID NO: 217115 - RNA, 19 nt, Artificial Sequence
  Description of Artificial Sequence: Synthetic oligonucleotide
  Antisense strand to SEQ ID NO: 217114
aucuguccggaccacccuc

SEQ ID NO: 217116 - RNA, 19 nt, Artificial Sequence
  Description of Artificial Sequence: Synthetic oligonucleotide
  Sense strand starting at position 2014 of SEQ ID NO: 2796
cuccaauggucacagacaa

SEQ ID NO: 217117 - RNA, 19 nt, Artificial Sequence
  Description of Artificial Sequence: Synthetic oligonucleotide
  Antisense strand to SEQ ID NO: 217116
uugucugugaccauuggag

SEQ ID NO: 217118 - RNA, 19 nt, Artificial Sequence
  Description of Artificial Sequence: Synthetic oligonucleotide
  Sense strand starting at position 2055 of SEQ ID NO: 2796
ggguuacugccaugaacau

SEQ ID NO: 217119 - RNA, 19 nt, Artificial Sequence
  Description of Artificial Sequence: Synthetic oligonucleotide
  Antisense strand to SEQ ID NO: 217118
auguucauggcaguaaccc

SEQ ID NO: 217120 - RNA, 19 nt, Artificial Sequence
  Description of Artificial Sequence: Synthetic oligonucleotide
  Sense strand starting at position 2056 of SEQ ID NO: 2796
gguuacugccaugaacauu

SEQ ID NO: 217121 - RNA, 19 nt, Artificial Sequence
  Description of Artificial Sequence: Synthetic oligonucleotide
  Antisense strand to SEQ ID NO: 217120
aauguucauggcaguaacc

SEQ ID NO: 217122 - RNA, 19 nt, Artificial Sequence
  Description of Artificial Sequence: Synthetic oligonucleotide
  Sense strand starting at position 2078 of SEQ ID NO: 2796
uguuaaauguccguuucca

SEQ ID NO: 217123 - RNA, 19 nt, Artificial Sequence
  Description of Artificial Sequence: Synthetic oligonucleotide
  Antisense strand to SEQ ID NO: 217122
uggaaacggacauuuaaca

SEQ ID NO: 217124 - RNA, 19 nt, Artificial Sequence
  Description of Artificial Sequence: Synthetic oligonucleotide
  Sense strand starting at position 2086 of SEQ ID NO: 2796
guccguuuccacugaggca

SEQ ID NO: 217125 - RNA, 19 nt, Artificial Sequence
  Description of Artificial Sequence: Synthetic oligonucleotide
  Antisense strand to SEQ ID NO: 217124
ugccucaguggaaacggac

SEQ ID NO: 217126 - RNA, 19 nt, Artificial Sequence
  Description of Artificial Sequence: Synthetic oligonucleotide
  Sense strand starting at position 2648 of SEQ ID NO: 2796
augagcuuuggcuacacua

SEQ ID NO: 217127 - RNA, 19 nt, Artificial Sequence
  Description of Artificial Sequence: Synthetic oligonucleotide
  Antisense strand to SEQ ID NO: 217126
uaguguagccaaagcucau

SEQ ID NO: 217128 - RNA, 19 nt, Artificial Sequence
  Description of Artificial Sequence: Synthetic oligonucleotide
  Sense strand starting at position 2661 of SEQ ID NO: 2796
acacuaugauggucuacau

SEQ ID NO: 217129 - RNA, 19 nt, Artificial Sequence
  Description of Artificial Sequence: Synthetic oligonucleotide
  Antisense strand to SEQ ID NO: 217128
auguagaccaucauagugu

SEQ ID NO: 217130 - RNA, 19 nt, Artificial Sequence
  Description of Artificial Sequence: Synthetic oligonucleotide
  Sense strand starting at position 2904 of SEQ ID NO: 2796
gcucccgacucuucugaga

SEQ ID NO: 217131 - RNA, 19 nt, Artificial Sequence
  Description of Artificial Sequence: Synthetic oligonucleotide
  Antisense strand to SEQ ID NO: 217130
ucucagaagagucgggagc

SEQ ID NO: 217132 - RNA, 19 nt, Artificial Sequence
  Description of Artificial Sequence: Synthetic oligonucleotide
  Sense strand starting at position 3138 of SEQ ID NO: 2796
ggaguuaauguguguauac

SEQ ID NO: 217133 - RNA, 19 nt, Artificial Sequence
  Description of Artificial Sequence: Synthetic oligonucleotide
  Antisense strand to SEQ ID NO: 217132
guauacacacauuaacucc

SEQ ID NO: 217134 - RNA, 19 nt, Artificial Sequence
  Description of Artificial Sequence: Synthetic oligonucleotide
  Sense strand starting at position 3139 of SEQ ID NO: 2796
gaguuaauguguguauaca

SEQ ID NO: 217135 - RNA, 19 nt, Artificial Sequence
  Description of Artificial Sequence: Synthetic oligonucleotide
  Antisense strand to SEQ ID NO: 217134
uguauacacacauuaacuc

SEQ ID NO: 217136 - RNA, 19 nt, Artificial Sequence
  Description of Artificial Sequence: Synthetic oligonucleotide
  Sense strand starting at position 3140 of SEQ ID NO: 2796
aguuaauguguguauacaa

SEQ ID NO: 217137 - RNA, 19 nt, Artificial Sequence
  Description of Artificial Sequence: Synthetic oligonucleotide
  Antisense strand to SEQ ID NO: 217136
uuguauacacacauuaacu

SEQ ID NO: 217138 - RNA, 19 nt, Artificial Sequence
  Description of Artificial Sequence: Synthetic oligonucleotide
  Sense strand starting at position 3161 of SEQ ID NO: 2796
acacaaugacgaggucuaa

SEQ ID NO: 217139 - RNA, 19 nt, Artificial Sequence
  Description of Artificial Sequence: Synthetic oligonucleotide
  Antisense strand to SEQ ID NO: 217138
uuagaccucgucauugugu

SEQ ID NO: 217140 - RNA, 19 nt, Artificial Sequence
  Description of Artificial Sequence: Synthetic oligonucleotide
  Sense strand starting at position 3299 of SEQ ID NO: 2796
ggguuuaagcaggauuccu

SEQ ID NO: 217141 - RNA, 19 nt, Artificial Sequence
  Description of Artificial Sequence: Synthetic oligonucleotide
  Antisense strand to SEQ ID NO: 217140
aggaauccugcuuaaaccc

SEQ ID NO: 217142 - RNA, 19 nt, Artificial Sequence
  Description of Artificial Sequence: Synthetic oligonucleotide
  Sense strand starting at position 3307 of SEQ ID NO: 2796
gcaggauuccuacacauua

SEQ ID NO: 217143 - RNA, 19 nt, Artificial Sequence
  Description of Artificial Sequence: Synthetic oligonucleotide
  Antisense strand to SEQ ID NO: 217142
uaauguguaggaauccugc

SEQ ID NO: 217144 - RNA, 19 nt, Artificial Sequence
  Description of Artificial Sequence: Synthetic oligonucleotide
  Sense strand starting at position 3565 of SEQ ID NO: 2796
gcugaagugaucugccucu

SEQ ID NO: 217145 - RNA, 19 nt, Artificial Sequence
  Description of Artificial Sequence: Synthetic oligonucleotide
  Antisense strand to SEQ ID NO: 217144
agaggcagaucacuucagc

SEQ ID NO: 217146 - RNA, 19 nt, Artificial Sequence
  Description of Artificial Sequence: Synthetic oligonucleotide
  Sense strand starting at position 41 of SEQ ID NO: 2797
ugaacaaacucgugugcca

SEQ ID NO: 217147 - RNA, 19 nt, Artificial Sequence
  Description of Artificial Sequence: Synthetic oligonucleotide
  Antisense strand to SEQ ID NO: 217146
uggcacacgaguuuguuca

SEQ ID NO: 217148 - RNA, 19 nt, Artificial Sequence
  Description of Artificial Sequence: Synthetic oligonucleotide
  Sense strand starting at position 150 of SEQ ID NO: 2797
ccuggcuuguucuacacaa

SEQ ID NO: 217149 - RNA, 19 nt, Artificial Sequence
  Description of Artificial Sequence: Synthetic oligonucleotide
  Antisense strand to SEQ ID NO: 217148
uuguguagaacaagccagg

SEQ ID NO: 217150 - RNA, 19 nt, Artificial Sequence
  Description of Artificial Sequence: Synthetic oligonucleotide
  Sense strand starting at position 188 of SEQ ID NO: 2797
gccgucaggugucagaaga

SEQ ID NO: 217151 - RNA, 19 nt, Artificial Sequence
  Description of Artificial Sequence: Synthetic oligonucleotide
  Antisense strand to SEQ ID NO: 217150
ucuucugacaccugacggc

SEQ ID NO: 217152 - RNA, 19 nt, Artificial Sequence
  Description of Artificial Sequence: Synthetic oligonucleotide
  Sense strand starting at position 264 of SEQ ID NO: 2797
uuuaaagaauggcaguaaa

SEQ ID NO: 217153 - RNA, 19 nt, Artificial Sequence
  Description of Artificial Sequence: Synthetic oligonucleotide
  Antisense strand to SEQ ID NO: 217152
uuuacugccauucuuuaaa

SEQ ID NO: 217154 - RNA, 19 nt, Artificial Sequence
  Description of Artificial Sequence: Synthetic oligonucleotide
  Sense strand starting at position 435 of SEQ ID NO: 2797
aaauuagccgggcguugau

SEQ ID NO: 217155 - RNA, 19 nt, Artificial Sequence
  Description of Artificial Sequence: Synthetic oligonucleotide
  Antisense strand to SEQ ID NO: 217154
aucaacgcccggcuaauuu

SEQ ID NO: 217156 - RNA, 19 nt, Artificial Sequence
  Description of Artificial Sequence: Synthetic oligonucleotide
  Sense strand starting at position 653 of SEQ ID NO: 2797
ucauauuucugggaaacac

SEQ ID NO: 217157 - RNA, 19 nt, Artificial Sequence
  Description of Artificial Sequence: Synthetic oligonucleotide
  Antisense strand to SEQ ID NO: 217156
guguuucccagaaauauga

SEQ ID NO: 217158 - RNA, 19 nt, Artificial Sequence
  Description of Artificial Sequence: Synthetic oligonucleotide
  Sense strand starting at position 753 of SEQ ID NO: 2797
aguugucauucucucuaaa

SEQ ID NO: 217159 - RNA, 19 nt, Artificial Sequence
  Description of Artificial Sequence: Synthetic oligonucleotide
  Antisense strand to SEQ ID NO: 217158
uuuagagagaaugacaacu

SEQ ID NO: 217160 - RNA, 19 nt, Artificial Sequence
  Description of Artificial Sequence: Synthetic oligonucleotide
  Sense strand starting at position 756 of SEQ ID NO: 2797
ugucauucucucuaaaugu

SEQ ID NO: 217161 - RNA, 19 nt, Artificial Sequence
  Description of Artificial Sequence: Synthetic oligonucleotide
  Antisense strand to SEQ ID NO: 217160
acauuuagagagaaugaca

SEQ ID NO: 217162 - RNA, 19 nt, Artificial Sequence
  Description of Artificial Sequence: Synthetic oligonucleotide
  Sense strand starting at position 825 of SEQ ID NO: 2797
ucugaaauggccuggaaug

SEQ ID NO: 217163 - RNA, 19 nt, Artificial Sequence
  Description of Artificial Sequence: Synthetic oligonucleotide
  Antisense strand to SEQ ID NO: 217162
cauuccaggccauuucaga

SEQ ID NO: 217164 - RNA, 19 nt, Artificial Sequence
  Description of Artificial Sequence: Synthetic oligonucleotide
  Sense strand starting at position 889 of SEQ ID NO: 2797
ugacucgugugcucaggaa

SEQ ID NO: 217165 - RNA, 19 nt, Artificial Sequence
  Description of Artificial Sequence: Synthetic oligonucleotide
  Antisense strand to SEQ ID NO: 217164
uuccugagcacacgaguca

SEQ ID NO: 217166 - RNA, 19 nt, Artificial Sequence
  Description of Artificial Sequence: Synthetic oligonucleotide
  Sense strand starting at position 893 of SEQ ID NO: 2797
ucgugugcucaggaagauu

SEQ ID NO: 217167 - RNA, 19 nt, Artificial Sequence
  Description of Artificial Sequence: Synthetic oligonucleotide
  Antisense strand to SEQ ID NO: 217166
aaucuuccugagcacacga

SEQ ID NO: 217168 - RNA, 19 nt, Artificial Sequence
  Description of Artificial Sequence: Synthetic oligonucleotide
  Sense strand starting at position 984 of SEQ ID NO: 2797
gcgcgugcuguguuucuca

SEQ ID NO: 217169 - RNA, 19 nt, Artificial Sequence
  Description of Artificial Sequence: Synthetic oligonucleotide
  Antisense strand to SEQ ID NO: 217168
ugagaaacacagcacgcgc

SEQ ID NO: 217170 - RNA, 19 nt, Artificial Sequence
  Description of Artificial Sequence: Synthetic oligonucleotide
  Sense strand starting at position 986 of SEQ ID NO: 2797
gcgugcuguguuucucaga

SEQ ID NO: 217171 - RNA, 19 nt, Artificial Sequence
  Description of Artificial Sequence: Synthetic oligonucleotide
  Antisense strand to SEQ ID NO: 217170
ucugagaaacacagcacgc

SEQ ID NO: 217172 - RNA, 19 nt, Artificial Sequence
  Description of Artificial Sequence: Synthetic oligonucleotide
  Sense strand starting at position 989 of SEQ ID NO: 2797
ugcuguguuucucagacca

SEQ ID NO: 217173 - RNA, 19 nt, Artificial Sequence
  Description of Artificial Sequence: Synthetic oligonucleotide
  Antisense strand to SEQ ID NO: 217172
uggucugagaaacacagca

SEQ ID NO: 217174 - RNA, 19 nt, Artificial Sequence
  Description of Artificial Sequence: Synthetic oligonucleotide
  Sense strand starting at position 991 of SEQ ID NO: 2797
cuguguuucucagaccaga

SEQ ID NO: 217175 - RNA, 19 nt, Artificial Sequence
  Description of Artificial Sequence: Synthetic oligonucleotide
  Antisense strand to SEQ ID NO: 217174
ucuggucugagaaacacag

SEQ ID NO: 217176 - RNA, 19 nt, Artificial Sequence
  Description of Artificial Sequence: Synthetic oligonucleotide
  Sense strand starting at position 1112 of SEQ ID NO: 2797
ugucuaaugaauggugacu

SEQ ID NO: 217177 - RNA, 19 nt, Artificial Sequence
  Description of Artificial Sequence: Synthetic oligonucleotide
  Antisense strand to SEQ ID NO: 217176
agucaccauucauuagaca

SEQ ID NO: 217178 - RNA, 19 nt, Artificial Sequence
  Description of Artificial Sequence: Synthetic oligonucleotide
  Sense strand starting at position 1135 of SEQ ID NO: 2797
gugugucuguuuccuuaga

SEQ ID NO: 217179 - RNA, 19 nt, Artificial Sequence
  Description of Artificial Sequence: Synthetic oligonucleotide
  Antisense strand to SEQ ID NO: 217178
ucuaaggaaacagacacac

SEQ ID NO: 217180 - RNA, 19 nt, Artificial Sequence
  Description of Artificial Sequence: Synthetic oligonucleotide
  Sense strand starting at position 1136 of SEQ ID NO: 2797
ugugucuguuuccuuagaa

SEQ ID NO: 217181 - RNA, 19 nt, Artificial Sequence
  Description of Artificial Sequence: Synthetic oligonucleotide
  Antisense strand to SEQ ID NO: 217180
uucuaaggaaacagacaca

SEQ ID NO: 217182 - RNA, 19 nt, Artificial Sequence
  Description of Artificial Sequence: Synthetic oligonucleotide
  Sense strand starting at position 1137 of SEQ ID NO: 2797
gugucuguuuccuuagaag

SEQ ID NO: 217183 - RNA, 19 nt, Artificial Sequence
  Description of Artificial Sequence: Synthetic oligonucleotide
  Antisense strand to SEQ ID NO: 217182
cuucuaaggaaacagacac

SEQ ID NO: 217184 - RNA, 19 nt, Artificial Sequence
  Description of Artificial Sequence: Synthetic oligonucleotide
  Sense strand starting at position 1237 of SEQ ID NO: 2797
gaugaagucugcuggcaca

SEQ ID NO: 217185 - RNA, 19 nt, Artificial Sequence
  Description of Artificial Sequence: Synthetic oligonucleotide
  Antisense strand to SEQ ID NO: 217184
ugugccagcagacuucauc

SEQ ID NO: 217186 - RNA, 19 nt, Artificial Sequence
  Description of Artificial Sequence: Synthetic oligonucleotide
  Sense strand starting at position 1290 of SEQ ID NO: 2797
caugcuggguauccugaau

SEQ ID NO: 217187 - RNA, 19 nt, Artificial Sequence
  Description of Artificial Sequence: Synthetic oligonucleotide
  Antisense strand to SEQ ID NO: 217186
auucaggauacccagcaug

SEQ ID NO: 217188 - RNA, 19 nt, Artificial Sequence
  Description of Artificial Sequence: Synthetic oligonucleotide
  Sense strand starting at position 1417 of SEQ ID NO: 2797
caggguuagugcuuuguaa

SEQ ID NO: 217189 - RNA, 19 nt, Artificial Sequence
  Description of Artificial Sequence: Synthetic oligonucleotide
  Antisense strand to SEQ ID NO: 217188
uuacaaagcacuaacccug

SEQ ID NO: 217190 - RNA, 19 nt, Artificial Sequence
  Description of Artificial Sequence: Synthetic oligonucleotide
  Sense strand starting at position 1419 of SEQ ID NO: 2797
ggguuagugcuuuguaagu

SEQ ID NO: 217191 - RNA, 19 nt, Artificial Sequence
  Description of Artificial Sequence: Synthetic oligonucleotide
  Antisense strand to SEQ ID NO: 217190
acuuacaaagcacuaaccc

SEQ ID NO: 217192 - RNA, 19 nt, Artificial Sequence
  Description of Artificial Sequence: Synthetic oligonucleotide
  Sense strand starting at position 1425 of SEQ ID NO: 2797
gugcuuuguaagucacugu

SEQ ID NO: 217193 - RNA, 19 nt, Artificial Sequence
  Description of Artificial Sequence: Synthetic oligonucleotide
  Antisense strand to SEQ ID NO: 217192
acagugacuuacaaagcac

SEQ ID NO: 217194 - RNA, 19 nt, Artificial Sequence
  Description of Artificial Sequence: Synthetic oligonucleotide
  Sense strand starting at position 1999 of SEQ ID NO: 2797
cugagagagccguaggcau

SEQ ID NO: 217195 - RNA, 19 nt, Artificial Sequence
  Description of Artificial Sequence: Synthetic oligonucleotide
  Antisense strand to SEQ ID NO: 217194
augccuacggcucucucag

SEQ ID NO: 217196 - RNA, 19 nt, Artificial Sequence
  Description of Artificial Sequence: Synthetic oligonucleotide
  Sense strand starting at position 2010 of SEQ ID NO: 2797
guaggcauccaacaguuua

SEQ ID NO: 217197 - RNA, 19 nt, Artificial Sequence
  Description of Artificial Sequence: Synthetic oligonucleotide
  Antisense strand to SEQ ID NO: 217196
uaaacuguuggaugccuac

SEQ ID NO: 217198 - RNA, 19 nt, Artificial Sequence
  Description of Artificial Sequence: Synthetic oligonucleotide
  Sense strand starting at position 2277 of SEQ ID NO: 2797
uuugucuuucguggugacu

SEQ ID NO: 217199 - RNA, 19 nt, Artificial Sequence
  Description of Artificial Sequence: Synthetic oligonucleotide
  Antisense strand to SEQ ID NO: 217198
agucaccacgaaagacaaa

SEQ ID NO: 217200 - RNA, 19 nt, Artificial Sequence
  Description of Artificial Sequence: Synthetic oligonucleotide
  Sense strand starting at position 2300 of SEQ ID NO: 2797
ugaucauggguuugaaucu

SEQ ID NO: 217201 - RNA, 19 nt, Artificial Sequence
  Description of Artificial Sequence: Synthetic oligonucleotide
  Antisense strand to SEQ ID NO: 217200
agauucaaacccaugauca

SEQ ID NO: 217202 - RNA, 19 nt, Artificial Sequence
  Description of Artificial Sequence: Synthetic oligonucleotide
  Sense strand starting at position 2301 of SEQ ID NO: 2797
gaucauggguuugaaucua

SEQ ID NO: 217203 - RNA, 19 nt, Artificial Sequence
  Description of Artificial Sequence: Synthetic oligonucleotide
  Antisense strand to SEQ ID NO: 217202
uagauucaaacccaugauc

SEQ ID NO: 217204 - RNA, 19 nt, Artificial Sequence
  Description of Artificial Sequence: Synthetic oligonucleotide
  Sense strand starting at position 2852 of SEQ ID NO: 2797
cuucuuggguucuguaauu

SEQ ID NO: 217205 - RNA, 19 nt, Artificial Sequence
  Description of Artificial Sequence: Synthetic oligonucleotide
  Antisense strand to SEQ ID NO: 217204
aauuacagaacccaagaag

SEQ ID NO: 217206 - RNA, 19 nt, Artificial Sequence
  Description of Artificial Sequence: Synthetic oligonucleotide
  Sense strand starting at position 2928 of SEQ ID NO: 2797
guugccucugcuuuguaga

SEQ ID NO: 217207 - RNA, 19 nt, Artificial Sequence
  Description of Artificial Sequence: Synthetic oligonucleotide
  Antisense strand to SEQ ID NO: 217206
ucuacaaagcagaggcaac

SEQ ID NO: 217208 - RNA, 19 nt, Artificial Sequence
  Description of Artificial Sequence: Synthetic oligonucleotide
  Sense strand starting at position 2929 of SEQ ID NO: 2797
uugccucugcuuuguagaa

SEQ ID NO: 217209 - RNA, 19 nt, Artificial Sequence
  Description of Artificial Sequence: Synthetic oligonucleotide
  Antisense strand to SEQ ID NO: 217208
uucuacaaagcagaggcaa

SEQ ID NO: 217210 - RNA, 19 nt, Artificial Sequence
  Description of Artificial Sequence: Synthetic oligonucleotide
  Sense strand starting at position 2939 of SEQ ID NO: 2797
uuuguagaagcuggucauu

SEQ ID NO: 217211 - RNA, 19 nt, Artificial Sequence
  Description of Artificial Sequence: Synthetic oligonucleotide
  Antisense strand to SEQ ID NO: 217210
aaugaccagcuucuacaaa

SEQ ID NO: 217212 - RNA, 19 nt, Artificial Sequence
  Description of Artificial Sequence: Synthetic oligonucleotide
  Sense strand starting at position 3040 of SEQ ID NO: 2797
aucucuauccgggagcaga

SEQ ID NO: 217213 - RNA, 19 nt, Artificial Sequence
  Description of Artificial Sequence: Synthetic oligonucleotide
  Antisense strand to SEQ ID NO: 217212
ucugcucccggauagagau

SEQ ID NO: 217214 - RNA, 19 nt, Artificial Sequence
  Description of Artificial Sequence: Synthetic oligonucleotide
  Sense strand starting at position 3183 of SEQ ID NO: 2797
agcacacuuugggaacuua

SEQ ID NO: 217215 - RNA, 19 nt, Artificial Sequence
  Description of Artificial Sequence: Synthetic oligonucleotide
  Antisense strand to SEQ ID NO: 217214
uaaguucccaaagugugcu

SEQ ID NO: 217216 - RNA, 19 nt, Artificial Sequence
  Description of Artificial Sequence: Synthetic oligonucleotide
  Sense strand starting at position 3349 of SEQ ID NO: 2797
agggcugaguugcaaauaa

SEQ ID NO: 217217 - RNA, 19 nt, Artificial Sequence
  Description of Artificial Sequence: Synthetic oligonucleotide
  Antisense strand to SEQ ID NO: 217216
uuauuugcaacucagcccu

SEQ ID NO: 217218 - RNA, 19 nt, Artificial Sequence
  Description of Artificial Sequence: Synthetic oligonucleotide
  Sense strand starting at position 3384 of SEQ ID NO: 2797
uuaggaauuccauggccga

SEQ ID NO: 217219 - RNA, 19 nt, Artificial Sequence
  Description of Artificial Sequence: Synthetic oligonucleotide
  Antisense strand to SEQ ID NO: 217218
ucggccauggaauuccuaa

SEQ ID NO: 217220 - RNA, 19 nt, Artificial Sequence
  Description of Artificial Sequence: Synthetic oligonucleotide
  Sense strand starting at position 3385 of SEQ ID NO: 2797
uaggaauuccauggccgaa

SEQ ID NO: 217221 - RNA, 19 nt, Artificial Sequence
  Description of Artificial Sequence: Synthetic oligonucleotide
  Antisense strand to SEQ ID NO: 217220
uucggccauggaauuccua

SEQ ID NO: 217222 - RNA, 19 nt, Artificial Sequence
  Description of Artificial Sequence: Synthetic oligonucleotide
  Sense strand starting at position 3909 of SEQ ID NO: 2797
cugagaagcuuccacagca

SEQ ID NO: 217223 - RNA, 19 nt, Artificial Sequence
  Description of Artificial Sequence: Synthetic oligonucleotide
  Antisense strand to SEQ ID NO: 217222
ugcuguggaagcuucucag

SEQ ID NO: 217224 - RNA, 19 nt, Artificial Sequence
  Description of Artificial Sequence: Synthetic oligonucleotide
  Sense strand starting at position 3970 of SEQ ID NO: 2797
gucagugagccuugauuga

SEQ ID NO: 217225 - RNA, 19 nt, Artificial Sequence
  Description of Artificial Sequence: Synthetic oligonucleotide
  Antisense strand to SEQ ID NO: 217224
ucaaucaaggcucacugac

SEQ ID NO: 217226 - RNA, 19 nt, Artificial Sequence
  Description of Artificial Sequence: Synthetic oligonucleotide
  Sense strand starting at position 611 of SEQ ID NO: 2798
uacuuagaaugucuaggau

SEQ ID NO: 217227 - RNA, 19 nt, Artificial Sequence
  Description of Artificial Sequence: Synthetic oligonucleotide
  Antisense strand to SEQ ID NO: 217226
auccuagacauucuaagua

SEQ ID NO: 217228 - RNA, 19 nt, Artificial Sequence
  Description of Artificial Sequence: Synthetic oligonucleotide
  Sense strand starting at position 867 of SEQ ID NO: 2798
cuggaccuguuucuuaaau

SEQ ID NO: 217229 - RNA, 19 nt, Artificial Sequence
  Description of Artificial Sequence: Synthetic oligonucleotide
  Antisense strand to SEQ ID NO: 217228
auuuaagaaacagguccag

SEQ ID NO: 217230 - RNA, 19 nt, Artificial Sequence
  Description of Artificial Sequence: Synthetic oligonucleotide
  Sense strand starting at position 868 of SEQ ID NO: 2798
uggaccuguuucuuaaauc

SEQ ID NO: 217231 - RNA, 19 nt, Artificial Sequence
  Description of Artificial Sequence: Synthetic oligonucleotide
  Antisense strand to SEQ ID NO: 217230
gauuuaagaaacaggucca

SEQ ID NO: 217232 - RNA, 19 nt, Artificial Sequence
  Description of Artificial Sequence: Synthetic oligonucleotide
  Sense strand starting at position 893 of SEQ ID NO: 2798
auggguguccacuauauaa

SEQ ID NO: 217233 - RNA, 19 nt, Artificial Sequence
  Description of Artificial Sequence: Synthetic oligonucleotide
  Antisense strand to SEQ ID NO: 217232
uuauauaguggacacccau

SEQ ID NO: 217234 - RNA, 19 nt, Artificial Sequence
  Description of Artificial Sequence: Synthetic oligonucleotide
  Sense strand starting at position 1005 of SEQ ID NO: 2798
acaguuugucucuagagua

SEQ ID NO: 217235 - RNA, 19 nt, Artificial Sequence
  Description of Artificial Sequence: Synthetic oligonucleotide
  Antisense strand to SEQ ID NO: 217234
uacucuagagacaaacugu

SEQ ID NO: 217236 - RNA, 19 nt, Artificial Sequence
  Description of Artificial Sequence: Synthetic oligonucleotide
  Sense strand starting at position 1015 of SEQ ID NO: 2798
ucuagaguacauugacacu

SEQ ID NO: 217237 - RNA, 19 nt, Artificial Sequence
  Description of Artificial Sequence: Synthetic oligonucleotide
  Antisense strand to SEQ ID NO: 217236
agugucaauguacucuaga

SEQ ID NO: 217238 - RNA, 19 nt, Artificial Sequence
  Description of Artificial Sequence: Synthetic oligonucleotide
  Sense strand starting at position 1047 of SEQ ID NO: 2798
uaguucucggucuaaauag

SEQ ID NO: 217239 - RNA, 19 nt, Artificial Sequence
  Description of Artificial Sequence: Synthetic oligonucleotide
  Antisense strand to SEQ ID NO: 217238
cuauuuagaccgagaacua

SEQ ID NO: 217240 - RNA, 19 nt, Artificial Sequence
  Description of Artificial Sequence: Synthetic oligonucleotide
  Sense strand starting at position 1072 of SEQ ID NO: 2798
ccaauaugaugguuauuag

SEQ ID NO: 217241 - RNA, 19 nt, Artificial Sequence
  Description of Artificial Sequence: Synthetic oligonucleotide
  Antisense strand to SEQ ID NO: 217240
cuaauaaccaucauauugg

SEQ ID NO: 217242 - RNA, 19 nt, Artificial Sequence
  Description of Artificial Sequence: Synthetic oligonucleotide
  Sense strand starting at position 1075 of SEQ ID NO: 2798
auaugaugguuauuagcca

SEQ ID NO: 217243 - RNA, 19 nt, Artificial Sequence
  Description of Artificial Sequence: Synthetic oligonucleotide
  Antisense strand to SEQ ID NO: 217242
uggcuaauaaccaucauau

SEQ ID NO: 217244 - RNA, 19 nt, Artificial Sequence
  Description of Artificial Sequence: Synthetic oligonucleotide
  Sense strand starting at position 1082 of SEQ ID NO: 2798
gguuauuagccauauguga

SEQ ID NO: 217245 - RNA, 19 nt, Artificial Sequence
  Description of Artificial Sequence: Synthetic oligonucleotide
  Antisense strand to SEQ ID NO: 217244
ucacauauggcuaauaacc

SEQ ID NO: 217246 - RNA, 19 nt, Artificial Sequence
  Description of Artificial Sequence: Synthetic oligonucleotide
  Sense strand starting at position 1197 of SEQ ID NO: 2798
gucaauauucuguauauug

SEQ ID NO: 217247 - RNA, 19 nt, Artificial Sequence
  Description of Artificial Sequence: Synthetic oligonucleotide
  Antisense strand to SEQ ID NO: 217246
caauauacagaauauugac

SEQ ID NO: 217248 - RNA, 19 nt, Artificial Sequence
  Description of Artificial Sequence: Synthetic oligonucleotide
  Sense strand starting at position 1205 of SEQ ID NO: 2798
ucuguauauugauuacaug

SEQ ID NO: 217249 - RNA, 19 nt, Artificial Sequence
  Description of Artificial Sequence: Synthetic oligonucleotide
  Antisense strand to SEQ ID NO: 217248
cauguaaucaauauacaga

SEQ ID NO: 217250 - RNA, 19 nt, Artificial Sequence
  Description of Artificial Sequence: Synthetic oligonucleotide
  Sense strand starting at position 1206 of SEQ ID NO: 2798
cuguauauugauuacaugu

SEQ ID NO: 217251 - RNA, 19 nt, Artificial Sequence
  Description of Artificial Sequence: Synthetic oligonucleotide
  Antisense strand to SEQ ID NO: 217250
acauguaaucaauauacag

SEQ ID NO: 217252 - RNA, 19 nt, Artificial Sequence
  Description of Artificial Sequence: Synthetic oligonucleotide
  Sense strand starting at position 1212 of SEQ ID NO: 2798
auugauuacaugugaagug

SEQ ID NO: 217253 - RNA, 19 nt, Artificial Sequence
  Description of Artificial Sequence: Synthetic oligonucleotide
  Antisense strand to SEQ ID NO: 217252
cacuucacauguaaucaau

SEQ ID NO: 217254 - RNA, 19 nt, Artificial Sequence
  Description of Artificial Sequence: Synthetic oligonucleotide
  Sense strand starting at position 1239 of SEQ ID NO: 2798
uuggcuauucuggauuaaa

SEQ ID NO: 217255 - RNA, 19 nt, Artificial Sequence
  Description of Artificial Sequence: Synthetic oligonucleotide
  Antisense strand to SEQ ID NO: 217254
uuuaauccagaauagccaa

SEQ ID NO: 217256 - RNA, 19 nt, Artificial Sequence
  Description of Artificial Sequence: Synthetic oligonucleotide
  Sense strand starting at position 1313 of SEQ ID NO: 2798
gacgaucuagucuauacuu

SEQ ID NO: 217257 - RNA, 19 nt, Artificial Sequence
  Description of Artificial Sequence: Synthetic oligonucleotide
  Antisense strand to SEQ ID NO: 217256
aaguauagacuagaucguc

SEQ ID NO: 217258 - RNA, 19 nt, Artificial Sequence
  Description of Artificial Sequence: Synthetic oligonucleotide
  Sense strand starting at position 1369 of SEQ ID NO: 2798
aguggacugcuugacagau

SEQ ID NO: 217259 - RNA, 19 nt, Artificial Sequence
  Description of Artificial Sequence: Synthetic oligonucleotide
  Antisense strand to SEQ ID NO: 217258
aucugucaagcaguccacu

SEQ ID NO: 217260 - RNA, 19 nt, Artificial Sequence
  Description of Artificial Sequence: Synthetic oligonucleotide
  Sense strand starting at position 2043 of SEQ ID NO: 2798
ccgagaugugccuaaauag

SEQ ID NO: 217261 - RNA, 19 nt, Artificial Sequence
  Description of Artificial Sequence: Synthetic oligonucleotide
  Antisense strand to SEQ ID NO: 217260
cuauuuaggcacaucucgg

SEQ ID NO: 217262 - RNA, 19 nt, Artificial Sequence
  Description of Artificial Sequence: Synthetic oligonucleotide
  Sense strand starting at position 2167 of SEQ ID NO: 2798
aggauaccuccacggaaau

SEQ ID NO: 217263 - RNA, 19 nt, Artificial Sequence
  Description of Artificial Sequence: Synthetic oligonucleotide
  Antisense strand to SEQ ID NO: 217262
auuuccguggagguauccu

SEQ ID NO: 217264 - RNA, 19 nt, Artificial Sequence
  Description of Artificial Sequence: Synthetic oligonucleotide
  Sense strand starting at position 2168 of SEQ ID NO: 2798
ggauaccuccacggaaaua

SEQ ID NO: 217265 - RNA, 19 nt, Artificial Sequence
  Description of Artificial Sequence: Synthetic oligonucleotide
  Antisense strand to SEQ ID NO: 217264
uauuuccguggagguaucc

SEQ ID NO: 217266 - RNA, 19 nt, Artificial Sequence
  Description of Artificial Sequence: Synthetic oligonucleotide
  Sense strand starting at position 2254 of SEQ ID NO: 2798
aagaaagauugcucgcaga

SEQ ID NO: 217267 - RNA, 19 nt, Artificial Sequence
  Description of Artificial Sequence: Synthetic oligonucleotide
  Antisense strand to SEQ ID NO: 217266
ucugcgagcaaucuuucuu

SEQ ID NO: 217268 - RNA, 19 nt, Artificial Sequence
  Description of Artificial Sequence: Synthetic oligonucleotide
  Sense strand starting at position 2319 of SEQ ID NO: 2798
uuuagauggcuguaucuca

SEQ ID NO: 217269 - RNA, 19 nt, Artificial Sequence
  Description of Artificial Sequence: Synthetic oligonucleotide
  Antisense strand to SEQ ID NO: 217268
ugagauacagccaucuaaa

SEQ ID NO: 217270 - RNA, 19 nt, Artificial Sequence
  Description of Artificial Sequence: Synthetic oligonucleotide
  Sense strand starting at position 2367 of SEQ ID NO: 2798
uaggaucgaucacucagau

SEQ ID NO: 217271 - RNA, 19 nt, Artificial Sequence
  Description of Artificial Sequence: Synthetic oligonucleotide
  Antisense strand to SEQ ID NO: 217270
aucugagugaucgauccua

SEQ ID NO: 217272 - RNA, 19 nt, Artificial Sequence
  Description of Artificial Sequence: Synthetic oligonucleotide
  Sense strand starting at position 2371 of SEQ ID NO: 2798
aucgaucacucagauuuaa

SEQ ID NO: 217273 - RNA, 19 nt, Artificial Sequence
  Description of Artificial Sequence: Synthetic oligonucleotide
  Antisense strand to SEQ ID NO: 217272
uuaaaucugagugaucgau

SEQ ID NO: 217274 - RNA, 19 nt, Artificial Sequence
  Description of Artificial Sequence: Synthetic oligonucleotide
  Sense strand starting at position 2792 of SEQ ID NO: 2798
aauguaauaguuggcagaa

SEQ ID NO: 217275 - RNA, 19 nt, Artificial Sequence
  Description of Artificial Sequence: Synthetic oligonucleotide
  Antisense strand to SEQ ID NO: 217274
uucugccaacuauuacauu

SEQ ID NO: 217276 - RNA, 19 nt, Artificial Sequence
  Description of Artificial Sequence: Synthetic oligonucleotide
  Sense strand starting at position 2793 of SEQ ID NO: 2798
auguaauaguuggcagaau

SEQ ID NO: 217277 - RNA, 19 nt, Artificial Sequence
  Description of Artificial Sequence: Synthetic oligonucleotide
  Antisense strand to SEQ ID NO: 217276
auucugccaacuauuacau

SEQ ID NO: 217278 - RNA, 19 nt, Artificial Sequence
  Description of Artificial Sequence: Synthetic oligonucleotide
  Sense strand starting at position 2801 of SEQ ID NO: 2798
guuggcagaaucuggagaa

SEQ ID NO: 217279 - RNA, 19 nt, Artificial Sequence
  Description of Artificial Sequence: Synthetic oligonucleotide
  Antisense strand to SEQ ID NO: 217278
uucuccagauucugccaac

SEQ ID NO: 217280 - RNA, 19 nt, Artificial Sequence
  Description of Artificial Sequence: Synthetic oligonucleotide
  Sense strand starting at position 2837 of SEQ ID NO: 2798
gacuguuuauagguacaga

SEQ ID NO: 217281 - RNA, 19 nt, Artificial Sequence
  Description of Artificial Sequence: Synthetic oligonucleotide
  Antisense strand to SEQ ID NO: 217280
ucuguaccuauaaacaguc

SEQ ID NO: 217282 - RNA, 19 nt, Artificial Sequence
  Description of Artificial Sequence: Synthetic oligonucleotide
  Sense strand starting at position 2840 of SEQ ID NO: 2798
uguuuauagguacagaguu

SEQ ID NO: 217283 - RNA, 19 nt, Artificial Sequence
  Description of Artificial Sequence: Synthetic oligonucleotide
  Antisense strand to SEQ ID NO: 217282
aacucuguaccuauaaaca

SEQ ID NO: 217284 - RNA, 19 nt, Artificial Sequence
  Description of Artificial Sequence: Synthetic oligonucleotide
  Sense strand starting at position 2954 of SEQ ID NO: 2798
acaguaugugaauaucuca

SEQ ID NO: 217285 - RNA, 19 nt, Artificial Sequence
  Description of Artificial Sequence: Synthetic oligonucleotide
  Antisense strand to SEQ ID NO: 217284
ugagauauucacauacugu

SEQ ID NO: 217286 - RNA, 19 nt, Artificial Sequence
  Description of Artificial Sequence: Synthetic oligonucleotide
  Sense strand starting at position 2957 of SEQ ID NO: 2798
guaugugaauaucucaauu

SEQ ID NO: 217287 - RNA, 19 nt, Artificial Sequence
  Description of Artificial Sequence: Synthetic oligonucleotide
  Antisense strand to SEQ ID NO: 217286
aauugagauauucacauac

SEQ ID NO: 217288 - RNA, 19 nt, Artificial Sequence
  Description of Artificial Sequence: Synthetic oligonucleotide
  Sense strand starting at position 3049 of SEQ ID NO: 2798
uggguacaccuauacuagu

SEQ ID NO: 217289 - RNA, 19 nt, Artificial Sequence
  Description of Artificial Sequence: Synthetic oligonucleotide
  Antisense strand to SEQ ID NO: 217288
acuaguauagguguaccca

SEQ ID NO: 217290 - RNA, 19 nt, Artificial Sequence
  Description of Artificial Sequence: Synthetic oligonucleotide
  Sense strand starting at position 3104 of SEQ ID NO: 2798
ucuuuacaucuuuauguag

SEQ ID NO: 217291 - RNA, 19 nt, Artificial Sequence
  Description of Artificial Sequence: Synthetic oligonucleotide
  Antisense strand to SEQ ID NO: 217290
cuacauaaagauguaaaga

SEQ ID NO: 217292 - RNA, 19 nt, Artificial Sequence
  Description of Artificial Sequence: Synthetic oligonucleotide
  Sense strand starting at position 3165 of SEQ ID NO: 2798
ugguauuggugacuccaga

SEQ ID NO: 217293 - RNA, 19 nt, Artificial Sequence
  Description of Artificial Sequence: Synthetic oligonucleotide
  Antisense strand to SEQ ID NO: 217292
ucuggagucaccaauacca

SEQ ID NO: 217294 - RNA, 19 nt, Artificial Sequence
  Description of Artificial Sequence: Synthetic oligonucleotide
  Sense strand starting at position 3246 of SEQ ID NO: 2798
gugaacaacaguugguaaa

SEQ ID NO: 217295 - RNA, 19 nt, Artificial Sequence
  Description of Artificial Sequence: Synthetic oligonucleotide
  Antisense strand to SEQ ID NO: 217294
uuuaccaacuguuguucac

SEQ ID NO: 217296 - RNA, 19 nt, Artificial Sequence
  Description of Artificial Sequence: Synthetic oligonucleotide
  Sense strand starting at position 3256 of SEQ ID NO: 2798
guugguaaaguuuacaaca

SEQ ID NO: 217297 - RNA, 19 nt, Artificial Sequence
  Description of Artificial Sequence: Synthetic oligonucleotide
  Antisense strand to SEQ ID NO: 217296
uguuguaaacuuuaccaac

SEQ ID NO: 217298 - RNA, 19 nt, Artificial Sequence
  Description of Artificial Sequence: Synthetic oligonucleotide
  Sense strand starting at position 3303 of SEQ ID NO: 2798
auugcaaagcuggaauauu

SEQ ID NO: 217299 - RNA, 19 nt, Artificial Sequence
  Description of Artificial Sequence: Synthetic oligonucleotide
  Antisense strand to SEQ ID NO: 217298
aauauuccagcuuugcaau

SEQ ID NO: 217300 - RNA, 19 nt, Artificial Sequence
  Description of Artificial Sequence: Synthetic oligonucleotide
  Sense strand starting at position 3312 of SEQ ID NO: 2798
cuggaauauucuguauaua

SEQ ID NO: 217301 - RNA, 19 nt, Artificial Sequence
  Description of Artificial Sequence: Synthetic oligonucleotide
  Antisense strand to SEQ ID NO: 217300
uauauacagaauauuccag

SEQ ID NO: 217302 - RNA, 19 nt, Artificial Sequence
  Description of Artificial Sequence: Synthetic oligonucleotide
  Sense strand starting at position 3690 of SEQ ID NO: 2798
agaguuugacuuuaggcuu

SEQ ID NO: 217303 - RNA, 19 nt, Artificial Sequence
  Description of Artificial Sequence: Synthetic oligonucleotide
  Antisense strand to SEQ ID NO: 217302
aagccuaaagucaaacucu

SEQ ID NO: 217304 - RNA, 19 nt, Artificial Sequence
  Description of Artificial Sequence: Synthetic oligonucleotide
  Sense strand starting at position 3753 of SEQ ID NO: 2798
augggaagaugucuuauau

SEQ ID NO: 217305 - RNA, 19 nt, Artificial Sequence
  Description of Artificial Sequence: Synthetic oligonucleotide
  Antisense strand to SEQ ID NO: 217304
auauaagacaucuucccau

SEQ ID NO: 217306 - RNA, 19 nt, Artificial Sequence
  Description of Artificial Sequence: Synthetic oligonucleotide
  Sense strand starting at position 241 of SEQ ID NO: 2799
uuguguugacaaggauaag

SEQ ID NO: 217307 - RNA, 19 nt, Artificial Sequence
  Description of Artificial Sequence: Synthetic oligonucleotide
  Antisense strand to SEQ ID NO: 217306
cuuauccuugucaacacaa

SEQ ID NO: 217308 - RNA, 19 nt, Artificial Sequence
  Description of Artificial Sequence: Synthetic oligonucleotide
  Sense strand starting at position 275 of SEQ ID NO: 2799
ucucauauugcuggcaaag

SEQ ID NO: 217309 - RNA, 19 nt, Artificial Sequence
  Description of Artificial Sequence: Synthetic oligonucleotide
  Antisense strand to SEQ ID NO: 217308
cuuugccagcaauaugaga

SEQ ID NO: 217310 - RNA, 19 nt, Artificial Sequence
  Description of Artificial Sequence: Synthetic oligonucleotide
  Sense strand starting at position 292 of SEQ ID NO: 2799
aggcguaaauugguacaau

SEQ ID NO: 217311 - RNA, 19 nt, Artificial Sequence
  Description of Artificial Sequence: Synthetic oligonucleotide
  Antisense strand to SEQ ID NO: 217310
auuguaccaauuuacgccu

SEQ ID NO: 217312 - RNA, 19 nt, Artificial Sequence
  Description of Artificial Sequence: Synthetic oligonucleotide
  Sense strand starting at position 330 of SEQ ID NO: 2799
ugucuacuaucacugauca

SEQ ID NO: 217313 - RNA, 19 nt, Artificial Sequence
  Description of Artificial Sequence: Synthetic oligonucleotide
  Antisense strand to SEQ ID NO: 217312
ugaucagugauaguagaca

SEQ ID NO: 217314 - RNA, 19 nt, Artificial Sequence
  Description of Artificial Sequence: Synthetic oligonucleotide
  Sense strand starting at position 331 of SEQ ID NO: 2799
gucuacuaucacugaucau

SEQ ID NO: 217315 - RNA, 19 nt, Artificial Sequence
  Description of Artificial Sequence: Synthetic oligonucleotide
  Antisense strand to SEQ ID NO: 217314
augaucagugauaguagac

SEQ ID NO: 217316 - RNA, 19 nt, Artificial Sequence
  Description of Artificial Sequence: Synthetic oligonucleotide
  Sense strand starting at position 384 of SEQ ID NO: 2799
ccuagaaaugugugcaagu

SEQ ID NO: 217317 - RNA, 19 nt, Artificial Sequence
  Description of Artificial Sequence: Synthetic oligonucleotide
  Antisense strand to SEQ ID NO: 217316
acuugcacacauuucuagg

SEQ ID NO: 217318 - RNA, 19 nt, Artificial Sequence
  Description of Artificial Sequence: Synthetic oligonucleotide
  Sense strand starting at position 385 of SEQ ID NO: 2799
cuagaaaugugugcaagug

SEQ ID NO: 217319 - RNA, 19 nt, Artificial Sequence
  Description of Artificial Sequence: Synthetic oligonucleotide
  Antisense strand to SEQ ID NO: 217318
cacuugcacacauuucuag

SEQ ID NO: 217320 - RNA, 19 nt, Artificial Sequence
  Description of Artificial Sequence: Synthetic oligonucleotide
  Sense strand starting at position 386 of SEQ ID NO: 2799
uagaaaugugugcaagugu

SEQ ID NO: 217321 - RNA, 19 nt, Artificial Sequence
  Description of Artificial Sequence: Synthetic oligonucleotide
  Antisense strand to SEQ ID NO: 217320
acacuugcacacauuucua

SEQ ID NO: 217322 - RNA, 19 nt, Artificial Sequence
  Description of Artificial Sequence: Synthetic oligonucleotide
  Sense strand starting at position 419 of SEQ ID NO: 2799
auguaagaaugcucacuac

SEQ ID NO: 217323 - RNA, 19 nt, Artificial Sequence
  Description of Artificial Sequence: Synthetic oligonucleotide
  Antisense strand to SEQ ID NO: 217322
guagugagcauucuuacau

SEQ ID NO: 217324 - RNA, 19 nt, Artificial Sequence
  Description of Artificial Sequence: Synthetic oligonucleotide
  Sense strand starting at position 608 of SEQ ID NO: 2799
cuguacauacuguauuauu

SEQ ID NO: 217325 - RNA, 19 nt, Artificial Sequence
  Description of Artificial Sequence: Synthetic oligonucleotide
  Antisense strand to SEQ ID NO: 217324
aauaauacaguauguacag

SEQ ID NO: 217326 - RNA, 19 nt, Artificial Sequence
  Description of Artificial Sequence: Synthetic oligonucleotide
  Sense strand starting at position 674 of SEQ ID NO: 2799
cagucagaagagugauuau

SEQ ID NO: 217327 - RNA, 19 nt, Artificial Sequence
  Description of Artificial Sequence: Synthetic oligonucleotide
  Antisense strand to SEQ ID NO: 217326
auaaucacucuucugacug

SEQ ID NO: 217328 - RNA, 19 nt, Artificial Sequence
  Description of Artificial Sequence: Synthetic oligonucleotide
  Sense strand starting at position 677 of SEQ ID NO: 2799
ucagaagagugauuaucuc

SEQ ID NO: 217329 - RNA, 19 nt, Artificial Sequence
  Description of Artificial Sequence: Synthetic oligonucleotide
  Antisense strand to SEQ ID NO: 217328
gagauaaucacucuucuga

SEQ ID NO: 217330 - RNA, 19 nt, Artificial Sequence
  Description of Artificial Sequence: Synthetic oligonucleotide
  Sense strand starting at position 728 of SEQ ID NO: 2799
agcacuaagugugcuagaa

SEQ ID NO: 217331 - RNA, 19 nt, Artificial Sequence
  Description of Artificial Sequence: Synthetic oligonucleotide
  Antisense strand to SEQ ID NO: 217330
uucuagcacacuuagugcu

SEQ ID NO: 217332 - RNA, 19 nt, Artificial Sequence
  Description of Artificial Sequence: Synthetic oligonucleotide
  Sense strand starting at position 732 of SEQ ID NO: 2799
cuaagugugcuagaaaugu

SEQ ID NO: 217333 - RNA, 19 nt, Artificial Sequence
  Description of Artificial Sequence: Synthetic oligonucleotide
  Antisense strand to SEQ ID NO: 217332
acauuucuagcacacuuag

SEQ ID NO: 217334 - RNA, 19 nt, Artificial Sequence
  Description of Artificial Sequence: Synthetic oligonucleotide
  Sense strand starting at position 782 of SEQ ID NO: 2799
gguguauaccuaugugaaa

SEQ ID NO: 217335 - RNA, 19 nt, Artificial Sequence
  Description of Artificial Sequence: Synthetic oligonucleotide
  Antisense strand to SEQ ID NO: 217334
uuucacauagguauacacc

SEQ ID NO: 217336 - RNA, 19 nt, Artificial Sequence
  Description of Artificial Sequence: Synthetic oligonucleotide
  Sense strand starting at position 804 of SEQ ID NO: 2799
guucccauacuguauguua

SEQ ID NO: 217337 - RNA, 19 nt, Artificial Sequence
  Description of Artificial Sequence: Synthetic oligonucleotide
  Antisense strand to SEQ ID NO: 217336
uaacauacaguaugggaac

SEQ ID NO: 217338 - RNA, 19 nt, Artificial Sequence
  Description of Artificial Sequence: Synthetic oligonucleotide
  Sense strand starting at position 806 of SEQ ID NO: 2799
ucccauacuguauguuaca

SEQ ID NO: 217339 - RNA, 19 nt, Artificial Sequence
  Description of Artificial Sequence: Synthetic oligonucleotide
  Antisense strand to SEQ ID NO: 217338
uguaacauacaguauggga

SEQ ID NO: 217340 - RNA, 19 nt, Artificial Sequence
  Description of Artificial Sequence: Synthetic oligonucleotide
  Sense strand starting at position 982 of SEQ ID NO: 2799
ucuugaaucucaguggagu

SEQ ID NO: 217341 - RNA, 19 nt, Artificial Sequence
  Description of Artificial Sequence: Synthetic oligonucleotide
  Antisense strand to SEQ ID NO: 217340
acuccacugagauucaaga

SEQ ID NO: 217342 - RNA, 19 nt, Artificial Sequence
  Description of Artificial Sequence: Synthetic oligonucleotide
  Sense strand starting at position 983 of SEQ ID NO: 2799
cuugaaucucaguggaguc

SEQ ID NO: 217343 - RNA, 19 nt, Artificial Sequence
  Description of Artificial Sequence: Synthetic oligonucleotide
  Antisense strand to SEQ ID NO: 217342
gacuccacugagauucaag

SEQ ID NO: 217344 - RNA, 19 nt, Artificial Sequence
  Description of Artificial Sequence: Synthetic oligonucleotide
  Sense strand starting at position 1066 of SEQ ID NO: 2799
ccacucagugccugacaaa

SEQ ID NO: 217345 - RNA, 19 nt, Artificial Sequence
  Description of Artificial Sequence: Synthetic oligonucleotide
  Antisense strand to SEQ ID NO: 217344
uuugucaggcacugagugg

SEQ ID NO: 217346 - RNA, 19 nt, Artificial Sequence
  Description of Artificial Sequence: Synthetic oligonucleotide
  Sense strand starting at position 1138 of SEQ ID NO: 2799
uucccagaugggugaaagu

SEQ ID NO: 217347 - RNA, 19 nt, Artificial Sequence
  Description of Artificial Sequence: Synthetic oligonucleotide
  Antisense strand to SEQ ID NO: 217346
acuuucacccaucugggaa

SEQ ID NO: 217348 - RNA, 19 nt, Artificial Sequence
  Description of Artificial Sequence: Synthetic oligonucleotide
  Sense strand starting at position 1362 of SEQ ID NO: 2799
uaccuaauucuggguguuu

SEQ ID NO: 217349 - RNA, 19 nt, Artificial Sequence
  Description of Artificial Sequence: Synthetic oligonucleotide
  Antisense strand to SEQ ID NO: 217348
aaacacccagaauuaggua

SEQ ID NO: 217350 - RNA, 19 nt, Artificial Sequence
  Description of Artificial Sequence: Synthetic oligonucleotide
  Sense strand starting at position 1375 of SEQ ID NO: 2799
guguuucaacaguggauag

SEQ ID NO: 217351 - RNA, 19 nt, Artificial Sequence
  Description of Artificial Sequence: Synthetic oligonucleotide
  Antisense strand to SEQ ID NO: 217350
cuauccacuguugaaacac

SEQ ID NO: 217352 - RNA, 19 nt, Artificial Sequence
  Description of Artificial Sequence: Synthetic oligonucleotide
  Sense strand starting at position 1486 of SEQ ID NO: 2799
cgacuuagggcugaauucu

SEQ ID NO: 217353 - RNA, 19 nt, Artificial Sequence
  Description of Artificial Sequence: Synthetic oligonucleotide
  Antisense strand to SEQ ID NO: 217352
agaauucagcccuaagucg

SEQ ID NO: 217354 - RNA, 19 nt, Artificial Sequence
  Description of Artificial Sequence: Synthetic oligonucleotide
  Sense strand starting at position 1613 of SEQ ID NO: 2799
uugauauucugaguauaca

SEQ ID NO: 217355 - RNA, 19 nt, Artificial Sequence
  Description of Artificial Sequence: Synthetic oligonucleotide
  Antisense strand to SEQ ID NO: 217354
uguauacucagaauaucaa

SEQ ID NO: 217356 - RNA, 19 nt, Artificial Sequence
  Description of Artificial Sequence: Synthetic oligonucleotide
  Sense strand starting at position 2060 of SEQ ID NO: 2799
gcuggaaugcugggaaaug

SEQ ID NO: 217357 - RNA, 19 nt, Artificial Sequence
  Description of Artificial Sequence: Synthetic oligonucleotide
  Antisense strand to SEQ ID NO: 217356
cauuucccagcauuccagc

SEQ ID NO: 217358 - RNA, 19 nt, Artificial Sequence
  Description of Artificial Sequence: Synthetic oligonucleotide
  Sense strand starting at position 2154 of SEQ ID NO: 2799
cccuaaagccucugcagau

SEQ ID NO: 217359 - RNA, 19 nt, Artificial Sequence
  Description of Artificial Sequence: Synthetic oligonucleotide
  Antisense strand to SEQ ID NO: 217358
aucugcagaggcuuuaggg

SEQ ID NO: 217360 - RNA, 19 nt, Artificial Sequence
  Description of Artificial Sequence: Synthetic oligonucleotide
  Sense strand starting at position 2218 of SEQ ID NO: 2799
gaugaauauuguguccuau

SEQ ID NO: 217361 - RNA, 19 nt, Artificial Sequence
  Description of Artificial Sequence: Synthetic oligonucleotide
  Antisense strand to SEQ ID NO: 217360
auaggacacaauauucauc

SEQ ID NO: 217362 - RNA, 19 nt, Artificial Sequence
  Description of Artificial Sequence: Synthetic oligonucleotide
  Sense strand starting at position 2224 of SEQ ID NO: 2799
uauuguguccuaugggacu

SEQ ID NO: 217363 - RNA, 19 nt, Artificial Sequence
  Description of Artificial Sequence: Synthetic oligonucleotide
  Antisense strand to SEQ ID NO: 217362
agucccauaggacacaaua

SEQ ID NO: 217364 - RNA, 19 nt, Artificial Sequence
  Description of Artificial Sequence: Synthetic oligonucleotide
  Sense strand starting at position 2259 of SEQ ID NO: 2799
ucccauugacguuaacagu

SEQ ID NO: 217365 - RNA, 19 nt, Artificial Sequence
  Description of Artificial Sequence: Synthetic oligonucleotide
  Antisense strand to SEQ ID NO: 217364
acuguuaacgucaauggga

SEQ ID NO: 217366 - RNA, 19 nt, Artificial Sequence
  Description of Artificial Sequence: Synthetic oligonucleotide
  Sense strand starting at position 2302 of SEQ ID NO: 2799
ccuacuggcugguugagau

SEQ ID NO: 217367 - RNA, 19 nt, Artificial Sequence
  Description of Artificial Sequence: Synthetic oligonucleotide
  Antisense strand to SEQ ID NO: 217366
aucucaaccagccaguagg

SEQ ID NO: 217368 - RNA, 19 nt, Artificial Sequence
  Description of Artificial Sequence: Synthetic oligonucleotide
  Sense strand starting at position 3007 of SEQ ID NO: 2799
cuagaagccucuuuggcua

SEQ ID NO: 217369 - RNA, 19 nt, Artificial Sequence
  Description of Artificial Sequence: Synthetic oligonucleotide
  Antisense strand to SEQ ID NO: 217368
uagccaaagaggcuucuag

SEQ ID NO: 217370 - RNA, 19 nt, Artificial Sequence
  Description of Artificial Sequence: Synthetic oligonucleotide
  Sense strand starting at position 3067 of SEQ ID NO: 2799
cgaccuugugugggacaaa

SEQ ID NO: 217371 - RNA, 19 nt, Artificial Sequence
  Description of Artificial Sequence: Synthetic oligonucleotide
  Antisense strand to SEQ ID NO: 217370
uuugucccacacaaggucg

SEQ ID NO: 217372 - RNA, 19 nt, Artificial Sequence
  Description of Artificial Sequence: Synthetic oligonucleotide
  Sense strand starting at position 3227 of SEQ ID NO: 2799
caagaucgaccucgucuua

SEQ ID NO: 217373 - RNA, 19 nt, Artificial Sequence
  Description of Artificial Sequence: Synthetic oligonucleotide
  Antisense strand to SEQ ID NO: 217372
uaagacgaggucgaucuug

SEQ ID NO: 217374 - RNA, 19 nt, Artificial Sequence
  Description of Artificial Sequence: Synthetic oligonucleotide
  Sense strand starting at position 3410 of SEQ ID NO: 2799
gguggagcuguccagcaau

SEQ ID NO: 217375 - RNA, 19 nt, Artificial Sequence
  Description of Artificial Sequence: Synthetic oligonucleotide
  Antisense strand to SEQ ID NO: 217374
auugcuggacagcuccacc

SEQ ID NO: 217376 - RNA, 19 nt, Artificial Sequence
  Description of Artificial Sequence: Synthetic oligonucleotide
  Sense strand starting at position 3509 of SEQ ID NO: 2799
gcauccucuccguaaggaa

SEQ ID NO: 217377 - RNA, 19 nt, Artificial Sequence
  Description of Artificial Sequence: Synthetic oligonucleotide
  Antisense strand to SEQ ID NO: 217376
uuccuuacggagaggaugc

SEQ ID NO: 217378 - RNA, 19 nt, Artificial Sequence
  Description of Artificial Sequence: Synthetic oligonucleotide
  Sense strand starting at position 3550 of SEQ ID NO: 2799
guuagucugucaccauaug

SEQ ID NO: 217379 - RNA, 19 nt, Artificial Sequence
  Description of Artificial Sequence: Synthetic oligonucleotide
  Antisense strand to SEQ ID NO: 217378
cauauggugacagacuaac

SEQ ID NO: 217380 - RNA, 19 nt, Artificial Sequence
  Description of Artificial Sequence: Synthetic oligonucleotide
  Sense strand starting at position 3551 of SEQ ID NO: 2799
uuagucugucaccauauga

SEQ ID NO: 217381 - RNA, 19 nt, Artificial Sequence
  Description of Artificial Sequence: Synthetic oligonucleotide
  Antisense strand to SEQ ID NO: 217380
ucauauggugacagacuaa

SEQ ID NO: 217382 - RNA, 19 nt, Artificial Sequence
  Description of Artificial Sequence: Synthetic oligonucleotide
  Sense strand starting at position 3774 of SEQ ID NO: 2799
guccaugucacgcuugcaa

SEQ ID NO: 217383 - RNA, 19 nt, Artificial Sequence
  Description of Artificial Sequence: Synthetic oligonucleotide
  Antisense strand to SEQ ID NO: 217382
uugcaagcgugacauggac

SEQ ID NO: 217384 - RNA, 19 nt, Artificial Sequence
  Description of Artificial Sequence: Synthetic oligonucleotide
  Sense strand starting at position 3820 of SEQ ID NO: 2799
ccaaguugguaauacauuu

SEQ ID NO: 217385 - RNA, 19 nt, Artificial Sequence
  Description of Artificial Sequence: Synthetic oligonucleotide
  Antisense strand to SEQ ID NO: 217384
aaauguauuaccaacuugg

SEQ ID NO: 217386 - RNA, 19 nt, Artificial Sequence
  Description of Artificial Sequence: Synthetic oligonucleotide
  Sense strand starting at position 246 of SEQ ID NO: 2800
aacaguuccugaguccaga

SEQ ID NO: 217387 - RNA, 19 nt, Artificial Sequence
  Description of Artificial Sequence: Synthetic oligonucleotide
  Antisense strand to SEQ ID NO: 217386
ucuggacucaggaacuguu

SEQ ID NO: 217388 - RNA, 19 nt, Artificial Sequence
  Description of Artificial Sequence: Synthetic oligonucleotide
  Sense strand starting at position 278 of SEQ ID NO: 2800
uuaugagauggguggaguu

SEQ ID NO: 217389 - RNA, 19 nt, Artificial Sequence
  Description of Artificial Sequence: Synthetic oligonucleotide
  Antisense strand to SEQ ID NO: 217388
aacuccacccaucucauaa

SEQ ID NO: 217390 - RNA, 19 nt, Artificial Sequence
  Description of Artificial Sequence: Synthetic oligonucleotide
  Sense strand starting at position 291 of SEQ ID NO: 2800
ggaguucaaccuggaguua

SEQ ID NO: 217391 - RNA, 19 nt, Artificial Sequence
  Description of Artificial Sequence: Synthetic oligonucleotide
  Antisense strand to SEQ ID NO: 217390
uaacuccagguugaacucc

SEQ ID NO: 217392 - RNA, 19 nt, Artificial Sequence
  Description of Artificial Sequence: Synthetic oligonucleotide
  Sense strand starting at position 325 of SEQ ID NO: 2800
aaauucugguguuugaaac

SEQ ID NO: 217393 - RNA, 19 nt, Artificial Sequence
  Description of Artificial Sequence: Synthetic oligonucleotide
  Antisense strand to SEQ ID NO: 217392
guuucaaacaccagaauuu

SEQ ID NO: 217394 - RNA, 19 nt, Artificial Sequence
  Description of Artificial Sequence: Synthetic oligonucleotide
  Sense strand starting at position 326 of SEQ ID NO: 2800
aauucugguguuugaaaca

SEQ ID NO: 217395 - RNA, 19 nt, Artificial Sequence
  Description of Artificial Sequence: Synthetic oligonucleotide
  Antisense strand to SEQ ID NO: 217394
uguuucaaacaccagaauu

SEQ ID NO: 217396 - RNA, 19 nt, Artificial Sequence
  Description of Artificial Sequence: Synthetic oligonucleotide
  Sense strand starting at position 435 of SEQ ID NO: 2800
acacaugaguuucucagca

SEQ ID NO: 217397 - RNA, 19 nt, Artificial Sequence
  Description of Artificial Sequence: Synthetic oligonucleotide
  Antisense strand to SEQ ID NO: 217396
ugcugagaaacucaugugu

SEQ ID NO: 217398 - RNA, 19 nt, Artificial Sequence
  Description of Artificial Sequence: Synthetic oligonucleotide
  Sense strand starting at position 497 of SEQ ID NO: 2800
ggaggauacugccuauaca

SEQ ID NO: 217399 - RNA, 19 nt, Artificial Sequence
  Description of Artificial Sequence: Synthetic oligonucleotide
  Antisense strand to SEQ ID NO: 217398
uguauaggcaguauccucc

SEQ ID NO: 217400 - RNA, 19 nt, Artificial Sequence
  Description of Artificial Sequence: Synthetic oligonucleotide
  Sense strand starting at position 556 of SEQ ID NO: 2800
cccacugugucaucagaau

SEQ ID NO: 217401 - RNA, 19 nt, Artificial Sequence
  Description of Artificial Sequence: Synthetic oligonucleotide
  Antisense strand to SEQ ID NO: 217400
auucugaugacacaguggg

SEQ ID NO: 217402 - RNA, 19 nt, Artificial Sequence
  Description of Artificial Sequence: Synthetic oligonucleotide
  Sense strand starting at position 709 of SEQ ID NO: 2800
cauacaugcuguguaagac

SEQ ID NO: 217403 - RNA, 19 nt, Artificial Sequence
  Description of Artificial Sequence: Synthetic oligonucleotide
  Antisense strand to SEQ ID NO: 217402
gucuuacacagcauguaug

SEQ ID NO: 217404 - RNA, 19 nt, Artificial Sequence
  Description of Artificial Sequence: Synthetic oligonucleotide
  Sense strand starting at position 855 of SEQ ID NO: 2800
auuguaucagcgcuccgaa

SEQ ID NO: 217405 - RNA, 19 nt, Artificial Sequence
  Description of Artificial Sequence: Synthetic oligonucleotide
  Antisense strand to SEQ ID NO: 217404
uucggagcgcugauacaau

SEQ ID NO: 217406 - RNA, 19 nt, Artificial Sequence
  Description of Artificial Sequence: Synthetic oligonucleotide
  Sense strand starting at position 862 of SEQ ID NO: 2800
cagcgcuccgaagacauua

SEQ ID NO: 217407 - RNA, 19 nt, Artificial Sequence
  Description of Artificial Sequence: Synthetic oligonucleotide
  Antisense strand to SEQ ID NO: 217406
uaaugucuucggagcgcug

SEQ ID NO: 217408 - RNA, 19 nt, Artificial Sequence
  Description of Artificial Sequence: Synthetic oligonucleotide
  Sense strand starting at position 884 of SEQ ID NO: 2800
acaggagggucccucaauu

SEQ ID NO: 217409 - RNA, 19 nt, Artificial Sequence
  Description of Artificial Sequence: Synthetic oligonucleotide
  Antisense strand to SEQ ID NO: 217408
aauugagggacccuccugu

SEQ ID NO: 217410 - RNA, 19 nt, Artificial Sequence
  Description of Artificial Sequence: Synthetic oligonucleotide
  Sense strand starting at position 890 of SEQ ID NO: 2800
gggucccucaauuguguaa

SEQ ID NO: 217411 - RNA, 19 nt, Artificial Sequence
  Description of Artificial Sequence: Synthetic oligonucleotide
  Antisense strand to SEQ ID NO: 217410
uuacacaauugagggaccc

SEQ ID NO: 217412 - RNA, 19 nt, Artificial Sequence
  Description of Artificial Sequence: Synthetic oligonucleotide
  Sense strand starting at position 893 of SEQ ID NO: 2800
ucccucaauuguguaaucu

SEQ ID NO: 217413 - RNA, 19 nt, Artificial Sequence
  Description of Artificial Sequence: Synthetic oligonucleotide
  Antisense strand to SEQ ID NO: 217412
agauuacacaauugaggga

SEQ ID NO: 217414 - RNA, 19 nt, Artificial Sequence
  Description of Artificial Sequence: Synthetic oligonucleotide
  Sense strand starting at position 894 of SEQ ID NO: 2800
cccucaauuguguaaucua

SEQ ID NO: 217415 - RNA, 19 nt, Artificial Sequence
  Description of Artificial Sequence: Synthetic oligonucleotide
  Antisense strand to SEQ ID NO: 217414
uagauuacacaauugaggg

SEQ ID NO: 217416 - RNA, 19 nt, Artificial Sequence
  Description of Artificial Sequence: Synthetic oligonucleotide
  Sense strand starting at position 902 of SEQ ID NO: 2800
uguguaaucuaauuacacg

SEQ ID NO: 217417 - RNA, 19 nt, Artificial Sequence
  Description of Artificial Sequence: Synthetic oligonucleotide
  Antisense strand to SEQ ID NO: 217416
cguguaauuagauuacaca

SEQ ID NO: 217418 - RNA, 19 nt, Artificial Sequence
  Description of Artificial Sequence: Synthetic oligonucleotide
  Sense strand starting at position 911 of SEQ ID NO: 2800
uaauuacacgcugagugua

SEQ ID NO: 217419 - RNA, 19 nt, Artificial Sequence
  Description of Artificial Sequence: Synthetic oligonucleotide
  Antisense strand to SEQ ID NO: 217418
uacacucagcguguaauua

SEQ ID NO: 217420 - RNA, 19 nt, Artificial Sequence
  Description of Artificial Sequence: Synthetic oligonucleotide
  Sense strand starting at position 929 of SEQ ID NO: 2800
acaggaguuccagguaaga

SEQ ID NO: 217421 - RNA, 19 nt, Artificial Sequence
  Description of Artificial Sequence: Synthetic oligonucleotide
  Antisense strand to SEQ ID NO: 217420
ucuuaccuggaacuccugu

SEQ ID NO: 217422 - RNA, 19 nt, Artificial Sequence
  Description of Artificial Sequence: Synthetic oligonucleotide
  Sense strand starting at position 971 of SEQ ID NO: 2800
auuagagcagcgugacaaa

SEQ ID NO: 217423 - RNA, 19 nt, Artificial Sequence
  Description of Artificial Sequence: Synthetic oligonucleotide
  Antisense strand to SEQ ID NO: 217422
uuugucacgcugcucuaau

SEQ ID NO: 217424 - RNA, 19 nt, Artificial Sequence
  Description of Artificial Sequence: Synthetic oligonucleotide
  Sense strand starting at position 1032 of SEQ ID NO: 2800
ugaagaauaguuuggugca

SEQ ID NO: 217425 - RNA, 19 nt, Artificial Sequence
  Description of Artificial Sequence: Synthetic oligonucleotide
  Antisense strand to SEQ ID NO: 217424
ugcaccaaacuauucuuca

SEQ ID NO: 217426 - RNA, 19 nt, Artificial Sequence
  Description of Artificial Sequence: Synthetic oligonucleotide
  Sense strand starting at position 1127 of SEQ ID NO: 2800
cucacuuaggguuaccuaa

SEQ ID NO: 217427 - RNA, 19 nt, Artificial Sequence
  Description of Artificial Sequence: Synthetic oligonucleotide
  Antisense strand to SEQ ID NO: 217426
uuagguaacccuaagugag

SEQ ID NO: 217428 - RNA, 19 nt, Artificial Sequence
  Description of Artificial Sequence: Synthetic oligonucleotide
  Sense strand starting at position 1129 of SEQ ID NO: 2800
cacuuaggguuaccuaaga

SEQ ID NO: 217429 - RNA, 19 nt, Artificial Sequence
  Description of Artificial Sequence: Synthetic oligonucleotide
  Antisense strand to SEQ ID NO: 217428
ucuuagguaacccuaagug

SEQ ID NO: 217430 - RNA, 19 nt, Artificial Sequence
  Description of Artificial Sequence: Synthetic oligonucleotide
  Sense strand starting at position 1449 of SEQ ID NO: 2800
gccugugggcgcagagaau

SEQ ID NO: 217431 - RNA, 19 nt, Artificial Sequence
  Description of Artificial Sequence: Synthetic oligonucleotide
  Antisense strand to SEQ ID NO: 217430
auucucugcgcccacaggc

SEQ ID NO: 217432 - RNA, 19 nt, Artificial Sequence
  Description of Artificial Sequence: Synthetic oligonucleotide
  Sense strand starting at position 2344 of SEQ ID NO: 2800
cucguugaauucucauaac

SEQ ID NO: 217433 - RNA, 19 nt, Artificial Sequence
  Description of Artificial Sequence: Synthetic oligonucleotide
  Antisense strand to SEQ ID NO: 217432
guuaugagaauucaacgag

SEQ ID NO: 217434 - RNA, 19 nt, Artificial Sequence
  Description of Artificial Sequence: Synthetic oligonucleotide
  Sense strand starting at position 2395 of SEQ ID NO: 2800
ugaguuaacuaaguccaaa

SEQ ID NO: 217435 - RNA, 19 nt, Artificial Sequence
  Description of Artificial Sequence: Synthetic oligonucleotide
  Antisense strand to SEQ ID NO: 217434
uuuggacuuaguuaacuca

SEQ ID NO: 217436 - RNA, 19 nt, Artificial Sequence
  Description of Artificial Sequence: Synthetic oligonucleotide
  Sense strand starting at position 2424 of SEQ ID NO: 2800
ugacaaagcuugcuaucuu

SEQ ID NO: 217437 - RNA, 19 nt, Artificial Sequence
  Description of Artificial Sequence: Synthetic oligonucleotide
  Antisense strand to SEQ ID NO: 217436
aagauagcaagcuuuguca

SEQ ID NO: 217438 - RNA, 19 nt, Artificial Sequence
  Description of Artificial Sequence: Synthetic oligonucleotide
  Sense strand starting at position 2509 of SEQ ID NO: 2800
auaagcaagagauggguua

SEQ ID NO: 217439 - RNA, 19 nt, Artificial Sequence
  Description of Artificial Sequence: Synthetic oligonucleotide
  Antisense strand to SEQ ID NO: 217438
uaacccaucucuugcuuau

SEQ ID NO: 217440 - RNA, 19 nt, Artificial Sequence
  Description of Artificial Sequence: Synthetic oligonucleotide
  Sense strand starting at position 2522 of SEQ ID NO: 2800
ggguuaagccaacaauggu

SEQ ID NO: 217441 - RNA, 19 nt, Artificial Sequence
  Description of Artificial Sequence: Synthetic oligonucleotide
  Antisense strand to SEQ ID NO: 217440
accauuguuggcuuaaccc

SEQ ID NO: 217442 - RNA, 19 nt, Artificial Sequence
  Description of Artificial Sequence: Synthetic oligonucleotide
  Sense strand starting at position 2700 of SEQ ID NO: 2800
gccuaucgugcguuagaau

SEQ ID NO: 217443 - RNA, 19 nt, Artificial Sequence
  Description of Artificial Sequence: Synthetic oligonucleotide
  Antisense strand to SEQ ID NO: 217442
auucuaacgcacgauaggc

SEQ ID NO: 217444 - RNA, 19 nt, Artificial Sequence
  Description of Artificial Sequence: Synthetic oligonucleotide
  Sense strand starting at position 2708 of SEQ ID NO: 2800
ugcguuagaaugcagaaau

SEQ ID NO: 217445 - RNA, 19 nt, Artificial Sequence
  Description of Artificial Sequence: Synthetic oligonucleotide
  Antisense strand to SEQ ID NO: 217444
auuucugcauucuaacgca

SEQ ID NO: 217446 - RNA, 19 nt, Artificial Sequence
  Description of Artificial Sequence: Synthetic oligonucleotide
  Sense strand starting at position 3070 of SEQ ID NO: 2800
gagucaggucaucaaaggu

SEQ ID NO: 217447 - RNA, 19 nt, Artificial Sequence
  Description of Artificial Sequence: Synthetic oligonucleotide
  Antisense strand to SEQ ID NO: 217446
accuuugaugaccugacuc

SEQ ID NO: 217448 - RNA, 19 nt, Artificial Sequence
  Description of Artificial Sequence: Synthetic oligonucleotide
  Sense strand starting at position 3149 of SEQ ID NO: 2800
augaauaauugccuuguua

SEQ ID NO: 217449 - RNA, 19 nt, Artificial Sequence
  Description of Artificial Sequence: Synthetic oligonucleotide
  Antisense strand to SEQ ID NO: 217448
uaacaaggcaauuauucau

SEQ ID NO: 217450 - RNA, 19 nt, Artificial Sequence
  Description of Artificial Sequence: Synthetic oligonucleotide
  Sense strand starting at position 3151 of SEQ ID NO: 2800
gaauaauugccuuguuaga

SEQ ID NO: 217451 - RNA, 19 nt, Artificial Sequence
  Description of Artificial Sequence: Synthetic oligonucleotide
  Antisense strand to SEQ ID NO: 217450
ucuaacaaggcaauuauuc

SEQ ID NO: 217452 - RNA, 19 nt, Artificial Sequence
  Description of Artificial Sequence: Synthetic oligonucleotide
  Sense strand starting at position 3160 of SEQ ID NO: 2800
ccuuguuagagugaucaug

SEQ ID NO: 217453 - RNA, 19 nt, Artificial Sequence
  Description of Artificial Sequence: Synthetic oligonucleotide
  Antisense strand to SEQ ID NO: 217452
caugaucacucuaacaagg

SEQ ID NO: 217454 - RNA, 19 nt, Artificial Sequence
  Description of Artificial Sequence: Synthetic oligonucleotide
  Sense strand starting at position 3183 of SEQ ID NO: 2800
gugcuauaggaguggauug

SEQ ID NO: 217455 - RNA, 19 nt, Artificial Sequence
  Description of Artificial Sequence: Synthetic oligonucleotide
  Antisense strand to SEQ ID NO: 217454
caauccacuccuauagcac

SEQ ID NO: 217456 - RNA, 19 nt, Artificial Sequence
  Description of Artificial Sequence: Synthetic oligonucleotide
  Sense strand starting at position 3235 of SEQ ID NO: 2800
cggugaggugaccgauuua

SEQ ID NO: 217457 - RNA, 19 nt, Artificial Sequence
  Description of Artificial Sequence: Synthetic oligonucleotide
  Antisense strand to SEQ ID NO: 217456
uaaaucggucaccucaccg

SEQ ID NO: 217458 - RNA, 19 nt, Artificial Sequence
  Description of Artificial Sequence: Synthetic oligonucleotide
  Sense strand starting at position 3245 of SEQ ID NO: 2800
accgauuuauucuagauaa

SEQ ID NO: 217459 - RNA, 19 nt, Artificial Sequence
  Description of Artificial Sequence: Synthetic oligonucleotide
  Antisense strand to SEQ ID NO: 217458
uuaucuagaauaaaucggu

SEQ ID NO: 217460 - RNA, 19 nt, Artificial Sequence
  Description of Artificial Sequence: Synthetic oligonucleotide
  Sense strand starting at position 3613 of SEQ ID NO: 2800
uggagacauuuagacuaua

SEQ ID NO: 217461 - RNA, 19 nt, Artificial Sequence
  Description of Artificial Sequence: Synthetic oligonucleotide
  Antisense strand to SEQ ID NO: 217460
uauagucuaaaugucucca

SEQ ID NO: 217462 - RNA, 19 nt, Artificial Sequence
  Description of Artificial Sequence: Synthetic oligonucleotide
  Sense strand starting at position 3777 of SEQ ID NO: 2800
gaggaagacaagugaguuu

SEQ ID NO: 217463 - RNA, 19 nt, Artificial Sequence
  Description of Artificial Sequence: Synthetic oligonucleotide
  Antisense strand to SEQ ID NO: 217462
aaacucacuugucuuccuc

SEQ ID NO: 217464 - RNA, 19 nt, Artificial Sequence
  Description of Artificial Sequence: Synthetic oligonucleotide
  Sense strand starting at position 3780 of SEQ ID NO: 2800
gaagacaagugaguuuagu

SEQ ID NO: 217465 - RNA, 19 nt, Artificial Sequence
  Description of Artificial Sequence: Synthetic oligonucleotide
  Antisense strand to SEQ ID NO: 217464
acuaaacucacuugucuuc

SEQ ID NO: 217466 - RNA, 19 nt, Artificial Sequence
  Description of Artificial Sequence: Synthetic oligonucleotide
  Sense strand starting at position 115 of SEQ ID NO: 2801
cguuaacaauuacuguaau

SEQ ID NO: 217467 - RNA, 19 nt, Artificial Sequence
  Description of Artificial Sequence: Synthetic oligonucleotide
  Antisense strand to SEQ ID NO: 217466
auuacaguaauuguuaacg

SEQ ID NO: 217468 - RNA, 19 nt, Artificial Sequence
  Description of Artificial Sequence: Synthetic oligonucleotide
  Sense strand starting at position 220 of SEQ ID NO: 2801
uuagcuuuagguuaaacau

SEQ ID NO: 217469 - RNA, 19 nt, Artificial Sequence
  Description of Artificial Sequence: Synthetic oligonucleotide
  Antisense strand to SEQ ID NO: 217468
auguuuaaccuaaagcuaa

SEQ ID NO: 217470 - RNA, 19 nt, Artificial Sequence
  Description of Artificial Sequence: Synthetic oligonucleotide
  Sense strand starting at position 229 of SEQ ID NO: 2801
gguuaaacauacuuacaug

SEQ ID NO: 217471 - RNA, 19 nt, Artificial Sequence
  Description of Artificial Sequence: Synthetic oligonucleotide
  Antisense strand to SEQ ID NO: 217470
cauguaaguauguuuaacc

SEQ ID NO: 217472 - RNA, 19 nt, Artificial Sequence
  Description of Artificial Sequence: Synthetic oligonucleotide
  Sense strand starting at position 239 of SEQ ID NO: 2801
acuuacaugucauuaugga

SEQ ID NO: 217473 - RNA, 19 nt, Artificial Sequence
  Description of Artificial Sequence: Synthetic oligonucleotide
  Antisense strand to SEQ ID NO: 217472
uccauaaugacauguaagu

SEQ ID NO: 217474 - RNA, 19 nt, Artificial Sequence
  Description of Artificial Sequence: Synthetic oligonucleotide
  Sense strand starting at position 436 of SEQ ID NO: 2801
uuagucuaagacuauaagu

SEQ ID NO: 217475 - RNA, 19 nt, Artificial Sequence
  Description of Artificial Sequence: Synthetic oligonucleotide
  Antisense strand to SEQ ID NO: 217474
acuuauagucuuagacuaa

SEQ ID NO: 217476 - RNA, 19 nt, Artificial Sequence
  Description of Artificial Sequence: Synthetic oligonucleotide
  Sense strand starting at position 453 of SEQ ID NO: 2801
guaaucuuauaguccuauu

SEQ ID NO: 217477 - RNA, 19 nt, Artificial Sequence
  Description of Artificial Sequence: Synthetic oligonucleotide
  Antisense strand to SEQ ID NO: 217476
aauaggacuauaagauuac

SEQ ID NO: 217478 - RNA, 19 nt, Artificial Sequence
  Description of Artificial Sequence: Synthetic oligonucleotide
  Sense strand starting at position 535 of SEQ ID NO: 2801
cgucaucagcuuugauuua

SEQ ID NO: 217479 - RNA, 19 nt, Artificial Sequence
  Description of Artificial Sequence: Synthetic oligonucleotide
  Antisense strand to SEQ ID NO: 217478
uaaaucaaagcugaugacg

SEQ ID NO: 217480 - RNA, 19 nt, Artificial Sequence
  Description of Artificial Sequence: Synthetic oligonucleotide
  Sense strand starting at position 704 of SEQ ID NO: 2801
aagcguccugaauaagaga

SEQ ID NO: 217481 - RNA, 19 nt, Artificial Sequence
  Description of Artificial Sequence: Synthetic oligonucleotide
  Antisense strand to SEQ ID NO: 217480
ucucuuauucaggacgcuu

SEQ ID NO: 217482 - RNA, 19 nt, Artificial Sequence
  Description of Artificial Sequence: Synthetic oligonucleotide
  Sense strand starting at position 775 of SEQ ID NO: 2801
acuggaaaguaucuauuau

SEQ ID NO: 217483 - RNA, 19 nt, Artificial Sequence
  Description of Artificial Sequence: Synthetic oligonucleotide
  Antisense strand to SEQ ID NO: 217482
auaauagauacuuuccagu

SEQ ID NO: 217484 - RNA, 19 nt, Artificial Sequence
  Description of Artificial Sequence: Synthetic oligonucleotide
  Sense strand starting at position 909 of SEQ ID NO: 2801
ucaucugucuuacugaaga

SEQ ID NO: 217485 - RNA, 19 nt, Artificial Sequence
  Description of Artificial Sequence: Synthetic oligonucleotide
  Antisense strand to SEQ ID NO: 217484
ucuucaguaagacagauga

SEQ ID NO: 217486 - RNA, 19 nt, Artificial Sequence
  Description of Artificial Sequence: Synthetic oligonucleotide
  Sense strand starting at position 935 of SEQ ID NO: 2801
gcaagcuaacuugacaaca

SEQ ID NO: 217487 - RNA, 19 nt, Artificial Sequence
  Description of Artificial Sequence: Synthetic oligonucleotide
  Antisense strand to SEQ ID NO: 217486
uguugucaaguuagcuugc

SEQ ID NO: 217488 - RNA, 19 nt, Artificial Sequence
  Description of Artificial Sequence: Synthetic oligonucleotide
  Sense strand starting at position 958 of SEQ ID NO: 2801
gagaaaggcuuugugaguu

SEQ ID NO: 217489 - RNA, 19 nt, Artificial Sequence
  Description of Artificial Sequence: Synthetic oligonucleotide
  Antisense strand to SEQ ID NO: 217488
aacucacaaagccuuucuc

SEQ ID NO: 217490 - RNA, 19 nt, Artificial Sequence
  Description of Artificial Sequence: Synthetic oligonucleotide
  Sense strand starting at position 983 of SEQ ID NO: 2801
agguuacaauggucacauu

SEQ ID NO: 217491 - RNA, 19 nt, Artificial Sequence
  Description of Artificial Sequence: Synthetic oligonucleotide
  Antisense strand to SEQ ID NO: 217490
aaugugaccauuguaaccu

SEQ ID NO: 217492 - RNA, 19 nt, Artificial Sequence
  Description of Artificial Sequence: Synthetic oligonucleotide
  Sense strand starting at position 1046 of SEQ ID NO: 2801
uguguauaccaagaucuuu

SEQ ID NO: 217493 - RNA, 19 nt, Artificial Sequence
  Description of Artificial Sequence: Synthetic oligonucleotide
  Antisense strand to SEQ ID NO: 217492
aaagaucuugguauacaca

SEQ ID NO: 217494 - RNA, 19 nt, Artificial Sequence
  Description of Artificial Sequence: Synthetic oligonucleotide
  Sense strand starting at position 1123 of SEQ ID NO: 2801
uuaauaugagcucaucggu

SEQ ID NO: 217495 - RNA, 19 nt, Artificial Sequence
  Description of Artificial Sequence: Synthetic oligonucleotide
  Antisense strand to SEQ ID NO: 217494
accgaugagcucauauuaa

SEQ ID NO: 217496 - RNA, 19 nt, Artificial Sequence
  Description of Artificial Sequence: Synthetic oligonucleotide
  Sense strand starting at position 2156 of SEQ ID NO: 2801
agcagaucugguuacucuu

SEQ ID NO: 217497 - RNA, 19 nt, Artificial Sequence
  Description of Artificial Sequence: Synthetic oligonucleotide
  Antisense strand to SEQ ID NO: 217496
aagaguaaccagaucugcu

SEQ ID NO: 217498 - RNA, 19 nt, Artificial Sequence
  Description of Artificial Sequence: Synthetic oligonucleotide
  Sense strand starting at position 2384 of SEQ ID NO: 2801
caaggcuggcugcauaauu

SEQ ID NO: 217499 - RNA, 19 nt, Artificial Sequence
  Description of Artificial Sequence: Synthetic oligonucleotide
  Antisense strand to SEQ ID NO: 217498
aauuaugcagccagccuug

SEQ ID NO: 217500 - RNA, 19 nt, Artificial Sequence
  Description of Artificial Sequence: Synthetic oligonucleotide
  Sense strand starting at position 2623 of SEQ ID NO: 2801
cuaauauaagugcacugau

SEQ ID NO: 217501 - RNA, 19 nt, Artificial Sequence
  Description of Artificial Sequence: Synthetic oligonucleotide
  Antisense strand to SEQ ID NO: 217500
aucagugcacuuauauuag

SEQ ID NO: 217502 - RNA, 19 nt, Artificial Sequence
  Description of Artificial Sequence: Synthetic oligonucleotide
  Sense strand starting at position 2637 of SEQ ID NO: 2801
cugaucucauauguggaau

SEQ ID NO: 217503 - RNA, 19 nt, Artificial Sequence
  Description of Artificial Sequence: Synthetic oligonucleotide
  Antisense strand to SEQ ID NO: 217502
auuccacauaugagaucag

SEQ ID NO: 217504 - RNA, 19 nt, Artificial Sequence
  Description of Artificial Sequence: Synthetic oligonucleotide
  Sense strand starting at position 2873 of SEQ ID NO: 2801
augaucaggugucuaauau

SEQ ID NO: 217505 - RNA, 19 nt, Artificial Sequence
  Description of Artificial Sequence: Synthetic oligonucleotide
  Antisense strand to SEQ ID NO: 217504
auauuagacaccugaucau

SEQ ID NO: 217506 - RNA, 19 nt, Artificial Sequence
  Description of Artificial Sequence: Synthetic oligonucleotide
  Sense strand starting at position 2874 of SEQ ID NO: 2801
ugaucaggugucuaauaua

SEQ ID NO: 217507 - RNA, 19 nt, Artificial Sequence
  Description of Artificial Sequence: Synthetic oligonucleotide
  Antisense strand to SEQ ID NO: 217506
uauauuagacaccugauca

SEQ ID NO: 217508 - RNA, 19 nt, Artificial Sequence
  Description of Artificial Sequence: Synthetic oligonucleotide
  Sense strand starting at position 2916 of SEQ ID NO: 2801
auaugauaugagugauggu

SEQ ID NO: 217509 - RNA, 19 nt, Artificial Sequence
  Description of Artificial Sequence: Synthetic oligonucleotide
  Antisense strand to SEQ ID NO: 217508
accaucacucauaucauau

SEQ ID NO: 217510 - RNA, 19 nt, Artificial Sequence
  Description of Artificial Sequence: Synthetic oligonucleotide
  Sense strand starting at position 2917 of SEQ ID NO: 2801
uaugauaugagugaugguu

SEQ ID NO: 217511 - RNA, 19 nt, Artificial Sequence
  Description of Artificial Sequence: Synthetic oligonucleotide
  Antisense strand to SEQ ID NO: 217510
aaccaucacucauaucaua

SEQ ID NO: 217512 - RNA, 19 nt, Artificial Sequence
  Description of Artificial Sequence: Synthetic oligonucleotide
  Sense strand starting at position 3244 of SEQ ID NO: 2801
guuccucagcuugaagacu

SEQ ID NO: 217513 - RNA, 19 nt, Artificial Sequence
  Description of Artificial Sequence: Synthetic oligonucleotide
  Antisense strand to SEQ ID NO: 217512
agucuucaagcugaggaac

SEQ ID NO: 217514 - RNA, 19 nt, Artificial Sequence
  Description of Artificial Sequence: Synthetic oligonucleotide
  Sense strand starting at position 3266 of SEQ ID NO: 2801
cauugugggacuugugauc

SEQ ID NO: 217515 - RNA, 19 nt, Artificial Sequence
  Description of Artificial Sequence: Synthetic oligonucleotide
  Antisense strand to SEQ ID NO: 217514
gaucacaagucccacaaug

SEQ ID NO: 217516 - RNA, 19 nt, Artificial Sequence
  Description of Artificial Sequence: Synthetic oligonucleotide
  Sense strand starting at position 3600 of SEQ ID NO: 2801
uuaugaaugcuguauggaa

SEQ ID NO: 217517 - RNA, 19 nt, Artificial Sequence
  Description of Artificial Sequence: Synthetic oligonucleotide
  Antisense strand to SEQ ID NO: 217516
uuccauacagcauucauaa

SEQ ID NO: 217518 - RNA, 19 nt, Artificial Sequence
  Description of Artificial Sequence: Synthetic oligonucleotide
  Sense strand starting at position 3602 of SEQ ID NO: 2801
augaaugcuguauggaaca

SEQ ID NO: 217519 - RNA, 19 nt, Artificial Sequence
  Description of Artificial Sequence: Synthetic oligonucleotide
  Antisense strand to SEQ ID NO: 217518
uguuccauacagcauucau

SEQ ID NO: 217520 - RNA, 19 nt, Artificial Sequence
  Description of Artificial Sequence: Synthetic oligonucleotide
  Sense strand starting at position 3763 of SEQ ID NO: 2801
uggcguaauccacaacauc

SEQ ID NO: 217521 - RNA, 19 nt, Artificial Sequence
  Description of Artificial Sequence: Synthetic oligonucleotide
  Antisense strand to SEQ ID NO: 217520
gauguuguggauuacgcca

SEQ ID NO: 217522 - RNA, 19 nt, Artificial Sequence
  Description of Artificial Sequence: Synthetic oligonucleotide
  Sense strand starting at position 3774 of SEQ ID NO: 2801
acaacaucucuguguggaa

SEQ ID NO: 217523 - RNA, 19 nt, Artificial Sequence
  Description of Artificial Sequence: Synthetic oligonucleotide
  Antisense strand to SEQ ID NO: 217522
uuccacacagagauguugu

SEQ ID NO: 217524 - RNA, 19 nt, Artificial Sequence
  Description of Artificial Sequence: Synthetic oligonucleotide
  Sense strand starting at position 3775 of SEQ ID NO: 2801
caacaucucuguguggaaa

SEQ ID NO: 217525 - RNA, 19 nt, Artificial Sequence
  Description of Artificial Sequence: Synthetic oligonucleotide
  Antisense strand to SEQ ID NO: 217524
uuuccacacagagauguug

SEQ ID NO: 217526 - RNA, 19 nt, Artificial Sequence
  Description of Artificial Sequence: Synthetic oligonucleotide
  Sense strand starting at position 3776 of SEQ ID NO: 2801
aacaucucuguguggaaau

SEQ ID NO: 217527 - RNA, 19 nt, Artificial Sequence
  Description of Artificial Sequence: Synthetic oligonucleotide
  Antisense strand to SEQ ID NO: 217526
auuuccacacagagauguu

SEQ ID NO: 217528 - RNA, 19 nt, Artificial Sequence
  Description of Artificial Sequence: Synthetic oligonucleotide
  Sense strand starting at position 3778 of SEQ ID NO: 2801
caucucuguguggaaauga

SEQ ID NO: 217529 - RNA, 19 nt, Artificial Sequence
  Description of Artificial Sequence: Synthetic oligonucleotide
  Antisense strand to SEQ ID NO: 217528
ucauuuccacacagagaug

SEQ ID NO: 217530 - RNA, 19 nt, Artificial Sequence
  Description of Artificial Sequence: Synthetic oligonucleotide
  Sense strand starting at position 3786 of SEQ ID NO: 2801
uguggaaaugauuguuuag

SEQ ID NO: 217531 - RNA, 19 nt, Artificial Sequence
  Description of Artificial Sequence: Synthetic oligonucleotide
  Antisense strand to SEQ ID NO: 217530
cuaaacaaucauuuccaca

SEQ ID NO: 217532 - RNA, 19 nt, Artificial Sequence
  Description of Artificial Sequence: Synthetic oligonucleotide
  Sense strand starting at position 3788 of SEQ ID NO: 2801
uggaaaugauuguuuagua

SEQ ID NO: 217533 - RNA, 19 nt, Artificial Sequence
  Description of Artificial Sequence: Synthetic oligonucleotide
  Antisense strand to SEQ ID NO: 217532
uacuaaacaaucauuucca

SEQ ID NO: 217534 - RNA, 19 nt, Artificial Sequence
  Description of Artificial Sequence: Synthetic oligonucleotide
  Sense strand starting at position 3789 of SEQ ID NO: 2801
ggaaaugauuguuuaguaa

SEQ ID NO: 217535 - RNA, 19 nt, Artificial Sequence
  Description of Artificial Sequence: Synthetic oligonucleotide
  Antisense strand to SEQ ID NO: 217534
uuacuaaacaaucauuucc

SEQ ID NO: 217536 - RNA, 19 nt, Artificial Sequence
  Description of Artificial Sequence: Synthetic oligonucleotide
  Sense strand starting at position 3801 of SEQ ID NO: 2801
uuaguaauucccugaauga

SEQ ID NO: 217537 - RNA, 19 nt, Artificial Sequence
  Description of Artificial Sequence: Synthetic oligonucleotide
  Antisense strand to SEQ ID NO: 217536
ucauucagggaauuacuaa

SEQ ID NO: 217538 - RNA, 19 nt, Artificial Sequence
  Description of Artificial Sequence: Synthetic oligonucleotide
  Sense strand starting at position 3843 of SEQ ID NO: 2801
uuguguguuccucaaggaa

SEQ ID NO: 217539 - RNA, 19 nt, Artificial Sequence
  Description of Artificial Sequence: Synthetic oligonucleotide
  Antisense strand to SEQ ID NO: 217538
uuccuugaggaacacacaa

SEQ ID NO: 217540 - RNA, 19 nt, Artificial Sequence
  Description of Artificial Sequence: Synthetic oligonucleotide
  Sense strand starting at position 3920 of SEQ ID NO: 2801
guaauaaagcaacagaguu

SEQ ID NO: 217541 - RNA, 19 nt, Artificial Sequence
  Description of Artificial Sequence: Synthetic oligonucleotide
  Antisense strand to SEQ ID NO: 217540
aacucuguugcuuuauuac

SEQ ID NO: 217542 - RNA, 19 nt, Artificial Sequence
  Description of Artificial Sequence: Synthetic oligonucleotide
  Sense strand starting at position 3965 of SEQ ID NO: 2801
gacugagggcaguaugauu

SEQ ID NO: 217543 - RNA, 19 nt, Artificial Sequence
  Description of Artificial Sequence: Synthetic oligonucleotide
  Antisense strand to SEQ ID NO: 217542
aaucauacugcccucaguc

SEQ ID NO: 217544 - RNA, 19 nt, Artificial Sequence
  Description of Artificial Sequence: Synthetic oligonucleotide
  Sense strand starting at position 3970 of SEQ ID NO: 2801
agggcaguaugauucuaag

SEQ ID NO: 217545 - RNA, 19 nt, Artificial Sequence
  Description of Artificial Sequence: Synthetic oligonucleotide
  Antisense strand to SEQ ID NO: 217544
cuuagaaucauacugcccu

SEQ ID NO: 217546 - RNA, 19 nt, Artificial Sequence
  Description of Artificial Sequence: Synthetic oligonucleotide
  Sense strand starting at position 222 of SEQ ID NO: 2802
ugcugaaaccuuuacuuga

SEQ ID NO: 217547 - RNA, 19 nt, Artificial Sequence
  Description of Artificial Sequence: Synthetic oligonucleotide
  Antisense strand to SEQ ID NO: 217546
ucaaguaaagguuucagca

SEQ ID NO: 217548 - RNA, 19 nt, Artificial Sequence
  Description of Artificial Sequence: Synthetic oligonucleotide
  Sense strand starting at position 245 of SEQ ID NO: 2802
agaugagaccuuugcuucu

SEQ ID NO: 217549 - RNA, 19 nt, Artificial Sequence
  Description of Artificial Sequence: Synthetic oligonucleotide
  Antisense strand to SEQ ID NO: 217548
agaagcaaaggucucaucu

SEQ ID NO: 217550 - RNA, 19 nt, Artificial Sequence
  Description of Artificial Sequence: Synthetic oligonucleotide
  Sense strand starting at position 247 of SEQ ID NO: 2802
augagaccuuugcuucuaa

SEQ ID NO: 217551 - RNA, 19 nt, Artificial Sequence
  Description of Artificial Sequence: Synthetic oligonucleotide
  Antisense strand to SEQ ID NO: 217550
uuagaagcaaaggucucau

SEQ ID NO: 217552 - RNA, 19 nt, Artificial Sequence
  Description of Artificial Sequence: Synthetic oligonucleotide
  Sense strand starting at position 248 of SEQ ID NO: 2802
ugagaccuuugcuucuaaa

SEQ ID NO: 217553 - RNA, 19 nt, Artificial Sequence
  Description of Artificial Sequence: Synthetic oligonucleotide
  Antisense strand to SEQ ID NO: 217552
uuuagaagcaaaggucuca

SEQ ID NO: 217554 - RNA, 19 nt, Artificial Sequence
  Description of Artificial Sequence: Synthetic oligonucleotide
  Sense strand starting at position 259 of SEQ ID NO: 2802
cuucuaaagaggugaauug

SEQ ID NO: 217555 - RNA, 19 nt, Artificial Sequence
  Description of Artificial Sequence: Synthetic oligonucleotide
  Antisense strand to SEQ ID NO: 217554
caauucaccucuuuagaag

SEQ ID NO: 217556 - RNA, 19 nt, Artificial Sequence
  Description of Artificial Sequence: Synthetic oligonucleotide
  Sense strand starting at position 458 of SEQ ID NO: 2802
cugaucaaucugcaugcua

SEQ ID NO: 217557 - RNA, 19 nt, Artificial Sequence
  Description of Artificial Sequence: Synthetic oligonucleotide
  Antisense strand to SEQ ID NO: 217556
uagcaugcagauugaucag

SEQ ID NO: 217558 - RNA, 19 nt, Artificial Sequence
  Description of Artificial Sequence: Synthetic oligonucleotide
  Sense strand starting at position 519 of SEQ ID NO: 2802
ccaggaauacuaugucuua

SEQ ID NO: 217559 - RNA, 19 nt, Artificial Sequence
  Description of Artificial Sequence: Synthetic oligonucleotide
  Antisense strand to SEQ ID NO: 217558
uaagacauaguauuccugg

SEQ ID NO: 217560 - RNA, 19 nt, Artificial Sequence
  Description of Artificial Sequence: Synthetic oligonucleotide
  Sense strand starting at position 522 of SEQ ID NO: 2802
ggaauacuaugucuuaaac

SEQ ID NO: 217561 - RNA, 19 nt, Artificial Sequence
  Description of Artificial Sequence: Synthetic oligonucleotide
  Antisense strand to SEQ ID NO: 217560
guuuaagacauaguauucc

SEQ ID NO: 217562 - RNA, 19 nt, Artificial Sequence
  Description of Artificial Sequence: Synthetic oligonucleotide
  Sense strand starting at position 531 of SEQ ID NO: 2802
ugucuuaaacuacgauaug

SEQ ID NO: 217563 - RNA, 19 nt, Artificial Sequence
  Description of Artificial Sequence: Synthetic oligonucleotide
  Antisense strand to SEQ ID NO: 217562
cauaucguaguuuaagaca

SEQ ID NO: 217564 - RNA, 19 nt, Artificial Sequence
  Description of Artificial Sequence: Synthetic oligonucleotide
  Sense strand starting at position 681 of SEQ ID NO: 2802
agaaucugaugcuuaacau

SEQ ID NO: 217565 - RNA, 19 nt, Artificial Sequence
  Description of Artificial Sequence: Synthetic oligonucleotide
  Antisense strand to SEQ ID NO: 217564
auguuaagcaucagauucu

SEQ ID NO: 217566 - RNA, 19 nt, Artificial Sequence
  Description of Artificial Sequence: Synthetic oligonucleotide
  Sense strand starting at position 740 of SEQ ID NO: 2802
guauuuaucuuggaacuga

SEQ ID NO: 217567 - RNA, 19 nt, Artificial Sequence
  Description of Artificial Sequence: Synthetic oligonucleotide
  Antisense strand to SEQ ID NO: 217566
ucaguuccaagauaaauac

SEQ ID NO: 217568 - RNA, 19 nt, Artificial Sequence
  Description of Artificial Sequence: Synthetic oligonucleotide
  Sense strand starting at position 799 of SEQ ID NO: 2802
aaguaaguguuauuugcaa

SEQ ID NO: 217569 - RNA, 19 nt, Artificial Sequence
  Description of Artificial Sequence: Synthetic oligonucleotide
  Antisense strand to SEQ ID NO: 217568
uugcaaauaacacuuacuu

SEQ ID NO: 217570 - RNA, 19 nt, Artificial Sequence
  Description of Artificial Sequence: Synthetic oligonucleotide
  Sense strand starting at position 865 of SEQ ID NO: 2802
guuauucugcuugaaacua

SEQ ID NO: 217571 - RNA, 19 nt, Artificial Sequence
  Description of Artificial Sequence: Synthetic oligonucleotide
  Antisense strand to SEQ ID NO: 217570
uaguuucaagcagaauaac

SEQ ID NO: 217572 - RNA, 19 nt, Artificial Sequence
  Description of Artificial Sequence: Synthetic oligonucleotide
  Sense strand starting at position 897 of SEQ ID NO: 2802
uuuccuaaagcaggaguaa

SEQ ID NO: 217573 - RNA, 19 nt, Artificial Sequence
  Description of Artificial Sequence: Synthetic oligonucleotide
  Antisense strand to SEQ ID NO: 217572
uuacuccugcuuuaggaaa

SEQ ID NO: 217574 - RNA, 19 nt, Artificial Sequence
  Description of Artificial Sequence: Synthetic oligonucleotide
  Sense strand starting at position 898 of SEQ ID NO: 2802
uuccuaaagcaggaguaau

SEQ ID NO: 217575 - RNA, 19 nt, Artificial Sequence
  Description of Artificial Sequence: Synthetic oligonucleotide
  Antisense strand to SEQ ID NO: 217574
auuacuccugcuuuaggaa

SEQ ID NO: 217576 - RNA, 19 nt, Artificial Sequence
  Description of Artificial Sequence: Synthetic oligonucleotide
  Sense strand starting at position 1184 of SEQ ID NO: 2802
aggaaacuaagucguacaa

SEQ ID NO: 217577 - RNA, 19 nt, Artificial Sequence
  Description of Artificial Sequence: Synthetic oligonucleotide
  Antisense strand to SEQ ID NO: 217576
uuguacgacuuaguuuccu

SEQ ID NO: 217578 - RNA, 19 nt, Artificial Sequence
  Description of Artificial Sequence: Synthetic oligonucleotide
  Sense strand starting at position 1188 of SEQ ID NO: 2802
aacuaagucguacaaguau

SEQ ID NO: 217579 - RNA, 19 nt, Artificial Sequence
  Description of Artificial Sequence: Synthetic oligonucleotide
  Antisense strand to SEQ ID NO: 217578
auacuuguacgacuuaguu

SEQ ID NO: 217580 - RNA, 19 nt, Artificial Sequence
  Description of Artificial Sequence: Synthetic oligonucleotide
  Sense strand starting at position 1418 of SEQ ID NO: 2802
gaccaucuggcagguagaa

SEQ ID NO: 217581 - RNA, 19 nt, Artificial Sequence
  Description of Artificial Sequence: Synthetic oligonucleotide
  Antisense strand to SEQ ID NO: 217580
uucuaccugccagaugguc

SEQ ID NO: 217582 - RNA, 19 nt, Artificial Sequence
  Description of Artificial Sequence: Synthetic oligonucleotide
  Sense strand starting at position 2452 of SEQ ID NO: 2802
gucagcguccugcuuguua

SEQ ID NO: 217583 - RNA, 19 nt, Artificial Sequence
  Description of Artificial Sequence: Synthetic oligonucleotide
  Antisense strand to SEQ ID NO: 217582
uaacaagcaggacgcugac

SEQ ID NO: 217584 - RNA, 19 nt, Artificial Sequence
  Description of Artificial Sequence: Synthetic oligonucleotide
  Sense strand starting at position 2467 of SEQ ID NO: 2802
guuaaugauugucuaauac

SEQ ID NO: 217585 - RNA, 19 nt, Artificial Sequence
  Description of Artificial Sequence: Synthetic oligonucleotide
  Antisense strand to SEQ ID NO: 217584
guauuagacaaucauuaac

SEQ ID NO: 217586 - RNA, 19 nt, Artificial Sequence
  Description of Artificial Sequence: Synthetic oligonucleotide
  Sense strand starting at position 2511 of SEQ ID NO: 2802
gguaauugugagggcaaca

SEQ ID NO: 217587 - RNA, 19 nt, Artificial Sequence
  Description of Artificial Sequence: Synthetic oligonucleotide
  Antisense strand to SEQ ID NO: 217586
uguugcccucacaauuacc

SEQ ID NO: 217588 - RNA, 19 nt, Artificial Sequence
  Description of Artificial Sequence: Synthetic oligonucleotide
  Sense strand starting at position 2611 of SEQ ID NO: 2802
gguguucucguaugauuug

SEQ ID NO: 217589 - RNA, 19 nt, Artificial Sequence
  Description of Artificial Sequence: Synthetic oligonucleotide
  Antisense strand to SEQ ID NO: 217588
caaaucauacgagaacacc

SEQ ID NO: 217590 - RNA, 19 nt, Artificial Sequence
  Description of Artificial Sequence: Synthetic oligonucleotide
  Sense strand starting at position 2616 of SEQ ID NO: 2802
ucucguaugauuuggguuu

SEQ ID NO: 217591 - RNA, 19 nt, Artificial Sequence
  Description of Artificial Sequence: Synthetic oligonucleotide
  Antisense strand to SEQ ID NO: 217590
aaacccaaaucauacgaga

SEQ ID NO: 217592 - RNA, 19 nt, Artificial Sequence
  Description of Artificial Sequence: Synthetic oligonucleotide
  Sense strand starting at position 2627 of SEQ ID NO: 2802
uuggguuucccuuauucca

SEQ ID NO: 217593 - RNA, 19 nt, Artificial Sequence
  Description of Artificial Sequence: Synthetic oligonucleotide
  Antisense strand to SEQ ID NO: 217592
uggaauaagggaaacccaa

SEQ ID NO: 217594 - RNA, 19 nt, Artificial Sequence
  Description of Artificial Sequence: Synthetic oligonucleotide
  Sense strand starting at position 2656 of SEQ ID NO: 2802
acgacuucgcuuugauuua

SEQ ID NO: 217595 - RNA, 19 nt, Artificial Sequence
  Description of Artificial Sequence: Synthetic oligonucleotide
  Antisense strand to SEQ ID NO: 217594
uaaaucaaagcgaagucgu

SEQ ID NO: 217596 - RNA, 19 nt, Artificial Sequence
  Description of Artificial Sequence: Synthetic oligonucleotide
  Sense strand starting at position 2806 of SEQ ID NO: 2802
aauauaguuuggguguaaa

SEQ ID NO: 217597 - RNA, 19 nt, Artificial Sequence
  Description of Artificial Sequence: Synthetic oligonucleotide
  Antisense strand to SEQ ID NO: 217596
uuuacacccaaacuauauu

SEQ ID NO: 217598 - RNA, 19 nt, Artificial Sequence
  Description of Artificial Sequence: Synthetic oligonucleotide
  Sense strand starting at position 2809 of SEQ ID NO: 2802
auaguuuggguguaaauga

SEQ ID NO: 217599 - RNA, 19 nt, Artificial Sequence
  Description of Artificial Sequence: Synthetic oligonucleotide
  Antisense strand to SEQ ID NO: 217598
ucauuuacacccaaacuau

SEQ ID NO: 217600 - RNA, 19 nt, Artificial Sequence
  Description of Artificial Sequence: Synthetic oligonucleotide
  Sense strand starting at position 2819 of SEQ ID NO: 2802
uguaaaugagauuguugau

SEQ ID NO: 217601 - RNA, 19 nt, Artificial Sequence
  Description of Artificial Sequence: Synthetic oligonucleotide
  Antisense strand to SEQ ID NO: 217600
aucaacaaucucauuuaca

SEQ ID NO: 217602 - RNA, 19 nt, Artificial Sequence
  Description of Artificial Sequence: Synthetic oligonucleotide
  Sense strand starting at position 2825 of SEQ ID NO: 2802
ugagauuguugauuaaaug

SEQ ID NO: 217603 - RNA, 19 nt, Artificial Sequence
  Description of Artificial Sequence: Synthetic oligonucleotide
  Antisense strand to SEQ ID NO: 217602
cauuuaaucaacaaucuca

SEQ ID NO: 217604 - RNA, 19 nt, Artificial Sequence
  Description of Artificial Sequence: Synthetic oligonucleotide
  Sense strand starting at position 2835 of SEQ ID NO: 2802
gauuaaauguagucagaua

SEQ ID NO: 217605 - RNA, 19 nt, Artificial Sequence
  Description of Artificial Sequence: Synthetic oligonucleotide
  Antisense strand to SEQ ID NO: 217604
uaucugacuacauuuaauc

SEQ ID NO: 217606 - RNA, 19 nt, Artificial Sequence
  Description of Artificial Sequence: Synthetic oligonucleotide
  Sense strand starting at position 2951 of SEQ ID NO: 2802
gugcaauggcagcuuguua

SEQ ID NO: 217607 - RNA, 19 nt, Artificial Sequence
  Description of Artificial Sequence: Synthetic oligonucleotide
  Antisense strand to SEQ ID NO: 217606
uaacaagcugccauugcac

SEQ ID NO: 217608 - RNA, 19 nt, Artificial Sequence
  Description of Artificial Sequence: Synthetic oligonucleotide
  Sense strand starting at position 3105 of SEQ ID NO: 2802
ggaagugaacucugauuac

SEQ ID NO: 217609 - RNA, 19 nt, Artificial Sequence
  Description of Artificial Sequence: Synthetic oligonucleotide
  Antisense strand to SEQ ID NO: 217608
guaaucagaguucacuucc

SEQ ID NO: 217610 - RNA, 19 nt, Artificial Sequence
  Description of Artificial Sequence: Synthetic oligonucleotide
  Sense strand starting at position 3108 of SEQ ID NO: 2802
agugaacucugauuacuug

SEQ ID NO: 217611 - RNA, 19 nt, Artificial Sequence
  Description of Artificial Sequence: Synthetic oligonucleotide
  Antisense strand to SEQ ID NO: 217610
caaguaaucagaguucacu

SEQ ID NO: 217612 - RNA, 19 nt, Artificial Sequence
  Description of Artificial Sequence: Synthetic oligonucleotide
  Sense strand starting at position 3642 of SEQ ID NO: 2802
uauucuaagcgugaaggaa

SEQ ID NO: 217613 - RNA, 19 nt, Artificial Sequence
  Description of Artificial Sequence: Synthetic oligonucleotide
  Antisense strand to SEQ ID NO: 217612
uuccuucacgcuuagaaua

SEQ ID NO: 217614 - RNA, 19 nt, Artificial Sequence
  Description of Artificial Sequence: Synthetic oligonucleotide
  Sense strand starting at position 3665 of SEQ ID NO: 2802
auuagaguuugagugcaga

SEQ ID NO: 217615 - RNA, 19 nt, Artificial Sequence
  Description of Artificial Sequence: Synthetic oligonucleotide
  Antisense strand to SEQ ID NO: 217614
ucugcacucaaacucuaau

SEQ ID NO: 217616 - RNA, 19 nt, Artificial Sequence
  Description of Artificial Sequence: Synthetic oligonucleotide
  Sense strand starting at position 3668 of SEQ ID NO: 2802
agaguuugagugcagaaca

SEQ ID NO: 217617 - RNA, 19 nt, Artificial Sequence
  Description of Artificial Sequence: Synthetic oligonucleotide
  Antisense strand to SEQ ID NO: 217616
uguucugcacucaaacucu

SEQ ID NO: 217618 - RNA, 19 nt, Artificial Sequence
  Description of Artificial Sequence: Synthetic oligonucleotide
  Sense strand starting at position 3679 of SEQ ID NO: 2802
gcagaacaguuacuugauc

SEQ ID NO: 217619 - RNA, 19 nt, Artificial Sequence
  Description of Artificial Sequence: Synthetic oligonucleotide
  Antisense strand to SEQ ID NO: 217618
gaucaaguaacuguucugc

SEQ ID NO: 217620 - RNA, 19 nt, Artificial Sequence
  Description of Artificial Sequence: Synthetic oligonucleotide
  Sense strand starting at position 3684 of SEQ ID NO: 2802
acaguuacuugaucugauu

SEQ ID NO: 217621 - RNA, 19 nt, Artificial Sequence
  Description of Artificial Sequence: Synthetic oligonucleotide
  Antisense strand to SEQ ID NO: 217620
aaucagaucaaguaacugu

SEQ ID NO: 217622 - RNA, 19 nt, Artificial Sequence
  Description of Artificial Sequence: Synthetic oligonucleotide
  Sense strand starting at position 3803 of SEQ ID NO: 2802
cuacaagguuugucaaaca

SEQ ID NO: 217623 - RNA, 19 nt, Artificial Sequence
  Description of Artificial Sequence: Synthetic oligonucleotide
  Antisense strand to SEQ ID NO: 217622
uguuugacaaaccuuguag

SEQ ID NO: 217624 - RNA, 19 nt, Artificial Sequence
  Description of Artificial Sequence: Synthetic oligonucleotide
  Sense strand starting at position 3875 of SEQ ID NO: 2802
auggacaauucuguaucaa

SEQ ID NO: 217625 - RNA, 19 nt, Artificial Sequence
  Description of Artificial Sequence: Synthetic oligonucleotide
  Antisense strand to SEQ ID NO: 217624
uugauacagaauuguccau

SEQ ID NO: 217626 - RNA, 19 nt, Artificial Sequence
  Description of Artificial Sequence: Synthetic oligonucleotide
  Sense strand starting at position 80 of SEQ ID NO: 2803
gugguuuauggucauccaa

SEQ ID NO: 217627 - RNA, 19 nt, Artificial Sequence
  Description of Artificial Sequence: Synthetic oligonucleotide
  Antisense strand to SEQ ID NO: 217626
uuggaugaccauaaaccac

SEQ ID NO: 217628 - RNA, 19 nt, Artificial Sequence
  Description of Artificial Sequence: Synthetic oligonucleotide
  Sense strand starting at position 154 of SEQ ID NO: 2803
caaguaagacuaugguuga

SEQ ID NO: 217629 - RNA, 19 nt, Artificial Sequence
  Description of Artificial Sequence: Synthetic oligonucleotide
  Antisense strand to SEQ ID NO: 217628
ucaaccauagucuuacuug

SEQ ID NO: 217630 - RNA, 19 nt, Artificial Sequence
  Description of Artificial Sequence: Synthetic oligonucleotide
  Sense strand starting at position 157 of SEQ ID NO: 2803
guaagacuaugguugauau

SEQ ID NO: 217631 - RNA, 19 nt, Artificial Sequence
  Description of Artificial Sequence: Synthetic oligonucleotide
  Antisense strand to SEQ ID NO: 217630
auaucaaccauagucuuac

SEQ ID NO: 217632 - RNA, 19 nt, Artificial Sequence
  Description of Artificial Sequence: Synthetic oligonucleotide
  Sense strand starting at position 158 of SEQ ID NO: 2803
uaagacuaugguugauauc

SEQ ID NO: 217633 - RNA, 19 nt, Artificial Sequence
  Description of Artificial Sequence: Synthetic oligonucleotide
  Antisense strand to SEQ ID NO: 217632
gauaucaaccauagucuua

SEQ ID NO: 217634 - RNA, 19 nt, Artificial Sequence
  Description of Artificial Sequence: Synthetic oligonucleotide
  Sense strand starting at position 164 of SEQ ID NO: 2803
uaugguugauaucuuaaga

SEQ ID NO: 217635 - RNA, 19 nt, Artificial Sequence
  Description of Artificial Sequence: Synthetic oligonucleotide
  Antisense strand to SEQ ID NO: 217634
ucuuaagauaucaaccaua

SEQ ID NO: 217636 - RNA, 19 nt, Artificial Sequence
  Description of Artificial Sequence: Synthetic oligonucleotide
  Sense strand starting at position 244 of SEQ ID NO: 2803
ugaguaaacugaccuugua

SEQ ID NO: 217637 - RNA, 19 nt, Artificial Sequence
  Description of Artificial Sequence: Synthetic oligonucleotide
  Antisense strand to SEQ ID NO: 217636
uacaaggucaguuuacuca

SEQ ID NO: 217638 - RNA, 19 nt, Artificial Sequence
  Description of Artificial Sequence: Synthetic oligonucleotide
  Sense strand starting at position 247 of SEQ ID NO: 2803
guaaacugaccuuguauca

SEQ ID NO: 217639 - RNA, 19 nt, Artificial Sequence
  Description of Artificial Sequence: Synthetic oligonucleotide
  Antisense strand to SEQ ID NO: 217638
ugauacaaggucaguuuac

SEQ ID NO: 217640 - RNA, 19 nt, Artificial Sequence
  Description of Artificial Sequence: Synthetic oligonucleotide
  Sense strand starting at position 357 of SEQ ID NO: 2803
cuggcauagaagcaguaua

SEQ ID NO: 217641 - RNA, 19 nt, Artificial Sequence
  Description of Artificial Sequence: Synthetic oligonucleotide
  Antisense strand to SEQ ID NO: 217640
uauacugcuucuaugccag

SEQ ID NO: 217642 - RNA, 19 nt, Artificial Sequence
  Description of Artificial Sequence: Synthetic oligonucleotide
  Sense strand starting at position 478 of SEQ ID NO: 2803
cauaaugaggcuugagagu

SEQ ID NO: 217643 - RNA, 19 nt, Artificial Sequence
  Description of Artificial Sequence: Synthetic oligonucleotide
  Antisense strand to SEQ ID NO: 217642
acucucaagccucauuaug

SEQ ID NO: 217644 - RNA, 19 nt, Artificial Sequence
  Description of Artificial Sequence: Synthetic oligonucleotide
  Sense strand starting at position 484 of SEQ ID NO: 2803
gaggcuugagagugucaag

SEQ ID NO: 217645 - RNA, 19 nt, Artificial Sequence
  Description of Artificial Sequence: Synthetic oligonucleotide
  Antisense strand to SEQ ID NO: 217644
cuugacacucucaagccuc

SEQ ID NO: 217646 - RNA, 19 nt, Artificial Sequence
  Description of Artificial Sequence: Synthetic oligonucleotide
  Sense strand starting at position 820 of SEQ ID NO: 2803
ccaaguuuccuguaucaaa

SEQ ID NO: 217647 - RNA, 19 nt, Artificial Sequence
  Description of Artificial Sequence: Synthetic oligonucleotide
  Antisense strand to SEQ ID NO: 217646
uuugauacaggaaacuugg

SEQ ID NO: 217648 - RNA, 19 nt, Artificial Sequence
  Description of Artificial Sequence: Synthetic oligonucleotide
  Sense strand starting at position 903 of SEQ ID NO: 2803
gggaguuucuccuuaccag

SEQ ID NO: 217649 - RNA, 19 nt, Artificial Sequence
  Description of Artificial Sequence: Synthetic oligonucleotide
  Antisense strand to SEQ ID NO: 217648
cugguaaggagaaacuccc

SEQ ID NO: 217650 - RNA, 19 nt, Artificial Sequence
  Description of Artificial Sequence: Synthetic oligonucleotide
  Sense strand starting at position 904 of SEQ ID NO: 2803
ggaguuucuccuuaccagu

SEQ ID NO: 217651 - RNA, 19 nt, Artificial Sequence
  Description of Artificial Sequence: Synthetic oligonucleotide
  Antisense strand to SEQ ID NO: 217650
acugguaaggagaaacucc

SEQ ID NO: 217652 - RNA, 19 nt, Artificial Sequence
  Description of Artificial Sequence: Synthetic oligonucleotide
  Sense strand starting at position 1010 of SEQ ID NO: 2803
gaauuaugacgcugacuga

SEQ ID NO: 217653 - RNA, 19 nt, Artificial Sequence
  Description of Artificial Sequence: Synthetic oligonucleotide
  Antisense strand to SEQ ID NO: 217652
ucagucagcgucauaauuc

SEQ ID NO: 217654 - RNA, 19 nt, Artificial Sequence
  Description of Artificial Sequence: Synthetic oligonucleotide
  Sense strand starting at position 1011 of SEQ ID NO: 2803
aauuaugacgcugacugaa

SEQ ID NO: 217655 - RNA, 19 nt, Artificial Sequence
  Description of Artificial Sequence: Synthetic oligonucleotide
  Antisense strand to SEQ ID NO: 217654
uucagucagcgucauaauu

SEQ ID NO: 217656 - RNA, 19 nt, Artificial Sequence
  Description of Artificial Sequence: Synthetic oligonucleotide
  Sense strand starting at position 1013 of SEQ ID NO: 2803
uuaugacgcugacugaaau

SEQ ID NO: 217657 - RNA, 19 nt, Artificial Sequence
  Description of Artificial Sequence: Synthetic oligonucleotide
  Antisense strand to SEQ ID NO: 217656
auuucagucagcgucauaa

SEQ ID NO: 217658 - RNA, 19 nt, Artificial Sequence
  Description of Artificial Sequence: Synthetic oligonucleotide
  Sense strand starting at position 1078 of SEQ ID NO: 2803
cccgaaacuucuguauaag

SEQ ID NO: 217659 - RNA, 19 nt, Artificial Sequence
  Description of Artificial Sequence: Synthetic oligonucleotide
  Antisense strand to SEQ ID NO: 217658
cuuauacagaaguuucggg

SEQ ID NO: 217660 - RNA, 19 nt, Artificial Sequence
  Description of Artificial Sequence: Synthetic oligonucleotide
  Sense strand starting at position 1079 of SEQ ID NO: 2803
ccgaaacuucuguauaagu

SEQ ID NO: 217661 - RNA, 19 nt, Artificial Sequence
  Description of Artificial Sequence: Synthetic oligonucleotide
  Antisense strand to SEQ ID NO: 217660
acuuauacagaaguuucgg

SEQ ID NO: 217662 - RNA, 19 nt, Artificial Sequence
  Description of Artificial Sequence: Synthetic oligonucleotide
  Sense strand starting at position 1648 of SEQ ID NO: 2803
ggcaccuccguuuaggaua

SEQ ID NO: 217663 - RNA, 19 nt, Artificial Sequence
  Description of Artificial Sequence: Synthetic oligonucleotide
  Antisense strand to SEQ ID NO: 217662
uauccuaaacggaggugcc

SEQ ID NO: 217664 - RNA, 19 nt, Artificial Sequence
  Description of Artificial Sequence: Synthetic oligonucleotide
  Sense strand starting at position 1699 of SEQ ID NO: 2803
ggagcagcgguccagaauu

SEQ ID NO: 217665 - RNA, 19 nt, Artificial Sequence
  Description of Artificial Sequence: Synthetic oligonucleotide
  Antisense strand to SEQ ID NO: 217664
aauucuggaccgcugcucc

SEQ ID NO: 217666 - RNA, 19 nt, Artificial Sequence
  Description of Artificial Sequence: Synthetic oligonucleotide
  Sense strand starting at position 2274 of SEQ ID NO: 2803
cccguagucguguucagca

SEQ ID NO: 217667 - RNA, 19 nt, Artificial Sequence
  Description of Artificial Sequence: Synthetic oligonucleotide
  Antisense strand to SEQ ID NO: 217666
ugcugaacacgacuacggg

SEQ ID NO: 217668 - RNA, 19 nt, Artificial Sequence
  Description of Artificial Sequence: Synthetic oligonucleotide
  Sense strand starting at position 2500 of SEQ ID NO: 2803
cguguuagaguuguacugu

SEQ ID NO: 217669 - RNA, 19 nt, Artificial Sequence
  Description of Artificial Sequence: Synthetic oligonucleotide
  Antisense strand to SEQ ID NO: 217668
acaguacaacucuaacacg

SEQ ID NO: 217670 - RNA, 19 nt, Artificial Sequence
  Description of Artificial Sequence: Synthetic oligonucleotide
  Sense strand starting at position 2698 of SEQ ID NO: 2803
uggaguuccuuguuugaaa

SEQ ID NO: 217671 - RNA, 19 nt, Artificial Sequence
  Description of Artificial Sequence: Synthetic oligonucleotide
  Antisense strand to SEQ ID NO: 217670
uuucaaacaaggaacucca

SEQ ID NO: 217672 - RNA, 19 nt, Artificial Sequence
  Description of Artificial Sequence: Synthetic oligonucleotide
  Sense strand starting at position 2699 of SEQ ID NO: 2803
ggaguuccuuguuugaaac

SEQ ID NO: 217673 - RNA, 19 nt, Artificial Sequence
  Description of Artificial Sequence: Synthetic oligonucleotide
  Antisense strand to SEQ ID NO: 217672
guuucaaacaaggaacucc

SEQ ID NO: 217674 - RNA, 19 nt, Artificial Sequence
  Description of Artificial Sequence: Synthetic oligonucleotide
  Sense strand starting at position 2755 of SEQ ID NO: 2803
aggcuaagaugugcaaauu

SEQ ID NO: 217675 - RNA, 19 nt, Artificial Sequence
  Description of Artificial Sequence: Synthetic oligonucleotide
  Antisense strand to SEQ ID NO: 217674
aauuugcacaucuuagccu

SEQ ID NO: 217676 - RNA, 19 nt, Artificial Sequence
  Description of Artificial Sequence: Synthetic oligonucleotide
  Sense strand starting at position 2764 of SEQ ID NO: 2803
ugugcaaauuucuuagggu

SEQ ID NO: 217677 - RNA, 19 nt, Artificial Sequence
  Description of Artificial Sequence: Synthetic oligonucleotide
  Antisense strand to SEQ ID NO: 217676
acccuaagaaauuugcaca

SEQ ID NO: 217678 - RNA, 19 nt, Artificial Sequence
  Description of Artificial Sequence: Synthetic oligonucleotide
  Sense strand starting at position 2868 of SEQ ID NO: 2803
gggaauuaaugcucaucau

SEQ ID NO: 217679 - RNA, 19 nt, Artificial Sequence
  Description of Artificial Sequence: Synthetic oligonucleotide
  Antisense strand to SEQ ID NO: 217678
augaugagcauuaauuccc

SEQ ID NO: 217680 - RNA, 19 nt, Artificial Sequence
  Description of Artificial Sequence: Synthetic oligonucleotide
  Sense strand starting at position 2869 of SEQ ID NO: 2803
ggaauuaaugcucaucauu

SEQ ID NO: 217681 - RNA, 19 nt, Artificial Sequence
  Description of Artificial Sequence: Synthetic oligonucleotide
  Antisense strand to SEQ ID NO: 217680
aaugaugagcauuaauucc

SEQ ID NO: 217682 - RNA, 19 nt, Artificial Sequence
  Description of Artificial Sequence: Synthetic oligonucleotide
  Sense strand starting at position 2906 of SEQ ID NO: 2803
agaggucugguauauagua

SEQ ID NO: 217683 - RNA, 19 nt, Artificial Sequence
  Description of Artificial Sequence: Synthetic oligonucleotide
  Antisense strand to SEQ ID NO: 217682
uacuauauaccagaccucu

SEQ ID NO: 217684 - RNA, 19 nt, Artificial Sequence
  Description of Artificial Sequence: Synthetic oligonucleotide
  Sense strand starting at position 3284 of SEQ ID NO: 2803
uucugaggaucuguaguua

SEQ ID NO: 217685 - RNA, 19 nt, Artificial Sequence
  Description of Artificial Sequence: Synthetic oligonucleotide
  Antisense strand to SEQ ID NO: 217684
uaacuacagauccucagaa

SEQ ID NO: 217686 - RNA, 19 nt, Artificial Sequence
  Description of Artificial Sequence: Synthetic oligonucleotide
  Sense strand starting at position 3320 of SEQ ID NO: 2803
aggucuuaggcaggagaaa

SEQ ID NO: 217687 - RNA, 19 nt, Artificial Sequence
  Description of Artificial Sequence: Synthetic oligonucleotide
  Antisense strand to SEQ ID NO: 217686
uuucuccugccuaagaccu

SEQ ID NO: 217688 - RNA, 19 nt, Artificial Sequence
  Description of Artificial Sequence: Synthetic oligonucleotide
  Sense strand starting at position 3339 of SEQ ID NO: 2803
aaagcauuggucuggaaag

SEQ ID NO: 217689 - RNA, 19 nt, Artificial Sequence
  Description of Artificial Sequence: Synthetic oligonucleotide
  Antisense strand to SEQ ID NO: 217688
cuuuccagaccaaugcuuu

SEQ ID NO: 217690 - RNA, 19 nt, Artificial Sequence
  Description of Artificial Sequence: Synthetic oligonucleotide
  Sense strand starting at position 3341 of SEQ ID NO: 2803
agcauuggucuggaaagua

SEQ ID NO: 217691 - RNA, 19 nt, Artificial Sequence
  Description of Artificial Sequence: Synthetic oligonucleotide
  Antisense strand to SEQ ID NO: 217690
uacuuuccagaccaaugcu

SEQ ID NO: 217692 - RNA, 19 nt, Artificial Sequence
  Description of Artificial Sequence: Synthetic oligonucleotide
  Sense strand starting at position 3398 of SEQ ID NO: 2803
ccgccauuucuacaucagu

SEQ ID NO: 217693 - RNA, 19 nt, Artificial Sequence
  Description of Artificial Sequence: Synthetic oligonucleotide
  Antisense strand to SEQ ID NO: 217692
acugauguagaaauggcgg

SEQ ID NO: 217694 - RNA, 19 nt, Artificial Sequence
  Description of Artificial Sequence: Synthetic oligonucleotide
  Sense strand starting at position 3615 of SEQ ID NO: 2803
caguuuaagccagaguuuc

SEQ ID NO: 217695 - RNA, 19 nt, Artificial Sequence
  Description of Artificial Sequence: Synthetic oligonucleotide
  Antisense strand to SEQ ID NO: 217694
gaaacucuggcuuaaacug

SEQ ID NO: 217696 - RNA, 19 nt, Artificial Sequence
  Description of Artificial Sequence: Synthetic oligonucleotide
  Sense strand starting at position 3688 of SEQ ID NO: 2803
ucagcaaaccagugaggua

SEQ ID NO: 217697 - RNA, 19 nt, Artificial Sequence
  Description of Artificial Sequence: Synthetic oligonucleotide
  Antisense strand to SEQ ID NO: 217696
uaccucacugguuugcuga

SEQ ID NO: 217698 - RNA, 19 nt, Artificial Sequence
  Description of Artificial Sequence: Synthetic oligonucleotide
  Sense strand starting at position 3709 of SEQ ID NO: 2803
cagcucugauauguuauga

SEQ ID NO: 217699 - RNA, 19 nt, Artificial Sequence
  Description of Artificial Sequence: Synthetic oligonucleotide
  Antisense strand to SEQ ID NO: 217698
ucauaacauaucagagcug

SEQ ID NO: 217700 - RNA, 19 nt, Artificial Sequence
  Description of Artificial Sequence: Synthetic oligonucleotide
  Sense strand starting at position 3773 of SEQ ID NO: 2803
ggaaauugaguuuaggcuu

SEQ ID NO: 217701 - RNA, 19 nt, Artificial Sequence
  Description of Artificial Sequence: Synthetic oligonucleotide
  Antisense strand to SEQ ID NO: 217700
aagccuaaacucaauuucc

SEQ ID NO: 217702 - RNA, 19 nt, Artificial Sequence
  Description of Artificial Sequence: Synthetic oligonucleotide
  Sense strand starting at position 3812 of SEQ ID NO: 2803
gccuaauaauaggaaauuu

SEQ ID NO: 217703 - RNA, 19 nt, Artificial Sequence
  Description of Artificial Sequence: Synthetic oligonucleotide
  Antisense strand to SEQ ID NO: 217702
aaauuuccuauuauuaggc

SEQ ID NO: 217704 - RNA, 19 nt, Artificial Sequence
  Description of Artificial Sequence: Synthetic oligonucleotide
  Sense strand starting at position 3863 of SEQ ID NO: 2803
agccucacucugggauuau

SEQ ID NO: 217705 - RNA, 19 nt, Artificial Sequence
  Description of Artificial Sequence: Synthetic oligonucleotide
  Antisense strand to SEQ ID NO: 217704
auaaucccagagugaggcu

SEQ ID NO: 217706 - RNA, 19 nt, Artificial Sequence
  Description of Artificial Sequence: Synthetic oligonucleotide
  Sense strand starting at position 141 of SEQ ID NO: 2804
aacuuccugggaugaugua

SEQ ID NO: 217707 - RNA, 19 nt, Artificial Sequence
  Description of Artificial Sequence: Synthetic oligonucleotide
  Antisense strand to SEQ ID NO: 217706
uacaucaucccaggaaguu

SEQ ID NO: 217708 - RNA, 19 nt, Artificial Sequence
  Description of Artificial Sequence: Synthetic oligonucleotide
  Sense strand starting at position 193 of SEQ ID NO: 2804
aguacauggguuuguccaa

SEQ ID NO: 217709 - RNA, 19 nt, Artificial Sequence
  Description of Artificial Sequence: Synthetic oligonucleotide
  Antisense strand to SEQ ID NO: 217708
uuggacaaacccauguacu

SEQ ID NO: 217710 - RNA, 19 nt, Artificial Sequence
  Description of Artificial Sequence: Synthetic oligonucleotide
  Sense strand starting at position 194 of SEQ ID NO: 2804
guacauggguuuguccaaa

SEQ ID NO: 217711 - RNA, 19 nt, Artificial Sequence
  Description of Artificial Sequence: Synthetic oligonucleotide
  Antisense strand to SEQ ID NO: 217710
uuuggacaaacccauguac

SEQ ID NO: 217712 - RNA, 19 nt, Artificial Sequence
  Description of Artificial Sequence: Synthetic oligonucleotide
  Sense strand starting at position 384 of SEQ ID NO: 2804
ccuucucauccggacuauu

SEQ ID NO: 217713 - RNA, 19 nt, Artificial Sequence
  Description of Artificial Sequence: Synthetic oligonucleotide
  Antisense strand to SEQ ID NO: 217712
aauaguccggaugagaagg

SEQ ID NO: 217714 - RNA, 19 nt, Artificial Sequence
  Description of Artificial Sequence: Synthetic oligonucleotide
  Sense strand starting at position 392 of SEQ ID NO: 2804
uccggacuauucuuuaaac

SEQ ID NO: 217715 - RNA, 19 nt, Artificial Sequence
  Description of Artificial Sequence: Synthetic oligonucleotide
  Antisense strand to SEQ ID NO: 217714
guuuaaagaauaguccgga

SEQ ID NO: 217716 - RNA, 19 nt, Artificial Sequence
  Description of Artificial Sequence: Synthetic oligonucleotide
  Sense strand starting at position 393 of SEQ ID NO: 2804
ccggacuauucuuuaaaca

SEQ ID NO: 217717 - RNA, 19 nt, Artificial Sequence
  Description of Artificial Sequence: Synthetic oligonucleotide
  Antisense strand to SEQ ID NO: 217716
uguuuaaagaauaguccgg

SEQ ID NO: 217718 - RNA, 19 nt, Artificial Sequence
  Description of Artificial Sequence: Synthetic oligonucleotide
  Sense strand starting at position 649 of SEQ ID NO: 2804
uugcccuucuuaucugaga

SEQ ID NO: 217719 - RNA, 19 nt, Artificial Sequence
  Description of Artificial Sequence: Synthetic oligonucleotide
  Antisense strand to SEQ ID NO: 217718
ucucagauaagaagggcaa

SEQ ID NO: 217720 - RNA, 19 nt, Artificial Sequence
  Description of Artificial Sequence: Synthetic oligonucleotide
  Sense strand starting at position 650 of SEQ ID NO: 2804
ugcccuucuuaucugagau

SEQ ID NO: 217721 - RNA, 19 nt, Artificial Sequence
  Description of Artificial Sequence: Synthetic oligonucleotide
  Antisense strand to SEQ ID NO: 217720
aucucagauaagaagggca

SEQ ID NO: 217722 - RNA, 19 nt, Artificial Sequence
  Description of Artificial Sequence: Synthetic oligonucleotide
  Sense strand starting at position 665 of SEQ ID NO: 2804
agauuagaaucaucuguuu

SEQ ID NO: 217723 - RNA, 19 nt, Artificial Sequence
  Description of Artificial Sequence: Synthetic oligonucleotide
  Antisense strand to SEQ ID NO: 217722
aaacagaugauucuaaucu

SEQ ID NO: 217724 - RNA, 19 nt, Artificial Sequence
  Description of Artificial Sequence: Synthetic oligonucleotide
  Sense strand starting at position 878 of SEQ ID NO: 2804
acaguaauggaguauccuu

SEQ ID NO: 217725 - RNA, 19 nt, Artificial Sequence
  Description of Artificial Sequence: Synthetic oligonucleotide
  Antisense strand to SEQ ID NO: 217724
aaggauacuccauuacugu

SEQ ID NO: 217726 - RNA, 19 nt, Artificial Sequence
  Description of Artificial Sequence: Synthetic oligonucleotide
  Sense strand starting at position 885 of SEQ ID NO: 2804
uggaguauccuuuacaccu

SEQ ID NO: 217727 - RNA, 19 nt, Artificial Sequence
  Description of Artificial Sequence: Synthetic oligonucleotide
  Antisense strand to SEQ ID NO: 217726
agguguaaaggauacucca

SEQ ID NO: 217728 - RNA, 19 nt, Artificial Sequence
  Description of Artificial Sequence: Synthetic oligonucleotide
  Sense strand starting at position 1000 of SEQ ID NO: 2804
gcuucuggugaacaguuaa

SEQ ID NO: 217729 - RNA, 19 nt, Artificial Sequence
  Description of Artificial Sequence: Synthetic oligonucleotide
  Antisense strand to SEQ ID NO: 217728
uuaacuguucaccagaagc

SEQ ID NO: 217730 - RNA, 19 nt, Artificial Sequence
  Description of Artificial Sequence: Synthetic oligonucleotide
  Sense strand starting at position 1097 of SEQ ID NO: 2804
ggaugaaacugagcucaca

SEQ ID NO: 217731 - RNA, 19 nt, Artificial Sequence
  Description of Artificial Sequence: Synthetic oligonucleotide
  Antisense strand to SEQ ID NO: 217730
ugugagcucaguuucaucc

SEQ ID NO: 217732 - RNA, 19 nt, Artificial Sequence
  Description of Artificial Sequence: Synthetic oligonucleotide
  Sense strand starting at position 1251 of SEQ ID NO: 2804
aucugcgugaaauggaaua

SEQ ID NO: 217733 - RNA, 19 nt, Artificial Sequence
  Description of Artificial Sequence: Synthetic oligonucleotide
  Antisense strand to SEQ ID NO: 217732
uauuccauuucacgcagau

SEQ ID NO: 217734 - RNA, 19 nt, Artificial Sequence
  Description of Artificial Sequence: Synthetic oligonucleotide
  Sense strand starting at position 1288 of SEQ ID NO: 2804
caacgagcaucugucaaau

SEQ ID NO: 217735 - RNA, 19 nt, Artificial Sequence
  Description of Artificial Sequence: Synthetic oligonucleotide
  Antisense strand to SEQ ID NO: 217734
auuugacagaugcucguug

SEQ ID NO: 217736 - RNA, 19 nt, Artificial Sequence
  Description of Artificial Sequence: Synthetic oligonucleotide
  Sense strand starting at position 1322 of SEQ ID NO: 2804
aaguguaaccucgcugcau

SEQ ID NO: 217737 - RNA, 19 nt, Artificial Sequence
  Description of Artificial Sequence: Synthetic oligonucleotide
  Antisense strand to SEQ ID NO: 217736
augcagcgagguuacacuu

SEQ ID NO: 217738 - RNA, 19 nt, Artificial Sequence
  Description of Artificial Sequence: Synthetic oligonucleotide
  Sense strand starting at position 1414 of SEQ ID NO: 2804
gcaccaugguuucucuaaa

SEQ ID NO: 217739 - RNA, 19 nt, Artificial Sequence
  Description of Artificial Sequence: Synthetic oligonucleotide
  Antisense strand to SEQ ID NO: 217738
uuuagagaaaccauggugc

SEQ ID NO: 217740 - RNA, 19 nt, Artificial Sequence
  Description of Artificial Sequence: Synthetic oligonucleotide
  Sense strand starting at position 1451 of SEQ ID NO: 2804
cucucuaaucucgagcuca

SEQ ID NO: 217741 - RNA, 19 nt, Artificial Sequence
  Description of Artificial Sequence: Synthetic oligonucleotide
  Antisense strand to SEQ ID NO: 217740
ugagcucgagauuagagag

SEQ ID NO: 217742 - RNA, 19 nt, Artificial Sequence
  Description of Artificial Sequence: Synthetic oligonucleotide
  Sense strand starting at position 1487 of SEQ ID NO: 2804
ggcucuggcagaugacaaa

SEQ ID NO: 217743 - RNA, 19 nt, Artificial Sequence
  Description of Artificial Sequence: Synthetic oligonucleotide
  Antisense strand to SEQ ID NO: 217742
uuugucaucugccagagcc

SEQ ID NO: 217744 - RNA, 19 nt, Artificial Sequence
  Description of Artificial Sequence: Synthetic oligonucleotide
  Sense strand starting at position 1520 of SEQ ID NO: 2804
aaagccagaugucuucgaa

SEQ ID NO: 217745 - RNA, 19 nt, Artificial Sequence
  Description of Artificial Sequence: Synthetic oligonucleotide
  Antisense strand to SEQ ID NO: 217744
uucgaagacaucuggcuuu

SEQ ID NO: 217746 - RNA, 19 nt, Artificial Sequence
  Description of Artificial Sequence: Synthetic oligonucleotide
  Sense strand starting at position 1528 of SEQ ID NO: 2804
augucuucgaauugaggga

SEQ ID NO: 217747 - RNA, 19 nt, Artificial Sequence
  Description of Artificial Sequence: Synthetic oligonucleotide
  Antisense strand to SEQ ID NO: 217746
ucccucaauucgaagacau

SEQ ID NO: 217748 - RNA, 19 nt, Artificial Sequence
  Description of Artificial Sequence: Synthetic oligonucleotide
  Sense strand starting at position 2503 of SEQ ID NO: 2804
cgaacuuuaacugaucgua

SEQ ID NO: 217749 - RNA, 19 nt, Artificial Sequence
  Description of Artificial Sequence: Synthetic oligonucleotide
  Antisense strand to SEQ ID NO: 217748
uacgaucaguuaaaguucg

SEQ ID NO: 217750 - RNA, 19 nt, Artificial Sequence
  Description of Artificial Sequence: Synthetic oligonucleotide
  Sense strand starting at position 2585 of SEQ ID NO: 2804
cagucugcccaggaguaua

SEQ ID NO: 217751 - RNA, 19 nt, Artificial Sequence
  Description of Artificial Sequence: Synthetic oligonucleotide
  Antisense strand to SEQ ID NO: 217750
uauacuccugggcagacug

SEQ ID NO: 217752 - RNA, 19 nt, Artificial Sequence
  Description of Artificial Sequence: Synthetic oligonucleotide
  Sense strand starting at position 2757 of SEQ ID NO: 2804
acacaugcagagugaucua

SEQ ID NO: 217753 - RNA, 19 nt, Artificial Sequence
  Description of Artificial Sequence: Synthetic oligonucleotide
  Antisense strand to SEQ ID NO: 217752
uagaucacucugcaugugu

SEQ ID NO: 217754 - RNA, 19 nt, Artificial Sequence
  Description of Artificial Sequence: Synthetic oligonucleotide
  Sense strand starting at position 2760 of SEQ ID NO: 2804
caugcagagugaucuaaag

SEQ ID NO: 217755 - RNA, 19 nt, Artificial Sequence
  Description of Artificial Sequence: Synthetic oligonucleotide
  Antisense strand to SEQ ID NO: 217754
cuuuagaucacucugcaug

SEQ ID NO: 217756 - RNA, 19 nt, Artificial Sequence
  Description of Artificial Sequence: Synthetic oligonucleotide
  Sense strand starting at position 2762 of SEQ ID NO: 2804
ugcagagugaucuaaagcu

SEQ ID NO: 217757 - RNA, 19 nt, Artificial Sequence
  Description of Artificial Sequence: Synthetic oligonucleotide
  Antisense strand to SEQ ID NO: 217756
agcuuuagaucacucugca

SEQ ID NO: 217758 - RNA, 19 nt, Artificial Sequence
  Description of Artificial Sequence: Synthetic oligonucleotide
  Sense strand starting at position 2781 of SEQ ID NO: 2804
cagguaccaggauguaaau

SEQ ID NO: 217759 - RNA, 19 nt, Artificial Sequence
  Description of Artificial Sequence: Synthetic oligonucleotide
  Antisense strand to SEQ ID NO: 217758
auuuacauccugguaccug

SEQ ID NO: 217760 - RNA, 19 nt, Artificial Sequence
  Description of Artificial Sequence: Synthetic oligonucleotide
  Sense strand starting at position 2879 of SEQ ID NO: 2804
ugcucuuugcgauaaauga

SEQ ID NO: 217761 - RNA, 19 nt, Artificial Sequence
  Description of Artificial Sequence: Synthetic oligonucleotide
  Antisense strand to SEQ ID NO: 217760
ucauuuaucgcaaagagca

SEQ ID NO: 217762 - RNA, 19 nt, Artificial Sequence
  Description of Artificial Sequence: Synthetic oligonucleotide
  Sense strand starting at position 2883 of SEQ ID NO: 2804
cuuugcgauaaaugaggua

SEQ ID NO: 217763 - RNA, 19 nt, Artificial Sequence
  Description of Artificial Sequence: Synthetic oligonucleotide
  Antisense strand to SEQ ID NO: 217762
uaccucauuuaucgcaaag

SEQ ID NO: 217764 - RNA, 19 nt, Artificial Sequence
  Description of Artificial Sequence: Synthetic oligonucleotide
  Sense strand starting at position 2935 of SEQ ID NO: 2804
ggaccuugagccugaaaga

SEQ ID NO: 217765 - RNA, 19 nt, Artificial Sequence
  Description of Artificial Sequence: Synthetic oligonucleotide
  Antisense strand to SEQ ID NO: 217764
ucuuucaggcucaaggucc

SEQ ID NO: 217766 - RNA, 19 nt, Artificial Sequence
  Description of Artificial Sequence: Synthetic oligonucleotide
  Sense strand starting at position 2978 of SEQ ID NO: 2804
gguaguauucgcuucaguu

SEQ ID NO: 217767 - RNA, 19 nt, Artificial Sequence
  Description of Artificial Sequence: Synthetic oligonucleotide
  Antisense strand to SEQ ID NO: 217766
aacugaagcgaauacuacc

SEQ ID NO: 217768 - RNA, 19 nt, Artificial Sequence
  Description of Artificial Sequence: Synthetic oligonucleotide
  Sense strand starting at position 2979 of SEQ ID NO: 2804
guaguauucgcuucaguuc

SEQ ID NO: 217769 - RNA, 19 nt, Artificial Sequence
  Description of Artificial Sequence: Synthetic oligonucleotide
  Antisense strand to SEQ ID NO: 217768
gaacugaagcgaauacuac

SEQ ID NO: 217770 - RNA, 19 nt, Artificial Sequence
  Description of Artificial Sequence: Synthetic oligonucleotide
  Sense strand starting at position 3049 of SEQ ID NO: 2804
ggaguauacuaguuucuua

SEQ ID NO: 217771 - RNA, 19 nt, Artificial Sequence
  Description of Artificial Sequence: Synthetic oligonucleotide
  Antisense strand to SEQ ID NO: 217770
uaagaaacuaguauacucc

SEQ ID NO: 217772 - RNA, 19 nt, Artificial Sequence
  Description of Artificial Sequence: Synthetic oligonucleotide
  Sense strand starting at position 3060 of SEQ ID NO: 2804
guuucuuacucuccaggga

SEQ ID NO: 217773 - RNA, 19 nt, Artificial Sequence
  Description of Artificial Sequence: Synthetic oligonucleotide
  Antisense strand to SEQ ID NO: 217772
ucccuggagaguaagaaac

SEQ ID NO: 217774 - RNA, 19 nt, Artificial Sequence
  Description of Artificial Sequence: Synthetic oligonucleotide
  Sense strand starting at position 3061 of SEQ ID NO: 2804
uuucuuacucuccagggau

SEQ ID NO: 217775 - RNA, 19 nt, Artificial Sequence
  Description of Artificial Sequence: Synthetic oligonucleotide
  Antisense strand to SEQ ID NO: 217774
aucccuggagaguaagaaa

SEQ ID NO: 217776 - RNA, 19 nt, Artificial Sequence
  Description of Artificial Sequence: Synthetic oligonucleotide
  Sense strand starting at position 3158 of SEQ ID NO: 2804
uugcaaauugauggaugau

SEQ ID NO: 217777 - RNA, 19 nt, Artificial Sequence
  Description of Artificial Sequence: Synthetic oligonucleotide
  Antisense strand to SEQ ID NO: 217776
aucauccaucaauuugcaa

SEQ ID NO: 217778 - RNA, 19 nt, Artificial Sequence
  Description of Artificial Sequence: Synthetic oligonucleotide
  Sense strand starting at position 3352 of SEQ ID NO: 2804
acuguuaagcacuauguua

SEQ ID NO: 217779 - RNA, 19 nt, Artificial Sequence
  Description of Artificial Sequence: Synthetic oligonucleotide
  Antisense strand to SEQ ID NO: 217778
uaacauagugcuuaacagu

SEQ ID NO: 217780 - RNA, 19 nt, Artificial Sequence
  Description of Artificial Sequence: Synthetic oligonucleotide
  Sense strand starting at position 3617 of SEQ ID NO: 2804
aaggauaagugguuuggga

SEQ ID NO: 217781 - RNA, 19 nt, Artificial Sequence
  Description of Artificial Sequence: Synthetic oligonucleotide
  Antisense strand to SEQ ID NO: 217780
ucccaaaccacuuauccuu

SEQ ID NO: 217782 - RNA, 19 nt, Artificial Sequence
  Description of Artificial Sequence: Synthetic oligonucleotide
  Sense strand starting at position 3619 of SEQ ID NO: 2804
ggauaagugguuugggacu

SEQ ID NO: 217783 - RNA, 19 nt, Artificial Sequence
  Description of Artificial Sequence: Synthetic oligonucleotide
  Antisense strand to SEQ ID NO: 217782
agucccaaaccacuuaucc

SEQ ID NO: 217784 - RNA, 19 nt, Artificial Sequence
  Description of Artificial Sequence: Synthetic oligonucleotide
  Sense strand starting at position 3625 of SEQ ID NO: 2804
gugguuugggacuagugau

SEQ ID NO: 217785 - RNA, 19 nt, Artificial Sequence
  Description of Artificial Sequence: Synthetic oligonucleotide
  Antisense strand to SEQ ID NO: 217784
aucacuagucccaaaccac

SEQ ID NO: 217786 - RNA, 19 nt, Artificial Sequence
  Description of Artificial Sequence: Synthetic oligonucleotide
  Sense strand starting at position 577 of SEQ ID NO: 2805
augcccuauguacaugaaa

SEQ ID NO: 217787 - RNA, 19 nt, Artificial Sequence
  Description of Artificial Sequence: Synthetic oligonucleotide
  Antisense strand to SEQ ID NO: 217786
uuucauguacauagggcau

SEQ ID NO: 217788 - RNA, 19 nt, Artificial Sequence
  Description of Artificial Sequence: Synthetic oligonucleotide
  Sense strand starting at position 662 of SEQ ID NO: 2805
ggacucuguaaguaucuga

SEQ ID NO: 217789 - RNA, 19 nt, Artificial Sequence
  Description of Artificial Sequence: Synthetic oligonucleotide
  Antisense strand to SEQ ID NO: 217788
ucagauacuuacagagucc

SEQ ID NO: 217790 - RNA, 19 nt, Artificial Sequence
  Description of Artificial Sequence: Synthetic oligonucleotide
  Sense strand starting at position 1080 of SEQ ID NO: 2805
ggaagucaacaauguguau

SEQ ID NO: 217791 - RNA, 19 nt, Artificial Sequence
  Description of Artificial Sequence: Synthetic oligonucleotide
  Antisense strand to SEQ ID NO: 217790
auacacauuguugacuucc

SEQ ID NO: 217792 - RNA, 19 nt, Artificial Sequence
  Description of Artificial Sequence: Synthetic oligonucleotide
  Sense strand starting at position 1153 of SEQ ID NO: 2805
ggaaguguagacugaugua

SEQ ID NO: 217793 - RNA, 19 nt, Artificial Sequence
  Description of Artificial Sequence: Synthetic oligonucleotide
  Antisense strand to SEQ ID NO: 217792
uacaucagucuacacuucc

SEQ ID NO: 217794 - RNA, 19 nt, Artificial Sequence
  Description of Artificial Sequence: Synthetic oligonucleotide
  Sense strand starting at position 1166 of SEQ ID NO: 2805
gauguaaucuuucuagagg

SEQ ID NO: 217795 - RNA, 19 nt, Artificial Sequence
  Description of Artificial Sequence: Synthetic oligonucleotide
  Antisense strand to SEQ ID NO: 217794
ccucuagaaagauuacauc

SEQ ID NO: 217796 - RNA, 19 nt, Artificial Sequence
  Description of Artificial Sequence: Synthetic oligonucleotide
  Sense strand starting at position 1169 of SEQ ID NO: 2805
guaaucuuucuagagggua

SEQ ID NO: 217797 - RNA, 19 nt, Artificial Sequence
  Description of Artificial Sequence: Synthetic oligonucleotide
  Antisense strand to SEQ ID NO: 217796
uacccucuagaaagauuac

SEQ ID NO: 217798 - RNA, 19 nt, Artificial Sequence
  Description of Artificial Sequence: Synthetic oligonucleotide
  Sense strand starting at position 1172 of SEQ ID NO: 2805
aucuuucuagaggguaauu

SEQ ID NO: 217799 - RNA, 19 nt, Artificial Sequence
  Description of Artificial Sequence: Synthetic oligonucleotide
  Antisense strand to SEQ ID NO: 217798
aauuacccucuagaaagau

SEQ ID NO: 217800 - RNA, 19 nt, Artificial Sequence
  Description of Artificial Sequence: Synthetic oligonucleotide
  Sense strand starting at position 1393 of SEQ ID NO: 2805
uugcuaaugccauaggaaa

SEQ ID NO: 217801 - RNA, 19 nt, Artificial Sequence
  Description of Artificial Sequence: Synthetic oligonucleotide
  Antisense strand to SEQ ID NO: 217800
uuuccuauggcauuagcaa

SEQ ID NO: 217802 - RNA, 19 nt, Artificial Sequence
  Description of Artificial Sequence: Synthetic oligonucleotide
  Sense strand starting at position 1445 of SEQ ID NO: 2805
gaaauagugcugcauacau

SEQ ID NO: 217803 - RNA, 19 nt, Artificial Sequence
  Description of Artificial Sequence: Synthetic oligonucleotide
  Antisense strand to SEQ ID NO: 217802
auguaugcagcacuauuuc

SEQ ID NO: 217804 - RNA, 19 nt, Artificial Sequence
  Description of Artificial Sequence: Synthetic oligonucleotide
  Sense strand starting at position 1492 of SEQ ID NO: 2805
aguacuuaucucuagguga

SEQ ID NO: 217805 - RNA, 19 nt, Artificial Sequence
  Description of Artificial Sequence: Synthetic oligonucleotide
  Antisense strand to SEQ ID NO: 217804
ucaccuagagauaaguacu

SEQ ID NO: 217806 - RNA, 19 nt, Artificial Sequence
  Description of Artificial Sequence: Synthetic oligonucleotide
  Sense strand starting at position 1495 of SEQ ID NO: 2805
acuuaucucuaggugaaau

SEQ ID NO: 217807 - RNA, 19 nt, Artificial Sequence
  Description of Artificial Sequence: Synthetic oligonucleotide
  Antisense strand to SEQ ID NO: 217806
auuucaccuagagauaagu

SEQ ID NO: 217808 - RNA, 19 nt, Artificial Sequence
  Description of Artificial Sequence: Synthetic oligonucleotide
  Sense strand starting at position 1545 of SEQ ID NO: 2805
uuaggauaaugugauuuac

SEQ ID NO: 217809 - RNA, 19 nt, Artificial Sequence
  Description of Artificial Sequence: Synthetic oligonucleotide
  Antisense strand to SEQ ID NO: 217808
guaaaucacauuauccuaa

SEQ ID NO: 217810 - RNA, 19 nt, Artificial Sequence
  Description of Artificial Sequence: Synthetic oligonucleotide
  Sense strand starting at position 1667 of SEQ ID NO: 2805
uuaggaaauguuugcuaga

SEQ ID NO: 217811 - RNA, 19 nt, Artificial Sequence
  Description of Artificial Sequence: Synthetic oligonucleotide
  Antisense strand to SEQ ID NO: 217810
ucuagcaaacauuuccuaa

SEQ ID NO: 217812 - RNA, 19 nt, Artificial Sequence
  Description of Artificial Sequence: Synthetic oligonucleotide
  Sense strand starting at position 1668 of SEQ ID NO: 2805
uaggaaauguuugcuagau

SEQ ID NO: 217813 - RNA, 19 nt, Artificial Sequence
  Description of Artificial Sequence: Synthetic oligonucleotide
  Antisense strand to SEQ ID NO: 217812
aucuagcaaacauuuccua

SEQ ID NO: 217814 - RNA, 19 nt, Artificial Sequence
  Description of Artificial Sequence: Synthetic oligonucleotide
  Sense strand starting at position 1669 of SEQ ID NO: 2805
aggaaauguuugcuagaua

SEQ ID NO: 217815 - RNA, 19 nt, Artificial Sequence
  Description of Artificial Sequence: Synthetic oligonucleotide
  Antisense strand to SEQ ID NO: 217814
uaucuagcaaacauuuccu

SEQ ID NO: 217816 - RNA, 19 nt, Artificial Sequence
  Description of Artificial Sequence: Synthetic oligonucleotide
  Sense strand starting at position 1767 of SEQ ID NO: 2805
cauggugguauauaugagu

SEQ ID NO: 217817 - RNA, 19 nt, Artificial Sequence
  Description of Artificial Sequence: Synthetic oligonucleotide
  Antisense strand to SEQ ID NO: 217816
acucauauauaccaccaug

SEQ ID NO: 217818 - RNA, 19 nt, Artificial Sequence
  Description of Artificial Sequence: Synthetic oligonucleotide
  Sense strand starting at position 1773 of SEQ ID NO: 2805
gguauauaugaguagcaag

SEQ ID NO: 217819 - RNA, 19 nt, Artificial Sequence
  Description of Artificial Sequence: Synthetic oligonucleotide
  Antisense strand to SEQ ID NO: 217818
cuugcuacucauauauacc

SEQ ID NO: 217820 - RNA, 19 nt, Artificial Sequence
  Description of Artificial Sequence: Synthetic oligonucleotide
  Sense strand starting at position 2001 of SEQ ID NO: 2805
gaucaaguguccuugagaa

SEQ ID NO: 217821 - RNA, 19 nt, Artificial Sequence
  Description of Artificial Sequence: Synthetic oligonucleotide
  Antisense strand to SEQ ID NO: 217820
uucucaaggacacuugauc

SEQ ID NO: 217822 - RNA, 19 nt, Artificial Sequence
  Description of Artificial Sequence: Synthetic oligonucleotide
  Sense strand starting at position 2003 of SEQ ID NO: 2805
ucaaguguccuugagaaug

SEQ ID NO: 217823 - RNA, 19 nt, Artificial Sequence
  Description of Artificial Sequence: Synthetic oligonucleotide
  Antisense strand to SEQ ID NO: 217822
cauucucaaggacacuuga

SEQ ID NO: 217824 - RNA, 19 nt, Artificial Sequence
  Description of Artificial Sequence: Synthetic oligonucleotide
  Sense strand starting at position 2009 of SEQ ID NO: 2805
guccuugagaaugaaugca

SEQ ID NO: 217825 - RNA, 19 nt, Artificial Sequence
  Description of Artificial Sequence: Synthetic oligonucleotide
  Antisense strand to SEQ ID NO: 217824
ugcauucauucucaaggac

SEQ ID NO: 217826 - RNA, 19 nt, Artificial Sequence
  Description of Artificial Sequence: Synthetic oligonucleotide
  Sense strand starting at position 2055 of SEQ ID NO: 2805
ugagauaaaucaguuagug

SEQ ID NO: 217827 - RNA, 19 nt, Artificial Sequence
  Description of Artificial Sequence: Synthetic oligonucleotide
  Antisense strand to SEQ ID NO: 217826
cacuaacugauuuaucuca

SEQ ID NO: 217828 - RNA, 19 nt, Artificial Sequence
  Description of Artificial Sequence: Synthetic oligonucleotide
  Sense strand starting at position 2095 of SEQ ID NO: 2805
gggcaauugcuuuauuaac

SEQ ID NO: 217829 - RNA, 19 nt, Artificial Sequence
  Description of Artificial Sequence: Synthetic oligonucleotide
  Antisense strand to SEQ ID NO: 217828
guuaauaaagcaauugccc

SEQ ID NO: 217830 - RNA, 19 nt, Artificial Sequence
  Description of Artificial Sequence: Synthetic oligonucleotide
  Sense strand starting at position 2145 of SEQ ID NO: 2805
ugggaaaugcuguaccauu

SEQ ID NO: 217831 - RNA, 19 nt, Artificial Sequence
  Description of Artificial Sequence: Synthetic oligonucleotide
  Antisense strand to SEQ ID NO: 217830
aaugguacagcauuuccca

SEQ ID NO: 217832 - RNA, 19 nt, Artificial Sequence
  Description of Artificial Sequence: Synthetic oligonucleotide
  Sense strand starting at position 2153 of SEQ ID NO: 2805
gcuguaccauuugauauuu

SEQ ID NO: 217833 - RNA, 19 nt, Artificial Sequence
  Description of Artificial Sequence: Synthetic oligonucleotide
  Antisense strand to SEQ ID NO: 217832
aaauaucaaaugguacagc

SEQ ID NO: 217834 - RNA, 19 nt, Artificial Sequence
  Description of Artificial Sequence: Synthetic oligonucleotide
  Sense strand starting at position 2241 of SEQ ID NO: 2805
uauguaaagucaccuugga

SEQ ID NO: 217835 - RNA, 19 nt, Artificial Sequence
  Description of Artificial Sequence: Synthetic oligonucleotide
  Antisense strand to SEQ ID NO: 217834
uccaaggugacuuuacaua

SEQ ID NO: 217836 - RNA, 19 nt, Artificial Sequence
  Description of Artificial Sequence: Synthetic oligonucleotide
  Sense strand starting at position 2245 of SEQ ID NO: 2805
uaaagucaccuuggaguau

SEQ ID NO: 217837 - RNA, 19 nt, Artificial Sequence
  Description of Artificial Sequence: Synthetic oligonucleotide
  Antisense strand to SEQ ID NO: 217836
auacuccaaggugacuuua

SEQ ID NO: 217838 - RNA, 19 nt, Artificial Sequence
  Description of Artificial Sequence: Synthetic oligonucleotide
  Sense strand starting at position 2333 of SEQ ID NO: 2805
ggaauaguaggcuagucuu

SEQ ID NO: 217839 - RNA, 19 nt, Artificial Sequence
  Description of Artificial Sequence: Synthetic oligonucleotide
  Antisense strand to SEQ ID NO: 217838
aagacuagccuacuauucc

SEQ ID NO: 217840 - RNA, 19 nt, Artificial Sequence
  Description of Artificial Sequence: Synthetic oligonucleotide
  Sense strand starting at position 2596 of SEQ ID NO: 2805
caugaaggacucugucaga

SEQ ID NO: 217841 - RNA, 19 nt, Artificial Sequence
  Description of Artificial Sequence: Synthetic oligonucleotide
  Antisense strand to SEQ ID NO: 217840
ucugacagaguccuucaug

SEQ ID NO: 217842 - RNA, 19 nt, Artificial Sequence
  Description of Artificial Sequence: Synthetic oligonucleotide
  Sense strand starting at position 2649 of SEQ ID NO: 2805
gcuugaaucucauugacca

SEQ ID NO: 217843 - RNA, 19 nt, Artificial Sequence
  Description of Artificial Sequence: Synthetic oligonucleotide
  Antisense strand to SEQ ID NO: 217842
uggucaaugagauucaagc

SEQ ID NO: 217844 - RNA, 19 nt, Artificial Sequence
  Description of Artificial Sequence: Synthetic oligonucleotide
  Sense strand starting at position 2696 of SEQ ID NO: 2805
uugcuaauagucuaacuga

SEQ ID NO: 217845 - RNA, 19 nt, Artificial Sequence
  Description of Artificial Sequence: Synthetic oligonucleotide
  Antisense strand to SEQ ID NO: 217844
ucaguuagacuauuagcaa

SEQ ID NO: 217846 - RNA, 19 nt, Artificial Sequence
  Description of Artificial Sequence: Synthetic oligonucleotide
  Sense strand starting at position 2699 of SEQ ID NO: 2805
cuaauagucuaacugagca

SEQ ID NO: 217847 - RNA, 19 nt, Artificial Sequence
  Description of Artificial Sequence: Synthetic oligonucleotide
  Antisense strand to SEQ ID NO: 217846
ugcucaguuagacuauuag

SEQ ID NO: 217848 - RNA, 19 nt, Artificial Sequence
  Description of Artificial Sequence: Synthetic oligonucleotide
  Sense strand starting at position 3118 of SEQ ID NO: 2805
agguaugauugaucauauc

SEQ ID NO: 217849 - RNA, 19 nt, Artificial Sequence
  Description of Artificial Sequence: Synthetic oligonucleotide
  Antisense strand to SEQ ID NO: 217848
gauaugaucaaucauaccu

SEQ ID NO: 217850 - RNA, 19 nt, Artificial Sequence
  Description of Artificial Sequence: Synthetic oligonucleotide
  Sense strand starting at position 3126 of SEQ ID NO: 2805
uugaucauaucauugguca

SEQ ID NO: 217851 - RNA, 19 nt, Artificial Sequence
  Description of Artificial Sequence: Synthetic oligonucleotide
  Antisense strand to SEQ ID NO: 217850
ugaccaaugauaugaucaa

SEQ ID NO: 217852 - RNA, 19 nt, Artificial Sequence
  Description of Artificial Sequence: Synthetic oligonucleotide
  Sense strand starting at position 3127 of SEQ ID NO: 2805
ugaucauaucauuggucau

SEQ ID NO: 217853 - RNA, 19 nt, Artificial Sequence
  Description of Artificial Sequence: Synthetic oligonucleotide
  Antisense strand to SEQ ID NO: 217852
augaccaaugauaugauca

SEQ ID NO: 217854 - RNA, 19 nt, Artificial Sequence
  Description of Artificial Sequence: Synthetic oligonucleotide
  Sense strand starting at position 3140 of SEQ ID NO: 2805
ggucauuggugauuaaaua

SEQ ID NO: 217855 - RNA, 19 nt, Artificial Sequence
  Description of Artificial Sequence: Synthetic oligonucleotide
  Antisense strand to SEQ ID NO: 217854
uauuuaaucaccaaugacc

SEQ ID NO: 217856 - RNA, 19 nt, Artificial Sequence
  Description of Artificial Sequence: Synthetic oligonucleotide
  Sense strand starting at position 3335 of SEQ ID NO: 2805
uugaucuuaucacugagga

SEQ ID NO: 217857 - RNA, 19 nt, Artificial Sequence
  Description of Artificial Sequence: Synthetic oligonucleotide
  Antisense strand to SEQ ID NO: 217856
uccucagugauaagaucaa

SEQ ID NO: 217858 - RNA, 19 nt, Artificial Sequence
  Description of Artificial Sequence: Synthetic oligonucleotide
  Sense strand starting at position 3457 of SEQ ID NO: 2805
gcuagaggaguucaucuag

SEQ ID NO: 217859 - RNA, 19 nt, Artificial Sequence
  Description of Artificial Sequence: Synthetic oligonucleotide
  Antisense strand to SEQ ID NO: 217858
cuagaugaacuccucuagc

SEQ ID NO: 217860 - RNA, 19 nt, Artificial Sequence
  Description of Artificial Sequence: Synthetic oligonucleotide
  Sense strand starting at position 3579 of SEQ ID NO: 2805
cagccagugagguaguuaa

SEQ ID NO: 217861 - RNA, 19 nt, Artificial Sequence
  Description of Artificial Sequence: Synthetic oligonucleotide
  Antisense strand to SEQ ID NO: 217860
uuaacuaccucacuggcug

SEQ ID NO: 217862 - RNA, 19 nt, Artificial Sequence
  Description of Artificial Sequence: Synthetic oligonucleotide
  Sense strand starting at position 3606 of SEQ ID NO: 2805
ugacuauugugucccagaa

SEQ ID NO: 217863 - RNA, 19 nt, Artificial Sequence
  Description of Artificial Sequence: Synthetic oligonucleotide
  Antisense strand to SEQ ID NO: 217862
uucugggacacaauaguca

SEQ ID NO: 217864 - RNA, 19 nt, Artificial Sequence
  Description of Artificial Sequence: Synthetic oligonucleotide
  Sense strand starting at position 3660 of SEQ ID NO: 2805
ggaguuacccacuggucaa

SEQ ID NO: 217865 - RNA, 19 nt, Artificial Sequence
  Description of Artificial Sequence: Synthetic oligonucleotide
  Antisense strand to SEQ ID NO: 217864
uugaccaguggguaacucc

SEQ ID NO: 217866 - RNA, 19 nt, Artificial Sequence
  Description of Artificial Sequence: Synthetic oligonucleotide
  Sense strand starting at position 352 of SEQ ID NO: 2806
aagaaagaaugauaagguu

SEQ ID NO: 217867 - RNA, 19 nt, Artificial Sequence
  Description of Artificial Sequence: Synthetic oligonucleotide
  Antisense strand to SEQ ID NO: 217866
aaccuuaucauucuuucuu

SEQ ID NO: 217868 - RNA, 19 nt, Artificial Sequence
  Description of Artificial Sequence: Synthetic oligonucleotide
  Sense strand starting at position 399 of SEQ ID NO: 2806
gucguaagaagaggaaauu

SEQ ID NO: 217869 - RNA, 19 nt, Artificial Sequence
  Description of Artificial Sequence: Synthetic oligonucleotide
  Antisense strand to SEQ ID NO: 217868
aauuuccucuucuuacgac

SEQ ID NO: 217870 - RNA, 19 nt, Artificial Sequence
  Description of Artificial Sequence: Synthetic oligonucleotide
  Sense strand starting at position 606 of SEQ ID NO: 2806
gcagccugaguagauaaau

SEQ ID NO: 217871 - RNA, 19 nt, Artificial Sequence
  Description of Artificial Sequence: Synthetic oligonucleotide
  Antisense strand to SEQ ID NO: 217870
auuuaucuacucaggcugc

SEQ ID NO: 217872 - RNA, 19 nt, Artificial Sequence
  Description of Artificial Sequence: Synthetic oligonucleotide
  Sense strand starting at position 672 of SEQ ID NO: 2806
gggauucucuggguugguu

SEQ ID NO: 217873 - RNA, 19 nt, Artificial Sequence
  Description of Artificial Sequence: Synthetic oligonucleotide
  Antisense strand to SEQ ID NO: 217872
aaccaacccagagaauccc

SEQ ID NO: 217874 - RNA, 19 nt, Artificial Sequence
  Description of Artificial Sequence: Synthetic oligonucleotide
  Sense strand starting at position 680 of SEQ ID NO: 2806
cuggguugguucucugaca

SEQ ID NO: 217875 - RNA, 19 nt, Artificial Sequence
  Description of Artificial Sequence: Synthetic oligonucleotide
  Antisense strand to SEQ ID NO: 217874
ugucagagaaccaacccag

SEQ ID NO: 217876 - RNA, 19 nt, Artificial Sequence
  Description of Artificial Sequence: Synthetic oligonucleotide
  Sense strand starting at position 681 of SEQ ID NO: 2806
uggguugguucucugacaa

SEQ ID NO: 217877 - RNA, 19 nt, Artificial Sequence
  Description of Artificial Sequence: Synthetic oligonucleotide
  Antisense strand to SEQ ID NO: 217876
uugucagagaaccaaccca

SEQ ID NO: 217878 - RNA, 19 nt, Artificial Sequence
  Description of Artificial Sequence: Synthetic oligonucleotide
  Sense strand starting at position 829 of SEQ ID NO: 2806
agucacaugcuuugauuau

SEQ ID NO: 217879 - RNA, 19 nt, Artificial Sequence
  Description of Artificial Sequence: Synthetic oligonucleotide
  Antisense strand to SEQ ID NO: 217878
auaaucaaagcaugugacu

SEQ ID NO: 217880 - RNA, 19 nt, Artificial Sequence
  Description of Artificial Sequence: Synthetic oligonucleotide
  Sense strand starting at position 979 of SEQ ID NO: 2806
ugcagucuaugaguagaca

SEQ ID NO: 217881 - RNA, 19 nt, Artificial Sequence
  Description of Artificial Sequence: Synthetic oligonucleotide
  Antisense strand to SEQ ID NO: 217880
ugucuacucauagacugca

SEQ ID NO: 217882 - RNA, 19 nt, Artificial Sequence
  Description of Artificial Sequence: Synthetic oligonucleotide
  Sense strand starting at position 980 of SEQ ID NO: 2806
gcagucuaugaguagacaa

SEQ ID NO: 217883 - RNA, 19 nt, Artificial Sequence
  Description of Artificial Sequence: Synthetic oligonucleotide
  Antisense strand to SEQ ID NO: 217882
uugucuacucauagacugc

SEQ ID NO: 217884 - RNA, 19 nt, Artificial Sequence
  Description of Artificial Sequence: Synthetic oligonucleotide
  Sense strand starting at position 1025 of SEQ ID NO: 2806
cucaaaucacagugucaca

SEQ ID NO: 217885 - RNA, 19 nt, Artificial Sequence
  Description of Artificial Sequence: Synthetic oligonucleotide
  Antisense strand to SEQ ID NO: 217884
ugugacacugugauuugag

SEQ ID NO: 217886 - RNA, 19 nt, Artificial Sequence
  Description of Artificial Sequence: Synthetic oligonucleotide
  Sense strand starting at position 1038 of SEQ ID NO: 2806
gucacaauuagauggguuu

SEQ ID NO: 217887 - RNA, 19 nt, Artificial Sequence
  Description of Artificial Sequence: Synthetic oligonucleotide
  Antisense strand to SEQ ID NO: 217886
aaacccaucuaauugugac

SEQ ID NO: 217888 - RNA, 19 nt, Artificial Sequence
  Description of Artificial Sequence: Synthetic oligonucleotide
  Sense strand starting at position 1039 of SEQ ID NO: 2806
ucacaauuagauggguuua

SEQ ID NO: 217889 - RNA, 19 nt, Artificial Sequence
  Description of Artificial Sequence: Synthetic oligonucleotide
  Antisense strand to SEQ ID NO: 217888
uaaacccaucuaauuguga

SEQ ID NO: 217890 - RNA, 19 nt, Artificial Sequence
  Description of Artificial Sequence: Synthetic oligonucleotide
  Sense strand starting at position 1041 of SEQ ID NO: 2806
acaauuagauggguuuaac

SEQ ID NO: 217891 - RNA, 19 nt, Artificial Sequence
  Description of Artificial Sequence: Synthetic oligonucleotide
  Antisense strand to SEQ ID NO: 217890
guuaaacccaucuaauugu

SEQ ID NO: 217892 - RNA, 19 nt, Artificial Sequence
  Description of Artificial Sequence: Synthetic oligonucleotide
  Sense strand starting at position 1431 of SEQ ID NO: 2806
aauugauauguuggaguga

SEQ ID NO: 217893 - RNA, 19 nt, Artificial Sequence
  Description of Artificial Sequence: Synthetic oligonucleotide
  Antisense strand to SEQ ID NO: 217892
ucacuccaacauaucaauu

SEQ ID NO: 217894 - RNA, 19 nt, Artificial Sequence
  Description of Artificial Sequence: Synthetic oligonucleotide
  Sense strand starting at position 1442 of SEQ ID NO: 2806
uggagugaauacucuugga

SEQ ID NO: 217895 - RNA, 19 nt, Artificial Sequence
  Description of Artificial Sequence: Synthetic oligonucleotide
  Antisense strand to SEQ ID NO: 217894
uccaagaguauucacucca

SEQ ID NO: 217896 - RNA, 19 nt, Artificial Sequence
  Description of Artificial Sequence: Synthetic oligonucleotide
  Sense strand starting at position 1446 of SEQ ID NO: 2806
gugaauacucuuggaguga

SEQ ID NO: 217897 - RNA, 19 nt, Artificial Sequence
  Description of Artificial Sequence: Synthetic oligonucleotide
  Antisense strand to SEQ ID NO: 217896
ucacuccaagaguauucac

SEQ ID NO: 217898 - RNA, 19 nt, Artificial Sequence
  Description of Artificial Sequence: Synthetic oligonucleotide
  Sense strand starting at position 1450 of SEQ ID NO: 2806
auacucuuggagugaacaa

SEQ ID NO: 217899 - RNA, 19 nt, Artificial Sequence
  Description of Artificial Sequence: Synthetic oligonucleotide
  Antisense strand to SEQ ID NO: 217898
uuguucacuccaagaguau

SEQ ID NO: 217900 - RNA, 19 nt, Artificial Sequence
  Description of Artificial Sequence: Synthetic oligonucleotide
  Sense strand starting at position 1581 of SEQ ID NO: 2806
guaugucucagggauacuc

SEQ ID NO: 217901 - RNA, 19 nt, Artificial Sequence
  Description of Artificial Sequence: Synthetic oligonucleotide
  Antisense strand to SEQ ID NO: 217900
gaguaucccugagacauac

SEQ ID NO: 217902 - RNA, 19 nt, Artificial Sequence
  Description of Artificial Sequence: Synthetic oligonucleotide
  Sense strand starting at position 1768 of SEQ ID NO: 2806
aagacugugagugggauaa

SEQ ID NO: 217903 - RNA, 19 nt, Artificial Sequence
  Description of Artificial Sequence: Synthetic oligonucleotide
  Antisense strand to SEQ ID NO: 217902
uuaucccacucacagucuu

SEQ ID NO: 217904 - RNA, 19 nt, Artificial Sequence
  Description of Artificial Sequence: Synthetic oligonucleotide
  Sense strand starting at position 1783 of SEQ ID NO: 2806
auaaauggauagccuuuaa

SEQ ID NO: 217905 - RNA, 19 nt, Artificial Sequence
  Description of Artificial Sequence: Synthetic oligonucleotide
  Antisense strand to SEQ ID NO: 217904
uuaaaggcuauccauuuau

SEQ ID NO: 217906 - RNA, 19 nt, Artificial Sequence
  Description of Artificial Sequence: Synthetic oligonucleotide
  Sense strand starting at position 1787 of SEQ ID NO: 2806
auggauagccuuuaaucau

SEQ ID NO: 217907 - RNA, 19 nt, Artificial Sequence
  Description of Artificial Sequence: Synthetic oligonucleotide
  Antisense strand to SEQ ID NO: 217906
augauuaaaggcuauccau

SEQ ID NO: 217908 - RNA, 19 nt, Artificial Sequence
  Description of Artificial Sequence: Synthetic oligonucleotide
  Sense strand starting at position 2206 of SEQ ID NO: 2806
gcaauagaaugggccuaau

SEQ ID NO: 217909 - RNA, 19 nt, Artificial Sequence
  Description of Artificial Sequence: Synthetic oligonucleotide
  Antisense strand to SEQ ID NO: 217908
auuaggcccauucuauugc

SEQ ID NO: 217910 - RNA, 19 nt, Artificial Sequence
  Description of Artificial Sequence: Synthetic oligonucleotide
  Sense strand starting at position 2223 of SEQ ID NO: 2806
auauguaccaggugggauu

SEQ ID NO: 217911 - RNA, 19 nt, Artificial Sequence
  Description of Artificial Sequence: Synthetic oligonucleotide
  Antisense strand to SEQ ID NO: 217910
aaucccaccugguacauau

SEQ ID NO: 217912 - RNA, 19 nt, Artificial Sequence
  Description of Artificial Sequence: Synthetic oligonucleotide
  Sense strand starting at position 2270 of SEQ ID NO: 2806
gauagcagggacuguuaaa

SEQ ID NO: 217913 - RNA, 19 nt, Artificial Sequence
  Description of Artificial Sequence: Synthetic oligonucleotide
  Antisense strand to SEQ ID NO: 217912
uuuaacagucccugcuauc

SEQ ID NO: 217914 - RNA, 19 nt, Artificial Sequence
  Description of Artificial Sequence: Synthetic oligonucleotide
  Sense strand starting at position 2356 of SEQ ID NO: 2806
ccaguauuauaguccaauu

SEQ ID NO: 217915 - RNA, 19 nt, Artificial Sequence
  Description of Artificial Sequence: Synthetic oligonucleotide
  Antisense strand to SEQ ID NO: 217914
aauuggacuauaauacugg

SEQ ID NO: 217916 - RNA, 19 nt, Artificial Sequence
  Description of Artificial Sequence: Synthetic oligonucleotide
  Sense strand starting at position 2403 of SEQ ID NO: 2806
agagcuguaauuuguguuu

SEQ ID NO: 217917 - RNA, 19 nt, Artificial Sequence
  Description of Artificial Sequence: Synthetic oligonucleotide
  Antisense strand to SEQ ID NO: 217916
aaacacaaauuacagcucu

SEQ ID NO: 217918 - RNA, 19 nt, Artificial Sequence
  Description of Artificial Sequence: Synthetic oligonucleotide
  Sense strand starting at position 2602 of SEQ ID NO: 2806
aucuauugcgaacagcaga

SEQ ID NO: 217919 - RNA, 19 nt, Artificial Sequence
  Description of Artificial Sequence: Synthetic oligonucleotide
  Antisense strand to SEQ ID NO: 217918
ucugcuguucgcaauagau

SEQ ID NO: 217920 - RNA, 19 nt, Artificial Sequence
  Description of Artificial Sequence: Synthetic oligonucleotide
  Sense strand starting at position 2651 of SEQ ID NO: 2806
cuguuucuucuccagguua

SEQ ID NO: 217921 - RNA, 19 nt, Artificial Sequence
  Description of Artificial Sequence: Synthetic oligonucleotide
  Antisense strand to SEQ ID NO: 217920
uaaccuggagaagaaacag

SEQ ID NO: 217922 - RNA, 19 nt, Artificial Sequence
  Description of Artificial Sequence: Synthetic oligonucleotide
  Sense strand starting at position 2683 of SEQ ID NO: 2806
uucuuaugacucuggacuu

SEQ ID NO: 217923 - RNA, 19 nt, Artificial Sequence
  Description of Artificial Sequence: Synthetic oligonucleotide
  Antisense strand to SEQ ID NO: 217922
aaguccagagucauaagaa

SEQ ID NO: 217924 - RNA, 19 nt, Artificial Sequence
  Description of Artificial Sequence: Synthetic oligonucleotide
  Sense strand starting at position 2732 of SEQ ID NO: 2806
aaagaaggguaggaaauau

SEQ ID NO: 217925 - RNA, 19 nt, Artificial Sequence
  Description of Artificial Sequence: Synthetic oligonucleotide
  Antisense strand to SEQ ID NO: 217924
auauuuccuacccuucuuu

SEQ ID NO: 217926 - RNA, 19 nt, Artificial Sequence
  Description of Artificial Sequence: Synthetic oligonucleotide
  Sense strand starting at position 2742 of SEQ ID NO: 2806
aggaaauauuggucacauc

SEQ ID NO: 217927 - RNA, 19 nt, Artificial Sequence
  Description of Artificial Sequence: Synthetic oligonucleotide
  Antisense strand to SEQ ID NO: 217926
gaugugaccaauauuuccu

SEQ ID NO: 217928 - RNA, 19 nt, Artificial Sequence
  Description of Artificial Sequence: Synthetic oligonucleotide
  Sense strand starting at position 2811 of SEQ ID NO: 2806
ugcguuauccuuuagaaau

SEQ ID NO: 217929 - RNA, 19 nt, Artificial Sequence
  Description of Artificial Sequence: Synthetic oligonucleotide
  Antisense strand to SEQ ID NO: 217928
auuucuaaaggauaacgca

SEQ ID NO: 217930 - RNA, 19 nt, Artificial Sequence
  Description of Artificial Sequence: Synthetic oligonucleotide
  Sense strand starting at position 3368 of SEQ ID NO: 2806
gugaguuuaggauaugucu

SEQ ID NO: 217931 - RNA, 19 nt, Artificial Sequence
  Description of Artificial Sequence: Synthetic oligonucleotide
  Antisense strand to SEQ ID NO: 217930
agacauauccuaaacucac

SEQ ID NO: 217932 - RNA, 19 nt, Artificial Sequence
  Description of Artificial Sequence: Synthetic oligonucleotide
  Sense strand starting at position 3479 of SEQ ID NO: 2806
cgacgauaaauacguaaau

SEQ ID NO: 217933 - RNA, 19 nt, Artificial Sequence
  Description of Artificial Sequence: Synthetic oligonucleotide
  Antisense strand to SEQ ID NO: 217932
auuuacguauuuaucgucg

SEQ ID NO: 217934 - RNA, 19 nt, Artificial Sequence
  Description of Artificial Sequence: Synthetic oligonucleotide
  Sense strand starting at position 3480 of SEQ ID NO: 2806
gacgauaaauacguaaauu

SEQ ID NO: 217935 - RNA, 19 nt, Artificial Sequence
  Description of Artificial Sequence: Synthetic oligonucleotide
  Antisense strand to SEQ ID NO: 217934
aauuuacguauuuaucguc

SEQ ID NO: 217936 - RNA, 19 nt, Artificial Sequence
  Description of Artificial Sequence: Synthetic oligonucleotide
  Sense strand starting at position 3617 of SEQ ID NO: 2806
gcaaauauguaguuuacua

SEQ ID NO: 217937 - RNA, 19 nt, Artificial Sequence
  Description of Artificial Sequence: Synthetic oligonucleotide
  Antisense strand to SEQ ID NO: 217936
uaguaaacuacauauuugc

SEQ ID NO: 217938 - RNA, 19 nt, Artificial Sequence
  Description of Artificial Sequence: Synthetic oligonucleotide
  Sense strand starting at position 3719 of SEQ ID NO: 2806
acuccuuugugauuauaca

SEQ ID NO: 217939 - RNA, 19 nt, Artificial Sequence
  Description of Artificial Sequence: Synthetic oligonucleotide
  Antisense strand to SEQ ID NO: 217938
uguauaaucacaaaggagu

SEQ ID NO: 217940 - RNA, 19 nt, Artificial Sequence
  Description of Artificial Sequence: Synthetic oligonucleotide
  Sense strand starting at position 3796 of SEQ ID NO: 2806
aacuguuagugcuuagaga

SEQ ID NO: 217941 - RNA, 19 nt, Artificial Sequence
  Description of Artificial Sequence: Synthetic oligonucleotide
  Antisense strand to SEQ ID NO: 217940
ucucuaagcacuaacaguu

SEQ ID NO: 217942 - RNA, 19 nt, Artificial Sequence
  Description of Artificial Sequence: Synthetic oligonucleotide
  Sense strand starting at position 3797 of SEQ ID NO: 2806
acuguuagugcuuagagaa

SEQ ID NO: 217943 - RNA, 19 nt, Artificial Sequence
  Description of Artificial Sequence: Synthetic oligonucleotide
  Antisense strand to SEQ ID NO: 217942
uucucuaagcacuaacagu

SEQ ID NO: 217944 - RNA, 19 nt, Artificial Sequence
  Description of Artificial Sequence: Synthetic oligonucleotide
  Sense strand starting at position 3925 of SEQ ID NO: 2806
gucacaaaucacugugcaa

SEQ ID NO: 217945 - RNA, 19 nt, Artificial Sequence
  Description of Artificial Sequence: Synthetic oligonucleotide
  Antisense strand to SEQ ID NO: 217944
uugcacagugauuugugac

SEQ ID NO: 217946 - RNA, 19 nt, Artificial Sequence
  Description of Artificial Sequence: Synthetic oligonucleotide
  Sense strand starting at position 35 of SEQ ID NO: 2808
ugaaguauuagauggcaca

SEQ ID NO: 217947 - RNA, 19 nt, Artificial Sequence
  Description of Artificial Sequence: Synthetic oligonucleotide
  Antisense strand to SEQ ID NO: 217946
ugugccaucuaauacuuca

SEQ ID NO: 217948 - RNA, 19 nt, Artificial Sequence
  Description of Artificial Sequence: Synthetic oligonucleotide
  Sense strand starting at position 36 of SEQ ID NO: 2808
gaaguauuagauggcacau

SEQ ID NO: 217949 - RNA, 19 nt, Artificial Sequence
  Description of Artificial Sequence: Synthetic oligonucleotide
  Antisense strand to SEQ ID NO: 217948
augugccaucuaauacuuc

SEQ ID NO: 217950 - RNA, 19 nt, Artificial Sequence
  Description of Artificial Sequence: Synthetic oligonucleotide
  Sense strand starting at position 104 of SEQ ID NO: 2808
acaugaguaccuugaggua

SEQ ID NO: 217951 - RNA, 19 nt, Artificial Sequence
  Description of Artificial Sequence: Synthetic oligonucleotide
  Antisense strand to SEQ ID NO: 217950
uaccucaagguacucaugu

SEQ ID NO: 217952 - RNA, 19 nt, Artificial Sequence
  Description of Artificial Sequence: Synthetic oligonucleotide
  Sense strand starting at position 145 of SEQ ID NO: 2808
guuuacaucuaguuacaau

SEQ ID NO: 217953 - RNA, 19 nt, Artificial Sequence
  Description of Artificial Sequence: Synthetic oligonucleotide
  Antisense strand to SEQ ID NO: 217952
auuguaacuagauguaaac

SEQ ID NO: 217954 - RNA, 19 nt, Artificial Sequence
  Description of Artificial Sequence: Synthetic oligonucleotide
  Sense strand starting at position 166 of SEQ ID NO: 2808
cuuugauguuaguuuagaa

SEQ ID NO: 217955 - RNA, 19 nt, Artificial Sequence
  Description of Artificial Sequence: Synthetic oligonucleotide
  Antisense strand to SEQ ID NO: 217954
uucuaaacuaacaucaaag

SEQ ID NO: 217956 - RNA, 19 nt, Artificial Sequence
  Description of Artificial Sequence: Synthetic oligonucleotide
  Sense strand starting at position 286 of SEQ ID NO: 2808
cuuuauggccauuauguaa

SEQ ID NO: 217957 - RNA, 19 nt, Artificial Sequence
  Description of Artificial Sequence: Synthetic oligonucleotide
  Antisense strand to SEQ ID NO: 217956
uuacauaauggccauaaag

SEQ ID NO: 217958 - RNA, 19 nt, Artificial Sequence
  Description of Artificial Sequence: Synthetic oligonucleotide
  Sense strand starting at position 449 of SEQ ID NO: 2808
guuagaaucuucucaaugu

SEQ ID NO: 217959 - RNA, 19 nt, Artificial Sequence
  Description of Artificial Sequence: Synthetic oligonucleotide
  Antisense strand to SEQ ID NO: 217958
acauugagaagauucuaac

SEQ ID NO: 217960 - RNA, 19 nt, Artificial Sequence
  Description of Artificial Sequence: Synthetic oligonucleotide
  Sense strand starting at position 463 of SEQ ID NO: 2808
aauguuaaaggcugaaguu

SEQ ID NO: 217961 - RNA, 19 nt, Artificial Sequence
  Description of Artificial Sequence: Synthetic oligonucleotide
  Antisense strand to SEQ ID NO: 217960
aacuucagccuuuaacauu

SEQ ID NO: 217962 - RNA, 19 nt, Artificial Sequence
  Description of Artificial Sequence: Synthetic oligonucleotide
  Sense strand starting at position 526 of SEQ ID NO: 2808
cugggaucuugagcuaguu

SEQ ID NO: 217963 - RNA, 19 nt, Artificial Sequence
  Description of Artificial Sequence: Synthetic oligonucleotide
  Antisense strand to SEQ ID NO: 217962
aacuagcucaagaucccag

SEQ ID NO: 217964 - RNA, 19 nt, Artificial Sequence
  Description of Artificial Sequence: Synthetic oligonucleotide
  Sense strand starting at position 679 of SEQ ID NO: 2808
augaauauuccuuggccuu

SEQ ID NO: 217965 - RNA, 19 nt, Artificial Sequence
  Description of Artificial Sequence: Synthetic oligonucleotide
  Antisense strand to SEQ ID NO: 217964
aaggccaaggaauauucau

SEQ ID NO: 217966 - RNA, 19 nt, Artificial Sequence
  Description of Artificial Sequence: Synthetic oligonucleotide
  Sense strand starting at position 1108 of SEQ ID NO: 2808
auuauagauaccuguggag

SEQ ID NO: 217967 - RNA, 19 nt, Artificial Sequence
  Description of Artificial Sequence: Synthetic oligonucleotide
  Antisense strand to SEQ ID NO: 217966
cuccacagguaucuauaau

SEQ ID NO: 217968 - RNA, 19 nt, Artificial Sequence
  Description of Artificial Sequence: Synthetic oligonucleotide
  Sense strand starting at position 1129 of SEQ ID NO: 2808
acagaauuaucagcugcua

SEQ ID NO: 217969 - RNA, 19 nt, Artificial Sequence
  Description of Artificial Sequence: Synthetic oligonucleotide
  Antisense strand to SEQ ID NO: 217968
uagcagcugauaauucugu

SEQ ID NO: 217970 - RNA, 19 nt, Artificial Sequence
  Description of Artificial Sequence: Synthetic oligonucleotide
  Sense strand starting at position 1231 of SEQ ID NO: 2808
uaaagcagugucuacauga

SEQ ID NO: 217971 - RNA, 19 nt, Artificial Sequence
  Description of Artificial Sequence: Synthetic oligonucleotide
  Antisense strand to SEQ ID NO: 217970
ucauguagacacugcuuua

SEQ ID NO: 217972 - RNA, 19 nt, Artificial Sequence
  Description of Artificial Sequence: Synthetic oligonucleotide
  Sense strand starting at position 1525 of SEQ ID NO: 2808
auucuuuauguuggguaaa

SEQ ID NO: 217973 - RNA, 19 nt, Artificial Sequence
  Description of Artificial Sequence: Synthetic oligonucleotide
  Antisense strand to SEQ ID NO: 217972
uuuacccaacauaaagaau

SEQ ID NO: 217974 - RNA, 19 nt, Artificial Sequence
  Description of Artificial Sequence: Synthetic oligonucleotide
  Sense strand starting at position 1548 of SEQ ID NO: 2808
acugucauguuacucagau

SEQ ID NO: 217975 - RNA, 19 nt, Artificial Sequence
  Description of Artificial Sequence: Synthetic oligonucleotide
  Antisense strand to SEQ ID NO: 217974
aucugaguaacaugacagu

SEQ ID NO: 217976 - RNA, 19 nt, Artificial Sequence
  Description of Artificial Sequence: Synthetic oligonucleotide
  Sense strand starting at position 1549 of SEQ ID NO: 2808
cugucauguuacucagaua

SEQ ID NO: 217977 - RNA, 19 nt, Artificial Sequence
  Description of Artificial Sequence: Synthetic oligonucleotide
  Antisense strand to SEQ ID NO: 217976
uaucugaguaacaugacag

SEQ ID NO: 217978 - RNA, 19 nt, Artificial Sequence
  Description of Artificial Sequence: Synthetic oligonucleotide
  Sense strand starting at position 1579 of SEQ ID NO: 2808
agcauuugcuaagucagua

SEQ ID NO: 217979 - RNA, 19 nt, Artificial Sequence
  Description of Artificial Sequence: Synthetic oligonucleotide
  Antisense strand to SEQ ID NO: 217978
uacugacuuagcaaaugcu

SEQ ID NO: 217980 - RNA, 19 nt, Artificial Sequence
  Description of Artificial Sequence: Synthetic oligonucleotide
  Sense strand starting at position 1653 of SEQ ID NO: 2808
cuguauuugccuuguaagg

SEQ ID NO: 217981 - RNA, 19 nt, Artificial Sequence
  Description of Artificial Sequence: Synthetic oligonucleotide
  Antisense strand to SEQ ID NO: 217980
ccuuacaaggcaaauacag

SEQ ID NO: 217982 - RNA, 19 nt, Artificial Sequence
  Description of Artificial Sequence: Synthetic oligonucleotide
  Sense strand starting at position 1731 of SEQ ID NO: 2808
uggguauuaccuugacaga

SEQ ID NO: 217983 - RNA, 19 nt, Artificial Sequence
  Description of Artificial Sequence: Synthetic oligonucleotide
  Antisense strand to SEQ ID NO: 217982
ucugucaagguaauaccca

SEQ ID NO: 217984 - RNA, 19 nt, Artificial Sequence
  Description of Artificial Sequence: Synthetic oligonucleotide
  Sense strand starting at position 2071 of SEQ ID NO: 2808
agguaauguccagagaugu

SEQ ID NO: 217985 - RNA, 19 nt, Artificial Sequence
  Description of Artificial Sequence: Synthetic oligonucleotide
  Antisense strand to SEQ ID NO: 217984
acaucucuggacauuaccu

SEQ ID NO: 217986 - RNA, 19 nt, Artificial Sequence
  Description of Artificial Sequence: Synthetic oligonucleotide
  Sense strand starting at position 2082 of SEQ ID NO: 2808
agagauguuccaugggcau

SEQ ID NO: 217987 - RNA, 19 nt, Artificial Sequence
  Description of Artificial Sequence: Synthetic oligonucleotide
  Antisense strand to SEQ ID NO: 217986
augcccauggaacaucucu

SEQ ID NO: 217988 - RNA, 19 nt, Artificial Sequence
  Description of Artificial Sequence: Synthetic oligonucleotide
  Sense strand starting at position 2505 of SEQ ID NO: 2808
ggguuaauagaguaguaua

SEQ ID NO: 217989 - RNA, 19 nt, Artificial Sequence
  Description of Artificial Sequence: Synthetic oligonucleotide
  Antisense strand to SEQ ID NO: 217988
uauacuacucuauuaaccc

SEQ ID NO: 217990 - RNA, 19 nt, Artificial Sequence
  Description of Artificial Sequence: Synthetic oligonucleotide
  Sense strand starting at position 2855 of SEQ ID NO: 2808
gucacaugacuauguagaa

SEQ ID NO: 217991 - RNA, 19 nt, Artificial Sequence
  Description of Artificial Sequence: Synthetic oligonucleotide
  Antisense strand to SEQ ID NO: 217990
uucuacauagucaugugac

SEQ ID NO: 217992 - RNA, 19 nt, Artificial Sequence
  Description of Artificial Sequence: Synthetic oligonucleotide
  Sense strand starting at position 2896 of SEQ ID NO: 2808
cuuugauacccuugcaaag

SEQ ID NO: 217993 - RNA, 19 nt, Artificial Sequence
  Description of Artificial Sequence: Synthetic oligonucleotide
  Antisense strand to SEQ ID NO: 217992
cuuugcaaggguaucaaag

SEQ ID NO: 217994 - RNA, 19 nt, Artificial Sequence
  Description of Artificial Sequence: Synthetic oligonucleotide
  Sense strand starting at position 2943 of SEQ ID NO: 2808
auaccuaggucuucucaua

SEQ ID NO: 217995 - RNA, 19 nt, Artificial Sequence
  Description of Artificial Sequence: Synthetic oligonucleotide
  Antisense strand to SEQ ID NO: 217994
uaugagaagaccuagguau

SEQ ID NO: 217996 - RNA, 19 nt, Artificial Sequence
  Description of Artificial Sequence: Synthetic oligonucleotide
  Sense strand starting at position 3129 of SEQ ID NO: 2808
auggcuccuggugauagaa

SEQ ID NO: 217997 - RNA, 19 nt, Artificial Sequence
  Description of Artificial Sequence: Synthetic oligonucleotide
  Antisense strand to SEQ ID NO: 217996
uucuaucaccaggagccau

SEQ ID NO: 217998 - RNA, 19 nt, Artificial Sequence
  Description of Artificial Sequence: Synthetic oligonucleotide
  Sense strand starting at position 3162 of SEQ ID NO: 2808
ggcucauacuaguuuauac

SEQ ID NO: 217999 - RNA, 19 nt, Artificial Sequence
  Description of Artificial Sequence: Synthetic oligonucleotide
  Antisense strand to SEQ ID NO: 217998
guauaaacuaguaugagcc

SEQ ID NO: 218000 - RNA, 19 nt, Artificial Sequence
  Description of Artificial Sequence: Synthetic oligonucleotide
  Sense strand starting at position 3205 of SEQ ID NO: 2808
ccaugaaaguugcccaaau

SEQ ID NO: 218001 - RNA, 19 nt, Artificial Sequence
  Description of Artificial Sequence: Synthetic oligonucleotide
  Antisense strand to SEQ ID NO: 218000
auuugggcaacuuucaugg

SEQ ID NO: 218002 - RNA, 19 nt, Artificial Sequence
  Description of Artificial Sequence: Synthetic oligonucleotide
  Sense strand starting at position 3216 of SEQ ID NO: 2808
gcccaaaugcaaugggaaa

SEQ ID NO: 218003 - RNA, 19 nt, Artificial Sequence
  Description of Artificial Sequence: Synthetic oligonucleotide
  Antisense strand to SEQ ID NO: 218002
uuucccauugcauuugggc

SEQ ID NO: 218004 - RNA, 19 nt, Artificial Sequence
  Description of Artificial Sequence: Synthetic oligonucleotide
  Sense strand starting at position 3288 of SEQ ID NO: 2808
aguaaaguuuaagcauaga

SEQ ID NO: 218005 - RNA, 19 nt, Artificial Sequence
  Description of Artificial Sequence: Synthetic oligonucleotide
  Antisense strand to SEQ ID NO: 218004
ucuaugcuuaaacuuuacu

SEQ ID NO: 218006 - RNA, 19 nt, Artificial Sequence
  Description of Artificial Sequence: Synthetic oligonucleotide
  Sense strand starting at position 3303 of SEQ ID NO: 2808
uagaauuauguugagcugu

SEQ ID NO: 218007 - RNA, 19 nt, Artificial Sequence
  Description of Artificial Sequence: Synthetic oligonucleotide
  Antisense strand to SEQ ID NO: 218006
acagcucaacauaauucua

SEQ ID NO: 218008 - RNA, 19 nt, Artificial Sequence
  Description of Artificial Sequence: Synthetic oligonucleotide
  Sense strand starting at position 3318 of SEQ ID NO: 2808
cuguguuauacugaaggau

SEQ ID NO: 218009 - RNA, 19 nt, Artificial Sequence
  Description of Artificial Sequence: Synthetic oligonucleotide
  Antisense strand to SEQ ID NO: 218008
auccuucaguauaacacag

SEQ ID NO: 218010 - RNA, 19 nt, Artificial Sequence
  Description of Artificial Sequence: Synthetic oligonucleotide
  Sense strand starting at position 3321 of SEQ ID NO: 2808
uguuauacugaaggaugca

SEQ ID NO: 218011 - RNA, 19 nt, Artificial Sequence
  Description of Artificial Sequence: Synthetic oligonucleotide
  Antisense strand to SEQ ID NO: 218010
ugcauccuucaguauaaca

SEQ ID NO: 218012 - RNA, 19 nt, Artificial Sequence
  Description of Artificial Sequence: Synthetic oligonucleotide
  Sense strand starting at position 3488 of SEQ ID NO: 2808
ggagacuuaguaugccuua

SEQ ID NO: 218013 - RNA, 19 nt, Artificial Sequence
  Description of Artificial Sequence: Synthetic oligonucleotide
  Antisense strand to SEQ ID NO: 218012
uaaggcauacuaagucucc

SEQ ID NO: 218014 - RNA, 19 nt, Artificial Sequence
  Description of Artificial Sequence: Synthetic oligonucleotide
  Sense strand starting at position 3489 of SEQ ID NO: 2808
gagacuuaguaugccuuaa

SEQ ID NO: 218015 - RNA, 19 nt, Artificial Sequence
  Description of Artificial Sequence: Synthetic oligonucleotide
  Antisense strand to SEQ ID NO: 218014
uuaaggcauacuaagucuc

SEQ ID NO: 218016 - RNA, 19 nt, Artificial Sequence
  Description of Artificial Sequence: Synthetic oligonucleotide
  Sense strand starting at position 3538 of SEQ ID NO: 2808
cauaauagucauggaagua

SEQ ID NO: 218017 - RNA, 19 nt, Artificial Sequence
  Description of Artificial Sequence: Synthetic oligonucleotide
  Antisense strand to SEQ ID NO: 218016
uacuuccaugacuauuaug

SEQ ID NO: 218018 - RNA, 19 nt, Artificial Sequence
  Description of Artificial Sequence: Synthetic oligonucleotide
  Sense strand starting at position 3575 of SEQ ID NO: 2808
ggcgaaauuuguguugaag

SEQ ID NO: 218019 - RNA, 19 nt, Artificial Sequence
  Description of Artificial Sequence: Synthetic oligonucleotide
  Antisense strand to SEQ ID NO: 218018
cuucaacacaaauuucgcc

SEQ ID NO: 218020 - RNA, 19 nt, Artificial Sequence
  Description of Artificial Sequence: Synthetic oligonucleotide
  Sense strand starting at position 3680 of SEQ ID NO: 2808
acuggcuuaguccaauacu

SEQ ID NO: 218021 - RNA, 19 nt, Artificial Sequence
  Description of Artificial Sequence: Synthetic oligonucleotide
  Antisense strand to SEQ ID NO: 218020
aguauuggacuaagccagu

SEQ ID NO: 218022 - RNA, 19 nt, Artificial Sequence
  Description of Artificial Sequence: Synthetic oligonucleotide
  Sense strand starting at position 3683 of SEQ ID NO: 2808
ggcuuaguccaauacuagu

SEQ ID NO: 218023 - RNA, 19 nt, Artificial Sequence
  Description of Artificial Sequence: Synthetic oligonucleotide
  Antisense strand to SEQ ID NO: 218022
acuaguauuggacuaagcc

SEQ ID NO: 218024 - RNA, 19 nt, Artificial Sequence
  Description of Artificial Sequence: Synthetic oligonucleotide
  Sense strand starting at position 3771 of SEQ ID NO: 2808
guugucuuuccuuaauuaa

SEQ ID NO: 218025 - RNA, 19 nt, Artificial Sequence
  Description of Artificial Sequence: Synthetic oligonucleotide
  Antisense strand to SEQ ID NO: 218024
uuaauuaaggaaagacaac

SEQ ID NO: 218026 - RNA, 19 nt, Artificial Sequence
  Description of Artificial Sequence: Synthetic oligonucleotide
  Sense strand starting at position 218 of SEQ ID NO: 2807
uaaugauaugaauguguag

SEQ ID NO: 218027 - RNA, 19 nt, Artificial Sequence
  Description of Artificial Sequence: Synthetic oligonucleotide
  Antisense strand to SEQ ID NO: 218026
cuacacauucauaucauua

SEQ ID NO: 218028 - RNA, 19 nt, Artificial Sequence
  Description of Artificial Sequence: Synthetic oligonucleotide
  Sense strand starting at position 225 of SEQ ID NO: 2807
augaauguguaguuuauga

SEQ ID NO: 218029 - RNA, 19 nt, Artificial Sequence
  Description of Artificial Sequence: Synthetic oligonucleotide
  Antisense strand to SEQ ID NO: 218028
ucauaaacuacacauucau

SEQ ID NO: 218030 - RNA, 19 nt, Artificial Sequence
  Description of Artificial Sequence: Synthetic oligonucleotide
  Sense strand starting at position 227 of SEQ ID NO: 2807
gaauguguaguuuaugaag

SEQ ID NO: 218031 - RNA, 19 nt, Artificial Sequence
  Description of Artificial Sequence: Synthetic oligonucleotide
  Antisense strand to SEQ ID NO: 218030
cuucauaaacuacacauuc

SEQ ID NO: 218032 - RNA, 19 nt, Artificial Sequence
  Description of Artificial Sequence: Synthetic oligonucleotide
  Sense strand starting at position 233 of SEQ ID NO: 2807
guaguuuaugaaggaaaug

SEQ ID NO: 218033 - RNA, 19 nt, Artificial Sequence
  Description of Artificial Sequence: Synthetic oligonucleotide
  Antisense strand to SEQ ID NO: 218032
cauuuccuucauaaacuac

SEQ ID NO: 218034 - RNA, 19 nt, Artificial Sequence
  Description of Artificial Sequence: Synthetic oligonucleotide
  Sense strand starting at position 302 of SEQ ID NO: 2807
guuauauucuuguccauuu

SEQ ID NO: 218035 - RNA, 19 nt, Artificial Sequence
  Description of Artificial Sequence: Synthetic oligonucleotide
  Antisense strand to SEQ ID NO: 218034
aaauggacaagaauauaac

SEQ ID NO: 218036 - RNA, 19 nt, Artificial Sequence
  Description of Artificial Sequence: Synthetic oligonucleotide
  Sense strand starting at position 367 of SEQ ID NO: 2807
guuauucuaguugaaacaa

SEQ ID NO: 218037 - RNA, 19 nt, Artificial Sequence
  Description of Artificial Sequence: Synthetic oligonucleotide
  Antisense strand to SEQ ID NO: 218036
uuguuucaacuagaauaac

SEQ ID NO: 218038 - RNA, 19 nt, Artificial Sequence
  Description of Artificial Sequence: Synthetic oligonucleotide
  Sense strand starting at position 406 of SEQ ID NO: 2807
augauucuguagucugaaa

SEQ ID NO: 218039 - RNA, 19 nt, Artificial Sequence
  Description of Artificial Sequence: Synthetic oligonucleotide
  Antisense strand to SEQ ID NO: 218038
uuucagacuacagaaucau

SEQ ID NO: 218040 - RNA, 19 nt, Artificial Sequence
  Description of Artificial Sequence: Synthetic oligonucleotide
  Sense strand starting at position 657 of SEQ ID NO: 2807
acuaguaugccuuacauca

SEQ ID NO: 218041 - RNA, 19 nt, Artificial Sequence
  Description of Artificial Sequence: Synthetic oligonucleotide
  Antisense strand to SEQ ID NO: 218040
ugauguaaggcauacuagu

SEQ ID NO: 218042 - RNA, 19 nt, Artificial Sequence
  Description of Artificial Sequence: Synthetic oligonucleotide
  Sense strand starting at position 1153 of SEQ ID NO: 2807
aaucaaauucuagguggau

SEQ ID NO: 218043 - RNA, 19 nt, Artificial Sequence
  Description of Artificial Sequence: Synthetic oligonucleotide
  Antisense strand to SEQ ID NO: 218042
auccaccuagaauuugauu

SEQ ID NO: 218044 - RNA, 19 nt, Artificial Sequence
  Description of Artificial Sequence: Synthetic oligonucleotide
  Sense strand starting at position 1154 of SEQ ID NO: 2807
aucaaauucuagguggaua

SEQ ID NO: 218045 - RNA, 19 nt, Artificial Sequence
  Description of Artificial Sequence: Synthetic oligonucleotide
  Antisense strand to SEQ ID NO: 218044
uauccaccuagaauuugau

SEQ ID NO: 218046 - RNA, 19 nt, Artificial Sequence
  Description of Artificial Sequence: Synthetic oligonucleotide
  Sense strand starting at position 1156 of SEQ ID NO: 2807
caaauucuagguggauaua

SEQ ID NO: 218047 - RNA, 19 nt, Artificial Sequence
  Description of Artificial Sequence: Synthetic oligonucleotide
  Antisense strand to SEQ ID NO: 218046
uauauccaccuagaauuug

SEQ ID NO: 218048 - RNA, 19 nt, Artificial Sequence
  Description of Artificial Sequence: Synthetic oligonucleotide
  Sense strand starting at position 1256 of SEQ ID NO: 2807
guuucugaagauuauucuu

SEQ ID NO: 218049 - RNA, 19 nt, Artificial Sequence
  Description of Artificial Sequence: Synthetic oligonucleotide
  Antisense strand to SEQ ID NO: 218048
aagaauaaucuucagaaac

SEQ ID NO: 218050 - RNA, 19 nt, Artificial Sequence
  Description of Artificial Sequence: Synthetic oligonucleotide
  Sense strand starting at position 1288 of SEQ ID NO: 2807
ggauuuacuucuguuguuu

SEQ ID NO: 218051 - RNA, 19 nt, Artificial Sequence
  Description of Artificial Sequence: Synthetic oligonucleotide
  Antisense strand to SEQ ID NO: 218050
aaacaacagaaguaaaucc

SEQ ID NO: 218052 - RNA, 19 nt, Artificial Sequence
  Description of Artificial Sequence: Synthetic oligonucleotide
  Sense strand starting at position 1368 of SEQ ID NO: 2807
aggagaauuaugugacagu

SEQ ID NO: 218053 - RNA, 19 nt, Artificial Sequence
  Description of Artificial Sequence: Synthetic oligonucleotide
  Antisense strand to SEQ ID NO: 218052
acugucacauaauucuccu

SEQ ID NO: 218054 - RNA, 19 nt, Artificial Sequence
  Description of Artificial Sequence: Synthetic oligonucleotide
  Sense strand starting at position 1375 of SEQ ID NO: 2807
uuaugugacaguggauauu

SEQ ID NO: 218055 - RNA, 19 nt, Artificial Sequence
  Description of Artificial Sequence: Synthetic oligonucleotide
  Antisense strand to SEQ ID NO: 218054
aauauccacugucacauaa

SEQ ID NO: 218056 - RNA, 19 nt, Artificial Sequence
  Description of Artificial Sequence: Synthetic oligonucleotide
  Sense strand starting at position 1378 of SEQ ID NO: 2807
ugugacaguggauauuauu

SEQ ID NO: 218057 - RNA, 19 nt, Artificial Sequence
  Description of Artificial Sequence: Synthetic oligonucleotide
  Antisense strand to SEQ ID NO: 218056
aauaauauccacugucaca

SEQ ID NO: 218058 - RNA, 19 nt, Artificial Sequence
  Description of Artificial Sequence: Synthetic oligonucleotide
  Sense strand starting at position 1516 of SEQ ID NO: 2807
ucaucauggguugguaaua

SEQ ID NO: 218059 - RNA, 19 nt, Artificial Sequence
  Description of Artificial Sequence: Synthetic oligonucleotide
  Antisense strand to SEQ ID NO: 218058
uauuaccaacccaugauga

SEQ ID NO: 218060 - RNA, 19 nt, Artificial Sequence
  Description of Artificial Sequence: Synthetic oligonucleotide
  Sense strand starting at position 1517 of SEQ ID NO: 2807
caucauggguugguaauau

SEQ ID NO: 218061 - RNA, 19 nt, Artificial Sequence
  Description of Artificial Sequence: Synthetic oligonucleotide
  Antisense strand to SEQ ID NO: 218060
auauuaccaacccaugaug

SEQ ID NO: 218062 - RNA, 19 nt, Artificial Sequence
  Description of Artificial Sequence: Synthetic oligonucleotide
  Sense strand starting at position 2171 of SEQ ID NO: 2807
caucgcuucggguuucuua

SEQ ID NO: 218063 - RNA, 19 nt, Artificial Sequence
  Description of Artificial Sequence: Synthetic oligonucleotide
  Antisense strand to SEQ ID NO: 218062
uaagaaacccgaagcgaug

SEQ ID NO: 218064 - RNA, 19 nt, Artificial Sequence
  Description of Artificial Sequence: Synthetic oligonucleotide
  Sense strand starting at position 2279 of SEQ ID NO: 2807
agcacucuucuugagaaug

SEQ ID NO: 218065 - RNA, 19 nt, Artificial Sequence
  Description of Artificial Sequence: Synthetic oligonucleotide
  Antisense strand to SEQ ID NO: 218064
cauucucaagaagagugcu

SEQ ID NO: 218066 - RNA, 19 nt, Artificial Sequence
  Description of Artificial Sequence: Synthetic oligonucleotide
  Sense strand starting at position 2290 of SEQ ID NO: 2807
ugagaauguucugcucaag

SEQ ID NO: 218067 - RNA, 19 nt, Artificial Sequence
  Description of Artificial Sequence: Synthetic oligonucleotide
  Antisense strand to SEQ ID NO: 218066
cuugagcagaacauucuca

SEQ ID NO: 218068 - RNA, 19 nt, Artificial Sequence
  Description of Artificial Sequence: Synthetic oligonucleotide
  Sense strand starting at position 2293 of SEQ ID NO: 2807
gaauguucugcucaagauc

SEQ ID NO: 218069 - RNA, 19 nt, Artificial Sequence
  Description of Artificial Sequence: Synthetic oligonucleotide
  Antisense strand to SEQ ID NO: 218068
gaucuugagcagaacauuc

SEQ ID NO: 218070 - RNA, 19 nt, Artificial Sequence
  Description of Artificial Sequence: Synthetic oligonucleotide
  Sense strand starting at position 2496 of SEQ ID NO: 2807
ggaagaaauuccuucugua

SEQ ID NO: 218071 - RNA, 19 nt, Artificial Sequence
  Description of Artificial Sequence: Synthetic oligonucleotide
  Antisense strand to SEQ ID NO: 218070
uacagaaggaauuucuucc

SEQ ID NO: 218072 - RNA, 19 nt, Artificial Sequence
  Description of Artificial Sequence: Synthetic oligonucleotide
  Sense strand starting at position 2577 of SEQ ID NO: 2807
ugaguuagaugcuuaacaa

SEQ ID NO: 218073 - RNA, 19 nt, Artificial Sequence
  Description of Artificial Sequence: Synthetic oligonucleotide
  Antisense strand to SEQ ID NO: 218072
uuguuaagcaucuaacuca

SEQ ID NO: 218074 - RNA, 19 nt, Artificial Sequence
  Description of Artificial Sequence: Synthetic oligonucleotide
  Sense strand starting at position 2602 of SEQ ID NO: 2807
uguaacuaacaguacuauu

SEQ ID NO: 218075 - RNA, 19 nt, Artificial Sequence
  Description of Artificial Sequence: Synthetic oligonucleotide
  Antisense strand to SEQ ID NO: 218074
aauaguacuguuaguuaca

SEQ ID NO: 218076 - RNA, 19 nt, Artificial Sequence
  Description of Artificial Sequence: Synthetic oligonucleotide
  Sense strand starting at position 2620 of SEQ ID NO: 2807
uaaguaacaugguccgaua

SEQ ID NO: 218077 - RNA, 19 nt, Artificial Sequence
  Description of Artificial Sequence: Synthetic oligonucleotide
  Antisense strand to SEQ ID NO: 218076
uaucggaccauguuacuua

SEQ ID NO: 218078 - RNA, 19 nt, Artificial Sequence
  Description of Artificial Sequence: Synthetic oligonucleotide
  Sense strand starting at position 2770 of SEQ ID NO: 2807
cuggguucuguucagagua

SEQ ID NO: 218079 - RNA, 19 nt, Artificial Sequence
  Description of Artificial Sequence: Synthetic oligonucleotide
  Antisense strand to SEQ ID NO: 218078
uacucugaacagaacccag

SEQ ID NO: 218080 - RNA, 19 nt, Artificial Sequence
  Description of Artificial Sequence: Synthetic oligonucleotide
  Sense strand starting at position 2829 of SEQ ID NO: 2807
uuccaagggucuucucaaa

SEQ ID NO: 218081 - RNA, 19 nt, Artificial Sequence
  Description of Artificial Sequence: Synthetic oligonucleotide
  Antisense strand to SEQ ID NO: 218080
uuugagaagacccuuggaa

SEQ ID NO: 218082 - RNA, 19 nt, Artificial Sequence
  Description of Artificial Sequence: Synthetic oligonucleotide
  Sense strand starting at position 2933 of SEQ ID NO: 2807
auaugagauaguuguugau

SEQ ID NO: 218083 - RNA, 19 nt, Artificial Sequence
  Description of Artificial Sequence: Synthetic oligonucleotide
  Antisense strand to SEQ ID NO: 218082
aucaacaacuaucucauau

SEQ ID NO: 218084 - RNA, 19 nt, Artificial Sequence
  Description of Artificial Sequence: Synthetic oligonucleotide
  Sense strand starting at position 2935 of SEQ ID NO: 2807
augagauaguuguugauua

SEQ ID NO: 218085 - RNA, 19 nt, Artificial Sequence
  Description of Artificial Sequence: Synthetic oligonucleotide
  Antisense strand to SEQ ID NO: 218084
uaaucaacaacuaucucau

SEQ ID NO: 218086 - RNA, 19 nt, Artificial Sequence
  Description of Artificial Sequence: Synthetic oligonucleotide
  Sense strand starting at position 3131 of SEQ ID NO: 2807
cugggugaauauucugagu

SEQ ID NO: 218087 - RNA, 19 nt, Artificial Sequence
  Description of Artificial Sequence: Synthetic oligonucleotide
  Antisense strand to SEQ ID NO: 218086
acucagaauauucacccag

SEQ ID NO: 218088 - RNA, 19 nt, Artificial Sequence
  Description of Artificial Sequence: Synthetic oligonucleotide
  Sense strand starting at position 3261 of SEQ ID NO: 2807
auaugauaugcauguauca

SEQ ID NO: 218089 - RNA, 19 nt, Artificial Sequence
  Description of Artificial Sequence: Synthetic oligonucleotide
  Antisense strand to SEQ ID NO: 218088
ugauacaugcauaucauau

SEQ ID NO: 218090 - RNA, 19 nt, Artificial Sequence
  Description of Artificial Sequence: Synthetic oligonucleotide
  Sense strand starting at position 3361 of SEQ ID NO: 2807
ugaacagguuuauugacau

SEQ ID NO: 218091 - RNA, 19 nt, Artificial Sequence
  Description of Artificial Sequence: Synthetic oligonucleotide
  Antisense strand to SEQ ID NO: 218090
augucaauaaaccuguuca

SEQ ID NO: 218092 - RNA, 19 nt, Artificial Sequence
  Description of Artificial Sequence: Synthetic oligonucleotide
  Sense strand starting at position 3672 of SEQ ID NO: 2807
acagauuguuaaucccagu

SEQ ID NO: 218093 - RNA, 19 nt, Artificial Sequence
  Description of Artificial Sequence: Synthetic oligonucleotide
  Antisense strand to SEQ ID NO: 218092
acugggauuaacaaucugu

SEQ ID NO: 218094 - RNA, 19 nt, Artificial Sequence
  Description of Artificial Sequence: Synthetic oligonucleotide
  Sense strand starting at position 3716 of SEQ ID NO: 2807
ggaagcuuuguuguguguu

SEQ ID NO: 218095 - RNA, 19 nt, Artificial Sequence
  Description of Artificial Sequence: Synthetic oligonucleotide
  Antisense strand to SEQ ID NO: 218094
aacacacaacaaagcuucc

SEQ ID NO: 218096 - RNA, 19 nt, Artificial Sequence
  Description of Artificial Sequence: Synthetic oligonucleotide
  Sense strand starting at position 3836 of SEQ ID NO: 2807
auaagugacuuacuuuaag

SEQ ID NO: 218097 - RNA, 19 nt, Artificial Sequence
  Description of Artificial Sequence: Synthetic oligonucleotide
  Antisense strand to SEQ ID NO: 218096
cuuaaaguaagucacuuau

SEQ ID NO: 218098 - RNA, 19 nt, Artificial Sequence
  Description of Artificial Sequence: Synthetic oligonucleotide
  Sense strand starting at position 3869 of SEQ ID NO: 2807
uuuaaagcccgagaguuau

SEQ ID NO: 218099 - RNA, 19 nt, Artificial Sequence
  Description of Artificial Sequence: Synthetic oligonucleotide
  Antisense strand to SEQ ID NO: 218098
auaacucucgggcuuuaaa

SEQ ID NO: 218100 - RNA, 19 nt, Artificial Sequence
  Description of Artificial Sequence: Synthetic oligonucleotide
  Sense strand starting at position 3877 of SEQ ID NO: 2807
ccgagaguuauagggagau

SEQ ID NO: 218101 - RNA, 19 nt, Artificial Sequence
  Description of Artificial Sequence: Synthetic oligonucleotide
  Antisense strand to SEQ ID NO: 218100
aucucccuauaacucucgg

SEQ ID NO: 218102 - RNA, 19 nt, Artificial Sequence
  Description of Artificial Sequence: Synthetic oligonucleotide
  Sense strand starting at position 3909 of SEQ ID NO: 2807
cugcucagaccugaauuau

SEQ ID NO: 218103 - RNA, 19 nt, Artificial Sequence
  Description of Artificial Sequence: Synthetic oligonucleotide
  Antisense strand to SEQ ID NO: 218102
auaauucaggucugagcag

SEQ ID NO: 218104 - RNA, 19 nt, Artificial Sequence
  Description of Artificial Sequence: Synthetic oligonucleotide
  Sense strand starting at position 3975 of SEQ ID NO: 2807
auuaauauuguuugaggca

SEQ ID NO: 218105 - RNA, 19 nt, Artificial Sequence
  Description of Artificial Sequence: Synthetic oligonucleotide
  Antisense strand to SEQ ID NO: 218104
ugccucaaacaauauuaau

SEQ ID NO: 218106 - RNA, 19 nt, Artificial Sequence
  Description of Artificial Sequence: Synthetic oligonucleotide
  Sense strand starting at position 211 of SEQ ID NO: 2809
cccuguaauugacuugaua

SEQ ID NO: 218107 - RNA, 19 nt, Artificial Sequence
  Description of Artificial Sequence: Synthetic oligonucleotide
  Antisense strand to SEQ ID NO: 218106
uaucaagucaauuacaggg

SEQ ID NO: 218108 - RNA, 19 nt, Artificial Sequence
  Description of Artificial Sequence: Synthetic oligonucleotide
  Sense strand starting at position 312 of SEQ ID NO: 2809
uagcuacagccaugaggaa

SEQ ID NO: 218109 - RNA, 19 nt, Artificial Sequence
  Description of Artificial Sequence: Synthetic oligonucleotide
  Antisense strand to SEQ ID NO: 218108
uuccucauggcuguagcua

SEQ ID NO: 218110 - RNA, 19 nt, Artificial Sequence
  Description of Artificial Sequence: Synthetic oligonucleotide
  Sense strand starting at position 324 of SEQ ID NO: 2809
ugaggaaucuggccacaag

SEQ ID NO: 218111 - RNA, 19 nt, Artificial Sequence
  Description of Artificial Sequence: Synthetic oligonucleotide
  Antisense strand to SEQ ID NO: 218110
cuuguggccagauuccuca

SEQ ID NO: 218112 - RNA, 19 nt, Artificial Sequence
  Description of Artificial Sequence: Synthetic oligonucleotide
  Sense strand starting at position 533 of SEQ ID NO: 2809
gccugccugcguucuuaga

SEQ ID NO: 218113 - RNA, 19 nt, Artificial Sequence
  Description of Artificial Sequence: Synthetic oligonucleotide
  Antisense strand to SEQ ID NO: 218112
ucuaagaacgcaggcaggc

SEQ ID NO: 218114 - RNA, 19 nt, Artificial Sequence
  Description of Artificial Sequence: Synthetic oligonucleotide
  Sense strand starting at position 534 of SEQ ID NO: 2809
ccugccugcguucuuagau

SEQ ID NO: 218115 - RNA, 19 nt, Artificial Sequence
  Description of Artificial Sequence: Synthetic oligonucleotide
  Antisense strand to SEQ ID NO: 218114
aucuaagaacgcaggcagg

SEQ ID NO: 218116 - RNA, 19 nt, Artificial Sequence
  Description of Artificial Sequence: Synthetic oligonucleotide
  Sense strand starting at position 543 of SEQ ID NO: 2809
guucuuagauuagcuauua

SEQ ID NO: 218117 - RNA, 19 nt, Artificial Sequence
  Description of Artificial Sequence: Synthetic oligonucleotide
  Antisense strand to SEQ ID NO: 218116
uaauagcuaaucuaagaac

SEQ ID NO: 218118 - RNA, 19 nt, Artificial Sequence
  Description of Artificial Sequence: Synthetic oligonucleotide
  Sense strand starting at position 633 of SEQ ID NO: 2809
ugagauuguuguccuacua

SEQ ID NO: 218119 - RNA, 19 nt, Artificial Sequence
  Description of Artificial Sequence: Synthetic oligonucleotide
  Antisense strand to SEQ ID NO: 218118
uaguaggacaacaaucuca

SEQ ID NO: 218120 - RNA, 19 nt, Artificial Sequence
  Description of Artificial Sequence: Synthetic oligonucleotide
  Sense strand starting at position 645 of SEQ ID NO: 2809
ccuacuaauuggucaagua

SEQ ID NO: 218121 - RNA, 19 nt, Artificial Sequence
  Description of Artificial Sequence: Synthetic oligonucleotide
  Antisense strand to SEQ ID NO: 218120
uacuugaccaauuaguagg

SEQ ID NO: 218122 - RNA, 19 nt, Artificial Sequence
  Description of Artificial Sequence: Synthetic oligonucleotide
  Sense strand starting at position 646 of SEQ ID NO: 2809
cuacuaauuggucaaguag

SEQ ID NO: 218123 - RNA, 19 nt, Artificial Sequence
  Description of Artificial Sequence: Synthetic oligonucleotide
  Antisense strand to SEQ ID NO: 218122
cuacuugaccaauuaguag

SEQ ID NO: 218124 - RNA, 19 nt, Artificial Sequence
  Description of Artificial Sequence: Synthetic oligonucleotide
  Sense strand starting at position 783 of SEQ ID NO: 2809
cccucuguugcgucuauau

SEQ ID NO: 218125 - RNA, 19 nt, Artificial Sequence
  Description of Artificial Sequence: Synthetic oligonucleotide
  Antisense strand to SEQ ID NO: 218124
auauagacgcaacagaggg

SEQ ID NO: 218126 - RNA, 19 nt, Artificial Sequence
  Description of Artificial Sequence: Synthetic oligonucleotide
  Sense strand starting at position 831 of SEQ ID NO: 2809
guguuugcucaucacagga

SEQ ID NO: 218127 - RNA, 19 nt, Artificial Sequence
  Description of Artificial Sequence: Synthetic oligonucleotide
  Antisense strand to SEQ ID NO: 218126
uccugugaugagcaaacac

SEQ ID NO: 218128 - RNA, 19 nt, Artificial Sequence
  Description of Artificial Sequence: Synthetic oligonucleotide
  Sense strand starting at position 850 of SEQ ID NO: 2809
agacaugacaggugugaac

SEQ ID NO: 218129 - RNA, 19 nt, Artificial Sequence
  Description of Artificial Sequence: Synthetic oligonucleotide
  Antisense strand to SEQ ID NO: 218128
guucacaccugucaugucu

SEQ ID NO: 218130 - RNA, 19 nt, Artificial Sequence
  Description of Artificial Sequence: Synthetic oligonucleotide
  Sense strand starting at position 852 of SEQ ID NO: 2809
acaugacaggugugaacua

SEQ ID NO: 218131 - RNA, 19 nt, Artificial Sequence
  Description of Artificial Sequence: Synthetic oligonucleotide
  Antisense strand to SEQ ID NO: 218130
uaguucacaccugucaugu

SEQ ID NO: 218132 - RNA, 19 nt, Artificial Sequence
  Description of Artificial Sequence: Synthetic oligonucleotide
  Sense strand starting at position 895 of SEQ ID NO: 2809
caagcaggugcucaaugaa

SEQ ID NO: 218133 - RNA, 19 nt, Artificial Sequence
  Description of Artificial Sequence: Synthetic oligonucleotide
  Antisense strand to SEQ ID NO: 218132
uucauugagcaccugcuug

SEQ ID NO: 218134 - RNA, 19 nt, Artificial Sequence
  Description of Artificial Sequence: Synthetic oligonucleotide
  Sense strand starting at position 913 of SEQ ID NO: 2809
agccuuacugaaugauugu

SEQ ID NO: 218135 - RNA, 19 nt, Artificial Sequence
  Description of Artificial Sequence: Synthetic oligonucleotide
  Antisense strand to SEQ ID NO: 218134
acaaucauucaguaaggcu

SEQ ID NO: 218136 - RNA, 19 nt, Artificial Sequence
  Description of Artificial Sequence: Synthetic oligonucleotide
  Sense strand starting at position 916 of SEQ ID NO: 2809
cuuacugaaugauugugua

SEQ ID NO: 218137 - RNA, 19 nt, Artificial Sequence
  Description of Artificial Sequence: Synthetic oligonucleotide
  Antisense strand to SEQ ID NO: 218136
uacacaaucauucaguaag

SEQ ID NO: 218138 - RNA, 19 nt, Artificial Sequence
  Description of Artificial Sequence: Synthetic oligonucleotide
  Sense strand starting at position 936 of SEQ ID NO: 2809
aggagauacuuucuaccuu

SEQ ID NO: 218139 - RNA, 19 nt, Artificial Sequence
  Description of Artificial Sequence: Synthetic oligonucleotide
  Antisense strand to SEQ ID NO: 218138
aagguagaaaguaucuccu

SEQ ID NO: 218140 - RNA, 19 nt, Artificial Sequence
  Description of Artificial Sequence: Synthetic oligonucleotide
  Sense strand starting at position 1017 of SEQ ID NO: 2809
aaaugcucaucuguaggaa

SEQ ID NO: 218141 - RNA, 19 nt, Artificial Sequence
  Description of Artificial Sequence: Synthetic oligonucleotide
  Antisense strand to SEQ ID NO: 218140
uuccuacagaugagcauuu

SEQ ID NO: 218142 - RNA, 19 nt, Artificial Sequence
  Description of Artificial Sequence: Synthetic oligonucleotide
  Sense strand starting at position 1018 of SEQ ID NO: 2809
aaugcucaucuguaggaau

SEQ ID NO: 218143 - RNA, 19 nt, Artificial Sequence
  Description of Artificial Sequence: Synthetic oligonucleotide
  Antisense strand to SEQ ID NO: 218142
auuccuacagaugagcauu

SEQ ID NO: 218144 - RNA, 19 nt, Artificial Sequence
  Description of Artificial Sequence: Synthetic oligonucleotide
  Sense strand starting at position 1067 of SEQ ID NO: 2809
agcagcauucccgacugau

SEQ ID NO: 218145 - RNA, 19 nt, Artificial Sequence
  Description of Artificial Sequence: Synthetic oligonucleotide
  Antisense strand to SEQ ID NO: 218144
aucagucgggaaugcugcu

SEQ ID NO: 218146 - RNA, 19 nt, Artificial Sequence
  Description of Artificial Sequence: Synthetic oligonucleotide
  Sense strand starting at position 1089 of SEQ ID NO: 2809
gaucguguccacugaaagg

SEQ ID NO: 218147 - RNA, 19 nt, Artificial Sequence
  Description of Artificial Sequence: Synthetic oligonucleotide
  Antisense strand to SEQ ID NO: 218146
ccuuucaguggacacgauc

SEQ ID NO: 218148 - RNA, 19 nt, Artificial Sequence
  Description of Artificial Sequence: Synthetic oligonucleotide
  Sense strand starting at position 1228 of SEQ ID NO: 2809
acggcaagucccuaauauu

SEQ ID NO: 218149 - RNA, 19 nt, Artificial Sequence
  Description of Artificial Sequence: Synthetic oligonucleotide
  Antisense strand to SEQ ID NO: 218148
aauauuagggacuugccgu

SEQ ID NO: 218150 - RNA, 19 nt, Artificial Sequence
  Description of Artificial Sequence: Synthetic oligonucleotide
  Sense strand starting at position 1419 of SEQ ID NO: 2809
gcuucuuagcguguacgaa

SEQ ID NO: 218151 - RNA, 19 nt, Artificial Sequence
  Description of Artificial Sequence: Synthetic oligonucleotide
  Antisense strand to SEQ ID NO: 218150
uucguacacgcuaagaagc

SEQ ID NO: 218152 - RNA, 19 nt, Artificial Sequence
  Description of Artificial Sequence: Synthetic oligonucleotide
  Sense strand starting at position 2713 of SEQ ID NO: 2809
ggcuguuauccugcagccu

SEQ ID NO: 218153 - RNA, 19 nt, Artificial Sequence
  Description of Artificial Sequence: Synthetic oligonucleotide
  Antisense strand to SEQ ID NO: 218152
aggcugcaggauaacagcc

SEQ ID NO: 218154 - RNA, 19 nt, Artificial Sequence
  Description of Artificial Sequence: Synthetic oligonucleotide
  Sense strand starting at position 2789 of SEQ ID NO: 2809
acgugguaggcguuuggua

SEQ ID NO: 218155 - RNA, 19 nt, Artificial Sequence
  Description of Artificial Sequence: Synthetic oligonucleotide
  Antisense strand to SEQ ID NO: 218154
uaccaaacgccuaccacgu

SEQ ID NO: 218156 - RNA, 19 nt, Artificial Sequence
  Description of Artificial Sequence: Synthetic oligonucleotide
  Sense strand starting at position 3160 of SEQ ID NO: 2809
ugcugagaucaaugaacug

SEQ ID NO: 218157 - RNA, 19 nt, Artificial Sequence
  Description of Artificial Sequence: Synthetic oligonucleotide
  Antisense strand to SEQ ID NO: 218156
caguucauugaucucagca

SEQ ID NO: 218158 - RNA, 19 nt, Artificial Sequence
  Description of Artificial Sequence: Synthetic oligonucleotide
  Sense strand starting at position 3238 of SEQ ID NO: 2809
uggcgugucgugcugaaga

SEQ ID NO: 218159 - RNA, 19 nt, Artificial Sequence
  Description of Artificial Sequence: Synthetic oligonucleotide
  Antisense strand to SEQ ID NO: 218158
ucuucagcacgacacgcca

SEQ ID NO: 218160 - RNA, 19 nt, Artificial Sequence
  Description of Artificial Sequence: Synthetic oligonucleotide
  Sense strand starting at position 3261 of SEQ ID NO: 2809
ugacuuuggucucugacuu

SEQ ID NO: 218161 - RNA, 19 nt, Artificial Sequence
  Description of Artificial Sequence: Synthetic oligonucleotide
  Antisense strand to SEQ ID NO: 218160
aagucagagaccaaaguca

SEQ ID NO: 218162 - RNA, 19 nt, Artificial Sequence
  Description of Artificial Sequence: Synthetic oligonucleotide
  Sense strand starting at position 3262 of SEQ ID NO: 2809
gacuuuggucucugacuuu

SEQ ID NO: 218163 - RNA, 19 nt, Artificial Sequence
  Description of Artificial Sequence: Synthetic oligonucleotide
  Antisense strand to SEQ ID NO: 218162
aaagucagagaccaaaguc

SEQ ID NO: 218164 - RNA, 19 nt, Artificial Sequence
  Description of Artificial Sequence: Synthetic oligonucleotide
  Sense strand starting at position 3268 of SEQ ID NO: 2809
ggucucugacuuuggagaa

SEQ ID NO: 218165 - RNA, 19 nt, Artificial Sequence
  Description of Artificial Sequence: Synthetic oligonucleotide
  Antisense strand to SEQ ID NO: 218164
uucuccaaagucagagacc

SEQ ID NO: 218166 - RNA, 19 nt, Artificial Sequence
  Description of Artificial Sequence: Synthetic oligonucleotide
  Sense strand starting at position 3374 of SEQ ID NO: 2809
gauuuaaaguguuagggaa

SEQ ID NO: 218167 - RNA, 19 nt, Artificial Sequence
  Description of Artificial Sequence: Synthetic oligonucleotide
  Antisense strand to SEQ ID NO: 218166
uucccuaacacuuuaaauc

SEQ ID NO: 218168 - RNA, 19 nt, Artificial Sequence
  Description of Artificial Sequence: Synthetic oligonucleotide
  Sense strand starting at position 3407 of SEQ ID NO: 2809
gucccuuauccacgaaaua

SEQ ID NO: 218169 - RNA, 19 nt, Artificial Sequence
  Description of Artificial Sequence: Synthetic oligonucleotide
  Antisense strand to SEQ ID NO: 218168
uauuucguggauaagggac

SEQ ID NO: 218170 - RNA, 19 nt, Artificial Sequence
  Description of Artificial Sequence: Synthetic oligonucleotide
  Sense strand starting at position 3417 of SEQ ID NO: 2809
cacgaaauauccuuggguu

SEQ ID NO: 218171 - RNA, 19 nt, Artificial Sequence
  Description of Artificial Sequence: Synthetic oligonucleotide
  Antisense strand to SEQ ID NO: 218170
aacccaaggauauuucgug

SEQ ID NO: 218172 - RNA, 19 nt, Artificial Sequence
  Description of Artificial Sequence: Synthetic oligonucleotide
  Sense strand starting at position 3418 of SEQ ID NO: 2809
acgaaauauccuuggguuu

SEQ ID NO: 218173 - RNA, 19 nt, Artificial Sequence
  Description of Artificial Sequence: Synthetic oligonucleotide
  Antisense strand to SEQ ID NO: 218172
aaacccaaggauauuucgu

SEQ ID NO: 218174 - RNA, 19 nt, Artificial Sequence
  Description of Artificial Sequence: Synthetic oligonucleotide
  Sense strand starting at position 3419 of SEQ ID NO: 2809
cgaaauauccuuggguuug

SEQ ID NO: 218175 - RNA, 19 nt, Artificial Sequence
  Description of Artificial Sequence: Synthetic oligonucleotide
  Antisense strand to SEQ ID NO: 218174
caaacccaaggauauuucg

SEQ ID NO: 218176 - RNA, 19 nt, Artificial Sequence
  Description of Artificial Sequence: Synthetic oligonucleotide
  Sense strand starting at position 3425 of SEQ ID NO: 2809
auccuuggguuugugaauu

SEQ ID NO: 218177 - RNA, 19 nt, Artificial Sequence
  Description of Artificial Sequence: Synthetic oligonucleotide
  Antisense strand to SEQ ID NO: 218176
aauucacaaacccaaggau

SEQ ID NO: 218178 - RNA, 19 nt, Artificial Sequence
  Description of Artificial Sequence: Synthetic oligonucleotide
  Sense strand starting at position 3667 of SEQ ID NO: 2809
ggcuuccuccagcaauaau

SEQ ID NO: 218179 - RNA, 19 nt, Artificial Sequence
  Description of Artificial Sequence: Synthetic oligonucleotide
  Antisense strand to SEQ ID NO: 218178
auuauugcuggaggaagcc

SEQ ID NO: 218180 - RNA, 19 nt, Artificial Sequence
  Description of Artificial Sequence: Synthetic oligonucleotide
  Sense strand starting at position 3740 of SEQ ID NO: 2809
auggguucagcuugagaca

SEQ ID NO: 218181 - RNA, 19 nt, Artificial Sequence
  Description of Artificial Sequence: Synthetic oligonucleotide
  Antisense strand to SEQ ID NO: 218180
ugucucaagcugaacccau

SEQ ID NO: 218182 - RNA, 19 nt, Artificial Sequence
  Description of Artificial Sequence: Synthetic oligonucleotide
  Sense strand starting at position 3741 of SEQ ID NO: 2809
uggguucagcuugagacau

SEQ ID NO: 218183 - RNA, 19 nt, Artificial Sequence
  Description of Artificial Sequence: Synthetic oligonucleotide
  Antisense strand to SEQ ID NO: 218182
augucucaagcugaaccca

SEQ ID NO: 218184 - RNA, 19 nt, Artificial Sequence
  Description of Artificial Sequence: Synthetic oligonucleotide
  Sense strand starting at position 3800 of SEQ ID NO: 2809
caggaucauuggccucauu

SEQ ID NO: 218185 - RNA, 19 nt, Artificial Sequence
  Description of Artificial Sequence: Synthetic oligonucleotide
  Antisense strand to SEQ ID NO: 218184
aaugaggccaaugauccug

SEQ ID NO: 218186 - RNA, 19 nt, Artificial Sequence
  Description of Artificial Sequence: Synthetic oligonucleotide
  Sense strand starting at position 89 of SEQ ID NO: 2810
gugcuucugcugccaauca

SEQ ID NO: 218187 - RNA, 19 nt, Artificial Sequence
  Description of Artificial Sequence: Synthetic oligonucleotide
  Antisense strand to SEQ ID NO: 218186
ugauuggcagcagaagcac

SEQ ID NO: 218188 - RNA, 19 nt, Artificial Sequence
  Description of Artificial Sequence: Synthetic oligonucleotide
  Sense strand starting at position 113 of SEQ ID NO: 2810
uguucuuaaccagaagguu

SEQ ID NO: 218189 - RNA, 19 nt, Artificial Sequence
  Description of Artificial Sequence: Synthetic oligonucleotide
  Antisense strand to SEQ ID NO: 218188
aaccuucugguuaagaaca

SEQ ID NO: 218190 - RNA, 19 nt, Artificial Sequence
  Description of Artificial Sequence: Synthetic oligonucleotide
  Sense strand starting at position 121 of SEQ ID NO: 2810
accagaagguuuguacgua

SEQ ID NO: 218191 - RNA, 19 nt, Artificial Sequence
  Description of Artificial Sequence: Synthetic oligonucleotide
  Antisense strand to SEQ ID NO: 218190
uacguacaaaccuucuggu

SEQ ID NO: 218192 - RNA, 19 nt, Artificial Sequence
  Description of Artificial Sequence: Synthetic oligonucleotide
  Sense strand starting at position 125 of SEQ ID NO: 2810
gaagguuuguacguaucaa

SEQ ID NO: 218193 - RNA, 19 nt, Artificial Sequence
  Description of Artificial Sequence: Synthetic oligonucleotide
  Antisense strand to SEQ ID NO: 218192
uugauacguacaaaccuuc

SEQ ID NO: 218194 - RNA, 19 nt, Artificial Sequence
  Description of Artificial Sequence: Synthetic oligonucleotide
  Sense strand starting at position 151 of SEQ ID NO: 2810
gcaaucauacagugacaga

SEQ ID NO: 218195 - RNA, 19 nt, Artificial Sequence
  Description of Artificial Sequence: Synthetic oligonucleotide
  Antisense strand to SEQ ID NO: 218194
ucugucacuguaugauugc

SEQ ID NO: 218196 - RNA, 19 nt, Artificial Sequence
  Description of Artificial Sequence: Synthetic oligonucleotide
  Sense strand starting at position 245 of SEQ ID NO: 2810
cgaaaugagccauaaaugu

SEQ ID NO: 218197 - RNA, 19 nt, Artificial Sequence
  Description of Artificial Sequence: Synthetic oligonucleotide
  Antisense strand to SEQ ID NO: 218196
acauuuauggcucauuucg

SEQ ID NO: 218198 - RNA, 19 nt, Artificial Sequence
  Description of Artificial Sequence: Synthetic oligonucleotide
  Sense strand starting at position 323 of SEQ ID NO: 2810
gccagcugagguuagaauu

SEQ ID NO: 218199 - RNA, 19 nt, Artificial Sequence
  Description of Artificial Sequence: Synthetic oligonucleotide
  Antisense strand to SEQ ID NO: 218198
aauucuaaccucagcuggc

SEQ ID NO: 218200 - RNA, 19 nt, Artificial Sequence
  Description of Artificial Sequence: Synthetic oligonucleotide
  Sense strand starting at position 342 of SEQ ID NO: 2810
auaacuugagaugguauua

SEQ ID NO: 218201 - RNA, 19 nt, Artificial Sequence
  Description of Artificial Sequence: Synthetic oligonucleotide
  Antisense strand to SEQ ID NO: 218200
uaauaccaucucaaguuau

SEQ ID NO: 218202 - RNA, 19 nt, Artificial Sequence
  Description of Artificial Sequence: Synthetic oligonucleotide
  Sense strand starting at position 467 of SEQ ID NO: 2810
uacagcuuguggcuuaaau

SEQ ID NO: 218203 - RNA, 19 nt, Artificial Sequence
  Description of Artificial Sequence: Synthetic oligonucleotide
  Antisense strand to SEQ ID NO: 218202
auuuaagccacaagcugua

SEQ ID NO: 218204 - RNA, 19 nt, Artificial Sequence
  Description of Artificial Sequence: Synthetic oligonucleotide
  Sense strand starting at position 476 of SEQ ID NO: 2810
uggcuuaaauugucaaucu

SEQ ID NO: 218205 - RNA, 19 nt, Artificial Sequence
  Description of Artificial Sequence: Synthetic oligonucleotide
  Antisense strand to SEQ ID NO: 218204
agauugacaauuuaagcca

SEQ ID NO: 218206 - RNA, 19 nt, Artificial Sequence
  Description of Artificial Sequence: Synthetic oligonucleotide
  Sense strand starting at position 506 of SEQ ID NO: 2810
uuaccuacugcaugagaca

SEQ ID NO: 218207 - RNA, 19 nt, Artificial Sequence
  Description of Artificial Sequence: Synthetic oligonucleotide
  Antisense strand to SEQ ID NO: 218206
ugucucaugcaguagguaa

SEQ ID NO: 218208 - RNA, 19 nt, Artificial Sequence
  Description of Artificial Sequence: Synthetic oligonucleotide
  Sense strand starting at position 590 of SEQ ID NO: 2810
acagaaauucgugggaaau

SEQ ID NO: 218209 - RNA, 19 nt, Artificial Sequence
  Description of Artificial Sequence: Synthetic oligonucleotide
  Antisense strand to SEQ ID NO: 218208
auuucccacgaauuucugu

SEQ ID NO: 218210 - RNA, 19 nt, Artificial Sequence
  Description of Artificial Sequence: Synthetic oligonucleotide
  Sense strand starting at position 591 of SEQ ID NO: 2810
cagaaauucgugggaaaua

SEQ ID NO: 218211 - RNA, 19 nt, Artificial Sequence
  Description of Artificial Sequence: Synthetic oligonucleotide
  Antisense strand to SEQ ID NO: 218210
uauuucccacgaauuucug

SEQ ID NO: 218212 - RNA, 19 nt, Artificial Sequence
  Description of Artificial Sequence: Synthetic oligonucleotide
  Sense strand starting at position 596 of SEQ ID NO: 2810
auucgugggaaauauggua

SEQ ID NO: 218213 - RNA, 19 nt, Artificial Sequence
  Description of Artificial Sequence: Synthetic oligonucleotide
  Antisense strand to SEQ ID NO: 218212
uaccauauuucccacgaau

SEQ ID NO: 218214 - RNA, 19 nt, Artificial Sequence
  Description of Artificial Sequence: Synthetic oligonucleotide
  Sense strand starting at position 699 of SEQ ID NO: 2810
aagaguacaucggcugaua

SEQ ID NO: 218215 - RNA, 19 nt, Artificial Sequence
  Description of Artificial Sequence: Synthetic oligonucleotide
  Antisense strand to SEQ ID NO: 218214
uaucagccgauguacucuu

SEQ ID NO: 218216 - RNA, 19 nt, Artificial Sequence
  Description of Artificial Sequence: Synthetic oligonucleotide
  Sense strand starting at position 701 of SEQ ID NO: 2810
gaguacaucggcugauacu

SEQ ID NO: 218217 - RNA, 19 nt, Artificial Sequence
  Description of Artificial Sequence: Synthetic oligonucleotide
  Antisense strand to SEQ ID NO: 218216
aguaucagccgauguacuc

SEQ ID NO: 218218 - RNA, 19 nt, Artificial Sequence
  Description of Artificial Sequence: Synthetic oligonucleotide
  Sense strand starting at position 710 of SEQ ID NO: 2810
ggcugauacucguuccaac

SEQ ID NO: 218219 - RNA, 19 nt, Artificial Sequence
  Description of Artificial Sequence: Synthetic oligonucleotide
  Antisense strand to SEQ ID NO: 218218
guuggaacgaguaucagcc

SEQ ID NO: 218220 - RNA, 19 nt, Artificial Sequence
  Description of Artificial Sequence: Synthetic oligonucleotide
  Sense strand starting at position 755 of SEQ ID NO: 2810
agugaugauuaccuuauua

SEQ ID NO: 218221 - RNA, 19 nt, Artificial Sequence
  Description of Artificial Sequence: Synthetic oligonucleotide
  Antisense strand to SEQ ID NO: 218220
uaauaagguaaucaucacu

SEQ ID NO: 218222 - RNA, 19 nt, Artificial Sequence
  Description of Artificial Sequence: Synthetic oligonucleotide
  Sense strand starting at position 1001 of SEQ ID NO: 2810
gcagcauuuccucaacggu

SEQ ID NO: 218223 - RNA, 19 nt, Artificial Sequence
  Description of Artificial Sequence: Synthetic oligonucleotide
  Antisense strand to SEQ ID NO: 218222
accguugaggaaaugcugc

SEQ ID NO: 218224 - RNA, 19 nt, Artificial Sequence
  Description of Artificial Sequence: Synthetic oligonucleotide
  Sense strand starting at position 1004 of SEQ ID NO: 2810
gcauuuccucaacggugua

SEQ ID NO: 218225 - RNA, 19 nt, Artificial Sequence
  Description of Artificial Sequence: Synthetic oligonucleotide
  Antisense strand to SEQ ID NO: 218224
uacaccguugaggaaaugc

SEQ ID NO: 218226 - RNA, 19 nt, Artificial Sequence
  Description of Artificial Sequence: Synthetic oligonucleotide
  Sense strand starting at position 1076 of SEQ ID NO: 2810
uuucgaacuuuauugcaca

SEQ ID NO: 218227 - RNA, 19 nt, Artificial Sequence
  Description of Artificial Sequence: Synthetic oligonucleotide
  Antisense strand to SEQ ID NO: 218226
ugugcaauaaaguucgaaa

SEQ ID NO: 218228 - RNA, 19 nt, Artificial Sequence
  Description of Artificial Sequence: Synthetic oligonucleotide
  Sense strand starting at position 1751 of SEQ ID NO: 2810
ccucuuaccggugguacaa

SEQ ID NO: 218229 - RNA, 19 nt, Artificial Sequence
  Description of Artificial Sequence: Synthetic oligonucleotide
  Antisense strand to SEQ ID NO: 218228
uuguaccaccgguaagagg

SEQ ID NO: 218230 - RNA, 19 nt, Artificial Sequence
  Description of Artificial Sequence: Synthetic oligonucleotide
  Sense strand starting at position 2142 of SEQ ID NO: 2810
cgggaggaguggucuaaac

SEQ ID NO: 218231 - RNA, 19 nt, Artificial Sequence
  Description of Artificial Sequence: Synthetic oligonucleotide
  Antisense strand to SEQ ID NO: 218230
guuuagaccacuccucccg

SEQ ID NO: 218232 - RNA, 19 nt, Artificial Sequence
  Description of Artificial Sequence: Synthetic oligonucleotide
  Sense strand starting at position 2167 of SEQ ID NO: 2810
gcggcuuucgcaucgguaa

SEQ ID NO: 218233 - RNA, 19 nt, Artificial Sequence
  Description of Artificial Sequence: Synthetic oligonucleotide
  Antisense strand to SEQ ID NO: 218232
uuaccgaugcgaaagccgc

SEQ ID NO: 218234 - RNA, 19 nt, Artificial Sequence
  Description of Artificial Sequence: Synthetic oligonucleotide
  Sense strand starting at position 2538 of SEQ ID NO: 2810
ccgagacuccgcggagaaa

SEQ ID NO: 218235 - RNA, 19 nt, Artificial Sequence
  Description of Artificial Sequence: Synthetic oligonucleotide
  Antisense strand to SEQ ID NO: 218234
uuucuccgcggagucucgg

SEQ ID NO: 218236 - RNA, 19 nt, Artificial Sequence
  Description of Artificial Sequence: Synthetic oligonucleotide
  Sense strand starting at position 2720 of SEQ ID NO: 2810
cccgccuuucuccagacaa

SEQ ID NO: 218237 - RNA, 19 nt, Artificial Sequence
  Description of Artificial Sequence: Synthetic oligonucleotide
  Antisense strand to SEQ ID NO: 218236
uugucuggagaaaggcggg

SEQ ID NO: 218238 - RNA, 19 nt, Artificial Sequence
  Description of Artificial Sequence: Synthetic oligonucleotide
  Sense strand starting at position 2722 of SEQ ID NO: 2810
cgccuuucuccagacaaca

SEQ ID NO: 218239 - RNA, 19 nt, Artificial Sequence
  Description of Artificial Sequence: Synthetic oligonucleotide
  Antisense strand to SEQ ID NO: 218238
uguugucuggagaaaggcg

SEQ ID NO: 218240 - RNA, 19 nt, Artificial Sequence
  Description of Artificial Sequence: Synthetic oligonucleotide
  Sense strand starting at position 2817 of SEQ ID NO: 2810
ggacuuccguggcuggaaa

SEQ ID NO: 218241 - RNA, 19 nt, Artificial Sequence
  Description of Artificial Sequence: Synthetic oligonucleotide
  Antisense strand to SEQ ID NO: 218240
uuuccagccacggaagucc

SEQ ID NO: 218242 - RNA, 19 nt, Artificial Sequence
  Description of Artificial Sequence: Synthetic oligonucleotide
  Sense strand starting at position 3279 of SEQ ID NO: 2810
ggagacgugucuuuaggaa

SEQ ID NO: 218243 - RNA, 19 nt, Artificial Sequence
  Description of Artificial Sequence: Synthetic oligonucleotide
  Antisense strand to SEQ ID NO: 218242
uuccuaaagacacgucucc

SEQ ID NO: 218244 - RNA, 19 nt, Artificial Sequence
  Description of Artificial Sequence: Synthetic oligonucleotide
  Sense strand starting at position 3328 of SEQ ID NO: 2810
augacucacuucucuugua

SEQ ID NO: 218245 - RNA, 19 nt, Artificial Sequence
  Description of Artificial Sequence: Synthetic oligonucleotide
  Antisense strand to SEQ ID NO: 218244
uacaagagaagugagucau

SEQ ID NO: 218246 - RNA, 19 nt, Artificial Sequence
  Description of Artificial Sequence: Synthetic oligonucleotide
  Sense strand starting at position 3457 of SEQ ID NO: 2810
ggcucuuucuuacugguau

SEQ ID NO: 218247 - RNA, 19 nt, Artificial Sequence
  Description of Artificial Sequence: Synthetic oligonucleotide
  Antisense strand to SEQ ID NO: 218246
auaccaguaagaaagagcc

SEQ ID NO: 218248 - RNA, 19 nt, Artificial Sequence
  Description of Artificial Sequence: Synthetic oligonucleotide
  Sense strand starting at position 3628 of SEQ ID NO: 2810
cucugaauuguccacagac

SEQ ID NO: 218249 - RNA, 19 nt, Artificial Sequence
  Description of Artificial Sequence: Synthetic oligonucleotide
  Antisense strand to SEQ ID NO: 218248
gucuguggacaauucagag

SEQ ID NO: 218250 - RNA, 19 nt, Artificial Sequence
  Description of Artificial Sequence: Synthetic oligonucleotide
  Sense strand starting at position 3660 of SEQ ID NO: 2810
guaaaugcagcggaucauu

SEQ ID NO: 218251 - RNA, 19 nt, Artificial Sequence
  Description of Artificial Sequence: Synthetic oligonucleotide
  Antisense strand to SEQ ID NO: 218250
aaugauccgcugcauuuac

SEQ ID NO: 218252 - RNA, 19 nt, Artificial Sequence
  Description of Artificial Sequence: Synthetic oligonucleotide
  Sense strand starting at position 3708 of SEQ ID NO: 2810
caguauuugacgcgauuga

SEQ ID NO: 218253 - RNA, 19 nt, Artificial Sequence
  Description of Artificial Sequence: Synthetic oligonucleotide
  Antisense strand to SEQ ID NO: 218252
ucaaucgcgucaaauacug

SEQ ID NO: 218254 - RNA, 19 nt, Artificial Sequence
  Description of Artificial Sequence: Synthetic oligonucleotide
  Sense strand starting at position 3772 of SEQ ID NO: 2810
agguuuccucccuaccuga

SEQ ID NO: 218255 - RNA, 19 nt, Artificial Sequence
  Description of Artificial Sequence: Synthetic oligonucleotide
  Antisense strand to SEQ ID NO: 218254
ucagguagggaggaaaccu

SEQ ID NO: 218256 - RNA, 19 nt, Artificial Sequence
  Description of Artificial Sequence: Synthetic oligonucleotide
  Sense strand starting at position 3785 of SEQ ID NO: 2810
accugaguuugcucuuuaa

SEQ ID NO: 218257 - RNA, 19 nt, Artificial Sequence
  Description of Artificial Sequence: Synthetic oligonucleotide
  Antisense strand to SEQ ID NO: 218256
uuaaagagcaaacucaggu

SEQ ID NO: 218258 - RNA, 19 nt, Artificial Sequence
  Description of Artificial Sequence: Synthetic oligonucleotide
  Sense strand starting at position 3788 of SEQ ID NO: 2810
ugaguuugcucuuuaacaa

SEQ ID NO: 218259 - RNA, 19 nt, Artificial Sequence
  Description of Artificial Sequence: Synthetic oligonucleotide
  Antisense strand to SEQ ID NO: 218258
uuguuaaagagcaaacuca

SEQ ID NO: 218260 - RNA, 19 nt, Artificial Sequence
  Description of Artificial Sequence: Synthetic oligonucleotide
  Sense strand starting at position 3838 of SEQ ID NO: 2810
uggaaucaugcugagcuga

SEQ ID NO: 218261 - RNA, 19 nt, Artificial Sequence
  Description of Artificial Sequence: Synthetic oligonucleotide
  Antisense strand to SEQ ID NO: 218260
ucagcucagcaugauucca

SEQ ID NO: 218262 - RNA, 19 nt, Artificial Sequence
  Description of Artificial Sequence: Synthetic oligonucleotide
  Sense strand starting at position 3840 of SEQ ID NO: 2810
gaaucaugcugagcugaac

SEQ ID NO: 218263 - RNA, 19 nt, Artificial Sequence
  Description of Artificial Sequence: Synthetic oligonucleotide
  Antisense strand to SEQ ID NO: 218262
guucagcucagcaugauuc

SEQ ID NO: 218264 - RNA, 19 nt, Artificial Sequence
  Description of Artificial Sequence: Synthetic oligonucleotide
  Sense strand starting at position 3965 of SEQ ID NO: 2810
ccuagaucuugcucuggaa

SEQ ID NO: 218265 - RNA, 19 nt, Artificial Sequence
  Description of Artificial Sequence: Synthetic oligonucleotide
  Antisense strand to SEQ ID NO: 218264
uuccagagcaagaucuagg

SEQ ID NO: 218266 - RNA, 19 nt, Artificial Sequence
  Description of Artificial Sequence: Synthetic oligonucleotide
  Sense strand starting at position 69 of SEQ ID NO: 2811
uuguuacuugcucagaauu

SEQ ID NO: 218267 - RNA, 19 nt, Artificial Sequence
  Description of Artificial Sequence: Synthetic oligonucleotide
  Antisense strand to SEQ ID NO: 218266
aauucugagcaaguaacaa

SEQ ID NO: 218268 - RNA, 19 nt, Artificial Sequence
  Description of Artificial Sequence: Synthetic oligonucleotide
  Sense strand starting at position 96 of SEQ ID NO: 2811
gucuuuguccuugaaaugu

SEQ ID NO: 218269 - RNA, 19 nt, Artificial Sequence
  Description of Artificial Sequence: Synthetic oligonucleotide
  Antisense strand to SEQ ID NO: 218268
acauuucaaggacaaagac

SEQ ID NO: 218270 - RNA, 19 nt, Artificial Sequence
  Description of Artificial Sequence: Synthetic oligonucleotide
  Sense strand starting at position 107 of SEQ ID NO: 2811
ugaaauguugcaugauaau

SEQ ID NO: 218271 - RNA, 19 nt, Artificial Sequence
  Description of Artificial Sequence: Synthetic oligonucleotide
  Antisense strand to SEQ ID NO: 218270
auuaucaugcaacauuuca

SEQ ID NO: 218272 - RNA, 19 nt, Artificial Sequence
  Description of Artificial Sequence: Synthetic oligonucleotide
  Sense strand starting at position 118 of SEQ ID NO: 2811
augauaaugguguguagaa

SEQ ID NO: 218273 - RNA, 19 nt, Artificial Sequence
  Description of Artificial Sequence: Synthetic oligonucleotide
  Antisense strand to SEQ ID NO: 218272
uucuacacaccauuaucau

SEQ ID NO: 218274 - RNA, 19 nt, Artificial Sequence
  Description of Artificial Sequence: Synthetic oligonucleotide
  Sense strand starting at position 119 of SEQ ID NO: 2811
ugauaaugguguguagaau

SEQ ID NO: 218275 - RNA, 19 nt, Artificial Sequence
  Description of Artificial Sequence: Synthetic oligonucleotide
  Antisense strand to SEQ ID NO: 218274
auucuacacaccauuauca

SEQ ID NO: 218276 - RNA, 19 nt, Artificial Sequence
  Description of Artificial Sequence: Synthetic oligonucleotide
  Sense strand starting at position 120 of SEQ ID NO: 2811
gauaaugguguguagaauu

SEQ ID NO: 218277 - RNA, 19 nt, Artificial Sequence
  Description of Artificial Sequence: Synthetic oligonucleotide
  Antisense strand to SEQ ID NO: 218276
aauucuacacaccauuauc

SEQ ID NO: 218278 - RNA, 19 nt, Artificial Sequence
  Description of Artificial Sequence: Synthetic oligonucleotide
  Sense strand starting at position 283 of SEQ ID NO: 2811
guaaaugcugucugaauuu

SEQ ID NO: 218279 - RNA, 19 nt, Artificial Sequence
  Description of Artificial Sequence: Synthetic oligonucleotide
  Antisense strand to SEQ ID NO: 218278
aaauucagacagcauuuac

SEQ ID NO: 218280 - RNA, 19 nt, Artificial Sequence
  Description of Artificial Sequence: Synthetic oligonucleotide
  Sense strand starting at position 389 of SEQ ID NO: 2811
aauacauuggcacgagacu

SEQ ID NO: 218281 - RNA, 19 nt, Artificial Sequence
  Description of Artificial Sequence: Synthetic oligonucleotide
  Antisense strand to SEQ ID NO: 218280
agucucgugccaauguauu

SEQ ID NO: 218282 - RNA, 19 nt, Artificial Sequence
  Description of Artificial Sequence: Synthetic oligonucleotide
  Sense strand starting at position 390 of SEQ ID NO: 2811
auacauuggcacgagacua

SEQ ID NO: 218283 - RNA, 19 nt, Artificial Sequence
  Description of Artificial Sequence: Synthetic oligonucleotide
  Antisense strand to SEQ ID NO: 218282
uagucucgugccaauguau

SEQ ID NO: 218284 - RNA, 19 nt, Artificial Sequence
  Description of Artificial Sequence: Synthetic oligonucleotide
  Sense strand starting at position 443 of SEQ ID NO: 2811
agaucagugucaucuuuaa

SEQ ID NO: 218285 - RNA, 19 nt, Artificial Sequence
  Description of Artificial Sequence: Synthetic oligonucleotide
  Antisense strand to SEQ ID NO: 218284
uuaaagaugacacugaucu

SEQ ID NO: 218286 - RNA, 19 nt, Artificial Sequence
  Description of Artificial Sequence: Synthetic oligonucleotide
  Sense strand starting at position 484 of SEQ ID NO: 2811
gucuuaggagugcaagaua

SEQ ID NO: 218287 - RNA, 19 nt, Artificial Sequence
  Description of Artificial Sequence: Synthetic oligonucleotide
  Antisense strand to SEQ ID NO: 218286
uaucuugcacuccuaagac

SEQ ID NO: 218288 - RNA, 19 nt, Artificial Sequence
  Description of Artificial Sequence: Synthetic oligonucleotide
  Sense strand starting at position 495 of SEQ ID NO: 2811
gcaagauacagcugugaaa

SEQ ID NO: 218289 - RNA, 19 nt, Artificial Sequence
  Description of Artificial Sequence: Synthetic oligonucleotide
  Antisense strand to SEQ ID NO: 218288
uuucacagcuguaucuugc

SEQ ID NO: 218290 - RNA, 19 nt, Artificial Sequence
  Description of Artificial Sequence: Synthetic oligonucleotide
  Sense strand starting at position 566 of SEQ ID NO: 2811
gguuaagaccauugccaaa

SEQ ID NO: 218291 - RNA, 19 nt, Artificial Sequence
  Description of Artificial Sequence: Synthetic oligonucleotide
  Antisense strand to SEQ ID NO: 218290
uuuggcaauggucuuaacc

SEQ ID NO: 218292 - RNA, 19 nt, Artificial Sequence
  Description of Artificial Sequence: Synthetic oligonucleotide
  Sense strand starting at position 882 of SEQ ID NO: 2811
caugucauucuagguggaa

SEQ ID NO: 218293 - RNA, 19 nt, Artificial Sequence
  Description of Artificial Sequence: Synthetic oligonucleotide
  Antisense strand to SEQ ID NO: 218292
uuccaccuagaaugacaug

SEQ ID NO: 218294 - RNA, 19 nt, Artificial Sequence
  Description of Artificial Sequence: Synthetic oligonucleotide
  Sense strand starting at position 883 of SEQ ID NO: 2811
augucauucuagguggaau

SEQ ID NO: 218295 - RNA, 19 nt, Artificial Sequence
  Description of Artificial Sequence: Synthetic oligonucleotide
  Antisense strand to SEQ ID NO: 218294
auuccaccuagaaugacau

SEQ ID NO: 218296 - RNA, 19 nt, Artificial Sequence
  Description of Artificial Sequence: Synthetic oligonucleotide
  Sense strand starting at position 884 of SEQ ID NO: 2811
ugucauucuagguggaauc

SEQ ID NO: 218297 - RNA, 19 nt, Artificial Sequence
  Description of Artificial Sequence: Synthetic oligonucleotide
  Antisense strand to SEQ ID NO: 218296
gauuccaccuagaaugaca

SEQ ID NO: 218298 - RNA, 19 nt, Artificial Sequence
  Description of Artificial Sequence: Synthetic oligonucleotide
  Sense strand starting at position 885 of SEQ ID NO: 2811
gucauucuagguggaauca

SEQ ID NO: 218299 - RNA, 19 nt, Artificial Sequence
  Description of Artificial Sequence: Synthetic oligonucleotide
  Antisense strand to SEQ ID NO: 218298
ugauuccaccuagaaugac

SEQ ID NO: 218300 - RNA, 19 nt, Artificial Sequence
  Description of Artificial Sequence: Synthetic oligonucleotide
  Sense strand starting at position 895 of SEQ ID NO: 2811
guggaaucaugucuaacag

SEQ ID NO: 218301 - RNA, 19 nt, Artificial Sequence
  Description of Artificial Sequence: Synthetic oligonucleotide
  Antisense strand to SEQ ID NO: 218300
cuguuagacaugauuccac

SEQ ID NO: 218302 - RNA, 19 nt, Artificial Sequence
  Description of Artificial Sequence: Synthetic oligonucleotide
  Sense strand starting at position 903 of SEQ ID NO: 2811
augucuaacaggugaguaa

SEQ ID NO: 218303 - RNA, 19 nt, Artificial Sequence
  Description of Artificial Sequence: Synthetic oligonucleotide
  Antisense strand to SEQ ID NO: 218302
uuacucaccuguuagacau

SEQ ID NO: 218304 - RNA, 19 nt, Artificial Sequence
  Description of Artificial Sequence: Synthetic oligonucleotide
  Sense strand starting at position 904 of SEQ ID NO: 2811
ugucuaacaggugaguaaa

SEQ ID NO: 218305 - RNA, 19 nt, Artificial Sequence
  Description of Artificial Sequence: Synthetic oligonucleotide
  Antisense strand to SEQ ID NO: 218304
uuuacucaccuguuagaca

SEQ ID NO: 218306 - RNA, 19 nt, Artificial Sequence
  Description of Artificial Sequence: Synthetic oligonucleotide
  Sense strand starting at position 927 of SEQ ID NO: 2811
uugcgaacugaacaauuaa

SEQ ID NO: 218307 - RNA, 19 nt, Artificial Sequence
  Description of Artificial Sequence: Synthetic oligonucleotide
  Antisense strand to SEQ ID NO: 218306
uuaauuguucaguucgcaa

SEQ ID NO: 218308 - RNA, 19 nt, Artificial Sequence
  Description of Artificial Sequence: Synthetic oligonucleotide
  Sense strand starting at position 1284 of SEQ ID NO: 2811
caggaaaccugguuaucca

SEQ ID NO: 218309 - RNA, 19 nt, Artificial Sequence
  Description of Artificial Sequence: Synthetic oligonucleotide
  Antisense strand to SEQ ID NO: 218308
uggauaaccagguuuccug

SEQ ID NO: 218310 - RNA, 19 nt, Artificial Sequence
  Description of Artificial Sequence: Synthetic oligonucleotide
  Sense strand starting at position 2916 of SEQ ID NO: 2811
agaagugacucaucugaug

SEQ ID NO: 218311 - RNA, 19 nt, Artificial Sequence
  Description of Artificial Sequence: Synthetic oligonucleotide
  Antisense strand to SEQ ID NO: 218310
caucagaugagucacuucu

SEQ ID NO: 218312 - RNA, 19 nt, Artificial Sequence
  Description of Artificial Sequence: Synthetic oligonucleotide
  Sense strand starting at position 3385 of SEQ ID NO: 2811
ccugguuuccugcagaauc

SEQ ID NO: 218313 - RNA, 19 nt, Artificial Sequence
  Description of Artificial Sequence: Synthetic oligonucleotide
  Antisense strand to SEQ ID NO: 218312
gauucugcaggaaaccagg

SEQ ID NO: 218314 - RNA, 19 nt, Artificial Sequence
  Description of Artificial Sequence: Synthetic oligonucleotide
  Sense strand starting at position 3409 of SEQ ID NO: 2811
cuguuugaauaagcuugaa

SEQ ID NO: 218315 - RNA, 19 nt, Artificial Sequence
  Description of Artificial Sequence: Synthetic oligonucleotide
  Antisense strand to SEQ ID NO: 218314
uucaagcuuauucaaacag

SEQ ID NO: 218316 - RNA, 19 nt, Artificial Sequence
  Description of Artificial Sequence: Synthetic oligonucleotide
  Sense strand starting at position 3432 of SEQ ID NO: 2811
uagagauagugucuuucug

SEQ ID NO: 218317 - RNA, 19 nt, Artificial Sequence
  Description of Artificial Sequence: Synthetic oligonucleotide
  Antisense strand to SEQ ID NO: 218316
cagaaagacacuaucucua

SEQ ID NO: 218318 - RNA, 19 nt, Artificial Sequence
  Description of Artificial Sequence: Synthetic oligonucleotide
  Sense strand starting at position 3434 of SEQ ID NO: 2811
gagauagugucuuucugga

SEQ ID NO: 218319 - RNA, 19 nt, Artificial Sequence
  Description of Artificial Sequence: Synthetic oligonucleotide
  Antisense strand to SEQ ID NO: 218318
uccagaaagacacuaucuc

SEQ ID NO: 218320 - RNA, 19 nt, Artificial Sequence
  Description of Artificial Sequence: Synthetic oligonucleotide
  Sense strand starting at position 3436 of SEQ ID NO: 2811
gauagugucuuucuggaga

SEQ ID NO: 218321 - RNA, 19 nt, Artificial Sequence
  Description of Artificial Sequence: Synthetic oligonucleotide
  Antisense strand to SEQ ID NO: 218320
ucuccagaaagacacuauc

SEQ ID NO: 218322 - RNA, 19 nt, Artificial Sequence
  Description of Artificial Sequence: Synthetic oligonucleotide
  Sense strand starting at position 3439 of SEQ ID NO: 2811
agugucuuucuggagagau

SEQ ID NO: 218323 - RNA, 19 nt, Artificial Sequence
  Description of Artificial Sequence: Synthetic oligonucleotide
  Antisense strand to SEQ ID NO: 218322
aucucuccagaaagacacu

SEQ ID NO: 218324 - RNA, 19 nt, Artificial Sequence
  Description of Artificial Sequence: Synthetic oligonucleotide
  Sense strand starting at position 3449 of SEQ ID NO: 2811
uggagagauuuagggaucu

SEQ ID NO: 218325 - RNA, 19 nt, Artificial Sequence
  Description of Artificial Sequence: Synthetic oligonucleotide
  Antisense strand to SEQ ID NO: 218324
agaucccuaaaucucucca

SEQ ID NO: 218326 - RNA, 19 nt, Artificial Sequence
  Description of Artificial Sequence: Synthetic oligonucleotide
  Sense strand starting at position 3475 of SEQ ID NO: 2811
agagacaucccagguacua

SEQ ID NO: 218327 - RNA, 19 nt, Artificial Sequence
  Description of Artificial Sequence: Synthetic oligonucleotide
  Antisense strand to SEQ ID NO: 218326
uaguaccugggaugucucu

SEQ ID NO: 218328 - RNA, 19 nt, Artificial Sequence
  Description of Artificial Sequence: Synthetic oligonucleotide
  Sense strand starting at position 3488 of SEQ ID NO: 2811
guacuaaagauauggguag

SEQ ID NO: 218329 - RNA, 19 nt, Artificial Sequence
  Description of Artificial Sequence: Synthetic oligonucleotide
  Antisense strand to SEQ ID NO: 218328
cuacccauaucuuuaguac

SEQ ID NO: 218330 - RNA, 19 nt, Artificial Sequence
  Description of Artificial Sequence: Synthetic oligonucleotide
  Sense strand starting at position 3500 of SEQ ID NO: 2811
uggguaggaauauguuuau

SEQ ID NO: 218331 - RNA, 19 nt, Artificial Sequence
  Description of Artificial Sequence: Synthetic oligonucleotide
  Antisense strand to SEQ ID NO: 218330
auaaacauauuccuaccca

SEQ ID NO: 218332 - RNA, 19 nt, Artificial Sequence
  Description of Artificial Sequence: Synthetic oligonucleotide
  Sense strand starting at position 3742 of SEQ ID NO: 2811
gagcaaugguaucucauug

SEQ ID NO: 218333 - RNA, 19 nt, Artificial Sequence
  Description of Artificial Sequence: Synthetic oligonucleotide
  Antisense strand to SEQ ID NO: 218332
caaugagauaccauugcuc

SEQ ID NO: 218334 - RNA, 19 nt, Artificial Sequence
  Description of Artificial Sequence: Synthetic oligonucleotide
  Sense strand starting at position 3785 of SEQ ID NO: 2811
ugacuaauauggcugauca

SEQ ID NO: 218335 - RNA, 19 nt, Artificial Sequence
  Description of Artificial Sequence: Synthetic oligonucleotide
  Antisense strand to SEQ ID NO: 218334
ugaucagccauauuaguca

SEQ ID NO: 218336 - RNA, 19 nt, Artificial Sequence
  Description of Artificial Sequence: Synthetic oligonucleotide
  Sense strand starting at position 3787 of SEQ ID NO: 2811
acuaauauggcugaucauu

SEQ ID NO: 218337 - RNA, 19 nt, Artificial Sequence
  Description of Artificial Sequence: Synthetic oligonucleotide
  Antisense strand to SEQ ID NO: 218336
aaugaucagccauauuagu

SEQ ID NO: 218338 - RNA, 19 nt, Artificial Sequence
  Description of Artificial Sequence: Synthetic oligonucleotide
  Sense strand starting at position 3898 of SEQ ID NO: 2811
ggagaucuauccucucaac

SEQ ID NO: 218339 - RNA, 19 nt, Artificial Sequence
  Description of Artificial Sequence: Synthetic oligonucleotide
  Antisense strand to SEQ ID NO: 218338
guugagaggauagaucucc

SEQ ID NO: 218340 - RNA, 19 nt, Artificial Sequence
  Description of Artificial Sequence: Synthetic oligonucleotide
  Sense strand starting at position 3961 of SEQ ID NO: 2811
agcaaaucucuagaauugu

SEQ ID NO: 218341 - RNA, 19 nt, Artificial Sequence
  Description of Artificial Sequence: Synthetic oligonucleotide
  Antisense strand to SEQ ID NO: 218340
acaauucuagagauuugcu

SEQ ID NO: 218342 - RNA, 19 nt, Artificial Sequence
  Description of Artificial Sequence: Synthetic oligonucleotide
  Sense strand starting at position 3970 of SEQ ID NO: 2811
cuagaauuguaccuugcau

SEQ ID NO: 218343 - RNA, 19 nt, Artificial Sequence
  Description of Artificial Sequence: Synthetic oligonucleotide
  Antisense strand to SEQ ID NO: 218342
augcaagguacaauucuag

SEQ ID NO: 218344 - RNA, 19 nt, Artificial Sequence
  Description of Artificial Sequence: Synthetic oligonucleotide
  Sense strand starting at position 3972 of SEQ ID NO: 2811
agaauuguaccuugcauaa

SEQ ID NO: 218345 - RNA, 19 nt, Artificial Sequence
  Description of Artificial Sequence: Synthetic oligonucleotide
  Antisense strand to SEQ ID NO: 218344
uuaugcaagguacaauucu

SEQ ID NO: 218346 - RNA, 19 nt, Artificial Sequence
  Description of Artificial Sequence: Synthetic oligonucleotide
  Sense strand starting at position 79 of SEQ ID NO: 2812
ggcaaaugaucucuucuaa

SEQ ID NO: 218347 - RNA, 19 nt, Artificial Sequence
  Description of Artificial Sequence: Synthetic oligonucleotide
  Antisense strand to SEQ ID NO: 218346
uuagaagagaucauuugcc

SEQ ID NO: 218348 - RNA, 19 nt, Artificial Sequence
  Description of Artificial Sequence: Synthetic oligonucleotide
  Sense strand starting at position 265 of SEQ ID NO: 2812
gucugugcguauuuagaga

SEQ ID NO: 218349 - RNA, 19 nt, Artificial Sequence
  Description of Artificial Sequence: Synthetic oligonucleotide
  Antisense strand to SEQ ID NO: 218348
ucucuaaauacgcacagac

SEQ ID NO: 218350 - RNA, 19 nt, Artificial Sequence
  Description of Artificial Sequence: Synthetic oligonucleotide
  Sense strand starting at position 347 of SEQ ID NO: 2812
ucaguaucccagcauacua

SEQ ID NO: 218351 - RNA, 19 nt, Artificial Sequence
  Description of Artificial Sequence: Synthetic oligonucleotide
  Antisense strand to SEQ ID NO: 218350
uaguaugcugggauacuga

SEQ ID NO: 218352 - RNA, 19 nt, Artificial Sequence
  Description of Artificial Sequence: Synthetic oligonucleotide
  Sense strand starting at position 375 of SEQ ID NO: 2812
acacaaagaugcuucggaa

SEQ ID NO: 218353 - RNA, 19 nt, Artificial Sequence
  Description of Artificial Sequence: Synthetic oligonucleotide
  Antisense strand to SEQ ID NO: 218352
uuccgaagcaucuuugugu

SEQ ID NO: 218354 - RNA, 19 nt, Artificial Sequence
  Description of Artificial Sequence: Synthetic oligonucleotide
  Sense strand starting at position 575 of SEQ ID NO: 2812
uuaacugaugcuuaccgaa

SEQ ID NO: 218355 - RNA, 19 nt, Artificial Sequence
  Description of Artificial Sequence: Synthetic oligonucleotide
  Antisense strand to SEQ ID NO: 218354
uucgguaagcaucaguuaa

SEQ ID NO: 218356 - RNA, 19 nt, Artificial Sequence
  Description of Artificial Sequence: Synthetic oligonucleotide
  Sense strand starting at position 953 of SEQ ID NO: 2812
agagaaagccuuugaccgu

SEQ ID NO: 218357 - RNA, 19 nt, Artificial Sequence
  Description of Artificial Sequence: Synthetic oligonucleotide
  Antisense strand to SEQ ID NO: 218356
acggucaaaggcuuucucu

SEQ ID NO: 218358 - RNA, 19 nt, Artificial Sequence
  Description of Artificial Sequence: Synthetic oligonucleotide
  Sense strand starting at position 966 of SEQ ID NO: 2812
gaccguuuacaaugggcaa

SEQ ID NO: 218359 - RNA, 19 nt, Artificial Sequence
  Description of Artificial Sequence: Synthetic oligonucleotide
  Antisense strand to SEQ ID NO: 218358
uugcccauuguaaacgguc

SEQ ID NO: 218360 - RNA, 19 nt, Artificial Sequence
  Description of Artificial Sequence: Synthetic oligonucleotide
  Sense strand starting at position 967 of SEQ ID NO: 2812
accguuuacaaugggcaaa

SEQ ID NO: 218361 - RNA, 19 nt, Artificial Sequence
  Description of Artificial Sequence: Synthetic oligonucleotide
  Antisense strand to SEQ ID NO: 218360
uuugcccauuguaaacggu

SEQ ID NO: 218362 - RNA, 19 nt, Artificial Sequence
  Description of Artificial Sequence: Synthetic oligonucleotide
  Sense strand starting at position 969 of SEQ ID NO: 2812
cguuuacaaugggcaaaua

SEQ ID NO: 218363 - RNA, 19 nt, Artificial Sequence
  Description of Artificial Sequence: Synthetic oligonucleotide
  Antisense strand to SEQ ID NO: 218362
uauuugcccauuguaaacg

SEQ ID NO: 218364 - RNA, 19 nt, Artificial Sequence
  Description of Artificial Sequence: Synthetic oligonucleotide
  Sense strand starting at position 978 of SEQ ID NO: 2812
ugggcaaauaaaugaguaa

SEQ ID NO: 218365 - RNA, 19 nt, Artificial Sequence
  Description of Artificial Sequence: Synthetic oligonucleotide
  Antisense strand to SEQ ID NO: 218364
uuacucauuuauuugccca

SEQ ID NO: 218366 - RNA, 19 nt, Artificial Sequence
  Description of Artificial Sequence: Synthetic oligonucleotide
  Sense strand starting at position 981 of SEQ ID NO: 2812
gcaaauaaaugaguaacca

SEQ ID NO: 218367 - RNA, 19 nt, Artificial Sequence
  Description of Artificial Sequence: Synthetic oligonucleotide
  Antisense strand to SEQ ID NO: 218366
ugguuacucauuuauuugc

SEQ ID NO: 218368 - RNA, 19 nt, Artificial Sequence
  Description of Artificial Sequence: Synthetic oligonucleotide
  Sense strand starting at position 1032 of SEQ ID NO: 2812
cgcggcugaaacugauuua

SEQ ID NO: 218369 - RNA, 19 nt, Artificial Sequence
  Description of Artificial Sequence: Synthetic oligonucleotide
  Antisense strand to SEQ ID NO: 218368
uaaaucaguuucagccgcg

SEQ ID NO: 218370 - RNA, 19 nt, Artificial Sequence
  Description of Artificial Sequence: Synthetic oligonucleotide
  Sense strand starting at position 1513 of SEQ ID NO: 2812
cagaaagucucgcccaaac

SEQ ID NO: 218371 - RNA, 19 nt, Artificial Sequence
  Description of Artificial Sequence: Synthetic oligonucleotide
  Antisense strand to SEQ ID NO: 218370
guuugggcgagacuuucug

SEQ ID NO: 218372 - RNA, 19 nt, Artificial Sequence
  Description of Artificial Sequence: Synthetic oligonucleotide
  Sense strand starting at position 1515 of SEQ ID NO: 2812
gaaagucucgcccaaacuu

SEQ ID NO: 218373 - RNA, 19 nt, Artificial Sequence
  Description of Artificial Sequence: Synthetic oligonucleotide
  Antisense strand to SEQ ID NO: 218372
aaguuugggcgagacuuuc

SEQ ID NO: 218374 - RNA, 19 nt, Artificial Sequence
  Description of Artificial Sequence: Synthetic oligonucleotide
  Sense strand starting at position 3001 of SEQ ID NO: 2812
ccgcacacuggaugagaau

SEQ ID NO: 218375 - RNA, 19 nt, Artificial Sequence
  Description of Artificial Sequence: Synthetic oligonucleotide
  Antisense strand to SEQ ID NO: 218374
auucucauccagugugcgg

SEQ ID NO: 218376 - RNA, 19 nt, Artificial Sequence
  Description of Artificial Sequence: Synthetic oligonucleotide
  Sense strand starting at position 3025 of SEQ ID NO: 2812
uuccauucgagcugggaau

SEQ ID NO: 218377 - RNA, 19 nt, Artificial Sequence
  Description of Artificial Sequence: Synthetic oligonucleotide
  Antisense strand to SEQ ID NO: 218376
auucccagcucgaauggaa

SEQ ID NO: 218378 - RNA, 19 nt, Artificial Sequence
  Description of Artificial Sequence: Synthetic oligonucleotide
  Sense strand starting at position 3026 of SEQ ID NO: 2812
uccauucgagcugggaaua

SEQ ID NO: 218379 - RNA, 19 nt, Artificial Sequence
  Description of Artificial Sequence: Synthetic oligonucleotide
  Antisense strand to SEQ ID NO: 218378
uauucccagcucgaaugga

SEQ ID NO: 218380 - RNA, 19 nt, Artificial Sequence
  Description of Artificial Sequence: Synthetic oligonucleotide
  Sense strand starting at position 3085 of SEQ ID NO: 2812
cugagaccucuccagcgaa

SEQ ID NO: 218381 - RNA, 19 nt, Artificial Sequence
  Description of Artificial Sequence: Synthetic oligonucleotide
  Antisense strand to SEQ ID NO: 218380
uucgcuggagaggucucag

SEQ ID NO: 218382 - RNA, 19 nt, Artificial Sequence
  Description of Artificial Sequence: Synthetic oligonucleotide
  Sense strand starting at position 3100 of SEQ ID NO: 2812
cgaagcugaagugaauuaa

SEQ ID NO: 218383 - RNA, 19 nt, Artificial Sequence
  Description of Artificial Sequence: Synthetic oligonucleotide
  Antisense strand to SEQ ID NO: 218382
uuaauucacuucagcuucg

SEQ ID NO: 218384 - RNA, 19 nt, Artificial Sequence
  Description of Artificial Sequence: Synthetic oligonucleotide
  Sense strand starting at position 3128 of SEQ ID NO: 2812
uuaaacggucuugguaaau

SEQ ID NO: 218385 - RNA, 19 nt, Artificial Sequence
  Description of Artificial Sequence: Synthetic oligonucleotide
  Antisense strand to SEQ ID NO: 218384
auuuaccaagaccguuuaa

SEQ ID NO: 218386 - RNA, 19 nt, Artificial Sequence
  Description of Artificial Sequence: Synthetic oligonucleotide
  Sense strand starting at position 3182 of SEQ ID NO: 2812
uguagcuugaguugaauuu

SEQ ID NO: 218387 - RNA, 19 nt, Artificial Sequence
  Description of Artificial Sequence: Synthetic oligonucleotide
  Antisense strand to SEQ ID NO: 218386
aaauucaacucaagcuaca

SEQ ID NO: 218388 - RNA, 19 nt, Artificial Sequence
  Description of Artificial Sequence: Synthetic oligonucleotide
  Sense strand starting at position 3289 of SEQ ID NO: 2812
gaaucuuucucccuggagu

SEQ ID NO: 218389 - RNA, 19 nt, Artificial Sequence
  Description of Artificial Sequence: Synthetic oligonucleotide
  Antisense strand to SEQ ID NO: 218388
acuccagggagaaagauuc

SEQ ID NO: 218390 - RNA, 19 nt, Artificial Sequence
  Description of Artificial Sequence: Synthetic oligonucleotide
  Sense strand starting at position 3291 of SEQ ID NO: 2812
aucuuucucccuggaguaa

SEQ ID NO: 218391 - RNA, 19 nt, Artificial Sequence
  Description of Artificial Sequence: Synthetic oligonucleotide
  Antisense strand to SEQ ID NO: 218390
uuacuccagggagaaagau

SEQ ID NO: 218392 - RNA, 19 nt, Artificial Sequence
  Description of Artificial Sequence: Synthetic oligonucleotide
  Sense strand starting at position 3310 of SEQ ID NO: 2812
ggccgaagacuggauuacu

SEQ ID NO: 218393 - RNA, 19 nt, Artificial Sequence
  Description of Artificial Sequence: Synthetic oligonucleotide
  Antisense strand to SEQ ID NO: 218392
aguaauccagucuucggcc

SEQ ID NO: 218394 - RNA, 19 nt, Artificial Sequence
  Description of Artificial Sequence: Synthetic oligonucleotide
  Sense strand starting at position 3442 of SEQ ID NO: 2812
acugauugucaaugcauua

SEQ ID NO: 218395 - RNA, 19 nt, Artificial Sequence
  Description of Artificial Sequence: Synthetic oligonucleotide
  Antisense strand to SEQ ID NO: 218394
uaaugcauugacaaucagu

SEQ ID NO: 218396 - RNA, 19 nt, Artificial Sequence
  Description of Artificial Sequence: Synthetic oligonucleotide
  Sense strand starting at position 3463 of SEQ ID NO: 2812
aaagaagaugugugguaca

SEQ ID NO: 218397 - RNA, 19 nt, Artificial Sequence
  Description of Artificial Sequence: Synthetic oligonucleotide
  Antisense strand to SEQ ID NO: 218396
uguaccacacaucuucuuu

SEQ ID NO: 218398 - RNA, 19 nt, Artificial Sequence
  Description of Artificial Sequence: Synthetic oligonucleotide
  Sense strand starting at position 3588 of SEQ ID NO: 2812
ggcucugucauugauggga

SEQ ID NO: 218399 - RNA, 19 nt, Artificial Sequence
  Description of Artificial Sequence: Synthetic oligonucleotide
  Antisense strand to SEQ ID NO: 218398
ucccaucaaugacagagcc

SEQ ID NO: 218400 - RNA, 19 nt, Artificial Sequence
  Description of Artificial Sequence: Synthetic oligonucleotide
  Sense strand starting at position 3591 of SEQ ID NO: 2812
ucugucauugaugggauau

SEQ ID NO: 218401 - RNA, 19 nt, Artificial Sequence
  Description of Artificial Sequence: Synthetic oligonucleotide
  Antisense strand to SEQ ID NO: 218400
auaucccaucaaugacaga

SEQ ID NO: 218402 - RNA, 19 nt, Artificial Sequence
  Description of Artificial Sequence: Synthetic oligonucleotide
  Sense strand starting at position 3592 of SEQ ID NO: 2812
cugucauugaugggauaug

SEQ ID NO: 218403 - RNA, 19 nt, Artificial Sequence
  Description of Artificial Sequence: Synthetic oligonucleotide
  Antisense strand to SEQ ID NO: 218402
cauaucccaucaaugacag

SEQ ID NO: 218404 - RNA, 19 nt, Artificial Sequence
  Description of Artificial Sequence: Synthetic oligonucleotide
  Sense strand starting at position 3612 of SEQ ID NO: 2812
aguaguaauccgcuccgua

SEQ ID NO: 218405 - RNA, 19 nt, Artificial Sequence
  Description of Artificial Sequence: Synthetic oligonucleotide
  Antisense strand to SEQ ID NO: 218404
uacggagcggauuacuacu

SEQ ID NO: 218406 - RNA, 19 nt, Artificial Sequence
  Description of Artificial Sequence: Synthetic oligonucleotide
  Sense strand starting at position 3613 of SEQ ID NO: 2812
guaguaauccgcuccguag

SEQ ID NO: 218407 - RNA, 19 nt, Artificial Sequence
  Description of Artificial Sequence: Synthetic oligonucleotide
  Antisense strand to SEQ ID NO: 218406
cuacggagcggauuacuac

SEQ ID NO: 218408 - RNA, 19 nt, Artificial Sequence
  Description of Artificial Sequence: Synthetic oligonucleotide
  Sense strand starting at position 3614 of SEQ ID NO: 2812
uaguaauccgcuccguagu

SEQ ID NO: 218409 - RNA, 19 nt, Artificial Sequence
  Description of Artificial Sequence: Synthetic oligonucleotide
  Antisense strand to SEQ ID NO: 218408
acuacggagcggauuacua

SEQ ID NO: 218410 - RNA, 19 nt, Artificial Sequence
  Description of Artificial Sequence: Synthetic oligonucleotide
  Sense strand starting at position 3650 of SEQ ID NO: 2812
auggguaccaggugaauaa

SEQ ID NO: 218411 - RNA, 19 nt, Artificial Sequence
  Description of Artificial Sequence: Synthetic oligonucleotide
  Antisense strand to SEQ ID NO: 218410
uuauucaccugguacccau

SEQ ID NO: 218412 - RNA, 19 nt, Artificial Sequence
  Description of Artificial Sequence: Synthetic oligonucleotide
  Sense strand starting at position 3816 of SEQ ID NO: 2812
ugacuaaugaaccgaaagu

SEQ ID NO: 218413 - RNA, 19 nt, Artificial Sequence
  Description of Artificial Sequence: Synthetic oligonucleotide
  Antisense strand to SEQ ID NO: 218412
acuuucgguucauuaguca

SEQ ID NO: 218414 - RNA, 19 nt, Artificial Sequence
  Description of Artificial Sequence: Synthetic oligonucleotide
  Sense strand starting at position 3879 of SEQ ID NO: 2812
aaauguuauguuuguggaa

SEQ ID NO: 218415 - RNA, 19 nt, Artificial Sequence
  Description of Artificial Sequence: Synthetic oligonucleotide
  Antisense strand to SEQ ID NO: 218414
uuccacaaacauaacauuu

SEQ ID NO: 218416 - RNA, 19 nt, Artificial Sequence
  Description of Artificial Sequence: Synthetic oligonucleotide
  Sense strand starting at position 3880 of SEQ ID NO: 2812
aauguuauguuuguggaac

SEQ ID NO: 218417 - RNA, 19 nt, Artificial Sequence
  Description of Artificial Sequence: Synthetic oligonucleotide
  Antisense strand to SEQ ID NO: 218416
guuccacaaacauaacauu

SEQ ID NO: 218418 - RNA, 19 nt, Artificial Sequence
  Description of Artificial Sequence: Synthetic oligonucleotide
  Sense strand starting at position 3926 of SEQ ID NO: 2812
guuuaaccacucugucuaa

SEQ ID NO: 218419 - RNA, 19 nt, Artificial Sequence
  Description of Artificial Sequence: Synthetic oligonucleotide
  Antisense strand to SEQ ID NO: 218418
uuagacagagugguuaaac

SEQ ID NO: 218420 - RNA, 19 nt, Artificial Sequence
  Description of Artificial Sequence: Synthetic oligonucleotide
  Sense strand starting at position 3961 of SEQ ID NO: 2812
cagaguuaccaguggacua

SEQ ID NO: 218421 - RNA, 19 nt, Artificial Sequence
  Description of Artificial Sequence: Synthetic oligonucleotide
  Antisense strand to SEQ ID NO: 218420
uaguccacugguaacucug

SEQ ID NO: 218422 - RNA, 19 nt, Artificial Sequence
  Description of Artificial Sequence: Synthetic oligonucleotide
  Sense strand starting at position 3962 of SEQ ID NO: 2812
agaguuaccaguggacuau

SEQ ID NO: 218423 - RNA, 19 nt, Artificial Sequence
  Description of Artificial Sequence: Synthetic oligonucleotide
  Antisense strand to SEQ ID NO: 218422
auaguccacugguaacucu

SEQ ID NO: 218424 - RNA, 19 nt, Artificial Sequence
  Description of Artificial Sequence: Synthetic oligonucleotide
  Sense strand starting at position 3963 of SEQ ID NO: 2812
gaguuaccaguggacuauu

SEQ ID NO: 218425 - RNA, 19 nt, Artificial Sequence
  Description of Artificial Sequence: Synthetic oligonucleotide
  Antisense strand to SEQ ID NO: 218424
aauaguccacugguaacuc

SEQ ID NO: 218426 - RNA, 19 nt, Artificial Sequence
  Description of Artificial Sequence: Synthetic oligonucleotide
  Sense strand starting at position 93 of SEQ ID NO: 2813
ugauauugccaucacuuga

SEQ ID NO: 218427 - RNA, 19 nt, Artificial Sequence
  Description of Artificial Sequence: Synthetic oligonucleotide
  Antisense strand to SEQ ID NO: 218426
ucaagugauggcaauauca

SEQ ID NO: 218428 - RNA, 19 nt, Artificial Sequence
  Description of Artificial Sequence: Synthetic oligonucleotide
  Sense strand starting at position 201 of SEQ ID NO: 2813
cccaguauucuuuaauguu

SEQ ID NO: 218429 - RNA, 19 nt, Artificial Sequence
  Description of Artificial Sequence: Synthetic oligonucleotide
  Antisense strand to SEQ ID NO: 218428
aacauuaaagaauacuggg

SEQ ID NO: 218430 - RNA, 19 nt, Artificial Sequence
  Description of Artificial Sequence: Synthetic oligonucleotide
  Sense strand starting at position 293 of SEQ ID NO: 2813
uaaguauucgguuaaauuc

SEQ ID NO: 218431 - RNA, 19 nt, Artificial Sequence
  Description of Artificial Sequence: Synthetic oligonucleotide
  Antisense strand to SEQ ID NO: 218430
gaauuuaaccgaauacuua

SEQ ID NO: 218432 - RNA, 19 nt, Artificial Sequence
  Description of Artificial Sequence: Synthetic oligonucleotide
  Sense strand starting at position 324 of SEQ ID NO: 2813
agaagaaauaccuguggua

SEQ ID NO: 218433 - RNA, 19 nt, Artificial Sequence
  Description of Artificial Sequence: Synthetic oligonucleotide
  Antisense strand to SEQ ID NO: 218432
uaccacagguauuucuucu

SEQ ID NO: 218434 - RNA, 19 nt, Artificial Sequence
  Description of Artificial Sequence: Synthetic oligonucleotide
  Sense strand starting at position 326 of SEQ ID NO: 2813
aagaaauaccugugguauu

SEQ ID NO: 218435 - RNA, 19 nt, Artificial Sequence
  Description of Artificial Sequence: Synthetic oligonucleotide
  Antisense strand to SEQ ID NO: 218434
aauaccacagguauuucuu

SEQ ID NO: 218436 - RNA, 19 nt, Artificial Sequence
  Description of Artificial Sequence: Synthetic oligonucleotide
  Sense strand starting at position 455 of SEQ ID NO: 2813
uuacauugugccuaagguu

SEQ ID NO: 218437 - RNA, 19 nt, Artificial Sequence
  Description of Artificial Sequence: Synthetic oligonucleotide
  Antisense strand to SEQ ID NO: 218436
aaccuuaggcacaauguaa

SEQ ID NO: 218438 - RNA, 19 nt, Artificial Sequence
  Description of Artificial Sequence: Synthetic oligonucleotide
  Sense strand starting at position 477 of SEQ ID NO: 2813
aaugguaucgacuaucaau

SEQ ID NO: 218439 - RNA, 19 nt, Artificial Sequence
  Description of Artificial Sequence: Synthetic oligonucleotide
  Antisense strand to SEQ ID NO: 218438
auugauagucgauaccauu

SEQ ID NO: 218440 - RNA, 19 nt, Artificial Sequence
  Description of Artificial Sequence: Synthetic oligonucleotide
  Sense strand starting at position 483 of SEQ ID NO: 2813
aucgacuaucaaugguauu

SEQ ID NO: 218441 - RNA, 19 nt, Artificial Sequence
  Description of Artificial Sequence: Synthetic oligonucleotide
  Antisense strand to SEQ ID NO: 218440
aauaccauugauagucgau

SEQ ID NO: 218442 - RNA, 19 nt, Artificial Sequence
  Description of Artificial Sequence: Synthetic oligonucleotide
  Sense strand starting at position 549 of SEQ ID NO: 2813
ucauauuaacuguggccaa

SEQ ID NO: 218443 - RNA, 19 nt, Artificial Sequence
  Description of Artificial Sequence: Synthetic oligonucleotide
  Antisense strand to SEQ ID NO: 218442
uuggccacaguuaauauga

SEQ ID NO: 218444 - RNA, 19 nt, Artificial Sequence
  Description of Artificial Sequence: Synthetic oligonucleotide
  Sense strand starting at position 556 of SEQ ID NO: 2813
aacuguggccaaugaauga

SEQ ID NO: 218445 - RNA, 19 nt, Artificial Sequence
  Description of Artificial Sequence: Synthetic oligonucleotide
  Antisense strand to SEQ ID NO: 218444
ucauucauuggccacaguu

SEQ ID NO: 218446 - RNA, 19 nt, Artificial Sequence
  Description of Artificial Sequence: Synthetic oligonucleotide
  Sense strand starting at position 656 of SEQ ID NO: 2813
guaagucuauuuguuccau

SEQ ID NO: 218447 - RNA, 19 nt, Artificial Sequence
  Description of Artificial Sequence: Synthetic oligonucleotide
  Antisense strand to SEQ ID NO: 218446
auggaacaaauagacuuac

SEQ ID NO: 218448 - RNA, 19 nt, Artificial Sequence
  Description of Artificial Sequence: Synthetic oligonucleotide
  Sense strand starting at position 837 of SEQ ID NO: 2813
gguggaguuguacacaaac

SEQ ID NO: 218449 - RNA, 19 nt, Artificial Sequence
  Description of Artificial Sequence: Synthetic oligonucleotide
  Antisense strand to SEQ ID NO: 218448
guuuguguacaacuccacc

SEQ ID NO: 218450 - RNA, 19 nt, Artificial Sequence
  Description of Artificial Sequence: Synthetic oligonucleotide
  Sense strand starting at position 880 of SEQ ID NO: 2813
cuggcaagagucuauaguu

SEQ ID NO: 218451 - RNA, 19 nt, Artificial Sequence
  Description of Artificial Sequence: Synthetic oligonucleotide
  Antisense strand to SEQ ID NO: 218450
aacuauagacucuugccag

SEQ ID NO: 218452 - RNA, 19 nt, Artificial Sequence
  Description of Artificial Sequence: Synthetic oligonucleotide
  Sense strand starting at position 1080 of SEQ ID NO: 2813
gacagaggauuuggauaug

SEQ ID NO: 218453 - RNA, 19 nt, Artificial Sequence
  Description of Artificial Sequence: Synthetic oligonucleotide
  Antisense strand to SEQ ID NO: 218452
cauauccaaauccucuguc

SEQ ID NO: 218454 - RNA, 19 nt, Artificial Sequence
  Description of Artificial Sequence: Synthetic oligonucleotide
  Sense strand starting at position 1101 of SEQ ID NO: 2813
gcaauaggacugugaacaa

SEQ ID NO: 218455 - RNA, 19 nt, Artificial Sequence
  Description of Artificial Sequence: Synthetic oligonucleotide
  Antisense strand to SEQ ID NO: 218454
uuguucacaguccuauugc

SEQ ID NO: 218456 - RNA, 19 nt, Artificial Sequence
  Description of Artificial Sequence: Synthetic oligonucleotide
  Sense strand starting at position 1154 of SEQ ID NO: 2813
aggacacauucugaggaaa

SEQ ID NO: 218457 - RNA, 19 nt, Artificial Sequence
  Description of Artificial Sequence: Synthetic oligonucleotide
  Antisense strand to SEQ ID NO: 218456
uuuccucagaauguguccu

SEQ ID NO: 218458 - RNA, 19 nt, Artificial Sequence
  Description of Artificial Sequence: Synthetic oligonucleotide
  Sense strand starting at position 1236 of SEQ ID NO: 2813
ggauaagccucagugaaga

SEQ ID NO: 218459 - RNA, 19 nt, Artificial Sequence
  Description of Artificial Sequence: Synthetic oligonucleotide
  Antisense strand to SEQ ID NO: 218458
ucuucacugaggcuuaucc

SEQ ID NO: 218460 - RNA, 19 nt, Artificial Sequence
  Description of Artificial Sequence: Synthetic oligonucleotide
  Sense strand starting at position 1333 of SEQ ID NO: 2813
uucucugcacacugagaau

SEQ ID NO: 218461 - RNA, 19 nt, Artificial Sequence
  Description of Artificial Sequence: Synthetic oligonucleotide
  Antisense strand to SEQ ID NO: 218460
auucucagugugcagagaa

SEQ ID NO: 218462 - RNA, 19 nt, Artificial Sequence
  Description of Artificial Sequence: Synthetic oligonucleotide
  Sense strand starting at position 1336 of SEQ ID NO: 2813
ucugcacacugagaauuua

SEQ ID NO: 218463 - RNA, 19 nt, Artificial Sequence
  Description of Artificial Sequence: Synthetic oligonucleotide
  Antisense strand to SEQ ID NO: 218462
uaaauucucagugugcaga

SEQ ID NO: 218464 - RNA, 19 nt, Artificial Sequence
  Description of Artificial Sequence: Synthetic oligonucleotide
  Sense strand starting at position 1344 of SEQ ID NO: 2813
cugagaauuuauuaaaggu

SEQ ID NO: 218465 - RNA, 19 nt, Artificial Sequence
  Description of Artificial Sequence: Synthetic oligonucleotide
  Antisense strand to SEQ ID NO: 218464
accuuuaauaaauucucag

SEQ ID NO: 218466 - RNA, 19 nt, Artificial Sequence
  Description of Artificial Sequence: Synthetic oligonucleotide
  Sense strand starting at position 1442 of SEQ ID NO: 2813
cuggcauaaugacuaauga

SEQ ID NO: 218467 - RNA, 19 nt, Artificial Sequence
  Description of Artificial Sequence: Synthetic oligonucleotide
  Antisense strand to SEQ ID NO: 218466
ucauuagucauuaugccag

SEQ ID NO: 218468 - RNA, 19 nt, Artificial Sequence
  Description of Artificial Sequence: Synthetic oligonucleotide
  Sense strand starting at position 1469 of SEQ ID NO: 2813
aaggcaaaguccuuagucu

SEQ ID NO: 218469 - RNA, 19 nt, Artificial Sequence
  Description of Artificial Sequence: Synthetic oligonucleotide
  Antisense strand to SEQ ID NO: 218468
agacuaaggacuuugccuu

SEQ ID NO: 218470 - RNA, 19 nt, Artificial Sequence
  Description of Artificial Sequence: Synthetic oligonucleotide
  Sense strand starting at position 1470 of SEQ ID NO: 2813
aggcaaaguccuuagucuu

SEQ ID NO: 218471 - RNA, 19 nt, Artificial Sequence
  Description of Artificial Sequence: Synthetic oligonucleotide
  Antisense strand to SEQ ID NO: 218470
aagacuaaggacuuugccu

SEQ ID NO: 218472 - RNA, 19 nt, Artificial Sequence
  Description of Artificial Sequence: Synthetic oligonucleotide
  Sense strand starting at position 1771 of SEQ ID NO: 2813
agaccugugggcgaagaaa

SEQ ID NO: 218473 - RNA, 19 nt, Artificial Sequence
  Description of Artificial Sequence: Synthetic oligonucleotide
  Antisense strand to SEQ ID NO: 218472
uuucuucgcccacaggucu

SEQ ID NO: 218474 - RNA, 19 nt, Artificial Sequence
  Description of Artificial Sequence: Synthetic oligonucleotide
  Sense strand starting at position 2725 of SEQ ID NO: 2813
uccugcucacuguauuaca

SEQ ID NO: 218475 - RNA, 19 nt, Artificial Sequence
  Description of Artificial Sequence: Synthetic oligonucleotide
  Antisense strand to SEQ ID NO: 218474
uguaauacagugagcagga

SEQ ID NO: 218476 - RNA, 19 nt, Artificial Sequence
  Description of Artificial Sequence: Synthetic oligonucleotide
  Sense strand starting at position 2800 of SEQ ID NO: 2813
gggcuaucuguugagagaa

SEQ ID NO: 218477 - RNA, 19 nt, Artificial Sequence
  Description of Artificial Sequence: Synthetic oligonucleotide
  Antisense strand to SEQ ID NO: 218476
uucucucaacagauagccc

SEQ ID NO: 218478 - RNA, 19 nt, Artificial Sequence
  Description of Artificial Sequence: Synthetic oligonucleotide
  Sense strand starting at position 2915 of SEQ ID NO: 2813
ugccuaguguauuuccuua

SEQ ID NO: 218479 - RNA, 19 nt, Artificial Sequence
  Description of Artificial Sequence: Synthetic oligonucleotide
  Antisense strand to SEQ ID NO: 218478
uaaggaaauacacuaggca

SEQ ID NO: 218480 - RNA, 19 nt, Artificial Sequence
  Description of Artificial Sequence: Synthetic oligonucleotide
  Sense strand starting at position 2922 of SEQ ID NO: 2813
uguauuuccuuauaccaga

SEQ ID NO: 218481 - RNA, 19 nt, Artificial Sequence
  Description of Artificial Sequence: Synthetic oligonucleotide
  Antisense strand to SEQ ID NO: 218480
ucugguauaaggaaauaca

SEQ ID NO: 218482 - RNA, 19 nt, Artificial Sequence
  Description of Artificial Sequence: Synthetic oligonucleotide
  Sense strand starting at position 3227 of SEQ ID NO: 2813
cuuguuuagcaguacaauu

SEQ ID NO: 218483 - RNA, 19 nt, Artificial Sequence
  Description of Artificial Sequence: Synthetic oligonucleotide
  Antisense strand to SEQ ID NO: 218482
aauuguacugcuaaacaag

SEQ ID NO: 218484 - RNA, 19 nt, Artificial Sequence
  Description of Artificial Sequence: Synthetic oligonucleotide
  Sense strand starting at position 3353 of SEQ ID NO: 2813
cguugucaucuugguauuu

SEQ ID NO: 218485 - RNA, 19 nt, Artificial Sequence
  Description of Artificial Sequence: Synthetic oligonucleotide
  Antisense strand to SEQ ID NO: 218484
aaauaccaagaugacaacg

SEQ ID NO: 218486 - RNA, 19 nt, Artificial Sequence
  Description of Artificial Sequence: Synthetic oligonucleotide
  Sense strand starting at position 3380 of SEQ ID NO: 2813
uugggaucccuugguuuag

SEQ ID NO: 218487 - RNA, 19 nt, Artificial Sequence
  Description of Artificial Sequence: Synthetic oligonucleotide
  Antisense strand to SEQ ID NO: 218486
cuaaaccaagggaucccaa

SEQ ID NO: 218488 - RNA, 19 nt, Artificial Sequence
  Description of Artificial Sequence: Synthetic oligonucleotide
  Sense strand starting at position 3381 of SEQ ID NO: 2813
ugggaucccuugguuuagu

SEQ ID NO: 218489 - RNA, 19 nt, Artificial Sequence
  Description of Artificial Sequence: Synthetic oligonucleotide
  Antisense strand to SEQ ID NO: 218488
acuaaaccaagggauccca

SEQ ID NO: 218490 - RNA, 19 nt, Artificial Sequence
  Description of Artificial Sequence: Synthetic oligonucleotide
  Sense strand starting at position 3439 of SEQ ID NO: 2813
ugaguauuggaaugugcac

SEQ ID NO: 218491 - RNA, 19 nt, Artificial Sequence
  Description of Artificial Sequence: Synthetic oligonucleotide
  Antisense strand to SEQ ID NO: 218490
gugcacauuccaauacuca

SEQ ID NO: 218492 - RNA, 19 nt, Artificial Sequence
  Description of Artificial Sequence: Synthetic oligonucleotide
  Sense strand starting at position 3457 of SEQ ID NO: 2813
cuuggugucauuuggcauu

SEQ ID NO: 218493 - RNA, 19 nt, Artificial Sequence
  Description of Artificial Sequence: Synthetic oligonucleotide
  Antisense strand to SEQ ID NO: 218492
aaugccaaaugacaccaag

SEQ ID NO: 218494 - RNA, 19 nt, Artificial Sequence
  Description of Artificial Sequence: Synthetic oligonucleotide
  Sense strand starting at position 3496 of SEQ ID NO: 2813
uguaauguuagacaagagu

SEQ ID NO: 218495 - RNA, 19 nt, Artificial Sequence
  Description of Artificial Sequence: Synthetic oligonucleotide
  Antisense strand to SEQ ID NO: 218494
acucuugucuaacauuaca

SEQ ID NO: 218496 - RNA, 19 nt, Artificial Sequence
  Description of Artificial Sequence: Synthetic oligonucleotide
  Sense strand starting at position 3550 of SEQ ID NO: 2813
uguggaguuguuggaauua

SEQ ID NO: 218497 - RNA, 19 nt, Artificial Sequence
  Description of Artificial Sequence: Synthetic oligonucleotide
  Antisense strand to SEQ ID NO: 218496
uaauuccaacaacuccaca

SEQ ID NO: 218498 - RNA, 19 nt, Artificial Sequence
  Description of Artificial Sequence: Synthetic oligonucleotide
  Sense strand starting at position 3685 of SEQ ID NO: 2813
aaugaauugcuuuauuggu

SEQ ID NO: 218499 - RNA, 19 nt, Artificial Sequence
  Description of Artificial Sequence: Synthetic oligonucleotide
  Antisense strand to SEQ ID NO: 218498
accaauaaagcaauucauu

SEQ ID NO: 218500 - RNA, 19 nt, Artificial Sequence
  Description of Artificial Sequence: Synthetic oligonucleotide
  Sense strand starting at position 3776 of SEQ ID NO: 2813
cugagagauguuuguacca

SEQ ID NO: 218501 - RNA, 19 nt, Artificial Sequence
  Description of Artificial Sequence: Synthetic oligonucleotide
  Antisense strand to SEQ ID NO: 218500
ugguacaaacaucucucag

SEQ ID NO: 218502 - RNA, 19 nt, Artificial Sequence
  Description of Artificial Sequence: Synthetic oligonucleotide
  Sense strand starting at position 3783 of SEQ ID NO: 2813
auguuuguaccauauuaag

SEQ ID NO: 218503 - RNA, 19 nt, Artificial Sequence
  Description of Artificial Sequence: Synthetic oligonucleotide
  Antisense strand to SEQ ID NO: 218502
cuuaauaugguacaaacau

SEQ ID NO: 218504 - RNA, 19 nt, Artificial Sequence
  Description of Artificial Sequence: Synthetic oligonucleotide
  Sense strand starting at position 3817 of SEQ ID NO: 2813
auagaaagcuaagucugua

SEQ ID NO: 218505 - RNA, 19 nt, Artificial Sequence
  Description of Artificial Sequence: Synthetic oligonucleotide
  Antisense strand to SEQ ID NO: 218504
uacagacuuagcuuucuau

SEQ ID NO: 218506 - RNA, 19 nt, Artificial Sequence
  Description of Artificial Sequence: Synthetic oligonucleotide
  Sense strand starting at position 6 of SEQ ID NO: 2814
acagauuagugcccagcua

SEQ ID NO: 218507 - RNA, 19 nt, Artificial Sequence
  Description of Artificial Sequence: Synthetic oligonucleotide
  Antisense strand to SEQ ID NO: 218506
uagcugggcacuaaucugu

SEQ ID NO: 218508 - RNA, 19 nt, Artificial Sequence
  Description of Artificial Sequence: Synthetic oligonucleotide
  Sense strand starting at position 7 of SEQ ID NO: 2814
cagauuagugcccagcuaa

SEQ ID NO: 218509 - RNA, 19 nt, Artificial Sequence
  Description of Artificial Sequence: Synthetic oligonucleotide
  Antisense strand to SEQ ID NO: 218508
uuagcugggcacuaaucug

SEQ ID NO: 218510 - RNA, 19 nt, Artificial Sequence
  Description of Artificial Sequence: Synthetic oligonucleotide
  Sense strand starting at position 36 of SEQ ID NO: 2814
guggcagaaucagaauaga

SEQ ID NO: 218511 - RNA, 19 nt, Artificial Sequence
  Description of Artificial Sequence: Synthetic oligonucleotide
  Antisense strand to SEQ ID NO: 218510
ucuauucugauucugccac

SEQ ID NO: 218512 - RNA, 19 nt, Artificial Sequence
  Description of Artificial Sequence: Synthetic oligonucleotide
  Sense strand starting at position 51 of SEQ ID NO: 2814
uagacaugucagggcauca

SEQ ID NO: 218513 - RNA, 19 nt, Artificial Sequence
  Description of Artificial Sequence: Synthetic oligonucleotide
  Antisense strand to SEQ ID NO: 218512
ugaugcccugacaugucua

SEQ ID NO: 218514 - RNA, 19 nt, Artificial Sequence
  Description of Artificial Sequence: Synthetic oligonucleotide
  Sense strand starting at position 217 of SEQ ID NO: 2814
uccucucuuucgguguauu

SEQ ID NO: 218515 - RNA, 19 nt, Artificial Sequence
  Description of Artificial Sequence: Synthetic oligonucleotide
  Antisense strand to SEQ ID NO: 218514
aauacaccgaaagagagga

SEQ ID NO: 218516 - RNA, 19 nt, Artificial Sequence
  Description of Artificial Sequence: Synthetic oligonucleotide
  Sense strand starting at position 218 of SEQ ID NO: 2814
ccucucuuucgguguauuu

SEQ ID NO: 218517 - RNA, 19 nt, Artificial Sequence
  Description of Artificial Sequence: Synthetic oligonucleotide
  Antisense strand to SEQ ID NO: 218516
aaauacaccgaaagagagg

SEQ ID NO: 218518 - RNA, 19 nt, Artificial Sequence
  Description of Artificial Sequence: Synthetic oligonucleotide
  Sense strand starting at position 220 of SEQ ID NO: 2814
ucucuuucgguguauuuga

SEQ ID NO: 218519 - RNA, 19 nt, Artificial Sequence
  Description of Artificial Sequence: Synthetic oligonucleotide
  Antisense strand to SEQ ID NO: 218518
ucaaauacaccgaaagaga

SEQ ID NO: 218520 - RNA, 19 nt, Artificial Sequence
  Description of Artificial Sequence: Synthetic oligonucleotide
  Sense strand starting at position 480 of SEQ ID NO: 2814
gcuguccguggugaugauu

SEQ ID NO: 218521 - RNA, 19 nt, Artificial Sequence
  Description of Artificial Sequence: Synthetic oligonucleotide
  Antisense strand to SEQ ID NO: 218520
aaucaucaccacggacagc

SEQ ID NO: 218522 - RNA, 19 nt, Artificial Sequence
  Description of Artificial Sequence: Synthetic oligonucleotide
  Sense strand starting at position 526 of SEQ ID NO: 2814
cccaacuuucuuggagaca

SEQ ID NO: 218523 - RNA, 19 nt, Artificial Sequence
  Description of Artificial Sequence: Synthetic oligonucleotide
  Antisense strand to SEQ ID NO: 218522
ugucuccaagaaaguuggg

SEQ ID NO: 218524 - RNA, 19 nt, Artificial Sequence
  Description of Artificial Sequence: Synthetic oligonucleotide
  Sense strand starting at position 546 of SEQ ID NO: 2814
ccuucugauucugagaaau

SEQ ID NO: 218525 - RNA, 19 nt, Artificial Sequence
  Description of Artificial Sequence: Synthetic oligonucleotide
  Antisense strand to SEQ ID NO: 218524
auuucucagaaucagaagg

SEQ ID NO: 218526 - RNA, 19 nt, Artificial Sequence
  Description of Artificial Sequence: Synthetic oligonucleotide
  Sense strand starting at position 548 of SEQ ID NO: 2814
uucugauucugagaaauaa

SEQ ID NO: 218527 - RNA, 19 nt, Artificial Sequence
  Description of Artificial Sequence: Synthetic oligonucleotide
  Antisense strand to SEQ ID NO: 218526
uuauuucucagaaucagaa

SEQ ID NO: 218528 - RNA, 19 nt, Artificial Sequence
  Description of Artificial Sequence: Synthetic oligonucleotide
  Sense strand starting at position 583 of SEQ ID NO: 2814
cucggaguuuguuuacaca

SEQ ID NO: 218529 - RNA, 19 nt, Artificial Sequence
  Description of Artificial Sequence: Synthetic oligonucleotide
  Antisense strand to SEQ ID NO: 218528
uguguaaacaaacuccgag

SEQ ID NO: 218530 - RNA, 19 nt, Artificial Sequence
  Description of Artificial Sequence: Synthetic oligonucleotide
  Sense strand starting at position 1340 of SEQ ID NO: 2814
guguaaguacacuagaaac

SEQ ID NO: 218531 - RNA, 19 nt, Artificial Sequence
  Description of Artificial Sequence: Synthetic oligonucleotide
  Antisense strand to SEQ ID NO: 218530
guuucuaguguacuuacac

SEQ ID NO: 218532 - RNA, 19 nt, Artificial Sequence
  Description of Artificial Sequence: Synthetic oligonucleotide
  Sense strand starting at position 1445 of SEQ ID NO: 2814
caugauuuaucuugcgaug

SEQ ID NO: 218533 - RNA, 19 nt, Artificial Sequence
  Description of Artificial Sequence: Synthetic oligonucleotide
  Antisense strand to SEQ ID NO: 218532
caucgcaagauaaaucaug

SEQ ID NO: 218534 - RNA, 19 nt, Artificial Sequence
  Description of Artificial Sequence: Synthetic oligonucleotide
  Sense strand starting at position 1448 of SEQ ID NO: 2814
gauuuaucuugcgaugggu

SEQ ID NO: 218535 - RNA, 19 nt, Artificial Sequence
  Description of Artificial Sequence: Synthetic oligonucleotide
  Antisense strand to SEQ ID NO: 218534
acccaucgcaagauaaauc

SEQ ID NO: 218536 - RNA, 19 nt, Artificial Sequence
  Description of Artificial Sequence: Synthetic oligonucleotide
  Sense strand starting at position 2389 of SEQ ID NO: 2814
agcggaaguucuucccaga

SEQ ID NO: 218537 - RNA, 19 nt, Artificial Sequence
  Description of Artificial Sequence: Synthetic oligonucleotide
  Antisense strand to SEQ ID NO: 218536
ucugggaagaacuuccgcu

SEQ ID NO: 218538 - RNA, 19 nt, Artificial Sequence
  Description of Artificial Sequence: Synthetic oligonucleotide
  Sense strand starting at position 2406 of SEQ ID NO: 2814
gagucuaaucgccagccuu

SEQ ID NO: 218539 - RNA, 19 nt, Artificial Sequence
  Description of Artificial Sequence: Synthetic oligonucleotide
  Antisense strand to SEQ ID NO: 218538
aaggcuggcgauuagacuc

SEQ ID NO: 218540 - RNA, 19 nt, Artificial Sequence
  Description of Artificial Sequence: Synthetic oligonucleotide
  Sense strand starting at position 2686 of SEQ ID NO: 2814
cgcgguuuacucaguguuu

SEQ ID NO: 218541 - RNA, 19 nt, Artificial Sequence
  Description of Artificial Sequence: Synthetic oligonucleotide
  Antisense strand to SEQ ID NO: 218540
aaacacugaguaaaccgcg

SEQ ID NO: 218542 - RNA, 19 nt, Artificial Sequence
  Description of Artificial Sequence: Synthetic oligonucleotide
  Sense strand starting at position 2688 of SEQ ID NO: 2814
cgguuuacucaguguuuag

SEQ ID NO: 218543 - RNA, 19 nt, Artificial Sequence
  Description of Artificial Sequence: Synthetic oligonucleotide
  Antisense strand to SEQ ID NO: 218542
cuaaacacugaguaaaccg

SEQ ID NO: 218544 - RNA, 19 nt, Artificial Sequence
  Description of Artificial Sequence: Synthetic oligonucleotide
  Sense strand starting at position 2695 of SEQ ID NO: 2814
cucaguguuuaggcauaau

SEQ ID NO: 218545 - RNA, 19 nt, Artificial Sequence
  Description of Artificial Sequence: Synthetic oligonucleotide
  Antisense strand to SEQ ID NO: 218544
auuaugccuaaacacugag

SEQ ID NO: 218546 - RNA, 19 nt, Artificial Sequence
  Description of Artificial Sequence: Synthetic oligonucleotide
  Sense strand starting at position 2748 of SEQ ID NO: 2814
gaagaauguugggcuuuag

SEQ ID NO: 218547 - RNA, 19 nt, Artificial Sequence
  Description of Artificial Sequence: Synthetic oligonucleotide
  Antisense strand to SEQ ID NO: 218546
cuaaagcccaacauucuuc

SEQ ID NO: 218548 - RNA, 19 nt, Artificial Sequence
  Description of Artificial Sequence: Synthetic oligonucleotide
  Sense strand starting at position 2830 of SEQ ID NO: 2814
cgacgucugccugagaguu

SEQ ID NO: 218549 - RNA, 19 nt, Artificial Sequence
  Description of Artificial Sequence: Synthetic oligonucleotide
  Antisense strand to SEQ ID NO: 218548
aacucucaggcagacgucg

SEQ ID NO: 218550 - RNA, 19 nt, Artificial Sequence
  Description of Artificial Sequence: Synthetic oligonucleotide
  Sense strand starting at position 2843 of SEQ ID NO: 2814
agaguuagcagcugaggau

SEQ ID NO: 218551 - RNA, 19 nt, Artificial Sequence
  Description of Artificial Sequence: Synthetic oligonucleotide
  Antisense strand to SEQ ID NO: 218550
auccucagcugcuaacucu

SEQ ID NO: 218552 - RNA, 19 nt, Artificial Sequence
  Description of Artificial Sequence: Synthetic oligonucleotide
  Sense strand starting at position 2858 of SEQ ID NO: 2814
ggaugaagcgcuuaguuca

SEQ ID NO: 218553 - RNA, 19 nt, Artificial Sequence
  Description of Artificial Sequence: Synthetic oligonucleotide
  Antisense strand to SEQ ID NO: 218552
ugaacuaagcgcuucaucc

SEQ ID NO: 218554 - RNA, 19 nt, Artificial Sequence
  Description of Artificial Sequence: Synthetic oligonucleotide
  Sense strand starting at position 2904 of SEQ ID NO: 2814
gugcgugaacuccaucaau

SEQ ID NO: 218555 - RNA, 19 nt, Artificial Sequence
  Description of Artificial Sequence: Synthetic oligonucleotide
  Antisense strand to SEQ ID NO: 218554
auugauggaguucacgcac

SEQ ID NO: 218556 - RNA, 19 nt, Artificial Sequence
  Description of Artificial Sequence: Synthetic oligonucleotide
  Sense strand starting at position 2907 of SEQ ID NO: 2814
cgugaacuccaucaauucu

SEQ ID NO: 218557 - RNA, 19 nt, Artificial Sequence
  Description of Artificial Sequence: Synthetic oligonucleotide
  Antisense strand to SEQ ID NO: 218556
agaauugauggaguucacg

SEQ ID NO: 218558 - RNA, 19 nt, Artificial Sequence
  Description of Artificial Sequence: Synthetic oligonucleotide
  Sense strand starting at position 2930 of SEQ ID NO: 2814
cugaccugcuaggaagaua

SEQ ID NO: 218559 - RNA, 19 nt, Artificial Sequence
  Description of Artificial Sequence: Synthetic oligonucleotide
  Antisense strand to SEQ ID NO: 218558
uaucuuccuagcaggucag

SEQ ID NO: 218560 - RNA, 19 nt, Artificial Sequence
  Description of Artificial Sequence: Synthetic oligonucleotide
  Sense strand starting at position 2958 of SEQ ID NO: 2814
uccugcauuucgcagauga

SEQ ID NO: 218561 - RNA, 19 nt, Artificial Sequence
  Description of Artificial Sequence: Synthetic oligonucleotide
  Antisense strand to SEQ ID NO: 218560
ucaucugcgaaaugcagga

SEQ ID NO: 218562 - RNA, 19 nt, Artificial Sequence
  Description of Artificial Sequence: Synthetic oligonucleotide
  Sense strand starting at position 3302 of SEQ ID NO: 2814
gacagagugagcugggaaa

SEQ ID NO: 218563 - RNA, 19 nt, Artificial Sequence
  Description of Artificial Sequence: Synthetic oligonucleotide
  Antisense strand to SEQ ID NO: 218562
uuucccagcucacucuguc

SEQ ID NO: 218564 - RNA, 19 nt, Artificial Sequence
  Description of Artificial Sequence: Synthetic oligonucleotide
  Sense strand starting at position 3421 of SEQ ID NO: 2814
gguagcuccagguaggaaa

SEQ ID NO: 218565 - RNA, 19 nt, Artificial Sequence
  Description of Artificial Sequence: Synthetic oligonucleotide
  Antisense strand to SEQ ID NO: 218564
uuuccuaccuggagcuacc

SEQ ID NO: 218566 - RNA, 19 nt, Artificial Sequence
  Description of Artificial Sequence: Synthetic oligonucleotide
  Sense strand starting at position 3446 of SEQ ID NO: 2814
caccacuugcaguggaauu

SEQ ID NO: 218567 - RNA, 19 nt, Artificial Sequence
  Description of Artificial Sequence: Synthetic oligonucleotide
  Antisense strand to SEQ ID NO: 218566
aauuccacugcaaguggug

SEQ ID NO: 218568 - RNA, 19 nt, Artificial Sequence
  Description of Artificial Sequence: Synthetic oligonucleotide
  Sense strand starting at position 3541 of SEQ ID NO: 2814
gggauauuccagcagaggu

SEQ ID NO: 218569 - RNA, 19 nt, Artificial Sequence
  Description of Artificial Sequence: Synthetic oligonucleotide
  Antisense strand to SEQ ID NO: 218568
accucugcuggaauauccc

SEQ ID NO: 218570 - RNA, 19 nt, Artificial Sequence
  Description of Artificial Sequence: Synthetic oligonucleotide
  Sense strand starting at position 3594 of SEQ ID NO: 2814
uugcuuccaugagucacau

SEQ ID NO: 218571 - RNA, 19 nt, Artificial Sequence
  Description of Artificial Sequence: Synthetic oligonucleotide
  Antisense strand to SEQ ID NO: 218570
augugacucauggaagcaa

SEQ ID NO: 218572 - RNA, 19 nt, Artificial Sequence
  Description of Artificial Sequence: Synthetic oligonucleotide
  Sense strand starting at position 3618 of SEQ ID NO: 2814
ccuuauggguccucacaac

SEQ ID NO: 218573 - RNA, 19 nt, Artificial Sequence
  Description of Artificial Sequence: Synthetic oligonucleotide
  Antisense strand to SEQ ID NO: 218572
guugugaggacccauaagg

SEQ ID NO: 218574 - RNA, 19 nt, Artificial Sequence
  Description of Artificial Sequence: Synthetic oligonucleotide
  Sense strand starting at position 3632 of SEQ ID NO: 2814
acaacaguccagcgaguua

SEQ ID NO: 218575 - RNA, 19 nt, Artificial Sequence
  Description of Artificial Sequence: Synthetic oligonucleotide
  Antisense strand to SEQ ID NO: 218574
uaacucgcuggacuguugu

SEQ ID NO: 218576 - RNA, 19 nt, Artificial Sequence
  Description of Artificial Sequence: Synthetic oligonucleotide
  Sense strand starting at position 3641 of SEQ ID NO: 2814
cagcgaguuagguuugugu

SEQ ID NO: 218577 - RNA, 19 nt, Artificial Sequence
  Description of Artificial Sequence: Synthetic oligonucleotide
  Antisense strand to SEQ ID NO: 218576
acacaaaccuaacucgcug

SEQ ID NO: 218578 - RNA, 19 nt, Artificial Sequence
  Description of Artificial Sequence: Synthetic oligonucleotide
  Sense strand starting at position 3650 of SEQ ID NO: 2814
agguuuguguguacgguua

SEQ ID NO: 218579 - RNA, 19 nt, Artificial Sequence
  Description of Artificial Sequence: Synthetic oligonucleotide
  Antisense strand to SEQ ID NO: 218578
uaaccguacacacaaaccu

SEQ ID NO: 218580 - RNA, 19 nt, Artificial Sequence
  Description of Artificial Sequence: Synthetic oligonucleotide
  Sense strand starting at position 3940 of SEQ ID NO: 2814
uggagugucuuggucacaa

SEQ ID NO: 218581 - RNA, 19 nt, Artificial Sequence
  Description of Artificial Sequence: Synthetic oligonucleotide
  Antisense strand to SEQ ID NO: 218580
uugugaccaagacacucca

SEQ ID NO: 218582 - RNA, 19 nt, Artificial Sequence
  Description of Artificial Sequence: Synthetic oligonucleotide
  Sense strand starting at position 3942 of SEQ ID NO: 2814
gagugucuuggucacaaga

SEQ ID NO: 218583 - RNA, 19 nt, Artificial Sequence
  Description of Artificial Sequence: Synthetic oligonucleotide
  Antisense strand to SEQ ID NO: 218582
ucuugugaccaagacacuc

SEQ ID NO: 218584 - RNA, 19 nt, Artificial Sequence
  Description of Artificial Sequence: Synthetic oligonucleotide
  Sense strand starting at position 3981 of SEQ ID NO: 2814
gugucaccuccucagugau

SEQ ID NO: 218585 - RNA, 19 nt, Artificial Sequence
  Description of Artificial Sequence: Synthetic oligonucleotide
  Antisense strand to SEQ ID NO: 218584
aucacugaggaggugacac

SEQ ID NO: 218586 - RNA, 19 nt, Artificial Sequence
  Description of Artificial Sequence: Synthetic oligonucleotide
  Sense strand starting at position 94 of SEQ ID NO: 2815
auacaauuguagucaguga

SEQ ID NO: 218587 - RNA, 19 nt, Artificial Sequence
  Description of Artificial Sequence: Synthetic oligonucleotide
  Antisense strand to SEQ ID NO: 218586
ucacugacuacaauuguau

SEQ ID NO: 218588 - RNA, 19 nt, Artificial Sequence
  Description of Artificial Sequence: Synthetic oligonucleotide
  Sense strand starting at position 110 of SEQ ID NO: 2815
ugagucuguagugaggauu

SEQ ID NO: 218589 - RNA, 19 nt, Artificial Sequence
  Description of Artificial Sequence: Synthetic oligonucleotide
  Antisense strand to SEQ ID NO: 218588
aauccucacuacagacuca

SEQ ID NO: 218590 - RNA, 19 nt, Artificial Sequence
  Description of Artificial Sequence: Synthetic oligonucleotide
  Sense strand starting at position 699 of SEQ ID NO: 2815
auaauuuggugccaacaga

SEQ ID NO: 218591 - RNA, 19 nt, Artificial Sequence
  Description of Artificial Sequence: Synthetic oligonucleotide
  Antisense strand to SEQ ID NO: 218590
ucuguuggcaccaaauuau

SEQ ID NO: 218592 - RNA, 19 nt, Artificial Sequence
  Description of Artificial Sequence: Synthetic oligonucleotide
  Sense strand starting at position 766 of SEQ ID NO: 2815
ugaugaggaccauguucua

SEQ ID NO: 218593 - RNA, 19 nt, Artificial Sequence
  Description of Artificial Sequence: Synthetic oligonucleotide
  Antisense strand to SEQ ID NO: 218592
uagaacaugguccucauca

SEQ ID NO: 218594 - RNA, 19 nt, Artificial Sequence
  Description of Artificial Sequence: Synthetic oligonucleotide
  Sense strand starting at position 891 of SEQ ID NO: 2815
uaguaaguccuagaaugua

SEQ ID NO: 218595 - RNA, 19 nt, Artificial Sequence
  Description of Artificial Sequence: Synthetic oligonucleotide
  Antisense strand to SEQ ID NO: 218594
uacauucuaggacuuacua

SEQ ID NO: 218596 - RNA, 19 nt, Artificial Sequence
  Description of Artificial Sequence: Synthetic oligonucleotide
  Sense strand starting at position 896 of SEQ ID NO: 2815
aguccuagaauguagugaa

SEQ ID NO: 218597 - RNA, 19 nt, Artificial Sequence
  Description of Artificial Sequence: Synthetic oligonucleotide
  Antisense strand to SEQ ID NO: 218596
uucacuacauucuaggacu

SEQ ID NO: 218598 - RNA, 19 nt, Artificial Sequence
  Description of Artificial Sequence: Synthetic oligonucleotide
  Sense strand starting at position 948 of SEQ ID NO: 2815
cuauauuguuaucucauag

SEQ ID NO: 218599 - RNA, 19 nt, Artificial Sequence
  Description of Artificial Sequence: Synthetic oligonucleotide
  Antisense strand to SEQ ID NO: 218598
cuaugagauaacaauauag

SEQ ID NO: 218600 - RNA, 19 nt, Artificial Sequence
  Description of Artificial Sequence: Synthetic oligonucleotide
  Sense strand starting at position 958 of SEQ ID NO: 2815
aucucauagucuguuaacu

SEQ ID NO: 218601 - RNA, 19 nt, Artificial Sequence
  Description of Artificial Sequence: Synthetic oligonucleotide
  Antisense strand to SEQ ID NO: 218600
aguuaacagacuaugagau

SEQ ID NO: 218602 - RNA, 19 nt, Artificial Sequence
  Description of Artificial Sequence: Synthetic oligonucleotide
  Sense strand starting at position 1420 of SEQ ID NO: 2815
ugugauuucccaugcccua

SEQ ID NO: 218603 - RNA, 19 nt, Artificial Sequence
  Description of Artificial Sequence: Synthetic oligonucleotide
  Antisense strand to SEQ ID NO: 218602
uagggcaugggaaaucaca

SEQ ID NO: 218604 - RNA, 19 nt, Artificial Sequence
  Description of Artificial Sequence: Synthetic oligonucleotide
  Sense strand starting at position 1442 of SEQ ID NO: 2815
ugauguccuuaaguaagaa

SEQ ID NO: 218605 - RNA, 19 nt, Artificial Sequence
  Description of Artificial Sequence: Synthetic oligonucleotide
  Antisense strand to SEQ ID NO: 218604
uucuuacuuaaggacauca

SEQ ID NO: 218606 - RNA, 19 nt, Artificial Sequence
  Description of Artificial Sequence: Synthetic oligonucleotide
  Sense strand starting at position 1488 of SEQ ID NO: 2815
uuuauauauguuugagggu

SEQ ID NO: 218607 - RNA, 19 nt, Artificial Sequence
  Description of Artificial Sequence: Synthetic oligonucleotide
  Antisense strand to SEQ ID NO: 218606
acccucaaacauauauaaa

SEQ ID NO: 218608 - RNA, 19 nt, Artificial Sequence
  Description of Artificial Sequence: Synthetic oligonucleotide
  Sense strand starting at position 1531 of SEQ ID NO: 2815
acacucauccuguguugga

SEQ ID NO: 218609 - RNA, 19 nt, Artificial Sequence
  Description of Artificial Sequence: Synthetic oligonucleotide
  Antisense strand to SEQ ID NO: 218608
uccaacacaggaugagugu

SEQ ID NO: 218610 - RNA, 19 nt, Artificial Sequence
  Description of Artificial Sequence: Synthetic oligonucleotide
  Sense strand starting at position 1532 of SEQ ID NO: 2815
cacucauccuguguuggaa

SEQ ID NO: 218611 - RNA, 19 nt, Artificial Sequence
  Description of Artificial Sequence: Synthetic oligonucleotide
  Antisense strand to SEQ ID NO: 218610
uuccaacacaggaugagug

SEQ ID NO: 218612 - RNA, 19 nt, Artificial Sequence
  Description of Artificial Sequence: Synthetic oligonucleotide
  Sense strand starting at position 1535 of SEQ ID NO: 2815
ucauccuguguuggaacaa

SEQ ID NO: 218613 - RNA, 19 nt, Artificial Sequence
  Description of Artificial Sequence: Synthetic oligonucleotide
  Antisense strand to SEQ ID NO: 218612
uuguuccaacacaggauga

SEQ ID NO: 218614 - RNA, 19 nt, Artificial Sequence
  Description of Artificial Sequence: Synthetic oligonucleotide
  Sense strand starting at position 1573 of SEQ ID NO: 2815
aauugauggccauggauca

SEQ ID NO: 218615 - RNA, 19 nt, Artificial Sequence
  Description of Artificial Sequence: Synthetic oligonucleotide
  Antisense strand to SEQ ID NO: 218614
ugauccauggccaucaauu

SEQ ID NO: 218616 - RNA, 19 nt, Artificial Sequence
  Description of Artificial Sequence: Synthetic oligonucleotide
  Sense strand starting at position 1879 of SEQ ID NO: 2815
guagaaauaaggugacagu

SEQ ID NO: 218617 - RNA, 19 nt, Artificial Sequence
  Description of Artificial Sequence: Synthetic oligonucleotide
  Antisense strand to SEQ ID NO: 218616
acugucaccuuauuucuac

SEQ ID NO: 218618 - RNA, 19 nt, Artificial Sequence
  Description of Artificial Sequence: Synthetic oligonucleotide
  Sense strand starting at position 1991 of SEQ ID NO: 2815
gacagagggugauuagcau

SEQ ID NO: 218619 - RNA, 19 nt, Artificial Sequence
  Description of Artificial Sequence: Synthetic oligonucleotide
  Antisense strand to SEQ ID NO: 218618
augcuaaucacccucuguc

SEQ ID NO: 218620 - RNA, 19 nt, Artificial Sequence
  Description of Artificial Sequence: Synthetic oligonucleotide
  Sense strand starting at position 1999 of SEQ ID NO: 2815
gugauuagcaucuaguaug

SEQ ID NO: 218621 - RNA, 19 nt, Artificial Sequence
  Description of Artificial Sequence: Synthetic oligonucleotide
  Antisense strand to SEQ ID NO: 218620
cauacuagaugcuaaucac

SEQ ID NO: 218622 - RNA, 19 nt, Artificial Sequence
  Description of Artificial Sequence: Synthetic oligonucleotide
  Sense strand starting at position 2197 of SEQ ID NO: 2815
gcuccagugaaagguauua

SEQ ID NO: 218623 - RNA, 19 nt, Artificial Sequence
  Description of Artificial Sequence: Synthetic oligonucleotide
  Antisense strand to SEQ ID NO: 218622
uaauaccuuucacuggagc

SEQ ID NO: 218624 - RNA, 19 nt, Artificial Sequence
  Description of Artificial Sequence: Synthetic oligonucleotide
  Sense strand starting at position 2208 of SEQ ID NO: 2815
agguauuaaagucagcaga

SEQ ID NO: 218625 - RNA, 19 nt, Artificial Sequence
  Description of Artificial Sequence: Synthetic oligonucleotide
  Antisense strand to SEQ ID NO: 218624
ucugcugacuuuaauaccu

SEQ ID NO: 218626 - RNA, 19 nt, Artificial Sequence
  Description of Artificial Sequence: Synthetic oligonucleotide
  Sense strand starting at position 2225 of SEQ ID NO: 2815
gagccauuaugaccuugga

SEQ ID NO: 218627 - RNA, 19 nt, Artificial Sequence
  Description of Artificial Sequence: Synthetic oligonucleotide
  Antisense strand to SEQ ID NO: 218626
uccaaggucauaauggcuc

SEQ ID NO: 218628 - RNA, 19 nt, Artificial Sequence
  Description of Artificial Sequence: Synthetic oligonucleotide
  Sense strand starting at position 2266 of SEQ ID NO: 2815
cuaugcagcucacuagaaa

SEQ ID NO: 218629 - RNA, 19 nt, Artificial Sequence
  Description of Artificial Sequence: Synthetic oligonucleotide
  Antisense strand to SEQ ID NO: 218628
uuucuagugagcugcauag

SEQ ID NO: 218630 - RNA, 19 nt, Artificial Sequence
  Description of Artificial Sequence: Synthetic oligonucleotide
  Sense strand starting at position 2309 of SEQ ID NO: 2815
aauguuugccuauggaaac

SEQ ID NO: 218631 - RNA, 19 nt, Artificial Sequence
  Description of Artificial Sequence: Synthetic oligonucleotide
  Antisense strand to SEQ ID NO: 218630
guuuccauaggcaaacauu

SEQ ID NO: 218632 - RNA, 19 nt, Artificial Sequence
  Description of Artificial Sequence: Synthetic oligonucleotide
  Sense strand starting at position 2390 of SEQ ID NO: 2815
ggacuugaagugugaagag

SEQ ID NO: 218633 - RNA, 19 nt, Artificial Sequence
  Description of Artificial Sequence: Synthetic oligonucleotide
  Antisense strand to SEQ ID NO: 218632
cucuucacacuucaagucc

SEQ ID NO: 218634 - RNA, 19 nt, Artificial Sequence
  Description of Artificial Sequence: Synthetic oligonucleotide
  Sense strand starting at position 2535 of SEQ ID NO: 2815
agauuagaaguguguacua

SEQ ID NO: 218635 - RNA, 19 nt, Artificial Sequence
  Description of Artificial Sequence: Synthetic oligonucleotide
  Antisense strand to SEQ ID NO: 218634
uaguacacacuucuaaucu

SEQ ID NO: 218636 - RNA, 19 nt, Artificial Sequence
  Description of Artificial Sequence: Synthetic oligonucleotide
  Sense strand starting at position 2537 of SEQ ID NO: 2815
auuagaaguguguacuaua

SEQ ID NO: 218637 - RNA, 19 nt, Artificial Sequence
  Description of Artificial Sequence: Synthetic oligonucleotide
  Antisense strand to SEQ ID NO: 218636
uauaguacacacuucuaau

SEQ ID NO: 218638 - RNA, 19 nt, Artificial Sequence
  Description of Artificial Sequence: Synthetic oligonucleotide
  Sense strand starting at position 2747 of SEQ ID NO: 2815
aauguaugacuuugaggug

SEQ ID NO: 218639 - RNA, 19 nt, Artificial Sequence
  Description of Artificial Sequence: Synthetic oligonucleotide
  Antisense strand to SEQ ID NO: 218638
caccucaaagucauacauu

SEQ ID NO: 218640 - RNA, 19 nt, Artificial Sequence
  Description of Artificial Sequence: Synthetic oligonucleotide
  Sense strand starting at position 2957 of SEQ ID NO: 2815
ugaugauuugccuguguuu

SEQ ID NO: 218641 - RNA, 19 nt, Artificial Sequence
  Description of Artificial Sequence: Synthetic oligonucleotide
  Antisense strand to SEQ ID NO: 218640
aaacacaggcaaaucauca

SEQ ID NO: 218642 - RNA, 19 nt, Artificial Sequence
  Description of Artificial Sequence: Synthetic oligonucleotide
  Sense strand starting at position 3038 of SEQ ID NO: 2815
gcugccaacuuauugauuu

SEQ ID NO: 218643 - RNA, 19 nt, Artificial Sequence
  Description of Artificial Sequence: Synthetic oligonucleotide
  Antisense strand to SEQ ID NO: 218642
aaaucaauaaguuggcagc

SEQ ID NO: 218644 - RNA, 19 nt, Artificial Sequence
  Description of Artificial Sequence: Synthetic oligonucleotide
  Sense strand starting at position 3046 of SEQ ID NO: 2815
cuuauugauuuagaaguac

SEQ ID NO: 218645 - RNA, 19 nt, Artificial Sequence
  Description of Artificial Sequence: Synthetic oligonucleotide
  Antisense strand to SEQ ID NO: 218644
guacuucuaaaucaauaag

SEQ ID NO: 218646 - RNA, 19 nt, Artificial Sequence
  Description of Artificial Sequence: Synthetic oligonucleotide
  Sense strand starting at position 3057 of SEQ ID NO: 2815
agaaguacuccucagaugu

SEQ ID NO: 218647 - RNA, 19 nt, Artificial Sequence
  Description of Artificial Sequence: Synthetic oligonucleotide
  Antisense strand to SEQ ID NO: 218646
acaucugaggaguacuucu

SEQ ID NO: 218648 - RNA, 19 nt, Artificial Sequence
  Description of Artificial Sequence: Synthetic oligonucleotide
  Sense strand starting at position 3113 of SEQ ID NO: 2815
uuugucauuccacauguau

SEQ ID NO: 218649 - RNA, 19 nt, Artificial Sequence
  Description of Artificial Sequence: Synthetic oligonucleotide
  Antisense strand to SEQ ID NO: 218648
auacauguggaaugacaaa

SEQ ID NO: 218650 - RNA, 19 nt, Artificial Sequence
  Description of Artificial Sequence: Synthetic oligonucleotide
  Sense strand starting at position 3348 of SEQ ID NO: 2815
ggugaaguccuaugaagcu

SEQ ID NO: 218651 - RNA, 19 nt, Artificial Sequence
  Description of Artificial Sequence: Synthetic oligonucleotide
  Antisense strand to SEQ ID NO: 218650
agcuucauaggacuucacc

SEQ ID NO: 218652 - RNA, 19 nt, Artificial Sequence
  Description of Artificial Sequence: Synthetic oligonucleotide
  Sense strand starting at position 3464 of SEQ ID NO: 2815
aaucaaacccaguguggaa

SEQ ID NO: 218653 - RNA, 19 nt, Artificial Sequence
  Description of Artificial Sequence: Synthetic oligonucleotide
  Antisense strand to SEQ ID NO: 218652
uuccacacuggguuugauu

SEQ ID NO: 218654 - RNA, 19 nt, Artificial Sequence
  Description of Artificial Sequence: Synthetic oligonucleotide
  Sense strand starting at position 3561 of SEQ ID NO: 2815
uuuguacaugcugaugaaa

SEQ ID NO: 218655 - RNA, 19 nt, Artificial Sequence
  Description of Artificial Sequence: Synthetic oligonucleotide
  Antisense strand to SEQ ID NO: 218654
uuucaucagcauguacaaa

SEQ ID NO: 218656 - RNA, 19 nt, Artificial Sequence
  Description of Artificial Sequence: Synthetic oligonucleotide
  Sense strand starting at position 3579 of SEQ ID NO: 2815
aacuguucuguagacagau

SEQ ID NO: 218657 - RNA, 19 nt, Artificial Sequence
  Description of Artificial Sequence: Synthetic oligonucleotide
  Antisense strand to SEQ ID NO: 218656
aucugucuacagaacaguu

SEQ ID NO: 218658 - RNA, 19 nt, Artificial Sequence
  Description of Artificial Sequence: Synthetic oligonucleotide
  Sense strand starting at position 3618 of SEQ ID NO: 2815
aauguauuauguguacuga

SEQ ID NO: 218659 - RNA, 19 nt, Artificial Sequence
  Description of Artificial Sequence: Synthetic oligonucleotide
  Antisense strand to SEQ ID NO: 218658
ucaguacacauaauacauu

SEQ ID NO: 218660 - RNA, 19 nt, Artificial Sequence
  Description of Artificial Sequence: Synthetic oligonucleotide
  Sense strand starting at position 3644 of SEQ ID NO: 2815
gugaucaaguuguuauuac

SEQ ID NO: 218661 - RNA, 19 nt, Artificial Sequence
  Description of Artificial Sequence: Synthetic oligonucleotide
  Antisense strand to SEQ ID NO: 218660
guaauaacaacuugaucac

SEQ ID NO: 218662 - RNA, 19 nt, Artificial Sequence
  Description of Artificial Sequence: Synthetic oligonucleotide
  Sense strand starting at position 3736 of SEQ ID NO: 2815
ccuaguagucauuauaguc

SEQ ID NO: 218663 - RNA, 19 nt, Artificial Sequence
  Description of Artificial Sequence: Synthetic oligonucleotide
  Antisense strand to SEQ ID NO: 218662
gacuauaaugacuacuagg

SEQ ID NO: 218664 - RNA, 19 nt, Artificial Sequence
  Description of Artificial Sequence: Synthetic oligonucleotide
  Sense strand starting at position 3981 of SEQ ID NO: 2815
uucugaauucuccagcagu

SEQ ID NO: 218665 - RNA, 19 nt, Artificial Sequence
  Description of Artificial Sequence: Synthetic oligonucleotide
  Antisense strand to SEQ ID NO: 218664
acugcuggagaauucagaa

SEQ ID NO: 218666 - RNA, 19 nt, Artificial Sequence
  Description of Artificial Sequence: Synthetic oligonucleotide
  Sense strand starting at position 876 of SEQ ID NO: 2816
cuaagaauucugcagucac

SEQ ID NO: 218667 - RNA, 19 nt, Artificial Sequence
  Description of Artificial Sequence: Synthetic oligonucleotide
  Antisense strand to SEQ ID NO: 218666
gugacugcagaauucuuag

SEQ ID NO: 218668 - RNA, 19 nt, Artificial Sequence
  Description of Artificial Sequence: Synthetic oligonucleotide
  Sense strand starting at position 886 of SEQ ID NO: 2816
ugcagucacugcccagaaa

SEQ ID NO: 218669 - RNA, 19 nt, Artificial Sequence
  Description of Artificial Sequence: Synthetic oligonucleotide
  Antisense strand to SEQ ID NO: 218668
uuucugggcagugacugca

SEQ ID NO: 218670 - RNA, 19 nt, Artificial Sequence
  Description of Artificial Sequence: Synthetic oligonucleotide
  Sense strand starting at position 955 of SEQ ID NO: 2816
accucuaagugagcuaaua

SEQ ID NO: 218671 - RNA, 19 nt, Artificial Sequence
  Description of Artificial Sequence: Synthetic oligonucleotide
  Antisense strand to SEQ ID NO: 218670
uauuagcucacuuagaggu

SEQ ID NO: 218672 - RNA, 19 nt, Artificial Sequence
  Description of Artificial Sequence: Synthetic oligonucleotide
  Sense strand starting at position 1357 of SEQ ID NO: 2816
gcaaccucgucucuacuau

SEQ ID NO: 218673 - RNA, 19 nt, Artificial Sequence
  Description of Artificial Sequence: Synthetic oligonucleotide
  Antisense strand to SEQ ID NO: 218672
auaguagagacgagguugc

SEQ ID NO: 218674 - RNA, 19 nt, Artificial Sequence
  Description of Artificial Sequence: Synthetic oligonucleotide
  Sense strand starting at position 1363 of SEQ ID NO: 2816
ucgucucuacuaugaauac

SEQ ID NO: 218675 - RNA, 19 nt, Artificial Sequence
  Description of Artificial Sequence: Synthetic oligonucleotide
  Antisense strand to SEQ ID NO: 218674
guauucauaguagagacga

SEQ ID NO: 218676 - RNA, 19 nt, Artificial Sequence
  Description of Artificial Sequence: Synthetic oligonucleotide
  Sense strand starting at position 1731 of SEQ ID NO: 2816
gcucauagaucauccagca

SEQ ID NO: 218677 - RNA, 19 nt, Artificial Sequence
  Description of Artificial Sequence: Synthetic oligonucleotide
  Antisense strand to SEQ ID NO: 218676
ugcuggaugaucuaugagc

SEQ ID NO: 218678 - RNA, 19 nt, Artificial Sequence
  Description of Artificial Sequence: Synthetic oligonucleotide
  Sense strand starting at position 1781 of SEQ ID NO: 2816
cugaaauaggguuguaggu

SEQ ID NO: 218679 - RNA, 19 nt, Artificial Sequence
  Description of Artificial Sequence: Synthetic oligonucleotide
  Antisense strand to SEQ ID NO: 218678
accuacaacccuauuucag

SEQ ID NO: 218680 - RNA, 19 nt, Artificial Sequence
  Description of Artificial Sequence: Synthetic oligonucleotide
  Sense strand starting at position 1851 of SEQ ID NO: 2816
cguagaaggugaucugaaa

SEQ ID NO: 218681 - RNA, 19 nt, Artificial Sequence
  Description of Artificial Sequence: Synthetic oligonucleotide
  Antisense strand to SEQ ID NO: 218680
uuucagaucaccuucuacg

SEQ ID NO: 218682 - RNA, 19 nt, Artificial Sequence
  Description of Artificial Sequence: Synthetic oligonucleotide
  Sense strand starting at position 1880 of SEQ ID NO: 2816
gugggagcauggagugauu

SEQ ID NO: 218683 - RNA, 19 nt, Artificial Sequence
  Description of Artificial Sequence: Synthetic oligonucleotide
  Antisense strand to SEQ ID NO: 218682
aaucacuccaugcucccac

SEQ ID NO: 218684 - RNA, 19 nt, Artificial Sequence
  Description of Artificial Sequence: Synthetic oligonucleotide
  Sense strand starting at position 2171 of SEQ ID NO: 2816
agguucggguuguucuaau

SEQ ID NO: 218685 - RNA, 19 nt, Artificial Sequence
  Description of Artificial Sequence: Synthetic oligonucleotide
  Antisense strand to SEQ ID NO: 218684
auuagaacaacccgaaccu

SEQ ID NO: 218686 - RNA, 19 nt, Artificial Sequence
  Description of Artificial Sequence: Synthetic oligonucleotide
  Sense strand starting at position 2251 of SEQ ID NO: 2816
gggcgaaauucugucucug

SEQ ID NO: 218687 - RNA, 19 nt, Artificial Sequence
  Description of Artificial Sequence: Synthetic oligonucleotide
  Antisense strand to SEQ ID NO: 218686
cagagacagaauuucgccc

SEQ ID NO: 218688 - RNA, 19 nt, Artificial Sequence
  Description of Artificial Sequence: Synthetic oligonucleotide
  Sense strand starting at position 2284 of SEQ ID NO: 2816
aguuuacucugcuuaauug

SEQ ID NO: 218689 - RNA, 19 nt, Artificial Sequence
  Description of Artificial Sequence: Synthetic oligonucleotide
  Antisense strand to SEQ ID NO: 218688
caauuaagcagaguaaacu

SEQ ID NO: 218690 - RNA, 19 nt, Artificial Sequence
  Description of Artificial Sequence: Synthetic oligonucleotide
  Sense strand starting at position 2285 of SEQ ID NO: 2816
guuuacucugcuuaauuga

SEQ ID NO: 218691 - RNA, 19 nt, Artificial Sequence
  Description of Artificial Sequence: Synthetic oligonucleotide
  Antisense strand to SEQ ID NO: 218690
ucaauuaagcagaguaaac

SEQ ID NO: 218692 - RNA, 19 nt, Artificial Sequence
  Description of Artificial Sequence: Synthetic oligonucleotide
  Sense strand starting at position 2329 of SEQ ID NO: 2816
aaugaauucugcucaggga

SEQ ID NO: 218693 - RNA, 19 nt, Artificial Sequence
  Description of Artificial Sequence: Synthetic oligonucleotide
  Antisense strand to SEQ ID NO: 218692
ucccugagcagaauucauu

SEQ ID NO: 218694 - RNA, 19 nt, Artificial Sequence
  Description of Artificial Sequence: Synthetic oligonucleotide
  Sense strand starting at position 2438 of SEQ ID NO: 2816
agugaaguaaucugugaaa

SEQ ID NO: 218695 - RNA, 19 nt, Artificial Sequence
  Description of Artificial Sequence: Synthetic oligonucleotide
  Antisense strand to SEQ ID NO: 218694
uuucacagauuacuucacu

SEQ ID NO: 218696 - RNA, 19 nt, Artificial Sequence
  Description of Artificial Sequence: Synthetic oligonucleotide
  Sense strand starting at position 2440 of SEQ ID NO: 2816
ugaaguaaucugugaaagu

SEQ ID NO: 218697 - RNA, 19 nt, Artificial Sequence
  Description of Artificial Sequence: Synthetic oligonucleotide
  Antisense strand to SEQ ID NO: 218696
acuuucacagauuacuuca

SEQ ID NO: 218698 - RNA, 19 nt, Artificial Sequence
  Description of Artificial Sequence: Synthetic oligonucleotide
  Sense strand starting at position 2806 of SEQ ID NO: 2816
uucugugaucaucauuguu

SEQ ID NO: 218699 - RNA, 19 nt, Artificial Sequence
  Description of Artificial Sequence: Synthetic oligonucleotide
  Antisense strand to SEQ ID NO: 218698
aacaaugaugaucacagaa

SEQ ID NO: 218700 - RNA, 19 nt, Artificial Sequence
  Description of Artificial Sequence: Synthetic oligonucleotide
  Sense strand starting at position 2852 of SEQ ID NO: 2816
acugauacuugccuggaau

SEQ ID NO: 218701 - RNA, 19 nt, Artificial Sequence
  Description of Artificial Sequence: Synthetic oligonucleotide
  Antisense strand to SEQ ID NO: 218700
auuccaggcaaguaucagu

SEQ ID NO: 218702 - RNA, 19 nt, Artificial Sequence
  Description of Artificial Sequence: Synthetic oligonucleotide
  Sense strand starting at position 2853 of SEQ ID NO: 2816
cugauacuugccuggaauu

SEQ ID NO: 218703 - RNA, 19 nt, Artificial Sequence
  Description of Artificial Sequence: Synthetic oligonucleotide
  Antisense strand to SEQ ID NO: 218702
aauuccaggcaaguaucag

SEQ ID NO: 218704 - RNA, 19 nt, Artificial Sequence
  Description of Artificial Sequence: Synthetic oligonucleotide
  Sense strand starting at position 2946 of SEQ ID NO: 2816
auugcagguccucaauaau

SEQ ID NO: 218705 - RNA, 19 nt, Artificial Sequence
  Description of Artificial Sequence: Synthetic oligonucleotide
  Antisense strand to SEQ ID NO: 218704
auuauugaggaccugcaau

SEQ ID NO: 218706 - RNA, 19 nt, Artificial Sequence
  Description of Artificial Sequence: Synthetic oligonucleotide
  Sense strand starting at position 2964 of SEQ ID NO: 2816
uuggcucugaccugagcaa

SEQ ID NO: 218707 - RNA, 19 nt, Artificial Sequence
  Description of Artificial Sequence: Synthetic oligonucleotide
  Antisense strand to SEQ ID NO: 218706
uugcucaggucagagccaa

SEQ ID NO: 218708 - RNA, 19 nt, Artificial Sequence
  Description of Artificial Sequence: Synthetic oligonucleotide
  Sense strand starting at position 3117 of SEQ ID NO: 2816
gcugauuggucuucucaag

SEQ ID NO: 218709 - RNA, 19 nt, Artificial Sequence
  Description of Artificial Sequence: Synthetic oligonucleotide
  Antisense strand to SEQ ID NO: 218708
cuugagaagaccaaucagc

SEQ ID NO: 218710 - RNA, 19 nt, Artificial Sequence
  Description of Artificial Sequence: Synthetic oligonucleotide
  Sense strand starting at position 3156 of SEQ ID NO: 2816
agaguuggucccuauugcu

SEQ ID NO: 218711 - RNA, 19 nt, Artificial Sequence
  Description of Artificial Sequence: Synthetic oligonucleotide
  Antisense strand to SEQ ID NO: 218710
agcaauagggaccaacucu

SEQ ID NO: 218712 - RNA, 19 nt, Artificial Sequence
  Description of Artificial Sequence: Synthetic oligonucleotide
  Sense strand starting at position 3163 of SEQ ID NO: 2816
gucccuauugcuggcagau

SEQ ID NO: 218713 - RNA, 19 nt, Artificial Sequence
  Description of Artificial Sequence: Synthetic oligonucleotide
  Antisense strand to SEQ ID NO: 218712
aucugccagcaauagggac

SEQ ID NO: 218714 - RNA, 19 nt, Artificial Sequence
  Description of Artificial Sequence: Synthetic oligonucleotide
  Sense strand starting at position 3184 of SEQ ID NO: 2816
gacauucuacaguggaaau

SEQ ID NO: 218715 - RNA, 19 nt, Artificial Sequence
  Description of Artificial Sequence: Synthetic oligonucleotide
  Antisense strand to SEQ ID NO: 218714
auuuccacuguagaauguc

SEQ ID NO: 218716 - RNA, 19 nt, Artificial Sequence
  Description of Artificial Sequence: Synthetic oligonucleotide
  Sense strand starting at position 3194 of SEQ ID NO: 2816
aguggaaauagcuggauua

SEQ ID NO: 218717 - RNA, 19 nt, Artificial Sequence
  Description of Artificial Sequence: Synthetic oligonucleotide
  Antisense strand to SEQ ID NO: 218716
uaauccagcuauuuccacu

SEQ ID NO: 218718 - RNA, 19 nt, Artificial Sequence
  Description of Artificial Sequence: Synthetic oligonucleotide
  Sense strand starting at position 3195 of SEQ ID NO: 2816
guggaaauagcuggauuag

SEQ ID NO: 218719 - RNA, 19 nt, Artificial Sequence
  Description of Artificial Sequence: Synthetic oligonucleotide
  Antisense strand to SEQ ID NO: 218718
cuaauccagcuauuuccac

SEQ ID NO: 218720 - RNA, 19 nt, Artificial Sequence
  Description of Artificial Sequence: Synthetic oligonucleotide
  Sense strand starting at position 3226 of SEQ ID NO: 2816
gaaguuaaugcauagccuu

SEQ ID NO: 218721 - RNA, 19 nt, Artificial Sequence
  Description of Artificial Sequence: Synthetic oligonucleotide
  Antisense strand to SEQ ID NO: 218720
aaggcuaugcauuaacuuc

SEQ ID NO: 218722 - RNA, 19 nt, Artificial Sequence
  Description of Artificial Sequence: Synthetic oligonucleotide
  Sense strand starting at position 3360 of SEQ ID NO: 2816
gugccucuucaauggugga

SEQ ID NO: 218723 - RNA, 19 nt, Artificial Sequence
  Description of Artificial Sequence: Synthetic oligonucleotide
  Antisense strand to SEQ ID NO: 218722
uccaccauugaagaggcac

SEQ ID NO: 218724 - RNA, 19 nt, Artificial Sequence
  Description of Artificial Sequence: Synthetic oligonucleotide
  Sense strand starting at position 3577 of SEQ ID NO: 2816
uucuuucugcaccgaguga

SEQ ID NO: 218725 - RNA, 19 nt, Artificial Sequence
  Description of Artificial Sequence: Synthetic oligonucleotide
  Antisense strand to SEQ ID NO: 218724
ucacucggugcagaaagaa

SEQ ID NO: 218726 - RNA, 19 nt, Artificial Sequence
  Description of Artificial Sequence: Synthetic oligonucleotide
  Sense strand starting at position 3603 of SEQ ID NO: 2816
ggugcacuaccucaagguu

SEQ ID NO: 218727 - RNA, 19 nt, Artificial Sequence
  Description of Artificial Sequence: Synthetic oligonucleotide
  Antisense strand to SEQ ID NO: 218726
aaccuugagguagugcacc

SEQ ID NO: 218728 - RNA, 19 nt, Artificial Sequence
  Description of Artificial Sequence: Synthetic oligonucleotide
  Sense strand starting at position 3659 of SEQ ID NO: 2816
gugacuccugagugagcua

SEQ ID NO: 218729 - RNA, 19 nt, Artificial Sequence
  Description of Artificial Sequence: Synthetic oligonucleotide
  Antisense strand to SEQ ID NO: 218728
uagcucacucaggagucac

SEQ ID NO: 218730 - RNA, 19 nt, Artificial Sequence
  Description of Artificial Sequence: Synthetic oligonucleotide
  Sense strand starting at position 3664 of SEQ ID NO: 2816
uccugagugagcuauucug

SEQ ID NO: 218731 - RNA, 19 nt, Artificial Sequence
  Description of Artificial Sequence: Synthetic oligonucleotide
  Antisense strand to SEQ ID NO: 218730
cagaauagcucacucagga

SEQ ID NO: 218732 - RNA, 19 nt, Artificial Sequence
  Description of Artificial Sequence: Synthetic oligonucleotide
  Sense strand starting at position 3719 of SEQ ID NO: 2816
augccaauuuauuagugua

SEQ ID NO: 218733 - RNA, 19 nt, Artificial Sequence
  Description of Artificial Sequence: Synthetic oligonucleotide
  Antisense strand to SEQ ID NO: 218732
uacacuaauaaauuggcau

SEQ ID NO: 218734 - RNA, 19 nt, Artificial Sequence
  Description of Artificial Sequence: Synthetic oligonucleotide
  Sense strand starting at position 3721 of SEQ ID NO: 2816
gccaauuuauuaguguauc

SEQ ID NO: 218735 - RNA, 19 nt, Artificial Sequence
  Description of Artificial Sequence: Synthetic oligonucleotide
  Antisense strand to SEQ ID NO: 218734
gauacacuaauaaauuggc

SEQ ID NO: 218736 - RNA, 19 nt, Artificial Sequence
  Description of Artificial Sequence: Synthetic oligonucleotide
  Sense strand starting at position 3757 of SEQ ID NO: 2816
acucuaucagcuggucaga

SEQ ID NO: 218737 - RNA, 19 nt, Artificial Sequence
  Description of Artificial Sequence: Synthetic oligonucleotide
  Antisense strand to SEQ ID NO: 218736
ucugaccagcugauagagu

SEQ ID NO: 218738 - RNA, 19 nt, Artificial Sequence
  Description of Artificial Sequence: Synthetic oligonucleotide
  Sense strand starting at position 3794 of SEQ ID NO: 2816
uuguaagugugagcugaga

SEQ ID NO: 218739 - RNA, 19 nt, Artificial Sequence
  Description of Artificial Sequence: Synthetic oligonucleotide
  Antisense strand to SEQ ID NO: 218738
ucucagcucacacuuacaa

SEQ ID NO: 218740 - RNA, 19 nt, Artificial Sequence
  Description of Artificial Sequence: Synthetic oligonucleotide
  Sense strand starting at position 3815 of SEQ ID NO: 2816
gagcuauugcaauaauggu

SEQ ID NO: 218741 - RNA, 19 nt, Artificial Sequence
  Description of Artificial Sequence: Synthetic oligonucleotide
  Antisense strand to SEQ ID NO: 218740
accauuauugcaauagcuc

SEQ ID NO: 218742 - RNA, 19 nt, Artificial Sequence
  Description of Artificial Sequence: Synthetic oligonucleotide
  Sense strand starting at position 3863 of SEQ ID NO: 2816
gggcuagaguugucaggaa

SEQ ID NO: 218743 - RNA, 19 nt, Artificial Sequence
  Description of Artificial Sequence: Synthetic oligonucleotide
  Antisense strand to SEQ ID NO: 218742
uuccugacaacucuagccc

SEQ ID NO: 218744 - RNA, 19 nt, Artificial Sequence
  Description of Artificial Sequence: Synthetic oligonucleotide
  Sense strand starting at position 3971 of SEQ ID NO: 2816
ggcagcuuccuccagcaga

SEQ ID NO: 218745 - RNA, 19 nt, Artificial Sequence
  Description of Artificial Sequence: Synthetic oligonucleotide
  Antisense strand to SEQ ID NO: 218744
ucugcuggaggaagcugcc

SEQ ID NO: 218746 - RNA, 19 nt, Artificial Sequence
  Description of Artificial Sequence: Synthetic oligonucleotide
  Sense strand starting at position 309 of SEQ ID NO: 2817
gccagcaaugcagacuaaa

SEQ ID NO: 218747 - RNA, 19 nt, Artificial Sequence
  Description of Artificial Sequence: Synthetic oligonucleotide
  Antisense strand to SEQ ID NO: 218746
uuuagucugcauugcuggc

SEQ ID NO: 218748 - RNA, 19 nt, Artificial Sequence
  Description of Artificial Sequence: Synthetic oligonucleotide
  Sense strand starting at position 603 of SEQ ID NO: 2817
uguggucuucccucucgua

SEQ ID NO: 218749 - RNA, 19 nt, Artificial Sequence
  Description of Artificial Sequence: Synthetic oligonucleotide
  Antisense strand to SEQ ID NO: 218748
uacgagagggaagaccaca

SEQ ID NO: 218750 - RNA, 19 nt, Artificial Sequence
  Description of Artificial Sequence: Synthetic oligonucleotide
  Sense strand starting at position 741 of SEQ ID NO: 2817
auggaauugucauuguaaa

SEQ ID NO: 218751 - RNA, 19 nt, Artificial Sequence
  Description of Artificial Sequence: Synthetic oligonucleotide
  Antisense strand to SEQ ID NO: 218750
uuuacaaugacaauuccau

SEQ ID NO: 218752 - RNA, 19 nt, Artificial Sequence
  Description of Artificial Sequence: Synthetic oligonucleotide
  Sense strand starting at position 801 of SEQ ID NO: 2817
auggaucugucuuccacua

SEQ ID NO: 218753 - RNA, 19 nt, Artificial Sequence
  Description of Artificial Sequence: Synthetic oligonucleotide
  Antisense strand to SEQ ID NO: 218752
uaguggaagacagauccau

SEQ ID NO: 218754 - RNA, 19 nt, Artificial Sequence
  Description of Artificial Sequence: Synthetic oligonucleotide
  Sense strand starting at position 1022 of SEQ ID NO: 2817
aggguauuaucucccaaau

SEQ ID NO: 218755 - RNA, 19 nt, Artificial Sequence
  Description of Artificial Sequence: Synthetic oligonucleotide
  Antisense strand to SEQ ID NO: 218754
auuugggagauaauacccu

SEQ ID NO: 218756 - RNA, 19 nt, Artificial Sequence
  Description of Artificial Sequence: Synthetic oligonucleotide
  Sense strand starting at position 1219 of SEQ ID NO: 2817
uuacuaguccaugguggaa

SEQ ID NO: 218757 - RNA, 19 nt, Artificial Sequence
  Description of Artificial Sequence: Synthetic oligonucleotide
  Antisense strand to SEQ ID NO: 218756
uuccaccauggacuaguaa

SEQ ID NO: 218758 - RNA, 19 nt, Artificial Sequence
  Description of Artificial Sequence: Synthetic oligonucleotide
  Sense strand starting at position 1231 of SEQ ID NO: 2817
gguggaaucuaucuaauuc

SEQ ID NO: 218759 - RNA, 19 nt, Artificial Sequence
  Description of Artificial Sequence: Synthetic oligonucleotide
  Antisense strand to SEQ ID NO: 218758
gaauuagauagauuccacc

SEQ ID NO: 218760 - RNA, 19 nt, Artificial Sequence
  Description of Artificial Sequence: Synthetic oligonucleotide
  Sense strand starting at position 1385 of SEQ ID NO: 2817
auugacuuauugguagcaa

SEQ ID NO: 218761 - RNA, 19 nt, Artificial Sequence
  Description of Artificial Sequence: Synthetic oligonucleotide
  Antisense strand to SEQ ID NO: 218760
uugcuaccaauaagucaau

SEQ ID NO: 218762 - RNA, 19 nt, Artificial Sequence
  Description of Artificial Sequence: Synthetic oligonucleotide
  Sense strand starting at position 1495 of SEQ ID NO: 2817
gucucugauguccaucuaa

SEQ ID NO: 218763 - RNA, 19 nt, Artificial Sequence
  Description of Artificial Sequence: Synthetic oligonucleotide
  Antisense strand to SEQ ID NO: 218762
uuagauggacaucagagac

SEQ ID NO: 218764 - RNA, 19 nt, Artificial Sequence
  Description of Artificial Sequence: Synthetic oligonucleotide
  Sense strand starting at position 1829 of SEQ ID NO: 2817
aggcccuguccucauagaa

SEQ ID NO: 218765 - RNA, 19 nt, Artificial Sequence
  Description of Artificial Sequence: Synthetic oligonucleotide
  Antisense strand to SEQ ID NO: 218764
uucuaugaggacagggccu

SEQ ID NO: 218766 - RNA, 19 nt, Artificial Sequence
  Description of Artificial Sequence: Synthetic oligonucleotide
  Sense strand starting at position 1849 of SEQ ID NO: 2817
gugaucugcaaaggaagaa

SEQ ID NO: 218767 - RNA, 19 nt, Artificial Sequence
  Description of Artificial Sequence: Synthetic oligonucleotide
  Antisense strand to SEQ ID NO: 218766
uucuuccuuugcagaucac

SEQ ID NO: 218768 - RNA, 19 nt, Artificial Sequence
  Description of Artificial Sequence: Synthetic oligonucleotide
  Sense strand starting at position 1859 of SEQ ID NO: 2817
aaggaagaaucguuccgaa

SEQ ID NO: 218769 - RNA, 19 nt, Artificial Sequence
  Description of Artificial Sequence: Synthetic oligonucleotide
  Antisense strand to SEQ ID NO: 218768
uucggaacgauucuuccuu

SEQ ID NO: 218770 - RNA, 19 nt, Artificial Sequence
  Description of Artificial Sequence: Synthetic oligonucleotide
  Sense strand starting at position 2281 of SEQ ID NO: 2817
auugaauuauucccuguga

SEQ ID NO: 218771 - RNA, 19 nt, Artificial Sequence
  Description of Artificial Sequence: Synthetic oligonucleotide
  Antisense strand to SEQ ID NO: 218770
ucacagggaauaauucaau

SEQ ID NO: 218772 - RNA, 19 nt, Artificial Sequence
  Description of Artificial Sequence: Synthetic oligonucleotide
  Sense strand starting at position 2282 of SEQ ID NO: 2817
uugaauuauucccugugaa

SEQ ID NO: 218773 - RNA, 19 nt, Artificial Sequence
  Description of Artificial Sequence: Synthetic oligonucleotide
  Antisense strand to SEQ ID NO: 218772
uucacagggaauaauucaa

SEQ ID NO: 218774 - RNA, 19 nt, Artificial Sequence
  Description of Artificial Sequence: Synthetic oligonucleotide
  Sense strand starting at position 2283 of SEQ ID NO: 2817
ugaauuauucccugugaau

SEQ ID NO: 218775 - RNA, 19 nt, Artificial Sequence
  Description of Artificial Sequence: Synthetic oligonucleotide
  Antisense strand to SEQ ID NO: 218774
auucacagggaauaauuca

SEQ ID NO: 218776 - RNA, 19 nt, Artificial Sequence
  Description of Artificial Sequence: Synthetic oligonucleotide
  Sense strand starting at position 2307 of SEQ ID NO: 2817
gggaaagaucuaugccauu

SEQ ID NO: 218777 - RNA, 19 nt, Artificial Sequence
  Description of Artificial Sequence: Synthetic oligonucleotide
  Antisense strand to SEQ ID NO: 218776
aauggcauagaucuuuccc

SEQ ID NO: 218778 - RNA, 19 nt, Artificial Sequence
  Description of Artificial Sequence: Synthetic oligonucleotide
  Sense strand starting at position 2545 of SEQ ID NO: 2817
gucgucuaacuagagauca

SEQ ID NO: 218779 - RNA, 19 nt, Artificial Sequence
  Description of Artificial Sequence: Synthetic oligonucleotide
  Antisense strand to SEQ ID NO: 218778
ugaucucuaguuagacgac

SEQ ID NO: 218780 - RNA, 19 nt, Artificial Sequence
  Description of Artificial Sequence: Synthetic oligonucleotide
  Sense strand starting at position 2547 of SEQ ID NO: 2817
cgucuaacuagagaucagu

SEQ ID NO: 218781 - RNA, 19 nt, Artificial Sequence
  Description of Artificial Sequence: Synthetic oligonucleotide
  Antisense strand to SEQ ID NO: 218780
acugaucucuaguuagacg

SEQ ID NO: 218782 - RNA, 19 nt, Artificial Sequence
  Description of Artificial Sequence: Synthetic oligonucleotide
  Sense strand starting at position 2564 of SEQ ID NO: 2817
gucccugguagugaacuua

SEQ ID NO: 218783 - RNA, 19 nt, Artificial Sequence
  Description of Artificial Sequence: Synthetic oligonucleotide
  Antisense strand to SEQ ID NO: 218782
uaaguucacuaccagggac

SEQ ID NO: 218784 - RNA, 19 nt, Artificial Sequence
  Description of Artificial Sequence: Synthetic oligonucleotide
  Sense strand starting at position 2595 of SEQ ID NO: 2817
agggaaagguuucuauggu

SEQ ID NO: 218785 - RNA, 19 nt, Artificial Sequence
  Description of Artificial Sequence: Synthetic oligonucleotide
  Antisense strand to SEQ ID NO: 218784
accauagaaaccuuucccu

SEQ ID NO: 218786 - RNA, 19 nt, Artificial Sequence
  Description of Artificial Sequence: Synthetic oligonucleotide
  Sense strand starting at position 2629 of SEQ ID NO: 2817
ugagaaguaccguauacua

SEQ ID NO: 218787 - RNA, 19 nt, Artificial Sequence
  Description of Artificial Sequence: Synthetic oligonucleotide
  Antisense strand to SEQ ID NO: 218786
uaguauacgguacuucuca

SEQ ID NO: 218788 - RNA, 19 nt, Artificial Sequence
  Description of Artificial Sequence: Synthetic oligonucleotide
  Sense strand starting at position 2631 of SEQ ID NO: 2817
agaaguaccguauacuacu

SEQ ID NO: 218789 - RNA, 19 nt, Artificial Sequence
  Description of Artificial Sequence: Synthetic oligonucleotide
  Antisense strand to SEQ ID NO: 218788
aguaguauacgguacuucu

SEQ ID NO: 218790 - RNA, 19 nt, Artificial Sequence
  Description of Artificial Sequence: Synthetic oligonucleotide
  Sense strand starting at position 2639 of SEQ ID NO: 2817
cguauacuacuuuauagau

SEQ ID NO: 218791 - RNA, 19 nt, Artificial Sequence
  Description of Artificial Sequence: Synthetic oligonucleotide
  Antisense strand to SEQ ID NO: 218790
aucuauaaaguaguauacg

SEQ ID NO: 218792 - RNA, 19 nt, Artificial Sequence
  Description of Artificial Sequence: Synthetic oligonucleotide
  Sense strand starting at position 2779 of SEQ ID NO: 2817
ccacucagagcaggaguua

SEQ ID NO: 218793 - RNA, 19 nt, Artificial Sequence
  Description of Artificial Sequence: Synthetic oligonucleotide
  Antisense strand to SEQ ID NO: 218792
uaacuccugcucugagugg

SEQ ID NO: 218794 - RNA, 19 nt, Artificial Sequence
  Description of Artificial Sequence: Synthetic oligonucleotide
  Sense strand starting at position 2780 of SEQ ID NO: 2817
cacucagagcaggaguuau

SEQ ID NO: 218795 - RNA, 19 nt, Artificial Sequence
  Description of Artificial Sequence: Synthetic oligonucleotide
  Antisense strand to SEQ ID NO: 218794
auaacuccugcucugagug

SEQ ID NO: 218796 - RNA, 19 nt, Artificial Sequence
  Description of Artificial Sequence: Synthetic oligonucleotide
  Sense strand starting at position 2792 of SEQ ID NO: 2817
gaguuaucucauggacuau

SEQ ID NO: 218797 - RNA, 19 nt, Artificial Sequence
  Description of Artificial Sequence: Synthetic oligonucleotide
  Antisense strand to SEQ ID NO: 218796
auaguccaugagauaacuc

SEQ ID NO: 218798 - RNA, 19 nt, Artificial Sequence
  Description of Artificial Sequence: Synthetic oligonucleotide
  Sense strand starting at position 2801 of SEQ ID NO: 2817
cauggacuauagucugauu

SEQ ID NO: 218799 - RNA, 19 nt, Artificial Sequence
  Description of Artificial Sequence: Synthetic oligonucleotide
  Antisense strand to SEQ ID NO: 218798
aaucagacuauaguccaug

SEQ ID NO: 218800 - RNA, 19 nt, Artificial Sequence
  Description of Artificial Sequence: Synthetic oligonucleotide
  Sense strand starting at position 2803 of SEQ ID NO: 2817
uggacuauagucugauuaa

SEQ ID NO: 218801 - RNA, 19 nt, Artificial Sequence
  Description of Artificial Sequence: Synthetic oligonucleotide
  Antisense strand to SEQ ID NO: 218800
uuaaucagacuauagucca

SEQ ID NO: 218802 - RNA, 19 nt, Artificial Sequence
  Description of Artificial Sequence: Synthetic oligonucleotide
  Sense strand starting at position 2806 of SEQ ID NO: 2817
acuauagucugauuaauga

SEQ ID NO: 218803 - RNA, 19 nt, Artificial Sequence
  Description of Artificial Sequence: Synthetic oligonucleotide
  Antisense strand to SEQ ID NO: 218802
ucauuaaucagacuauagu

SEQ ID NO: 218804 - RNA, 19 nt, Artificial Sequence
  Description of Artificial Sequence: Synthetic oligonucleotide
  Sense strand starting at position 2842 of SEQ ID NO: 2817
aagaguagccucugacauu

SEQ ID NO: 218805 - RNA, 19 nt, Artificial Sequence
  Description of Artificial Sequence: Synthetic oligonucleotide
  Antisense strand to SEQ ID NO: 218804
aaugucagaggcuacucuu

SEQ ID NO: 218806 - RNA, 19 nt, Artificial Sequence
  Description of Artificial Sequence: Synthetic oligonucleotide
  Sense strand starting at position 3079 of SEQ ID NO: 2817
cugccacuucuuuauggau

SEQ ID NO: 218807 - RNA, 19 nt, Artificial Sequence
  Description of Artificial Sequence: Synthetic oligonucleotide
  Antisense strand to SEQ ID NO: 218806
auccauaaagaaguggcag

SEQ ID NO: 218808 - RNA, 19 nt, Artificial Sequence
  Description of Artificial Sequence: Synthetic oligonucleotide
  Sense strand starting at position 3125 of SEQ ID NO: 2817
ccucccuacggguaagauu

SEQ ID NO: 218809 - RNA, 19 nt, Artificial Sequence
  Description of Artificial Sequence: Synthetic oligonucleotide
  Antisense strand to SEQ ID NO: 218808
aaucuuacccguagggagg

SEQ ID NO: 218810 - RNA, 19 nt, Artificial Sequence
  Description of Artificial Sequence: Synthetic oligonucleotide
  Sense strand starting at position 3341 of SEQ ID NO: 2817
agcucaacuuguuuaaaga

SEQ ID NO: 218811 - RNA, 19 nt, Artificial Sequence
  Description of Artificial Sequence: Synthetic oligonucleotide
  Antisense strand to SEQ ID NO: 218810
ucuuuaaacaaguugagcu

SEQ ID NO: 218812 - RNA, 19 nt, Artificial Sequence
  Description of Artificial Sequence: Synthetic oligonucleotide
  Sense strand starting at position 3342 of SEQ ID NO: 2817
gcucaacuuguuuaaagac

SEQ ID NO: 218813 - RNA, 19 nt, Artificial Sequence
  Description of Artificial Sequence: Synthetic oligonucleotide
  Antisense strand to SEQ ID NO: 218812
gucuuuaaacaaguugagc

SEQ ID NO: 218814 - RNA, 19 nt, Artificial Sequence
  Description of Artificial Sequence: Synthetic oligonucleotide
  Sense strand starting at position 3374 of SEQ ID NO: 2817
guggucuuuagcuaaagga

SEQ ID NO: 218815 - RNA, 19 nt, Artificial Sequence
  Description of Artificial Sequence: Synthetic oligonucleotide
  Antisense strand to SEQ ID NO: 218814
uccuuuagcuaaagaccac

SEQ ID NO: 218816 - RNA, 19 nt, Artificial Sequence
  Description of Artificial Sequence: Synthetic oligonucleotide
  Sense strand starting at position 3408 of SEQ ID NO: 2817
gugggauuauguguauaag

SEQ ID NO: 218817 - RNA, 19 nt, Artificial Sequence
  Description of Artificial Sequence: Synthetic oligonucleotide
  Antisense strand to SEQ ID NO: 218816
cuuauacacauaaucccac

SEQ ID NO: 218818 - RNA, 19 nt, Artificial Sequence
  Description of Artificial Sequence: Synthetic oligonucleotide
  Sense strand starting at position 3411 of SEQ ID NO: 2817
ggauuauguguauaaggca

SEQ ID NO: 218819 - RNA, 19 nt, Artificial Sequence
  Description of Artificial Sequence: Synthetic oligonucleotide
  Antisense strand to SEQ ID NO: 218818
ugccuuauacacauaaucc

SEQ ID NO: 218820 - RNA, 19 nt, Artificial Sequence
  Description of Artificial Sequence: Synthetic oligonucleotide
  Sense strand starting at position 3433 of SEQ ID NO: 2817
ggcacauacuuggcacaaa

SEQ ID NO: 218821 - RNA, 19 nt, Artificial Sequence
  Description of Artificial Sequence: Synthetic oligonucleotide
  Antisense strand to SEQ ID NO: 218820
uuugugccaaguaugugcc

SEQ ID NO: 218822 - RNA, 19 nt, Artificial Sequence
  Description of Artificial Sequence: Synthetic oligonucleotide
  Sense strand starting at position 3475 of SEQ ID NO: 2817
uuaguaauagagugacauu

SEQ ID NO: 218823 - RNA, 19 nt, Artificial Sequence
  Description of Artificial Sequence: Synthetic oligonucleotide
  Antisense strand to SEQ ID NO: 218822
aaugucacucuauuacuaa

SEQ ID NO: 218824 - RNA, 19 nt, Artificial Sequence
  Description of Artificial Sequence: Synthetic oligonucleotide
  Sense strand starting at position 3706 of SEQ ID NO: 2817
ggcuaaauccugcaucauu

SEQ ID NO: 218825 - RNA, 19 nt, Artificial Sequence
  Description of Artificial Sequence: Synthetic oligonucleotide
  Antisense strand to SEQ ID NO: 218824
aaugaugcaggauuuagcc

SEQ ID NO: 218826 - RNA, 19 nt, Artificial Sequence
  Description of Artificial Sequence: Synthetic oligonucleotide
  Sense strand starting at position 83 of SEQ ID NO: 2818
gacgaauauggcgaaaccu

SEQ ID NO: 218827 - RNA, 19 nt, Artificial Sequence
  Description of Artificial Sequence: Synthetic oligonucleotide
  Antisense strand to SEQ ID NO: 218826
agguuucgccauauucguc

SEQ ID NO: 218828 - RNA, 19 nt, Artificial Sequence
  Description of Artificial Sequence: Synthetic oligonucleotide
  Sense strand starting at position 938 of SEQ ID NO: 2818
auaacuugugaaugcaaug

SEQ ID NO: 218829 - RNA, 19 nt, Artificial Sequence
  Description of Artificial Sequence: Synthetic oligonucleotide
  Antisense strand to SEQ ID NO: 218828
cauugcauucacaaguuau

SEQ ID NO: 218830 - RNA, 19 nt, Artificial Sequence
  Description of Artificial Sequence: Synthetic oligonucleotide
  Sense strand starting at position 1070 of SEQ ID NO: 2818
cucuccuuugaaggaaagu

SEQ ID NO: 218831 - RNA, 19 nt, Artificial Sequence
  Description of Artificial Sequence: Synthetic oligonucleotide
  Antisense strand to SEQ ID NO: 218830
acuuuccuucaaaggagag

SEQ ID NO: 218832 - RNA, 19 nt, Artificial Sequence
  Description of Artificial Sequence: Synthetic oligonucleotide
  Sense strand starting at position 1081 of SEQ ID NO: 2818
aggaaagucuuacuuauau

SEQ ID NO: 218833 - RNA, 19 nt, Artificial Sequence
  Description of Artificial Sequence: Synthetic oligonucleotide
  Antisense strand to SEQ ID NO: 218832
auauaaguaagacuuuccu

SEQ ID NO: 218834 - RNA, 19 nt, Artificial Sequence
  Description of Artificial Sequence: Synthetic oligonucleotide
  Sense strand starting at position 1090 of SEQ ID NO: 2818
uuacuuauauagguuggga

SEQ ID NO: 218835 - RNA, 19 nt, Artificial Sequence
  Description of Artificial Sequence: Synthetic oligonucleotide
  Antisense strand to SEQ ID NO: 218834
ucccaaccuauauaaguaa

SEQ ID NO: 218836 - RNA, 19 nt, Artificial Sequence
  Description of Artificial Sequence: Synthetic oligonucleotide
  Sense strand starting at position 1205 of SEQ ID NO: 2818
ucuucuauuggguauuagu

SEQ ID NO: 218837 - RNA, 19 nt, Artificial Sequence
  Description of Artificial Sequence: Synthetic oligonucleotide
  Antisense strand to SEQ ID NO: 218836
acuaauacccaauagaaga

SEQ ID NO: 218838 - RNA, 19 nt, Artificial Sequence
  Description of Artificial Sequence: Synthetic oligonucleotide
  Sense strand starting at position 1324 of SEQ ID NO: 2818
gauuaauugugauuaacug

SEQ ID NO: 218839 - RNA, 19 nt, Artificial Sequence
  Description of Artificial Sequence: Synthetic oligonucleotide
  Antisense strand to SEQ ID NO: 218838
caguuaaucacaauuaauc

SEQ ID NO: 218840 - RNA, 19 nt, Artificial Sequence
  Description of Artificial Sequence: Synthetic oligonucleotide
  Sense strand starting at position 1422 of SEQ ID NO: 2818
caguuauugugacugauca

SEQ ID NO: 218841 - RNA, 19 nt, Artificial Sequence
  Description of Artificial Sequence: Synthetic oligonucleotide
  Antisense strand to SEQ ID NO: 218840
ugaucagucacaauaacug

SEQ ID NO: 218842 - RNA, 19 nt, Artificial Sequence
  Description of Artificial Sequence: Synthetic oligonucleotide
  Sense strand starting at position 1423 of SEQ ID NO: 2818
aguuauugugacugaucac

SEQ ID NO: 218843 - RNA, 19 nt, Artificial Sequence
  Description of Artificial Sequence: Synthetic oligonucleotide
  Antisense strand to SEQ ID NO: 218842
gugaucagucacaauaacu

SEQ ID NO: 218844 - RNA, 19 nt, Artificial Sequence
  Description of Artificial Sequence: Synthetic oligonucleotide
  Sense strand starting at position 1430 of SEQ ID NO: 2818
gugacugaucacuacuucu

SEQ ID NO: 218845 - RNA, 19 nt, Artificial Sequence
  Description of Artificial Sequence: Synthetic oligonucleotide
  Antisense strand to SEQ ID NO: 218844
agaaguagugaucagucac

SEQ ID NO: 218846 - RNA, 19 nt, Artificial Sequence
  Description of Artificial Sequence: Synthetic oligonucleotide
  Sense strand starting at position 1496 of SEQ ID NO: 2818
uggguccugacuugaggau

SEQ ID NO: 218847 - RNA, 19 nt, Artificial Sequence
  Description of Artificial Sequence: Synthetic oligonucleotide
  Antisense strand to SEQ ID NO: 218846
auccucaagucaggaccca

SEQ ID NO: 218848 - RNA, 19 nt, Artificial Sequence
  Description of Artificial Sequence: Synthetic oligonucleotide
  Sense strand starting at position 2128 of SEQ ID NO: 2818
gcugaugcuauugagaaug

SEQ ID NO: 218849 - RNA, 19 nt, Artificial Sequence
  Description of Artificial Sequence: Synthetic oligonucleotide
  Antisense strand to SEQ ID NO: 218848
cauucucaauagcaucagc

SEQ ID NO: 218850 - RNA, 19 nt, Artificial Sequence
  Description of Artificial Sequence: Synthetic oligonucleotide
  Sense strand starting at position 2315 of SEQ ID NO: 2818
cugucagaacuacaguauu

SEQ ID NO: 218851 - RNA, 19 nt, Artificial Sequence
  Description of Artificial Sequence: Synthetic oligonucleotide
  Antisense strand to SEQ ID NO: 218850
aauacuguaguucugacag

SEQ ID NO: 218852 - RNA, 19 nt, Artificial Sequence
  Description of Artificial Sequence: Synthetic oligonucleotide
  Sense strand starting at position 2353 of SEQ ID NO: 2818
gaauacugauuguuaauag

SEQ ID NO: 218853 - RNA, 19 nt, Artificial Sequence
  Description of Artificial Sequence: Synthetic oligonucleotide
  Antisense strand to SEQ ID NO: 218852
cuauuaacaaucaguauuc

SEQ ID NO: 218854 - RNA, 19 nt, Artificial Sequence
  Description of Artificial Sequence: Synthetic oligonucleotide
  Sense strand starting at position 2382 of SEQ ID NO: 2818
ggcuuaacugaauguugaa

SEQ ID NO: 218855 - RNA, 19 nt, Artificial Sequence
  Description of Artificial Sequence: Synthetic oligonucleotide
  Antisense strand to SEQ ID NO: 218854
uucaacauucaguuaagcc

SEQ ID NO: 218856 - RNA, 19 nt, Artificial Sequence
  Description of Artificial Sequence: Synthetic oligonucleotide
  Sense strand starting at position 2405 of SEQ ID NO: 2818
ucaaguuaguccuuuaaga

SEQ ID NO: 218857 - RNA, 19 nt, Artificial Sequence
  Description of Artificial Sequence: Synthetic oligonucleotide
  Antisense strand to SEQ ID NO: 218856
ucuuaaaggacuaacuuga

SEQ ID NO: 218858 - RNA, 19 nt, Artificial Sequence
  Description of Artificial Sequence: Synthetic oligonucleotide
  Sense strand starting at position 2428 of SEQ ID NO: 2818
gucaucaugaaagggugua

SEQ ID NO: 218859 - RNA, 19 nt, Artificial Sequence
  Description of Artificial Sequence: Synthetic oligonucleotide
  Antisense strand to SEQ ID NO: 218858
uacacccuuucaugaugac

SEQ ID NO: 218860 - RNA, 19 nt, Artificial Sequence
  Description of Artificial Sequence: Synthetic oligonucleotide
  Sense strand starting at position 2442 of SEQ ID NO: 2818
guguaagaaauuggaacau

SEQ ID NO: 218861 - RNA, 19 nt, Artificial Sequence
  Description of Artificial Sequence: Synthetic oligonucleotide
  Antisense strand to SEQ ID NO: 218860
auguuccaauuucuuacac

SEQ ID NO: 218862 - RNA, 19 nt, Artificial Sequence
  Description of Artificial Sequence: Synthetic oligonucleotide
  Sense strand starting at position 2551 of SEQ ID NO: 2818
caauuaugccuggaaguag

SEQ ID NO: 218863 - RNA, 19 nt, Artificial Sequence
  Description of Artificial Sequence: Synthetic oligonucleotide
  Antisense strand to SEQ ID NO: 218862
cuacuuccaggcauaauug

SEQ ID NO: 218864 - RNA, 19 nt, Artificial Sequence
  Description of Artificial Sequence: Synthetic oligonucleotide
  Sense strand starting at position 2559 of SEQ ID NO: 2818
ccuggaaguagcugagaau

SEQ ID NO: 218865 - RNA, 19 nt, Artificial Sequence
  Description of Artificial Sequence: Synthetic oligonucleotide
  Antisense strand to SEQ ID NO: 218864
auucucagcuacuuccagg

SEQ ID NO: 218866 - RNA, 19 nt, Artificial Sequence
  Description of Artificial Sequence: Synthetic oligonucleotide
  Sense strand starting at position 2566 of SEQ ID NO: 2818
guagcugagaauuagaugu

SEQ ID NO: 218867 - RNA, 19 nt, Artificial Sequence
  Description of Artificial Sequence: Synthetic oligonucleotide
  Antisense strand to SEQ ID NO: 218866
acaucuaauucucagcuac

SEQ ID NO: 218868 - RNA, 19 nt, Artificial Sequence
  Description of Artificial Sequence: Synthetic oligonucleotide
  Sense strand starting at position 2825 of SEQ ID NO: 2818
aggccuuugacucagacga

SEQ ID NO: 218869 - RNA, 19 nt, Artificial Sequence
  Description of Artificial Sequence: Synthetic oligonucleotide
  Antisense strand to SEQ ID NO: 218868
ucgucugagucaaaggccu

SEQ ID NO: 218870 - RNA, 19 nt, Artificial Sequence
  Description of Artificial Sequence: Synthetic oligonucleotide
  Sense strand starting at position 2867 of SEQ ID NO: 2818
ggagcuauggcuggaauga

SEQ ID NO: 218871 - RNA, 19 nt, Artificial Sequence
  Description of Artificial Sequence: Synthetic oligonucleotide
  Antisense strand to SEQ ID NO: 218870
ucauuccagccauagcucc

SEQ ID NO: 218872 - RNA, 19 nt, Artificial Sequence
  Description of Artificial Sequence: Synthetic oligonucleotide
  Sense strand starting at position 2868 of SEQ ID NO: 2818
gagcuauggcuggaaugau

SEQ ID NO: 218873 - RNA, 19 nt, Artificial Sequence
  Description of Artificial Sequence: Synthetic oligonucleotide
  Antisense strand to SEQ ID NO: 218872
aucauuccagccauagcuc

SEQ ID NO: 218874 - RNA, 19 nt, Artificial Sequence
  Description of Artificial Sequence: Synthetic oligonucleotide
  Sense strand starting at position 2913 of SEQ ID NO: 2818
agaaguuggacucgaggaa

SEQ ID NO: 218875 - RNA, 19 nt, Artificial Sequence
  Description of Artificial Sequence: Synthetic oligonucleotide
  Antisense strand to SEQ ID NO: 218874
uuccucgaguccaacuucu

SEQ ID NO: 218876 - RNA, 19 nt, Artificial Sequence
  Description of Artificial Sequence: Synthetic oligonucleotide
  Sense strand starting at position 2942 of SEQ ID NO: 2818
aguacuuauuggccuggaa

SEQ ID NO: 218877 - RNA, 19 nt, Artificial Sequence
  Description of Artificial Sequence: Synthetic oligonucleotide
  Antisense strand to SEQ ID NO: 218876
uuccaggccaauaaguacu

SEQ ID NO: 218878 - RNA, 19 nt, Artificial Sequence
  Description of Artificial Sequence: Synthetic oligonucleotide
  Sense strand starting at position 2944 of SEQ ID NO: 2818
uacuuauuggccuggaaga

SEQ ID NO: 218879 - RNA, 19 nt, Artificial Sequence
  Description of Artificial Sequence: Synthetic oligonucleotide
  Antisense strand to SEQ ID NO: 218878
ucuuccaggccaauaagua

SEQ ID NO: 218880 - RNA, 19 nt, Artificial Sequence
  Description of Artificial Sequence: Synthetic oligonucleotide
  Sense strand starting at position 2945 of SEQ ID NO: 2818
acuuauuggccuggaagag

SEQ ID NO: 218881 - RNA, 19 nt, Artificial Sequence
  Description of Artificial Sequence: Synthetic oligonucleotide
  Antisense strand to SEQ ID NO: 218880
cucuuccaggccaauaagu

SEQ ID NO: 218882 - RNA, 19 nt, Artificial Sequence
  Description of Artificial Sequence: Synthetic oligonucleotide
  Sense strand starting at position 2984 of SEQ ID NO: 2818
agaguacuggaguggaaua

SEQ ID NO: 218883 - RNA, 19 nt, Artificial Sequence
  Description of Artificial Sequence: Synthetic oligonucleotide
  Antisense strand to SEQ ID NO: 218882
uauuccacuccaguacucu

SEQ ID NO: 218884 - RNA, 19 nt, Artificial Sequence
  Description of Artificial Sequence: Synthetic oligonucleotide
  Sense strand starting at position 2985 of SEQ ID NO: 2818
gaguacuggaguggaauau

SEQ ID NO: 218885 - RNA, 19 nt, Artificial Sequence
  Description of Artificial Sequence: Synthetic oligonucleotide
  Antisense strand to SEQ ID NO: 218884
auauuccacuccaguacuc

SEQ ID NO: 218886 - RNA, 19 nt, Artificial Sequence
  Description of Artificial Sequence: Synthetic oligonucleotide
  Sense strand starting at position 2994 of SEQ ID NO: 2818
aguggaauaugaccuaugu

SEQ ID NO: 218887 - RNA, 19 nt, Artificial Sequence
  Description of Artificial Sequence: Synthetic oligonucleotide
  Antisense strand to SEQ ID NO: 218886
acauaggucauauuccacu

SEQ ID NO: 218888 - RNA, 19 nt, Artificial Sequence
  Description of Artificial Sequence: Synthetic oligonucleotide
  Sense strand starting at position 2996 of SEQ ID NO: 2818
uggaauaugaccuaugugu

SEQ ID NO: 218889 - RNA, 19 nt, Artificial Sequence
  Description of Artificial Sequence: Synthetic oligonucleotide
  Antisense strand to SEQ ID NO: 218888
acacauaggucauauucca

SEQ ID NO: 218890 - RNA, 19 nt, Artificial Sequence
  Description of Artificial Sequence: Synthetic oligonucleotide
  Sense strand starting at position 3088 of SEQ ID NO: 2818
agucauaaaucuuuguaag

SEQ ID NO: 218891 - RNA, 19 nt, Artificial Sequence
  Description of Artificial Sequence: Synthetic oligonucleotide
  Antisense strand to SEQ ID NO: 218890
cuuacaaagauuuaugacu

SEQ ID NO: 218892 - RNA, 19 nt, Artificial Sequence
  Description of Artificial Sequence: Synthetic oligonucleotide
  Sense strand starting at position 3090 of SEQ ID NO: 2818
ucauaaaucuuuguaagug

SEQ ID NO: 218893 - RNA, 19 nt, Artificial Sequence
  Description of Artificial Sequence: Synthetic oligonucleotide
  Antisense strand to SEQ ID NO: 218892
cacuuacaaagauuuauga

SEQ ID NO: 218894 - RNA, 19 nt, Artificial Sequence
  Description of Artificial Sequence: Synthetic oligonucleotide
  Sense strand starting at position 3096 of SEQ ID NO: 2818
aucuuuguaagugguauuu

SEQ ID NO: 218895 - RNA, 19 nt, Artificial Sequence
  Description of Artificial Sequence: Synthetic oligonucleotide
  Antisense strand to SEQ ID NO: 218894
aaauaccacuuacaaagau

SEQ ID NO: 218896 - RNA, 19 nt, Artificial Sequence
  Description of Artificial Sequence: Synthetic oligonucleotide
  Sense strand starting at position 3186 of SEQ ID NO: 2818
guauucuuucuauauagag

SEQ ID NO: 218897 - RNA, 19 nt, Artificial Sequence
  Description of Artificial Sequence: Synthetic oligonucleotide
  Antisense strand to SEQ ID NO: 218896
cucuauauagaaagaauac

SEQ ID NO: 218898 - RNA, 19 nt, Artificial Sequence
  Description of Artificial Sequence: Synthetic oligonucleotide
  Sense strand starting at position 3315 of SEQ ID NO: 2818
auccuaacucaaggaaguu

SEQ ID NO: 218899 - RNA, 19 nt, Artificial Sequence
  Description of Artificial Sequence: Synthetic oligonucleotide
  Antisense strand to SEQ ID NO: 218898
aacuuccuugaguuaggau

SEQ ID NO: 218900 - RNA, 19 nt, Artificial Sequence
  Description of Artificial Sequence: Synthetic oligonucleotide
  Sense strand starting at position 3338 of SEQ ID NO: 2818
gucucuaguggcuaauaau

SEQ ID NO: 218901 - RNA, 19 nt, Artificial Sequence
  Description of Artificial Sequence: Synthetic oligonucleotide
  Antisense strand to SEQ ID NO: 218900
auuauuagccacuagagac

SEQ ID NO: 218902 - RNA, 19 nt, Artificial Sequence
  Description of Artificial Sequence: Synthetic oligonucleotide
  Sense strand starting at position 3349 of SEQ ID NO: 2818
cuaauaauuggaggcuauu

SEQ ID NO: 218903 - RNA, 19 nt, Artificial Sequence
  Description of Artificial Sequence: Synthetic oligonucleotide
  Antisense strand to SEQ ID NO: 218902
aauagccuccaauuauuag

SEQ ID NO: 218904 - RNA, 19 nt, Artificial Sequence
  Description of Artificial Sequence: Synthetic oligonucleotide
  Sense strand starting at position 3919 of SEQ ID NO: 2818
cuagauauauguccauauu

SEQ ID NO: 218905 - RNA, 19 nt, Artificial Sequence
  Description of Artificial Sequence: Synthetic oligonucleotide
  Antisense strand to SEQ ID NO: 218904
aauauggacauauaucuag

SEQ ID NO: 218906 - RNA, 19 nt, Artificial Sequence
  Description of Artificial Sequence: Synthetic oligonucleotide
  Sense strand starting at position 13 of SEQ ID NO: 2819
aguccucucccuuagugau

SEQ ID NO: 218907 - RNA, 19 nt, Artificial Sequence
  Description of Artificial Sequence: Synthetic oligonucleotide
  Antisense strand to SEQ ID NO: 218906
aucacuaagggagaggacu

SEQ ID NO: 218908 - RNA, 19 nt, Artificial Sequence
  Description of Artificial Sequence: Synthetic oligonucleotide
  Sense strand starting at position 83 of SEQ ID NO: 2819
gcugguuuccaaggaaaca

SEQ ID NO: 218909 - RNA, 19 nt, Artificial Sequence
  Description of Artificial Sequence: Synthetic oligonucleotide
  Antisense strand to SEQ ID NO: 218908
uguuuccuuggaaaccagc

SEQ ID NO: 218910 - RNA, 19 nt, Artificial Sequence
  Description of Artificial Sequence: Synthetic oligonucleotide
  Sense strand starting at position 164 of SEQ ID NO: 2819
gagguagcuuuacucagaa

SEQ ID NO: 218911 - RNA, 19 nt, Artificial Sequence
  Description of Artificial Sequence: Synthetic oligonucleotide
  Antisense strand to SEQ ID NO: 218910
uucugaguaaagcuaccuc

SEQ ID NO: 218912 - RNA, 19 nt, Artificial Sequence
  Description of Artificial Sequence: Synthetic oligonucleotide
  Sense strand starting at position 242 of SEQ ID NO: 2819
augaauaucuggucuuaua

SEQ ID NO: 218913 - RNA, 19 nt, Artificial Sequence
  Description of Artificial Sequence: Synthetic oligonucleotide
  Antisense strand to SEQ ID NO: 218912
uauaagaccagauauucau

SEQ ID NO: 218914 - RNA, 19 nt, Artificial Sequence
  Description of Artificial Sequence: Synthetic oligonucleotide
  Sense strand starting at position 844 of SEQ ID NO: 2819
gucauaauucuugaaaguu

SEQ ID NO: 218915 - RNA, 19 nt, Artificial Sequence
  Description of Artificial Sequence: Synthetic oligonucleotide
  Antisense strand to SEQ ID NO: 218914
aacuuucaagaauuaugac

SEQ ID NO: 218916 - RNA, 19 nt, Artificial Sequence
  Description of Artificial Sequence: Synthetic oligonucleotide
  Sense strand starting at position 877 of SEQ ID NO: 2819
uucuaccaccguuaaauga

SEQ ID NO: 218917 - RNA, 19 nt, Artificial Sequence
  Description of Artificial Sequence: Synthetic oligonucleotide
  Antisense strand to SEQ ID NO: 218916
ucauuuaacggugguagaa

SEQ ID NO: 218918 - RNA, 19 nt, Artificial Sequence
  Description of Artificial Sequence: Synthetic oligonucleotide
  Sense strand starting at position 920 of SEQ ID NO: 2819
gaauuaagugacugggagu

SEQ ID NO: 218919 - RNA, 19 nt, Artificial Sequence
  Description of Artificial Sequence: Synthetic oligonucleotide
  Antisense strand to SEQ ID NO: 218918
acucccagucacuuaauuc

SEQ ID NO: 218920 - RNA, 19 nt, Artificial Sequence
  Description of Artificial Sequence: Synthetic oligonucleotide
  Sense strand starting at position 963 of SEQ ID NO: 2819
gcaaguguguuauuuauuc

SEQ ID NO: 218921 - RNA, 19 nt, Artificial Sequence
  Description of Artificial Sequence: Synthetic oligonucleotide
  Antisense strand to SEQ ID NO: 218920
gaauaaauaacacacuugc

SEQ ID NO: 218922 - RNA, 19 nt, Artificial Sequence
  Description of Artificial Sequence: Synthetic oligonucleotide
  Sense strand starting at position 967 of SEQ ID NO: 2819
guguguuauuuauucuaca

SEQ ID NO: 218923 - RNA, 19 nt, Artificial Sequence
  Description of Artificial Sequence: Synthetic oligonucleotide
  Antisense strand to SEQ ID NO: 218922
uguagaauaaauaacacac

SEQ ID NO: 218924 - RNA, 19 nt, Artificial Sequence
  Description of Artificial Sequence: Synthetic oligonucleotide
  Sense strand starting at position 1096 of SEQ ID NO: 2819
auauaaaugcucugaugga

SEQ ID NO: 218925 - RNA, 19 nt, Artificial Sequence
  Description of Artificial Sequence: Synthetic oligonucleotide
  Antisense strand to SEQ ID NO: 218924
uccaucagagcauuuauau

SEQ ID NO: 218926 - RNA, 19 nt, Artificial Sequence
  Description of Artificial Sequence: Synthetic oligonucleotide
  Sense strand starting at position 1111 of SEQ ID NO: 2819
uggaauucuuaucuagaug

SEQ ID NO: 218927 - RNA, 19 nt, Artificial Sequence
  Description of Artificial Sequence: Synthetic oligonucleotide
  Antisense strand to SEQ ID NO: 218926
caucuagauaagaauucca

SEQ ID NO: 218928 - RNA, 19 nt, Artificial Sequence
  Description of Artificial Sequence: Synthetic oligonucleotide
  Sense strand starting at position 1122 of SEQ ID NO: 2819
ucuagauguguuugacuga

SEQ ID NO: 218929 - RNA, 19 nt, Artificial Sequence
  Description of Artificial Sequence: Synthetic oligonucleotide
  Antisense strand to SEQ ID NO: 218928
ucagucaaacacaucuaga

SEQ ID NO: 218930 - RNA, 19 nt, Artificial Sequence
  Description of Artificial Sequence: Synthetic oligonucleotide
  Sense strand starting at position 1125 of SEQ ID NO: 2819
agauguguuugacugauaa

SEQ ID NO: 218931 - RNA, 19 nt, Artificial Sequence
  Description of Artificial Sequence: Synthetic oligonucleotide
  Antisense strand to SEQ ID NO: 218930
uuaucagucaaacacaucu

SEQ ID NO: 218932 - RNA, 19 nt, Artificial Sequence
  Description of Artificial Sequence: Synthetic oligonucleotide
  Sense strand starting at position 1326 of SEQ ID NO: 2819
ugaacaacaugagauuuau

SEQ ID NO: 218933 - RNA, 19 nt, Artificial Sequence
  Description of Artificial Sequence: Synthetic oligonucleotide
  Antisense strand to SEQ ID NO: 218932
auaaaucucauguuguuca

SEQ ID NO: 218934 - RNA, 19 nt, Artificial Sequence
  Description of Artificial Sequence: Synthetic oligonucleotide
  Sense strand starting at position 1357 of SEQ ID NO: 2819
guuaaauaacagggcuuaa

SEQ ID NO: 218935 - RNA, 19 nt, Artificial Sequence
  Description of Artificial Sequence: Synthetic oligonucleotide
  Antisense strand to SEQ ID NO: 218934
uuaagcccuguuauuuaac

SEQ ID NO: 218936 - RNA, 19 nt, Artificial Sequence
  Description of Artificial Sequence: Synthetic oligonucleotide
  Sense strand starting at position 1369 of SEQ ID NO: 2819
ggcuuaaaugcacacaaau

SEQ ID NO: 218937 - RNA, 19 nt, Artificial Sequence
  Description of Artificial Sequence: Synthetic oligonucleotide
  Antisense strand to SEQ ID NO: 218936
auuugugugcauuuaagcc

SEQ ID NO: 218938 - RNA, 19 nt, Artificial Sequence
  Description of Artificial Sequence: Synthetic oligonucleotide
  Sense strand starting at position 1657 of SEQ ID NO: 2819
gaaaguuauuuaggauaag

SEQ ID NO: 218939 - RNA, 19 nt, Artificial Sequence
  Description of Artificial Sequence: Synthetic oligonucleotide
  Antisense strand to SEQ ID NO: 218938
cuuauccuaaauaacuuuc

SEQ ID NO: 218940 - RNA, 19 nt, Artificial Sequence
  Description of Artificial Sequence: Synthetic oligonucleotide
  Sense strand starting at position 1673 of SEQ ID NO: 2819
aagacaugccucuggugau

SEQ ID NO: 218941 - RNA, 19 nt, Artificial Sequence
  Description of Artificial Sequence: Synthetic oligonucleotide
  Antisense strand to SEQ ID NO: 218940
aucaccagaggcaugucuu

SEQ ID NO: 218942 - RNA, 19 nt, Artificial Sequence
  Description of Artificial Sequence: Synthetic oligonucleotide
  Sense strand starting at position 2357 of SEQ ID NO: 2819
aguguaccuccucauuaua

SEQ ID NO: 218943 - RNA, 19 nt, Artificial Sequence
  Description of Artificial Sequence: Synthetic oligonucleotide
  Antisense strand to SEQ ID NO: 218942
uauaaugaggagguacacu

SEQ ID NO: 218944 - RNA, 19 nt, Artificial Sequence
  Description of Artificial Sequence: Synthetic oligonucleotide
  Sense strand starting at position 2535 of SEQ ID NO: 2819
cgcaguuucgaggccuaau

SEQ ID NO: 218945 - RNA, 19 nt, Artificial Sequence
  Description of Artificial Sequence: Synthetic oligonucleotide
  Antisense strand to SEQ ID NO: 218944
auuaggccucgaaacugcg

SEQ ID NO: 218946 - RNA, 19 nt, Artificial Sequence
  Description of Artificial Sequence: Synthetic oligonucleotide
  Sense strand starting at position 2544 of SEQ ID NO: 2819
gaggccuaaucaguaugaa

SEQ ID NO: 218947 - RNA, 19 nt, Artificial Sequence
  Description of Artificial Sequence: Synthetic oligonucleotide
  Antisense strand to SEQ ID NO: 218946
uucauacugauuaggccuc

SEQ ID NO: 218948 - RNA, 19 nt, Artificial Sequence
  Description of Artificial Sequence: Synthetic oligonucleotide
  Sense strand starting at position 2681 of SEQ ID NO: 2819
agagaucagucacuugguu

SEQ ID NO: 218949 - RNA, 19 nt, Artificial Sequence
  Description of Artificial Sequence: Synthetic oligonucleotide
  Antisense strand to SEQ ID NO: 218948
aaccaagugacugaucucu

SEQ ID NO: 218950 - RNA, 19 nt, Artificial Sequence
  Description of Artificial Sequence: Synthetic oligonucleotide
  Sense strand starting at position 2928 of SEQ ID NO: 2819
uugagcuuccucuagugga

SEQ ID NO: 218951 - RNA, 19 nt, Artificial Sequence
  Description of Artificial Sequence: Synthetic oligonucleotide
  Antisense strand to SEQ ID NO: 218950
uccacuagaggaagcucaa

SEQ ID NO: 218952 - RNA, 19 nt, Artificial Sequence
  Description of Artificial Sequence: Synthetic oligonucleotide
  Sense strand starting at position 3049 of SEQ ID NO: 2819
uucuuaaaucaguaaugug

SEQ ID NO: 218953 - RNA, 19 nt, Artificial Sequence
  Description of Artificial Sequence: Synthetic oligonucleotide
  Antisense strand to SEQ ID NO: 218952
cacauuacugauuuaagaa

SEQ ID NO: 218954 - RNA, 19 nt, Artificial Sequence
  Description of Artificial Sequence: Synthetic oligonucleotide
  Sense strand starting at position 3063 of SEQ ID NO: 2819
auguguccucaugggaaua

SEQ ID NO: 218955 - RNA, 19 nt, Artificial Sequence
  Description of Artificial Sequence: Synthetic oligonucleotide
  Antisense strand to SEQ ID NO: 218954
uauucccaugaggacacau

SEQ ID NO: 218956 - RNA, 19 nt, Artificial Sequence
  Description of Artificial Sequence: Synthetic oligonucleotide
  Sense strand starting at position 3064 of SEQ ID NO: 2819
uguguccucaugggaauaa

SEQ ID NO: 218957 - RNA, 19 nt, Artificial Sequence
  Description of Artificial Sequence: Synthetic oligonucleotide
  Antisense strand to SEQ ID NO: 218956
uuauucccaugaggacaca

SEQ ID NO: 218958 - RNA, 19 nt, Artificial Sequence
  Description of Artificial Sequence: Synthetic oligonucleotide
  Sense strand starting at position 3116 of SEQ ID NO: 2819
gcaagcauucuuuaagagu

SEQ ID NO: 218959 - RNA, 19 nt, Artificial Sequence
  Description of Artificial Sequence: Synthetic oligonucleotide
  Antisense strand to SEQ ID NO: 218958
acucuuaaagaaugcuugc

SEQ ID NO: 218960 - RNA, 19 nt, Artificial Sequence
  Description of Artificial Sequence: Synthetic oligonucleotide
  Sense strand starting at position 3145 of SEQ ID NO: 2819
guggcaaaucauuagucca

SEQ ID NO: 218961 - RNA, 19 nt, Artificial Sequence
  Description of Artificial Sequence: Synthetic oligonucleotide
  Antisense strand to SEQ ID NO: 218960
uggacuaaugauuugccac

SEQ ID NO: 218962 - RNA, 19 nt, Artificial Sequence
  Description of Artificial Sequence: Synthetic oligonucleotide
  Sense strand starting at position 3148 of SEQ ID NO: 2819
gcaaaucauuaguccagga

SEQ ID NO: 218963 - RNA, 19 nt, Artificial Sequence
  Description of Artificial Sequence: Synthetic oligonucleotide
  Antisense strand to SEQ ID NO: 218962
uccuggacuaaugauuugc

SEQ ID NO: 218964 - RNA, 19 nt, Artificial Sequence
  Description of Artificial Sequence: Synthetic oligonucleotide
  Sense strand starting at position 3152 of SEQ ID NO: 2819
aucauuaguccaggaauau

SEQ ID NO: 218965 - RNA, 19 nt, Artificial Sequence
  Description of Artificial Sequence: Synthetic oligonucleotide
  Antisense strand to SEQ ID NO: 218964
auauuccuggacuaaugau

SEQ ID NO: 218966 - RNA, 19 nt, Artificial Sequence
  Description of Artificial Sequence: Synthetic oligonucleotide
  Sense strand starting at position 3191 of SEQ ID NO: 2819
gugucaauauuguuaggaa

SEQ ID NO: 218967 - RNA, 19 nt, Artificial Sequence
  Description of Artificial Sequence: Synthetic oligonucleotide
  Antisense strand to SEQ ID NO: 218966
uuccuaacaauauugacac

SEQ ID NO: 218968 - RNA, 19 nt, Artificial Sequence
  Description of Artificial Sequence: Synthetic oligonucleotide
  Sense strand starting at position 3273 of SEQ ID NO: 2819
uugcacuguuauuuagagu

SEQ ID NO: 218969 - RNA, 19 nt, Artificial Sequence
  Description of Artificial Sequence: Synthetic oligonucleotide
  Antisense strand to SEQ ID NO: 218968
acucuaaauaacagugcaa

SEQ ID NO: 218970 - RNA, 19 nt, Artificial Sequence
  Description of Artificial Sequence: Synthetic oligonucleotide
  Sense strand starting at position 3337 of SEQ ID NO: 2819
cgcuuauucccaccgccaa

SEQ ID NO: 218971 - RNA, 19 nt, Artificial Sequence
  Description of Artificial Sequence: Synthetic oligonucleotide
  Antisense strand to SEQ ID NO: 218970
uuggcggugggaauaagcg

SEQ ID NO: 218972 - RNA, 19 nt, Artificial Sequence
  Description of Artificial Sequence: Synthetic oligonucleotide
  Sense strand starting at position 3393 of SEQ ID NO: 2819
guccuauugcuaggaauaa

SEQ ID NO: 218973 - RNA, 19 nt, Artificial Sequence
  Description of Artificial Sequence: Synthetic oligonucleotide
  Antisense strand to SEQ ID NO: 218972
uuauuccuagcaauaggac

SEQ ID NO: 218974 - RNA, 19 nt, Artificial Sequence
  Description of Artificial Sequence: Synthetic oligonucleotide
  Sense strand starting at position 3533 of SEQ ID NO: 2819
gaauaagcauuugaggagu

SEQ ID NO: 218975 - RNA, 19 nt, Artificial Sequence
  Description of Artificial Sequence: Synthetic oligonucleotide
  Antisense strand to SEQ ID NO: 218974
acuccucaaaugcuuauuc

SEQ ID NO: 218976 - RNA, 19 nt, Artificial Sequence
  Description of Artificial Sequence: Synthetic oligonucleotide
  Sense strand starting at position 3546 of SEQ ID NO: 2819
aggaguuucugacucagca

SEQ ID NO: 218977 - RNA, 19 nt, Artificial Sequence
  Description of Artificial Sequence: Synthetic oligonucleotide
  Antisense strand to SEQ ID NO: 218976
ugcugagucagaaacuccu

SEQ ID NO: 218978 - RNA, 19 nt, Artificial Sequence
  Description of Artificial Sequence: Synthetic oligonucleotide
  Sense strand starting at position 3615 of SEQ ID NO: 2819
agagacuuguaggcaagua

SEQ ID NO: 218979 - RNA, 19 nt, Artificial Sequence
  Description of Artificial Sequence: Synthetic oligonucleotide
  Antisense strand to SEQ ID NO: 218978
uacuugccuacaagucucu

SEQ ID NO: 218980 - RNA, 19 nt, Artificial Sequence
  Description of Artificial Sequence: Synthetic oligonucleotide
  Sense strand starting at position 3616 of SEQ ID NO: 2819
gagacuuguaggcaaguau

SEQ ID NO: 218981 - RNA, 19 nt, Artificial Sequence
  Description of Artificial Sequence: Synthetic oligonucleotide
  Antisense strand to SEQ ID NO: 218980
auacuugccuacaagucuc

SEQ ID NO: 218982 - RNA, 19 nt, Artificial Sequence
  Description of Artificial Sequence: Synthetic oligonucleotide
  Sense strand starting at position 3715 of SEQ ID NO: 2819
uuuagagauuugggaacaa

SEQ ID NO: 218983 - RNA, 19 nt, Artificial Sequence
  Description of Artificial Sequence: Synthetic oligonucleotide
  Antisense strand to SEQ ID NO: 218982
uuguucccaaaucucuaaa

SEQ ID NO: 218984 - RNA, 19 nt, Artificial Sequence
  Description of Artificial Sequence: Synthetic oligonucleotide
  Sense strand starting at position 3809 of SEQ ID NO: 2819
uaaauaaggcugggaugua

SEQ ID NO: 218985 - RNA, 19 nt, Artificial Sequence
  Description of Artificial Sequence: Synthetic oligonucleotide
  Antisense strand to SEQ ID NO: 218984
uacaucccagccuuauuua

SEQ ID NO: 218986 - RNA, 19 nt, Artificial Sequence
  Description of Artificial Sequence: Synthetic oligonucleotide
  Sense strand starting at position 161 of SEQ ID NO: 2820
cggaaugcuggguaaggaa

SEQ ID NO: 218987 - RNA, 19 nt, Artificial Sequence
  Description of Artificial Sequence: Synthetic oligonucleotide
  Antisense strand to SEQ ID NO: 218986
uuccuuacccagcauuccg

SEQ ID NO: 218988 - RNA, 19 nt, Artificial Sequence
  Description of Artificial Sequence: Synthetic oligonucleotide
  Sense strand starting at position 169 of SEQ ID NO: 2820
uggguaaggaauuguggaa

SEQ ID NO: 218989 - RNA, 19 nt, Artificial Sequence
  Description of Artificial Sequence: Synthetic oligonucleotide
  Antisense strand to SEQ ID NO: 218988
uuccacaauuccuuaccca

SEQ ID NO: 218990 - RNA, 19 nt, Artificial Sequence
  Description of Artificial Sequence: Synthetic oligonucleotide
  Sense strand starting at position 272 of SEQ ID NO: 2820
aucacauuucccugugucu

SEQ ID NO: 218991 - RNA, 19 nt, Artificial Sequence
  Description of Artificial Sequence: Synthetic oligonucleotide
  Antisense strand to SEQ ID NO: 218990
agacacagggaaaugugau

SEQ ID NO: 218992 - RNA, 19 nt, Artificial Sequence
  Description of Artificial Sequence: Synthetic oligonucleotide
  Sense strand starting at position 275 of SEQ ID NO: 2820
acauuucccugugucuauu

SEQ ID NO: 218993 - RNA, 19 nt, Artificial Sequence
  Description of Artificial Sequence: Synthetic oligonucleotide
  Antisense strand to SEQ ID NO: 218992
aauagacacagggaaaugu

SEQ ID NO: 218994 - RNA, 19 nt, Artificial Sequence
  Description of Artificial Sequence: Synthetic oligonucleotide
  Sense strand starting at position 278 of SEQ ID NO: 2820
uuucccugugucuauuaau

SEQ ID NO: 218995 - RNA, 19 nt, Artificial Sequence
  Description of Artificial Sequence: Synthetic oligonucleotide
  Antisense strand to SEQ ID NO: 218994
auuaauagacacagggaaa

SEQ ID NO: 218996 - RNA, 19 nt, Artificial Sequence
  Description of Artificial Sequence: Synthetic oligonucleotide
  Sense strand starting at position 500 of SEQ ID NO: 2820
auacauauugcacguauaa

SEQ ID NO: 218997 - RNA, 19 nt, Artificial Sequence
  Description of Artificial Sequence: Synthetic oligonucleotide
  Antisense strand to SEQ ID NO: 218996
uuauacgugcaauauguau

SEQ ID NO: 218998 - RNA, 19 nt, Artificial Sequence
  Description of Artificial Sequence: Synthetic oligonucleotide
  Sense strand starting at position 551 of SEQ ID NO: 2820
ugguuuaaacagcaucuua

SEQ ID NO: 218999 - RNA, 19 nt, Artificial Sequence
  Description of Artificial Sequence: Synthetic oligonucleotide
  Antisense strand to SEQ ID NO: 218998
uaagaugcuguuuaaacca

SEQ ID NO: 219000 - RNA, 19 nt, Artificial Sequence
  Description of Artificial Sequence: Synthetic oligonucleotide
  Sense strand starting at position 611 of SEQ ID NO: 2820
ucacuauaguaauucugua

SEQ ID NO: 219001 - RNA, 19 nt, Artificial Sequence
  Description of Artificial Sequence: Synthetic oligonucleotide
  Antisense strand to SEQ ID NO: 219000
uacagaauuacuauaguga

SEQ ID NO: 219002 - RNA, 19 nt, Artificial Sequence
  Description of Artificial Sequence: Synthetic oligonucleotide
  Sense strand starting at position 650 of SEQ ID NO: 2820
ugucuuagagacuaucauc

SEQ ID NO: 219003 - RNA, 19 nt, Artificial Sequence
  Description of Artificial Sequence: Synthetic oligonucleotide
  Antisense strand to SEQ ID NO: 219002
gaugauagucucuaagaca

SEQ ID NO: 219004 - RNA, 19 nt, Artificial Sequence
  Description of Artificial Sequence: Synthetic oligonucleotide
  Sense strand starting at position 698 of SEQ ID NO: 2820
gaauuuaggucccaggaug

SEQ ID NO: 219005 - RNA, 19 nt, Artificial Sequence
  Description of Artificial Sequence: Synthetic oligonucleotide
  Antisense strand to SEQ ID NO: 219004
cauccugggaccuaaauuc

SEQ ID NO: 219006 - RNA, 19 nt, Artificial Sequence
  Description of Artificial Sequence: Synthetic oligonucleotide
  Sense strand starting at position 706 of SEQ ID NO: 2820
gucccaggaugccuuuaaa

SEQ ID NO: 219007 - RNA, 19 nt, Artificial Sequence
  Description of Artificial Sequence: Synthetic oligonucleotide
  Antisense strand to SEQ ID NO: 219006
uuuaaaggcauccugggac

SEQ ID NO: 219008 - RNA, 19 nt, Artificial Sequence
  Description of Artificial Sequence: Synthetic oligonucleotide
  Sense strand starting at position 830 of SEQ ID NO: 2820
gugcuauuauuugcuaguu

SEQ ID NO: 219009 - RNA, 19 nt, Artificial Sequence
  Description of Artificial Sequence: Synthetic oligonucleotide
  Antisense strand to SEQ ID NO: 219008
aacuagcaaauaauagcac

SEQ ID NO: 219010 - RNA, 19 nt, Artificial Sequence
  Description of Artificial Sequence: Synthetic oligonucleotide
  Sense strand starting at position 831 of SEQ ID NO: 2820
ugcuauuauuugcuaguua

SEQ ID NO: 219011 - RNA, 19 nt, Artificial Sequence
  Description of Artificial Sequence: Synthetic oligonucleotide
  Antisense strand to SEQ ID NO: 219010
uaacuagcaaauaauagca

SEQ ID NO: 219012 - RNA, 19 nt, Artificial Sequence
  Description of Artificial Sequence: Synthetic oligonucleotide
  Sense strand starting at position 949 of SEQ ID NO: 2820
aaagucauguguguacaua

SEQ ID NO: 219013 - RNA, 19 nt, Artificial Sequence
  Description of Artificial Sequence: Synthetic oligonucleotide
  Antisense strand to SEQ ID NO: 219012
uauguacacacaugacuuu

SEQ ID NO: 219014 - RNA, 19 nt, Artificial Sequence
  Description of Artificial Sequence: Synthetic oligonucleotide
  Sense strand starting at position 950 of SEQ ID NO: 2820
aagucauguguguacauau

SEQ ID NO: 219015 - RNA, 19 nt, Artificial Sequence
  Description of Artificial Sequence: Synthetic oligonucleotide
  Antisense strand to SEQ ID NO: 219014
auauguacacacaugacuu

SEQ ID NO: 219016 - RNA, 19 nt, Artificial Sequence
  Description of Artificial Sequence: Synthetic oligonucleotide
  Sense strand starting at position 1187 of SEQ ID NO: 2820
agauauguguuacuaaagu

SEQ ID NO: 219017 - RNA, 19 nt, Artificial Sequence
  Description of Artificial Sequence: Synthetic oligonucleotide
  Antisense strand to SEQ ID NO: 219016
acuuuaguaacacauaucu

SEQ ID NO: 219018 - RNA, 19 nt, Artificial Sequence
  Description of Artificial Sequence: Synthetic oligonucleotide
  Sense strand starting at position 1578 of SEQ ID NO: 2820
aucugacuacaucgacaau

SEQ ID NO: 219019 - RNA, 19 nt, Artificial Sequence
  Description of Artificial Sequence: Synthetic oligonucleotide
  Antisense strand to SEQ ID NO: 219018
auugucgauguagucagau

SEQ ID NO: 219020 - RNA, 19 nt, Artificial Sequence
  Description of Artificial Sequence: Synthetic oligonucleotide
  Sense strand starting at position 1589 of SEQ ID NO: 2820
ucgacaauuuaaucgcauu

SEQ ID NO: 219021 - RNA, 19 nt, Artificial Sequence
  Description of Artificial Sequence: Synthetic oligonucleotide
  Antisense strand to SEQ ID NO: 219020
aaugcgauuaaauugucga

SEQ ID NO: 219022 - RNA, 19 nt, Artificial Sequence
  Description of Artificial Sequence: Synthetic oligonucleotide
  Sense strand starting at position 1595 of SEQ ID NO: 2820
auuuaaucgcauuggguca

SEQ ID NO: 219023 - RNA, 19 nt, Artificial Sequence
  Description of Artificial Sequence: Synthetic oligonucleotide
  Antisense strand to SEQ ID NO: 219022
ugacccaaugcgauuaaau

SEQ ID NO: 219024 - RNA, 19 nt, Artificial Sequence
  Description of Artificial Sequence: Synthetic oligonucleotide
  Sense strand starting at position 1714 of SEQ ID NO: 2820
caaggaaguguuggaguaa

SEQ ID NO: 219025 - RNA, 19 nt, Artificial Sequence
  Description of Artificial Sequence: Synthetic oligonucleotide
  Antisense strand to SEQ ID NO: 219024
uuacuccaacacuuccuug

SEQ ID NO: 219026 - RNA, 19 nt, Artificial Sequence
  Description of Artificial Sequence: Synthetic oligonucleotide
  Sense strand starting at position 1995 of SEQ ID NO: 2820
ugaggcugccuauauguga

SEQ ID NO: 219027 - RNA, 19 nt, Artificial Sequence
  Description of Artificial Sequence: Synthetic oligonucleotide
  Antisense strand to SEQ ID NO: 219026
ucacauauaggcagccuca

SEQ ID NO: 219028 - RNA, 19 nt, Artificial Sequence
  Description of Artificial Sequence: Synthetic oligonucleotide
  Sense strand starting at position 2002 of SEQ ID NO: 2820
gccuauaugugaucacaug

SEQ ID NO: 219029 - RNA, 19 nt, Artificial Sequence
  Description of Artificial Sequence: Synthetic oligonucleotide
  Antisense strand to SEQ ID NO: 219028
caugugaucacauauaggc

SEQ ID NO: 219030 - RNA, 19 nt, Artificial Sequence
  Description of Artificial Sequence: Synthetic oligonucleotide
  Sense strand starting at position 2008 of SEQ ID NO: 2820
augugaucacauggaguuu

SEQ ID NO: 219031 - RNA, 19 nt, Artificial Sequence
  Description of Artificial Sequence: Synthetic oligonucleotide
  Antisense strand to SEQ ID NO: 219030
aaacuccaugugaucacau

SEQ ID NO: 219032 - RNA, 19 nt, Artificial Sequence
  Description of Artificial Sequence: Synthetic oligonucleotide
  Sense strand starting at position 2116 of SEQ ID NO: 2820
uaaggaagcugcucuaagu

SEQ ID NO: 219033 - RNA, 19 nt, Artificial Sequence
  Description of Artificial Sequence: Synthetic oligonucleotide
  Antisense strand to SEQ ID NO: 219032
acuuagagcagcuuccuua

SEQ ID NO: 219034 - RNA, 19 nt, Artificial Sequence
  Description of Artificial Sequence: Synthetic oligonucleotide
  Sense strand starting at position 2126 of SEQ ID NO: 2820
gcucuaagucauuaaugca

SEQ ID NO: 219035 - RNA, 19 nt, Artificial Sequence
  Description of Artificial Sequence: Synthetic oligonucleotide
  Antisense strand to SEQ ID NO: 219034
ugcauuaaugacuuagagc

SEQ ID NO: 219036 - RNA, 19 nt, Artificial Sequence
  Description of Artificial Sequence: Synthetic oligonucleotide
  Sense strand starting at position 3164 of SEQ ID NO: 2820
guaacuuaacggcacuuau

SEQ ID NO: 219037 - RNA, 19 nt, Artificial Sequence
  Description of Artificial Sequence: Synthetic oligonucleotide
  Antisense strand to SEQ ID NO: 219036
auaagugccguuaaguuac

SEQ ID NO: 219038 - RNA, 19 nt, Artificial Sequence
  Description of Artificial Sequence: Synthetic oligonucleotide
  Sense strand starting at position 3221 of SEQ ID NO: 2820
uguauauuugcuuaagccu

SEQ ID NO: 219039 - RNA, 19 nt, Artificial Sequence
  Description of Artificial Sequence: Synthetic oligonucleotide
  Antisense strand to SEQ ID NO: 219038
aggcuuaagcaaauauaca

SEQ ID NO: 219040 - RNA, 19 nt, Artificial Sequence
  Description of Artificial Sequence: Synthetic oligonucleotide
  Sense strand starting at position 3235 of SEQ ID NO: 2820
agccuuccauuaguaagaa

SEQ ID NO: 219041 - RNA, 19 nt, Artificial Sequence
  Description of Artificial Sequence: Synthetic oligonucleotide
  Antisense strand to SEQ ID NO: 219040
uucuuacuaauggaaggcu

SEQ ID NO: 219042 - RNA, 19 nt, Artificial Sequence
  Description of Artificial Sequence: Synthetic oligonucleotide
  Sense strand starting at position 3331 of SEQ ID NO: 2820
agaauagguaaguaugguu

SEQ ID NO: 219043 - RNA, 19 nt, Artificial Sequence
  Description of Artificial Sequence: Synthetic oligonucleotide
  Antisense strand to SEQ ID NO: 219042
aaccauacuuaccuauucu

SEQ ID NO: 219044 - RNA, 19 nt, Artificial Sequence
  Description of Artificial Sequence: Synthetic oligonucleotide
  Sense strand starting at position 3336 of SEQ ID NO: 2820
agguaaguaugguuaagua

SEQ ID NO: 219045 - RNA, 19 nt, Artificial Sequence
  Description of Artificial Sequence: Synthetic oligonucleotide
  Antisense strand to SEQ ID NO: 219044
uacuuaaccauacuuaccu

SEQ ID NO: 219046 - RNA, 19 nt, Artificial Sequence
  Description of Artificial Sequence: Synthetic oligonucleotide
  Sense strand starting at position 3406 of SEQ ID NO: 2820
uaggguuagcauugaucua

SEQ ID NO: 219047 - RNA, 19 nt, Artificial Sequence
  Description of Artificial Sequence: Synthetic oligonucleotide
  Antisense strand to SEQ ID NO: 219046
uagaucaaugcuaacccua

SEQ ID NO: 219048 - RNA, 19 nt, Artificial Sequence
  Description of Artificial Sequence: Synthetic oligonucleotide
  Sense strand starting at position 3413 of SEQ ID NO: 2820
agcauugaucuagaauguu

SEQ ID NO: 219049 - RNA, 19 nt, Artificial Sequence
  Description of Artificial Sequence: Synthetic oligonucleotide
  Antisense strand to SEQ ID NO: 219048
aacauucuagaucaaugcu

SEQ ID NO: 219050 - RNA, 19 nt, Artificial Sequence
  Description of Artificial Sequence: Synthetic oligonucleotide
  Sense strand starting at position 3419 of SEQ ID NO: 2820
gaucuagaauguuuaugac

SEQ ID NO: 219051 - RNA, 19 nt, Artificial Sequence
  Description of Artificial Sequence: Synthetic oligonucleotide
  Antisense strand to SEQ ID NO: 219050
gucauaaacauucuagauc

SEQ ID NO: 219052 - RNA, 19 nt, Artificial Sequence
  Description of Artificial Sequence: Synthetic oligonucleotide
  Sense strand starting at position 3636 of SEQ ID NO: 2820
acuucuggguucuuaagau

SEQ ID NO: 219053 - RNA, 19 nt, Artificial Sequence
  Description of Artificial Sequence: Synthetic oligonucleotide
  Antisense strand to SEQ ID NO: 219052
aucuuaagaacccagaagu

SEQ ID NO: 219054 - RNA, 19 nt, Artificial Sequence
  Description of Artificial Sequence: Synthetic oligonucleotide
  Sense strand starting at position 3642 of SEQ ID NO: 2820
ggguucuuaagauauguac

SEQ ID NO: 219055 - RNA, 19 nt, Artificial Sequence
  Description of Artificial Sequence: Synthetic oligonucleotide
  Antisense strand to SEQ ID NO: 219054
guacauaucuuaagaaccc

SEQ ID NO: 219056 - RNA, 19 nt, Artificial Sequence
  Description of Artificial Sequence: Synthetic oligonucleotide
  Sense strand starting at position 3656 of SEQ ID NO: 2820
uguacauccuaguuaauau

SEQ ID NO: 219057 - RNA, 19 nt, Artificial Sequence
  Description of Artificial Sequence: Synthetic oligonucleotide
  Antisense strand to SEQ ID NO: 219056
auauuaacuaggauguaca

SEQ ID NO: 219058 - RNA, 19 nt, Artificial Sequence
  Description of Artificial Sequence: Synthetic oligonucleotide
  Sense strand starting at position 3694 of SEQ ID NO: 2820
gcuaauguacaaggaagua

SEQ ID NO: 219059 - RNA, 19 nt, Artificial Sequence
  Description of Artificial Sequence: Synthetic oligonucleotide
  Antisense strand to SEQ ID NO: 219058
uacuuccuuguacauuagc

SEQ ID NO: 219060 - RNA, 19 nt, Artificial Sequence
  Description of Artificial Sequence: Synthetic oligonucleotide
  Sense strand starting at position 3883 of SEQ ID NO: 2820
auaugugaaauuugugugu

SEQ ID NO: 219061 - RNA, 19 nt, Artificial Sequence
  Description of Artificial Sequence: Synthetic oligonucleotide
  Antisense strand to SEQ ID NO: 219060
acacacaaauuucacauau

SEQ ID NO: 219062 - RNA, 19 nt, Artificial Sequence
  Description of Artificial Sequence: Synthetic oligonucleotide
  Sense strand starting at position 3886 of SEQ ID NO: 2820
ugugaaauuuguguguaua

SEQ ID NO: 219063 - RNA, 19 nt, Artificial Sequence
  Description of Artificial Sequence: Synthetic oligonucleotide
  Antisense strand to SEQ ID NO: 219062
uauacacacaaauuucaca

SEQ ID NO: 219064 - RNA, 19 nt, Artificial Sequence
  Description of Artificial Sequence: Synthetic oligonucleotide
  Sense strand starting at position 3887 of SEQ ID NO: 2820
gugaaauuuguguguauau

SEQ ID NO: 219065 - RNA, 19 nt, Artificial Sequence
  Description of Artificial Sequence: Synthetic oligonucleotide
  Antisense strand to SEQ ID NO: 219064
auauacacacaaauuucac

SEQ ID NO: 219066 - RNA, 19 nt, Artificial Sequence
  Description of Artificial Sequence: Synthetic oligonucleotide
  Sense strand starting at position 817 of SEQ ID NO: 2821
acuagaggcuucucgguuu

SEQ ID NO: 219067 - RNA, 19 nt, Artificial Sequence
  Description of Artificial Sequence: Synthetic oligonucleotide
  Antisense strand to SEQ ID NO: 219066
aaaccgagaagccucuagu

SEQ ID NO: 219068 - RNA, 19 nt, Artificial Sequence
  Description of Artificial Sequence: Synthetic oligonucleotide
  Sense strand starting at position 829 of SEQ ID NO: 2821
ucgguuuccucguugagga

SEQ ID NO: 219069 - RNA, 19 nt, Artificial Sequence
  Description of Artificial Sequence: Synthetic oligonucleotide
  Antisense strand to SEQ ID NO: 219068
uccucaacgaggaaaccga

SEQ ID NO: 219070 - RNA, 19 nt, Artificial Sequence
  Description of Artificial Sequence: Synthetic oligonucleotide
  Sense strand starting at position 839 of SEQ ID NO: 2821
cguugaggacuuggagaua

SEQ ID NO: 219071 - RNA, 19 nt, Artificial Sequence
  Description of Artificial Sequence: Synthetic oligonucleotide
  Antisense strand to SEQ ID NO: 219070
uaucuccaaguccucaacg

SEQ ID NO: 219072 - RNA, 19 nt, Artificial Sequence
  Description of Artificial Sequence: Synthetic oligonucleotide
  Sense strand starting at position 893 of SEQ ID NO: 2821
gucugguggucgcagagau

SEQ ID NO: 219073 - RNA, 19 nt, Artificial Sequence
  Description of Artificial Sequence: Synthetic oligonucleotide
  Antisense strand to SEQ ID NO: 219072
aucucugcgaccaccagac

SEQ ID NO: 219074 - RNA, 19 nt, Artificial Sequence
  Description of Artificial Sequence: Synthetic oligonucleotide
  Sense strand starting at position 894 of SEQ ID NO: 2821
ucugguggucgcagagauc

SEQ ID NO: 219075 - RNA, 19 nt, Artificial Sequence
  Description of Artificial Sequence: Synthetic oligonucleotide
  Antisense strand to SEQ ID NO: 219074
gaucucugcgaccaccaga

SEQ ID NO: 219076 - RNA, 19 nt, Artificial Sequence
  Description of Artificial Sequence: Synthetic oligonucleotide
  Sense strand starting at position 952 of SEQ ID NO: 2821
gcccgaaacagcugugcaa

SEQ ID NO: 219077 - RNA, 19 nt, Artificial Sequence
  Description of Artificial Sequence: Synthetic oligonucleotide
  Antisense strand to SEQ ID NO: 219076
uugcacagcuguuucgggc

SEQ ID NO: 219078 - RNA, 19 nt, Artificial Sequence
  Description of Artificial Sequence: Synthetic oligonucleotide
  Sense strand starting at position 1036 of SEQ ID NO: 2821
cggucuguaggacgugaaa

SEQ ID NO: 219079 - RNA, 19 nt, Artificial Sequence
  Description of Artificial Sequence: Synthetic oligonucleotide
  Antisense strand to SEQ ID NO: 219078
uuucacguccuacagaccg

SEQ ID NO: 219080 - RNA, 19 nt, Artificial Sequence
  Description of Artificial Sequence: Synthetic oligonucleotide
  Sense strand starting at position 1038 of SEQ ID NO: 2821
gucuguaggacgugaaauu

SEQ ID NO: 219081 - RNA, 19 nt, Artificial Sequence
  Description of Artificial Sequence: Synthetic oligonucleotide
  Antisense strand to SEQ ID NO: 219080
aauuucacguccuacagac

SEQ ID NO: 219082 - RNA, 19 nt, Artificial Sequence
  Description of Artificial Sequence: Synthetic oligonucleotide
  Sense strand starting at position 1049 of SEQ ID NO: 2821
gugaaauucuaacucucug

SEQ ID NO: 219083 - RNA, 19 nt, Artificial Sequence
  Description of Artificial Sequence: Synthetic oligonucleotide
  Antisense strand to SEQ ID NO: 219082
cagagaguuagaauuucac

SEQ ID NO: 219084 - RNA, 19 nt, Artificial Sequence
  Description of Artificial Sequence: Synthetic oligonucleotide
  Sense strand starting at position 1148 of SEQ ID NO: 2821
gcgcguucccgccugaagu

SEQ ID NO: 219085 - RNA, 19 nt, Artificial Sequence
  Description of Artificial Sequence: Synthetic oligonucleotide
  Antisense strand to SEQ ID NO: 219084
acuucaggcgggaacgcgc

SEQ ID NO: 219086 - RNA, 19 nt, Artificial Sequence
  Description of Artificial Sequence: Synthetic oligonucleotide
  Sense strand starting at position 1149 of SEQ ID NO: 2821
cgcguucccgccugaaguu

SEQ ID NO: 219087 - RNA, 19 nt, Artificial Sequence
  Description of Artificial Sequence: Synthetic oligonucleotide
  Antisense strand to SEQ ID NO: 219086
aacuucaggcgggaacgcg

SEQ ID NO: 219088 - RNA, 19 nt, Artificial Sequence
  Description of Artificial Sequence: Synthetic oligonucleotide
  Sense strand starting at position 1180 of SEQ ID NO: 2821
guuccuuucgcguagccaa

SEQ ID NO: 219089 - RNA, 19 nt, Artificial Sequence
  Description of Artificial Sequence: Synthetic oligonucleotide
  Antisense strand to SEQ ID NO: 219088
uuggcuacgcgaaaggaac

SEQ ID NO: 219090 - RNA, 19 nt, Artificial Sequence
  Description of Artificial Sequence: Synthetic oligonucleotide
  Sense strand starting at position 1455 of SEQ ID NO: 2821
cccugucuucucgcugcaa

SEQ ID NO: 219091 - RNA, 19 nt, Artificial Sequence
  Description of Artificial Sequence: Synthetic oligonucleotide
  Antisense strand to SEQ ID NO: 219090
uugcagcgagaagacaggg

SEQ ID NO: 219092 - RNA, 19 nt, Artificial Sequence
  Description of Artificial Sequence: Synthetic oligonucleotide
  Sense strand starting at position 2498 of SEQ ID NO: 2821
ccuggagcccuggacuuau

SEQ ID NO: 219093 - RNA, 19 nt, Artificial Sequence
  Description of Artificial Sequence: Synthetic oligonucleotide
  Antisense strand to SEQ ID NO: 219092
auaaguccagggcuccagg

SEQ ID NO: 219094 - RNA, 19 nt, Artificial Sequence
  Description of Artificial Sequence: Synthetic oligonucleotide
  Sense strand starting at position 2532 of SEQ ID NO: 2821
gcggguaguuaguuacgga

SEQ ID NO: 219095 - RNA, 19 nt, Artificial Sequence
  Description of Artificial Sequence: Synthetic oligonucleotide
  Antisense strand to SEQ ID NO: 219094
uccguaacuaacuacccgc

SEQ ID NO: 219096 - RNA, 19 nt, Artificial Sequence
  Description of Artificial Sequence: Synthetic oligonucleotide
  Sense strand starting at position 2536 of SEQ ID NO: 2821
guaguuaguuacggaguga

SEQ ID NO: 219097 - RNA, 19 nt, Artificial Sequence
  Description of Artificial Sequence: Synthetic oligonucleotide
  Antisense strand to SEQ ID NO: 219096
ucacuccguaacuaacuac

SEQ ID NO: 219098 - RNA, 19 nt, Artificial Sequence
  Description of Artificial Sequence: Synthetic oligonucleotide
  Sense strand starting at position 2590 of SEQ ID NO: 2821
cuucgaguguccucacugu

SEQ ID NO: 219099 - RNA, 19 nt, Artificial Sequence
  Description of Artificial Sequence: Synthetic oligonucleotide
  Antisense strand to SEQ ID NO: 219098
acagugaggacacucgaag

SEQ ID NO: 219100 - RNA, 19 nt, Artificial Sequence
  Description of Artificial Sequence: Synthetic oligonucleotide
  Sense strand starting at position 2788 of SEQ ID NO: 2821
uuggaagcgucucuuccaa

SEQ ID NO: 219101 - RNA, 19 nt, Artificial Sequence
  Description of Artificial Sequence: Synthetic oligonucleotide
  Antisense strand to SEQ ID NO: 219100
uuggaagagacgcuuccaa

SEQ ID NO: 219102 - RNA, 19 nt, Artificial Sequence
  Description of Artificial Sequence: Synthetic oligonucleotide
  Sense strand starting at position 2790 of SEQ ID NO: 2821
ggaagcgucucuuccaaca

SEQ ID NO: 219103 - RNA, 19 nt, Artificial Sequence
  Description of Artificial Sequence: Synthetic oligonucleotide
  Antisense strand to SEQ ID NO: 219102
uguuggaagagacgcuucc

SEQ ID NO: 219104 - RNA, 19 nt, Artificial Sequence
  Description of Artificial Sequence: Synthetic oligonucleotide
  Sense strand starting at position 3063 of SEQ ID NO: 2821
gacgccuuccaguguccaa

SEQ ID NO: 219105 - RNA, 19 nt, Artificial Sequence
  Description of Artificial Sequence: Synthetic oligonucleotide
  Antisense strand to SEQ ID NO: 219104
uuggacacuggaaggcguc

SEQ ID NO: 219106 - RNA, 19 nt, Artificial Sequence
  Description of Artificial Sequence: Synthetic oligonucleotide
  Sense strand starting at position 3229 of SEQ ID NO: 2821
agcuucaggucuuggcaga

SEQ ID NO: 219107 - RNA, 19 nt, Artificial Sequence
  Description of Artificial Sequence: Synthetic oligonucleotide
  Antisense strand to SEQ ID NO: 219106
ucugccaagaccugaagcu

SEQ ID NO: 219108 - RNA, 19 nt, Artificial Sequence
  Description of Artificial Sequence: Synthetic oligonucleotide
  Sense strand starting at position 3230 of SEQ ID NO: 2821
gcuucaggucuuggcagau

SEQ ID NO: 219109 - RNA, 19 nt, Artificial Sequence
  Description of Artificial Sequence: Synthetic oligonucleotide
  Antisense strand to SEQ ID NO: 219108
aucugccaagaccugaagc

SEQ ID NO: 219110 - RNA, 19 nt, Artificial Sequence
  Description of Artificial Sequence: Synthetic oligonucleotide
  Sense strand starting at position 178 of SEQ ID NO: 2822
cugacuucuggucaccuga

SEQ ID NO: 219111 - RNA, 19 nt, Artificial Sequence
  Description of Artificial Sequence: Synthetic oligonucleotide
  Antisense strand to SEQ ID NO: 219110
ucaggugaccagaagucag

SEQ ID NO: 219112 - RNA, 19 nt, Artificial Sequence
  Description of Artificial Sequence: Synthetic oligonucleotide
  Sense strand starting at position 237 of SEQ ID NO: 2822
ugcagaauccugcaugugu

SEQ ID NO: 219113 - RNA, 19 nt, Artificial Sequence
  Description of Artificial Sequence: Synthetic oligonucleotide
  Antisense strand to SEQ ID NO: 219112
acacaugcaggauucugca

SEQ ID NO: 219114 - RNA, 19 nt, Artificial Sequence
  Description of Artificial Sequence: Synthetic oligonucleotide
  Sense strand starting at position 316 of SEQ ID NO: 2822
gaaggcagcuccugacuuu

SEQ ID NO: 219115 - RNA, 19 nt, Artificial Sequence
  Description of Artificial Sequence: Synthetic oligonucleotide
  Antisense strand to SEQ ID NO: 219114
aaagucaggagcugccuuc

SEQ ID NO: 219116 - RNA, 19 nt, Artificial Sequence
  Description of Artificial Sequence: Synthetic oligonucleotide
  Sense strand starting at position 323 of SEQ ID NO: 2822
gcuccugacuuucucugaa

SEQ ID NO: 219117 - RNA, 19 nt, Artificial Sequence
  Description of Artificial Sequence: Synthetic oligonucleotide
  Antisense strand to SEQ ID NO: 219116
uucagagaaagucaggagc

SEQ ID NO: 219118 - RNA, 19 nt, Artificial Sequence
  Description of Artificial Sequence: Synthetic oligonucleotide
  Sense strand starting at position 397 of SEQ ID NO: 2822
auaggucuagcagguauua

SEQ ID NO: 219119 - RNA, 19 nt, Artificial Sequence
  Description of Artificial Sequence: Synthetic oligonucleotide
  Antisense strand to SEQ ID NO: 219118
uaauaccugcuagaccuau

SEQ ID NO: 219120 - RNA, 19 nt, Artificial Sequence
  Description of Artificial Sequence: Synthetic oligonucleotide
  Sense strand starting at position 1018 of SEQ ID NO: 2822
ccaagcgacucuuggaagu

SEQ ID NO: 219121 - RNA, 19 nt, Artificial Sequence
  Description of Artificial Sequence: Synthetic oligonucleotide
  Antisense strand to SEQ ID NO: 219120
acuuccaagagucgcuugg

SEQ ID NO: 219122 - RNA, 19 nt, Artificial Sequence
  Description of Artificial Sequence: Synthetic oligonucleotide
  Sense strand starting at position 1110 of SEQ ID NO: 2822
cuguguguuggcgggagau

SEQ ID NO: 219123 - RNA, 19 nt, Artificial Sequence
  Description of Artificial Sequence: Synthetic oligonucleotide
  Antisense strand to SEQ ID NO: 219122
aucucccgccaacacacag

SEQ ID NO: 219124 - RNA, 19 nt, Artificial Sequence
  Description of Artificial Sequence: Synthetic oligonucleotide
  Sense strand starting at position 1122 of SEQ ID NO: 2822
gggagaucccuccaagccu

SEQ ID NO: 219125 - RNA, 19 nt, Artificial Sequence
  Description of Artificial Sequence: Synthetic oligonucleotide
  Antisense strand to SEQ ID NO: 219124
aggcuuggagggaucuccc

SEQ ID NO: 219126 - RNA, 19 nt, Artificial Sequence
  Description of Artificial Sequence: Synthetic oligonucleotide
  Sense strand starting at position 1315 of SEQ ID NO: 2822
cgcaaugccugccaggaaa

SEQ ID NO: 219127 - RNA, 19 nt, Artificial Sequence
  Description of Artificial Sequence: Synthetic oligonucleotide
  Antisense strand to SEQ ID NO: 219126
uuuccuggcaggcauugcg

SEQ ID NO: 219128 - RNA, 19 nt, Artificial Sequence
  Description of Artificial Sequence: Synthetic oligonucleotide
  Sense strand starting at position 2234 of SEQ ID NO: 2822
acuagaggcuucucgguuu

SEQ ID NO: 219129 - RNA, 19 nt, Artificial Sequence
  Description of Artificial Sequence: Synthetic oligonucleotide
  Antisense strand to SEQ ID NO: 219128
aaaccgagaagccucuagu

SEQ ID NO: 219130 - RNA, 19 nt, Artificial Sequence
  Description of Artificial Sequence: Synthetic oligonucleotide
  Sense strand starting at position 2246 of SEQ ID NO: 2822
ucgguuuccucguugagga

SEQ ID NO: 219131 - RNA, 19 nt, Artificial Sequence
  Description of Artificial Sequence: Synthetic oligonucleotide
  Antisense strand to SEQ ID NO: 219130
uccucaacgaggaaaccga

SEQ ID NO: 219132 - RNA, 19 nt, Artificial Sequence
  Description of Artificial Sequence: Synthetic oligonucleotide
  Sense strand starting at position 2256 of SEQ ID NO: 2822
cguugaggacuuggagaua

SEQ ID NO: 219133 - RNA, 19 nt, Artificial Sequence
  Description of Artificial Sequence: Synthetic oligonucleotide
  Antisense strand to SEQ ID NO: 219132
uaucuccaaguccucaacg

SEQ ID NO: 219134 - RNA, 19 nt, Artificial Sequence
  Description of Artificial Sequence: Synthetic oligonucleotide
  Sense strand starting at position 2310 of SEQ ID NO: 2822
gucugguggucgcagagau

SEQ ID NO: 219135 - RNA, 19 nt, Artificial Sequence
  Description of Artificial Sequence: Synthetic oligonucleotide
  Antisense strand to SEQ ID NO: 219134
aucucugcgaccaccagac

SEQ ID NO: 219136 - RNA, 19 nt, Artificial Sequence
  Description of Artificial Sequence: Synthetic oligonucleotide
  Sense strand starting at position 2311 of SEQ ID NO: 2822
ucugguggucgcagagauc

SEQ ID NO: 219137 - RNA, 19 nt, Artificial Sequence
  Description of Artificial Sequence: Synthetic oligonucleotide
  Antisense strand to SEQ ID NO: 219136
gaucucugcgaccaccaga

SEQ ID NO: 219138 - RNA, 19 nt, Artificial Sequence
  Description of Artificial Sequence: Synthetic oligonucleotide
  Sense strand starting at position 2369 of SEQ ID NO: 2822
gcccgaaacagcugugcaa

SEQ ID NO: 219139 - RNA, 19 nt, Artificial Sequence
  Description of Artificial Sequence: Synthetic oligonucleotide
  Antisense strand to SEQ ID NO: 219138
uugcacagcuguuucgggc

SEQ ID NO: 219140 - RNA, 19 nt, Artificial Sequence
  Description of Artificial Sequence: Synthetic oligonucleotide
  Sense strand starting at position 2453 of SEQ ID NO: 2822
cggucuguaggacgugaaa

SEQ ID NO: 219141 - RNA, 19 nt, Artificial Sequence
  Description of Artificial Sequence: Synthetic oligonucleotide
  Antisense strand to SEQ ID NO: 219140
uuucacguccuacagaccg

SEQ ID NO: 219142 - RNA, 19 nt, Artificial Sequence
  Description of Artificial Sequence: Synthetic oligonucleotide
  Sense strand starting at position 2455 of SEQ ID NO: 2822
gucuguaggacgugaaauu

SEQ ID NO: 219143 - RNA, 19 nt, Artificial Sequence
  Description of Artificial Sequence: Synthetic oligonucleotide
  Antisense strand to SEQ ID NO: 219142
aauuucacguccuacagac

SEQ ID NO: 219144 - RNA, 19 nt, Artificial Sequence
  Description of Artificial Sequence: Synthetic oligonucleotide
  Sense strand starting at position 2466 of SEQ ID NO: 2822
gugaaauucuaacucucug

SEQ ID NO: 219145 - RNA, 19 nt, Artificial Sequence
  Description of Artificial Sequence: Synthetic oligonucleotide
  Antisense strand to SEQ ID NO: 219144
cagagaguuagaauuucac

SEQ ID NO: 219146 - RNA, 19 nt, Artificial Sequence
  Description of Artificial Sequence: Synthetic oligonucleotide
  Sense strand starting at position 2565 of SEQ ID NO: 2822
gcgcguucccgccugaagu

SEQ ID NO: 219147 - RNA, 19 nt, Artificial Sequence
  Description of Artificial Sequence: Synthetic oligonucleotide
  Antisense strand to SEQ ID NO: 219146
acuucaggcgggaacgcgc

SEQ ID NO: 219148 - RNA, 19 nt, Artificial Sequence
  Description of Artificial Sequence: Synthetic oligonucleotide
  Sense strand starting at position 2566 of SEQ ID NO: 2822
cgcguucccgccugaaguu

SEQ ID NO: 219149 - RNA, 19 nt, Artificial Sequence
  Description of Artificial Sequence: Synthetic oligonucleotide
  Antisense strand to SEQ ID NO: 219148
aacuucaggcgggaacgcg

SEQ ID NO: 219150 - RNA, 19 nt, Artificial Sequence
  Description of Artificial Sequence: Synthetic oligonucleotide
  Sense strand starting at position 2597 of SEQ ID NO: 2822
guuccuuucgcguagccaa

SEQ ID NO: 219151 - RNA, 19 nt, Artificial Sequence
  Description of Artificial Sequence: Synthetic oligonucleotide
  Antisense strand to SEQ ID NO: 219150
uuggcuacgcgaaaggaac

SEQ ID NO: 219152 - RNA, 19 nt, Artificial Sequence
  Description of Artificial Sequence: Synthetic oligonucleotide
  Sense strand starting at position 2872 of SEQ ID NO: 2822
cccugucuucucgcugcaa

SEQ ID NO: 219153 - RNA, 19 nt, Artificial Sequence
  Description of Artificial Sequence: Synthetic oligonucleotide
  Antisense strand to SEQ ID NO: 219152
uugcagcgagaagacaggg

SEQ ID NO: 219154 - RNA, 19 nt, Artificial Sequence
  Description of Artificial Sequence: Synthetic oligonucleotide
  Sense strand starting at position 3915 of SEQ ID NO: 2822
ccuggagcccuggacuuau

SEQ ID NO: 219155 - RNA, 19 nt, Artificial Sequence
  Description of Artificial Sequence: Synthetic oligonucleotide
  Antisense strand to SEQ ID NO: 219154
auaaguccagggcuccagg

SEQ ID NO: 219156 - RNA, 19 nt, Artificial Sequence
  Description of Artificial Sequence: Synthetic oligonucleotide
  Sense strand starting at position 3949 of SEQ ID NO: 2822
gcggguaguuaguuacgga

SEQ ID NO: 219157 - RNA, 19 nt, Artificial Sequence
  Description of Artificial Sequence: Synthetic oligonucleotide
  Antisense strand to SEQ ID NO: 219156
uccguaacuaacuacccgc

SEQ ID NO: 219158 - RNA, 19 nt, Artificial Sequence
  Description of Artificial Sequence: Synthetic oligonucleotide
  Sense strand starting at position 3953 of SEQ ID NO: 2822
guaguuaguuacggaguga

SEQ ID NO: 219159 - RNA, 19 nt, Artificial Sequence
  Description of Artificial Sequence: Synthetic oligonucleotide
  Antisense strand to SEQ ID NO: 219158
ucacuccguaacuaacuac

SEQ ID NO: 219160 - RNA, 19 nt, Artificial Sequence
  Description of Artificial Sequence: Synthetic oligonucleotide
  Sense strand starting at position 237 of SEQ ID NO: 2823
cuaucacucuggucugaau

SEQ ID NO: 219161 - RNA, 19 nt, Artificial Sequence
  Description of Artificial Sequence: Synthetic oligonucleotide
  Antisense strand to SEQ ID NO: 219160
auucagaccagagugauag

SEQ ID NO: 219162 - RNA, 19 nt, Artificial Sequence
  Description of Artificial Sequence: Synthetic oligonucleotide
  Sense strand starting at position 261 of SEQ ID NO: 2823
ggacacacuuuccugcuua

SEQ ID NO: 219163 - RNA, 19 nt, Artificial Sequence
  Description of Artificial Sequence: Synthetic oligonucleotide
  Antisense strand to SEQ ID NO: 219162
uaagcaggaaagugugucc

SEQ ID NO: 219164 - RNA, 19 nt, Artificial Sequence
  Description of Artificial Sequence: Synthetic oligonucleotide
  Sense strand starting at position 330 of SEQ ID NO: 2823
cgggacaucuguccucaga

SEQ ID NO: 219165 - RNA, 19 nt, Artificial Sequence
  Description of Artificial Sequence: Synthetic oligonucleotide
  Antisense strand to SEQ ID NO: 219164
ucugaggacagaugucccg

SEQ ID NO: 219166 - RNA, 19 nt, Artificial Sequence
  Description of Artificial Sequence: Synthetic oligonucleotide
  Sense strand starting at position 332 of SEQ ID NO: 2823
ggacaucuguccucagaag

SEQ ID NO: 219167 - RNA, 19 nt, Artificial Sequence
  Description of Artificial Sequence: Synthetic oligonucleotide
  Antisense strand to SEQ ID NO: 219166
cuucugaggacagaugucc

SEQ ID NO: 219168 - RNA, 19 nt, Artificial Sequence
  Description of Artificial Sequence: Synthetic oligonucleotide
  Sense strand starting at position 447 of SEQ ID NO: 2823
agagaugcccucugagcau

SEQ ID NO: 219169 - RNA, 19 nt, Artificial Sequence
  Description of Artificial Sequence: Synthetic oligonucleotide
  Antisense strand to SEQ ID NO: 219168
augcucagagggcaucucu

SEQ ID NO: 219170 - RNA, 19 nt, Artificial Sequence
  Description of Artificial Sequence: Synthetic oligonucleotide
  Sense strand starting at position 465 of SEQ ID NO: 2823
uccuuagcacugugauaac

SEQ ID NO: 219171 - RNA, 19 nt, Artificial Sequence
  Description of Artificial Sequence: Synthetic oligonucleotide
  Antisense strand to SEQ ID NO: 219170
guuaucacagugcuaagga

SEQ ID NO: 219172 - RNA, 19 nt, Artificial Sequence
  Description of Artificial Sequence: Synthetic oligonucleotide
  Sense strand starting at position 474 of SEQ ID NO: 2823
cugugauaacuccauugca

SEQ ID NO: 219173 - RNA, 19 nt, Artificial Sequence
  Description of Artificial Sequence: Synthetic oligonucleotide
  Antisense strand to SEQ ID NO: 219172
ugcaauggaguuaucacag

SEQ ID NO: 219174 - RNA, 19 nt, Artificial Sequence
  Description of Artificial Sequence: Synthetic oligonucleotide
  Sense strand starting at position 522 of SEQ ID NO: 2823
aguuauuugugagcuaauc

SEQ ID NO: 219175 - RNA, 19 nt, Artificial Sequence
  Description of Artificial Sequence: Synthetic oligonucleotide
  Antisense strand to SEQ ID NO: 219174
gauuagcucacaaauaacu

SEQ ID NO: 219176 - RNA, 19 nt, Artificial Sequence
  Description of Artificial Sequence: Synthetic oligonucleotide
  Sense strand starting at position 587 of SEQ ID NO: 2823
gugauuauagcccacccaa

SEQ ID NO: 219177 - RNA, 19 nt, Artificial Sequence
  Description of Artificial Sequence: Synthetic oligonucleotide
  Antisense strand to SEQ ID NO: 219176
uugggugggcuauaaucac

SEQ ID NO: 219178 - RNA, 19 nt, Artificial Sequence
  Description of Artificial Sequence: Synthetic oligonucleotide
  Sense strand starting at position 606 of SEQ ID NO: 2823
gugagcacucaauaaucuu

SEQ ID NO: 219179 - RNA, 19 nt, Artificial Sequence
  Description of Artificial Sequence: Synthetic oligonucleotide
  Antisense strand to SEQ ID NO: 219178
aagauuauugagugcucac

SEQ ID NO: 219180 - RNA, 19 nt, Artificial Sequence
  Description of Artificial Sequence: Synthetic oligonucleotide
  Sense strand starting at position 627 of SEQ ID NO: 2823
uuguauugacucuaagcuu

SEQ ID NO: 219181 - RNA, 19 nt, Artificial Sequence
  Description of Artificial Sequence: Synthetic oligonucleotide
  Antisense strand to SEQ ID NO: 219180
aagcuuagagucaauacaa

SEQ ID NO: 219182 - RNA, 19 nt, Artificial Sequence
  Description of Artificial Sequence: Synthetic oligonucleotide
  Sense strand starting at position 738 of SEQ ID NO: 2823
uccuguuacugguugagau

SEQ ID NO: 219183 - RNA, 19 nt, Artificial Sequence
  Description of Artificial Sequence: Synthetic oligonucleotide
  Antisense strand to SEQ ID NO: 219182
aucucaaccaguaacagga

SEQ ID NO: 219184 - RNA, 19 nt, Artificial Sequence
  Description of Artificial Sequence: Synthetic oligonucleotide
  Sense strand starting at position 739 of SEQ ID NO: 2823
ccuguuacugguugagaua

SEQ ID NO: 219185 - RNA, 19 nt, Artificial Sequence
  Description of Artificial Sequence: Synthetic oligonucleotide
  Antisense strand to SEQ ID NO: 219184
uaucucaaccaguaacagg

SEQ ID NO: 219186 - RNA, 19 nt, Artificial Sequence
  Description of Artificial Sequence: Synthetic oligonucleotide
  Sense strand starting at position 740 of SEQ ID NO: 2823
cuguuacugguugagauaa

SEQ ID NO: 219187 - RNA, 19 nt, Artificial Sequence
  Description of Artificial Sequence: Synthetic oligonucleotide
  Antisense strand to SEQ ID NO: 219186
uuaucucaaccaguaacag

SEQ ID NO: 219188 - RNA, 19 nt, Artificial Sequence
  Description of Artificial Sequence: Synthetic oligonucleotide
  Sense strand starting at position 913 of SEQ ID NO: 2823
augguuucuuaaccaagaa

SEQ ID NO: 219189 - RNA, 19 nt, Artificial Sequence
  Description of Artificial Sequence: Synthetic oligonucleotide
  Antisense strand to SEQ ID NO: 219188
uucuugguuaagaaaccau

SEQ ID NO: 219190 - RNA, 19 nt, Artificial Sequence
  Description of Artificial Sequence: Synthetic oligonucleotide
  Sense strand starting at position 998 of SEQ ID NO: 2823
uggugucagucucugaaga

SEQ ID NO: 219191 - RNA, 19 nt, Artificial Sequence
  Description of Artificial Sequence: Synthetic oligonucleotide
  Antisense strand to SEQ ID NO: 219190
ucuucagagacugacacca

SEQ ID NO: 219192 - RNA, 19 nt, Artificial Sequence
  Description of Artificial Sequence: Synthetic oligonucleotide
  Sense strand starting at position 999 of SEQ ID NO: 2823
ggugucagucucugaagag

SEQ ID NO: 219193 - RNA, 19 nt, Artificial Sequence
  Description of Artificial Sequence: Synthetic oligonucleotide
  Antisense strand to SEQ ID NO: 219192
cucuucagagacugacacc

SEQ ID NO: 219194 - RNA, 19 nt, Artificial Sequence
  Description of Artificial Sequence: Synthetic oligonucleotide
  Sense strand starting at position 1068 of SEQ ID NO: 2823
uuaaguauuguaugccaaa

SEQ ID NO: 219195 - RNA, 19 nt, Artificial Sequence
  Description of Artificial Sequence: Synthetic oligonucleotide
  Antisense strand to SEQ ID NO: 219194
uuuggcauacaauacuuaa

SEQ ID NO: 219196 - RNA, 19 nt, Artificial Sequence
  Description of Artificial Sequence: Synthetic oligonucleotide
  Sense strand starting at position 1163 of SEQ ID NO: 2823
uggcuaauuagcuaguaga

SEQ ID NO: 219197 - RNA, 19 nt, Artificial Sequence
  Description of Artificial Sequence: Synthetic oligonucleotide
  Antisense strand to SEQ ID NO: 219196
ucuacuagcuaauuagcca

SEQ ID NO: 219198 - RNA, 19 nt, Artificial Sequence
  Description of Artificial Sequence: Synthetic oligonucleotide
  Sense strand starting at position 1282 of SEQ ID NO: 2823
auaugaauccgaggaccuu

SEQ ID NO: 219199 - RNA, 19 nt, Artificial Sequence
  Description of Artificial Sequence: Synthetic oligonucleotide
  Antisense strand to SEQ ID NO: 219198
aagguccucggauucauau

SEQ ID NO: 219200 - RNA, 19 nt, Artificial Sequence
  Description of Artificial Sequence: Synthetic oligonucleotide
  Sense strand starting at position 1305 of SEQ ID NO: 2823
ccuugaauuguauagcaaa

SEQ ID NO: 219201 - RNA, 19 nt, Artificial Sequence
  Description of Artificial Sequence: Synthetic oligonucleotide
  Antisense strand to SEQ ID NO: 219200
uuugcuauacaauucaagg

SEQ ID NO: 219202 - RNA, 19 nt, Artificial Sequence
  Description of Artificial Sequence: Synthetic oligonucleotide
  Sense strand starting at position 1445 of SEQ ID NO: 2823
gucucauagaagggucuga

SEQ ID NO: 219203 - RNA, 19 nt, Artificial Sequence
  Description of Artificial Sequence: Synthetic oligonucleotide
  Antisense strand to SEQ ID NO: 219202
ucagacccuucuaugagac

SEQ ID NO: 219204 - RNA, 19 nt, Artificial Sequence
  Description of Artificial Sequence: Synthetic oligonucleotide
  Sense strand starting at position 1638 of SEQ ID NO: 2823
cuggcuuugcuauaaauca

SEQ ID NO: 219205 - RNA, 19 nt, Artificial Sequence
  Description of Artificial Sequence: Synthetic oligonucleotide
  Antisense strand to SEQ ID NO: 219204
ugauuuauagcaaagccag

SEQ ID NO: 219206 - RNA, 19 nt, Artificial Sequence
  Description of Artificial Sequence: Synthetic oligonucleotide
  Sense strand starting at position 1733 of SEQ ID NO: 2823
cucaccuuugcagaagaca

SEQ ID NO: 219207 - RNA, 19 nt, Artificial Sequence
  Description of Artificial Sequence: Synthetic oligonucleotide
  Antisense strand to SEQ ID NO: 219206
ugucuucugcaaaggugag

SEQ ID NO: 219208 - RNA, 19 nt, Artificial Sequence
  Description of Artificial Sequence: Synthetic oligonucleotide
  Sense strand starting at position 2041 of SEQ ID NO: 2823
aaaggaagccguggguuua

SEQ ID NO: 219209 - RNA, 19 nt, Artificial Sequence
  Description of Artificial Sequence: Synthetic oligonucleotide
  Antisense strand to SEQ ID NO: 219208
uaaacccacggcuuccuuu

SEQ ID NO: 219210 - RNA, 19 nt, Artificial Sequence
  Description of Artificial Sequence: Synthetic oligonucleotide
  Sense strand starting at position 2192 of SEQ ID NO: 2823
uggagaauuuccuggagua

SEQ ID NO: 219211 - RNA, 19 nt, Artificial Sequence
  Description of Artificial Sequence: Synthetic oligonucleotide
  Antisense strand to SEQ ID NO: 219210
uacuccaggaaauucucca

SEQ ID NO: 219212 - RNA, 19 nt, Artificial Sequence
  Description of Artificial Sequence: Synthetic oligonucleotide
  Sense strand starting at position 2208 of SEQ ID NO: 2823
guacaaggguccuccuaaa

SEQ ID NO: 219213 - RNA, 19 nt, Artificial Sequence
  Description of Artificial Sequence: Synthetic oligonucleotide
  Antisense strand to SEQ ID NO: 219212
uuuaggaggacccuuguac

SEQ ID NO: 219214 - RNA, 19 nt, Artificial Sequence
  Description of Artificial Sequence: Synthetic oligonucleotide
  Sense strand starting at position 2343 of SEQ ID NO: 2823
uugucuaggcaucauuaau

SEQ ID NO: 219215 - RNA, 19 nt, Artificial Sequence
  Description of Artificial Sequence: Synthetic oligonucleotide
  Antisense strand to SEQ ID NO: 219214
auuaaugaugccuagacaa

SEQ ID NO: 219216 - RNA, 19 nt, Artificial Sequence
  Description of Artificial Sequence: Synthetic oligonucleotide
  Sense strand starting at position 2366 of SEQ ID NO: 2823
acuguauucuaucugugaa

SEQ ID NO: 219217 - RNA, 19 nt, Artificial Sequence
  Description of Artificial Sequence: Synthetic oligonucleotide
  Antisense strand to SEQ ID NO: 219216
uucacagauagaauacagu

SEQ ID NO: 219218 - RNA, 19 nt, Artificial Sequence
  Description of Artificial Sequence: Synthetic oligonucleotide
  Sense strand starting at position 2394 of SEQ ID NO: 2823
uucuaauggucccuugaca

SEQ ID NO: 219219 - RNA, 19 nt, Artificial Sequence
  Description of Artificial Sequence: Synthetic oligonucleotide
  Antisense strand to SEQ ID NO: 219218
ugucaagggaccauuagaa

SEQ ID NO: 219220 - RNA, 19 nt, Artificial Sequence
  Description of Artificial Sequence: Synthetic oligonucleotide
  Sense strand starting at position 2626 of SEQ ID NO: 2823
agagauuagagccguccau

SEQ ID NO: 219221 - RNA, 19 nt, Artificial Sequence
  Description of Artificial Sequence: Synthetic oligonucleotide
  Antisense strand to SEQ ID NO: 219220
auggacggcucuaaucucu

SEQ ID NO: 219222 - RNA, 19 nt, Artificial Sequence
  Description of Artificial Sequence: Synthetic oligonucleotide
  Sense strand starting at position 2782 of SEQ ID NO: 2823
ugaggaccuuccuuaaauc

SEQ ID NO: 219223 - RNA, 19 nt, Artificial Sequence
  Description of Artificial Sequence: Synthetic oligonucleotide
  Antisense strand to SEQ ID NO: 219222
gauuuaaggaagguccuca

SEQ ID NO: 219224 - RNA, 19 nt, Artificial Sequence
  Description of Artificial Sequence: Synthetic oligonucleotide
  Sense strand starting at position 2852 of SEQ ID NO: 2823
guaauaugcccggaauucu

SEQ ID NO: 219225 - RNA, 19 nt, Artificial Sequence
  Description of Artificial Sequence: Synthetic oligonucleotide
  Antisense strand to SEQ ID NO: 219224
agaauuccgggcauauuac

SEQ ID NO: 219226 - RNA, 19 nt, Artificial Sequence
  Description of Artificial Sequence: Synthetic oligonucleotide
  Sense strand starting at position 2872 of SEQ ID NO: 2823
ugcacuuaggauugaauga

SEQ ID NO: 219227 - RNA, 19 nt, Artificial Sequence
  Description of Artificial Sequence: Synthetic oligonucleotide
  Antisense strand to SEQ ID NO: 219226
ucauucaauccuaagugca

SEQ ID NO: 219228 - RNA, 19 nt, Artificial Sequence
  Description of Artificial Sequence: Synthetic oligonucleotide
  Sense strand starting at position 2952 of SEQ ID NO: 2823
acaguuguaacagggaaua

SEQ ID NO: 219229 - RNA, 19 nt, Artificial Sequence
  Description of Artificial Sequence: Synthetic oligonucleotide
  Antisense strand to SEQ ID NO: 219228
uauucccuguuacaacugu

SEQ ID NO: 219230 - RNA, 19 nt, Artificial Sequence
  Description of Artificial Sequence: Synthetic oligonucleotide
  Sense strand starting at position 3041 of SEQ ID NO: 2823
gcagaauacucaccaaaug

SEQ ID NO: 219231 - RNA, 19 nt, Artificial Sequence
  Description of Artificial Sequence: Synthetic oligonucleotide
  Antisense strand to SEQ ID NO: 219230
cauuuggugaguauucugc

SEQ ID NO: 219232 - RNA, 19 nt, Artificial Sequence
  Description of Artificial Sequence: Synthetic oligonucleotide
  Sense strand starting at position 3355 of SEQ ID NO: 2823
guuggugugaugcacagaa

SEQ ID NO: 219233 - RNA, 19 nt, Artificial Sequence
  Description of Artificial Sequence: Synthetic oligonucleotide
  Antisense strand to SEQ ID NO: 219232
uucugugcaucacaccaac

SEQ ID NO: 219234 - RNA, 19 nt, Artificial Sequence
  Description of Artificial Sequence: Synthetic oligonucleotide
  Sense strand starting at position 3592 of SEQ ID NO: 2823
gagugagaucaaugcugga

SEQ ID NO: 219235 - RNA, 19 nt, Artificial Sequence
  Description of Artificial Sequence: Synthetic oligonucleotide
  Antisense strand to SEQ ID NO: 219234
uccagcauugaucucacuc

SEQ ID NO: 219236 - RNA, 19 nt, Artificial Sequence
  Description of Artificial Sequence: Synthetic oligonucleotide
  Sense strand starting at position 3596 of SEQ ID NO: 2823
gagaucaaugcuggaauug

SEQ ID NO: 219237 - RNA, 19 nt, Artificial Sequence
  Description of Artificial Sequence: Synthetic oligonucleotide
  Antisense strand to SEQ ID NO: 219236
caauuccagcauugaucuc

SEQ ID NO: 219238 - RNA, 19 nt, Artificial Sequence
  Description of Artificial Sequence: Synthetic oligonucleotide
  Sense strand starting at position 3695 of SEQ ID NO: 2823
acuuauuauugagaacaga

SEQ ID NO: 219239 - RNA, 19 nt, Artificial Sequence
  Description of Artificial Sequence: Synthetic oligonucleotide
  Antisense strand to SEQ ID NO: 219238
ucuguucucaauaauaagu

SEQ ID NO: 219240 - RNA, 19 nt, Artificial Sequence
  Description of Artificial Sequence: Synthetic oligonucleotide
  Sense strand starting at position 45 of SEQ ID NO: 2824
ucaauaauguguuccacag

SEQ ID NO: 219241 - RNA, 19 nt, Artificial Sequence
  Description of Artificial Sequence: Synthetic oligonucleotide
  Antisense strand to SEQ ID NO: 219240
cuguggaacacauuauuga

SEQ ID NO: 219242 - RNA, 19 nt, Artificial Sequence
  Description of Artificial Sequence: Synthetic oligonucleotide
  Sense strand starting at position 496 of SEQ ID NO: 2824
uuuccauugguguaagcca

SEQ ID NO: 219243 - RNA, 19 nt, Artificial Sequence
  Description of Artificial Sequence: Synthetic oligonucleotide
  Antisense strand to SEQ ID NO: 219242
uggcuuacaccaauggaaa

SEQ ID NO: 219244 - RNA, 19 nt, Artificial Sequence
  Description of Artificial Sequence: Synthetic oligonucleotide
  Sense strand starting at position 581 of SEQ ID NO: 2824
ggguaagggugucuguuaa

SEQ ID NO: 219245 - RNA, 19 nt, Artificial Sequence
  Description of Artificial Sequence: Synthetic oligonucleotide
  Antisense strand to SEQ ID NO: 219244
uuaacagacacccuuaccc

SEQ ID NO: 219246 - RNA, 19 nt, Artificial Sequence
  Description of Artificial Sequence: Synthetic oligonucleotide
  Sense strand starting at position 594 of SEQ ID NO: 2824
uguuaaaggcucuaaugca

SEQ ID NO: 219247 - RNA, 19 nt, Artificial Sequence
  Description of Artificial Sequence: Synthetic oligonucleotide
  Antisense strand to SEQ ID NO: 219246
ugcauuagagccuuuaaca

SEQ ID NO: 219248 - RNA, 19 nt, Artificial Sequence
  Description of Artificial Sequence: Synthetic oligonucleotide
  Sense strand starting at position 646 of SEQ ID NO: 2824
uguggaguauaaccucauu

SEQ ID NO: 219249 - RNA, 19 nt, Artificial Sequence
  Description of Artificial Sequence: Synthetic oligonucleotide
  Antisense strand to SEQ ID NO: 219248
aaugagguuauacuccaca

SEQ ID NO: 219250 - RNA, 19 nt, Artificial Sequence
  Description of Artificial Sequence: Synthetic oligonucleotide
  Sense strand starting at position 694 of SEQ ID NO: 2824
uugagaaguuaacccauga

SEQ ID NO: 219251 - RNA, 19 nt, Artificial Sequence
  Description of Artificial Sequence: Synthetic oligonucleotide
  Antisense strand to SEQ ID NO: 219250
ucauggguuaacuucucaa

SEQ ID NO: 219252 - RNA, 19 nt, Artificial Sequence
  Description of Artificial Sequence: Synthetic oligonucleotide
  Sense strand starting at position 761 of SEQ ID NO: 2824
ccuuucuaucuugguauuu

SEQ ID NO: 219253 - RNA, 19 nt, Artificial Sequence
  Description of Artificial Sequence: Synthetic oligonucleotide
  Antisense strand to SEQ ID NO: 219252
aaauaccaagauagaaagg

SEQ ID NO: 219254 - RNA, 19 nt, Artificial Sequence
  Description of Artificial Sequence: Synthetic oligonucleotide
  Sense strand starting at position 838 of SEQ ID NO: 2824
gagaguuucugccuuugaa

SEQ ID NO: 219255 - RNA, 19 nt, Artificial Sequence
  Description of Artificial Sequence: Synthetic oligonucleotide
  Antisense strand to SEQ ID NO: 219254
uucaaaggcagaaacucuc

SEQ ID NO: 219256 - RNA, 19 nt, Artificial Sequence
  Description of Artificial Sequence: Synthetic oligonucleotide
  Sense strand starting at position 1039 of SEQ ID NO: 2824
gugguuucucacggagaca

SEQ ID NO: 219257 - RNA, 19 nt, Artificial Sequence
  Description of Artificial Sequence: Synthetic oligonucleotide
  Antisense strand to SEQ ID NO: 219256
ugucuccgugagaaaccac

SEQ ID NO: 219258 - RNA, 19 nt, Artificial Sequence
  Description of Artificial Sequence: Synthetic oligonucleotide
  Sense strand starting at position 1040 of SEQ ID NO: 2824
ugguuucucacggagacaa

SEQ ID NO: 219259 - RNA, 19 nt, Artificial Sequence
  Description of Artificial Sequence: Synthetic oligonucleotide
  Antisense strand to SEQ ID NO: 219258
uugucuccgugagaaacca

SEQ ID NO: 219260 - RNA, 19 nt, Artificial Sequence
  Description of Artificial Sequence: Synthetic oligonucleotide
  Sense strand starting at position 1216 of SEQ ID NO: 2824
uccacagauucuucuucga

SEQ ID NO: 219261 - RNA, 19 nt, Artificial Sequence
  Description of Artificial Sequence: Synthetic oligonucleotide
  Antisense strand to SEQ ID NO: 219260
ucgaagaagaaucugugga

SEQ ID NO: 219262 - RNA, 19 nt, Artificial Sequence
  Description of Artificial Sequence: Synthetic oligonucleotide
  Sense strand starting at position 1247 of SEQ ID NO: 2824
uccaguucccaguacucua

SEQ ID NO: 219263 - RNA, 19 nt, Artificial Sequence
  Description of Artificial Sequence: Synthetic oligonucleotide
  Antisense strand to SEQ ID NO: 219262
uagaguacugggaacugga

SEQ ID NO: 219264 - RNA, 19 nt, Artificial Sequence
  Description of Artificial Sequence: Synthetic oligonucleotide
  Sense strand starting at position 2476 of SEQ ID NO: 2824
aagggagguuuguugggau

SEQ ID NO: 219265 - RNA, 19 nt, Artificial Sequence
  Description of Artificial Sequence: Synthetic oligonucleotide
  Antisense strand to SEQ ID NO: 219264
aucccaacaaaccucccuu

SEQ ID NO: 219266 - RNA, 19 nt, Artificial Sequence
  Description of Artificial Sequence: Synthetic oligonucleotide
  Sense strand starting at position 2478 of SEQ ID NO: 2824
gggagguuuguugggaugu

SEQ ID NO: 219267 - RNA, 19 nt, Artificial Sequence
  Description of Artificial Sequence: Synthetic oligonucleotide
  Antisense strand to SEQ ID NO: 219266
acaucccaacaaaccuccc

SEQ ID NO: 219268 - RNA, 19 nt, Artificial Sequence
  Description of Artificial Sequence: Synthetic oligonucleotide
  Sense strand starting at position 2516 of SEQ ID NO: 2824
aagggagauuuggacuuua

SEQ ID NO: 219269 - RNA, 19 nt, Artificial Sequence
  Description of Artificial Sequence: Synthetic oligonucleotide
  Antisense strand to SEQ ID NO: 219268
uaaaguccaaaucucccuu

SEQ ID NO: 219270 - RNA, 19 nt, Artificial Sequence
  Description of Artificial Sequence: Synthetic oligonucleotide
  Sense strand starting at position 2587 of SEQ ID NO: 2824
uuaacaagccuuuguugaa

SEQ ID NO: 219271 - RNA, 19 nt, Artificial Sequence
  Description of Artificial Sequence: Synthetic oligonucleotide
  Antisense strand to SEQ ID NO: 219270
uucaacaaaggcuuguuaa

SEQ ID NO: 219272 - RNA, 19 nt, Artificial Sequence
  Description of Artificial Sequence: Synthetic oligonucleotide
  Sense strand starting at position 2650 of SEQ ID NO: 2824
ggauauuacuuggcuccua

SEQ ID NO: 219273 - RNA, 19 nt, Artificial Sequence
  Description of Artificial Sequence: Synthetic oligonucleotide
  Antisense strand to SEQ ID NO: 219272
uaggagccaaguaauaucc

SEQ ID NO: 219274 - RNA, 19 nt, Artificial Sequence
  Description of Artificial Sequence: Synthetic oligonucleotide
  Sense strand starting at position 2669 of SEQ ID NO: 2824
guuuguaccagacacugua

SEQ ID NO: 219275 - RNA, 19 nt, Artificial Sequence
  Description of Artificial Sequence: Synthetic oligonucleotide
  Antisense strand to SEQ ID NO: 219274
uacagugucugguacaaac

SEQ ID NO: 219276 - RNA, 19 nt, Artificial Sequence
  Description of Artificial Sequence: Synthetic oligonucleotide
  Sense strand starting at position 2711 of SEQ ID NO: 2824
aaauguucguccucugaga

SEQ ID NO: 219277 - RNA, 19 nt, Artificial Sequence
  Description of Artificial Sequence: Synthetic oligonucleotide
  Antisense strand to SEQ ID NO: 219276
ucucagaggacgaacauuu

SEQ ID NO: 219278 - RNA, 19 nt, Artificial Sequence
  Description of Artificial Sequence: Synthetic oligonucleotide
  Sense strand starting at position 2971 of SEQ ID NO: 2824
ggaaguuuaguaugacaca

SEQ ID NO: 219279 - RNA, 19 nt, Artificial Sequence
  Description of Artificial Sequence: Synthetic oligonucleotide
  Antisense strand to SEQ ID NO: 219278
ugugucauacuaaacuucc

SEQ ID NO: 219280 - RNA, 19 nt, Artificial Sequence
  Description of Artificial Sequence: Synthetic oligonucleotide
  Sense strand starting at position 3021 of SEQ ID NO: 2824
uugguauccuaguccacua

SEQ ID NO: 219281 - RNA, 19 nt, Artificial Sequence
  Description of Artificial Sequence: Synthetic oligonucleotide
  Antisense strand to SEQ ID NO: 219280
uaguggacuaggauaccaa

SEQ ID NO: 219282 - RNA, 19 nt, Artificial Sequence
  Description of Artificial Sequence: Synthetic oligonucleotide
  Sense strand starting at position 3040 of SEQ ID NO: 2824
gcaucagugcguguguuca

SEQ ID NO: 219283 - RNA, 19 nt, Artificial Sequence
  Description of Artificial Sequence: Synthetic oligonucleotide
  Antisense strand to SEQ ID NO: 219282
ugaacacacgcacugaugc

SEQ ID NO: 219284 - RNA, 19 nt, Artificial Sequence
  Description of Artificial Sequence: Synthetic oligonucleotide
  Sense strand starting at position 3048 of SEQ ID NO: 2824
gcguguguucaugccgaca

SEQ ID NO: 219285 - RNA, 19 nt, Artificial Sequence
  Description of Artificial Sequence: Synthetic oligonucleotide
  Antisense strand to SEQ ID NO: 219284
ugucggcaugaacacacgc

SEQ ID NO: 219286 - RNA, 19 nt, Artificial Sequence
  Description of Artificial Sequence: Synthetic oligonucleotide
  Sense strand starting at position 3067 of SEQ ID NO: 2824
cuuggauggcuuuauguca

SEQ ID NO: 219287 - RNA, 19 nt, Artificial Sequence
  Description of Artificial Sequence: Synthetic oligonucleotide
  Antisense strand to SEQ ID NO: 219286
ugacauaaagccauccaag

SEQ ID NO: 219288 - RNA, 19 nt, Artificial Sequence
  Description of Artificial Sequence: Synthetic oligonucleotide
  Sense strand starting at position 3083 of SEQ ID NO: 2824
ucacuuagugcaugcauuu

SEQ ID NO: 219289 - RNA, 19 nt, Artificial Sequence
  Description of Artificial Sequence: Synthetic oligonucleotide
  Antisense strand to SEQ ID NO: 219288
aaaugcaugcacuaaguga

SEQ ID NO: 219290 - RNA, 19 nt, Artificial Sequence
  Description of Artificial Sequence: Synthetic oligonucleotide
  Sense strand starting at position 3162 of SEQ ID NO: 2824
ccaaguucgcgucugcaau

SEQ ID NO: 219291 - RNA, 19 nt, Artificial Sequence
  Description of Artificial Sequence: Synthetic oligonucleotide
  Antisense strand to SEQ ID NO: 219290
auugcagacgcgaacuugg

SEQ ID NO: 219292 - RNA, 19 nt, Artificial Sequence
  Description of Artificial Sequence: Synthetic oligonucleotide
  Sense strand starting at position 3170 of SEQ ID NO: 2824
gcgucugcaauuguuugaa

SEQ ID NO: 219293 - RNA, 19 nt, Artificial Sequence
  Description of Artificial Sequence: Synthetic oligonucleotide
  Antisense strand to SEQ ID NO: 219292
uucaaacaauugcagacgc

SEQ ID NO: 219294 - RNA, 19 nt, Artificial Sequence
  Description of Artificial Sequence: Synthetic oligonucleotide
  Sense strand starting at position 3238 of SEQ ID NO: 2824
gagggauaccucuguccau

SEQ ID NO: 219295 - RNA, 19 nt, Artificial Sequence
  Description of Artificial Sequence: Synthetic oligonucleotide
  Antisense strand to SEQ ID NO: 219294
auggacagagguaucccuc

SEQ ID NO: 219296 - RNA, 19 nt, Artificial Sequence
  Description of Artificial Sequence: Synthetic oligonucleotide
  Sense strand starting at position 3347 of SEQ ID NO: 2824
acaggagucaccggauauu

SEQ ID NO: 219297 - RNA, 19 nt, Artificial Sequence
  Description of Artificial Sequence: Synthetic oligonucleotide
  Antisense strand to SEQ ID NO: 219296
aauauccggugacuccugu

SEQ ID NO: 219298 - RNA, 19 nt, Artificial Sequence
  Description of Artificial Sequence: Synthetic oligonucleotide
  Sense strand starting at position 3356 of SEQ ID NO: 2824
accggauauuggcuuaaga

SEQ ID NO: 219299 - RNA, 19 nt, Artificial Sequence
  Description of Artificial Sequence: Synthetic oligonucleotide
  Antisense strand to SEQ ID NO: 219298
ucuuaagccaauauccggu

SEQ ID NO: 219300 - RNA, 19 nt, Artificial Sequence
  Description of Artificial Sequence: Synthetic oligonucleotide
  Sense strand starting at position 3372 of SEQ ID NO: 2824
agaagaaucuuagcacgca

SEQ ID NO: 219301 - RNA, 19 nt, Artificial Sequence
  Description of Artificial Sequence: Synthetic oligonucleotide
  Antisense strand to SEQ ID NO: 219300
ugcgugcuaagauucuucu

SEQ ID NO: 219302 - RNA, 19 nt, Artificial Sequence
  Description of Artificial Sequence: Synthetic oligonucleotide
  Sense strand starting at position 3446 of SEQ ID NO: 2824
uucuuagacugccuauaga

SEQ ID NO: 219303 - RNA, 19 nt, Artificial Sequence
  Description of Artificial Sequence: Synthetic oligonucleotide
  Antisense strand to SEQ ID NO: 219302
ucuauaggcagucuaagaa

SEQ ID NO: 219304 - RNA, 19 nt, Artificial Sequence
  Description of Artificial Sequence: Synthetic oligonucleotide
  Sense strand starting at position 3515 of SEQ ID NO: 2824
cgccaaaugauuugugcca

SEQ ID NO: 219305 - RNA, 19 nt, Artificial Sequence
  Description of Artificial Sequence: Synthetic oligonucleotide
  Antisense strand to SEQ ID NO: 219304
uggcacaaaucauuuggcg

SEQ ID NO: 219306 - RNA, 19 nt, Artificial Sequence
  Description of Artificial Sequence: Synthetic oligonucleotide
  Sense strand starting at position 3516 of SEQ ID NO: 2824
gccaaaugauuugugccaa

SEQ ID NO: 219307 - RNA, 19 nt, Artificial Sequence
  Description of Artificial Sequence: Synthetic oligonucleotide
  Antisense strand to SEQ ID NO: 219306
uuggcacaaaucauuuggc

SEQ ID NO: 219308 - RNA, 19 nt, Artificial Sequence
  Description of Artificial Sequence: Synthetic oligonucleotide
  Sense strand starting at position 3564 of SEQ ID NO: 2824
cauacuauggacuggagua

SEQ ID NO: 219309 - RNA, 19 nt, Artificial Sequence
  Description of Artificial Sequence: Synthetic oligonucleotide
  Antisense strand to SEQ ID NO: 219308
uacuccaguccauaguaug

SEQ ID NO: 219310 - RNA, 19 nt, Artificial Sequence
  Description of Artificial Sequence: Synthetic oligonucleotide
  Sense strand starting at position 3679 of SEQ ID NO: 2824
cagcgaggugcuuaaauaa

SEQ ID NO: 219311 - RNA, 19 nt, Artificial Sequence
  Description of Artificial Sequence: Synthetic oligonucleotide
  Antisense strand to SEQ ID NO: 219310
uuauuuaagcaccucgcug

SEQ ID NO: 219312 - RNA, 19 nt, Artificial Sequence
  Description of Artificial Sequence: Synthetic oligonucleotide
  Sense strand starting at position 3717 of SEQ ID NO: 2824
ugucauuccagaggcagaa

SEQ ID NO: 219313 - RNA, 19 nt, Artificial Sequence
  Description of Artificial Sequence: Synthetic oligonucleotide
  Antisense strand to SEQ ID NO: 219312
uucugccucuggaaugaca

SEQ ID NO: 219314 - RNA, 19 nt, Artificial Sequence
  Description of Artificial Sequence: Synthetic oligonucleotide
  Sense strand starting at position 3783 of SEQ ID NO: 2824
guccuagucaaaugaggua

SEQ ID NO: 219315 - RNA, 19 nt, Artificial Sequence
  Description of Artificial Sequence: Synthetic oligonucleotide
  Antisense strand to SEQ ID NO: 219314
uaccucauuugacuaggac

SEQ ID NO: 219316 - RNA, 19 nt, Artificial Sequence
  Description of Artificial Sequence: Synthetic oligonucleotide
  Sense strand starting at position 3801 of SEQ ID NO: 2824
agagcaugcacguaagaau

SEQ ID NO: 219317 - RNA, 19 nt, Artificial Sequence
  Description of Artificial Sequence: Synthetic oligonucleotide
  Antisense strand to SEQ ID NO: 219316
auucuuacgugcaugcucu

SEQ ID NO: 219318 - RNA, 19 nt, Artificial Sequence
  Description of Artificial Sequence: Synthetic oligonucleotide
  Sense strand starting at position 3808 of SEQ ID NO: 2824
gcacguaagaauugacuuu

SEQ ID NO: 219319 - RNA, 19 nt, Artificial Sequence
  Description of Artificial Sequence: Synthetic oligonucleotide
  Antisense strand to SEQ ID NO: 219318
aaagucaauucuuacgugc

SEQ ID NO: 219320 - RNA, 19 nt, Artificial Sequence
  Description of Artificial Sequence: Synthetic oligonucleotide
  Sense strand starting at position 176 of SEQ ID NO: 2825
acauguugucaccaccauu

SEQ ID NO: 219321 - RNA, 19 nt, Artificial Sequence
  Description of Artificial Sequence: Synthetic oligonucleotide
  Antisense strand to SEQ ID NO: 219320
aaugguggugacaacaugu

SEQ ID NO: 219322 - RNA, 19 nt, Artificial Sequence
  Description of Artificial Sequence: Synthetic oligonucleotide
  Sense strand starting at position 179 of SEQ ID NO: 2825
uguugucaccaccauuaga

SEQ ID NO: 219323 - RNA, 19 nt, Artificial Sequence
  Description of Artificial Sequence: Synthetic oligonucleotide
  Antisense strand to SEQ ID NO: 219322
ucuaaugguggugacaaca

SEQ ID NO: 219324 - RNA, 19 nt, Artificial Sequence
  Description of Artificial Sequence: Synthetic oligonucleotide
  Sense strand starting at position 279 of SEQ ID NO: 2825
auggaauacugagaaacau

SEQ ID NO: 219325 - RNA, 19 nt, Artificial Sequence
  Description of Artificial Sequence: Synthetic oligonucleotide
  Antisense strand to SEQ ID NO: 219324
auguuucucaguauuccau

SEQ ID NO: 219326 - RNA, 19 nt, Artificial Sequence
  Description of Artificial Sequence: Synthetic oligonucleotide
  Sense strand starting at position 311 of SEQ ID NO: 2825
aaguaaauuucuggaagug

SEQ ID NO: 219327 - RNA, 19 nt, Artificial Sequence
  Description of Artificial Sequence: Synthetic oligonucleotide
  Antisense strand to SEQ ID NO: 219326
cacuuccagaaauuuacuu

SEQ ID NO: 219328 - RNA, 19 nt, Artificial Sequence
  Description of Artificial Sequence: Synthetic oligonucleotide
  Sense strand starting at position 600 of SEQ ID NO: 2825
guaaauaaggcuuguaagu

SEQ ID NO: 219329 - RNA, 19 nt, Artificial Sequence
  Description of Artificial Sequence: Synthetic oligonucleotide
  Antisense strand to SEQ ID NO: 219328
acuuacaagccuuauuuac

SEQ ID NO: 219330 - RNA, 19 nt, Artificial Sequence
  Description of Artificial Sequence: Synthetic oligonucleotide
  Sense strand starting at position 648 of SEQ ID NO: 2825
guuuguguguauuuaaacu

SEQ ID NO: 219331 - RNA, 19 nt, Artificial Sequence
  Description of Artificial Sequence: Synthetic oligonucleotide
  Antisense strand to SEQ ID NO: 219330
aguuuaaauacacacaaac

SEQ ID NO: 219332 - RNA, 19 nt, Artificial Sequence
  Description of Artificial Sequence: Synthetic oligonucleotide
  Sense strand starting at position 847 of SEQ ID NO: 2825
cuuucccaacgguaauaaa

SEQ ID NO: 219333 - RNA, 19 nt, Artificial Sequence
  Description of Artificial Sequence: Synthetic oligonucleotide
  Antisense strand to SEQ ID NO: 219332
uuuauuaccguugggaaag

SEQ ID NO: 219334 - RNA, 19 nt, Artificial Sequence
  Description of Artificial Sequence: Synthetic oligonucleotide
  Sense strand starting at position 924 of SEQ ID NO: 2825
uauuuauguuacugaagga

SEQ ID NO: 219335 - RNA, 19 nt, Artificial Sequence
  Description of Artificial Sequence: Synthetic oligonucleotide
  Antisense strand to SEQ ID NO: 219334
uccuucaguaacauaaaua

SEQ ID NO: 219336 - RNA, 19 nt, Artificial Sequence
  Description of Artificial Sequence: Synthetic oligonucleotide
  Sense strand starting at position 976 of SEQ ID NO: 2825
uggaaagauuaugaauuga

SEQ ID NO: 219337 - RNA, 19 nt, Artificial Sequence
  Description of Artificial Sequence: Synthetic oligonucleotide
  Antisense strand to SEQ ID NO: 219336
ucaauucauaaucuuucca

SEQ ID NO: 219338 - RNA, 19 nt, Artificial Sequence
  Description of Artificial Sequence: Synthetic oligonucleotide
  Sense strand starting at position 987 of SEQ ID NO: 2825
ugaauugagaguugucacu

SEQ ID NO: 219339 - RNA, 19 nt, Artificial Sequence
  Description of Artificial Sequence: Synthetic oligonucleotide
  Antisense strand to SEQ ID NO: 219338
agugacaacucucaauuca

SEQ ID NO: 219340 - RNA, 19 nt, Artificial Sequence
  Description of Artificial Sequence: Synthetic oligonucleotide
  Sense strand starting at position 989 of SEQ ID NO: 2825
aauugagaguugucacuuc

SEQ ID NO: 219341 - RNA, 19 nt, Artificial Sequence
  Description of Artificial Sequence: Synthetic oligonucleotide
  Antisense strand to SEQ ID NO: 219340
gaagugacaacucucaauu

SEQ ID NO: 219342 - RNA, 19 nt, Artificial Sequence
  Description of Artificial Sequence: Synthetic oligonucleotide
  Sense strand starting at position 1304 of SEQ ID NO: 2825
gcaagacauuaggccauua

SEQ ID NO: 219343 - RNA, 19 nt, Artificial Sequence
  Description of Artificial Sequence: Synthetic oligonucleotide
  Antisense strand to SEQ ID NO: 219342
uaauggccuaaugucuugc

SEQ ID NO: 219344 - RNA, 19 nt, Artificial Sequence
  Description of Artificial Sequence: Synthetic oligonucleotide
  Sense strand starting at position 1350 of SEQ ID NO: 2825
cuagaaaucugggaaacaa

SEQ ID NO: 219345 - RNA, 19 nt, Artificial Sequence
  Description of Artificial Sequence: Synthetic oligonucleotide
  Antisense strand to SEQ ID NO: 219344
uuguuucccagauuucuag

SEQ ID NO: 219346 - RNA, 19 nt, Artificial Sequence
  Description of Artificial Sequence: Synthetic oligonucleotide
  Sense strand starting at position 1627 of SEQ ID NO: 2825
aucuuagcauuguuugaaa

SEQ ID NO: 219347 - RNA, 19 nt, Artificial Sequence
  Description of Artificial Sequence: Synthetic oligonucleotide
  Antisense strand to SEQ ID NO: 219346
uuucaaacaaugcuaagau

SEQ ID NO: 219348 - RNA, 19 nt, Artificial Sequence
  Description of Artificial Sequence: Synthetic oligonucleotide
  Sense strand starting at position 1629 of SEQ ID NO: 2825
cuuagcauuguuugaaaua

SEQ ID NO: 219349 - RNA, 19 nt, Artificial Sequence
  Description of Artificial Sequence: Synthetic oligonucleotide
  Antisense strand to SEQ ID NO: 219348
uauuucaaacaaugcuaag

SEQ ID NO: 219350 - RNA, 19 nt, Artificial Sequence
  Description of Artificial Sequence: Synthetic oligonucleotide
  Sense strand starting at position 1718 of SEQ ID NO: 2825
ucaaguaauaggcaagagu

SEQ ID NO: 219351 - RNA, 19 nt, Artificial Sequence
  Description of Artificial Sequence: Synthetic oligonucleotide
  Antisense strand to SEQ ID NO: 219350
acucuugccuauuacuuga

SEQ ID NO: 219352 - RNA, 19 nt, Artificial Sequence
  Description of Artificial Sequence: Synthetic oligonucleotide
  Sense strand starting at position 2066 of SEQ ID NO: 2825
gcaggaaacgcuuagauau

SEQ ID NO: 219353 - RNA, 19 nt, Artificial Sequence
  Description of Artificial Sequence: Synthetic oligonucleotide
  Antisense strand to SEQ ID NO: 219352
auaucuaagcguuuccugc

SEQ ID NO: 219354 - RNA, 19 nt, Artificial Sequence
  Description of Artificial Sequence: Synthetic oligonucleotide
  Sense strand starting at position 2282 of SEQ ID NO: 2825
uuauuacuguaagugcaaa

SEQ ID NO: 219355 - RNA, 19 nt, Artificial Sequence
  Description of Artificial Sequence: Synthetic oligonucleotide
  Antisense strand to SEQ ID NO: 219354
uuugcacuuacaguaauaa

SEQ ID NO: 219356 - RNA, 19 nt, Artificial Sequence
  Description of Artificial Sequence: Synthetic oligonucleotide
  Sense strand starting at position 2338 of SEQ ID NO: 2825
guuauuggauucuugagau

SEQ ID NO: 219357 - RNA, 19 nt, Artificial Sequence
  Description of Artificial Sequence: Synthetic oligonucleotide
  Antisense strand to SEQ ID NO: 219356
aucucaagaauccaauaac

SEQ ID NO: 219358 - RNA, 19 nt, Artificial Sequence
  Description of Artificial Sequence: Synthetic oligonucleotide
  Sense strand starting at position 2350 of SEQ ID NO: 2825
uugagauaccucuguauag

SEQ ID NO: 219359 - RNA, 19 nt, Artificial Sequence
  Description of Artificial Sequence: Synthetic oligonucleotide
  Antisense strand to SEQ ID NO: 219358
cuauacagagguaucucaa

SEQ ID NO: 219360 - RNA, 19 nt, Artificial Sequence
  Description of Artificial Sequence: Synthetic oligonucleotide
  Sense strand starting at position 2351 of SEQ ID NO: 2825
ugagauaccucuguauaga

SEQ ID NO: 219361 - RNA, 19 nt, Artificial Sequence
  Description of Artificial Sequence: Synthetic oligonucleotide
  Antisense strand to SEQ ID NO: 219360
ucuauacagagguaucuca

SEQ ID NO: 219362 - RNA, 19 nt, Artificial Sequence
  Description of Artificial Sequence: Synthetic oligonucleotide
  Sense strand starting at position 2430 of SEQ ID NO: 2825
cuaccuaccgaguaguuau

SEQ ID NO: 219363 - RNA, 19 nt, Artificial Sequence
  Description of Artificial Sequence: Synthetic oligonucleotide
  Antisense strand to SEQ ID NO: 219362
auaacuacucgguagguag

SEQ ID NO: 219364 - RNA, 19 nt, Artificial Sequence
  Description of Artificial Sequence: Synthetic oligonucleotide
  Sense strand starting at position 2458 of SEQ ID NO: 2825
agcuuuaguucuccugaau

SEQ ID NO: 219365 - RNA, 19 nt, Artificial Sequence
  Description of Artificial Sequence: Synthetic oligonucleotide
  Antisense strand to SEQ ID NO: 219364
auucaggagaacuaaagcu

SEQ ID NO: 219366 - RNA, 19 nt, Artificial Sequence
  Description of Artificial Sequence: Synthetic oligonucleotide
  Sense strand starting at position 2461 of SEQ ID NO: 2825
uuuaguucuccugaaugug

SEQ ID NO: 219367 - RNA, 19 nt, Artificial Sequence
  Description of Artificial Sequence: Synthetic oligonucleotide
  Antisense strand to SEQ ID NO: 219366
cacauucaggagaacuaaa

SEQ ID NO: 219368 - RNA, 19 nt, Artificial Sequence
  Description of Artificial Sequence: Synthetic oligonucleotide
  Sense strand starting at position 2464 of SEQ ID NO: 2825
aguucuccugaaugugauu

SEQ ID NO: 219369 - RNA, 19 nt, Artificial Sequence
  Description of Artificial Sequence: Synthetic oligonucleotide
  Antisense strand to SEQ ID NO: 219368
aaucacauucaggagaacu

SEQ ID NO: 219370 - RNA, 19 nt, Artificial Sequence
  Description of Artificial Sequence: Synthetic oligonucleotide
  Sense strand starting at position 2700 of SEQ ID NO: 2825
gcaggacacacucgaucau

SEQ ID NO: 219371 - RNA, 19 nt, Artificial Sequence
  Description of Artificial Sequence: Synthetic oligonucleotide
  Antisense strand to SEQ ID NO: 219370
augaucgaguguguccugc

SEQ ID NO: 219372 - RNA, 19 nt, Artificial Sequence
  Description of Artificial Sequence: Synthetic oligonucleotide
  Sense strand starting at position 2713 of SEQ ID NO: 2825
gaucauucugucugguauu

SEQ ID NO: 219373 - RNA, 19 nt, Artificial Sequence
  Description of Artificial Sequence: Synthetic oligonucleotide
  Antisense strand to SEQ ID NO: 219372
aauaccagacagaaugauc

SEQ ID NO: 219374 - RNA, 19 nt, Artificial Sequence
  Description of Artificial Sequence: Synthetic oligonucleotide
  Sense strand starting at position 2895 of SEQ ID NO: 2825
aucugaggaucuguuugaa

SEQ ID NO: 219375 - RNA, 19 nt, Artificial Sequence
  Description of Artificial Sequence: Synthetic oligonucleotide
  Antisense strand to SEQ ID NO: 219374
uucaaacagauccucagau

SEQ ID NO: 219376 - RNA, 19 nt, Artificial Sequence
  Description of Artificial Sequence: Synthetic oligonucleotide
  Sense strand starting at position 2898 of SEQ ID NO: 2825
ugaggaucuguuugaagau

SEQ ID NO: 219377 - RNA, 19 nt, Artificial Sequence
  Description of Artificial Sequence: Synthetic oligonucleotide
  Antisense strand to SEQ ID NO: 219376
aucuucaaacagauccuca

SEQ ID NO: 219378 - RNA, 19 nt, Artificial Sequence
  Description of Artificial Sequence: Synthetic oligonucleotide
  Sense strand starting at position 2946 of SEQ ID NO: 2825
acaagcauuuaugaaggaa

SEQ ID NO: 219379 - RNA, 19 nt, Artificial Sequence
  Description of Artificial Sequence: Synthetic oligonucleotide
  Antisense strand to SEQ ID NO: 219378
uuccuucauaaaugcuugu

SEQ ID NO: 219380 - RNA, 19 nt, Artificial Sequence
  Description of Artificial Sequence: Synthetic oligonucleotide
  Sense strand starting at position 3017 of SEQ ID NO: 2825
ggcuccuauccuuaagaca

SEQ ID NO: 219381 - RNA, 19 nt, Artificial Sequence
  Description of Artificial Sequence: Synthetic oligonucleotide
  Antisense strand to SEQ ID NO: 219380
ugucuuaaggauaggagcc

SEQ ID NO: 219382 - RNA, 19 nt, Artificial Sequence
  Description of Artificial Sequence: Synthetic oligonucleotide
  Sense strand starting at position 3034 of SEQ ID NO: 2825
cagaaucuagagugguuga

SEQ ID NO: 219383 - RNA, 19 nt, Artificial Sequence
  Description of Artificial Sequence: Synthetic oligonucleotide
  Antisense strand to SEQ ID NO: 219382
ucaaccacucuagauucug

SEQ ID NO: 219384 - RNA, 19 nt, Artificial Sequence
  Description of Artificial Sequence: Synthetic oligonucleotide
  Sense strand starting at position 3037 of SEQ ID NO: 2825
aaucuagagugguugagaa

SEQ ID NO: 219385 - RNA, 19 nt, Artificial Sequence
  Description of Artificial Sequence: Synthetic oligonucleotide
  Antisense strand to SEQ ID NO: 219384
uucucaaccacucuagauu

SEQ ID NO: 219386 - RNA, 19 nt, Artificial Sequence
  Description of Artificial Sequence: Synthetic oligonucleotide
  Sense strand starting at position 3092 of SEQ ID NO: 2825
uggcuucugccuuaacaag

SEQ ID NO: 219387 - RNA, 19 nt, Artificial Sequence
  Description of Artificial Sequence: Synthetic oligonucleotide
  Antisense strand to SEQ ID NO: 219386
cuuguuaaggcagaagcca

SEQ ID NO: 219388 - RNA, 19 nt, Artificial Sequence
  Description of Artificial Sequence: Synthetic oligonucleotide
  Sense strand starting at position 3170 of SEQ ID NO: 2825
gaauuugccugccuggauu

SEQ ID NO: 219389 - RNA, 19 nt, Artificial Sequence
  Description of Artificial Sequence: Synthetic oligonucleotide
  Antisense strand to SEQ ID NO: 219388
aauccaggcaggcaaauuc

SEQ ID NO: 219390 - RNA, 19 nt, Artificial Sequence
  Description of Artificial Sequence: Synthetic oligonucleotide
  Sense strand starting at position 3257 of SEQ ID NO: 2825
gcuugucacuauuuguaug

SEQ ID NO: 219391 - RNA, 19 nt, Artificial Sequence
  Description of Artificial Sequence: Synthetic oligonucleotide
  Antisense strand to SEQ ID NO: 219390
cauacaaauagugacaagc

SEQ ID NO: 219392 - RNA, 19 nt, Artificial Sequence
  Description of Artificial Sequence: Synthetic oligonucleotide
  Sense strand starting at position 3330 of SEQ ID NO: 2825
ugcugugggcuagaaucua

SEQ ID NO: 219393 - RNA, 19 nt, Artificial Sequence
  Description of Artificial Sequence: Synthetic oligonucleotide
  Antisense strand to SEQ ID NO: 219392
uagauucuagcccacagca

SEQ ID NO: 219394 - RNA, 19 nt, Artificial Sequence
  Description of Artificial Sequence: Synthetic oligonucleotide
  Sense strand starting at position 3593 of SEQ ID NO: 2825
agugaaggcuaaucccaua

SEQ ID NO: 219395 - RNA, 19 nt, Artificial Sequence
  Description of Artificial Sequence: Synthetic oligonucleotide
  Antisense strand to SEQ ID NO: 219394
uaugggauuagccuucacu

SEQ ID NO: 219396 - RNA, 19 nt, Artificial Sequence
  Description of Artificial Sequence: Synthetic oligonucleotide
  Sense strand starting at position 3635 of SEQ ID NO: 2825
gauuuagucuaagcgccua

SEQ ID NO: 219397 - RNA, 19 nt, Artificial Sequence
  Description of Artificial Sequence: Synthetic oligonucleotide
  Antisense strand to SEQ ID NO: 219396
uaggcgcuuagacuaaauc

SEQ ID NO: 219398 - RNA, 19 nt, Artificial Sequence
  Description of Artificial Sequence: Synthetic oligonucleotide
  Sense strand starting at position 3694 of SEQ ID NO: 2825
ugggaauguccaugugauu

SEQ ID NO: 219399 - RNA, 19 nt, Artificial Sequence
  Description of Artificial Sequence: Synthetic oligonucleotide
  Antisense strand to SEQ ID NO: 219398
aaucacauggacauuccca

SEQ ID NO: 219400 - RNA, 19 nt, Artificial Sequence
  Description of Artificial Sequence: Synthetic oligonucleotide
  Sense strand starting at position 457 of SEQ ID NO: 2827
acgaauaauugucuuggca

SEQ ID NO: 219401 - RNA, 19 nt, Artificial Sequence
  Description of Artificial Sequence: Synthetic oligonucleotide
  Antisense strand to SEQ ID NO: 219400
ugccaagacaauuauucgu

SEQ ID NO: 219402 - RNA, 19 nt, Artificial Sequence
  Description of Artificial Sequence: Synthetic oligonucleotide
  Sense strand starting at position 461 of SEQ ID NO: 2827
auaauugucuuggcaagag

SEQ ID NO: 219403 - RNA, 19 nt, Artificial Sequence
  Description of Artificial Sequence: Synthetic oligonucleotide
  Antisense strand to SEQ ID NO: 219402
cucuugccaagacaauuau

SEQ ID NO: 219404 - RNA, 19 nt, Artificial Sequence
  Description of Artificial Sequence: Synthetic oligonucleotide
  Sense strand starting at position 465 of SEQ ID NO: 2827
uugucuuggcaagagguga

SEQ ID NO: 219405 - RNA, 19 nt, Artificial Sequence
  Description of Artificial Sequence: Synthetic oligonucleotide
  Antisense strand to SEQ ID NO: 219404
ucaccucuugccaagacaa

SEQ ID NO: 219406 - RNA, 19 nt, Artificial Sequence
  Description of Artificial Sequence: Synthetic oligonucleotide
  Sense strand starting at position 479 of SEQ ID NO: 2827
ggugaaaccacuugauggu

SEQ ID NO: 219407 - RNA, 19 nt, Artificial Sequence
  Description of Artificial Sequence: Synthetic oligonucleotide
  Antisense strand to SEQ ID NO: 219406
accaucaagugguuucacc

SEQ ID NO: 219408 - RNA, 19 nt, Artificial Sequence
  Description of Artificial Sequence: Synthetic oligonucleotide
  Sense strand starting at position 494 of SEQ ID NO: 2827
uggugaauuuguuugucug

SEQ ID NO: 219409 - RNA, 19 nt, Artificial Sequence
  Description of Artificial Sequence: Synthetic oligonucleotide
  Antisense strand to SEQ ID NO: 219408
cagacaaacaaauucacca

SEQ ID NO: 219410 - RNA, 19 nt, Artificial Sequence
  Description of Artificial Sequence: Synthetic oligonucleotide
  Sense strand starting at position 495 of SEQ ID NO: 2827
ggugaauuuguuugucugu

SEQ ID NO: 219411 - RNA, 19 nt, Artificial Sequence
  Description of Artificial Sequence: Synthetic oligonucleotide
  Antisense strand to SEQ ID NO: 219410
acagacaaacaaauucacc

SEQ ID NO: 219412 - RNA, 19 nt, Artificial Sequence
  Description of Artificial Sequence: Synthetic oligonucleotide
  Sense strand starting at position 497 of SEQ ID NO: 2827
ugaauuuguuugucugucu

SEQ ID NO: 219413 - RNA, 19 nt, Artificial Sequence
  Description of Artificial Sequence: Synthetic oligonucleotide
  Antisense strand to SEQ ID NO: 219412
agacagacaaacaaauuca

SEQ ID NO: 219414 - RNA, 19 nt, Artificial Sequence
  Description of Artificial Sequence: Synthetic oligonucleotide
  Sense strand starting at position 501 of SEQ ID NO: 2827
uuuguuugucugucuguua

SEQ ID NO: 219415 - RNA, 19 nt, Artificial Sequence
  Description of Artificial Sequence: Synthetic oligonucleotide
  Antisense strand to SEQ ID NO: 219414
uaacagacagacaaacaaa

SEQ ID NO: 219416 - RNA, 19 nt, Artificial Sequence
  Description of Artificial Sequence: Synthetic oligonucleotide
  Sense strand starting at position 564 of SEQ ID NO: 2827
augccugauccagaguuag

SEQ ID NO: 219417 - RNA, 19 nt, Artificial Sequence
  Description of Artificial Sequence: Synthetic oligonucleotide
  Antisense strand to SEQ ID NO: 219416
cuaacucuggaucaggcau

SEQ ID NO: 219418 - RNA, 19 nt, Artificial Sequence
  Description of Artificial Sequence: Synthetic oligonucleotide
  Sense strand starting at position 766 of SEQ ID NO: 2827
cuguaugaccuuggauaaa

SEQ ID NO: 219419 - RNA, 19 nt, Artificial Sequence
  Description of Artificial Sequence: Synthetic oligonucleotide
  Antisense strand to SEQ ID NO: 219418
uuuauccaaggucauacag

SEQ ID NO: 219420 - RNA, 19 nt, Artificial Sequence
  Description of Artificial Sequence: Synthetic oligonucleotide
  Sense strand starting at position 868 of SEQ ID NO: 2827
gcaugugaugucuaggaca

SEQ ID NO: 219421 - RNA, 19 nt, Artificial Sequence
  Description of Artificial Sequence: Synthetic oligonucleotide
  Antisense strand to SEQ ID NO: 219420
uguccuagacaucacaugc

SEQ ID NO: 219422 - RNA, 19 nt, Artificial Sequence
  Description of Artificial Sequence: Synthetic oligonucleotide
  Sense strand starting at position 870 of SEQ ID NO: 2827
augugaugucuaggacauu

SEQ ID NO: 219423 - RNA, 19 nt, Artificial Sequence
  Description of Artificial Sequence: Synthetic oligonucleotide
  Antisense strand to SEQ ID NO: 219422
aauguccuagacaucacau

SEQ ID NO: 219424 - RNA, 19 nt, Artificial Sequence
  Description of Artificial Sequence: Synthetic oligonucleotide
  Sense strand starting at position 1022 of SEQ ID NO: 2827
uggugacuuugauuccauu

SEQ ID NO: 219425 - RNA, 19 nt, Artificial Sequence
  Description of Artificial Sequence: Synthetic oligonucleotide
  Antisense strand to SEQ ID NO: 219424
aauggaaucaaagucacca

SEQ ID NO: 219426 - RNA, 19 nt, Artificial Sequence
  Description of Artificial Sequence: Synthetic oligonucleotide
  Sense strand starting at position 1077 of SEQ ID NO: 2827
caguuacuuguccagucua

SEQ ID NO: 219427 - RNA, 19 nt, Artificial Sequence
  Description of Artificial Sequence: Synthetic oligonucleotide
  Antisense strand to SEQ ID NO: 219426
uagacuggacaaguaacug

SEQ ID NO: 219428 - RNA, 19 nt, Artificial Sequence
  Description of Artificial Sequence: Synthetic oligonucleotide
  Sense strand starting at position 1182 of SEQ ID NO: 2827
ggcagaaacgaugggaauu

SEQ ID NO: 219429 - RNA, 19 nt, Artificial Sequence
  Description of Artificial Sequence: Synthetic oligonucleotide
  Antisense strand to SEQ ID NO: 219428
aauucccaucguuucugcc

SEQ ID NO: 219430 - RNA, 19 nt, Artificial Sequence
  Description of Artificial Sequence: Synthetic oligonucleotide
  Sense strand starting at position 1212 of SEQ ID NO: 2827
gcuggagacucacauuuga

SEQ ID NO: 219431 - RNA, 19 nt, Artificial Sequence
  Description of Artificial Sequence: Synthetic oligonucleotide
  Antisense strand to SEQ ID NO: 219430
ucaaaugugagucuccagc

SEQ ID NO: 219432 - RNA, 19 nt, Artificial Sequence
  Description of Artificial Sequence: Synthetic oligonucleotide
  Sense strand starting at position 1248 of SEQ ID NO: 2827
cugggcaucuuugucaaga

SEQ ID NO: 219433 - RNA, 19 nt, Artificial Sequence
  Description of Artificial Sequence: Synthetic oligonucleotide
  Antisense strand to SEQ ID NO: 219432
ucuugacaaagaugcccag

SEQ ID NO: 219434 - RNA, 19 nt, Artificial Sequence
  Description of Artificial Sequence: Synthetic oligonucleotide
  Sense strand starting at position 1249 of SEQ ID NO: 2827
ugggcaucuuugucaagaa

SEQ ID NO: 219435 - RNA, 19 nt, Artificial Sequence
  Description of Artificial Sequence: Synthetic oligonucleotide
  Antisense strand to SEQ ID NO: 219434
uucuugacaaagaugccca

SEQ ID NO: 219436 - RNA, 19 nt, Artificial Sequence
  Description of Artificial Sequence: Synthetic oligonucleotide
  Sense strand starting at position 1312 of SEQ ID NO: 2827
cuuggaggacuuuguuuaa

SEQ ID NO: 219437 - RNA, 19 nt, Artificial Sequence
  Description of Artificial Sequence: Synthetic oligonucleotide
  Antisense strand to SEQ ID NO: 219436
uuaaacaaaguccuccaag

SEQ ID NO: 219438 - RNA, 19 nt, Artificial Sequence
  Description of Artificial Sequence: Synthetic oligonucleotide
  Sense strand starting at position 1315 of SEQ ID NO: 2827
ggaggacuuuguuuaaaca

SEQ ID NO: 219439 - RNA, 19 nt, Artificial Sequence
  Description of Artificial Sequence: Synthetic oligonucleotide
  Antisense strand to SEQ ID NO: 219438
uguuuaaacaaaguccucc

SEQ ID NO: 219440 - RNA, 19 nt, Artificial Sequence
  Description of Artificial Sequence: Synthetic oligonucleotide
  Sense strand starting at position 1409 of SEQ ID NO: 2827
gggagagcucauuguaagg

SEQ ID NO: 219441 - RNA, 19 nt, Artificial Sequence
  Description of Artificial Sequence: Synthetic oligonucleotide
  Antisense strand to SEQ ID NO: 219440
ccuuacaaugagcucuccc

SEQ ID NO: 219442 - RNA, 19 nt, Artificial Sequence
  Description of Artificial Sequence: Synthetic oligonucleotide
  Sense strand starting at position 1475 of SEQ ID NO: 2827
ucucgucauacucagagga

SEQ ID NO: 219443 - RNA, 19 nt, Artificial Sequence
  Description of Artificial Sequence: Synthetic oligonucleotide
  Antisense strand to SEQ ID NO: 219442
uccucugaguaugacgaga

SEQ ID NO: 219444 - RNA, 19 nt, Artificial Sequence
  Description of Artificial Sequence: Synthetic oligonucleotide
  Sense strand starting at position 1524 of SEQ ID NO: 2827
gauuaauuaggaugugugu

SEQ ID NO: 219445 - RNA, 19 nt, Artificial Sequence
  Description of Artificial Sequence: Synthetic oligonucleotide
  Antisense strand to SEQ ID NO: 219444
acacacauccuaauuaauc

SEQ ID NO: 219446 - RNA, 19 nt, Artificial Sequence
  Description of Artificial Sequence: Synthetic oligonucleotide
  Sense strand starting at position 1526 of SEQ ID NO: 2827
uuaauuaggauguguguau

SEQ ID NO: 219447 - RNA, 19 nt, Artificial Sequence
  Description of Artificial Sequence: Synthetic oligonucleotide
  Antisense strand to SEQ ID NO: 219446
auacacacauccuaauuaa

SEQ ID NO: 219448 - RNA, 19 nt, Artificial Sequence
  Description of Artificial Sequence: Synthetic oligonucleotide
  Sense strand starting at position 1575 of SEQ ID NO: 2827
cuaucacgucccuacacau

SEQ ID NO: 219449 - RNA, 19 nt, Artificial Sequence
  Description of Artificial Sequence: Synthetic oligonucleotide
  Antisense strand to SEQ ID NO: 219448
auguguagggacgugauag

SEQ ID NO: 219450 - RNA, 19 nt, Artificial Sequence
  Description of Artificial Sequence: Synthetic oligonucleotide
  Sense strand starting at position 1720 of SEQ ID NO: 2827
aucuguggagccugaugaa

SEQ ID NO: 219451 - RNA, 19 nt, Artificial Sequence
  Description of Artificial Sequence: Synthetic oligonucleotide
  Antisense strand to SEQ ID NO: 219450
uucaucaggcuccacagau

SEQ ID NO: 219452 - RNA, 19 nt, Artificial Sequence
  Description of Artificial Sequence: Synthetic oligonucleotide
  Sense strand starting at position 2014 of SEQ ID NO: 2827
cucuacagauuccuacgua

SEQ ID NO: 219453 - RNA, 19 nt, Artificial Sequence
  Description of Artificial Sequence: Synthetic oligonucleotide
  Antisense strand to SEQ ID NO: 219452
uacguaggaaucuguagag

SEQ ID NO: 219454 - RNA, 19 nt, Artificial Sequence
  Description of Artificial Sequence: Synthetic oligonucleotide
  Sense strand starting at position 2109 of SEQ ID NO: 2827
aguuucccacuuggaaaua

SEQ ID NO: 219455 - RNA, 19 nt, Artificial Sequence
  Description of Artificial Sequence: Synthetic oligonucleotide
  Antisense strand to SEQ ID NO: 219454
uauuuccaagugggaaacu

SEQ ID NO: 219456 - RNA, 19 nt, Artificial Sequence
  Description of Artificial Sequence: Synthetic oligonucleotide
  Sense strand starting at position 2121 of SEQ ID NO: 2827
ggaaauaucuugucgugga

SEQ ID NO: 219457 - RNA, 19 nt, Artificial Sequence
  Description of Artificial Sequence: Synthetic oligonucleotide
  Antisense strand to SEQ ID NO: 219456
uccacgacaagauauuucc

SEQ ID NO: 219458 - RNA, 19 nt, Artificial Sequence
  Description of Artificial Sequence: Synthetic oligonucleotide
  Sense strand starting at position 2126 of SEQ ID NO: 2827
uaucuugucguggaugaug

SEQ ID NO: 219459 - RNA, 19 nt, Artificial Sequence
  Description of Artificial Sequence: Synthetic oligonucleotide
  Antisense strand to SEQ ID NO: 219458
caucauccacgacaagaua

SEQ ID NO: 219460 - RNA, 19 nt, Artificial Sequence
  Description of Artificial Sequence: Synthetic oligonucleotide
  Sense strand starting at position 2933 of SEQ ID NO: 2827
gguugucacucucuggaaa

SEQ ID NO: 219461 - RNA, 19 nt, Artificial Sequence
  Description of Artificial Sequence: Synthetic oligonucleotide
  Antisense strand to SEQ ID NO: 219460
uuuccagagagugacaacc

SEQ ID NO: 219462 - RNA, 19 nt, Artificial Sequence
  Description of Artificial Sequence: Synthetic oligonucleotide
  Sense strand starting at position 2974 of SEQ ID NO: 2827
auuaaauucuuucccgaag

SEQ ID NO: 219463 - RNA, 19 nt, Artificial Sequence
  Description of Artificial Sequence: Synthetic oligonucleotide
  Antisense strand to SEQ ID NO: 219462
cuucgggaaagaauuuaau

SEQ ID NO: 219464 - RNA, 19 nt, Artificial Sequence
  Description of Artificial Sequence: Synthetic oligonucleotide
  Sense strand starting at position 2975 of SEQ ID NO: 2827
uuaaauucuuucccgaaga

SEQ ID NO: 219465 - RNA, 19 nt, Artificial Sequence
  Description of Artificial Sequence: Synthetic oligonucleotide
  Antisense strand to SEQ ID NO: 219464
ucuucgggaaagaauuuaa

SEQ ID NO: 219466 - RNA, 19 nt, Artificial Sequence
  Description of Artificial Sequence: Synthetic oligonucleotide
  Sense strand starting at position 3257 of SEQ ID NO: 2827
ucuccagucucucuggaaa

SEQ ID NO: 219467 - RNA, 19 nt, Artificial Sequence
  Description of Artificial Sequence: Synthetic oligonucleotide
  Antisense strand to SEQ ID NO: 219466
uuuccagagagacuggaga

SEQ ID NO: 219468 - RNA, 19 nt, Artificial Sequence
  Description of Artificial Sequence: Synthetic oligonucleotide
  Sense strand starting at position 3269 of SEQ ID NO: 2827
cuggaaagauucucgcuaa

SEQ ID NO: 219469 - RNA, 19 nt, Artificial Sequence
  Description of Artificial Sequence: Synthetic oligonucleotide
  Antisense strand to SEQ ID NO: 219468
uuagcgagaaucuuuccag

SEQ ID NO: 219470 - RNA, 19 nt, Artificial Sequence
  Description of Artificial Sequence: Synthetic oligonucleotide
  Sense strand starting at position 3272 of SEQ ID NO: 2827
gaaagauucucgcuaaugg

SEQ ID NO: 219471 - RNA, 19 nt, Artificial Sequence
  Description of Artificial Sequence: Synthetic oligonucleotide
  Antisense strand to SEQ ID NO: 219470
ccauuagcgagaaucuuuc

SEQ ID NO: 219472 - RNA, 19 nt, Artificial Sequence
  Description of Artificial Sequence: Synthetic oligonucleotide
  Sense strand starting at position 3273 of SEQ ID NO: 2827
aaagauucucgcuaaugga

SEQ ID NO: 219473 - RNA, 19 nt, Artificial Sequence
  Description of Artificial Sequence: Synthetic oligonucleotide
  Antisense strand to SEQ ID NO: 219472
uccauuagcgagaaucuuu

SEQ ID NO: 219474 - RNA, 19 nt, Artificial Sequence
  Description of Artificial Sequence: Synthetic oligonucleotide
  Sense strand starting at position 3563 of SEQ ID NO: 2827
uggcucuaucuggaucaca

SEQ ID NO: 219475 - RNA, 19 nt, Artificial Sequence
  Description of Artificial Sequence: Synthetic oligonucleotide
  Antisense strand to SEQ ID NO: 219474
ugugauccagauagagcca

SEQ ID NO: 219476 - RNA, 19 nt, Artificial Sequence
  Description of Artificial Sequence: Synthetic oligonucleotide
  Sense strand starting at position 3847 of SEQ ID NO: 2827
caaguuucucgacaucgga

SEQ ID NO: 219477 - RNA, 19 nt, Artificial Sequence
  Description of Artificial Sequence: Synthetic oligonucleotide
  Antisense strand to SEQ ID NO: 219476
uccgaugucgagaaacuug

SEQ ID NO: 219478 - RNA, 19 nt, Artificial Sequence
  Description of Artificial Sequence: Synthetic oligonucleotide
  Sense strand starting at position 3865 of SEQ ID NO: 2827
auacaaucagcucaagagu

SEQ ID NO: 219479 - RNA, 19 nt, Artificial Sequence
  Description of Artificial Sequence: Synthetic oligonucleotide
  Antisense strand to SEQ ID NO: 219478
acucuugagcugauuguau

SEQ ID NO: 219480 - RNA, 19 nt, Artificial Sequence
  Description of Artificial Sequence: Synthetic oligonucleotide
  Sense strand starting at position 187 of SEQ ID NO: 2826
cugagauacugggcacaau

SEQ ID NO: 219481 - RNA, 19 nt, Artificial Sequence
  Description of Artificial Sequence: Synthetic oligonucleotide
  Antisense strand to SEQ ID NO: 219480
auugugcccaguaucucag

SEQ ID NO: 219482 - RNA, 19 nt, Artificial Sequence
  Description of Artificial Sequence: Synthetic oligonucleotide
  Sense strand starting at position 205 of SEQ ID NO: 2826
ugcaauuugugcuuaugau

SEQ ID NO: 219483 - RNA, 19 nt, Artificial Sequence
  Description of Artificial Sequence: Synthetic oligonucleotide
  Antisense strand to SEQ ID NO: 219482
aucauaagcacaaauugca

SEQ ID NO: 219484 - RNA, 19 nt, Artificial Sequence
  Description of Artificial Sequence: Synthetic oligonucleotide
  Sense strand starting at position 243 of SEQ ID NO: 2826
caaucuauagggugugauu

SEQ ID NO: 219485 - RNA, 19 nt, Artificial Sequence
  Description of Artificial Sequence: Synthetic oligonucleotide
  Antisense strand to SEQ ID NO: 219484
aaucacacccuauagauug

SEQ ID NO: 219486 - RNA, 19 nt, Artificial Sequence
  Description of Artificial Sequence: Synthetic oligonucleotide
  Sense strand starting at position 390 of SEQ ID NO: 2826
gucacuugcccagaucaca

SEQ ID NO: 219487 - RNA, 19 nt, Artificial Sequence
  Description of Artificial Sequence: Synthetic oligonucleotide
  Antisense strand to SEQ ID NO: 219486
ugugaucugggcaagugac

SEQ ID NO: 219488 - RNA, 19 nt, Artificial Sequence
  Description of Artificial Sequence: Synthetic oligonucleotide
  Sense strand starting at position 478 of SEQ ID NO: 2826
guuauuagaugucucaaau

SEQ ID NO: 219489 - RNA, 19 nt, Artificial Sequence
  Description of Artificial Sequence: Synthetic oligonucleotide
  Antisense strand to SEQ ID NO: 219488
auuugagacaucuaauaac

SEQ ID NO: 219490 - RNA, 19 nt, Artificial Sequence
  Description of Artificial Sequence: Synthetic oligonucleotide
  Sense strand starting at position 583 of SEQ ID NO: 2826
aaggucuauccgcaaagga

SEQ ID NO: 219491 - RNA, 19 nt, Artificial Sequence
  Description of Artificial Sequence: Synthetic oligonucleotide
  Antisense strand to SEQ ID NO: 219490
uccuuugcggauagaccuu

SEQ ID NO: 219492 - RNA, 19 nt, Artificial Sequence
  Description of Artificial Sequence: Synthetic oligonucleotide
  Sense strand starting at position 664 of SEQ ID NO: 2826
ccagcuagacauugacaua

SEQ ID NO: 219493 - RNA, 19 nt, Artificial Sequence
  Description of Artificial Sequence: Synthetic oligonucleotide
  Antisense strand to SEQ ID NO: 219492
uaugucaaugucuagcugg

SEQ ID NO: 219494 - RNA, 19 nt, Artificial Sequence
  Description of Artificial Sequence: Synthetic oligonucleotide
  Sense strand starting at position 761 of SEQ ID NO: 2826
uggugaucuugaccaucca

SEQ ID NO: 219495 - RNA, 19 nt, Artificial Sequence
  Description of Artificial Sequence: Synthetic oligonucleotide
  Antisense strand to SEQ ID NO: 219494
uggauggucaagaucacca

SEQ ID NO: 219496 - RNA, 19 nt, Artificial Sequence
  Description of Artificial Sequence: Synthetic oligonucleotide
  Sense strand starting at position 861 of SEQ ID NO: 2826
uggccaucccuauauguua

SEQ ID NO: 219497 - RNA, 19 nt, Artificial Sequence
  Description of Artificial Sequence: Synthetic oligonucleotide
  Antisense strand to SEQ ID NO: 219496
uaacauauagggauggcca

SEQ ID NO: 219498 - RNA, 19 nt, Artificial Sequence
  Description of Artificial Sequence: Synthetic oligonucleotide
  Sense strand starting at position 973 of SEQ ID NO: 2826
uucuuucuuguugagaauc

SEQ ID NO: 219499 - RNA, 19 nt, Artificial Sequence
  Description of Artificial Sequence: Synthetic oligonucleotide
  Antisense strand to SEQ ID NO: 219498
gauucucaacaagaaagaa

SEQ ID NO: 219500 - RNA, 19 nt, Artificial Sequence
  Description of Artificial Sequence: Synthetic oligonucleotide
  Sense strand starting at position 981 of SEQ ID NO: 2826
uguugagaaucaucacuua

SEQ ID NO: 219501 - RNA, 19 nt, Artificial Sequence
  Description of Artificial Sequence: Synthetic oligonucleotide
  Antisense strand to SEQ ID NO: 219500
uaagugaugauucucaaca

SEQ ID NO: 219502 - RNA, 19 nt, Artificial Sequence
  Description of Artificial Sequence: Synthetic oligonucleotide
  Sense strand starting at position 1171 of SEQ ID NO: 2826
accuuacuggacugugaaa

SEQ ID NO: 219503 - RNA, 19 nt, Artificial Sequence
  Description of Artificial Sequence: Synthetic oligonucleotide
  Antisense strand to SEQ ID NO: 219502
uuucacaguccaguaaggu

SEQ ID NO: 219504 - RNA, 19 nt, Artificial Sequence
  Description of Artificial Sequence: Synthetic oligonucleotide
  Sense strand starting at position 1278 of SEQ ID NO: 2826
gggacucccugaucuauau

SEQ ID NO: 219505 - RNA, 19 nt, Artificial Sequence
  Description of Artificial Sequence: Synthetic oligonucleotide
  Antisense strand to SEQ ID NO: 219504
auauagaucagggaguccc

SEQ ID NO: 219506 - RNA, 19 nt, Artificial Sequence
  Description of Artificial Sequence: Synthetic oligonucleotide
  Sense strand starting at position 1422 of SEQ ID NO: 2826
aucaccuuucuuggaaaga

SEQ ID NO: 219507 - RNA, 19 nt, Artificial Sequence
  Description of Artificial Sequence: Synthetic oligonucleotide
  Antisense strand to SEQ ID NO: 219506
ucuuuccaagaaaggugau

SEQ ID NO: 219508 - RNA, 19 nt, Artificial Sequence
  Description of Artificial Sequence: Synthetic oligonucleotide
  Sense strand starting at position 1661 of SEQ ID NO: 2826
aguugaaagucuuuccaau

SEQ ID NO: 219509 - RNA, 19 nt, Artificial Sequence
  Description of Artificial Sequence: Synthetic oligonucleotide
  Antisense strand to SEQ ID NO: 219508
auuggaaagacuuucaacu

SEQ ID NO: 219510 - RNA, 19 nt, Artificial Sequence
  Description of Artificial Sequence: Synthetic oligonucleotide
  Sense strand starting at position 1722 of SEQ ID NO: 2826
auaccugugcuccagacau

SEQ ID NO: 219511 - RNA, 19 nt, Artificial Sequence
  Description of Artificial Sequence: Synthetic oligonucleotide
  Antisense strand to SEQ ID NO: 219510
augucuggagcacagguau

SEQ ID NO: 219512 - RNA, 19 nt, Artificial Sequence
  Description of Artificial Sequence: Synthetic oligonucleotide
  Sense strand starting at position 2091 of SEQ ID NO: 2826
ucaagauucuugucagaga

SEQ ID NO: 219513 - RNA, 19 nt, Artificial Sequence
  Description of Artificial Sequence: Synthetic oligonucleotide
  Antisense strand to SEQ ID NO: 219512
ucucugacaagaaucuuga

SEQ ID NO: 219514 - RNA, 19 nt, Artificial Sequence
  Description of Artificial Sequence: Synthetic oligonucleotide
  Sense strand starting at position 2158 of SEQ ID NO: 2826
cagguuaguuuaccacuga

SEQ ID NO: 219515 - RNA, 19 nt, Artificial Sequence
  Description of Artificial Sequence: Synthetic oligonucleotide
  Antisense strand to SEQ ID NO: 219514
ucagugguaaacuaaccug

SEQ ID NO: 219516 - RNA, 19 nt, Artificial Sequence
  Description of Artificial Sequence: Synthetic oligonucleotide
  Sense strand starting at position 2162 of SEQ ID NO: 2826
uuaguuuaccacugaagac

SEQ ID NO: 219517 - RNA, 19 nt, Artificial Sequence
  Description of Artificial Sequence: Synthetic oligonucleotide
  Antisense strand to SEQ ID NO: 219516
gucuucagugguaaacuaa

SEQ ID NO: 219518 - RNA, 19 nt, Artificial Sequence
  Description of Artificial Sequence: Synthetic oligonucleotide
  Sense strand starting at position 2177 of SEQ ID NO: 2826
agaccuguugcuuauggau

SEQ ID NO: 219519 - RNA, 19 nt, Artificial Sequence
  Description of Artificial Sequence: Synthetic oligonucleotide
  Antisense strand to SEQ ID NO: 219518
auccauaagcaacaggucu

SEQ ID NO: 219520 - RNA, 19 nt, Artificial Sequence
  Description of Artificial Sequence: Synthetic oligonucleotide
  Sense strand starting at position 2357 of SEQ ID NO: 2826
caggcuauugauuaggcaa

SEQ ID NO: 219521 - RNA, 19 nt, Artificial Sequence
  Description of Artificial Sequence: Synthetic oligonucleotide
  Antisense strand to SEQ ID NO: 219520
uugccuaaucaauagccug

SEQ ID NO: 219522 - RNA, 19 nt, Artificial Sequence
  Description of Artificial Sequence: Synthetic oligonucleotide
  Sense strand starting at position 2404 of SEQ ID NO: 2826
caaugagaguguuuacaaa

SEQ ID NO: 219523 - RNA, 19 nt, Artificial Sequence
  Description of Artificial Sequence: Synthetic oligonucleotide
  Antisense strand to SEQ ID NO: 219522
uuuguaaacacucucauug

SEQ ID NO: 219524 - RNA, 19 nt, Artificial Sequence
  Description of Artificial Sequence: Synthetic oligonucleotide
  Sense strand starting at position 2433 of SEQ ID NO: 2826
cgcagacugcacuaagaga

SEQ ID NO: 219525 - RNA, 19 nt, Artificial Sequence
  Description of Artificial Sequence: Synthetic oligonucleotide
  Antisense strand to SEQ ID NO: 219524
ucucuuagugcagucugcg

SEQ ID NO: 219526 - RNA, 19 nt, Artificial Sequence
  Description of Artificial Sequence: Synthetic oligonucleotide
  Sense strand starting at position 2574 of SEQ ID NO: 2826
auaugucuguucuuagaga

SEQ ID NO: 219527 - RNA, 19 nt, Artificial Sequence
  Description of Artificial Sequence: Synthetic oligonucleotide
  Antisense strand to SEQ ID NO: 219526
ucucuaagaacagacauau

SEQ ID NO: 219528 - RNA, 19 nt, Artificial Sequence
  Description of Artificial Sequence: Synthetic oligonucleotide
  Sense strand starting at position 2702 of SEQ ID NO: 2826
gaauuaaauugguucuguu

SEQ ID NO: 219529 - RNA, 19 nt, Artificial Sequence
  Description of Artificial Sequence: Synthetic oligonucleotide
  Antisense strand to SEQ ID NO: 219528
aacagaaccaauuuaauuc

SEQ ID NO: 219530 - RNA, 19 nt, Artificial Sequence
  Description of Artificial Sequence: Synthetic oligonucleotide
  Sense strand starting at position 3205 of SEQ ID NO: 2826
ugagcacccuuucugaaga

SEQ ID NO: 219531 - RNA, 19 nt, Artificial Sequence
  Description of Artificial Sequence: Synthetic oligonucleotide
  Antisense strand to SEQ ID NO: 219530
ucuucagaaagggugcuca

SEQ ID NO: 219532 - RNA, 19 nt, Artificial Sequence
  Description of Artificial Sequence: Synthetic oligonucleotide
  Sense strand starting at position 3267 of SEQ ID NO: 2826
ugcuauuucuuuguggcaa

SEQ ID NO: 219533 - RNA, 19 nt, Artificial Sequence
  Description of Artificial Sequence: Synthetic oligonucleotide
  Antisense strand to SEQ ID NO: 219532
uugccacaaagaaauagca

SEQ ID NO: 219534 - RNA, 19 nt, Artificial Sequence
  Description of Artificial Sequence: Synthetic oligonucleotide
  Sense strand starting at position 3316 of SEQ ID NO: 2826
auuuauggcuaggaugaga

SEQ ID NO: 219535 - RNA, 19 nt, Artificial Sequence
  Description of Artificial Sequence: Synthetic oligonucleotide
  Antisense strand to SEQ ID NO: 219534
ucucauccuagccauaaau

SEQ ID NO: 219536 - RNA, 19 nt, Artificial Sequence
  Description of Artificial Sequence: Synthetic oligonucleotide
  Sense strand starting at position 3346 of SEQ ID NO: 2826
gcuaauagcaaguagaaga

SEQ ID NO: 219537 - RNA, 19 nt, Artificial Sequence
  Description of Artificial Sequence: Synthetic oligonucleotide
  Antisense strand to SEQ ID NO: 219536
ucuucuacuugcuauuagc

SEQ ID NO: 219538 - RNA, 19 nt, Artificial Sequence
  Description of Artificial Sequence: Synthetic oligonucleotide
  Sense strand starting at position 3357 of SEQ ID NO: 2826
guagaagaacuguaguugu

SEQ ID NO: 219539 - RNA, 19 nt, Artificial Sequence
  Description of Artificial Sequence: Synthetic oligonucleotide
  Antisense strand to SEQ ID NO: 219538
acaacuacaguucuucuac

SEQ ID NO: 219540 - RNA, 19 nt, Artificial Sequence
  Description of Artificial Sequence: Synthetic oligonucleotide
  Sense strand starting at position 3360 of SEQ ID NO: 2826
gaagaacuguaguugucua

SEQ ID NO: 219541 - RNA, 19 nt, Artificial Sequence
  Description of Artificial Sequence: Synthetic oligonucleotide
  Antisense strand to SEQ ID NO: 219540
uagacaacuacaguucuuc

SEQ ID NO: 219542 - RNA, 19 nt, Artificial Sequence
  Description of Artificial Sequence: Synthetic oligonucleotide
  Sense strand starting at position 3624 of SEQ ID NO: 2826
gagauuucuuaugagagug

SEQ ID NO: 219543 - RNA, 19 nt, Artificial Sequence
  Description of Artificial Sequence: Synthetic oligonucleotide
  Antisense strand to SEQ ID NO: 219542
cacucucauaagaaaucuc

SEQ ID NO: 219544 - RNA, 19 nt, Artificial Sequence
  Description of Artificial Sequence: Synthetic oligonucleotide
  Sense strand starting at position 3626 of SEQ ID NO: 2826
gauuucuuaugagagugaa

SEQ ID NO: 219545 - RNA, 19 nt, Artificial Sequence
  Description of Artificial Sequence: Synthetic oligonucleotide
  Antisense strand to SEQ ID NO: 219544
uucacucucauaagaaauc

SEQ ID NO: 219546 - RNA, 19 nt, Artificial Sequence
  Description of Artificial Sequence: Synthetic oligonucleotide
  Sense strand starting at position 3629 of SEQ ID NO: 2826
uucuuaugagagugaaaca

SEQ ID NO: 219547 - RNA, 19 nt, Artificial Sequence
  Description of Artificial Sequence: Synthetic oligonucleotide
  Antisense strand to SEQ ID NO: 219546
uguuucacucucauaagaa

SEQ ID NO: 219548 - RNA, 19 nt, Artificial Sequence
  Description of Artificial Sequence: Synthetic oligonucleotide
  Sense strand starting at position 3716 of SEQ ID NO: 2826
uuaaguaaugcuggauuaa

SEQ ID NO: 219549 - RNA, 19 nt, Artificial Sequence
  Description of Artificial Sequence: Synthetic oligonucleotide
  Antisense strand to SEQ ID NO: 219548
uuaauccagcauuacuuaa

SEQ ID NO: 219550 - RNA, 19 nt, Artificial Sequence
  Description of Artificial Sequence: Synthetic oligonucleotide
  Sense strand starting at position 3747 of SEQ ID NO: 2826
uauuaauggcuuugugaaa

SEQ ID NO: 219551 - RNA, 19 nt, Artificial Sequence
  Description of Artificial Sequence: Synthetic oligonucleotide
  Antisense strand to SEQ ID NO: 219550
uuucacaaagccauuaaua

SEQ ID NO: 219552 - RNA, 19 nt, Artificial Sequence
  Description of Artificial Sequence: Synthetic oligonucleotide
  Sense strand starting at position 3799 of SEQ ID NO: 2826
aggaauuaaguccacguaa

SEQ ID NO: 219553 - RNA, 19 nt, Artificial Sequence
  Description of Artificial Sequence: Synthetic oligonucleotide
  Antisense strand to SEQ ID NO: 219552
uuacguggacuuaauuccu

SEQ ID NO: 219554 - RNA, 19 nt, Artificial Sequence
  Description of Artificial Sequence: Synthetic oligonucleotide
  Sense strand starting at position 3801 of SEQ ID NO: 2826
gaauuaaguccacguaaac

SEQ ID NO: 219555 - RNA, 19 nt, Artificial Sequence
  Description of Artificial Sequence: Synthetic oligonucleotide
  Antisense strand to SEQ ID NO: 219554
guuuacguggacuuaauuc

SEQ ID NO: 219556 - RNA, 19 nt, Artificial Sequence
  Description of Artificial Sequence: Synthetic oligonucleotide
  Sense strand starting at position 3854 of SEQ ID NO: 2826
cucuuucugaagugggaau

SEQ ID NO: 219557 - RNA, 19 nt, Artificial Sequence
  Description of Artificial Sequence: Synthetic oligonucleotide
  Antisense strand to SEQ ID NO: 219556
auucccacuucagaaagag

SEQ ID NO: 219558 - RNA, 19 nt, Artificial Sequence
  Description of Artificial Sequence: Synthetic oligonucleotide
  Sense strand starting at position 3855 of SEQ ID NO: 2826
ucuuucugaagugggaauu

SEQ ID NO: 219559 - RNA, 19 nt, Artificial Sequence
  Description of Artificial Sequence: Synthetic oligonucleotide
  Antisense strand to SEQ ID NO: 219558
aauucccacuucagaaaga

SEQ ID NO: 219560 - RNA, 19 nt, Artificial Sequence
  Description of Artificial Sequence: Synthetic oligonucleotide
  Sense strand starting at position 420 of SEQ ID NO: 2829
cuaaauaaacuguagugua

SEQ ID NO: 219561 - RNA, 19 nt, Artificial Sequence
  Description of Artificial Sequence: Synthetic oligonucleotide
  Antisense strand to SEQ ID NO: 219560
uacacuacaguuuauuuag

SEQ ID NO: 219562 - RNA, 19 nt, Artificial Sequence
  Description of Artificial Sequence: Synthetic oligonucleotide
  Sense strand starting at position 460 of SEQ ID NO: 2829
ggugauagucuauaacuac

SEQ ID NO: 219563 - RNA, 19 nt, Artificial Sequence
  Description of Artificial Sequence: Synthetic oligonucleotide
  Antisense strand to SEQ ID NO: 219562
guaguuauagacuaucacc

SEQ ID NO: 219564 - RNA, 19 nt, Artificial Sequence
  Description of Artificial Sequence: Synthetic oligonucleotide
  Sense strand starting at position 507 of SEQ ID NO: 2829
ucccauguagcugaauuau

SEQ ID NO: 219565 - RNA, 19 nt, Artificial Sequence
  Description of Artificial Sequence: Synthetic oligonucleotide
  Antisense strand to SEQ ID NO: 219564
auaauucagcuacauggga

SEQ ID NO: 219566 - RNA, 19 nt, Artificial Sequence
  Description of Artificial Sequence: Synthetic oligonucleotide
  Sense strand starting at position 557 of SEQ ID NO: 2829
agcuuaagagauuaugcau

SEQ ID NO: 219567 - RNA, 19 nt, Artificial Sequence
  Description of Artificial Sequence: Synthetic oligonucleotide
  Antisense strand to SEQ ID NO: 219566
augcauaaucucuuaagcu

SEQ ID NO: 219568 - RNA, 19 nt, Artificial Sequence
  Description of Artificial Sequence: Synthetic oligonucleotide
  Sense strand starting at position 766 of SEQ ID NO: 2829
acagaaguaguguacaagu

SEQ ID NO: 219569 - RNA, 19 nt, Artificial Sequence
  Description of Artificial Sequence: Synthetic oligonucleotide
  Antisense strand to SEQ ID NO: 219568
acuuguacacuacuucugu

SEQ ID NO: 219570 - RNA, 19 nt, Artificial Sequence
  Description of Artificial Sequence: Synthetic oligonucleotide
  Sense strand starting at position 768 of SEQ ID NO: 2829
agaaguaguguacaaguaa

SEQ ID NO: 219571 - RNA, 19 nt, Artificial Sequence
  Description of Artificial Sequence: Synthetic oligonucleotide
  Antisense strand to SEQ ID NO: 219570
uuacuuguacacuacuucu

SEQ ID NO: 219572 - RNA, 19 nt, Artificial Sequence
  Description of Artificial Sequence: Synthetic oligonucleotide
  Sense strand starting at position 851 of SEQ ID NO: 2829
ccagaaggcugcuuaauca

SEQ ID NO: 219573 - RNA, 19 nt, Artificial Sequence
  Description of Artificial Sequence: Synthetic oligonucleotide
  Antisense strand to SEQ ID NO: 219572
ugauuaagcagccuucugg

SEQ ID NO: 219574 - RNA, 19 nt, Artificial Sequence
  Description of Artificial Sequence: Synthetic oligonucleotide
  Sense strand starting at position 997 of SEQ ID NO: 2829
gggcuucaagugcagauua

SEQ ID NO: 219575 - RNA, 19 nt, Artificial Sequence
  Description of Artificial Sequence: Synthetic oligonucleotide
  Antisense strand to SEQ ID NO: 219574
uaaucugcacuugaagccc

SEQ ID NO: 219576 - RNA, 19 nt, Artificial Sequence
  Description of Artificial Sequence: Synthetic oligonucleotide
  Sense strand starting at position 1002 of SEQ ID NO: 2829
ucaagugcagauuaauaca

SEQ ID NO: 219577 - RNA, 19 nt, Artificial Sequence
  Description of Artificial Sequence: Synthetic oligonucleotide
  Antisense strand to SEQ ID NO: 219576
uguauuaaucugcacuuga

SEQ ID NO: 219578 - RNA, 19 nt, Artificial Sequence
  Description of Artificial Sequence: Synthetic oligonucleotide
  Sense strand starting at position 1078 of SEQ ID NO: 2829
uguuacuaaugagcuuuaa

SEQ ID NO: 219579 - RNA, 19 nt, Artificial Sequence
  Description of Artificial Sequence: Synthetic oligonucleotide
  Antisense strand to SEQ ID NO: 219578
uuaaagcucauuaguaaca

SEQ ID NO: 219580 - RNA, 19 nt, Artificial Sequence
  Description of Artificial Sequence: Synthetic oligonucleotide
  Sense strand starting at position 1246 of SEQ ID NO: 2829
aggcucuaacuuuauguau

SEQ ID NO: 219581 - RNA, 19 nt, Artificial Sequence
  Description of Artificial Sequence: Synthetic oligonucleotide
  Antisense strand to SEQ ID NO: 219580
auacauaaaguuagagccu

SEQ ID NO: 219582 - RNA, 19 nt, Artificial Sequence
  Description of Artificial Sequence: Synthetic oligonucleotide
  Sense strand starting at position 1467 of SEQ ID NO: 2829
gcuaucuaauuaucagaug

SEQ ID NO: 219583 - RNA, 19 nt, Artificial Sequence
  Description of Artificial Sequence: Synthetic oligonucleotide
  Antisense strand to SEQ ID NO: 219582
caucugauaauuagauagc

SEQ ID NO: 219584 - RNA, 19 nt, Artificial Sequence
  Description of Artificial Sequence: Synthetic oligonucleotide
  Sense strand starting at position 1859 of SEQ ID NO: 2829
cuuacacaucuugaagguu

SEQ ID NO: 219585 - RNA, 19 nt, Artificial Sequence
  Description of Artificial Sequence: Synthetic oligonucleotide
  Antisense strand to SEQ ID NO: 219584
aaccuucaagauguguaag

SEQ ID NO: 219586 - RNA, 19 nt, Artificial Sequence
  Description of Artificial Sequence: Synthetic oligonucleotide
  Sense strand starting at position 1868 of SEQ ID NO: 2829
cuugaagguucugugauua

SEQ ID NO: 219587 - RNA, 19 nt, Artificial Sequence
  Description of Artificial Sequence: Synthetic oligonucleotide
  Antisense strand to SEQ ID NO: 219586
uaaucacagaaccuucaag

SEQ ID NO: 219588 - RNA, 19 nt, Artificial Sequence
  Description of Artificial Sequence: Synthetic oligonucleotide
  Sense strand starting at position 1872 of SEQ ID NO: 2829
aagguucugugauuacuga

SEQ ID NO: 219589 - RNA, 19 nt, Artificial Sequence
  Description of Artificial Sequence: Synthetic oligonucleotide
  Antisense strand to SEQ ID NO: 219588
ucaguaaucacagaaccuu

SEQ ID NO: 219590 - RNA, 19 nt, Artificial Sequence
  Description of Artificial Sequence: Synthetic oligonucleotide
  Sense strand starting at position 1964 of SEQ ID NO: 2829
acaagaagucuuuaguccu

SEQ ID NO: 219591 - RNA, 19 nt, Artificial Sequence
  Description of Artificial Sequence: Synthetic oligonucleotide
  Antisense strand to SEQ ID NO: 219590
aggacuaaagacuucuugu

SEQ ID NO: 219592 - RNA, 19 nt, Artificial Sequence
  Description of Artificial Sequence: Synthetic oligonucleotide
  Sense strand starting at position 2035 of SEQ ID NO: 2829
gggugagaauuugaaauuc

SEQ ID NO: 219593 - RNA, 19 nt, Artificial Sequence
  Description of Artificial Sequence: Synthetic oligonucleotide
  Antisense strand to SEQ ID NO: 219592
gaauuucaaauucucaccc

SEQ ID NO: 219594 - RNA, 19 nt, Artificial Sequence
  Description of Artificial Sequence: Synthetic oligonucleotide
  Sense strand starting at position 2044 of SEQ ID NO: 2829
uuugaaauuccaggcaauu

SEQ ID NO: 219595 - RNA, 19 nt, Artificial Sequence
  Description of Artificial Sequence: Synthetic oligonucleotide
  Antisense strand to SEQ ID NO: 219594
aauugccuggaauuucaaa

SEQ ID NO: 219596 - RNA, 19 nt, Artificial Sequence
  Description of Artificial Sequence: Synthetic oligonucleotide
  Sense strand starting at position 2159 of SEQ ID NO: 2829
gguacaagcaucugaggaa

SEQ ID NO: 219597 - RNA, 19 nt, Artificial Sequence
  Description of Artificial Sequence: Synthetic oligonucleotide
  Antisense strand to SEQ ID NO: 219596
uuccucagaugcuuguacc

SEQ ID NO: 219598 - RNA, 19 nt, Artificial Sequence
  Description of Artificial Sequence: Synthetic oligonucleotide
  Sense strand starting at position 2259 of SEQ ID NO: 2829
uagauaaggucuuuauguu

SEQ ID NO: 219599 - RNA, 19 nt, Artificial Sequence
  Description of Artificial Sequence: Synthetic oligonucleotide
  Antisense strand to SEQ ID NO: 219598
aacauaaagaccuuaucua

SEQ ID NO: 219600 - RNA, 19 nt, Artificial Sequence
  Description of Artificial Sequence: Synthetic oligonucleotide
  Sense strand starting at position 2260 of SEQ ID NO: 2829
agauaaggucuuuauguua

SEQ ID NO: 219601 - RNA, 19 nt, Artificial Sequence
  Description of Artificial Sequence: Synthetic oligonucleotide
  Antisense strand to SEQ ID NO: 219600
uaacauaaagaccuuaucu

SEQ ID NO: 219602 - RNA, 19 nt, Artificial Sequence
  Description of Artificial Sequence: Synthetic oligonucleotide
  Sense strand starting at position 2476 of SEQ ID NO: 2829
agauccaagcuuugagaaa

SEQ ID NO: 219603 - RNA, 19 nt, Artificial Sequence
  Description of Artificial Sequence: Synthetic oligonucleotide
  Antisense strand to SEQ ID NO: 219602
uuucucaaagcuuggaucu

SEQ ID NO: 219604 - RNA, 19 nt, Artificial Sequence
  Description of Artificial Sequence: Synthetic oligonucleotide
  Sense strand starting at position 2561 of SEQ ID NO: 2829
auuugcuuguggccagaga

SEQ ID NO: 219605 - RNA, 19 nt, Artificial Sequence
  Description of Artificial Sequence: Synthetic oligonucleotide
  Antisense strand to SEQ ID NO: 219604
ucucuggccacaagcaaau

SEQ ID NO: 219606 - RNA, 19 nt, Artificial Sequence
  Description of Artificial Sequence: Synthetic oligonucleotide
  Sense strand starting at position 2607 of SEQ ID NO: 2829
uuaagaaagucugugaaag

SEQ ID NO: 219607 - RNA, 19 nt, Artificial Sequence
  Description of Artificial Sequence: Synthetic oligonucleotide
  Antisense strand to SEQ ID NO: 219606
cuuucacagacuuucuuaa

SEQ ID NO: 219608 - RNA, 19 nt, Artificial Sequence
  Description of Artificial Sequence: Synthetic oligonucleotide
  Sense strand starting at position 2608 of SEQ ID NO: 2829
uaagaaagucugugaaagc

SEQ ID NO: 219609 - RNA, 19 nt, Artificial Sequence
  Description of Artificial Sequence: Synthetic oligonucleotide
  Antisense strand to SEQ ID NO: 219608
gcuuucacagacuuucuua

SEQ ID NO: 219610 - RNA, 19 nt, Artificial Sequence
  Description of Artificial Sequence: Synthetic oligonucleotide
  Sense strand starting at position 2684 of SEQ ID NO: 2829
agagacauauagccuugau

SEQ ID NO: 219611 - RNA, 19 nt, Artificial Sequence
  Description of Artificial Sequence: Synthetic oligonucleotide
  Antisense strand to SEQ ID NO: 219610
aucaaggcuauaugucucu

SEQ ID NO: 219612 - RNA, 19 nt, Artificial Sequence
  Description of Artificial Sequence: Synthetic oligonucleotide
  Sense strand starting at position 2687 of SEQ ID NO: 2829
gacauauagccuugauuag

SEQ ID NO: 219613 - RNA, 19 nt, Artificial Sequence
  Description of Artificial Sequence: Synthetic oligonucleotide
  Antisense strand to SEQ ID NO: 219612
cuaaucaaggcuauauguc

SEQ ID NO: 219614 - RNA, 19 nt, Artificial Sequence
  Description of Artificial Sequence: Synthetic oligonucleotide
  Sense strand starting at position 2688 of SEQ ID NO: 2829
acauauagccuugauuagu

SEQ ID NO: 219615 - RNA, 19 nt, Artificial Sequence
  Description of Artificial Sequence: Synthetic oligonucleotide
  Antisense strand to SEQ ID NO: 219614
acuaaucaaggcuauaugu

SEQ ID NO: 219616 - RNA, 19 nt, Artificial Sequence
  Description of Artificial Sequence: Synthetic oligonucleotide
  Sense strand starting at position 2728 of SEQ ID NO: 2829
acuacugauguuugguuaa

SEQ ID NO: 219617 - RNA, 19 nt, Artificial Sequence
  Description of Artificial Sequence: Synthetic oligonucleotide
  Antisense strand to SEQ ID NO: 219616
uuaaccaaacaucaguagu

SEQ ID NO: 219618 - RNA, 19 nt, Artificial Sequence
  Description of Artificial Sequence: Synthetic oligonucleotide
  Sense strand starting at position 2880 of SEQ ID NO: 2829
aucacaaccugaucgacau

SEQ ID NO: 219619 - RNA, 19 nt, Artificial Sequence
  Description of Artificial Sequence: Synthetic oligonucleotide
  Antisense strand to SEQ ID NO: 219618
augucgaucagguugugau

SEQ ID NO: 219620 - RNA, 19 nt, Artificial Sequence
  Description of Artificial Sequence: Synthetic oligonucleotide
  Sense strand starting at position 2881 of SEQ ID NO: 2829
ucacaaccugaucgacauu

SEQ ID NO: 219621 - RNA, 19 nt, Artificial Sequence
  Description of Artificial Sequence: Synthetic oligonucleotide
  Antisense strand to SEQ ID NO: 219620
aaugucgaucagguuguga

SEQ ID NO: 219622 - RNA, 19 nt, Artificial Sequence
  Description of Artificial Sequence: Synthetic oligonucleotide
  Sense strand starting at position 2998 of SEQ ID NO: 2829
ccucaauaugaguaggcua

SEQ ID NO: 219623 - RNA, 19 nt, Artificial Sequence
  Description of Artificial Sequence: Synthetic oligonucleotide
  Antisense strand to SEQ ID NO: 219622
uagccuacucauauugagg

SEQ ID NO: 219624 - RNA, 19 nt, Artificial Sequence
  Description of Artificial Sequence: Synthetic oligonucleotide
  Sense strand starting at position 3003 of SEQ ID NO: 2829
auaugaguaggcuauccaa

SEQ ID NO: 219625 - RNA, 19 nt, Artificial Sequence
  Description of Artificial Sequence: Synthetic oligonucleotide
  Antisense strand to SEQ ID NO: 219624
uuggauagccuacucauau

SEQ ID NO: 219626 - RNA, 19 nt, Artificial Sequence
  Description of Artificial Sequence: Synthetic oligonucleotide
  Sense strand starting at position 3028 of SEQ ID NO: 2829
auuugagaaugugggaaau

SEQ ID NO: 219627 - RNA, 19 nt, Artificial Sequence
  Description of Artificial Sequence: Synthetic oligonucleotide
  Antisense strand to SEQ ID NO: 219626
auuucccacauucucaaau

SEQ ID NO: 219628 - RNA, 19 nt, Artificial Sequence
  Description of Artificial Sequence: Synthetic oligonucleotide
  Sense strand starting at position 3151 of SEQ ID NO: 2829
gacuauaucucugugaaug

SEQ ID NO: 219629 - RNA, 19 nt, Artificial Sequence
  Description of Artificial Sequence: Synthetic oligonucleotide
  Antisense strand to SEQ ID NO: 219628
cauucacagagauauaguc

SEQ ID NO: 219630 - RNA, 19 nt, Artificial Sequence
  Description of Artificial Sequence: Synthetic oligonucleotide
  Sense strand starting at position 3152 of SEQ ID NO: 2829
acuauaucucugugaauga

SEQ ID NO: 219631 - RNA, 19 nt, Artificial Sequence
  Description of Artificial Sequence: Synthetic oligonucleotide
  Antisense strand to SEQ ID NO: 219630
ucauucacagagauauagu

SEQ ID NO: 219632 - RNA, 19 nt, Artificial Sequence
  Description of Artificial Sequence: Synthetic oligonucleotide
  Sense strand starting at position 3250 of SEQ ID NO: 2829
uaaguacucucacugaggu

SEQ ID NO: 219633 - RNA, 19 nt, Artificial Sequence
  Description of Artificial Sequence: Synthetic oligonucleotide
  Antisense strand to SEQ ID NO: 219632
accucagugagaguacuua

SEQ ID NO: 219634 - RNA, 19 nt, Artificial Sequence
  Description of Artificial Sequence: Synthetic oligonucleotide
  Sense strand starting at position 3251 of SEQ ID NO: 2829
aaguacucucacugaggua

SEQ ID NO: 219635 - RNA, 19 nt, Artificial Sequence
  Description of Artificial Sequence: Synthetic oligonucleotide
  Antisense strand to SEQ ID NO: 219634
uaccucagugagaguacuu

SEQ ID NO: 219636 - RNA, 19 nt, Artificial Sequence
  Description of Artificial Sequence: Synthetic oligonucleotide
  Sense strand starting at position 3618 of SEQ ID NO: 2829
ugacaaauugauuguaccu

SEQ ID NO: 219637 - RNA, 19 nt, Artificial Sequence
  Description of Artificial Sequence: Synthetic oligonucleotide
  Antisense strand to SEQ ID NO: 219636
agguacaaucaauuuguca

SEQ ID NO: 219638 - RNA, 19 nt, Artificial Sequence
  Description of Artificial Sequence: Synthetic oligonucleotide
  Sense strand starting at position 3708 of SEQ ID NO: 2829
gucuuugaaugauucuaac

SEQ ID NO: 219639 - RNA, 19 nt, Artificial Sequence
  Description of Artificial Sequence: Synthetic oligonucleotide
  Antisense strand to SEQ ID NO: 219638
guuagaaucauucaaagac

SEQ ID NO: 219640 - RNA, 19 nt, Artificial Sequence
  Description of Artificial Sequence: Synthetic oligonucleotide
  Sense strand starting at position 27 of SEQ ID NO: 2828
acucuaaaguggucagaau

SEQ ID NO: 219641 - RNA, 19 nt, Artificial Sequence
  Description of Artificial Sequence: Synthetic oligonucleotide
  Antisense strand to SEQ ID NO: 219640
auucugaccacuuuagagu

SEQ ID NO: 219642 - RNA, 19 nt, Artificial Sequence
  Description of Artificial Sequence: Synthetic oligonucleotide
  Sense strand starting at position 28 of SEQ ID NO: 2828
cucuaaaguggucagaauu

SEQ ID NO: 219643 - RNA, 19 nt, Artificial Sequence
  Description of Artificial Sequence: Synthetic oligonucleotide
  Antisense strand to SEQ ID NO: 219642
aauucugaccacuuuagag

SEQ ID NO: 219644 - RNA, 19 nt, Artificial Sequence
  Description of Artificial Sequence: Synthetic oligonucleotide
  Sense strand starting at position 38 of SEQ ID NO: 2828
gucagaauuuaguaggaaa

SEQ ID NO: 219645 - RNA, 19 nt, Artificial Sequence
  Description of Artificial Sequence: Synthetic oligonucleotide
  Antisense strand to SEQ ID NO: 219644
uuuccuacuaaauucugac

SEQ ID NO: 219646 - RNA, 19 nt, Artificial Sequence
  Description of Artificial Sequence: Synthetic oligonucleotide
  Sense strand starting at position 126 of SEQ ID NO: 2828
guuaguacucgcuugucaa

SEQ ID NO: 219647 - RNA, 19 nt, Artificial Sequence
  Description of Artificial Sequence: Synthetic oligonucleotide
  Antisense strand to SEQ ID NO: 219646
uugacaagcgaguacuaac

SEQ ID NO: 219648 - RNA, 19 nt, Artificial Sequence
  Description of Artificial Sequence: Synthetic oligonucleotide
  Sense strand starting at position 139 of SEQ ID NO: 2828
ugucaacauuucucacguu

SEQ ID NO: 219649 - RNA, 19 nt, Artificial Sequence
  Description of Artificial Sequence: Synthetic oligonucleotide
  Antisense strand to SEQ ID NO: 219648
aacgugagaaauguugaca

SEQ ID NO: 219650 - RNA, 19 nt, Artificial Sequence
  Description of Artificial Sequence: Synthetic oligonucleotide
  Sense strand starting at position 149 of SEQ ID NO: 2828
ucucacguuuacuuagaaa

SEQ ID NO: 219651 - RNA, 19 nt, Artificial Sequence
  Description of Artificial Sequence: Synthetic oligonucleotide
  Antisense strand to SEQ ID NO: 219650
uuucuaaguaaacgugaga

SEQ ID NO: 219652 - RNA, 19 nt, Artificial Sequence
  Description of Artificial Sequence: Synthetic oligonucleotide
  Sense strand starting at position 261 of SEQ ID NO: 2828
gcacacugacuuuaguauu

SEQ ID NO: 219653 - RNA, 19 nt, Artificial Sequence
  Description of Artificial Sequence: Synthetic oligonucleotide
  Antisense strand to SEQ ID NO: 219652
aauacuaaagucagugugc

SEQ ID NO: 219654 - RNA, 19 nt, Artificial Sequence
  Description of Artificial Sequence: Synthetic oligonucleotide
  Sense strand starting at position 296 of SEQ ID NO: 2828
cagaauucugcaugaggug

SEQ ID NO: 219655 - RNA, 19 nt, Artificial Sequence
  Description of Artificial Sequence: Synthetic oligonucleotide
  Antisense strand to SEQ ID NO: 219654
caccucaugcagaauucug

SEQ ID NO: 219656 - RNA, 19 nt, Artificial Sequence
  Description of Artificial Sequence: Synthetic oligonucleotide
  Sense strand starting at position 297 of SEQ ID NO: 2828
agaauucugcaugaggugu

SEQ ID NO: 219657 - RNA, 19 nt, Artificial Sequence
  Description of Artificial Sequence: Synthetic oligonucleotide
  Antisense strand to SEQ ID NO: 219656
acaccucaugcagaauucu

SEQ ID NO: 219658 - RNA, 19 nt, Artificial Sequence
  Description of Artificial Sequence: Synthetic oligonucleotide
  Sense strand starting at position 338 of SEQ ID NO: 2828
cagagagguccucauguuc

SEQ ID NO: 219659 - RNA, 19 nt, Artificial Sequence
  Description of Artificial Sequence: Synthetic oligonucleotide
  Antisense strand to SEQ ID NO: 219658
gaacaugaggaccucucug

SEQ ID NO: 219660 - RNA, 19 nt, Artificial Sequence
  Description of Artificial Sequence: Synthetic oligonucleotide
  Sense strand starting at position 612 of SEQ ID NO: 2828
caaguaugcccaguucguu

SEQ ID NO: 219661 - RNA, 19 nt, Artificial Sequence
  Description of Artificial Sequence: Synthetic oligonucleotide
  Antisense strand to SEQ ID NO: 219660
aacgaacugggcauacuug

SEQ ID NO: 219662 - RNA, 19 nt, Artificial Sequence
  Description of Artificial Sequence: Synthetic oligonucleotide
  Sense strand starting at position 713 of SEQ ID NO: 2828
aaggguacgacucaacgua

SEQ ID NO: 219663 - RNA, 19 nt, Artificial Sequence
  Description of Artificial Sequence: Synthetic oligonucleotide
  Antisense strand to SEQ ID NO: 219662
uacguugagucguacccuu

SEQ ID NO: 219664 - RNA, 19 nt, Artificial Sequence
  Description of Artificial Sequence: Synthetic oligonucleotide
  Sense strand starting at position 773 of SEQ ID NO: 2828
gucacugaaagcgaugaaa

SEQ ID NO: 219665 - RNA, 19 nt, Artificial Sequence
  Description of Artificial Sequence: Synthetic oligonucleotide
  Antisense strand to SEQ ID NO: 219664
uuucaucgcuuucagugac

SEQ ID NO: 219666 - RNA, 19 nt, Artificial Sequence
  Description of Artificial Sequence: Synthetic oligonucleotide
  Sense strand starting at position 775 of SEQ ID NO: 2828
cacugaaagcgaugaaaca

SEQ ID NO: 219667 - RNA, 19 nt, Artificial Sequence
  Description of Artificial Sequence: Synthetic oligonucleotide
  Antisense strand to SEQ ID NO: 219666
uguuucaucgcuuucagug

SEQ ID NO: 219668 - RNA, 19 nt, Artificial Sequence
  Description of Artificial Sequence: Synthetic oligonucleotide
  Sense strand starting at position 830 of SEQ ID NO: 2828
gcucccaaggcugagaaau

SEQ ID NO: 219669 - RNA, 19 nt, Artificial Sequence
  Description of Artificial Sequence: Synthetic oligonucleotide
  Antisense strand to SEQ ID NO: 219668
auuucucagccuugggagc

SEQ ID NO: 219670 - RNA, 19 nt, Artificial Sequence
  Description of Artificial Sequence: Synthetic oligonucleotide
  Sense strand starting at position 913 of SEQ ID NO: 2828
gaggcaauccugcacaaga

SEQ ID NO: 219671 - RNA, 19 nt, Artificial Sequence
  Description of Artificial Sequence: Synthetic oligonucleotide
  Antisense strand to SEQ ID NO: 219670
ucuugugcaggauugccuc

SEQ ID NO: 219672 - RNA, 19 nt, Artificial Sequence
  Description of Artificial Sequence: Synthetic oligonucleotide
  Sense strand starting at position 915 of SEQ ID NO: 2828
ggcaauccugcacaagagu

SEQ ID NO: 219673 - RNA, 19 nt, Artificial Sequence
  Description of Artificial Sequence: Synthetic oligonucleotide
  Antisense strand to SEQ ID NO: 219672
acucuugugcaggauugcc

SEQ ID NO: 219674 - RNA, 19 nt, Artificial Sequence
  Description of Artificial Sequence: Synthetic oligonucleotide
  Sense strand starting at position 923 of SEQ ID NO: 2828
ugcacaagaguuuguaaag

SEQ ID NO: 219675 - RNA, 19 nt, Artificial Sequence
  Description of Artificial Sequence: Synthetic oligonucleotide
  Antisense strand to SEQ ID NO: 219674
cuuuacaaacucuugugca

SEQ ID NO: 219676 - RNA, 19 nt, Artificial Sequence
  Description of Artificial Sequence: Synthetic oligonucleotide
  Sense strand starting at position 934 of SEQ ID NO: 2828
uuguaaagugcuuaggaag

SEQ ID NO: 219677 - RNA, 19 nt, Artificial Sequence
  Description of Artificial Sequence: Synthetic oligonucleotide
  Antisense strand to SEQ ID NO: 219676
cuuccuaagcacuuuacaa

SEQ ID NO: 219678 - RNA, 19 nt, Artificial Sequence
  Description of Artificial Sequence: Synthetic oligonucleotide
  Sense strand starting at position 950 of SEQ ID NO: 2828
aagcuuguaggaugaaaga

SEQ ID NO: 219679 - RNA, 19 nt, Artificial Sequence
  Description of Artificial Sequence: Synthetic oligonucleotide
  Antisense strand to SEQ ID NO: 219678
ucuuucauccuacaagcuu

SEQ ID NO: 219680 - RNA, 19 nt, Artificial Sequence
  Description of Artificial Sequence: Synthetic oligonucleotide
  Sense strand starting at position 2122 of SEQ ID NO: 2828
cucagaucucgcgagaaga

SEQ ID NO: 219681 - RNA, 19 nt, Artificial Sequence
  Description of Artificial Sequence: Synthetic oligonucleotide
  Antisense strand to SEQ ID NO: 219680
ucuucucgcgagaucugag

SEQ ID NO: 219682 - RNA, 19 nt, Artificial Sequence
  Description of Artificial Sequence: Synthetic oligonucleotide
  Sense strand starting at position 2478 of SEQ ID NO: 2828
aggauagucuugaggagga

SEQ ID NO: 219683 - RNA, 19 nt, Artificial Sequence
  Description of Artificial Sequence: Synthetic oligonucleotide
  Antisense strand to SEQ ID NO: 219682
uccuccucaagacuauccu

SEQ ID NO: 219684 - RNA, 19 nt, Artificial Sequence
  Description of Artificial Sequence: Synthetic oligonucleotide
  Sense strand starting at position 2564 of SEQ ID NO: 2828
agggauggguacuugagua

SEQ ID NO: 219685 - RNA, 19 nt, Artificial Sequence
  Description of Artificial Sequence: Synthetic oligonucleotide
  Antisense strand to SEQ ID NO: 219684
uacucaaguacccaucccu

SEQ ID NO: 219686 - RNA, 19 nt, Artificial Sequence
  Description of Artificial Sequence: Synthetic oligonucleotide
  Sense strand starting at position 2642 of SEQ ID NO: 2828
cuguaugcucaacaaggua

SEQ ID NO: 219687 - RNA, 19 nt, Artificial Sequence
  Description of Artificial Sequence: Synthetic oligonucleotide
  Antisense strand to SEQ ID NO: 219686
uaccuuguugagcauacag

SEQ ID NO: 219688 - RNA, 19 nt, Artificial Sequence
  Description of Artificial Sequence: Synthetic oligonucleotide
  Sense strand starting at position 2870 of SEQ ID NO: 2828
uguuaaguggaaugauaga

SEQ ID NO: 219689 - RNA, 19 nt, Artificial Sequence
  Description of Artificial Sequence: Synthetic oligonucleotide
  Antisense strand to SEQ ID NO: 219688
ucuaucauuccacuuaaca

SEQ ID NO: 219690 - RNA, 19 nt, Artificial Sequence
  Description of Artificial Sequence: Synthetic oligonucleotide
  Sense strand starting at position 3021 of SEQ ID NO: 2828
aggcguuuggucgcuuuau

SEQ ID NO: 219691 - RNA, 19 nt, Artificial Sequence
  Description of Artificial Sequence: Synthetic oligonucleotide
  Antisense strand to SEQ ID NO: 219690
auaaagcgaccaaacgccu

SEQ ID NO: 219692 - RNA, 19 nt, Artificial Sequence
  Description of Artificial Sequence: Synthetic oligonucleotide
  Sense strand starting at position 3023 of SEQ ID NO: 2828
gcguuuggucgcuuuauag

SEQ ID NO: 219693 - RNA, 19 nt, Artificial Sequence
  Description of Artificial Sequence: Synthetic oligonucleotide
  Antisense strand to SEQ ID NO: 219692
cuauaaagcgaccaaacgc

SEQ ID NO: 219694 - RNA, 19 nt, Artificial Sequence
  Description of Artificial Sequence: Synthetic oligonucleotide
  Sense strand starting at position 3071 of SEQ ID NO: 2828
ugcuguccauuuguuauga

SEQ ID NO: 219695 - RNA, 19 nt, Artificial Sequence
  Description of Artificial Sequence: Synthetic oligonucleotide
  Antisense strand to SEQ ID NO: 219694
ucauaacaaauggacagca

SEQ ID NO: 219696 - RNA, 19 nt, Artificial Sequence
  Description of Artificial Sequence: Synthetic oligonucleotide
  Sense strand starting at position 3072 of SEQ ID NO: 2828
gcuguccauuuguuaugaa

SEQ ID NO: 219697 - RNA, 19 nt, Artificial Sequence
  Description of Artificial Sequence: Synthetic oligonucleotide
  Antisense strand to SEQ ID NO: 219696
uucauaacaaauggacagc

SEQ ID NO: 219698 - RNA, 19 nt, Artificial Sequence
  Description of Artificial Sequence: Synthetic oligonucleotide
  Sense strand starting at position 3114 of SEQ ID NO: 2828
ugcccaauugcuguuaugu

SEQ ID NO: 219699 - RNA, 19 nt, Artificial Sequence
  Description of Artificial Sequence: Synthetic oligonucleotide
  Antisense strand to SEQ ID NO: 219698
acauaacagcaauugggca

SEQ ID NO: 219700 - RNA, 19 nt, Artificial Sequence
  Description of Artificial Sequence: Synthetic oligonucleotide
  Sense strand starting at position 3115 of SEQ ID NO: 2828
gcccaauugcuguuauguu

SEQ ID NO: 219701 - RNA, 19 nt, Artificial Sequence
  Description of Artificial Sequence: Synthetic oligonucleotide
  Antisense strand to SEQ ID NO: 219700
aacauaacagcaauugggc

SEQ ID NO: 219702 - RNA, 19 nt, Artificial Sequence
  Description of Artificial Sequence: Synthetic oligonucleotide
  Sense strand starting at position 3141 of SEQ ID NO: 2828
cugacucugcaagggaaua

SEQ ID NO: 219703 - RNA, 19 nt, Artificial Sequence
  Description of Artificial Sequence: Synthetic oligonucleotide
  Antisense strand to SEQ ID NO: 219702
uauucccuugcagagucag

SEQ ID NO: 219704 - RNA, 19 nt, Artificial Sequence
  Description of Artificial Sequence: Synthetic oligonucleotide
  Sense strand starting at position 3151 of SEQ ID NO: 2828
aagggaauacgugaguucu

SEQ ID NO: 219705 - RNA, 19 nt, Artificial Sequence
  Description of Artificial Sequence: Synthetic oligonucleotide
  Antisense strand to SEQ ID NO: 219704
agaacucacguauucccuu

SEQ ID NO: 219706 - RNA, 19 nt, Artificial Sequence
  Description of Artificial Sequence: Synthetic oligonucleotide
  Sense strand starting at position 3336 of SEQ ID NO: 2828
gaugacuaagcuuaugagu

SEQ ID NO: 219707 - RNA, 19 nt, Artificial Sequence
  Description of Artificial Sequence: Synthetic oligonucleotide
  Antisense strand to SEQ ID NO: 219706
acucauaagcuuagucauc

SEQ ID NO: 219708 - RNA, 19 nt, Artificial Sequence
  Description of Artificial Sequence: Synthetic oligonucleotide
  Sense strand starting at position 3440 of SEQ ID NO: 2828
uuugguauuggcuaauuaa

SEQ ID NO: 219709 - RNA, 19 nt, Artificial Sequence
  Description of Artificial Sequence: Synthetic oligonucleotide
  Antisense strand to SEQ ID NO: 219708
uuaauuagccaauaccaaa

SEQ ID NO: 219710 - RNA, 19 nt, Artificial Sequence
  Description of Artificial Sequence: Synthetic oligonucleotide
  Sense strand starting at position 3485 of SEQ ID NO: 2828
ugcuuaagacaauaucugu

SEQ ID NO: 219711 - RNA, 19 nt, Artificial Sequence
  Description of Artificial Sequence: Synthetic oligonucleotide
  Antisense strand to SEQ ID NO: 219710
acagauauugucuuaagca

SEQ ID NO: 219712 - RNA, 19 nt, Artificial Sequence
  Description of Artificial Sequence: Synthetic oligonucleotide
  Sense strand starting at position 3580 of SEQ ID NO: 2828
aagauaaugucagccuuga

SEQ ID NO: 219713 - RNA, 19 nt, Artificial Sequence
  Description of Artificial Sequence: Synthetic oligonucleotide
  Antisense strand to SEQ ID NO: 219712
ucaaggcugacauuaucuu

SEQ ID NO: 219714 - RNA, 19 nt, Artificial Sequence
  Description of Artificial Sequence: Synthetic oligonucleotide
  Sense strand starting at position 3584 of SEQ ID NO: 2828
uaaugucagccuugaauag

SEQ ID NO: 219715 - RNA, 19 nt, Artificial Sequence
  Description of Artificial Sequence: Synthetic oligonucleotide
  Antisense strand to SEQ ID NO: 219714
cuauucaaggcugacauua

SEQ ID NO: 219716 - RNA, 19 nt, Artificial Sequence
  Description of Artificial Sequence: Synthetic oligonucleotide
  Sense strand starting at position 3780 of SEQ ID NO: 2828
aagaauauguguucuugga

SEQ ID NO: 219717 - RNA, 19 nt, Artificial Sequence
  Description of Artificial Sequence: Synthetic oligonucleotide
  Antisense strand to SEQ ID NO: 219716
uccaagaacacauauucuu

SEQ ID NO: 219718 - RNA, 19 nt, Artificial Sequence
  Description of Artificial Sequence: Synthetic oligonucleotide
  Sense strand starting at position 3956 of SEQ ID NO: 2828
uuuaaagagcccugagaac

SEQ ID NO: 219719 - RNA, 19 nt, Artificial Sequence
  Description of Artificial Sequence: Synthetic oligonucleotide
  Antisense strand to SEQ ID NO: 219718
guucucagggcucuuuaaa

SEQ ID NO: 219720 - RNA, 19 nt, Artificial Sequence
  Description of Artificial Sequence: Synthetic oligonucleotide
  Sense strand starting at position 36 of SEQ ID NO: 2830
cugggugaagcccaguaau

SEQ ID NO: 219721 - RNA, 19 nt, Artificial Sequence
  Description of Artificial Sequence: Synthetic oligonucleotide
  Antisense strand to SEQ ID NO: 219720
auuacugggcuucacccag

SEQ ID NO: 219722 - RNA, 19 nt, Artificial Sequence
  Description of Artificial Sequence: Synthetic oligonucleotide
  Sense strand starting at position 114 of SEQ ID NO: 2830
ccaauacaccaguguauua

SEQ ID NO: 219723 - RNA, 19 nt, Artificial Sequence
  Description of Artificial Sequence: Synthetic oligonucleotide
  Antisense strand to SEQ ID NO: 219722
uaauacacugguguauugg

SEQ ID NO: 219724 - RNA, 19 nt, Artificial Sequence
  Description of Artificial Sequence: Synthetic oligonucleotide
  Sense strand starting at position 124 of SEQ ID NO: 2830
aguguauuagaucaaaguu

SEQ ID NO: 219725 - RNA, 19 nt, Artificial Sequence
  Description of Artificial Sequence: Synthetic oligonucleotide
  Antisense strand to SEQ ID NO: 219724
aacuuugaucuaauacacu

SEQ ID NO: 219726 - RNA, 19 nt, Artificial Sequence
  Description of Artificial Sequence: Synthetic oligonucleotide
  Sense strand starting at position 183 of SEQ ID NO: 2830
agucaacugaguugggaaa

SEQ ID NO: 219727 - RNA, 19 nt, Artificial Sequence
  Description of Artificial Sequence: Synthetic oligonucleotide
  Antisense strand to SEQ ID NO: 219726
uuucccaacucaguugacu

SEQ ID NO: 219728 - RNA, 19 nt, Artificial Sequence
  Description of Artificial Sequence: Synthetic oligonucleotide
  Sense strand starting at position 731 of SEQ ID NO: 2830
cagugaggcagguauugua

SEQ ID NO: 219729 - RNA, 19 nt, Artificial Sequence
  Description of Artificial Sequence: Synthetic oligonucleotide
  Antisense strand to SEQ ID NO: 219728
uacaauaccugccucacug

SEQ ID NO: 219730 - RNA, 19 nt, Artificial Sequence
  Description of Artificial Sequence: Synthetic oligonucleotide
  Sense strand starting at position 741 of SEQ ID NO: 2830
gguauuguauuacuaccua

SEQ ID NO: 219731 - RNA, 19 nt, Artificial Sequence
  Description of Artificial Sequence: Synthetic oligonucleotide
  Antisense strand to SEQ ID NO: 219730
uagguaguaauacaauacc

SEQ ID NO: 219732 - RNA, 19 nt, Artificial Sequence
  Description of Artificial Sequence: Synthetic oligonucleotide
  Sense strand starting at position 753 of SEQ ID NO: 2830
cuaccuacauguuuccaga

SEQ ID NO: 219733 - RNA, 19 nt, Artificial Sequence
  Description of Artificial Sequence: Synthetic oligonucleotide
  Antisense strand to SEQ ID NO: 219732
ucuggaaacauguagguag

SEQ ID NO: 219734 - RNA, 19 nt, Artificial Sequence
  Description of Artificial Sequence: Synthetic oligonucleotide
  Sense strand starting at position 787 of SEQ ID NO: 2830
uagagacuuuagguaacuu

SEQ ID NO: 219735 - RNA, 19 nt, Artificial Sequence
  Description of Artificial Sequence: Synthetic oligonucleotide
  Antisense strand to SEQ ID NO: 219734
aaguuaccuaaagucucua

SEQ ID NO: 219736 - RNA, 19 nt, Artificial Sequence
  Description of Artificial Sequence: Synthetic oligonucleotide
  Sense strand starting at position 798 of SEQ ID NO: 2830
gguaacuugcuccaaguga

SEQ ID NO: 219737 - RNA, 19 nt, Artificial Sequence
  Description of Artificial Sequence: Synthetic oligonucleotide
  Antisense strand to SEQ ID NO: 219736
ucacuuggagcaaguuacc

SEQ ID NO: 219738 - RNA, 19 nt, Artificial Sequence
  Description of Artificial Sequence: Synthetic oligonucleotide
  Sense strand starting at position 820 of SEQ ID NO: 2830
accuaauaauagcuggaua

SEQ ID NO: 219739 - RNA, 19 nt, Artificial Sequence
  Description of Artificial Sequence: Synthetic oligonucleotide
  Antisense strand to SEQ ID NO: 219738
uauccagcuauuauuaggu

SEQ ID NO: 219740 - RNA, 19 nt, Artificial Sequence
  Description of Artificial Sequence: Synthetic oligonucleotide
  Sense strand starting at position 843 of SEQ ID NO: 2830
agaaaucuuuggucuacua

SEQ ID NO: 219741 - RNA, 19 nt, Artificial Sequence
  Description of Artificial Sequence: Synthetic oligonucleotide
  Antisense strand to SEQ ID NO: 219740
uaguagaccaaagauuucu

SEQ ID NO: 219742 - RNA, 19 nt, Artificial Sequence
  Description of Artificial Sequence: Synthetic oligonucleotide
  Sense strand starting at position 905 of SEQ ID NO: 2830
ugauaacgccuguaacaau

SEQ ID NO: 219743 - RNA, 19 nt, Artificial Sequence
  Description of Artificial Sequence: Synthetic oligonucleotide
  Antisense strand to SEQ ID NO: 219742
auuguuacaggcguuauca

SEQ ID NO: 219744 - RNA, 19 nt, Artificial Sequence
  Description of Artificial Sequence: Synthetic oligonucleotide
  Sense strand starting at position 979 of SEQ ID NO: 2830
uccauaguaggaugauaau

SEQ ID NO: 219745 - RNA, 19 nt, Artificial Sequence
  Description of Artificial Sequence: Synthetic oligonucleotide
  Antisense strand to SEQ ID NO: 219744
auuaucauccuacuaugga

SEQ ID NO: 219746 - RNA, 19 nt, Artificial Sequence
  Description of Artificial Sequence: Synthetic oligonucleotide
  Sense strand starting at position 1065 of SEQ ID NO: 2830
guuaacugaucugcugaga

SEQ ID NO: 219747 - RNA, 19 nt, Artificial Sequence
  Description of Artificial Sequence: Synthetic oligonucleotide
  Antisense strand to SEQ ID NO: 219746
ucucagcagaucaguuaac

SEQ ID NO: 219748 - RNA, 19 nt, Artificial Sequence
  Description of Artificial Sequence: Synthetic oligonucleotide
  Sense strand starting at position 1112 of SEQ ID NO: 2830
cgagucucugcacaucuaa

SEQ ID NO: 219749 - RNA, 19 nt, Artificial Sequence
  Description of Artificial Sequence: Synthetic oligonucleotide
  Antisense strand to SEQ ID NO: 219748
uuagaugugcagagacucg

SEQ ID NO: 219750 - RNA, 19 nt, Artificial Sequence
  Description of Artificial Sequence: Synthetic oligonucleotide
  Sense strand starting at position 1254 of SEQ ID NO: 2830
aguuaaacucagugaaauu

SEQ ID NO: 219751 - RNA, 19 nt, Artificial Sequence
  Description of Artificial Sequence: Synthetic oligonucleotide
  Antisense strand to SEQ ID NO: 219750
aauuucacugaguuuaacu

SEQ ID NO: 219752 - RNA, 19 nt, Artificial Sequence
  Description of Artificial Sequence: Synthetic oligonucleotide
  Sense strand starting at position 1312 of SEQ ID NO: 2830
cccagagcucguuagagag

SEQ ID NO: 219753 - RNA, 19 nt, Artificial Sequence
  Description of Artificial Sequence: Synthetic oligonucleotide
  Antisense strand to SEQ ID NO: 219752
cucucuaacgagcucuggg

SEQ ID NO: 219754 - RNA, 19 nt, Artificial Sequence
  Description of Artificial Sequence: Synthetic oligonucleotide
  Sense strand starting at position 1358 of SEQ ID NO: 2830
guuauuaccucacuggaga

SEQ ID NO: 219755 - RNA, 19 nt, Artificial Sequence
  Description of Artificial Sequence: Synthetic oligonucleotide
  Antisense strand to SEQ ID NO: 219754
ucuccagugagguaauaac

SEQ ID NO: 219756 - RNA, 19 nt, Artificial Sequence
  Description of Artificial Sequence: Synthetic oligonucleotide
  Sense strand starting at position 1359 of SEQ ID NO: 2830
uuauuaccucacuggagau

SEQ ID NO: 219757 - RNA, 19 nt, Artificial Sequence
  Description of Artificial Sequence: Synthetic oligonucleotide
  Antisense strand to SEQ ID NO: 219756
aucuccagugagguaauaa

SEQ ID NO: 219758 - RNA, 19 nt, Artificial Sequence
  Description of Artificial Sequence: Synthetic oligonucleotide
  Sense strand starting at position 1530 of SEQ ID NO: 2830
ggauauaaugccggcaaga

SEQ ID NO: 219759 - RNA, 19 nt, Artificial Sequence
  Description of Artificial Sequence: Synthetic oligonucleotide
  Antisense strand to SEQ ID NO: 219758
ucuugccggcauuauaucc

SEQ ID NO: 219760 - RNA, 19 nt, Artificial Sequence
  Description of Artificial Sequence: Synthetic oligonucleotide
  Sense strand starting at position 1549 of SEQ ID NO: 2830
ggcauaagagugcaaguaa

SEQ ID NO: 219761 - RNA, 19 nt, Artificial Sequence
  Description of Artificial Sequence: Synthetic oligonucleotide
  Antisense strand to SEQ ID NO: 219760
uuacuugcacucuuaugcc

SEQ ID NO: 219762 - RNA, 19 nt, Artificial Sequence
  Description of Artificial Sequence: Synthetic oligonucleotide
  Sense strand starting at position 1998 of SEQ ID NO: 2830
cacggaguucgauaauuac

SEQ ID NO: 219763 - RNA, 19 nt, Artificial Sequence
  Description of Artificial Sequence: Synthetic oligonucleotide
  Antisense strand to SEQ ID NO: 219762
guaauuaucgaacuccgug

SEQ ID NO: 219764 - RNA, 19 nt, Artificial Sequence
  Description of Artificial Sequence: Synthetic oligonucleotide
  Sense strand starting at position 2001 of SEQ ID NO: 2830
ggaguucgauaauuaccua

SEQ ID NO: 219765 - RNA, 19 nt, Artificial Sequence
  Description of Artificial Sequence: Synthetic oligonucleotide
  Antisense strand to SEQ ID NO: 219764
uagguaauuaucgaacucc

SEQ ID NO: 219766 - RNA, 19 nt, Artificial Sequence
  Description of Artificial Sequence: Synthetic oligonucleotide
  Sense strand starting at position 2004 of SEQ ID NO: 2830
guucgauaauuaccuagag

SEQ ID NO: 219767 - RNA, 19 nt, Artificial Sequence
  Description of Artificial Sequence: Synthetic oligonucleotide
  Antisense strand to SEQ ID NO: 219766
cucuagguaauuaucgaac

SEQ ID NO: 219768 - RNA, 19 nt, Artificial Sequence
  Description of Artificial Sequence: Synthetic oligonucleotide
  Sense strand starting at position 2333 of SEQ ID NO: 2830
uacgaugggaauuguaguu

SEQ ID NO: 219769 - RNA, 19 nt, Artificial Sequence
  Description of Artificial Sequence: Synthetic oligonucleotide
  Antisense strand to SEQ ID NO: 219768
aacuacaauucccaucgua

SEQ ID NO: 219770 - RNA, 19 nt, Artificial Sequence
  Description of Artificial Sequence: Synthetic oligonucleotide
  Sense strand starting at position 2531 of SEQ ID NO: 2830
uuuauaagaguuugaccaa

SEQ ID NO: 219771 - RNA, 19 nt, Artificial Sequence
  Description of Artificial Sequence: Synthetic oligonucleotide
  Antisense strand to SEQ ID NO: 219770
uuggucaaacucuuauaaa

SEQ ID NO: 219772 - RNA, 19 nt, Artificial Sequence
  Description of Artificial Sequence: Synthetic oligonucleotide
  Sense strand starting at position 2549 of SEQ ID NO: 2830
acaguuaagugccuaauaa

SEQ ID NO: 219773 - RNA, 19 nt, Artificial Sequence
  Description of Artificial Sequence: Synthetic oligonucleotide
  Antisense strand to SEQ ID NO: 219772
uuauuaggcacuuaacugu

SEQ ID NO: 219774 - RNA, 19 nt, Artificial Sequence
  Description of Artificial Sequence: Synthetic oligonucleotide
  Sense strand starting at position 2571 of SEQ ID NO: 2830
ccaagauauccaggccaua

SEQ ID NO: 219775 - RNA, 19 nt, Artificial Sequence
  Description of Artificial Sequence: Synthetic oligonucleotide
  Antisense strand to SEQ ID NO: 219774
uauggccuggauaucuugg

SEQ ID NO: 219776 - RNA, 19 nt, Artificial Sequence
  Description of Artificial Sequence: Synthetic oligonucleotide
  Sense strand starting at position 2585 of SEQ ID NO: 2830
ccauaagaaugggagaaua

SEQ ID NO: 219777 - RNA, 19 nt, Artificial Sequence
  Description of Artificial Sequence: Synthetic oligonucleotide
  Antisense strand to SEQ ID NO: 219776
uauucucccauucuuaugg

SEQ ID NO: 219778 - RNA, 19 nt, Artificial Sequence
  Description of Artificial Sequence: Synthetic oligonucleotide
  Sense strand starting at position 2686 of SEQ ID NO: 2830
acugguaugaccugagaau

SEQ ID NO: 219779 - RNA, 19 nt, Artificial Sequence
  Description of Artificial Sequence: Synthetic oligonucleotide
  Antisense strand to SEQ ID NO: 219778
auucucaggucauaccagu

SEQ ID NO: 219780 - RNA, 19 nt, Artificial Sequence
  Description of Artificial Sequence: Synthetic oligonucleotide
  Sense strand starting at position 2706 of SEQ ID NO: 2830
aagagauugccuggcugag

SEQ ID NO: 219781 - RNA, 19 nt, Artificial Sequence
  Description of Artificial Sequence: Synthetic oligonucleotide
  Antisense strand to SEQ ID NO: 219780
cucagccaggcaaucucuu

SEQ ID NO: 219782 - RNA, 19 nt, Artificial Sequence
  Description of Artificial Sequence: Synthetic oligonucleotide
  Sense strand starting at position 2893 of SEQ ID NO: 2830
cugguuucuccacacacuu

SEQ ID NO: 219783 - RNA, 19 nt, Artificial Sequence
  Description of Artificial Sequence: Synthetic oligonucleotide
  Antisense strand to SEQ ID NO: 219782
aaguguguggagaaaccag

SEQ ID NO: 219784 - RNA, 19 nt, Artificial Sequence
  Description of Artificial Sequence: Synthetic oligonucleotide
  Sense strand starting at position 2953 of SEQ ID NO: 2830
ggaggcagagugugaugau

SEQ ID NO: 219785 - RNA, 19 nt, Artificial Sequence
  Description of Artificial Sequence: Synthetic oligonucleotide
  Antisense strand to SEQ ID NO: 219784
aucaucacacucugccucc

SEQ ID NO: 219786 - RNA, 19 nt, Artificial Sequence
  Description of Artificial Sequence: Synthetic oligonucleotide
  Sense strand starting at position 3005 of SEQ ID NO: 2830
uuugaaucuugaguccuuu

SEQ ID NO: 219787 - RNA, 19 nt, Artificial Sequence
  Description of Artificial Sequence: Synthetic oligonucleotide
  Antisense strand to SEQ ID NO: 219786
aaaggacucaagauucaaa

SEQ ID NO: 219788 - RNA, 19 nt, Artificial Sequence
  Description of Artificial Sequence: Synthetic oligonucleotide
  Sense strand starting at position 3319 of SEQ ID NO: 2830
ggugaugguuaauucugaa

SEQ ID NO: 219789 - RNA, 19 nt, Artificial Sequence
  Description of Artificial Sequence: Synthetic oligonucleotide
  Antisense strand to SEQ ID NO: 219788
uucagaauuaaccaucacc

SEQ ID NO: 219790 - RNA, 19 nt, Artificial Sequence
  Description of Artificial Sequence: Synthetic oligonucleotide
  Sense strand starting at position 3326 of SEQ ID NO: 2830
guuaauucugaaugucaac

SEQ ID NO: 219791 - RNA, 19 nt, Artificial Sequence
  Description of Artificial Sequence: Synthetic oligonucleotide
  Antisense strand to SEQ ID NO: 219790
guugacauucagaauuaac

SEQ ID NO: 219792 - RNA, 19 nt, Artificial Sequence
  Description of Artificial Sequence: Synthetic oligonucleotide
  Sense strand starting at position 3463 of SEQ ID NO: 2830
ggaacaaucuaaucagcua

SEQ ID NO: 219793 - RNA, 19 nt, Artificial Sequence
  Description of Artificial Sequence: Synthetic oligonucleotide
  Antisense strand to SEQ ID NO: 219792
uagcugauuagauuguucc

SEQ ID NO: 219794 - RNA, 19 nt, Artificial Sequence
  Description of Artificial Sequence: Synthetic oligonucleotide
  Sense strand starting at position 3474 of SEQ ID NO: 2830
aucagcuaccaucgaauau

SEQ ID NO: 219795 - RNA, 19 nt, Artificial Sequence
  Description of Artificial Sequence: Synthetic oligonucleotide
  Antisense strand to SEQ ID NO: 219794
auauucgaugguagcugau

SEQ ID NO: 219796 - RNA, 19 nt, Artificial Sequence
  Description of Artificial Sequence: Synthetic oligonucleotide
  Sense strand starting at position 3478 of SEQ ID NO: 2830
gcuaccaucgaauauaaag

SEQ ID NO: 219797 - RNA, 19 nt, Artificial Sequence
  Description of Artificial Sequence: Synthetic oligonucleotide
  Antisense strand to SEQ ID NO: 219796
cuuuauauucgaugguagc

SEQ ID NO: 219798 - RNA, 19 nt, Artificial Sequence
  Description of Artificial Sequence: Synthetic oligonucleotide
  Sense strand starting at position 3981 of SEQ ID NO: 2830
uuggauuugucaguugggu

SEQ ID NO: 219799 - RNA, 19 nt, Artificial Sequence
  Description of Artificial Sequence: Synthetic oligonucleotide
  Antisense strand to SEQ ID NO: 219798
acccaacugacaaauccaa

SEQ ID NO: 219800 - RNA, 19 nt, Artificial Sequence
  Description of Artificial Sequence: Synthetic oligonucleotide
  Sense strand starting at position 193 of SEQ ID NO: 2831
aucuguggaucuguaauau

SEQ ID NO: 219801 - RNA, 19 nt, Artificial Sequence
  Description of Artificial Sequence: Synthetic oligonucleotide
  Antisense strand to SEQ ID NO: 219800
auauuacagauccacagau

SEQ ID NO: 219802 - RNA, 19 nt, Artificial Sequence
  Description of Artificial Sequence: Synthetic oligonucleotide
  Sense strand starting at position 232 of SEQ ID NO: 2831
ucagcaaugguuugaucua

SEQ ID NO: 219803 - RNA, 19 nt, Artificial Sequence
  Description of Artificial Sequence: Synthetic oligonucleotide
  Antisense strand to SEQ ID NO: 219802
uagaucaaaccauugcuga

SEQ ID NO: 219804 - RNA, 19 nt, Artificial Sequence
  Description of Artificial Sequence: Synthetic oligonucleotide
  Sense strand starting at position 241 of SEQ ID NO: 2831
guuugaucuaacuggaagg

SEQ ID NO: 219805 - RNA, 19 nt, Artificial Sequence
  Description of Artificial Sequence: Synthetic oligonucleotide
  Antisense strand to SEQ ID NO: 219804
ccuuccaguuagaucaaac

SEQ ID NO: 219806 - RNA, 19 nt, Artificial Sequence
  Description of Artificial Sequence: Synthetic oligonucleotide
  Sense strand starting at position 276 of SEQ ID NO: 2831
gugauuuaguagcucggau

SEQ ID NO: 219807 - RNA, 19 nt, Artificial Sequence
  Description of Artificial Sequence: Synthetic oligonucleotide
  Antisense strand to SEQ ID NO: 219806
auccgagcuacuaaaucac

SEQ ID NO: 219808 - RNA, 19 nt, Artificial Sequence
  Description of Artificial Sequence: Synthetic oligonucleotide
  Sense strand starting at position 298 of SEQ ID NO: 2831
aggcauucucaucaaugau

SEQ ID NO: 219809 - RNA, 19 nt, Artificial Sequence
  Description of Artificial Sequence: Synthetic oligonucleotide
  Antisense strand to SEQ ID NO: 219808
aucauugaugagaaugccu

SEQ ID NO: 219810 - RNA, 19 nt, Artificial Sequence
  Description of Artificial Sequence: Synthetic oligonucleotide
  Sense strand starting at position 600 of SEQ ID NO: 2831
ggaccagguuggucuuaga

SEQ ID NO: 219811 - RNA, 19 nt, Artificial Sequence
  Description of Artificial Sequence: Synthetic oligonucleotide
  Antisense strand to SEQ ID NO: 219810
ucuaagaccaaccuggucc

SEQ ID NO: 219812 - RNA, 19 nt, Artificial Sequence
  Description of Artificial Sequence: Synthetic oligonucleotide
  Sense strand starting at position 818 of SEQ ID NO: 2831
uguuccucugucuaaagga

SEQ ID NO: 219813 - RNA, 19 nt, Artificial Sequence
  Description of Artificial Sequence: Synthetic oligonucleotide
  Antisense strand to SEQ ID NO: 219812
uccuuuagacagaggaaca

SEQ ID NO: 219814 - RNA, 19 nt, Artificial Sequence
  Description of Artificial Sequence: Synthetic oligonucleotide
  Sense strand starting at position 865 of SEQ ID NO: 2831
ccaucuuggucccugaaac

SEQ ID NO: 219815 - RNA, 19 nt, Artificial Sequence
  Description of Artificial Sequence: Synthetic oligonucleotide
  Antisense strand to SEQ ID NO: 219814
guuucagggaccaagaugg

SEQ ID NO: 219816 - RNA, 19 nt, Artificial Sequence
  Description of Artificial Sequence: Synthetic oligonucleotide
  Sense strand starting at position 933 of SEQ ID NO: 2831
auuuccuauugugaaauag

SEQ ID NO: 219817 - RNA, 19 nt, Artificial Sequence
  Description of Artificial Sequence: Synthetic oligonucleotide
  Antisense strand to SEQ ID NO: 219816
cuauuucacaauaggaaau

SEQ ID NO: 219818 - RNA, 19 nt, Artificial Sequence
  Description of Artificial Sequence: Synthetic oligonucleotide
  Sense strand starting at position 1091 of SEQ ID NO: 2831
ucugaaagccuuuggaaag

SEQ ID NO: 219819 - RNA, 19 nt, Artificial Sequence
  Description of Artificial Sequence: Synthetic oligonucleotide
  Antisense strand to SEQ ID NO: 219818
cuuuccaaaggcuuucaga

SEQ ID NO: 219820 - RNA, 19 nt, Artificial Sequence
  Description of Artificial Sequence: Synthetic oligonucleotide
  Sense strand starting at position 1102 of SEQ ID NO: 2831
uuggaaagucaccgagguu

SEQ ID NO: 219821 - RNA, 19 nt, Artificial Sequence
  Description of Artificial Sequence: Synthetic oligonucleotide
  Antisense strand to SEQ ID NO: 219820
aaccucggugacuuuccaa

SEQ ID NO: 219822 - RNA, 19 nt, Artificial Sequence
  Description of Artificial Sequence: Synthetic oligonucleotide
  Sense strand starting at position 1579 of SEQ ID NO: 2831
gguguaugaugaguccacu

SEQ ID NO: 219823 - RNA, 19 nt, Artificial Sequence
  Description of Artificial Sequence: Synthetic oligonucleotide
  Antisense strand to SEQ ID NO: 219822
aguggacucaucauacacc

SEQ ID NO: 219824 - RNA, 19 nt, Artificial Sequence
  Description of Artificial Sequence: Synthetic oligonucleotide
  Sense strand starting at position 1658 of SEQ ID NO: 2831
aagucuuaaggugaagcaa

SEQ ID NO: 219825 - RNA, 19 nt, Artificial Sequence
  Description of Artificial Sequence: Synthetic oligonucleotide
  Antisense strand to SEQ ID NO: 219824
uugcuucaccuuaagacuu

SEQ ID NO: 219826 - RNA, 19 nt, Artificial Sequence
  Description of Artificial Sequence: Synthetic oligonucleotide
  Sense strand starting at position 1777 of SEQ ID NO: 2831
augagugguggucacaaga

SEQ ID NO: 219827 - RNA, 19 nt, Artificial Sequence
  Description of Artificial Sequence: Synthetic oligonucleotide
  Antisense strand to SEQ ID NO: 219826
ucuugugaccaccacucau

SEQ ID NO: 219828 - RNA, 19 nt, Artificial Sequence
  Description of Artificial Sequence: Synthetic oligonucleotide
  Sense strand starting at position 1945 of SEQ ID NO: 2831
aggagcugcagucagagau

SEQ ID NO: 219829 - RNA, 19 nt, Artificial Sequence
  Description of Artificial Sequence: Synthetic oligonucleotide
  Antisense strand to SEQ ID NO: 219828
aucucugacugcagcuccu

SEQ ID NO: 219830 - RNA, 19 nt, Artificial Sequence
  Description of Artificial Sequence: Synthetic oligonucleotide
  Sense strand starting at position 1949 of SEQ ID NO: 2831
gcugcagucagagaucaga

SEQ ID NO: 219831 - RNA, 19 nt, Artificial Sequence
  Description of Artificial Sequence: Synthetic oligonucleotide
  Antisense strand to SEQ ID NO: 219830
ucugaucucugacugcagc

SEQ ID NO: 219832 - RNA, 19 nt, Artificial Sequence
  Description of Artificial Sequence: Synthetic oligonucleotide
  Sense strand starting at position 2075 of SEQ ID NO: 2831
aguuuaagucaagggauca

SEQ ID NO: 219833 - RNA, 19 nt, Artificial Sequence
  Description of Artificial Sequence: Synthetic oligonucleotide
  Antisense strand to SEQ ID NO: 219832
ugaucccuugacuuaaacu

SEQ ID NO: 219834 - RNA, 19 nt, Artificial Sequence
  Description of Artificial Sequence: Synthetic oligonucleotide
  Sense strand starting at position 2076 of SEQ ID NO: 2831
guuuaagucaagggaucac

SEQ ID NO: 219835 - RNA, 19 nt, Artificial Sequence
  Description of Artificial Sequence: Synthetic oligonucleotide
  Antisense strand to SEQ ID NO: 219834
gugaucccuugacuuaaac

SEQ ID NO: 219836 - RNA, 19 nt, Artificial Sequence
  Description of Artificial Sequence: Synthetic oligonucleotide
  Sense strand starting at position 2088 of SEQ ID NO: 2831
ggaucacagacuugugauu

SEQ ID NO: 219837 - RNA, 19 nt, Artificial Sequence
  Description of Artificial Sequence: Synthetic oligonucleotide
  Antisense strand to SEQ ID NO: 219836
aaucacaagucugugaucc

SEQ ID NO: 219838 - RNA, 19 nt, Artificial Sequence
  Description of Artificial Sequence: Synthetic oligonucleotide
  Sense strand starting at position 2163 of SEQ ID NO: 2831
gaggguccauuaucugaau

SEQ ID NO: 219839 - RNA, 19 nt, Artificial Sequence
  Description of Artificial Sequence: Synthetic oligonucleotide
  Antisense strand to SEQ ID NO: 219838
auucagauaauggacccuc

SEQ ID NO: 219840 - RNA, 19 nt, Artificial Sequence
  Description of Artificial Sequence: Synthetic oligonucleotide
  Sense strand starting at position 2164 of SEQ ID NO: 2831
aggguccauuaucugaauu

SEQ ID NO: 219841 - RNA, 19 nt, Artificial Sequence
  Description of Artificial Sequence: Synthetic oligonucleotide
  Antisense strand to SEQ ID NO: 219840
aauucagauaauggacccu

SEQ ID NO: 219842 - RNA, 19 nt, Artificial Sequence
  Description of Artificial Sequence: Synthetic oligonucleotide
  Sense strand starting at position 2185 of SEQ ID NO: 2831
ccacucuauggaugaucau

SEQ ID NO: 219843 - RNA, 19 nt, Artificial Sequence
  Description of Artificial Sequence: Synthetic oligonucleotide
  Antisense strand to SEQ ID NO: 219842
augaucauccauagagugg

SEQ ID NO: 219844 - RNA, 19 nt, Artificial Sequence
  Description of Artificial Sequence: Synthetic oligonucleotide
  Sense strand starting at position 2282 of SEQ ID NO: 2831
gcaacuuccugaccaagua

SEQ ID NO: 219845 - RNA, 19 nt, Artificial Sequence
  Description of Artificial Sequence: Synthetic oligonucleotide
  Antisense strand to SEQ ID NO: 219844
uacuuggucaggaaguugc

SEQ ID NO: 219846 - RNA, 19 nt, Artificial Sequence
  Description of Artificial Sequence: Synthetic oligonucleotide
  Sense strand starting at position 2312 of SEQ ID NO: 2831
ggauuugacuuacagcaga

SEQ ID NO: 219847 - RNA, 19 nt, Artificial Sequence
  Description of Artificial Sequence: Synthetic oligonucleotide
  Antisense strand to SEQ ID NO: 219846
ucugcuguaagucaaaucc

SEQ ID NO: 219848 - RNA, 19 nt, Artificial Sequence
  Description of Artificial Sequence: Synthetic oligonucleotide
  Sense strand starting at position 2485 of SEQ ID NO: 2831
ucucaucaaggaugugaga

SEQ ID NO: 219849 - RNA, 19 nt, Artificial Sequence
  Description of Artificial Sequence: Synthetic oligonucleotide
  Antisense strand to SEQ ID NO: 219848
ucucacauccuugaugaga

SEQ ID NO: 219850 - RNA, 19 nt, Artificial Sequence
  Description of Artificial Sequence: Synthetic oligonucleotide
  Sense strand starting at position 2501 of SEQ ID NO: 2831
agagcaguuacugggauau

SEQ ID NO: 219851 - RNA, 19 nt, Artificial Sequence
  Description of Artificial Sequence: Synthetic oligonucleotide
  Antisense strand to SEQ ID NO: 219850
auaucccaguaacugcucu

SEQ ID NO: 219852 - RNA, 19 nt, Artificial Sequence
  Description of Artificial Sequence: Synthetic oligonucleotide
  Sense strand starting at position 2505 of SEQ ID NO: 2831
caguuacugggauauccuu

SEQ ID NO: 219853 - RNA, 19 nt, Artificial Sequence
  Description of Artificial Sequence: Synthetic oligonucleotide
  Antisense strand to SEQ ID NO: 219852
aaggauaucccaguaacug

SEQ ID NO: 219854 - RNA, 19 nt, Artificial Sequence
  Description of Artificial Sequence: Synthetic oligonucleotide
  Sense strand starting at position 2511 of SEQ ID NO: 2831
cugggauauccuuggcuuc

SEQ ID NO: 219855 - RNA, 19 nt, Artificial Sequence
  Description of Artificial Sequence: Synthetic oligonucleotide
  Antisense strand to SEQ ID NO: 219854
gaagccaaggauaucccag

SEQ ID NO: 219856 - RNA, 19 nt, Artificial Sequence
  Description of Artificial Sequence: Synthetic oligonucleotide
  Sense strand starting at position 2733 of SEQ ID NO: 2831
caaugaccaguugguuuaa

SEQ ID NO: 219857 - RNA, 19 nt, Artificial Sequence
  Description of Artificial Sequence: Synthetic oligonucleotide
  Antisense strand to SEQ ID NO: 219856
uuaaaccaacuggucauug

SEQ ID NO: 219858 - RNA, 19 nt, Artificial Sequence
  Description of Artificial Sequence: Synthetic oligonucleotide
  Sense strand starting at position 2734 of SEQ ID NO: 2831
aaugaccaguugguuuaaa

SEQ ID NO: 219859 - RNA, 19 nt, Artificial Sequence
  Description of Artificial Sequence: Synthetic oligonucleotide
  Antisense strand to SEQ ID NO: 219858
uuuaaaccaacuggucauu

SEQ ID NO: 219860 - RNA, 19 nt, Artificial Sequence
  Description of Artificial Sequence: Synthetic oligonucleotide
  Sense strand starting at position 2735 of SEQ ID NO: 2831
augaccaguugguuuaaau

SEQ ID NO: 219861 - RNA, 19 nt, Artificial Sequence
  Description of Artificial Sequence: Synthetic oligonucleotide
  Antisense strand to SEQ ID NO: 219860
auuuaaaccaacuggucau

SEQ ID NO: 219862 - RNA, 19 nt, Artificial Sequence
  Description of Artificial Sequence: Synthetic oligonucleotide
  Sense strand starting at position 2834 of SEQ ID NO: 2831
auggaagagcuguggucaa

SEQ ID NO: 219863 - RNA, 19 nt, Artificial Sequence
  Description of Artificial Sequence: Synthetic oligonucleotide
  Antisense strand to SEQ ID NO: 219862
uugaccacagcucuuccau

SEQ ID NO: 219864 - RNA, 19 nt, Artificial Sequence
  Description of Artificial Sequence: Synthetic oligonucleotide
  Sense strand starting at position 2881 of SEQ ID NO: 2831
gagaauggcuucucuggga

SEQ ID NO: 219865 - RNA, 19 nt, Artificial Sequence
  Description of Artificial Sequence: Synthetic oligonucleotide
  Antisense strand to SEQ ID NO: 219864
ucccagagaagccauucuc

SEQ ID NO: 219866 - RNA, 19 nt, Artificial Sequence
  Description of Artificial Sequence: Synthetic oligonucleotide
  Sense strand starting at position 3021 of SEQ ID NO: 2831
uagcuugggagccaugaga

SEQ ID NO: 219867 - RNA, 19 nt, Artificial Sequence
  Description of Artificial Sequence: Synthetic oligonucleotide
  Antisense strand to SEQ ID NO: 219866
ucucauggcucccaagcua

SEQ ID NO: 219868 - RNA, 19 nt, Artificial Sequence
  Description of Artificial Sequence: Synthetic oligonucleotide
  Sense strand starting at position 3098 of SEQ ID NO: 2831
ucaaucaaugguuguggaa

SEQ ID NO: 219869 - RNA, 19 nt, Artificial Sequence
  Description of Artificial Sequence: Synthetic oligonucleotide
  Antisense strand to SEQ ID NO: 219868
uuccacaaccauugauuga

SEQ ID NO: 219870 - RNA, 19 nt, Artificial Sequence
  Description of Artificial Sequence: Synthetic oligonucleotide
  Sense strand starting at position 3155 of SEQ ID NO: 2831
auaagucaccaccacgauu

SEQ ID NO: 219871 - RNA, 19 nt, Artificial Sequence
  Description of Artificial Sequence: Synthetic oligonucleotide
  Antisense strand to SEQ ID NO: 219870
aaucgugguggugacuuau

SEQ ID NO: 219872 - RNA, 19 nt, Artificial Sequence
  Description of Artificial Sequence: Synthetic oligonucleotide
  Sense strand starting at position 3197 of SEQ ID NO: 2831
acacuaaagucacugguau

SEQ ID NO: 219873 - RNA, 19 nt, Artificial Sequence
  Description of Artificial Sequence: Synthetic oligonucleotide
  Antisense strand to SEQ ID NO: 219872
auaccagugacuuuagugu

SEQ ID NO: 219874 - RNA, 19 nt, Artificial Sequence
  Description of Artificial Sequence: Synthetic oligonucleotide
  Sense strand starting at position 3198 of SEQ ID NO: 2831
cacuaaagucacugguaug

SEQ ID NO: 219875 - RNA, 19 nt, Artificial Sequence
  Description of Artificial Sequence: Synthetic oligonucleotide
  Antisense strand to SEQ ID NO: 219874
cauaccagugacuuuagug

SEQ ID NO: 219876 - RNA, 19 nt, Artificial Sequence
  Description of Artificial Sequence: Synthetic oligonucleotide
  Sense strand starting at position 3208 of SEQ ID NO: 2831
acugguaugccugauagcu

SEQ ID NO: 219877 - RNA, 19 nt, Artificial Sequence
  Description of Artificial Sequence: Synthetic oligonucleotide
  Antisense strand to SEQ ID NO: 219876
agcuaucaggcauaccagu

SEQ ID NO: 219878 - RNA, 19 nt, Artificial Sequence
  Description of Artificial Sequence: Synthetic oligonucleotide
  Sense strand starting at position 3366 of SEQ ID NO: 2831
acaguucugcacuggaaag

SEQ ID NO: 219879 - RNA, 19 nt, Artificial Sequence
  Description of Artificial Sequence: Synthetic oligonucleotide
  Antisense strand to SEQ ID NO: 219878
cuuuccagugcagaacugu

SEQ ID NO: 219880 - RNA, 19 nt, Artificial Sequence
  Description of Artificial Sequence: Synthetic oligonucleotide
  Sense strand starting at position 173 of SEQ ID NO: 2832
uucuaauccugcuuggaga

SEQ ID NO: 219881 - RNA, 19 nt, Artificial Sequence
  Description of Artificial Sequence: Synthetic oligonucleotide
  Antisense strand to SEQ ID NO: 219880
ucuccaagcaggauuagaa

SEQ ID NO: 219882 - RNA, 19 nt, Artificial Sequence
  Description of Artificial Sequence: Synthetic oligonucleotide
  Sense strand starting at position 174 of SEQ ID NO: 2832
ucuaauccugcuuggagaa

SEQ ID NO: 219883 - RNA, 19 nt, Artificial Sequence
  Description of Artificial Sequence: Synthetic oligonucleotide
  Antisense strand to SEQ ID NO: 219882
uucuccaagcaggauuaga

SEQ ID NO: 219884 - RNA, 19 nt, Artificial Sequence
  Description of Artificial Sequence: Synthetic oligonucleotide
  Sense strand starting at position 176 of SEQ ID NO: 2832
uaauccugcuuggagaagu

SEQ ID NO: 219885 - RNA, 19 nt, Artificial Sequence
  Description of Artificial Sequence: Synthetic oligonucleotide
  Antisense strand to SEQ ID NO: 219884
acuucuccaagcaggauua

SEQ ID NO: 219886 - RNA, 19 nt, Artificial Sequence
  Description of Artificial Sequence: Synthetic oligonucleotide
  Sense strand starting at position 230 of SEQ ID NO: 2832
acgggagcuucuucuaauu

SEQ ID NO: 219887 - RNA, 19 nt, Artificial Sequence
  Description of Artificial Sequence: Synthetic oligonucleotide
  Antisense strand to SEQ ID NO: 219886
aauuagaagaagcucccgu

SEQ ID NO: 219888 - RNA, 19 nt, Artificial Sequence
  Description of Artificial Sequence: Synthetic oligonucleotide
  Sense strand starting at position 232 of SEQ ID NO: 2832
gggagcuucuucuaauucu

SEQ ID NO: 219889 - RNA, 19 nt, Artificial Sequence
  Description of Artificial Sequence: Synthetic oligonucleotide
  Antisense strand to SEQ ID NO: 219888
agaauuagaagaagcuccc

SEQ ID NO: 219890 - RNA, 19 nt, Artificial Sequence
  Description of Artificial Sequence: Synthetic oligonucleotide
  Sense strand starting at position 739 of SEQ ID NO: 2832
agggcaggucuaggacauu

SEQ ID NO: 219891 - RNA, 19 nt, Artificial Sequence
  Description of Artificial Sequence: Synthetic oligonucleotide
  Antisense strand to SEQ ID NO: 219890
aauguccuagaccugcccu

SEQ ID NO: 219892 - RNA, 19 nt, Artificial Sequence
  Description of Artificial Sequence: Synthetic oligonucleotide
  Sense strand starting at position 751 of SEQ ID NO: 2832
ggacauuucuauuauugca

SEQ ID NO: 219893 - RNA, 19 nt, Artificial Sequence
  Description of Artificial Sequence: Synthetic oligonucleotide
  Antisense strand to SEQ ID NO: 219892
ugcaauaauagaaaugucc

SEQ ID NO: 219894 - RNA, 19 nt, Artificial Sequence
  Description of Artificial Sequence: Synthetic oligonucleotide
  Sense strand starting at position 786 of SEQ ID NO: 2832
aacacugucuaggugaaga

SEQ ID NO: 219895 - RNA, 19 nt, Artificial Sequence
  Description of Artificial Sequence: Synthetic oligonucleotide
  Antisense strand to SEQ ID NO: 219894
ucuucaccuagacaguguu

SEQ ID NO: 219896 - RNA, 19 nt, Artificial Sequence
  Description of Artificial Sequence: Synthetic oligonucleotide
  Sense strand starting at position 797 of SEQ ID NO: 2832
ggugaagacuuaguugucu

SEQ ID NO: 219897 - RNA, 19 nt, Artificial Sequence
  Description of Artificial Sequence: Synthetic oligonucleotide
  Antisense strand to SEQ ID NO: 219896
agacaacuaagucuucacc

SEQ ID NO: 219898 - RNA, 19 nt, Artificial Sequence
  Description of Artificial Sequence: Synthetic oligonucleotide
  Sense strand starting at position 801 of SEQ ID NO: 2832
aagacuuaguugucuuuag

SEQ ID NO: 219899 - RNA, 19 nt, Artificial Sequence
  Description of Artificial Sequence: Synthetic oligonucleotide
  Antisense strand to SEQ ID NO: 219898
cuaaagacaacuaagucuu

SEQ ID NO: 219900 - RNA, 19 nt, Artificial Sequence
  Description of Artificial Sequence: Synthetic oligonucleotide
  Sense strand starting at position 811 of SEQ ID NO: 2832
ugucuuuagcucuaagcuu

SEQ ID NO: 219901 - RNA, 19 nt, Artificial Sequence
  Description of Artificial Sequence: Synthetic oligonucleotide
  Antisense strand to SEQ ID NO: 219900
aagcuuagagcuaaagaca

SEQ ID NO: 219902 - RNA, 19 nt, Artificial Sequence
  Description of Artificial Sequence: Synthetic oligonucleotide
  Sense strand starting at position 876 of SEQ ID NO: 2832
guuuccagaucucuuccau

SEQ ID NO: 219903 - RNA, 19 nt, Artificial Sequence
  Description of Artificial Sequence: Synthetic oligonucleotide
  Antisense strand to SEQ ID NO: 219902
auggaagagaucuggaaac

SEQ ID NO: 219904 - RNA, 19 nt, Artificial Sequence
  Description of Artificial Sequence: Synthetic oligonucleotide
  Sense strand starting at position 896 of SEQ ID NO: 2832
agaaauauguugccagcau

SEQ ID NO: 219905 - RNA, 19 nt, Artificial Sequence
  Description of Artificial Sequence: Synthetic oligonucleotide
  Antisense strand to SEQ ID NO: 219904
augcuggcaacauauuucu

SEQ ID NO: 219906 - RNA, 19 nt, Artificial Sequence
  Description of Artificial Sequence: Synthetic oligonucleotide
  Sense strand starting at position 897 of SEQ ID NO: 2832
gaaauauguugccagcauc

SEQ ID NO: 219907 - RNA, 19 nt, Artificial Sequence
  Description of Artificial Sequence: Synthetic oligonucleotide
  Antisense strand to SEQ ID NO: 219906
gaugcuggcaacauauuuc

SEQ ID NO: 219908 - RNA, 19 nt, Artificial Sequence
  Description of Artificial Sequence: Synthetic oligonucleotide
  Sense strand starting at position 900 of SEQ ID NO: 2832
auauguugccagcaucuca

SEQ ID NO: 219909 - RNA, 19 nt, Artificial Sequence
  Description of Artificial Sequence: Synthetic oligonucleotide
  Antisense strand to SEQ ID NO: 219908
ugagaugcuggcaacauau

SEQ ID NO: 219910 - RNA, 19 nt, Artificial Sequence
  Description of Artificial Sequence: Synthetic oligonucleotide
  Sense strand starting at position 1440 of SEQ ID NO: 2832
cucucugguccuugaggau

SEQ ID NO: 219911 - RNA, 19 nt, Artificial Sequence
  Description of Artificial Sequence: Synthetic oligonucleotide
  Antisense strand to SEQ ID NO: 219910
auccucaaggaccagagag

SEQ ID NO: 219912 - RNA, 19 nt, Artificial Sequence
  Description of Artificial Sequence: Synthetic oligonucleotide
  Sense strand starting at position 1637 of SEQ ID NO: 2832
ugaaauaacuuucgccaag

SEQ ID NO: 219913 - RNA, 19 nt, Artificial Sequence
  Description of Artificial Sequence: Synthetic oligonucleotide
  Antisense strand to SEQ ID NO: 219912
cuuggcgaaaguuauuuca

SEQ ID NO: 219914 - RNA, 19 nt, Artificial Sequence
  Description of Artificial Sequence: Synthetic oligonucleotide
  Sense strand starting at position 1659 of SEQ ID NO: 2832
cccaaugaccucuggguua

SEQ ID NO: 219915 - RNA, 19 nt, Artificial Sequence
  Description of Artificial Sequence: Synthetic oligonucleotide
  Antisense strand to SEQ ID NO: 219914
uaacccagaggucauuggg

SEQ ID NO: 219916 - RNA, 19 nt, Artificial Sequence
  Description of Artificial Sequence: Synthetic oligonucleotide
  Sense strand starting at position 1661 of SEQ ID NO: 2832
caaugaccucuggguuacu

SEQ ID NO: 219917 - RNA, 19 nt, Artificial Sequence
  Description of Artificial Sequence: Synthetic oligonucleotide
  Antisense strand to SEQ ID NO: 219916
aguaacccagaggucauug

SEQ ID NO: 219918 - RNA, 19 nt, Artificial Sequence
  Description of Artificial Sequence: Synthetic oligonucleotide
  Sense strand starting at position 1662 of SEQ ID NO: 2832
aaugaccucuggguuacua

SEQ ID NO: 219919 - RNA, 19 nt, Artificial Sequence
  Description of Artificial Sequence: Synthetic oligonucleotide
  Antisense strand to SEQ ID NO: 219918
uaguaacccagaggucauu

SEQ ID NO: 219920 - RNA, 19 nt, Artificial Sequence
  Description of Artificial Sequence: Synthetic oligonucleotide
  Sense strand starting at position 1784 of SEQ ID NO: 2832
gacagaauagcguguagag

SEQ ID NO: 219921 - RNA, 19 nt, Artificial Sequence
  Description of Artificial Sequence: Synthetic oligonucleotide
  Antisense strand to SEQ ID NO: 219920
cucuacacgcuauucuguc

SEQ ID NO: 219922 - RNA, 19 nt, Artificial Sequence
  Description of Artificial Sequence: Synthetic oligonucleotide
  Sense strand starting at position 1786 of SEQ ID NO: 2832
cagaauagcguguagagau

SEQ ID NO: 219923 - RNA, 19 nt, Artificial Sequence
  Description of Artificial Sequence: Synthetic oligonucleotide
  Antisense strand to SEQ ID NO: 219922
aucucuacacgcuauucug

SEQ ID NO: 219924 - RNA, 19 nt, Artificial Sequence
  Description of Artificial Sequence: Synthetic oligonucleotide
  Sense strand starting at position 2018 of SEQ ID NO: 2832
ccagaaguccugcgucugu

SEQ ID NO: 219925 - RNA, 19 nt, Artificial Sequence
  Description of Artificial Sequence: Synthetic oligonucleotide
  Antisense strand to SEQ ID NO: 219924
acagacgcaggacuucugg

SEQ ID NO: 219926 - RNA, 19 nt, Artificial Sequence
  Description of Artificial Sequence: Synthetic oligonucleotide
  Sense strand starting at position 2027 of SEQ ID NO: 2832
cugcgucuguccacgugau

SEQ ID NO: 219927 - RNA, 19 nt, Artificial Sequence
  Description of Artificial Sequence: Synthetic oligonucleotide
  Antisense strand to SEQ ID NO: 219926
aucacguggacagacgcag

SEQ ID NO: 219928 - RNA, 19 nt, Artificial Sequence
  Description of Artificial Sequence: Synthetic oligonucleotide
  Sense strand starting at position 2028 of SEQ ID NO: 2832
ugcgucuguccacgugaua

SEQ ID NO: 219929 - RNA, 19 nt, Artificial Sequence
  Description of Artificial Sequence: Synthetic oligonucleotide
  Antisense strand to SEQ ID NO: 219928
uaucacguggacagacgca

SEQ ID NO: 219930 - RNA, 19 nt, Artificial Sequence
  Description of Artificial Sequence: Synthetic oligonucleotide
  Sense strand starting at position 2029 of SEQ ID NO: 2832
gcgucuguccacgugauaa

SEQ ID NO: 219931 - RNA, 19 nt, Artificial Sequence
  Description of Artificial Sequence: Synthetic oligonucleotide
  Antisense strand to SEQ ID NO: 219930
uuaucacguggacagacgc

SEQ ID NO: 219932 - RNA, 19 nt, Artificial Sequence
  Description of Artificial Sequence: Synthetic oligonucleotide
  Sense strand starting at position 2031 of SEQ ID NO: 2832
gucuguccacgugauaagu

SEQ ID NO: 219933 - RNA, 19 nt, Artificial Sequence
  Description of Artificial Sequence: Synthetic oligonucleotide
  Antisense strand to SEQ ID NO: 219932
acuuaucacguggacagac

SEQ ID NO: 219934 - RNA, 19 nt, Artificial Sequence
  Description of Artificial Sequence: Synthetic oligonucleotide
  Sense strand starting at position 2106 of SEQ ID NO: 2832
caaggaaucuugcagaguu

SEQ ID NO: 219935 - RNA, 19 nt, Artificial Sequence
  Description of Artificial Sequence: Synthetic oligonucleotide
  Antisense strand to SEQ ID NO: 219934
aacucugcaagauuccuug

SEQ ID NO: 219936 - RNA, 19 nt, Artificial Sequence
  Description of Artificial Sequence: Synthetic oligonucleotide
  Sense strand starting at position 2138 of SEQ ID NO: 2832
ucccacuucugucagagau

SEQ ID NO: 219937 - RNA, 19 nt, Artificial Sequence
  Description of Artificial Sequence: Synthetic oligonucleotide
  Antisense strand to SEQ ID NO: 219936
aucucugacagaaguggga

SEQ ID NO: 219938 - RNA, 19 nt, Artificial Sequence
  Description of Artificial Sequence: Synthetic oligonucleotide
  Sense strand starting at position 2339 of SEQ ID NO: 2832
ggaauacccuguggaacaa

SEQ ID NO: 219939 - RNA, 19 nt, Artificial Sequence
  Description of Artificial Sequence: Synthetic oligonucleotide
  Antisense strand to SEQ ID NO: 219938
uuguuccacaggguauucc

SEQ ID NO: 219940 - RNA, 19 nt, Artificial Sequence
  Description of Artificial Sequence: Synthetic oligonucleotide
  Sense strand starting at position 2402 of SEQ ID NO: 2832
ugggaaguuuccuauugca

SEQ ID NO: 219941 - RNA, 19 nt, Artificial Sequence
  Description of Artificial Sequence: Synthetic oligonucleotide
  Antisense strand to SEQ ID NO: 219940
ugcaauaggaaacuuccca

SEQ ID NO: 219942 - RNA, 19 nt, Artificial Sequence
  Description of Artificial Sequence: Synthetic oligonucleotide
  Sense strand starting at position 2409 of SEQ ID NO: 2832
uuuccuauugcagagacaa

SEQ ID NO: 219943 - RNA, 19 nt, Artificial Sequence
  Description of Artificial Sequence: Synthetic oligonucleotide
  Antisense strand to SEQ ID NO: 219942
uugucucugcaauaggaaa

SEQ ID NO: 219944 - RNA, 19 nt, Artificial Sequence
  Description of Artificial Sequence: Synthetic oligonucleotide
  Sense strand starting at position 2476 of SEQ ID NO: 2832
gcaggcagccucugguauu

SEQ ID NO: 219945 - RNA, 19 nt, Artificial Sequence
  Description of Artificial Sequence: Synthetic oligonucleotide
  Antisense strand to SEQ ID NO: 219944
aauaccagaggcugccugc

SEQ ID NO: 219946 - RNA, 19 nt, Artificial Sequence
  Description of Artificial Sequence: Synthetic oligonucleotide
  Sense strand starting at position 2488 of SEQ ID NO: 2832
ugguauugugaagggucuu

SEQ ID NO: 219947 - RNA, 19 nt, Artificial Sequence
  Description of Artificial Sequence: Synthetic oligonucleotide
  Antisense strand to SEQ ID NO: 219946
aagacccuucacaauacca

SEQ ID NO: 219948 - RNA, 19 nt, Artificial Sequence
  Description of Artificial Sequence: Synthetic oligonucleotide
  Sense strand starting at position 2489 of SEQ ID NO: 2832
gguauugugaagggucuua

SEQ ID NO: 219949 - RNA, 19 nt, Artificial Sequence
  Description of Artificial Sequence: Synthetic oligonucleotide
  Antisense strand to SEQ ID NO: 219948
uaagacccuucacaauacc

SEQ ID NO: 219950 - RNA, 19 nt, Artificial Sequence
  Description of Artificial Sequence: Synthetic oligonucleotide
  Sense strand starting at position 2726 of SEQ ID NO: 2832
cugccugucugaucugaau

SEQ ID NO: 219951 - RNA, 19 nt, Artificial Sequence
  Description of Artificial Sequence: Synthetic oligonucleotide
  Antisense strand to SEQ ID NO: 219950
auucagaucagacaggcag

SEQ ID NO: 219952 - RNA, 19 nt, Artificial Sequence
  Description of Artificial Sequence: Synthetic oligonucleotide
  Sense strand starting at position 2956 of SEQ ID NO: 2832
gugccuacccagggauacu

SEQ ID NO: 219953 - RNA, 19 nt, Artificial Sequence
  Description of Artificial Sequence: Synthetic oligonucleotide
  Antisense strand to SEQ ID NO: 219952
aguaucccuggguaggcac

SEQ ID NO: 219954 - RNA, 19 nt, Artificial Sequence
  Description of Artificial Sequence: Synthetic oligonucleotide
  Sense strand starting at position 2984 of SEQ ID NO: 2832
gguccaaagccugaaucaa

SEQ ID NO: 219955 - RNA, 19 nt, Artificial Sequence
  Description of Artificial Sequence: Synthetic oligonucleotide
  Antisense strand to SEQ ID NO: 219954
uugauucaggcuuuggacc

SEQ ID NO: 219956 - RNA, 19 nt, Artificial Sequence
  Description of Artificial Sequence: Synthetic oligonucleotide
  Sense strand starting at position 2995 of SEQ ID NO: 2832
ugaaucaacucaguaagua

SEQ ID NO: 219957 - RNA, 19 nt, Artificial Sequence
  Description of Artificial Sequence: Synthetic oligonucleotide
  Antisense strand to SEQ ID NO: 219956
uacuuacugaguugauuca

SEQ ID NO: 219958 - RNA, 19 nt, Artificial Sequence
  Description of Artificial Sequence: Synthetic oligonucleotide
  Sense strand starting at position 3179 of SEQ ID NO: 2832
gacugucucuaacuaacga

SEQ ID NO: 219959 - RNA, 19 nt, Artificial Sequence
  Description of Artificial Sequence: Synthetic oligonucleotide
  Antisense strand to SEQ ID NO: 219958
ucguuaguuagagacaguc

SEQ ID NO: 219960 - RNA, 19 nt, Artificial Sequence
  Description of Artificial Sequence: Synthetic oligonucleotide
  Sense strand starting at position 124 of SEQ ID NO: 2833
uuacuuugaccuggauauu

SEQ ID NO: 219961 - RNA, 19 nt, Artificial Sequence
  Description of Artificial Sequence: Synthetic oligonucleotide
  Antisense strand to SEQ ID NO: 219960
aauauccaggucaaaguaa

SEQ ID NO: 219962 - RNA, 19 nt, Artificial Sequence
  Description of Artificial Sequence: Synthetic oligonucleotide
  Sense strand starting at position 133 of SEQ ID NO: 2833
ccuggauauuaauugucau

SEQ ID NO: 219963 - RNA, 19 nt, Artificial Sequence
  Description of Artificial Sequence: Synthetic oligonucleotide
  Antisense strand to SEQ ID NO: 219962
augacaauuaauauccagg

SEQ ID NO: 219964 - RNA, 19 nt, Artificial Sequence
  Description of Artificial Sequence: Synthetic oligonucleotide
  Sense strand starting at position 144 of SEQ ID NO: 2833
auugucauauuagcuguaa

SEQ ID NO: 219965 - RNA, 19 nt, Artificial Sequence
  Description of Artificial Sequence: Synthetic oligonucleotide
  Antisense strand to SEQ ID NO: 219964
uuacagcuaauaugacaau

SEQ ID NO: 219966 - RNA, 19 nt, Artificial Sequence
  Description of Artificial Sequence: Synthetic oligonucleotide
  Sense strand starting at position 145 of SEQ ID NO: 2833
uugucauauuagcuguaau

SEQ ID NO: 219967 - RNA, 19 nt, Artificial Sequence
  Description of Artificial Sequence: Synthetic oligonucleotide
  Antisense strand to SEQ ID NO: 219966
auuacagcuaauaugacaa

SEQ ID NO: 219968 - RNA, 19 nt, Artificial Sequence
  Description of Artificial Sequence: Synthetic oligonucleotide
  Sense strand starting at position 148 of SEQ ID NO: 2833
ucauauuagcuguaauguu

SEQ ID NO: 219969 - RNA, 19 nt, Artificial Sequence
  Description of Artificial Sequence: Synthetic oligonucleotide
  Antisense strand to SEQ ID NO: 219968
aacauuacagcuaauauga

SEQ ID NO: 219970 - RNA, 19 nt, Artificial Sequence
  Description of Artificial Sequence: Synthetic oligonucleotide
  Sense strand starting at position 167 of SEQ ID NO: 2833
gagugucuaccagguucua

SEQ ID NO: 219971 - RNA, 19 nt, Artificial Sequence
  Description of Artificial Sequence: Synthetic oligonucleotide
  Antisense strand to SEQ ID NO: 219970
uagaaccugguagacacuc

SEQ ID NO: 219972 - RNA, 19 nt, Artificial Sequence
  Description of Artificial Sequence: Synthetic oligonucleotide
  Sense strand starting at position 279 of SEQ ID NO: 2833
cugagagguuaagcaacau

SEQ ID NO: 219973 - RNA, 19 nt, Artificial Sequence
  Description of Artificial Sequence: Synthetic oligonucleotide
  Antisense strand to SEQ ID NO: 219972
auguugcuuaaccucucag

SEQ ID NO: 219974 - RNA, 19 nt, Artificial Sequence
  Description of Artificial Sequence: Synthetic oligonucleotide
  Sense strand starting at position 432 of SEQ ID NO: 2833
cccugugucccagaaaguc

SEQ ID NO: 219975 - RNA, 19 nt, Artificial Sequence
  Description of Artificial Sequence: Synthetic oligonucleotide
  Antisense strand to SEQ ID NO: 219974
gacuuucugggacacaggg

SEQ ID NO: 219976 - RNA, 19 nt, Artificial Sequence
  Description of Artificial Sequence: Synthetic oligonucleotide
  Sense strand starting at position 448 of SEQ ID NO: 2833
gucagauacaaaggaugua

SEQ ID NO: 219977 - RNA, 19 nt, Artificial Sequence
  Description of Artificial Sequence: Synthetic oligonucleotide
  Antisense strand to SEQ ID NO: 219976
uacauccuuuguaucugac

SEQ ID NO: 219978 - RNA, 19 nt, Artificial Sequence
  Description of Artificial Sequence: Synthetic oligonucleotide
  Sense strand starting at position 540 of SEQ ID NO: 2833
uggagaucacugcgguuau

SEQ ID NO: 219979 - RNA, 19 nt, Artificial Sequence
  Description of Artificial Sequence: Synthetic oligonucleotide
  Antisense strand to SEQ ID NO: 219978
auaaccgcagugaucucca

SEQ ID NO: 219980 - RNA, 19 nt, Artificial Sequence
  Description of Artificial Sequence: Synthetic oligonucleotide
  Sense strand starting at position 552 of SEQ ID NO: 2833
cgguuauaugcagggugga

SEQ ID NO: 219981 - RNA, 19 nt, Artificial Sequence
  Description of Artificial Sequence: Synthetic oligonucleotide
  Antisense strand to SEQ ID NO: 219980
uccacccugcauauaaccg

SEQ ID NO: 219982 - RNA, 19 nt, Artificial Sequence
  Description of Artificial Sequence: Synthetic oligonucleotide
  Sense strand starting at position 896 of SEQ ID NO: 2833
uucuaauccugcuuggaga

SEQ ID NO: 219983 - RNA, 19 nt, Artificial Sequence
  Description of Artificial Sequence: Synthetic oligonucleotide
  Antisense strand to SEQ ID NO: 219982
ucuccaagcaggauuagaa

SEQ ID NO: 219984 - RNA, 19 nt, Artificial Sequence
  Description of Artificial Sequence: Synthetic oligonucleotide
  Sense strand starting at position 897 of SEQ ID NO: 2833
ucuaauccugcuuggagaa

SEQ ID NO: 219985 - RNA, 19 nt, Artificial Sequence
  Description of Artificial Sequence: Synthetic oligonucleotide
  Antisense strand to SEQ ID NO: 219984
uucuccaagcaggauuaga

SEQ ID NO: 219986 - RNA, 19 nt, Artificial Sequence
  Description of Artificial Sequence: Synthetic oligonucleotide
  Sense strand starting at position 953 of SEQ ID NO: 2833
acgggagcuucuucuaauu

SEQ ID NO: 219987 - RNA, 19 nt, Artificial Sequence
  Description of Artificial Sequence: Synthetic oligonucleotide
  Antisense strand to SEQ ID NO: 219986
aauuagaagaagcucccgu

SEQ ID NO: 219988 - RNA, 19 nt, Artificial Sequence
  Description of Artificial Sequence: Synthetic oligonucleotide
  Sense strand starting at position 1462 of SEQ ID NO: 2833
agggcaggucuaggacauu

SEQ ID NO: 219989 - RNA, 19 nt, Artificial Sequence
  Description of Artificial Sequence: Synthetic oligonucleotide
  Antisense strand to SEQ ID NO: 219988
aauguccuagaccugcccu

SEQ ID NO: 219990 - RNA, 19 nt, Artificial Sequence
  Description of Artificial Sequence: Synthetic oligonucleotide
  Sense strand starting at position 1474 of SEQ ID NO: 2833
ggacauuucuauuauugca

SEQ ID NO: 219991 - RNA, 19 nt, Artificial Sequence
  Description of Artificial Sequence: Synthetic oligonucleotide
  Antisense strand to SEQ ID NO: 219990
ugcaauaauagaaaugucc

SEQ ID NO: 219992 - RNA, 19 nt, Artificial Sequence
  Description of Artificial Sequence: Synthetic oligonucleotide
  Sense strand starting at position 1509 of SEQ ID NO: 2833
aacacugucuaggugaaga

SEQ ID NO: 219993 - RNA, 19 nt, Artificial Sequence
  Description of Artificial Sequence: Synthetic oligonucleotide
  Antisense strand to SEQ ID NO: 219992
ucuucaccuagacaguguu

SEQ ID NO: 219994 - RNA, 19 nt, Artificial Sequence
  Description of Artificial Sequence: Synthetic oligonucleotide
  Sense strand starting at position 1520 of SEQ ID NO: 2833
ggugaagacuuaguugucu

SEQ ID NO: 219995 - RNA, 19 nt, Artificial Sequence
  Description of Artificial Sequence: Synthetic oligonucleotide
  Antisense strand to SEQ ID NO: 219994
agacaacuaagucuucacc

SEQ ID NO: 219996 - RNA, 19 nt, Artificial Sequence
  Description of Artificial Sequence: Synthetic oligonucleotide
  Sense strand starting at position 1524 of SEQ ID NO: 2833
aagacuuaguugucuuuag

SEQ ID NO: 219997 - RNA, 19 nt, Artificial Sequence
  Description of Artificial Sequence: Synthetic oligonucleotide
  Antisense strand to SEQ ID NO: 219996
cuaaagacaacuaagucuu

SEQ ID NO: 219998 - RNA, 19 nt, Artificial Sequence
  Description of Artificial Sequence: Synthetic oligonucleotide
  Sense strand starting at position 1534 of SEQ ID NO: 2833
ugucuuuagcucuaagcuu

SEQ ID NO: 219999 - RNA, 19 nt, Artificial Sequence
  Description of Artificial Sequence: Synthetic oligonucleotide
  Antisense strand to SEQ ID NO: 219998
aagcuuagagcuaaagaca

SEQ ID NO: 220000 - RNA, 19 nt, Artificial Sequence
  Description of Artificial Sequence: Synthetic oligonucleotide
  Sense strand starting at position 1599 of SEQ ID NO: 2833
guuuccagaucucuuccau

SEQ ID NO: 220001 - RNA, 19 nt, Artificial Sequence
  Description of Artificial Sequence: Synthetic oligonucleotide
  Antisense strand to SEQ ID NO: 220000
auggaagagaucuggaaac

SEQ ID NO: 220002 - RNA, 19 nt, Artificial Sequence
  Description of Artificial Sequence: Synthetic oligonucleotide
  Sense strand starting at position 1619 of SEQ ID NO: 2833
agaaauauguugccagcau

SEQ ID NO: 220003 - RNA, 19 nt, Artificial Sequence
  Description of Artificial Sequence: Synthetic oligonucleotide
  Antisense strand to SEQ ID NO: 220002
augcuggcaacauauuucu

SEQ ID NO: 220004 - RNA, 19 nt, Artificial Sequence
  Description of Artificial Sequence: Synthetic oligonucleotide
  Sense strand starting at position 1623 of SEQ ID NO: 2833
auauguugccagcaucuca

SEQ ID NO: 220005 - RNA, 19 nt, Artificial Sequence
  Description of Artificial Sequence: Synthetic oligonucleotide
  Antisense strand to SEQ ID NO: 220004
ugagaugcuggcaacauau

SEQ ID NO: 220006 - RNA, 19 nt, Artificial Sequence
  Description of Artificial Sequence: Synthetic oligonucleotide
  Sense strand starting at position 2163 of SEQ ID NO: 2833
cucucugguccuugaggau

SEQ ID NO: 220007 - RNA, 19 nt, Artificial Sequence
  Description of Artificial Sequence: Synthetic oligonucleotide
  Antisense strand to SEQ ID NO: 220006
auccucaaggaccagagag

SEQ ID NO: 220008 - RNA, 19 nt, Artificial Sequence
  Description of Artificial Sequence: Synthetic oligonucleotide
  Sense strand starting at position 2382 of SEQ ID NO: 2833
cccaaugaccucuggguua

SEQ ID NO: 220009 - RNA, 19 nt, Artificial Sequence
  Description of Artificial Sequence: Synthetic oligonucleotide
  Antisense strand to SEQ ID NO: 220008
uaacccagaggucauuggg

SEQ ID NO: 220010 - RNA, 19 nt, Artificial Sequence
  Description of Artificial Sequence: Synthetic oligonucleotide
  Sense strand starting at position 2384 of SEQ ID NO: 2833
caaugaccucuggguuacu

SEQ ID NO: 220011 - RNA, 19 nt, Artificial Sequence
  Description of Artificial Sequence: Synthetic oligonucleotide
  Antisense strand to SEQ ID NO: 220010
aguaacccagaggucauug

SEQ ID NO: 220012 - RNA, 19 nt, Artificial Sequence
  Description of Artificial Sequence: Synthetic oligonucleotide
  Sense strand starting at position 2385 of SEQ ID NO: 2833
aaugaccucuggguuacua

SEQ ID NO: 220013 - RNA, 19 nt, Artificial Sequence
  Description of Artificial Sequence: Synthetic oligonucleotide
  Antisense strand to SEQ ID NO: 220012
uaguaacccagaggucauu

SEQ ID NO: 220014 - RNA, 19 nt, Artificial Sequence
  Description of Artificial Sequence: Synthetic oligonucleotide
  Sense strand starting at position 2507 of SEQ ID NO: 2833
gacagaauagcguguagag

SEQ ID NO: 220015 - RNA, 19 nt, Artificial Sequence
  Description of Artificial Sequence: Synthetic oligonucleotide
  Antisense strand to SEQ ID NO: 220014
cucuacacgcuauucuguc

SEQ ID NO: 220016 - RNA, 19 nt, Artificial Sequence
  Description of Artificial Sequence: Synthetic oligonucleotide
  Sense strand starting at position 2509 of SEQ ID NO: 2833
cagaauagcguguagagau

SEQ ID NO: 220017 - RNA, 19 nt, Artificial Sequence
  Description of Artificial Sequence: Synthetic oligonucleotide
  Antisense strand to SEQ ID NO: 220016
aucucuacacgcuauucug

SEQ ID NO: 220018 - RNA, 19 nt, Artificial Sequence
  Description of Artificial Sequence: Synthetic oligonucleotide
  Sense strand starting at position 2750 of SEQ ID NO: 2833
cugcgucuguccacgugau

SEQ ID NO: 220019 - RNA, 19 nt, Artificial Sequence
  Description of Artificial Sequence: Synthetic oligonucleotide
  Antisense strand to SEQ ID NO: 220018
aucacguggacagacgcag

SEQ ID NO: 220020 - RNA, 19 nt, Artificial Sequence
  Description of Artificial Sequence: Synthetic oligonucleotide
  Sense strand starting at position 2752 of SEQ ID NO: 2833
gcgucuguccacgugauaa

SEQ ID NO: 220021 - RNA, 19 nt, Artificial Sequence
  Description of Artificial Sequence: Synthetic oligonucleotide
  Antisense strand to SEQ ID NO: 220020
uuaucacguggacagacgc

SEQ ID NO: 220022 - RNA, 19 nt, Artificial Sequence
  Description of Artificial Sequence: Synthetic oligonucleotide
  Sense strand starting at position 2754 of SEQ ID NO: 2833
gucuguccacgugauaagu

SEQ ID NO: 220023 - RNA, 19 nt, Artificial Sequence
  Description of Artificial Sequence: Synthetic oligonucleotide
  Antisense strand to SEQ ID NO: 220022
acuuaucacguggacagac

SEQ ID NO: 220024 - RNA, 19 nt, Artificial Sequence
  Description of Artificial Sequence: Synthetic oligonucleotide
  Sense strand starting at position 3132 of SEQ ID NO: 2833
uuuccuauugcagagacaa

SEQ ID NO: 220025 - RNA, 19 nt, Artificial Sequence
  Description of Artificial Sequence: Synthetic oligonucleotide
  Antisense strand to SEQ ID NO: 220024
uugucucugcaauaggaaa

SEQ ID NO: 220026 - RNA, 19 nt, Artificial Sequence
  Description of Artificial Sequence: Synthetic oligonucleotide
  Sense strand starting at position 3211 of SEQ ID NO: 2833
ugguauugugaagggucuu

SEQ ID NO: 220027 - RNA, 19 nt, Artificial Sequence
  Description of Artificial Sequence: Synthetic oligonucleotide
  Antisense strand to SEQ ID NO: 220026
aagacccuucacaauacca

SEQ ID NO: 220028 - RNA, 19 nt, Artificial Sequence
  Description of Artificial Sequence: Synthetic oligonucleotide
  Sense strand starting at position 3212 of SEQ ID NO: 2833
gguauugugaagggucuua

SEQ ID NO: 220029 - RNA, 19 nt, Artificial Sequence
  Description of Artificial Sequence: Synthetic oligonucleotide
  Antisense strand to SEQ ID NO: 220028
uaagacccuucacaauacc

SEQ ID NO: 220030 - RNA, 19 nt, Artificial Sequence
  Description of Artificial Sequence: Synthetic oligonucleotide
  Sense strand starting at position 3449 of SEQ ID NO: 2833
cugccugucugaucugaau

SEQ ID NO: 220031 - RNA, 19 nt, Artificial Sequence
  Description of Artificial Sequence: Synthetic oligonucleotide
  Antisense strand to SEQ ID NO: 220030
auucagaucagacaggcag

SEQ ID NO: 220032 - RNA, 19 nt, Artificial Sequence
  Description of Artificial Sequence: Synthetic oligonucleotide
  Sense strand starting at position 3679 of SEQ ID NO: 2833
gugccuacccagggauacu

SEQ ID NO: 220033 - RNA, 19 nt, Artificial Sequence
  Description of Artificial Sequence: Synthetic oligonucleotide
  Antisense strand to SEQ ID NO: 220032
aguaucccuggguaggcac

SEQ ID NO: 220034 - RNA, 19 nt, Artificial Sequence
  Description of Artificial Sequence: Synthetic oligonucleotide
  Sense strand starting at position 3707 of SEQ ID NO: 2833
gguccaaagccugaaucaa

SEQ ID NO: 220035 - RNA, 19 nt, Artificial Sequence
  Description of Artificial Sequence: Synthetic oligonucleotide
  Antisense strand to SEQ ID NO: 220034
uugauucaggcuuuggacc

SEQ ID NO: 220036 - RNA, 19 nt, Artificial Sequence
  Description of Artificial Sequence: Synthetic oligonucleotide
  Sense strand starting at position 3718 of SEQ ID NO: 2833
ugaaucaacucaguaagua

SEQ ID NO: 220037 - RNA, 19 nt, Artificial Sequence
  Description of Artificial Sequence: Synthetic oligonucleotide
  Antisense strand to SEQ ID NO: 220036
uacuuacugaguugauuca

SEQ ID NO: 220038 - RNA, 19 nt, Artificial Sequence
  Description of Artificial Sequence: Synthetic oligonucleotide
  Sense strand starting at position 3902 of SEQ ID NO: 2833
gacugucucuaacuaacga

SEQ ID NO: 220039 - RNA, 19 nt, Artificial Sequence
  Description of Artificial Sequence: Synthetic oligonucleotide
  Antisense strand to SEQ ID NO: 220038
ucguuaguuagagacaguc

SEQ ID NO: 220040 - RNA, 19 nt, Artificial Sequence
  Description of Artificial Sequence: Synthetic oligonucleotide
  Sense strand starting at position 152 of SEQ ID NO: 2834
acuguaggugcugaaauca

SEQ ID NO: 220041 - RNA, 19 nt, Artificial Sequence
  Description of Artificial Sequence: Synthetic oligonucleotide
  Antisense strand to SEQ ID NO: 220040
ugauuucagcaccuacagu

SEQ ID NO: 220042 - RNA, 19 nt, Artificial Sequence
  Description of Artificial Sequence: Synthetic oligonucleotide
  Sense strand starting at position 213 of SEQ ID NO: 2834
uugggcuuugguuauaagu

SEQ ID NO: 220043 - RNA, 19 nt, Artificial Sequence
  Description of Artificial Sequence: Synthetic oligonucleotide
  Antisense strand to SEQ ID NO: 220042
acuuauaaccaaagcccaa

SEQ ID NO: 220044 - RNA, 19 nt, Artificial Sequence
  Description of Artificial Sequence: Synthetic oligonucleotide
  Sense strand starting at position 287 of SEQ ID NO: 2834
uggagagauuaucuaugca

SEQ ID NO: 220045 - RNA, 19 nt, Artificial Sequence
  Description of Artificial Sequence: Synthetic oligonucleotide
  Antisense strand to SEQ ID NO: 220044
ugcauagauaaucucucca

SEQ ID NO: 220046 - RNA, 19 nt, Artificial Sequence
  Description of Artificial Sequence: Synthetic oligonucleotide
  Sense strand starting at position 290 of SEQ ID NO: 2834
agagauuaucuaugcauaa

SEQ ID NO: 220047 - RNA, 19 nt, Artificial Sequence
  Description of Artificial Sequence: Synthetic oligonucleotide
  Antisense strand to SEQ ID NO: 220046
uuaugcauagauaaucucu

SEQ ID NO: 220048 - RNA, 19 nt, Artificial Sequence
  Description of Artificial Sequence: Synthetic oligonucleotide
  Sense strand starting at position 378 of SEQ ID NO: 2834
caguccuaccacgagacau

SEQ ID NO: 220049 - RNA, 19 nt, Artificial Sequence
  Description of Artificial Sequence: Synthetic oligonucleotide
  Antisense strand to SEQ ID NO: 220048
augucucgugguaggacug

SEQ ID NO: 220050 - RNA, 19 nt, Artificial Sequence
  Description of Artificial Sequence: Synthetic oligonucleotide
  Sense strand starting at position 536 of SEQ ID NO: 2834
guacaauauuggucagucu

SEQ ID NO: 220051 - RNA, 19 nt, Artificial Sequence
  Description of Artificial Sequence: Synthetic oligonucleotide
  Antisense strand to SEQ ID NO: 220050
agacugaccaauauuguac

SEQ ID NO: 220052 - RNA, 19 nt, Artificial Sequence
  Description of Artificial Sequence: Synthetic oligonucleotide
  Sense strand starting at position 621 of SEQ ID NO: 2834
cuguguuagcuggagugaa

SEQ ID NO: 220053 - RNA, 19 nt, Artificial Sequence
  Description of Artificial Sequence: Synthetic oligonucleotide
  Antisense strand to SEQ ID NO: 220052
uucacuccagcuaacacag

SEQ ID NO: 220054 - RNA, 19 nt, Artificial Sequence
  Description of Artificial Sequence: Synthetic oligonucleotide
  Sense strand starting at position 863 of SEQ ID NO: 2834
acacccuugcuugaugauu

SEQ ID NO: 220055 - RNA, 19 nt, Artificial Sequence
  Description of Artificial Sequence: Synthetic oligonucleotide
  Antisense strand to SEQ ID NO: 220054
aaucaucaagcaagggugu

SEQ ID NO: 220056 - RNA, 19 nt, Artificial Sequence
  Description of Artificial Sequence: Synthetic oligonucleotide
  Sense strand starting at position 898 of SEQ ID NO: 2834
agucgaugcugaucccaau

SEQ ID NO: 220057 - RNA, 19 nt, Artificial Sequence
  Description of Artificial Sequence: Synthetic oligonucleotide
  Antisense strand to SEQ ID NO: 220056
auugggaucagcaucgacu

SEQ ID NO: 220058 - RNA, 19 nt, Artificial Sequence
  Description of Artificial Sequence: Synthetic oligonucleotide
  Sense strand starting at position 952 of SEQ ID NO: 2834
ugaggaugacuguggucuu

SEQ ID NO: 220059 - RNA, 19 nt, Artificial Sequence
  Description of Artificial Sequence: Synthetic oligonucleotide
  Antisense strand to SEQ ID NO: 220058
aagaccacagucauccuca

SEQ ID NO: 220060 - RNA, 19 nt, Artificial Sequence
  Description of Artificial Sequence: Synthetic oligonucleotide
  Sense strand starting at position 955 of SEQ ID NO: 2834
ggaugacuguggucuugag

SEQ ID NO: 220061 - RNA, 19 nt, Artificial Sequence
  Description of Artificial Sequence: Synthetic oligonucleotide
  Antisense strand to SEQ ID NO: 220060
cucaagaccacagucaucc

SEQ ID NO: 220062 - RNA, 19 nt, Artificial Sequence
  Description of Artificial Sequence: Synthetic oligonucleotide
  Sense strand starting at position 1001 of SEQ ID NO: 2834
gugugacagcuuggagaug

SEQ ID NO: 220063 - RNA, 19 nt, Artificial Sequence
  Description of Artificial Sequence: Synthetic oligonucleotide
  Antisense strand to SEQ ID NO: 220062
caucuccaagcugucacac

SEQ ID NO: 220064 - RNA, 19 nt, Artificial Sequence
  Description of Artificial Sequence: Synthetic oligonucleotide
  Sense strand starting at position 1006 of SEQ ID NO: 2834
acagcuuggagaugauaau

SEQ ID NO: 220065 - RNA, 19 nt, Artificial Sequence
  Description of Artificial Sequence: Synthetic oligonucleotide
  Antisense strand to SEQ ID NO: 220064
auuaucaucuccaagcugu

SEQ ID NO: 220066 - RNA, 19 nt, Artificial Sequence
  Description of Artificial Sequence: Synthetic oligonucleotide
  Sense strand starting at position 1066 of SEQ ID NO: 2834
caaccaugaugugcugaaa

SEQ ID NO: 220067 - RNA, 19 nt, Artificial Sequence
  Description of Artificial Sequence: Synthetic oligonucleotide
  Antisense strand to SEQ ID NO: 220066
uuucagcacaucaugguug

SEQ ID NO: 220068 - RNA, 19 nt, Artificial Sequence
  Description of Artificial Sequence: Synthetic oligonucleotide
  Sense strand starting at position 1069 of SEQ ID NO: 2834
ccaugaugugcugaaacug

SEQ ID NO: 220069 - RNA, 19 nt, Artificial Sequence
  Description of Artificial Sequence: Synthetic oligonucleotide
  Antisense strand to SEQ ID NO: 220068
caguuucagcacaucaugg

SEQ ID NO: 220070 - RNA, 19 nt, Artificial Sequence
  Description of Artificial Sequence: Synthetic oligonucleotide
  Sense strand starting at position 1114 of SEQ ID NO: 2834
gguagaagcggucacagau

SEQ ID NO: 220071 - RNA, 19 nt, Artificial Sequence
  Description of Artificial Sequence: Synthetic oligonucleotide
  Antisense strand to SEQ ID NO: 220070
aucugugaccgcuucuacc

SEQ ID NO: 220072 - RNA, 19 nt, Artificial Sequence
  Description of Artificial Sequence: Synthetic oligonucleotide
  Sense strand starting at position 1120 of SEQ ID NO: 2834
agcggucacagauauaucu

SEQ ID NO: 220073 - RNA, 19 nt, Artificial Sequence
  Description of Artificial Sequence: Synthetic oligonucleotide
  Antisense strand to SEQ ID NO: 220072
agauauaucugugaccgcu

SEQ ID NO: 220074 - RNA, 19 nt, Artificial Sequence
  Description of Artificial Sequence: Synthetic oligonucleotide
  Sense strand starting at position 1127 of SEQ ID NO: 2834
acagauauaucugucaucu

SEQ ID NO: 220075 - RNA, 19 nt, Artificial Sequence
  Description of Artificial Sequence: Synthetic oligonucleotide
  Antisense strand to SEQ ID NO: 220074
agaugacagauauaucugu

SEQ ID NO: 220076 - RNA, 19 nt, Artificial Sequence
  Description of Artificial Sequence: Synthetic oligonucleotide
  Sense strand starting at position 1282 of SEQ ID NO: 2834
agcgguccagacugaugaa

SEQ ID NO: 220077 - RNA, 19 nt, Artificial Sequence
  Description of Artificial Sequence: Synthetic oligonucleotide
  Antisense strand to SEQ ID NO: 220076
uucaucagucuggaccgcu

SEQ ID NO: 220078 - RNA, 19 nt, Artificial Sequence
  Description of Artificial Sequence: Synthetic oligonucleotide
  Sense strand starting at position 1324 of SEQ ID NO: 2834
agagguugacuguguagau

SEQ ID NO: 220079 - RNA, 19 nt, Artificial Sequence
  Description of Artificial Sequence: Synthetic oligonucleotide
  Antisense strand to SEQ ID NO: 220078
aucuacacagucaaccucu

SEQ ID NO: 220080 - RNA, 19 nt, Artificial Sequence
  Description of Artificial Sequence: Synthetic oligonucleotide
  Sense strand starting at position 1325 of SEQ ID NO: 2834
gagguugacuguguagaug

SEQ ID NO: 220081 - RNA, 19 nt, Artificial Sequence
  Description of Artificial Sequence: Synthetic oligonucleotide
  Antisense strand to SEQ ID NO: 220080
caucuacacagucaaccuc

SEQ ID NO: 220082 - RNA, 19 nt, Artificial Sequence
  Description of Artificial Sequence: Synthetic oligonucleotide
  Sense strand starting at position 1456 of SEQ ID NO: 2834
uguacuuguccgucaugcu

SEQ ID NO: 220083 - RNA, 19 nt, Artificial Sequence
  Description of Artificial Sequence: Synthetic oligonucleotide
  Antisense strand to SEQ ID NO: 220082
agcaugacggacaaguaca

SEQ ID NO: 220084 - RNA, 19 nt, Artificial Sequence
  Description of Artificial Sequence: Synthetic oligonucleotide
  Sense strand starting at position 1463 of SEQ ID NO: 2834
guccgucaugcuucucagu

SEQ ID NO: 220085 - RNA, 19 nt, Artificial Sequence
  Description of Artificial Sequence: Synthetic oligonucleotide
  Antisense strand to SEQ ID NO: 220084
acugagaagcaugacggac

SEQ ID NO: 220086 - RNA, 19 nt, Artificial Sequence
  Description of Artificial Sequence: Synthetic oligonucleotide
  Sense strand starting at position 1633 of SEQ ID NO: 2834
agcccauuuccucggugua

SEQ ID NO: 220087 - RNA, 19 nt, Artificial Sequence
  Description of Artificial Sequence: Synthetic oligonucleotide
  Antisense strand to SEQ ID NO: 220086
uacaccgaggaaaugggcu

SEQ ID NO: 220088 - RNA, 19 nt, Artificial Sequence
  Description of Artificial Sequence: Synthetic oligonucleotide
  Sense strand starting at position 1635 of SEQ ID NO: 2834
cccauuuccucgguguagu

SEQ ID NO: 220089 - RNA, 19 nt, Artificial Sequence
  Description of Artificial Sequence: Synthetic oligonucleotide
  Antisense strand to SEQ ID NO: 220088
acuacaccgaggaaauggg

SEQ ID NO: 220090 - RNA, 19 nt, Artificial Sequence
  Description of Artificial Sequence: Synthetic oligonucleotide
  Sense strand starting at position 1636 of SEQ ID NO: 2834
ccauuuccucgguguaguu

SEQ ID NO: 220091 - RNA, 19 nt, Artificial Sequence
  Description of Artificial Sequence: Synthetic oligonucleotide
  Antisense strand to SEQ ID NO: 220090
aacuacaccgaggaaaugg

SEQ ID NO: 220092 - RNA, 19 nt, Artificial Sequence
  Description of Artificial Sequence: Synthetic oligonucleotide
  Sense strand starting at position 1638 of SEQ ID NO: 2834
auuuccucgguguaguuau

SEQ ID NO: 220093 - RNA, 19 nt, Artificial Sequence
  Description of Artificial Sequence: Synthetic oligonucleotide
  Antisense strand to SEQ ID NO: 220092
auaacuacaccgaggaaau

SEQ ID NO: 220094 - RNA, 19 nt, Artificial Sequence
  Description of Artificial Sequence: Synthetic oligonucleotide
  Sense strand starting at position 1651 of SEQ ID NO: 2834
aguuaucugaaguguauau

SEQ ID NO: 220095 - RNA, 19 nt, Artificial Sequence
  Description of Artificial Sequence: Synthetic oligonucleotide
  Antisense strand to SEQ ID NO: 220094
auauacacuucagauaacu

SEQ ID NO: 220096 - RNA, 19 nt, Artificial Sequence
  Description of Artificial Sequence: Synthetic oligonucleotide
  Sense strand starting at position 1658 of SEQ ID NO: 2834
ugaaguguauaucugcaaa

SEQ ID NO: 220097 - RNA, 19 nt, Artificial Sequence
  Description of Artificial Sequence: Synthetic oligonucleotide
  Antisense strand to SEQ ID NO: 220096
uuugcagauauacacuuca

SEQ ID NO: 220098 - RNA, 19 nt, Artificial Sequence
  Description of Artificial Sequence: Synthetic oligonucleotide
  Sense strand starting at position 1869 of SEQ ID NO: 2834
auuauauccuucuuuggua

SEQ ID NO: 220099 - RNA, 19 nt, Artificial Sequence
  Description of Artificial Sequence: Synthetic oligonucleotide
  Antisense strand to SEQ ID NO: 220098
uaccaaagaaggauauaau

SEQ ID NO: 220100 - RNA, 19 nt, Artificial Sequence
  Description of Artificial Sequence: Synthetic oligonucleotide
  Sense strand starting at position 1876 of SEQ ID NO: 2834
ccuucuuugguagaaccaa

SEQ ID NO: 220101 - RNA, 19 nt, Artificial Sequence
  Description of Artificial Sequence: Synthetic oligonucleotide
  Antisense strand to SEQ ID NO: 220100
uugguucuaccaaagaagg

SEQ ID NO: 220102 - RNA, 19 nt, Artificial Sequence
  Description of Artificial Sequence: Synthetic oligonucleotide
  Sense strand starting at position 1948 of SEQ ID NO: 2834
agucacaucuuggcuaacu

SEQ ID NO: 220103 - RNA, 19 nt, Artificial Sequence
  Description of Artificial Sequence: Synthetic oligonucleotide
  Antisense strand to SEQ ID NO: 220102
aguuagccaagaugugacu

SEQ ID NO: 220104 - RNA, 19 nt, Artificial Sequence
  Description of Artificial Sequence: Synthetic oligonucleotide
  Sense strand starting at position 2164 of SEQ ID NO: 2834
gggcguugcaaagacucau

SEQ ID NO: 220105 - RNA, 19 nt, Artificial Sequence
  Description of Artificial Sequence: Synthetic oligonucleotide
  Antisense strand to SEQ ID NO: 220104
augagucuuugcaacgccc

SEQ ID NO: 220106 - RNA, 19 nt, Artificial Sequence
  Description of Artificial Sequence: Synthetic oligonucleotide
  Sense strand starting at position 2248 of SEQ ID NO: 2834
gcaacuuguaguggguaaa

SEQ ID NO: 220107 - RNA, 19 nt, Artificial Sequence
  Description of Artificial Sequence: Synthetic oligonucleotide
  Antisense strand to SEQ ID NO: 220106
uuuacccacuacaaguugc

SEQ ID NO: 220108 - RNA, 19 nt, Artificial Sequence
  Description of Artificial Sequence: Synthetic oligonucleotide
  Sense strand starting at position 2386 of SEQ ID NO: 2834
cuugccauccucguguuua

SEQ ID NO: 220109 - RNA, 19 nt, Artificial Sequence
  Description of Artificial Sequence: Synthetic oligonucleotide
  Antisense strand to SEQ ID NO: 220108
uaaacacgaggauggcaag

SEQ ID NO: 220110 - RNA, 19 nt, Artificial Sequence
  Description of Artificial Sequence: Synthetic oligonucleotide
  Sense strand starting at position 3260 of SEQ ID NO: 2834
ccgcacagaguuuaacaaa

SEQ ID NO: 220111 - RNA, 19 nt, Artificial Sequence
  Description of Artificial Sequence: Synthetic oligonucleotide
  Antisense strand to SEQ ID NO: 220110
uuuguuaaacucugugcgg

SEQ ID NO: 220112 - RNA, 19 nt, Artificial Sequence
  Description of Artificial Sequence: Synthetic oligonucleotide
  Sense strand starting at position 3370 of SEQ ID NO: 2834
cgcccuccgccucuaaauu

SEQ ID NO: 220113 - RNA, 19 nt, Artificial Sequence
  Description of Artificial Sequence: Synthetic oligonucleotide
  Antisense strand to SEQ ID NO: 220112
aauuuagaggcggagggcg

SEQ ID NO: 220114 - RNA, 19 nt, Artificial Sequence
  Description of Artificial Sequence: Synthetic oligonucleotide
  Sense strand starting at position 3487 of SEQ ID NO: 2834
cacagaauguucuuacguu

SEQ ID NO: 220115 - RNA, 19 nt, Artificial Sequence
  Description of Artificial Sequence: Synthetic oligonucleotide
  Antisense strand to SEQ ID NO: 220114
aacguaagaacauucugug

SEQ ID NO: 220116 - RNA, 19 nt, Artificial Sequence
  Description of Artificial Sequence: Synthetic oligonucleotide
  Sense strand starting at position 3645 of SEQ ID NO: 2834
acuauauaggcauggucaa

SEQ ID NO: 220117 - RNA, 19 nt, Artificial Sequence
  Description of Artificial Sequence: Synthetic oligonucleotide
  Antisense strand to SEQ ID NO: 220116
uugaccaugccuauauagu

SEQ ID NO: 220118 - RNA, 19 nt, Artificial Sequence
  Description of Artificial Sequence: Synthetic oligonucleotide
  Sense strand starting at position 3766 of SEQ ID NO: 2834
guacauuuaugacaaagca

SEQ ID NO: 220119 - RNA, 19 nt, Artificial Sequence
  Description of Artificial Sequence: Synthetic oligonucleotide
  Antisense strand to SEQ ID NO: 220118
ugcuuugucauaaauguac

SEQ ID NO: 220120 - RNA, 19 nt, Artificial Sequence
  Description of Artificial Sequence: Synthetic oligonucleotide
  Sense strand starting at position 36 of SEQ ID NO: 2835
agucacaucuuggcuaacu

SEQ ID NO: 220121 - RNA, 19 nt, Artificial Sequence
  Description of Artificial Sequence: Synthetic oligonucleotide
  Antisense strand to SEQ ID NO: 220120
aguuagccaagaugugacu

SEQ ID NO: 220122 - RNA, 19 nt, Artificial Sequence
  Description of Artificial Sequence: Synthetic oligonucleotide
  Sense strand starting at position 252 of SEQ ID NO: 2835
gggcguugcaaagacucau

SEQ ID NO: 220123 - RNA, 19 nt, Artificial Sequence
  Description of Artificial Sequence: Synthetic oligonucleotide
  Antisense strand to SEQ ID NO: 220122
augagucuuugcaacgccc

SEQ ID NO: 220124 - RNA, 19 nt, Artificial Sequence
  Description of Artificial Sequence: Synthetic oligonucleotide
  Sense strand starting at position 336 of SEQ ID NO: 2835
gcaacuuguaguggguaaa

SEQ ID NO: 220125 - RNA, 19 nt, Artificial Sequence
  Description of Artificial Sequence: Synthetic oligonucleotide
  Antisense strand to SEQ ID NO: 220124
uuuacccacuacaaguugc

SEQ ID NO: 220126 - RNA, 19 nt, Artificial Sequence
  Description of Artificial Sequence: Synthetic oligonucleotide
  Sense strand starting at position 393 of SEQ ID NO: 2835
ggguauauugggcgggagu

SEQ ID NO: 220127 - RNA, 19 nt, Artificial Sequence
  Description of Artificial Sequence: Synthetic oligonucleotide
  Antisense strand to SEQ ID NO: 220126
acucccgcccaauauaccc

SEQ ID NO: 220128 - RNA, 19 nt, Artificial Sequence
  Description of Artificial Sequence: Synthetic oligonucleotide
  Sense strand starting at position 474 of SEQ ID NO: 2835
cuugccauccucguguuua

SEQ ID NO: 220129 - RNA, 19 nt, Artificial Sequence
  Description of Artificial Sequence: Synthetic oligonucleotide
  Antisense strand to SEQ ID NO: 220128
uaaacacgaggauggcaag

SEQ ID NO: 220130 - RNA, 19 nt, Artificial Sequence
  Description of Artificial Sequence: Synthetic oligonucleotide
  Sense strand starting at position 1348 of SEQ ID NO: 2835
ccgcacagaguuuaacaaa

SEQ ID NO: 220131 - RNA, 19 nt, Artificial Sequence
  Description of Artificial Sequence: Synthetic oligonucleotide
  Antisense strand to SEQ ID NO: 220130
uuuguuaaacucugugcgg

SEQ ID NO: 220132 - RNA, 19 nt, Artificial Sequence
  Description of Artificial Sequence: Synthetic oligonucleotide
  Sense strand starting at position 1458 of SEQ ID NO: 2835
cgcccuccgccucuaaauu

SEQ ID NO: 220133 - RNA, 19 nt, Artificial Sequence
  Description of Artificial Sequence: Synthetic oligonucleotide
  Antisense strand to SEQ ID NO: 220132
aauuuagaggcggagggcg

SEQ ID NO: 220134 - RNA, 19 nt, Artificial Sequence
  Description of Artificial Sequence: Synthetic oligonucleotide
  Sense strand starting at position 1575 of SEQ ID NO: 2835
cacagaauguucuuacguu

SEQ ID NO: 220135 - RNA, 19 nt, Artificial Sequence
  Description of Artificial Sequence: Synthetic oligonucleotide
  Antisense strand to SEQ ID NO: 220134
aacguaagaacauucugug

SEQ ID NO: 220136 - RNA, 19 nt, Artificial Sequence
  Description of Artificial Sequence: Synthetic oligonucleotide
  Sense strand starting at position 1733 of SEQ ID NO: 2835
acuauauaggcauggucaa

SEQ ID NO: 220137 - RNA, 19 nt, Artificial Sequence
  Description of Artificial Sequence: Synthetic oligonucleotide
  Antisense strand to SEQ ID NO: 220136
uugaccaugccuauauagu

SEQ ID NO: 220138 - RNA, 19 nt, Artificial Sequence
  Description of Artificial Sequence: Synthetic oligonucleotide
  Sense strand starting at position 1854 of SEQ ID NO: 2835
guacauuuaugacaaagca

SEQ ID NO: 220139 - RNA, 19 nt, Artificial Sequence
  Description of Artificial Sequence: Synthetic oligonucleotide
  Antisense strand to SEQ ID NO: 220138
ugcuuugucauaaauguac

SEQ ID NO: 220140 - RNA, 19 nt, Artificial Sequence
  Description of Artificial Sequence: Synthetic oligonucleotide
  Sense strand starting at position 2308 of SEQ ID NO: 2835
ugcuaaaguggauggaauu

SEQ ID NO: 220141 - RNA, 19 nt, Artificial Sequence
  Description of Artificial Sequence: Synthetic oligonucleotide
  Antisense strand to SEQ ID NO: 220140
aauuccauccacuuuagca

SEQ ID NO: 220142 - RNA, 19 nt, Artificial Sequence
  Description of Artificial Sequence: Synthetic oligonucleotide
  Sense strand starting at position 2372 of SEQ ID NO: 2835
gggagugacuugcuggagu

SEQ ID NO: 220143 - RNA, 19 nt, Artificial Sequence
  Description of Artificial Sequence: Synthetic oligonucleotide
  Antisense strand to SEQ ID NO: 220142
acuccagcaagucacuccc

SEQ ID NO: 220144 - RNA, 19 nt, Artificial Sequence
  Description of Artificial Sequence: Synthetic oligonucleotide
  Sense strand starting at position 2374 of SEQ ID NO: 2835
gagugacuugcuggaguaa

SEQ ID NO: 220145 - RNA, 19 nt, Artificial Sequence
  Description of Artificial Sequence: Synthetic oligonucleotide
  Antisense strand to SEQ ID NO: 220144
uuacuccagcaagucacuc

SEQ ID NO: 220146 - RNA, 19 nt, Artificial Sequence
  Description of Artificial Sequence: Synthetic oligonucleotide
  Sense strand starting at position 2497 of SEQ ID NO: 2835
ccuuccuucggaggaugua

SEQ ID NO: 220147 - RNA, 19 nt, Artificial Sequence
  Description of Artificial Sequence: Synthetic oligonucleotide
  Antisense strand to SEQ ID NO: 220146
uacauccuccgaaggaagg

SEQ ID NO: 220148 - RNA, 19 nt, Artificial Sequence
  Description of Artificial Sequence: Synthetic oligonucleotide
  Sense strand starting at position 2506 of SEQ ID NO: 2835
ggaggauguagcuauacuu

SEQ ID NO: 220149 - RNA, 19 nt, Artificial Sequence
  Description of Artificial Sequence: Synthetic oligonucleotide
  Antisense strand to SEQ ID NO: 220148
aaguauagcuacauccucc

SEQ ID NO: 220150 - RNA, 19 nt, Artificial Sequence
  Description of Artificial Sequence: Synthetic oligonucleotide
  Sense strand starting at position 2545 of SEQ ID NO: 2835
gggucaggugcagauaauu

SEQ ID NO: 220151 - RNA, 19 nt, Artificial Sequence
  Description of Artificial Sequence: Synthetic oligonucleotide
  Antisense strand to SEQ ID NO: 220150
aauuaucugcaccugaccc

SEQ ID NO: 220152 - RNA, 19 nt, Artificial Sequence
  Description of Artificial Sequence: Synthetic oligonucleotide
  Sense strand starting at position 2582 of SEQ ID NO: 2835
aagguaggauuuggcauaa

SEQ ID NO: 220153 - RNA, 19 nt, Artificial Sequence
  Description of Artificial Sequence: Synthetic oligonucleotide
  Antisense strand to SEQ ID NO: 220152
uuaugccaaauccuaccuu

SEQ ID NO: 220154 - RNA, 19 nt, Artificial Sequence
  Description of Artificial Sequence: Synthetic oligonucleotide
  Sense strand starting at position 2622 of SEQ ID NO: 2835
agauauguauugcucagua

SEQ ID NO: 220155 - RNA, 19 nt, Artificial Sequence
  Description of Artificial Sequence: Synthetic oligonucleotide
  Antisense strand to SEQ ID NO: 220154
uacugagcaauacauaucu

SEQ ID NO: 220156 - RNA, 19 nt, Artificial Sequence
  Description of Artificial Sequence: Synthetic oligonucleotide
  Sense strand starting at position 2624 of SEQ ID NO: 2835
auauguauugcucaguaau

SEQ ID NO: 220157 - RNA, 19 nt, Artificial Sequence
  Description of Artificial Sequence: Synthetic oligonucleotide
  Antisense strand to SEQ ID NO: 220156
auuacugagcaauacauau

SEQ ID NO: 220158 - RNA, 19 nt, Artificial Sequence
  Description of Artificial Sequence: Synthetic oligonucleotide
  Sense strand starting at position 2626 of SEQ ID NO: 2835
auguauugcucaguaauuu

SEQ ID NO: 220159 - RNA, 19 nt, Artificial Sequence
  Description of Artificial Sequence: Synthetic oligonucleotide
  Antisense strand to SEQ ID NO: 220158
aaauuacugagcaauacau

SEQ ID NO: 220160 - RNA, 19 nt, Artificial Sequence
  Description of Artificial Sequence: Synthetic oligonucleotide
  Sense strand starting at position 2644 of SEQ ID NO: 2835
ucauaauagcgguaaccaa

SEQ ID NO: 220161 - RNA, 19 nt, Artificial Sequence
  Description of Artificial Sequence: Synthetic oligonucleotide
  Antisense strand to SEQ ID NO: 220160
uugguuaccgcuauuauga

SEQ ID NO: 220162 - RNA, 19 nt, Artificial Sequence
  Description of Artificial Sequence: Synthetic oligonucleotide
  Sense strand starting at position 2652 of SEQ ID NO: 2835
gcgguaaccaauucgcgaa

SEQ ID NO: 220163 - RNA, 19 nt, Artificial Sequence
  Description of Artificial Sequence: Synthetic oligonucleotide
  Antisense strand to SEQ ID NO: 220162
uucgcgaauugguuaccgc

SEQ ID NO: 220164 - RNA, 19 nt, Artificial Sequence
  Description of Artificial Sequence: Synthetic oligonucleotide
  Sense strand starting at position 2654 of SEQ ID NO: 2835
gguaaccaauucgcgaaua

SEQ ID NO: 220165 - RNA, 19 nt, Artificial Sequence
  Description of Artificial Sequence: Synthetic oligonucleotide
  Antisense strand to SEQ ID NO: 220164
uauucgcgaauugguuacc

SEQ ID NO: 220166 - RNA, 19 nt, Artificial Sequence
  Description of Artificial Sequence: Synthetic oligonucleotide
  Sense strand starting at position 2656 of SEQ ID NO: 2835
uaaccaauucgcgaauagu

SEQ ID NO: 220167 - RNA, 19 nt, Artificial Sequence
  Description of Artificial Sequence: Synthetic oligonucleotide
  Antisense strand to SEQ ID NO: 220166
acuauucgcgaauugguua

SEQ ID NO: 220168 - RNA, 19 nt, Artificial Sequence
  Description of Artificial Sequence: Synthetic oligonucleotide
  Sense strand starting at position 2664 of SEQ ID NO: 2835
ucgcgaauagugcuuuauu

SEQ ID NO: 220169 - RNA, 19 nt, Artificial Sequence
  Description of Artificial Sequence: Synthetic oligonucleotide
  Antisense strand to SEQ ID NO: 220168
aauaaagcacuauucgcga

SEQ ID NO: 220170 - RNA, 19 nt, Artificial Sequence
  Description of Artificial Sequence: Synthetic oligonucleotide
  Sense strand starting at position 2667 of SEQ ID NO: 2835
cgaauagugcuuuauuauc

SEQ ID NO: 220171 - RNA, 19 nt, Artificial Sequence
  Description of Artificial Sequence: Synthetic oligonucleotide
  Antisense strand to SEQ ID NO: 220170
gauaauaaagcacuauucg

SEQ ID NO: 220172 - RNA, 19 nt, Artificial Sequence
  Description of Artificial Sequence: Synthetic oligonucleotide
  Sense strand starting at position 2810 of SEQ ID NO: 2835
augcauuuaguccgauauu

SEQ ID NO: 220173 - RNA, 19 nt, Artificial Sequence
  Description of Artificial Sequence: Synthetic oligonucleotide
  Antisense strand to SEQ ID NO: 220172
aauaucggacuaaaugcau

SEQ ID NO: 220174 - RNA, 19 nt, Artificial Sequence
  Description of Artificial Sequence: Synthetic oligonucleotide
  Sense strand starting at position 2811 of SEQ ID NO: 2835
ugcauuuaguccgauauuu

SEQ ID NO: 220175 - RNA, 19 nt, Artificial Sequence
  Description of Artificial Sequence: Synthetic oligonucleotide
  Antisense strand to SEQ ID NO: 220174
aaauaucggacuaaaugca

SEQ ID NO: 220176 - RNA, 19 nt, Artificial Sequence
  Description of Artificial Sequence: Synthetic oligonucleotide
  Sense strand starting at position 2819 of SEQ ID NO: 2835
guccgauauuuauagaagg

SEQ ID NO: 220177 - RNA, 19 nt, Artificial Sequence
  Description of Artificial Sequence: Synthetic oligonucleotide
  Antisense strand to SEQ ID NO: 220176
ccuucuauaaauaucggac

SEQ ID NO: 220178 - RNA, 19 nt, Artificial Sequence
  Description of Artificial Sequence: Synthetic oligonucleotide
  Sense strand starting at position 2916 of SEQ ID NO: 2835
gcaaauaagcccggagaga

SEQ ID NO: 220179 - RNA, 19 nt, Artificial Sequence
  Description of Artificial Sequence: Synthetic oligonucleotide
  Antisense strand to SEQ ID NO: 220178
ucucuccgggcuuauuugc

SEQ ID NO: 220180 - RNA, 19 nt, Artificial Sequence
  Description of Artificial Sequence: Synthetic oligonucleotide
  Sense strand starting at position 3029 of SEQ ID NO: 2835
caagcuuuggcacgaauca

SEQ ID NO: 220181 - RNA, 19 nt, Artificial Sequence
  Description of Artificial Sequence: Synthetic oligonucleotide
  Antisense strand to SEQ ID NO: 220180
ugauucgugccaaagcuug

SEQ ID NO: 220182 - RNA, 19 nt, Artificial Sequence
  Description of Artificial Sequence: Synthetic oligonucleotide
  Sense strand starting at position 3314 of SEQ ID NO: 2835
cgaaauggucccgaggaga

SEQ ID NO: 220183 - RNA, 19 nt, Artificial Sequence
  Description of Artificial Sequence: Synthetic oligonucleotide
  Antisense strand to SEQ ID NO: 220182
ucuccucgggaccauuucg

SEQ ID NO: 220184 - RNA, 19 nt, Artificial Sequence
  Description of Artificial Sequence: Synthetic oligonucleotide
  Sense strand starting at position 3401 of SEQ ID NO: 2835
uggaguguuccagagguag

SEQ ID NO: 220185 - RNA, 19 nt, Artificial Sequence
  Description of Artificial Sequence: Synthetic oligonucleotide
  Antisense strand to SEQ ID NO: 220184
cuaccucuggaacacucca

SEQ ID NO: 220186 - RNA, 19 nt, Artificial Sequence
  Description of Artificial Sequence: Synthetic oligonucleotide
  Sense strand starting at position 3403 of SEQ ID NO: 2835
gaguguuccagagguaguu

SEQ ID NO: 220187 - RNA, 19 nt, Artificial Sequence
  Description of Artificial Sequence: Synthetic oligonucleotide
  Antisense strand to SEQ ID NO: 220186
aacuaccucuggaacacuc

SEQ ID NO: 220188 - RNA, 19 nt, Artificial Sequence
  Description of Artificial Sequence: Synthetic oligonucleotide
  Sense strand starting at position 3480 of SEQ ID NO: 2835
ucccuaauguuggugguua

SEQ ID NO: 220189 - RNA, 19 nt, Artificial Sequence
  Description of Artificial Sequence: Synthetic oligonucleotide
  Antisense strand to SEQ ID NO: 220188
uaaccaccaacauuaggga

SEQ ID NO: 220190 - RNA, 19 nt, Artificial Sequence
  Description of Artificial Sequence: Synthetic oligonucleotide
  Sense strand starting at position 3482 of SEQ ID NO: 2835
ccuaauguuggugguuaaa

SEQ ID NO: 220191 - RNA, 19 nt, Artificial Sequence
  Description of Artificial Sequence: Synthetic oligonucleotide
  Antisense strand to SEQ ID NO: 220190
uuuaaccaccaacauuagg

SEQ ID NO: 220192 - RNA, 19 nt, Artificial Sequence
  Description of Artificial Sequence: Synthetic oligonucleotide
  Sense strand starting at position 3494 of SEQ ID NO: 2835
gguuaaagguucucaucua

SEQ ID NO: 220193 - RNA, 19 nt, Artificial Sequence
  Description of Artificial Sequence: Synthetic oligonucleotide
  Antisense strand to SEQ ID NO: 220192
uagaugagaaccuuuaacc

SEQ ID NO: 220194 - RNA, 19 nt, Artificial Sequence
  Description of Artificial Sequence: Synthetic oligonucleotide
  Sense strand starting at position 3567 of SEQ ID NO: 2835
cucagaaacgaacgaguua

SEQ ID NO: 220195 - RNA, 19 nt, Artificial Sequence
  Description of Artificial Sequence: Synthetic oligonucleotide
  Antisense strand to SEQ ID NO: 220194
uaacucguucguuucugag

SEQ ID NO: 220196 - RNA, 19 nt, Artificial Sequence
  Description of Artificial Sequence: Synthetic oligonucleotide
  Sense strand starting at position 3590 of SEQ ID NO: 2835
acacacuaauggccagaua

SEQ ID NO: 220197 - RNA, 19 nt, Artificial Sequence
  Description of Artificial Sequence: Synthetic oligonucleotide
  Antisense strand to SEQ ID NO: 220196
uaucuggccauuagugugu

SEQ ID NO: 220198 - RNA, 19 nt, Artificial Sequence
  Description of Artificial Sequence: Synthetic oligonucleotide
  Sense strand starting at position 3877 of SEQ ID NO: 2835
gguagauccuaucuacuga

SEQ ID NO: 220199 - RNA, 19 nt, Artificial Sequence
  Description of Artificial Sequence: Synthetic oligonucleotide
  Antisense strand to SEQ ID NO: 220198
ucaguagauaggaucuacc

SEQ ID NO: 220200 - RNA, 19 nt, Artificial Sequence
  Description of Artificial Sequence: Synthetic oligonucleotide
  Sense strand starting at position 128 of SEQ ID NO: 2837
ggagaaugcuggccacacu

SEQ ID NO: 220201 - RNA, 19 nt, Artificial Sequence
  Description of Artificial Sequence: Synthetic oligonucleotide
  Antisense strand to SEQ ID NO: 220200
aguguggccagcauucucc

SEQ ID NO: 220202 - RNA, 19 nt, Artificial Sequence
  Description of Artificial Sequence: Synthetic oligonucleotide
  Sense strand starting at position 129 of SEQ ID NO: 2837
gagaaugcuggccacacuu

SEQ ID NO: 220203 - RNA, 19 nt, Artificial Sequence
  Description of Artificial Sequence: Synthetic oligonucleotide
  Antisense strand to SEQ ID NO: 220202
aaguguggccagcauucuc

SEQ ID NO: 220204 - RNA, 19 nt, Artificial Sequence
  Description of Artificial Sequence: Synthetic oligonucleotide
  Sense strand starting at position 213 of SEQ ID NO: 2837
gaaugaggucagcacucuu

SEQ ID NO: 220205 - RNA, 19 nt, Artificial Sequence
  Description of Artificial Sequence: Synthetic oligonucleotide
  Antisense strand to SEQ ID NO: 220204
aagagugcugaccucauuc

SEQ ID NO: 220206 - RNA, 19 nt, Artificial Sequence
  Description of Artificial Sequence: Synthetic oligonucleotide
  Sense strand starting at position 252 of SEQ ID NO: 2837
aguuaaauauuuggugaag

SEQ ID NO: 220207 - RNA, 19 nt, Artificial Sequence
  Description of Artificial Sequence: Synthetic oligonucleotide
  Antisense strand to SEQ ID NO: 220206
cuucaccaaauauuuaacu

SEQ ID NO: 220208 - RNA, 19 nt, Artificial Sequence
  Description of Artificial Sequence: Synthetic oligonucleotide
  Sense strand starting at position 313 of SEQ ID NO: 2837
gugggcauaucuuuccaaa

SEQ ID NO: 220209 - RNA, 19 nt, Artificial Sequence
  Description of Artificial Sequence: Synthetic oligonucleotide
  Antisense strand to SEQ ID NO: 220208
uuuggaaagauaugcccac

SEQ ID NO: 220210 - RNA, 19 nt, Artificial Sequence
  Description of Artificial Sequence: Synthetic oligonucleotide
  Sense strand starting at position 337 of SEQ ID NO: 2837
gcuacuccucucgauuauu

SEQ ID NO: 220211 - RNA, 19 nt, Artificial Sequence
  Description of Artificial Sequence: Synthetic oligonucleotide
  Antisense strand to SEQ ID NO: 220210
aauaaucgagaggaguagc

SEQ ID NO: 220212 - RNA, 19 nt, Artificial Sequence
  Description of Artificial Sequence: Synthetic oligonucleotide
  Sense strand starting at position 751 of SEQ ID NO: 2837
gggaacuuucgccacucuu

SEQ ID NO: 220213 - RNA, 19 nt, Artificial Sequence
  Description of Artificial Sequence: Synthetic oligonucleotide
  Antisense strand to SEQ ID NO: 220212
aagaguggcgaaaguuccc

SEQ ID NO: 220214 - RNA, 19 nt, Artificial Sequence
  Description of Artificial Sequence: Synthetic oligonucleotide
  Sense strand starting at position 852 of SEQ ID NO: 2837
ccggacucgacugaguuua

SEQ ID NO: 220215 - RNA, 19 nt, Artificial Sequence
  Description of Artificial Sequence: Synthetic oligonucleotide
  Antisense strand to SEQ ID NO: 220214
uaaacucagucgaguccgg

SEQ ID NO: 220216 - RNA, 19 nt, Artificial Sequence
  Description of Artificial Sequence: Synthetic oligonucleotide
  Sense strand starting at position 950 of SEQ ID NO: 2837
guuacaaauacgggcaaau

SEQ ID NO: 220217 - RNA, 19 nt, Artificial Sequence
  Description of Artificial Sequence: Synthetic oligonucleotide
  Antisense strand to SEQ ID NO: 220216
auuugcccguauuuguaac

SEQ ID NO: 220218 - RNA, 19 nt, Artificial Sequence
  Description of Artificial Sequence: Synthetic oligonucleotide
  Sense strand starting at position 963 of SEQ ID NO: 2837
gcaaauucucgcuccggca

SEQ ID NO: 220219 - RNA, 19 nt, Artificial Sequence
  Description of Artificial Sequence: Synthetic oligonucleotide
  Antisense strand to SEQ ID NO: 220218
ugccggagcgagaauuugc

SEQ ID NO: 220220 - RNA, 19 nt, Artificial Sequence
  Description of Artificial Sequence: Synthetic oligonucleotide
  Sense strand starting at position 1040 of SEQ ID NO: 2837
ggcugaggcgaaaguguuu

SEQ ID NO: 220221 - RNA, 19 nt, Artificial Sequence
  Description of Artificial Sequence: Synthetic oligonucleotide
  Antisense strand to SEQ ID NO: 220220
aaacacuuucgccucagcc

SEQ ID NO: 220222 - RNA, 19 nt, Artificial Sequence
  Description of Artificial Sequence: Synthetic oligonucleotide
  Sense strand starting at position 1200 of SEQ ID NO: 2837
gccagucgccgcaaagagu

SEQ ID NO: 220223 - RNA, 19 nt, Artificial Sequence
  Description of Artificial Sequence: Synthetic oligonucleotide
  Antisense strand to SEQ ID NO: 220222
acucuuugcggcgacuggc

SEQ ID NO: 220224 - RNA, 19 nt, Artificial Sequence
  Description of Artificial Sequence: Synthetic oligonucleotide
  Sense strand starting at position 1207 of SEQ ID NO: 2837
gccgcaaagaguuaaccaa

SEQ ID NO: 220225 - RNA, 19 nt, Artificial Sequence
  Description of Artificial Sequence: Synthetic oligonucleotide
  Antisense strand to SEQ ID NO: 220224
uugguuaacucuuugcggc

SEQ ID NO: 220226 - RNA, 19 nt, Artificial Sequence
  Description of Artificial Sequence: Synthetic oligonucleotide
  Sense strand starting at position 1507 of SEQ ID NO: 2837
uaccgaugcccuggaugaa

SEQ ID NO: 220227 - RNA, 19 nt, Artificial Sequence
  Description of Artificial Sequence: Synthetic oligonucleotide
  Antisense strand to SEQ ID NO: 220226
uucauccagggcaucggua

SEQ ID NO: 220228 - RNA, 19 nt, Artificial Sequence
  Description of Artificial Sequence: Synthetic oligonucleotide
  Sense strand starting at position 2006 of SEQ ID NO: 2837
cuaguuaguugcucaaaga

SEQ ID NO: 220229 - RNA, 19 nt, Artificial Sequence
  Description of Artificial Sequence: Synthetic oligonucleotide
  Antisense strand to SEQ ID NO: 220228
ucuuugagcaacuaacuag

SEQ ID NO: 220230 - RNA, 19 nt, Artificial Sequence
  Description of Artificial Sequence: Synthetic oligonucleotide
  Sense strand starting at position 2007 of SEQ ID NO: 2837
uaguuaguugcucaaagag

SEQ ID NO: 220231 - RNA, 19 nt, Artificial Sequence
  Description of Artificial Sequence: Synthetic oligonucleotide
  Antisense strand to SEQ ID NO: 220230
cucuuugagcaacuaacua

SEQ ID NO: 220232 - RNA, 19 nt, Artificial Sequence
  Description of Artificial Sequence: Synthetic oligonucleotide
  Sense strand starting at position 2072 of SEQ ID NO: 2837
gugucucguccuuauuugu

SEQ ID NO: 220233 - RNA, 19 nt, Artificial Sequence
  Description of Artificial Sequence: Synthetic oligonucleotide
  Antisense strand to SEQ ID NO: 220232
acaaauaaggacgagacac

SEQ ID NO: 220234 - RNA, 19 nt, Artificial Sequence
  Description of Artificial Sequence: Synthetic oligonucleotide
  Sense strand starting at position 2116 of SEQ ID NO: 2837
cgcccucuugguuaagaga

SEQ ID NO: 220235 - RNA, 19 nt, Artificial Sequence
  Description of Artificial Sequence: Synthetic oligonucleotide
  Antisense strand to SEQ ID NO: 220234
ucucuuaaccaagagggcg

SEQ ID NO: 220236 - RNA, 19 nt, Artificial Sequence
  Description of Artificial Sequence: Synthetic oligonucleotide
  Sense strand starting at position 2195 of SEQ ID NO: 2837
agccacagugcuggagaau

SEQ ID NO: 220237 - RNA, 19 nt, Artificial Sequence
  Description of Artificial Sequence: Synthetic oligonucleotide
  Antisense strand to SEQ ID NO: 220236
auucuccagcacuguggcu

SEQ ID NO: 220238 - RNA, 19 nt, Artificial Sequence
  Description of Artificial Sequence: Synthetic oligonucleotide
  Sense strand starting at position 2196 of SEQ ID NO: 2837
gccacagugcuggagaauu

SEQ ID NO: 220239 - RNA, 19 nt, Artificial Sequence
  Description of Artificial Sequence: Synthetic oligonucleotide
  Antisense strand to SEQ ID NO: 220238
aauucuccagcacuguggc

SEQ ID NO: 220240 - RNA, 19 nt, Artificial Sequence
  Description of Artificial Sequence: Synthetic oligonucleotide
  Sense strand starting at position 2206 of SEQ ID NO: 2837
uggagaauuggcugucucu

SEQ ID NO: 220241 - RNA, 19 nt, Artificial Sequence
  Description of Artificial Sequence: Synthetic oligonucleotide
  Antisense strand to SEQ ID NO: 220240
agagacagccaauucucca

SEQ ID NO: 220242 - RNA, 19 nt, Artificial Sequence
  Description of Artificial Sequence: Synthetic oligonucleotide
  Sense strand starting at position 2336 of SEQ ID NO: 2837
ccuuaaagcugaguuucua

SEQ ID NO: 220243 - RNA, 19 nt, Artificial Sequence
  Description of Artificial Sequence: Synthetic oligonucleotide
  Antisense strand to SEQ ID NO: 220242
uagaaacucagcuuuaagg

SEQ ID NO: 220244 - RNA, 19 nt, Artificial Sequence
  Description of Artificial Sequence: Synthetic oligonucleotide
  Sense strand starting at position 2340 of SEQ ID NO: 2837
aaagcugaguuucuagcua

SEQ ID NO: 220245 - RNA, 19 nt, Artificial Sequence
  Description of Artificial Sequence: Synthetic oligonucleotide
  Antisense strand to SEQ ID NO: 220244
uagcuagaaacucagcuuu

SEQ ID NO: 220246 - RNA, 19 nt, Artificial Sequence
  Description of Artificial Sequence: Synthetic oligonucleotide
  Sense strand starting at position 2435 of SEQ ID NO: 2837
aaaucauaaggcggacaga

SEQ ID NO: 220247 - RNA, 19 nt, Artificial Sequence
  Description of Artificial Sequence: Synthetic oligonucleotide
  Antisense strand to SEQ ID NO: 220246
ucuguccgccuuaugauuu

SEQ ID NO: 220248 - RNA, 19 nt, Artificial Sequence
  Description of Artificial Sequence: Synthetic oligonucleotide
  Sense strand starting at position 2577 of SEQ ID NO: 2837
caagcacuggcuugagaua

SEQ ID NO: 220249 - RNA, 19 nt, Artificial Sequence
  Description of Artificial Sequence: Synthetic oligonucleotide
  Antisense strand to SEQ ID NO: 220248
uaucucaagccagugcuug

SEQ ID NO: 220250 - RNA, 19 nt, Artificial Sequence
  Description of Artificial Sequence: Synthetic oligonucleotide
  Sense strand starting at position 2578 of SEQ ID NO: 2837
aagcacuggcuugagauaa

SEQ ID NO: 220251 - RNA, 19 nt, Artificial Sequence
  Description of Artificial Sequence: Synthetic oligonucleotide
  Antisense strand to SEQ ID NO: 220250
uuaucucaagccagugcuu

SEQ ID NO: 220252 - RNA, 19 nt, Artificial Sequence
  Description of Artificial Sequence: Synthetic oligonucleotide
  Sense strand starting at position 2792 of SEQ ID NO: 2837
uuugaaguguagguuugaa

SEQ ID NO: 220253 - RNA, 19 nt, Artificial Sequence
  Description of Artificial Sequence: Synthetic oligonucleotide
  Antisense strand to SEQ ID NO: 220252
uucaaaccuacacuucaaa

SEQ ID NO: 220254 - RNA, 19 nt, Artificial Sequence
  Description of Artificial Sequence: Synthetic oligonucleotide
  Sense strand starting at position 2800 of SEQ ID NO: 2837
guagguuugaaguaauaca

SEQ ID NO: 220255 - RNA, 19 nt, Artificial Sequence
  Description of Artificial Sequence: Synthetic oligonucleotide
  Antisense strand to SEQ ID NO: 220254
uguauuacuucaaaccuac

SEQ ID NO: 220256 - RNA, 19 nt, Artificial Sequence
  Description of Artificial Sequence: Synthetic oligonucleotide
  Sense strand starting at position 2895 of SEQ ID NO: 2837
caauaugcauguguaagga

SEQ ID NO: 220257 - RNA, 19 nt, Artificial Sequence
  Description of Artificial Sequence: Synthetic oligonucleotide
  Antisense strand to SEQ ID NO: 220256
uccuuacacaugcauauug

SEQ ID NO: 220258 - RNA, 19 nt, Artificial Sequence
  Description of Artificial Sequence: Synthetic oligonucleotide
  Sense strand starting at position 2957 of SEQ ID NO: 2837
uauguauguuuggccaaac

SEQ ID NO: 220259 - RNA, 19 nt, Artificial Sequence
  Description of Artificial Sequence: Synthetic oligonucleotide
  Antisense strand to SEQ ID NO: 220258
guuuggccaaacauacaua

SEQ ID NO: 220260 - RNA, 19 nt, Artificial Sequence
  Description of Artificial Sequence: Synthetic oligonucleotide
  Sense strand starting at position 2958 of SEQ ID NO: 2837
auguauguuuggccaaacu

SEQ ID NO: 220261 - RNA, 19 nt, Artificial Sequence
  Description of Artificial Sequence: Synthetic oligonucleotide
  Antisense strand to SEQ ID NO: 220260
aguuuggccaaacauacau

SEQ ID NO: 220262 - RNA, 19 nt, Artificial Sequence
  Description of Artificial Sequence: Synthetic oligonucleotide
  Sense strand starting at position 3030 of SEQ ID NO: 2837
ggucuuaggccagaggcua

SEQ ID NO: 220263 - RNA, 19 nt, Artificial Sequence
  Description of Artificial Sequence: Synthetic oligonucleotide
  Antisense strand to SEQ ID NO: 220262
uagccucuggccuaagacc

SEQ ID NO: 220264 - RNA, 19 nt, Artificial Sequence
  Description of Artificial Sequence: Synthetic oligonucleotide
  Sense strand starting at position 3046 of SEQ ID NO: 2837
cuauguuuaucagccuaug

SEQ ID NO: 220265 - RNA, 19 nt, Artificial Sequence
  Description of Artificial Sequence: Synthetic oligonucleotide
  Antisense strand to SEQ ID NO: 220264
cauaggcugauaaacauag

SEQ ID NO: 220266 - RNA, 19 nt, Artificial Sequence
  Description of Artificial Sequence: Synthetic oligonucleotide
  Sense strand starting at position 3049 of SEQ ID NO: 2837
uguuuaucagccuauggaa

SEQ ID NO: 220267 - RNA, 19 nt, Artificial Sequence
  Description of Artificial Sequence: Synthetic oligonucleotide
  Antisense strand to SEQ ID NO: 220266
uuccauaggcugauaaaca

SEQ ID NO: 220268 - RNA, 19 nt, Artificial Sequence
  Description of Artificial Sequence: Synthetic oligonucleotide
  Sense strand starting at position 3633 of SEQ ID NO: 2837
ggccuuauccugcaaugaa

SEQ ID NO: 220269 - RNA, 19 nt, Artificial Sequence
  Description of Artificial Sequence: Synthetic oligonucleotide
  Antisense strand to SEQ ID NO: 220268
uucauugcaggauaaggcc

SEQ ID NO: 220270 - RNA, 19 nt, Artificial Sequence
  Description of Artificial Sequence: Synthetic oligonucleotide
  Sense strand starting at position 3660 of SEQ ID NO: 2837
caguuugcucuugagagag

SEQ ID NO: 220271 - RNA, 19 nt, Artificial Sequence
  Description of Artificial Sequence: Synthetic oligonucleotide
  Antisense strand to SEQ ID NO: 220270
cucucucaagagcaaacug

SEQ ID NO: 220272 - RNA, 19 nt, Artificial Sequence
  Description of Artificial Sequence: Synthetic oligonucleotide
  Sense strand starting at position 3702 of SEQ ID NO: 2837
uggacuugccguuuagugu

SEQ ID NO: 220273 - RNA, 19 nt, Artificial Sequence
  Description of Artificial Sequence: Synthetic oligonucleotide
  Antisense strand to SEQ ID NO: 220272
acacuaaacggcaagucca

SEQ ID NO: 220274 - RNA, 19 nt, Artificial Sequence
  Description of Artificial Sequence: Synthetic oligonucleotide
  Sense strand starting at position 3777 of SEQ ID NO: 2837
ccuugaugaagugaagcuu

SEQ ID NO: 220275 - RNA, 19 nt, Artificial Sequence
  Description of Artificial Sequence: Synthetic oligonucleotide
  Antisense strand to SEQ ID NO: 220274
aagcuucacuucaucaagg

SEQ ID NO: 220276 - RNA, 19 nt, Artificial Sequence
  Description of Artificial Sequence: Synthetic oligonucleotide
  Sense strand starting at position 3850 of SEQ ID NO: 2837
augucagcauuaucuaaug

SEQ ID NO: 220277 - RNA, 19 nt, Artificial Sequence
  Description of Artificial Sequence: Synthetic oligonucleotide
  Antisense strand to SEQ ID NO: 220276
cauuagauaaugcugacau

SEQ ID NO: 220278 - RNA, 19 nt, Artificial Sequence
  Description of Artificial Sequence: Synthetic oligonucleotide
  Sense strand starting at position 3959 of SEQ ID NO: 2837
aggacuacuuugcuauauu

SEQ ID NO: 220279 - RNA, 19 nt, Artificial Sequence
  Description of Artificial Sequence: Synthetic oligonucleotide
  Antisense strand to SEQ ID NO: 220278
aauauagcaaaguaguccu

SEQ ID NO: 220280 - RNA, 19 nt, Artificial Sequence
  Description of Artificial Sequence: Synthetic oligonucleotide
  Sense strand starting at position 35 of SEQ ID NO: 2836
ucugacaguuacuuuggaa

SEQ ID NO: 220281 - RNA, 19 nt, Artificial Sequence
  Description of Artificial Sequence: Synthetic oligonucleotide
  Antisense strand to SEQ ID NO: 220280
uuccaaaguaacugucaga

SEQ ID NO: 220282 - RNA, 19 nt, Artificial Sequence
  Description of Artificial Sequence: Synthetic oligonucleotide
  Sense strand starting at position 47 of SEQ ID NO: 2836
uuuggaacuugaguauguu

SEQ ID NO: 220283 - RNA, 19 nt, Artificial Sequence
  Description of Artificial Sequence: Synthetic oligonucleotide
  Antisense strand to SEQ ID NO: 220282
aacauacucaaguuccaaa

SEQ ID NO: 220284 - RNA, 19 nt, Artificial Sequence
  Description of Artificial Sequence: Synthetic oligonucleotide
  Sense strand starting at position 48 of SEQ ID NO: 2836
uuggaacuugaguauguuu

SEQ ID NO: 220285 - RNA, 19 nt, Artificial Sequence
  Description of Artificial Sequence: Synthetic oligonucleotide
  Antisense strand to SEQ ID NO: 220284
aaacauacucaaguuccaa

SEQ ID NO: 220286 - RNA, 19 nt, Artificial Sequence
  Description of Artificial Sequence: Synthetic oligonucleotide
  Sense strand starting at position 91 of SEQ ID NO: 2836
auaacugagaguuacgcaa

SEQ ID NO: 220287 - RNA, 19 nt, Artificial Sequence
  Description of Artificial Sequence: Synthetic oligonucleotide
  Antisense strand to SEQ ID NO: 220286
uugcguaacucucaguuau

SEQ ID NO: 220288 - RNA, 19 nt, Artificial Sequence
  Description of Artificial Sequence: Synthetic oligonucleotide
  Sense strand starting at position 95 of SEQ ID NO: 2836
cugagaguuacgcaacgaa

SEQ ID NO: 220289 - RNA, 19 nt, Artificial Sequence
  Description of Artificial Sequence: Synthetic oligonucleotide
  Antisense strand to SEQ ID NO: 220288
uucguugcguaacucucag

SEQ ID NO: 220290 - RNA, 19 nt, Artificial Sequence
  Description of Artificial Sequence: Synthetic oligonucleotide
  Sense strand starting at position 98 of SEQ ID NO: 2836
agaguuacgcaacgaaaug

SEQ ID NO: 220291 - RNA, 19 nt, Artificial Sequence
  Description of Artificial Sequence: Synthetic oligonucleotide
  Antisense strand to SEQ ID NO: 220290
cauuucguugcguaacucu

SEQ ID NO: 220292 - RNA, 19 nt, Artificial Sequence
  Description of Artificial Sequence: Synthetic oligonucleotide
  Sense strand starting at position 237 of SEQ ID NO: 2836
ggagaaugcuggccacacu

SEQ ID NO: 220293 - RNA, 19 nt, Artificial Sequence
  Description of Artificial Sequence: Synthetic oligonucleotide
  Antisense strand to SEQ ID NO: 220292
aguguggccagcauucucc

SEQ ID NO: 220294 - RNA, 19 nt, Artificial Sequence
  Description of Artificial Sequence: Synthetic oligonucleotide
  Sense strand starting at position 238 of SEQ ID NO: 2836
gagaaugcuggccacacuu

SEQ ID NO: 220295 - RNA, 19 nt, Artificial Sequence
  Description of Artificial Sequence: Synthetic oligonucleotide
  Antisense strand to SEQ ID NO: 220294
aaguguggccagcauucuc

SEQ ID NO: 220296 - RNA, 19 nt, Artificial Sequence
  Description of Artificial Sequence: Synthetic oligonucleotide
  Sense strand starting at position 322 of SEQ ID NO: 2836
gaaugaggucagcacucuu

SEQ ID NO: 220297 - RNA, 19 nt, Artificial Sequence
  Description of Artificial Sequence: Synthetic oligonucleotide
  Antisense strand to SEQ ID NO: 220296
aagagugcugaccucauuc

SEQ ID NO: 220298 - RNA, 19 nt, Artificial Sequence
  Description of Artificial Sequence: Synthetic oligonucleotide
  Sense strand starting at position 422 of SEQ ID NO: 2836
gugggcauaucuuuccaaa

SEQ ID NO: 220299 - RNA, 19 nt, Artificial Sequence
  Description of Artificial Sequence: Synthetic oligonucleotide
  Antisense strand to SEQ ID NO: 220298
uuuggaaagauaugcccac

SEQ ID NO: 220300 - RNA, 19 nt, Artificial Sequence
  Description of Artificial Sequence: Synthetic oligonucleotide
  Sense strand starting at position 446 of SEQ ID NO: 2836
gcuacuccucucgauuauu

SEQ ID NO: 220301 - RNA, 19 nt, Artificial Sequence
  Description of Artificial Sequence: Synthetic oligonucleotide
  Antisense strand to SEQ ID NO: 220300
aauaaucgagaggaguagc

SEQ ID NO: 220302 - RNA, 19 nt, Artificial Sequence
  Description of Artificial Sequence: Synthetic oligonucleotide
  Sense strand starting at position 860 of SEQ ID NO: 2836
gggaacuuucgccacucuu

SEQ ID NO: 220303 - RNA, 19 nt, Artificial Sequence
  Description of Artificial Sequence: Synthetic oligonucleotide
  Antisense strand to SEQ ID NO: 220302
aagaguggcgaaaguuccc

SEQ ID NO: 220304 - RNA, 19 nt, Artificial Sequence
  Description of Artificial Sequence: Synthetic oligonucleotide
  Sense strand starting at position 961 of SEQ ID NO: 2836
ccggacucgacugaguuua

SEQ ID NO: 220305 - RNA, 19 nt, Artificial Sequence
  Description of Artificial Sequence: Synthetic oligonucleotide
  Antisense strand to SEQ ID NO: 220304
uaaacucagucgaguccgg

SEQ ID NO: 220306 - RNA, 19 nt, Artificial Sequence
  Description of Artificial Sequence: Synthetic oligonucleotide
  Sense strand starting at position 1059 of SEQ ID NO: 2836
guuacaaauacgggcaaau

SEQ ID NO: 220307 - RNA, 19 nt, Artificial Sequence
  Description of Artificial Sequence: Synthetic oligonucleotide
  Antisense strand to SEQ ID NO: 220306
auuugcccguauuuguaac

SEQ ID NO: 220308 - RNA, 19 nt, Artificial Sequence
  Description of Artificial Sequence: Synthetic oligonucleotide
  Sense strand starting at position 1072 of SEQ ID NO: 2836
gcaaauucucgcuccggca

SEQ ID NO: 220309 - RNA, 19 nt, Artificial Sequence
  Description of Artificial Sequence: Synthetic oligonucleotide
  Antisense strand to SEQ ID NO: 220308
ugccggagcgagaauuugc

SEQ ID NO: 220310 - RNA, 19 nt, Artificial Sequence
  Description of Artificial Sequence: Synthetic oligonucleotide
  Sense strand starting at position 1149 of SEQ ID NO: 2836
ggcugaggcgaaaguguuu

SEQ ID NO: 220311 - RNA, 19 nt, Artificial Sequence
  Description of Artificial Sequence: Synthetic oligonucleotide
  Antisense strand to SEQ ID NO: 220310
aaacacuuucgccucagcc

SEQ ID NO: 220312 - RNA, 19 nt, Artificial Sequence
  Description of Artificial Sequence: Synthetic oligonucleotide
  Sense strand starting at position 1309 of SEQ ID NO: 2836
gccagucgccgcaaagagu

SEQ ID NO: 220313 - RNA, 19 nt, Artificial Sequence
  Description of Artificial Sequence: Synthetic oligonucleotide
  Antisense strand to SEQ ID NO: 220312
acucuuugcggcgacuggc

SEQ ID NO: 220314 - RNA, 19 nt, Artificial Sequence
  Description of Artificial Sequence: Synthetic oligonucleotide
  Sense strand starting at position 1316 of SEQ ID NO: 2836
gccgcaaagaguuaaccaa

SEQ ID NO: 220315 - RNA, 19 nt, Artificial Sequence
  Description of Artificial Sequence: Synthetic oligonucleotide
  Antisense strand to SEQ ID NO: 220314
uugguuaacucuuugcggc

SEQ ID NO: 220316 - RNA, 19 nt, Artificial Sequence
  Description of Artificial Sequence: Synthetic oligonucleotide
  Sense strand starting at position 1616 of SEQ ID NO: 2836
uaccgaugcccuggaugaa

SEQ ID NO: 220317 - RNA, 19 nt, Artificial Sequence
  Description of Artificial Sequence: Synthetic oligonucleotide
  Antisense strand to SEQ ID NO: 220316
uucauccagggcaucggua

SEQ ID NO: 220318 - RNA, 19 nt, Artificial Sequence
  Description of Artificial Sequence: Synthetic oligonucleotide
  Sense strand starting at position 2115 of SEQ ID NO: 2836
cuaguuaguugcucaaaga

SEQ ID NO: 220319 - RNA, 19 nt, Artificial Sequence
  Description of Artificial Sequence: Synthetic oligonucleotide
  Antisense strand to SEQ ID NO: 220318
ucuuugagcaacuaacuag

SEQ ID NO: 220320 - RNA, 19 nt, Artificial Sequence
  Description of Artificial Sequence: Synthetic oligonucleotide
  Sense strand starting at position 2116 of SEQ ID NO: 2836
uaguuaguugcucaaagag

SEQ ID NO: 220321 - RNA, 19 nt, Artificial Sequence
  Description of Artificial Sequence: Synthetic oligonucleotide
  Antisense strand to SEQ ID NO: 220320
cucuuugagcaacuaacua

SEQ ID NO: 220322 - RNA, 19 nt, Artificial Sequence
  Description of Artificial Sequence: Synthetic oligonucleotide
  Sense strand starting at position 2181 of SEQ ID NO: 2836
gugucucguccuuauuugu

SEQ ID NO: 220323 - RNA, 19 nt, Artificial Sequence
  Description of Artificial Sequence: Synthetic oligonucleotide
  Antisense strand to SEQ ID NO: 220322
acaaauaaggacgagacac

SEQ ID NO: 220324 - RNA, 19 nt, Artificial Sequence
  Description of Artificial Sequence: Synthetic oligonucleotide
  Sense strand starting at position 2225 of SEQ ID NO: 2836
cgcccucuugguuaagaga

SEQ ID NO: 220325 - RNA, 19 nt, Artificial Sequence
  Description of Artificial Sequence: Synthetic oligonucleotide
  Antisense strand to SEQ ID NO: 220324
ucucuuaaccaagagggcg

SEQ ID NO: 220326 - RNA, 19 nt, Artificial Sequence
  Description of Artificial Sequence: Synthetic oligonucleotide
  Sense strand starting at position 2304 of SEQ ID NO: 2836
agccacagugcuggagaau

SEQ ID NO: 220327 - RNA, 19 nt, Artificial Sequence
  Description of Artificial Sequence: Synthetic oligonucleotide
  Antisense strand to SEQ ID NO: 220326
auucuccagcacuguggcu

SEQ ID NO: 220328 - RNA, 19 nt, Artificial Sequence
  Description of Artificial Sequence: Synthetic oligonucleotide
  Sense strand starting at position 2305 of SEQ ID NO: 2836
gccacagugcuggagaauu

SEQ ID NO: 220329 - RNA, 19 nt, Artificial Sequence
  Description of Artificial Sequence: Synthetic oligonucleotide
  Antisense strand to SEQ ID NO: 220328
aauucuccagcacuguggc

SEQ ID NO: 220330 - RNA, 19 nt, Artificial Sequence
  Description of Artificial Sequence: Synthetic oligonucleotide
  Sense strand starting at position 2315 of SEQ ID NO: 2836
uggagaauuggcugucucu

SEQ ID NO: 220331 - RNA, 19 nt, Artificial Sequence
  Description of Artificial Sequence: Synthetic oligonucleotide
  Antisense strand to SEQ ID NO: 220330
agagacagccaauucucca

SEQ ID NO: 220332 - RNA, 19 nt, Artificial Sequence
  Description of Artificial Sequence: Synthetic oligonucleotide
  Sense strand starting at position 2445 of SEQ ID NO: 2836
ccuuaaagcugaguuucua

SEQ ID NO: 220333 - RNA, 19 nt, Artificial Sequence
  Description of Artificial Sequence: Synthetic oligonucleotide
  Antisense strand to SEQ ID NO: 220332
uagaaacucagcuuuaagg

SEQ ID NO: 220334 - RNA, 19 nt, Artificial Sequence
  Description of Artificial Sequence: Synthetic oligonucleotide
  Sense strand starting at position 2544 of SEQ ID NO: 2836
aaaucauaaggcggacaga

SEQ ID NO: 220335 - RNA, 19 nt, Artificial Sequence
  Description of Artificial Sequence: Synthetic oligonucleotide
  Antisense strand to SEQ ID NO: 220334
ucuguccgccuuaugauuu

SEQ ID NO: 220336 - RNA, 19 nt, Artificial Sequence
  Description of Artificial Sequence: Synthetic oligonucleotide
  Sense strand starting at position 2686 of SEQ ID NO: 2836
caagcacuggcuugagaua

SEQ ID NO: 220337 - RNA, 19 nt, Artificial Sequence
  Description of Artificial Sequence: Synthetic oligonucleotide
  Antisense strand to SEQ ID NO: 220336
uaucucaagccagugcuug

SEQ ID NO: 220338 - RNA, 19 nt, Artificial Sequence
  Description of Artificial Sequence: Synthetic oligonucleotide
  Sense strand starting at position 2687 of SEQ ID NO: 2836
aagcacuggcuugagauaa

SEQ ID NO: 220339 - RNA, 19 nt, Artificial Sequence
  Description of Artificial Sequence: Synthetic oligonucleotide
  Antisense strand to SEQ ID NO: 220338
uuaucucaagccagugcuu

SEQ ID NO: 220340 - RNA, 19 nt, Artificial Sequence
  Description of Artificial Sequence: Synthetic oligonucleotide
  Sense strand starting at position 2901 of SEQ ID NO: 2836
uuugaaguguagguuugaa

SEQ ID NO: 220341 - RNA, 19 nt, Artificial Sequence
  Description of Artificial Sequence: Synthetic oligonucleotide
  Antisense strand to SEQ ID NO: 220340
uucaaaccuacacuucaaa

SEQ ID NO: 220342 - RNA, 19 nt, Artificial Sequence
  Description of Artificial Sequence: Synthetic oligonucleotide
  Sense strand starting at position 2909 of SEQ ID NO: 2836
guagguuugaaguaauaca

SEQ ID NO: 220343 - RNA, 19 nt, Artificial Sequence
  Description of Artificial Sequence: Synthetic oligonucleotide
  Antisense strand to SEQ ID NO: 220342
uguauuacuucaaaccuac

SEQ ID NO: 220344 - RNA, 19 nt, Artificial Sequence
  Description of Artificial Sequence: Synthetic oligonucleotide
  Sense strand starting at position 3004 of SEQ ID NO: 2836
caauaugcauguguaagga

SEQ ID NO: 220345 - RNA, 19 nt, Artificial Sequence
  Description of Artificial Sequence: Synthetic oligonucleotide
  Antisense strand to SEQ ID NO: 220344
uccuuacacaugcauauug

SEQ ID NO: 220346 - RNA, 19 nt, Artificial Sequence
  Description of Artificial Sequence: Synthetic oligonucleotide
  Sense strand starting at position 3139 of SEQ ID NO: 2836
ggucuuaggccagaggcua

SEQ ID NO: 220347 - RNA, 19 nt, Artificial Sequence
  Description of Artificial Sequence: Synthetic oligonucleotide
  Antisense strand to SEQ ID NO: 220346
uagccucuggccuaagacc

SEQ ID NO: 220348 - RNA, 19 nt, Artificial Sequence
  Description of Artificial Sequence: Synthetic oligonucleotide
  Sense strand starting at position 3158 of SEQ ID NO: 2836
uguuuaucagccuauggaa

SEQ ID NO: 220349 - RNA, 19 nt, Artificial Sequence
  Description of Artificial Sequence: Synthetic oligonucleotide
  Antisense strand to SEQ ID NO: 220348
uuccauaggcugauaaaca

SEQ ID NO: 220350 - RNA, 19 nt, Artificial Sequence
  Description of Artificial Sequence: Synthetic oligonucleotide
  Sense strand starting at position 3742 of SEQ ID NO: 2836
ggccuuauccugcaaugaa

SEQ ID NO: 220351 - RNA, 19 nt, Artificial Sequence
  Description of Artificial Sequence: Synthetic oligonucleotide
  Antisense strand to SEQ ID NO: 220350
uucauugcaggauaaggcc

SEQ ID NO: 220352 - RNA, 19 nt, Artificial Sequence
  Description of Artificial Sequence: Synthetic oligonucleotide
  Sense strand starting at position 3769 of SEQ ID NO: 2836
caguuugcucuugagagag

SEQ ID NO: 220353 - RNA, 19 nt, Artificial Sequence
  Description of Artificial Sequence: Synthetic oligonucleotide
  Antisense strand to SEQ ID NO: 220352
cucucucaagagcaaacug

SEQ ID NO: 220354 - RNA, 19 nt, Artificial Sequence
  Description of Artificial Sequence: Synthetic oligonucleotide
  Sense strand starting at position 3811 of SEQ ID NO: 2836
uggacuugccguuuagugu

SEQ ID NO: 220355 - RNA, 19 nt, Artificial Sequence
  Description of Artificial Sequence: Synthetic oligonucleotide
  Antisense strand to SEQ ID NO: 220354
acacuaaacggcaagucca

SEQ ID NO: 220356 - RNA, 19 nt, Artificial Sequence
  Description of Artificial Sequence: Synthetic oligonucleotide
  Sense strand starting at position 3886 of SEQ ID NO: 2836
ccuugaugaagugaagcuu

SEQ ID NO: 220357 - RNA, 19 nt, Artificial Sequence
  Description of Artificial Sequence: Synthetic oligonucleotide
  Antisense strand to SEQ ID NO: 220356
aagcuucacuucaucaagg

SEQ ID NO: 220358 - RNA, 19 nt, Artificial Sequence
  Description of Artificial Sequence: Synthetic oligonucleotide
  Sense strand starting at position 3959 of SEQ ID NO: 2836
augucagcauuaucuaaug

SEQ ID NO: 220359 - RNA, 19 nt, Artificial Sequence
  Description of Artificial Sequence: Synthetic oligonucleotide
  Antisense strand to SEQ ID NO: 220358
cauuagauaaugcugacau

SEQ ID NO: 220360 - RNA, 19 nt, Artificial Sequence
  Description of Artificial Sequence: Synthetic oligonucleotide
  Sense strand starting at position 92 of SEQ ID NO: 2838
ucagcauauucugucucua

SEQ ID NO: 220361 - RNA, 19 nt, Artificial Sequence
  Description of Artificial Sequence: Synthetic oligonucleotide
  Antisense strand to SEQ ID NO: 220360
uagagacagaauaugcuga

SEQ ID NO: 220362 - RNA, 19 nt, Artificial Sequence
  Description of Artificial Sequence: Synthetic oligonucleotide
  Sense strand starting at position 94 of SEQ ID NO: 2838
agcauauucugucucuacu

SEQ ID NO: 220363 - RNA, 19 nt, Artificial Sequence
  Description of Artificial Sequence: Synthetic oligonucleotide
  Antisense strand to SEQ ID NO: 220362
aguagagacagaauaugcu

SEQ ID NO: 220364 - RNA, 19 nt, Artificial Sequence
  Description of Artificial Sequence: Synthetic oligonucleotide
  Sense strand starting at position 154 of SEQ ID NO: 2838
agaggcuuuaccuggugaa

SEQ ID NO: 220365 - RNA, 19 nt, Artificial Sequence
  Description of Artificial Sequence: Synthetic oligonucleotide
  Antisense strand to SEQ ID NO: 220364
uucaccagguaaagccucu

SEQ ID NO: 220366 - RNA, 19 nt, Artificial Sequence
  Description of Artificial Sequence: Synthetic oligonucleotide
  Sense strand starting at position 155 of SEQ ID NO: 2838
gaggcuuuaccuggugaag

SEQ ID NO: 220367 - RNA, 19 nt, Artificial Sequence
  Description of Artificial Sequence: Synthetic oligonucleotide
  Antisense strand to SEQ ID NO: 220366
cuucaccagguaaagccuc

SEQ ID NO: 220368 - RNA, 19 nt, Artificial Sequence
  Description of Artificial Sequence: Synthetic oligonucleotide
  Sense strand starting at position 223 of SEQ ID NO: 2838
cgaagaugucagugauagu

SEQ ID NO: 220369 - RNA, 19 nt, Artificial Sequence
  Description of Artificial Sequence: Synthetic oligonucleotide
  Antisense strand to SEQ ID NO: 220368
acuaucacugacaucuucg

SEQ ID NO: 220370 - RNA, 19 nt, Artificial Sequence
  Description of Artificial Sequence: Synthetic oligonucleotide
  Sense strand starting at position 224 of SEQ ID NO: 2838
gaagaugucagugauagug

SEQ ID NO: 220371 - RNA, 19 nt, Artificial Sequence
  Description of Artificial Sequence: Synthetic oligonucleotide
  Antisense strand to SEQ ID NO: 220370
cacuaucacugacaucuuc

SEQ ID NO: 220372 - RNA, 19 nt, Artificial Sequence
  Description of Artificial Sequence: Synthetic oligonucleotide
  Sense strand starting at position 317 of SEQ ID NO: 2838
gauaaaggcguccaucaug

SEQ ID NO: 220373 - RNA, 19 nt, Artificial Sequence
  Description of Artificial Sequence: Synthetic oligonucleotide
  Antisense strand to SEQ ID NO: 220372
caugauggacgccuuuauc

SEQ ID NO: 220374 - RNA, 19 nt, Artificial Sequence
  Description of Artificial Sequence: Synthetic oligonucleotide
  Sense strand starting at position 376 of SEQ ID NO: 2838
ucaagaacuuguccaggau

SEQ ID NO: 220375 - RNA, 19 nt, Artificial Sequence
  Description of Artificial Sequence: Synthetic oligonucleotide
  Antisense strand to SEQ ID NO: 220374
auccuggacaaguucuuga

SEQ ID NO: 220376 - RNA, 19 nt, Artificial Sequence
  Description of Artificial Sequence: Synthetic oligonucleotide
  Sense strand starting at position 382 of SEQ ID NO: 2838
acuuguccaggaugaaguu

SEQ ID NO: 220377 - RNA, 19 nt, Artificial Sequence
  Description of Artificial Sequence: Synthetic oligonucleotide
  Antisense strand to SEQ ID NO: 220376
aacuucauccuggacaagu

SEQ ID NO: 220378 - RNA, 19 nt, Artificial Sequence
  Description of Artificial Sequence: Synthetic oligonucleotide
  Sense strand starting at position 410 of SEQ ID NO: 2838
gcgguugagcugcucgaau

SEQ ID NO: 220379 - RNA, 19 nt, Artificial Sequence
  Description of Artificial Sequence: Synthetic oligonucleotide
  Antisense strand to SEQ ID NO: 220378
auucgagcagcucaaccgc

SEQ ID NO: 220380 - RNA, 19 nt, Artificial Sequence
  Description of Artificial Sequence: Synthetic oligonucleotide
  Sense strand starting at position 740 of SEQ ID NO: 2838
gaagaaguugcgcaucaug

SEQ ID NO: 220381 - RNA, 19 nt, Artificial Sequence
  Description of Artificial Sequence: Synthetic oligonucleotide
  Antisense strand to SEQ ID NO: 220380
caugaugcgcaacuucuuc

SEQ ID NO: 220382 - RNA, 19 nt, Artificial Sequence
  Description of Artificial Sequence: Synthetic oligonucleotide
  Sense strand starting at position 1319 of SEQ ID NO: 2838
ggagcugacucucuggaga

SEQ ID NO: 220383 - RNA, 19 nt, Artificial Sequence
  Description of Artificial Sequence: Synthetic oligonucleotide
  Antisense strand to SEQ ID NO: 220382
ucuccagagagucagcucc

SEQ ID NO: 220384 - RNA, 19 nt, Artificial Sequence
  Description of Artificial Sequence: Synthetic oligonucleotide
  Sense strand starting at position 1369 of SEQ ID NO: 2838
cccacucucccuuggagaa

SEQ ID NO: 220385 - RNA, 19 nt, Artificial Sequence
  Description of Artificial Sequence: Synthetic oligonucleotide
  Antisense strand to SEQ ID NO: 220384
uucuccaagggagaguggg

SEQ ID NO: 220386 - RNA, 19 nt, Artificial Sequence
  Description of Artificial Sequence: Synthetic oligonucleotide
  Sense strand starting at position 1450 of SEQ ID NO: 2838
cgcguaacgguuccugcaa

SEQ ID NO: 220387 - RNA, 19 nt, Artificial Sequence
  Description of Artificial Sequence: Synthetic oligonucleotide
  Antisense strand to SEQ ID NO: 220386
uugcaggaaccguuacgcg

SEQ ID NO: 220388 - RNA, 19 nt, Artificial Sequence
  Description of Artificial Sequence: Synthetic oligonucleotide
  Sense strand starting at position 1501 of SEQ ID NO: 2838
ggcgcuugauuuccuuuaa

SEQ ID NO: 220389 - RNA, 19 nt, Artificial Sequence
  Description of Artificial Sequence: Synthetic oligonucleotide
  Antisense strand to SEQ ID NO: 220388
uuaaaggaaaucaagcgcc

SEQ ID NO: 220390 - RNA, 19 nt, Artificial Sequence
  Description of Artificial Sequence: Synthetic oligonucleotide
  Sense strand starting at position 1502 of SEQ ID NO: 2838
gcgcuugauuuccuuuaaa

SEQ ID NO: 220391 - RNA, 19 nt, Artificial Sequence
  Description of Artificial Sequence: Synthetic oligonucleotide
  Antisense strand to SEQ ID NO: 220390
uuuaaaggaaaucaagcgc

SEQ ID NO: 220392 - RNA, 19 nt, Artificial Sequence
  Description of Artificial Sequence: Synthetic oligonucleotide
  Sense strand starting at position 1535 of SEQ ID NO: 2838
acccgcuaccuguaauaau

SEQ ID NO: 220393 - RNA, 19 nt, Artificial Sequence
  Description of Artificial Sequence: Synthetic oligonucleotide
  Antisense strand to SEQ ID NO: 220392
auuauuacagguagcgggu

SEQ ID NO: 220394 - RNA, 19 nt, Artificial Sequence
  Description of Artificial Sequence: Synthetic oligonucleotide
  Sense strand starting at position 1861 of SEQ ID NO: 2838
cagcguugagauugagacu

SEQ ID NO: 220395 - RNA, 19 nt, Artificial Sequence
  Description of Artificial Sequence: Synthetic oligonucleotide
  Antisense strand to SEQ ID NO: 220394
agucucaaucucaacgcug

SEQ ID NO: 220396 - RNA, 19 nt, Artificial Sequence
  Description of Artificial Sequence: Synthetic oligonucleotide
  Sense strand starting at position 1885 of SEQ ID NO: 2838
ucggugaguggcgucaauu

SEQ ID NO: 220397 - RNA, 19 nt, Artificial Sequence
  Description of Artificial Sequence: Synthetic oligonucleotide
  Antisense strand to SEQ ID NO: 220396
aauugacgccacucaccga

SEQ ID NO: 220398 - RNA, 19 nt, Artificial Sequence
  Description of Artificial Sequence: Synthetic oligonucleotide
  Sense strand starting at position 1886 of SEQ ID NO: 2838
cggugaguggcgucaauuc

SEQ ID NO: 220399 - RNA, 19 nt, Artificial Sequence
  Description of Artificial Sequence: Synthetic oligonucleotide
  Antisense strand to SEQ ID NO: 220398
gaauugacgccacucaccg

SEQ ID NO: 220400 - RNA, 19 nt, Artificial Sequence
  Description of Artificial Sequence: Synthetic oligonucleotide
  Sense strand starting at position 2376 of SEQ ID NO: 2838
ccugguugguuguuuaaau

SEQ ID NO: 220401 - RNA, 19 nt, Artificial Sequence
  Description of Artificial Sequence: Synthetic oligonucleotide
  Antisense strand to SEQ ID NO: 220400
auuuaaacaaccaaccagg

SEQ ID NO: 220402 - RNA, 19 nt, Artificial Sequence
  Description of Artificial Sequence: Synthetic oligonucleotide
  Sense strand starting at position 2377 of SEQ ID NO: 2838
cugguugguuguuuaaauu

SEQ ID NO: 220403 - RNA, 19 nt, Artificial Sequence
  Description of Artificial Sequence: Synthetic oligonucleotide
  Antisense strand to SEQ ID NO: 220402
aauuuaaacaaccaaccag

SEQ ID NO: 220404 - RNA, 19 nt, Artificial Sequence
  Description of Artificial Sequence: Synthetic oligonucleotide
  Sense strand starting at position 2461 of SEQ ID NO: 2838
ccaguucuugcggcgagau

SEQ ID NO: 220405 - RNA, 19 nt, Artificial Sequence
  Description of Artificial Sequence: Synthetic oligonucleotide
  Antisense strand to SEQ ID NO: 220404
aucucgccgcaagaacugg

SEQ ID NO: 220406 - RNA, 19 nt, Artificial Sequence
  Description of Artificial Sequence: Synthetic oligonucleotide
  Sense strand starting at position 2555 of SEQ ID NO: 2838
gcagcuggcccugagauuu

SEQ ID NO: 220407 - RNA, 19 nt, Artificial Sequence
  Description of Artificial Sequence: Synthetic oligonucleotide
  Antisense strand to SEQ ID NO: 220406
aaaucucagggccagcugc

SEQ ID NO: 220408 - RNA, 19 nt, Artificial Sequence
  Description of Artificial Sequence: Synthetic oligonucleotide
  Sense strand starting at position 2563 of SEQ ID NO: 2838
cccugagauuucccgcgua

SEQ ID NO: 220409 - RNA, 19 nt, Artificial Sequence
  Description of Artificial Sequence: Synthetic oligonucleotide
  Antisense strand to SEQ ID NO: 220408
uacgcgggaaaucucaggg

SEQ ID NO: 220410 - RNA, 19 nt, Artificial Sequence
  Description of Artificial Sequence: Synthetic oligonucleotide
  Sense strand starting at position 2566 of SEQ ID NO: 2838
ugagauuucccgcguagag

SEQ ID NO: 220411 - RNA, 19 nt, Artificial Sequence
  Description of Artificial Sequence: Synthetic oligonucleotide
  Antisense strand to SEQ ID NO: 220410
cucuacgcgggaaaucuca

SEQ ID NO: 220412 - RNA, 19 nt, Artificial Sequence
  Description of Artificial Sequence: Synthetic oligonucleotide
  Sense strand starting at position 2764 of SEQ ID NO: 2838
acuuuaucggguugaaguu

SEQ ID NO: 220413 - RNA, 19 nt, Artificial Sequence
  Description of Artificial Sequence: Synthetic oligonucleotide
  Antisense strand to SEQ ID NO: 220412
aacuucaacccgauaaagu

SEQ ID NO: 220414 - RNA, 19 nt, Artificial Sequence
  Description of Artificial Sequence: Synthetic oligonucleotide
  Sense strand starting at position 2838 of SEQ ID NO: 2838
gaaagucggcuccagucau

SEQ ID NO: 220415 - RNA, 19 nt, Artificial Sequence
  Description of Artificial Sequence: Synthetic oligonucleotide
  Antisense strand to SEQ ID NO: 220414
augacuggagccgacuuuc

SEQ ID NO: 220416 - RNA, 19 nt, Artificial Sequence
  Description of Artificial Sequence: Synthetic oligonucleotide
  Sense strand starting at position 3206 of SEQ ID NO: 2838
caugcugaugcauaggauu

SEQ ID NO: 220417 - RNA, 19 nt, Artificial Sequence
  Description of Artificial Sequence: Synthetic oligonucleotide
  Antisense strand to SEQ ID NO: 220416
aauccuaugcaucagcaug

SEQ ID NO: 220418 - RNA, 19 nt, Artificial Sequence
  Description of Artificial Sequence: Synthetic oligonucleotide
  Sense strand starting at position 3289 of SEQ ID NO: 2838
gugggauguaucugguuaa

SEQ ID NO: 220419 - RNA, 19 nt, Artificial Sequence
  Description of Artificial Sequence: Synthetic oligonucleotide
  Antisense strand to SEQ ID NO: 220418
uuaaccagauacaucccac

SEQ ID NO: 220420 - RNA, 19 nt, Artificial Sequence
  Description of Artificial Sequence: Synthetic oligonucleotide
  Sense strand starting at position 3292 of SEQ ID NO: 2838
ggauguaucugguuaacca

SEQ ID NO: 220421 - RNA, 19 nt, Artificial Sequence
  Description of Artificial Sequence: Synthetic oligonucleotide
  Antisense strand to SEQ ID NO: 220420
ugguuaaccagauacaucc

SEQ ID NO: 220422 - RNA, 19 nt, Artificial Sequence
  Description of Artificial Sequence: Synthetic oligonucleotide
  Sense strand starting at position 3293 of SEQ ID NO: 2838
gauguaucugguuaaccag

SEQ ID NO: 220423 - RNA, 19 nt, Artificial Sequence
  Description of Artificial Sequence: Synthetic oligonucleotide
  Antisense strand to SEQ ID NO: 220422
cugguuaaccagauacauc

SEQ ID NO: 220424 - RNA, 19 nt, Artificial Sequence
  Description of Artificial Sequence: Synthetic oligonucleotide
  Sense strand starting at position 3296 of SEQ ID NO: 2838
guaucugguuaaccaggua

SEQ ID NO: 220425 - RNA, 19 nt, Artificial Sequence
  Description of Artificial Sequence: Synthetic oligonucleotide
  Antisense strand to SEQ ID NO: 220424
uaccugguuaaccagauac

SEQ ID NO: 220426 - RNA, 19 nt, Artificial Sequence
  Description of Artificial Sequence: Synthetic oligonucleotide
  Sense strand starting at position 3299 of SEQ ID NO: 2838
ucugguuaaccagguagga

SEQ ID NO: 220427 - RNA, 19 nt, Artificial Sequence
  Description of Artificial Sequence: Synthetic oligonucleotide
  Antisense strand to SEQ ID NO: 220426
uccuaccugguuaaccaga

SEQ ID NO: 220428 - RNA, 19 nt, Artificial Sequence
  Description of Artificial Sequence: Synthetic oligonucleotide
  Sense strand starting at position 3352 of SEQ ID NO: 2838
gugauagguucaccaggga

SEQ ID NO: 220429 - RNA, 19 nt, Artificial Sequence
  Description of Artificial Sequence: Synthetic oligonucleotide
  Antisense strand to SEQ ID NO: 220428
ucccuggugaaccuaucac

SEQ ID NO: 220430 - RNA, 19 nt, Artificial Sequence
  Description of Artificial Sequence: Synthetic oligonucleotide
  Sense strand starting at position 3400 of SEQ ID NO: 2838
ugcgaaucucgugcuauua

SEQ ID NO: 220431 - RNA, 19 nt, Artificial Sequence
  Description of Artificial Sequence: Synthetic oligonucleotide
  Antisense strand to SEQ ID NO: 220430
uaauagcacgagauucgca

SEQ ID NO: 220432 - RNA, 19 nt, Artificial Sequence
  Description of Artificial Sequence: Synthetic oligonucleotide
  Sense strand starting at position 3401 of SEQ ID NO: 2838
gcgaaucucgugcuauuau

SEQ ID NO: 220433 - RNA, 19 nt, Artificial Sequence
  Description of Artificial Sequence: Synthetic oligonucleotide
  Antisense strand to SEQ ID NO: 220432
auaauagcacgagauucgc

SEQ ID NO: 220434 - RNA, 19 nt, Artificial Sequence
  Description of Artificial Sequence: Synthetic oligonucleotide
  Sense strand starting at position 3543 of SEQ ID NO: 2838
auaaguuuacacggaagaa

SEQ ID NO: 220435 - RNA, 19 nt, Artificial Sequence
  Description of Artificial Sequence: Synthetic oligonucleotide
  Antisense strand to SEQ ID NO: 220434
uucuuccguguaaacuuau

SEQ ID NO: 220436 - RNA, 19 nt, Artificial Sequence
  Description of Artificial Sequence: Synthetic oligonucleotide
  Sense strand starting at position 3818 of SEQ ID NO: 2838
agcagaauugguugaacgu

SEQ ID NO: 220437 - RNA, 19 nt, Artificial Sequence
  Description of Artificial Sequence: Synthetic oligonucleotide
  Antisense strand to SEQ ID NO: 220436
acguucaaccaauucugcu

SEQ ID NO: 220438 - RNA, 19 nt, Artificial Sequence
  Description of Artificial Sequence: Synthetic oligonucleotide
  Sense strand starting at position 3888 of SEQ ID NO: 2838
ggcagcagaguuuaaguga

SEQ ID NO: 220439 - RNA, 19 nt, Artificial Sequence
  Description of Artificial Sequence: Synthetic oligonucleotide
  Antisense strand to SEQ ID NO: 220438
ucacuuaaacucugcugcc

SEQ ID NO: 220440 - RNA, 19 nt, Artificial Sequence
  Description of Artificial Sequence: Synthetic oligonucleotide
  Sense strand starting at position 57 of SEQ ID NO: 2839
aagaauaaacagugugcuu

SEQ ID NO: 220441 - RNA, 19 nt, Artificial Sequence
  Description of Artificial Sequence: Synthetic oligonucleotide
  Antisense strand to SEQ ID NO: 220440
aagcacacuguuuauucuu

SEQ ID NO: 220442 - RNA, 19 nt, Artificial Sequence
  Description of Artificial Sequence: Synthetic oligonucleotide
  Sense strand starting at position 59 of SEQ ID NO: 2839
gaauaaacagugugcuucu

SEQ ID NO: 220443 - RNA, 19 nt, Artificial Sequence
  Description of Artificial Sequence: Synthetic oligonucleotide
  Antisense strand to SEQ ID NO: 220442
agaagcacacuguuuauuc

SEQ ID NO: 220444 - RNA, 19 nt, Artificial Sequence
  Description of Artificial Sequence: Synthetic oligonucleotide
  Sense strand starting at position 73 of SEQ ID NO: 2839
cuucuaugagcugaucaaa

SEQ ID NO: 220445 - RNA, 19 nt, Artificial Sequence
  Description of Artificial Sequence: Synthetic oligonucleotide
  Antisense strand to SEQ ID NO: 220444
uuugaucagcucauagaag

SEQ ID NO: 220446 - RNA, 19 nt, Artificial Sequence
  Description of Artificial Sequence: Synthetic oligonucleotide
  Sense strand starting at position 137 of SEQ ID NO: 2839
auuguuuaguuucucagaa

SEQ ID NO: 220447 - RNA, 19 nt, Artificial Sequence
  Description of Artificial Sequence: Synthetic oligonucleotide
  Antisense strand to SEQ ID NO: 220446
uucugagaaacuaaacaau

SEQ ID NO: 220448 - RNA, 19 nt, Artificial Sequence
  Description of Artificial Sequence: Synthetic oligonucleotide
  Sense strand starting at position 138 of SEQ ID NO: 2839
uuguuuaguuucucagaaa

SEQ ID NO: 220449 - RNA, 19 nt, Artificial Sequence
  Description of Artificial Sequence: Synthetic oligonucleotide
  Antisense strand to SEQ ID NO: 220448
uuucugagaaacuaaacaa

SEQ ID NO: 220450 - RNA, 19 nt, Artificial Sequence
  Description of Artificial Sequence: Synthetic oligonucleotide
  Sense strand starting at position 165 of SEQ ID NO: 2839
ucaggaagucccugauugu

SEQ ID NO: 220451 - RNA, 19 nt, Artificial Sequence
  Description of Artificial Sequence: Synthetic oligonucleotide
  Antisense strand to SEQ ID NO: 220450
acaaucagggacuuccuga

SEQ ID NO: 220452 - RNA, 19 nt, Artificial Sequence
  Description of Artificial Sequence: Synthetic oligonucleotide
  Sense strand starting at position 168 of SEQ ID NO: 2839
ggaagucccugauugugua

SEQ ID NO: 220453 - RNA, 19 nt, Artificial Sequence
  Description of Artificial Sequence: Synthetic oligonucleotide
  Antisense strand to SEQ ID NO: 220452
uacacaaucagggacuucc

SEQ ID NO: 220454 - RNA, 19 nt, Artificial Sequence
  Description of Artificial Sequence: Synthetic oligonucleotide
  Sense strand starting at position 190 of SEQ ID NO: 2839
gcaagauucuagucuaauc

SEQ ID NO: 220455 - RNA, 19 nt, Artificial Sequence
  Description of Artificial Sequence: Synthetic oligonucleotide
  Antisense strand to SEQ ID NO: 220454
gauuagacuagaaucuugc

SEQ ID NO: 220456 - RNA, 19 nt, Artificial Sequence
  Description of Artificial Sequence: Synthetic oligonucleotide
  Sense strand starting at position 235 of SEQ ID NO: 2839
uaagaagguguauggucaa

SEQ ID NO: 220457 - RNA, 19 nt, Artificial Sequence
  Description of Artificial Sequence: Synthetic oligonucleotide
  Antisense strand to SEQ ID NO: 220456
uugaccauacaccuucuua

SEQ ID NO: 220458 - RNA, 19 nt, Artificial Sequence
  Description of Artificial Sequence: Synthetic oligonucleotide
  Sense strand starting at position 238 of SEQ ID NO: 2839
gaagguguauggucaauuc

SEQ ID NO: 220459 - RNA, 19 nt, Artificial Sequence
  Description of Artificial Sequence: Synthetic oligonucleotide
  Antisense strand to SEQ ID NO: 220458
gaauugaccauacaccuuc

SEQ ID NO: 220460 - RNA, 19 nt, Artificial Sequence
  Description of Artificial Sequence: Synthetic oligonucleotide
  Sense strand starting at position 295 of SEQ ID NO: 2839
accaccuugcuuuguagaa

SEQ ID NO: 220461 - RNA, 19 nt, Artificial Sequence
  Description of Artificial Sequence: Synthetic oligonucleotide
  Antisense strand to SEQ ID NO: 220460
uucuacaaagcaagguggu

SEQ ID NO: 220462 - RNA, 19 nt, Artificial Sequence
  Description of Artificial Sequence: Synthetic oligonucleotide
  Sense strand starting at position 583 of SEQ ID NO: 2839
ucccaaaguguguagaaca

SEQ ID NO: 220463 - RNA, 19 nt, Artificial Sequence
  Description of Artificial Sequence: Synthetic oligonucleotide
  Antisense strand to SEQ ID NO: 220462
uguucuacacacuuuggga

SEQ ID NO: 220464 - RNA, 19 nt, Artificial Sequence
  Description of Artificial Sequence: Synthetic oligonucleotide
  Sense strand starting at position 615 of SEQ ID NO: 2839
guccucagucaucaacacu

SEQ ID NO: 220465 - RNA, 19 nt, Artificial Sequence
  Description of Artificial Sequence: Synthetic oligonucleotide
  Antisense strand to SEQ ID NO: 220464
aguguugaugacugaggac

SEQ ID NO: 220466 - RNA, 19 nt, Artificial Sequence
  Description of Artificial Sequence: Synthetic oligonucleotide
  Sense strand starting at position 860 of SEQ ID NO: 2839
acacaagugcugggagaau

SEQ ID NO: 220467 - RNA, 19 nt, Artificial Sequence
  Description of Artificial Sequence: Synthetic oligonucleotide
  Antisense strand to SEQ ID NO: 220466
auucucccagcacuugugu

SEQ ID NO: 220468 - RNA, 19 nt, Artificial Sequence
  Description of Artificial Sequence: Synthetic oligonucleotide
  Sense strand starting at position 944 of SEQ ID NO: 2839
uuggguuuggcgaguuaug

SEQ ID NO: 220469 - RNA, 19 nt, Artificial Sequence
  Description of Artificial Sequence: Synthetic oligonucleotide
  Antisense strand to SEQ ID NO: 220468
cauaacucgccaaacccaa

SEQ ID NO: 220470 - RNA, 19 nt, Artificial Sequence
  Description of Artificial Sequence: Synthetic oligonucleotide
  Sense strand starting at position 2277 of SEQ ID NO: 2839
guacaacaaucuguuugaa

SEQ ID NO: 220471 - RNA, 19 nt, Artificial Sequence
  Description of Artificial Sequence: Synthetic oligonucleotide
  Antisense strand to SEQ ID NO: 220470
uucaaacagauuguuguac

SEQ ID NO: 220472 - RNA, 19 nt, Artificial Sequence
  Description of Artificial Sequence: Synthetic oligonucleotide
  Sense strand starting at position 2322 of SEQ ID NO: 2839
acacuuaaauuugagugaa

SEQ ID NO: 220473 - RNA, 19 nt, Artificial Sequence
  Description of Artificial Sequence: Synthetic oligonucleotide
  Antisense strand to SEQ ID NO: 220472
uucacucaaauuuaagugu

SEQ ID NO: 220474 - RNA, 19 nt, Artificial Sequence
  Description of Artificial Sequence: Synthetic oligonucleotide
  Sense strand starting at position 2364 of SEQ ID NO: 2839
cagggaagugucugggagu

SEQ ID NO: 220475 - RNA, 19 nt, Artificial Sequence
  Description of Artificial Sequence: Synthetic oligonucleotide
  Antisense strand to SEQ ID NO: 220474
acucccagacacuucccug

SEQ ID NO: 220476 - RNA, 19 nt, Artificial Sequence
  Description of Artificial Sequence: Synthetic oligonucleotide
  Sense strand starting at position 2366 of SEQ ID NO: 2839
gggaagugucugggaguaa

SEQ ID NO: 220477 - RNA, 19 nt, Artificial Sequence
  Description of Artificial Sequence: Synthetic oligonucleotide
  Antisense strand to SEQ ID NO: 220476
uuacucccagacacuuccc

SEQ ID NO: 220478 - RNA, 19 nt, Artificial Sequence
  Description of Artificial Sequence: Synthetic oligonucleotide
  Sense strand starting at position 2401 of SEQ ID NO: 2839
ccuuguuucgcagaauuuc

SEQ ID NO: 220479 - RNA, 19 nt, Artificial Sequence
  Description of Artificial Sequence: Synthetic oligonucleotide
  Antisense strand to SEQ ID NO: 220478
gaaauucugcgaaacaagg

SEQ ID NO: 220480 - RNA, 19 nt, Artificial Sequence
  Description of Artificial Sequence: Synthetic oligonucleotide
  Sense strand starting at position 2409 of SEQ ID NO: 2839
cgcagaauuucugucugaa

SEQ ID NO: 220481 - RNA, 19 nt, Artificial Sequence
  Description of Artificial Sequence: Synthetic oligonucleotide
  Antisense strand to SEQ ID NO: 220480
uucagacagaaauucugcg

SEQ ID NO: 220482 - RNA, 19 nt, Artificial Sequence
  Description of Artificial Sequence: Synthetic oligonucleotide
  Sense strand starting at position 2413 of SEQ ID NO: 2839
gaauuucugucugaaguac

SEQ ID NO: 220483 - RNA, 19 nt, Artificial Sequence
  Description of Artificial Sequence: Synthetic oligonucleotide
  Antisense strand to SEQ ID NO: 220482
guacuucagacagaaauuc

SEQ ID NO: 220484 - RNA, 19 nt, Artificial Sequence
  Description of Artificial Sequence: Synthetic oligonucleotide
  Sense strand starting at position 2427 of SEQ ID NO: 2839
aguacuaguaaaugugauu

SEQ ID NO: 220485 - RNA, 19 nt, Artificial Sequence
  Description of Artificial Sequence: Synthetic oligonucleotide
  Antisense strand to SEQ ID NO: 220484
aaucacauuuacuaguacu

SEQ ID NO: 220486 - RNA, 19 nt, Artificial Sequence
  Description of Artificial Sequence: Synthetic oligonucleotide
  Sense strand starting at position 2432 of SEQ ID NO: 2839
uaguaaaugugauucuuug

SEQ ID NO: 220487 - RNA, 19 nt, Artificial Sequence
  Description of Artificial Sequence: Synthetic oligonucleotide
  Antisense strand to SEQ ID NO: 220486
caaagaaucacauuuacua

SEQ ID NO: 220488 - RNA, 19 nt, Artificial Sequence
  Description of Artificial Sequence: Synthetic oligonucleotide
  Sense strand starting at position 2505 of SEQ ID NO: 2839
cucugacuuucgguaaauu

SEQ ID NO: 220489 - RNA, 19 nt, Artificial Sequence
  Description of Artificial Sequence: Synthetic oligonucleotide
  Antisense strand to SEQ ID NO: 220488
aauuuaccgaaagucagag

SEQ ID NO: 220490 - RNA, 19 nt, Artificial Sequence
  Description of Artificial Sequence: Synthetic oligonucleotide
  Sense strand starting at position 2506 of SEQ ID NO: 2839
ucugacuuucgguaaauug

SEQ ID NO: 220491 - RNA, 19 nt, Artificial Sequence
  Description of Artificial Sequence: Synthetic oligonucleotide
  Antisense strand to SEQ ID NO: 220490
caauuuaccgaaagucaga

SEQ ID NO: 220492 - RNA, 19 nt, Artificial Sequence
  Description of Artificial Sequence: Synthetic oligonucleotide
  Sense strand starting at position 2582 of SEQ ID NO: 2839
uggaguugccuguagguua

SEQ ID NO: 220493 - RNA, 19 nt, Artificial Sequence
  Description of Artificial Sequence: Synthetic oligonucleotide
  Antisense strand to SEQ ID NO: 220492
uaaccuacaggcaacucca

SEQ ID NO: 220494 - RNA, 19 nt, Artificial Sequence
  Description of Artificial Sequence: Synthetic oligonucleotide
  Sense strand starting at position 2587 of SEQ ID NO: 2839
uugccuguagguuaaauua

SEQ ID NO: 220495 - RNA, 19 nt, Artificial Sequence
  Description of Artificial Sequence: Synthetic oligonucleotide
  Antisense strand to SEQ ID NO: 220494
uaauuuaaccuacaggcaa

SEQ ID NO: 220496 - RNA, 19 nt, Artificial Sequence
  Description of Artificial Sequence: Synthetic oligonucleotide
  Sense strand starting at position 2654 of SEQ ID NO: 2839
gugcuaucuacgucagcau

SEQ ID NO: 220497 - RNA, 19 nt, Artificial Sequence
  Description of Artificial Sequence: Synthetic oligonucleotide
  Antisense strand to SEQ ID NO: 220496
augcugacguagauagcac

SEQ ID NO: 220498 - RNA, 19 nt, Artificial Sequence
  Description of Artificial Sequence: Synthetic oligonucleotide
  Sense strand starting at position 2717 of SEQ ID NO: 2839
uucuauuucgccuggcuca

SEQ ID NO: 220499 - RNA, 19 nt, Artificial Sequence
  Description of Artificial Sequence: Synthetic oligonucleotide
  Antisense strand to SEQ ID NO: 220498
ugagccaggcgaaauagaa

SEQ ID NO: 220500 - RNA, 19 nt, Artificial Sequence
  Description of Artificial Sequence: Synthetic oligonucleotide
  Sense strand starting at position 3044 of SEQ ID NO: 2839
gcauauaaaugugcuuuaa

SEQ ID NO: 220501 - RNA, 19 nt, Artificial Sequence
  Description of Artificial Sequence: Synthetic oligonucleotide
  Antisense strand to SEQ ID NO: 220500
uuaaagcacauuuauaugc

SEQ ID NO: 220502 - RNA, 19 nt, Artificial Sequence
  Description of Artificial Sequence: Synthetic oligonucleotide
  Sense strand starting at position 3048 of SEQ ID NO: 2839
auaaaugugcuuuaaacug

SEQ ID NO: 220503 - RNA, 19 nt, Artificial Sequence
  Description of Artificial Sequence: Synthetic oligonucleotide
  Antisense strand to SEQ ID NO: 220502
caguuuaaagcacauuuau

SEQ ID NO: 220504 - RNA, 19 nt, Artificial Sequence
  Description of Artificial Sequence: Synthetic oligonucleotide
  Sense strand starting at position 3054 of SEQ ID NO: 2839
gugcuuuaaacugucguau

SEQ ID NO: 220505 - RNA, 19 nt, Artificial Sequence
  Description of Artificial Sequence: Synthetic oligonucleotide
  Antisense strand to SEQ ID NO: 220504
auacgacaguuuaaagcac

SEQ ID NO: 220506 - RNA, 19 nt, Artificial Sequence
  Description of Artificial Sequence: Synthetic oligonucleotide
  Sense strand starting at position 3131 of SEQ ID NO: 2839
ugauguucccaauagguuu

SEQ ID NO: 220507 - RNA, 19 nt, Artificial Sequence
  Description of Artificial Sequence: Synthetic oligonucleotide
  Antisense strand to SEQ ID NO: 220506
aaaccuauugggaacauca

SEQ ID NO: 220508 - RNA, 19 nt, Artificial Sequence
  Description of Artificial Sequence: Synthetic oligonucleotide
  Sense strand starting at position 3501 of SEQ ID NO: 2839
ugcauaagguagccauaua

SEQ ID NO: 220509 - RNA, 19 nt, Artificial Sequence
  Description of Artificial Sequence: Synthetic oligonucleotide
  Antisense strand to SEQ ID NO: 220508
uauauggcuaccuuaugca

SEQ ID NO: 220510 - RNA, 19 nt, Artificial Sequence
  Description of Artificial Sequence: Synthetic oligonucleotide
  Sense strand starting at position 3512 of SEQ ID NO: 2839
gccauauaaccguaaucuu

SEQ ID NO: 220511 - RNA, 19 nt, Artificial Sequence
  Description of Artificial Sequence: Synthetic oligonucleotide
  Antisense strand to SEQ ID NO: 220510
aagauuacgguuauauggc

SEQ ID NO: 220512 - RNA, 19 nt, Artificial Sequence
  Description of Artificial Sequence: Synthetic oligonucleotide
  Sense strand starting at position 3536 of SEQ ID NO: 2839
ccguaaucuuagguaccaa

SEQ ID NO: 220513 - RNA, 19 nt, Artificial Sequence
  Description of Artificial Sequence: Synthetic oligonucleotide
  Antisense strand to SEQ ID NO: 220512
uugguaccuaagauuacgg

SEQ ID NO: 220514 - RNA, 19 nt, Artificial Sequence
  Description of Artificial Sequence: Synthetic oligonucleotide
  Sense strand starting at position 3602 of SEQ ID NO: 2839
uccugagacucucugaacu

SEQ ID NO: 220515 - RNA, 19 nt, Artificial Sequence
  Description of Artificial Sequence: Synthetic oligonucleotide
  Antisense strand to SEQ ID NO: 220514
aguucagagagucucagga

SEQ ID NO: 220516 - RNA, 19 nt, Artificial Sequence
  Description of Artificial Sequence: Synthetic oligonucleotide
  Sense strand starting at position 3652 of SEQ ID NO: 2839
agaaauugucagggcacca

SEQ ID NO: 220517 - RNA, 19 nt, Artificial Sequence
  Description of Artificial Sequence: Synthetic oligonucleotide
  Antisense strand to SEQ ID NO: 220516
uggugcccugacaauuucu

SEQ ID NO: 220518 - RNA, 19 nt, Artificial Sequence
  Description of Artificial Sequence: Synthetic oligonucleotide
  Sense strand starting at position 3678 of SEQ ID NO: 2839
uagugugagucucuaaacu

SEQ ID NO: 220519 - RNA, 19 nt, Artificial Sequence
  Description of Artificial Sequence: Synthetic oligonucleotide
  Antisense strand to SEQ ID NO: 220518
aguuuagagacucacacua

SEQ ID NO: 220520 - RNA, 19 nt, Artificial Sequence
  Description of Artificial Sequence: Synthetic oligonucleotide
  Sense strand starting at position 73 of SEQ ID NO: 2840
ucugauaaaugacuccgaa

SEQ ID NO: 220521 - RNA, 19 nt, Artificial Sequence
  Description of Artificial Sequence: Synthetic oligonucleotide
  Antisense strand to SEQ ID NO: 220520
uucggagucauuuaucaga

SEQ ID NO: 220522 - RNA, 19 nt, Artificial Sequence
  Description of Artificial Sequence: Synthetic oligonucleotide
  Sense strand starting at position 264 of SEQ ID NO: 2840
ucuugugggauucggagaa

SEQ ID NO: 220523 - RNA, 19 nt, Artificial Sequence
  Description of Artificial Sequence: Synthetic oligonucleotide
  Antisense strand to SEQ ID NO: 220522
uucuccgaaucccacaaga

SEQ ID NO: 220524 - RNA, 19 nt, Artificial Sequence
  Description of Artificial Sequence: Synthetic oligonucleotide
  Sense strand starting at position 357 of SEQ ID NO: 2840
ucagcagacuggcucuaaa

SEQ ID NO: 220525 - RNA, 19 nt, Artificial Sequence
  Description of Artificial Sequence: Synthetic oligonucleotide
  Antisense strand to SEQ ID NO: 220524
uuuagagccagucugcuga

SEQ ID NO: 220526 - RNA, 19 nt, Artificial Sequence
  Description of Artificial Sequence: Synthetic oligonucleotide
  Sense strand starting at position 381 of SEQ ID NO: 2840
ggagccguugcccaaguua

SEQ ID NO: 220527 - RNA, 19 nt, Artificial Sequence
  Description of Artificial Sequence: Synthetic oligonucleotide
  Antisense strand to SEQ ID NO: 220526
uaacuugggcaacggcucc

SEQ ID NO: 220528 - RNA, 19 nt, Artificial Sequence
  Description of Artificial Sequence: Synthetic oligonucleotide
  Sense strand starting at position 507 of SEQ ID NO: 2840
gggugauacauccauuggu

SEQ ID NO: 220529 - RNA, 19 nt, Artificial Sequence
  Description of Artificial Sequence: Synthetic oligonucleotide
  Antisense strand to SEQ ID NO: 220528
accaauggauguaucaccc

SEQ ID NO: 220530 - RNA, 19 nt, Artificial Sequence
  Description of Artificial Sequence: Synthetic oligonucleotide
  Sense strand starting at position 510 of SEQ ID NO: 2840
ugauacauccauugguuga

SEQ ID NO: 220531 - RNA, 19 nt, Artificial Sequence
  Description of Artificial Sequence: Synthetic oligonucleotide
  Antisense strand to SEQ ID NO: 220530
ucaaccaauggauguauca

SEQ ID NO: 220532 - RNA, 19 nt, Artificial Sequence
  Description of Artificial Sequence: Synthetic oligonucleotide
  Sense strand starting at position 512 of SEQ ID NO: 2840
auacauccauugguugaaa

SEQ ID NO: 220533 - RNA, 19 nt, Artificial Sequence
  Description of Artificial Sequence: Synthetic oligonucleotide
  Antisense strand to SEQ ID NO: 220532
uuucaaccaauggauguau

SEQ ID NO: 220534 - RNA, 19 nt, Artificial Sequence
  Description of Artificial Sequence: Synthetic oligonucleotide
  Sense strand starting at position 690 of SEQ ID NO: 2840
gauugcacgcgucuguuaa

SEQ ID NO: 220535 - RNA, 19 nt, Artificial Sequence
  Description of Artificial Sequence: Synthetic oligonucleotide
  Antisense strand to SEQ ID NO: 220534
uuaacagacgcgugcaauc

SEQ ID NO: 220536 - RNA, 19 nt, Artificial Sequence
  Description of Artificial Sequence: Synthetic oligonucleotide
  Sense strand starting at position 691 of SEQ ID NO: 2840
auugcacgcgucuguuaau

SEQ ID NO: 220537 - RNA, 19 nt, Artificial Sequence
  Description of Artificial Sequence: Synthetic oligonucleotide
  Antisense strand to SEQ ID NO: 220536
auuaacagacgcgugcaau

SEQ ID NO: 220538 - RNA, 19 nt, Artificial Sequence
  Description of Artificial Sequence: Synthetic oligonucleotide
  Sense strand starting at position 692 of SEQ ID NO: 2840
uugcacgcgucuguuaauu

SEQ ID NO: 220539 - RNA, 19 nt, Artificial Sequence
  Description of Artificial Sequence: Synthetic oligonucleotide
  Antisense strand to SEQ ID NO: 220538
aauuaacagacgcgugcaa

SEQ ID NO: 220540 - RNA, 19 nt, Artificial Sequence
  Description of Artificial Sequence: Synthetic oligonucleotide
  Sense strand starting at position 900 of SEQ ID NO: 2840
cgguguguaucacauugca

SEQ ID NO: 220541 - RNA, 19 nt, Artificial Sequence
  Description of Artificial Sequence: Synthetic oligonucleotide
  Antisense strand to SEQ ID NO: 220540
ugcaaugugauacacaccg

SEQ ID NO: 220542 - RNA, 19 nt, Artificial Sequence
  Description of Artificial Sequence: Synthetic oligonucleotide
  Sense strand starting at position 920 of SEQ ID NO: 2840
aagcgauugucuggcacuu

SEQ ID NO: 220543 - RNA, 19 nt, Artificial Sequence
  Description of Artificial Sequence: Synthetic oligonucleotide
  Antisense strand to SEQ ID NO: 220542
aagugccagacaaucgcuu

SEQ ID NO: 220544 - RNA, 19 nt, Artificial Sequence
  Description of Artificial Sequence: Synthetic oligonucleotide
  Sense strand starting at position 922 of SEQ ID NO: 2840
gcgauugucuggcacuuga

SEQ ID NO: 220545 - RNA, 19 nt, Artificial Sequence
  Description of Artificial Sequence: Synthetic oligonucleotide
  Antisense strand to SEQ ID NO: 220544
ucaagugccagacaaucgc

SEQ ID NO: 220546 - RNA, 19 nt, Artificial Sequence
  Description of Artificial Sequence: Synthetic oligonucleotide
  Sense strand starting at position 941 of SEQ ID NO: 2840
ugaggugaacuccagguua

SEQ ID NO: 220547 - RNA, 19 nt, Artificial Sequence
  Description of Artificial Sequence: Synthetic oligonucleotide
  Antisense strand to SEQ ID NO: 220546
uaaccuggaguucaccuca

SEQ ID NO: 220548 - RNA, 19 nt, Artificial Sequence
  Description of Artificial Sequence: Synthetic oligonucleotide
  Sense strand starting at position 943 of SEQ ID NO: 2840
aggugaacuccagguuaau

SEQ ID NO: 220549 - RNA, 19 nt, Artificial Sequence
  Description of Artificial Sequence: Synthetic oligonucleotide
  Antisense strand to SEQ ID NO: 220548
auuaaccuggaguucaccu

SEQ ID NO: 220550 - RNA, 19 nt, Artificial Sequence
  Description of Artificial Sequence: Synthetic oligonucleotide
  Sense strand starting at position 2231 of SEQ ID NO: 2840
uuuguuuguuccuuuauag

SEQ ID NO: 220551 - RNA, 19 nt, Artificial Sequence
  Description of Artificial Sequence: Synthetic oligonucleotide
  Antisense strand to SEQ ID NO: 220550
cuauaaaggaacaaacaaa

SEQ ID NO: 220552 - RNA, 19 nt, Artificial Sequence
  Description of Artificial Sequence: Synthetic oligonucleotide
  Sense strand starting at position 2276 of SEQ ID NO: 2840
gugagaugaagccgugagu

SEQ ID NO: 220553 - RNA, 19 nt, Artificial Sequence
  Description of Artificial Sequence: Synthetic oligonucleotide
  Antisense strand to SEQ ID NO: 220552
acucacggcuucaucucac

SEQ ID NO: 220554 - RNA, 19 nt, Artificial Sequence
  Description of Artificial Sequence: Synthetic oligonucleotide
  Sense strand starting at position 2279 of SEQ ID NO: 2840
agaugaagccgugagucaa

SEQ ID NO: 220555 - RNA, 19 nt, Artificial Sequence
  Description of Artificial Sequence: Synthetic oligonucleotide
  Antisense strand to SEQ ID NO: 220554
uugacucacggcuucaucu

SEQ ID NO: 220556 - RNA, 19 nt, Artificial Sequence
  Description of Artificial Sequence: Synthetic oligonucleotide
  Sense strand starting at position 2291 of SEQ ID NO: 2840
gagucaagcugguggguuu

SEQ ID NO: 220557 - RNA, 19 nt, Artificial Sequence
  Description of Artificial Sequence: Synthetic oligonucleotide
  Antisense strand to SEQ ID NO: 220556
aaacccaccagcuugacuc

SEQ ID NO: 220558 - RNA, 19 nt, Artificial Sequence
  Description of Artificial Sequence: Synthetic oligonucleotide
  Sense strand starting at position 2426 of SEQ ID NO: 2840
gagagaaagugcggucgau

SEQ ID NO: 220559 - RNA, 19 nt, Artificial Sequence
  Description of Artificial Sequence: Synthetic oligonucleotide
  Antisense strand to SEQ ID NO: 220558
aucgaccgcacuuucucuc

SEQ ID NO: 220560 - RNA, 19 nt, Artificial Sequence
  Description of Artificial Sequence: Synthetic oligonucleotide
  Sense strand starting at position 2430 of SEQ ID NO: 2840
gaaagugcggucgauuugu

SEQ ID NO: 220561 - RNA, 19 nt, Artificial Sequence
  Description of Artificial Sequence: Synthetic oligonucleotide
  Antisense strand to SEQ ID NO: 220560
acaaaucgaccgcacuuuc

SEQ ID NO: 220562 - RNA, 19 nt, Artificial Sequence
  Description of Artificial Sequence: Synthetic oligonucleotide
  Sense strand starting at position 2556 of SEQ ID NO: 2840
gagaaagcucccuggcuga

SEQ ID NO: 220563 - RNA, 19 nt, Artificial Sequence
  Description of Artificial Sequence: Synthetic oligonucleotide
  Antisense strand to SEQ ID NO: 220562
ucagccagggagcuuucuc

SEQ ID NO: 220564 - RNA, 19 nt, Artificial Sequence
  Description of Artificial Sequence: Synthetic oligonucleotide
  Sense strand starting at position 2872 of SEQ ID NO: 2840
gggcuauuguaucaauuaa

SEQ ID NO: 220565 - RNA, 19 nt, Artificial Sequence
  Description of Artificial Sequence: Synthetic oligonucleotide
  Antisense strand to SEQ ID NO: 220564
uuaauugauacaauagccc

SEQ ID NO: 220566 - RNA, 19 nt, Artificial Sequence
  Description of Artificial Sequence: Synthetic oligonucleotide
  Sense strand starting at position 3006 of SEQ ID NO: 2840
gcaggauuucagggcuggu

SEQ ID NO: 220567 - RNA, 19 nt, Artificial Sequence
  Description of Artificial Sequence: Synthetic oligonucleotide
  Antisense strand to SEQ ID NO: 220566
accagcccugaaauccugc

SEQ ID NO: 220568 - RNA, 19 nt, Artificial Sequence
  Description of Artificial Sequence: Synthetic oligonucleotide
  Sense strand starting at position 3034 of SEQ ID NO: 2840
agcuucucucaaugugaau

SEQ ID NO: 220569 - RNA, 19 nt, Artificial Sequence
  Description of Artificial Sequence: Synthetic oligonucleotide
  Antisense strand to SEQ ID NO: 220568
auucacauugagagaagcu

SEQ ID NO: 220570 - RNA, 19 nt, Artificial Sequence
  Description of Artificial Sequence: Synthetic oligonucleotide
  Sense strand starting at position 3066 of SEQ ID NO: 2840
gaggcgaugcguguguuua

SEQ ID NO: 220571 - RNA, 19 nt, Artificial Sequence
  Description of Artificial Sequence: Synthetic oligonucleotide
  Antisense strand to SEQ ID NO: 220570
uaaacacacgcaucgccuc

SEQ ID NO: 220572 - RNA, 19 nt, Artificial Sequence
  Description of Artificial Sequence: Synthetic oligonucleotide
  Sense strand starting at position 3067 of SEQ ID NO: 2840
aggcgaugcguguguuuau

SEQ ID NO: 220573 - RNA, 19 nt, Artificial Sequence
  Description of Artificial Sequence: Synthetic oligonucleotide
  Antisense strand to SEQ ID NO: 220572
auaaacacacgcaucgccu

SEQ ID NO: 220574 - RNA, 19 nt, Artificial Sequence
  Description of Artificial Sequence: Synthetic oligonucleotide
  Sense strand starting at position 3068 of SEQ ID NO: 2840
ggcgaugcguguguuuaua

SEQ ID NO: 220575 - RNA, 19 nt, Artificial Sequence
  Description of Artificial Sequence: Synthetic oligonucleotide
  Antisense strand to SEQ ID NO: 220574
uauaaacacacgcaucgcc

SEQ ID NO: 220576 - RNA, 19 nt, Artificial Sequence
  Description of Artificial Sequence: Synthetic oligonucleotide
  Sense strand starting at position 3070 of SEQ ID NO: 2840
cgaugcguguguuuauaua

SEQ ID NO: 220577 - RNA, 19 nt, Artificial Sequence
  Description of Artificial Sequence: Synthetic oligonucleotide
  Antisense strand to SEQ ID NO: 220576
uauauaaacacacgcaucg

SEQ ID NO: 220578 - RNA, 19 nt, Artificial Sequence
  Description of Artificial Sequence: Synthetic oligonucleotide
  Sense strand starting at position 3608 of SEQ ID NO: 2840
gcccaaagcccucgaaacu

SEQ ID NO: 220579 - RNA, 19 nt, Artificial Sequence
  Description of Artificial Sequence: Synthetic oligonucleotide
  Antisense strand to SEQ ID NO: 220578
aguuucgagggcuuugggc

SEQ ID NO: 220580 - RNA, 19 nt, Artificial Sequence
  Description of Artificial Sequence: Synthetic oligonucleotide
  Sense strand starting at position 3782 of SEQ ID NO: 2840
ugucucuuacccuacggaa

SEQ ID NO: 220581 - RNA, 19 nt, Artificial Sequence
  Description of Artificial Sequence: Synthetic oligonucleotide
  Antisense strand to SEQ ID NO: 220580
uuccguaggguaagagaca

SEQ ID NO: 220582 - RNA, 19 nt, Artificial Sequence
  Description of Artificial Sequence: Synthetic oligonucleotide
  Sense strand starting at position 5 of SEQ ID NO: 2841
aaccaaguguccuugugga

SEQ ID NO: 220583 - RNA, 19 nt, Artificial Sequence
  Description of Artificial Sequence: Synthetic oligonucleotide
  Antisense strand to SEQ ID NO: 220582
uccacaaggacacuugguu

SEQ ID NO: 220584 - RNA, 19 nt, Artificial Sequence
  Description of Artificial Sequence: Synthetic oligonucleotide
  Sense strand starting at position 80 of SEQ ID NO: 2841
cagaguucucucugugaag

SEQ ID NO: 220585 - RNA, 19 nt, Artificial Sequence
  Description of Artificial Sequence: Synthetic oligonucleotide
  Antisense strand to SEQ ID NO: 220584
cuucacagagagaacucug

SEQ ID NO: 220586 - RNA, 19 nt, Artificial Sequence
  Description of Artificial Sequence: Synthetic oligonucleotide
  Sense strand starting at position 81 of SEQ ID NO: 2841
agaguucucucugugaagu

SEQ ID NO: 220587 - RNA, 19 nt, Artificial Sequence
  Description of Artificial Sequence: Synthetic oligonucleotide
  Antisense strand to SEQ ID NO: 220586
acuucacagagagaacucu

SEQ ID NO: 220588 - RNA, 19 nt, Artificial Sequence
  Description of Artificial Sequence: Synthetic oligonucleotide
  Sense strand starting at position 82 of SEQ ID NO: 2841
gaguucucucugugaaguu

SEQ ID NO: 220589 - RNA, 19 nt, Artificial Sequence
  Description of Artificial Sequence: Synthetic oligonucleotide
  Antisense strand to SEQ ID NO: 220588
aacuucacagagagaacuc

SEQ ID NO: 220590 - RNA, 19 nt, Artificial Sequence
  Description of Artificial Sequence: Synthetic oligonucleotide
  Sense strand starting at position 166 of SEQ ID NO: 2841
gcagaagccucaucucacu

SEQ ID NO: 220591 - RNA, 19 nt, Artificial Sequence
  Description of Artificial Sequence: Synthetic oligonucleotide
  Antisense strand to SEQ ID NO: 220590
agugagaugaggcuucugc

SEQ ID NO: 220592 - RNA, 19 nt, Artificial Sequence
  Description of Artificial Sequence: Synthetic oligonucleotide
  Sense strand starting at position 236 of SEQ ID NO: 2841
uguugauagucauuaggaa

SEQ ID NO: 220593 - RNA, 19 nt, Artificial Sequence
  Description of Artificial Sequence: Synthetic oligonucleotide
  Antisense strand to SEQ ID NO: 220592
uuccuaaugacuaucaaca

SEQ ID NO: 220594 - RNA, 19 nt, Artificial Sequence
  Description of Artificial Sequence: Synthetic oligonucleotide
  Sense strand starting at position 240 of SEQ ID NO: 2841
gauagucauuaggaagaua

SEQ ID NO: 220595 - RNA, 19 nt, Artificial Sequence
  Description of Artificial Sequence: Synthetic oligonucleotide
  Antisense strand to SEQ ID NO: 220594
uaucuuccuaaugacuauc

SEQ ID NO: 220596 - RNA, 19 nt, Artificial Sequence
  Description of Artificial Sequence: Synthetic oligonucleotide
  Sense strand starting at position 369 of SEQ ID NO: 2841
uucuguguucugcuguaua

SEQ ID NO: 220597 - RNA, 19 nt, Artificial Sequence
  Description of Artificial Sequence: Synthetic oligonucleotide
  Antisense strand to SEQ ID NO: 220596
uauacagcagaacacagaa

SEQ ID NO: 220598 - RNA, 19 nt, Artificial Sequence
  Description of Artificial Sequence: Synthetic oligonucleotide
  Sense strand starting at position 826 of SEQ ID NO: 2841
guuugcuuccacgaucuga

SEQ ID NO: 220599 - RNA, 19 nt, Artificial Sequence
  Description of Artificial Sequence: Synthetic oligonucleotide
  Antisense strand to SEQ ID NO: 220598
ucagaucguggaagcaaac

SEQ ID NO: 220600 - RNA, 19 nt, Artificial Sequence
  Description of Artificial Sequence: Synthetic oligonucleotide
  Sense strand starting at position 837 of SEQ ID NO: 2841
cgaucugagaugcagcauu

SEQ ID NO: 220601 - RNA, 19 nt, Artificial Sequence
  Description of Artificial Sequence: Synthetic oligonucleotide
  Antisense strand to SEQ ID NO: 220600
aaugcugcaucucagaucg

SEQ ID NO: 220602 - RNA, 19 nt, Artificial Sequence
  Description of Artificial Sequence: Synthetic oligonucleotide
  Sense strand starting at position 913 of SEQ ID NO: 2841
uccugaaguuauuucguuu

SEQ ID NO: 220603 - RNA, 19 nt, Artificial Sequence
  Description of Artificial Sequence: Synthetic oligonucleotide
  Antisense strand to SEQ ID NO: 220602
aaacgaaauaacuucagga

SEQ ID NO: 220604 - RNA, 19 nt, Artificial Sequence
  Description of Artificial Sequence: Synthetic oligonucleotide
  Sense strand starting at position 921 of SEQ ID NO: 2841
uuauuucguuuggaagaag

SEQ ID NO: 220605 - RNA, 19 nt, Artificial Sequence
  Description of Artificial Sequence: Synthetic oligonucleotide
  Antisense strand to SEQ ID NO: 220604
cuucuuccaaacgaaauaa

SEQ ID NO: 220606 - RNA, 19 nt, Artificial Sequence
  Description of Artificial Sequence: Synthetic oligonucleotide
  Sense strand starting at position 924 of SEQ ID NO: 2841
uuucguuuggaagaagucu

SEQ ID NO: 220607 - RNA, 19 nt, Artificial Sequence
  Description of Artificial Sequence: Synthetic oligonucleotide
  Antisense strand to SEQ ID NO: 220606
agacuucuuccaaacgaaa

SEQ ID NO: 220608 - RNA, 19 nt, Artificial Sequence
  Description of Artificial Sequence: Synthetic oligonucleotide
  Sense strand starting at position 930 of SEQ ID NO: 2841
uuggaagaagucuguggua

SEQ ID NO: 220609 - RNA, 19 nt, Artificial Sequence
  Description of Artificial Sequence: Synthetic oligonucleotide
  Antisense strand to SEQ ID NO: 220608
uaccacagacuucuuccaa

SEQ ID NO: 220610 - RNA, 19 nt, Artificial Sequence
  Description of Artificial Sequence: Synthetic oligonucleotide
  Sense strand starting at position 975 of SEQ ID NO: 2841
uccauaauauccguuagcu

SEQ ID NO: 220611 - RNA, 19 nt, Artificial Sequence
  Description of Artificial Sequence: Synthetic oligonucleotide
  Antisense strand to SEQ ID NO: 220610
agcuaacggauauuaugga

SEQ ID NO: 220612 - RNA, 19 nt, Artificial Sequence
  Description of Artificial Sequence: Synthetic oligonucleotide
  Sense strand starting at position 1084 of SEQ ID NO: 2841
uggugccguccugauuuaa

SEQ ID NO: 220613 - RNA, 19 nt, Artificial Sequence
  Description of Artificial Sequence: Synthetic oligonucleotide
  Antisense strand to SEQ ID NO: 220612
uuaaaucaggacggcacca

SEQ ID NO: 220614 - RNA, 19 nt, Artificial Sequence
  Description of Artificial Sequence: Synthetic oligonucleotide
  Sense strand starting at position 1163 of SEQ ID NO: 2841
ccuacugauuuccaguuua

SEQ ID NO: 220615 - RNA, 19 nt, Artificial Sequence
  Description of Artificial Sequence: Synthetic oligonucleotide
  Antisense strand to SEQ ID NO: 220614
uaaacuggaaaucaguagg

SEQ ID NO: 220616 - RNA, 19 nt, Artificial Sequence
  Description of Artificial Sequence: Synthetic oligonucleotide
  Sense strand starting at position 2002 of SEQ ID NO: 2841
aauggccuuccggauugau

SEQ ID NO: 220617 - RNA, 19 nt, Artificial Sequence
  Description of Artificial Sequence: Synthetic oligonucleotide
  Antisense strand to SEQ ID NO: 220616
aucaauccggaaggccauu

SEQ ID NO: 220618 - RNA, 19 nt, Artificial Sequence
  Description of Artificial Sequence: Synthetic oligonucleotide
  Sense strand starting at position 2012 of SEQ ID NO: 2841
cggauugaucccggaguca

SEQ ID NO: 220619 - RNA, 19 nt, Artificial Sequence
  Description of Artificial Sequence: Synthetic oligonucleotide
  Antisense strand to SEQ ID NO: 220618
ugacuccgggaucaauccg

SEQ ID NO: 220620 - RNA, 19 nt, Artificial Sequence
  Description of Artificial Sequence: Synthetic oligonucleotide
  Sense strand starting at position 2191 of SEQ ID NO: 2841
gagaccagauuucguagau

SEQ ID NO: 220621 - RNA, 19 nt, Artificial Sequence
  Description of Artificial Sequence: Synthetic oligonucleotide
  Antisense strand to SEQ ID NO: 220620
aucuacgaaaucuggucuc

SEQ ID NO: 220622 - RNA, 19 nt, Artificial Sequence
  Description of Artificial Sequence: Synthetic oligonucleotide
  Sense strand starting at position 2203 of SEQ ID NO: 2841
cguagaugauggccagaau

SEQ ID NO: 220623 - RNA, 19 nt, Artificial Sequence
  Description of Artificial Sequence: Synthetic oligonucleotide
  Antisense strand to SEQ ID NO: 220622
auucuggccaucaucuacg

SEQ ID NO: 220624 - RNA, 19 nt, Artificial Sequence
  Description of Artificial Sequence: Synthetic oligonucleotide
  Sense strand starting at position 2525 of SEQ ID NO: 2841
agguguggcuuucuacuua

SEQ ID NO: 220625 - RNA, 19 nt, Artificial Sequence
  Description of Artificial Sequence: Synthetic oligonucleotide
  Antisense strand to SEQ ID NO: 220624
uaaguagaaagccacaccu

SEQ ID NO: 220626 - RNA, 19 nt, Artificial Sequence
  Description of Artificial Sequence: Synthetic oligonucleotide
  Sense strand starting at position 2529 of SEQ ID NO: 2841
guggcuuucuacuuauuua

SEQ ID NO: 220627 - RNA, 19 nt, Artificial Sequence
  Description of Artificial Sequence: Synthetic oligonucleotide
  Antisense strand to SEQ ID NO: 220626
uaaauaaguagaaagccac

SEQ ID NO: 220628 - RNA, 19 nt, Artificial Sequence
  Description of Artificial Sequence: Synthetic oligonucleotide
  Sense strand starting at position 2562 of SEQ ID NO: 2841
guuucuugacucugugacu

SEQ ID NO: 220629 - RNA, 19 nt, Artificial Sequence
  Description of Artificial Sequence: Synthetic oligonucleotide
  Antisense strand to SEQ ID NO: 220628
agucacagagucaagaaac

SEQ ID NO: 220630 - RNA, 19 nt, Artificial Sequence
  Description of Artificial Sequence: Synthetic oligonucleotide
  Sense strand starting at position 2575 of SEQ ID NO: 2841
gugacuggaugucuuugau

SEQ ID NO: 220631 - RNA, 19 nt, Artificial Sequence
  Description of Artificial Sequence: Synthetic oligonucleotide
  Antisense strand to SEQ ID NO: 220630
aucaaagacauccagucac

SEQ ID NO: 220632 - RNA, 19 nt, Artificial Sequence
  Description of Artificial Sequence: Synthetic oligonucleotide
  Sense strand starting at position 2581 of SEQ ID NO: 2841
ggaugucuuugaucagucu

SEQ ID NO: 220633 - RNA, 19 nt, Artificial Sequence
  Description of Artificial Sequence: Synthetic oligonucleotide
  Antisense strand to SEQ ID NO: 220632
agacugaucaaagacaucc

SEQ ID NO: 220634 - RNA, 19 nt, Artificial Sequence
  Description of Artificial Sequence: Synthetic oligonucleotide
  Sense strand starting at position 2682 of SEQ ID NO: 2841
guauguuagcucucccugu

SEQ ID NO: 220635 - RNA, 19 nt, Artificial Sequence
  Description of Artificial Sequence: Synthetic oligonucleotide
  Antisense strand to SEQ ID NO: 220634
acagggagagcuaacauac

SEQ ID NO: 220636 - RNA, 19 nt, Artificial Sequence
  Description of Artificial Sequence: Synthetic oligonucleotide
  Sense strand starting at position 2741 of SEQ ID NO: 2841
cuuugugucauauaguuug

SEQ ID NO: 220637 - RNA, 19 nt, Artificial Sequence
  Description of Artificial Sequence: Synthetic oligonucleotide
  Antisense strand to SEQ ID NO: 220636
caaacuauaugacacaaag

SEQ ID NO: 220638 - RNA, 19 nt, Artificial Sequence
  Description of Artificial Sequence: Synthetic oligonucleotide
  Sense strand starting at position 3311 of SEQ ID NO: 2841
agccauuaacgaggucaua

SEQ ID NO: 220639 - RNA, 19 nt, Artificial Sequence
  Description of Artificial Sequence: Synthetic oligonucleotide
  Antisense strand to SEQ ID NO: 220638
uaugaccucguuaauggcu

SEQ ID NO: 220640 - RNA, 19 nt, Artificial Sequence
  Description of Artificial Sequence: Synthetic oligonucleotide
  Sense strand starting at position 3314 of SEQ ID NO: 2841
cauuaacgaggucauaauu

SEQ ID NO: 220641 - RNA, 19 nt, Artificial Sequence
  Description of Artificial Sequence: Synthetic oligonucleotide
  Antisense strand to SEQ ID NO: 220640
aauuaugaccucguuaaug

SEQ ID NO: 220642 - RNA, 19 nt, Artificial Sequence
  Description of Artificial Sequence: Synthetic oligonucleotide
  Sense strand starting at position 3517 of SEQ ID NO: 2841
ggacaauacugccucauga

SEQ ID NO: 220643 - RNA, 19 nt, Artificial Sequence
  Description of Artificial Sequence: Synthetic oligonucleotide
  Antisense strand to SEQ ID NO: 220642
ucaugaggcaguauugucc

SEQ ID NO: 220644 - RNA, 19 nt, Artificial Sequence
  Description of Artificial Sequence: Synthetic oligonucleotide
  Sense strand starting at position 3527 of SEQ ID NO: 2841
gccucaugacuuuagggau

SEQ ID NO: 220645 - RNA, 19 nt, Artificial Sequence
  Description of Artificial Sequence: Synthetic oligonucleotide
  Antisense strand to SEQ ID NO: 220644
aucccuaaagucaugaggc

SEQ ID NO: 220646 - RNA, 19 nt, Artificial Sequence
  Description of Artificial Sequence: Synthetic oligonucleotide
  Sense strand starting at position 3609 of SEQ ID NO: 2841
gccacacuccaguauguaa

SEQ ID NO: 220647 - RNA, 19 nt, Artificial Sequence
  Description of Artificial Sequence: Synthetic oligonucleotide
  Antisense strand to SEQ ID NO: 220646
uuacauacuggaguguggc

SEQ ID NO: 220648 - RNA, 19 nt, Artificial Sequence
  Description of Artificial Sequence: Synthetic oligonucleotide
  Sense strand starting at position 3612 of SEQ ID NO: 2841
acacuccaguauguaaaua

SEQ ID NO: 220649 - RNA, 19 nt, Artificial Sequence
  Description of Artificial Sequence: Synthetic oligonucleotide
  Antisense strand to SEQ ID NO: 220648
uauuuacauacuggagugu

SEQ ID NO: 220650 - RNA, 19 nt, Artificial Sequence
  Description of Artificial Sequence: Synthetic oligonucleotide
  Sense strand starting at position 3746 of SEQ ID NO: 2841
gugaaauaccuguaguaua

SEQ ID NO: 220651 - RNA, 19 nt, Artificial Sequence
  Description of Artificial Sequence: Synthetic oligonucleotide
  Antisense strand to SEQ ID NO: 220650
uauacuacagguauuucac

SEQ ID NO: 220652 - RNA, 19 nt, Artificial Sequence
  Description of Artificial Sequence: Synthetic oligonucleotide
  Sense strand starting at position 3754 of SEQ ID NO: 2841
ccuguaguauauucuaaac

SEQ ID NO: 220653 - RNA, 19 nt, Artificial Sequence
  Description of Artificial Sequence: Synthetic oligonucleotide
  Antisense strand to SEQ ID NO: 220652
guuuagaauauacuacagg

SEQ ID NO: 220654 - RNA, 19 nt, Artificial Sequence
  Description of Artificial Sequence: Synthetic oligonucleotide
  Sense strand starting at position 3857 of SEQ ID NO: 2841
cuaagaacuuuccugggua

SEQ ID NO: 220655 - RNA, 19 nt, Artificial Sequence
  Description of Artificial Sequence: Synthetic oligonucleotide
  Antisense strand to SEQ ID NO: 220654
uacccaggaaaguucuuag

SEQ ID NO: 220656 - RNA, 19 nt, Artificial Sequence
  Description of Artificial Sequence: Synthetic oligonucleotide
  Sense strand starting at position 3859 of SEQ ID NO: 2841
aagaacuuuccuggguaua

SEQ ID NO: 220657 - RNA, 19 nt, Artificial Sequence
  Description of Artificial Sequence: Synthetic oligonucleotide
  Antisense strand to SEQ ID NO: 220656
uauacccaggaaaguucuu

SEQ ID NO: 220658 - RNA, 19 nt, Artificial Sequence
  Description of Artificial Sequence: Synthetic oligonucleotide
  Sense strand starting at position 3860 of SEQ ID NO: 2841
agaacuuuccuggguauag

SEQ ID NO: 220659 - RNA, 19 nt, Artificial Sequence
  Description of Artificial Sequence: Synthetic oligonucleotide
  Antisense strand to SEQ ID NO: 220658
cuauacccaggaaaguucu

SEQ ID NO: 220660 - RNA, 19 nt, Artificial Sequence
  Description of Artificial Sequence: Synthetic oligonucleotide
  Sense strand starting at position 3894 of SEQ ID NO: 2841
uugcuaagccauuguauga

SEQ ID NO: 220661 - RNA, 19 nt, Artificial Sequence
  Description of Artificial Sequence: Synthetic oligonucleotide
  Antisense strand to SEQ ID NO: 220660
ucauacaauggcuuagcaa

SEQ ID NO: 220662 - RNA, 19 nt, Artificial Sequence
  Description of Artificial Sequence: Synthetic oligonucleotide
  Sense strand starting at position 121 of SEQ ID NO: 2842
ugagauugcuaauuagcaa

SEQ ID NO: 220663 - RNA, 19 nt, Artificial Sequence
  Description of Artificial Sequence: Synthetic oligonucleotide
  Antisense strand to SEQ ID NO: 220662
uugcuaauuagcaaucuca

SEQ ID NO: 220664 - RNA, 19 nt, Artificial Sequence
  Description of Artificial Sequence: Synthetic oligonucleotide
  Sense strand starting at position 1135 of SEQ ID NO: 2842
uccacuuucgcguucucaa

SEQ ID NO: 220665 - RNA, 19 nt, Artificial Sequence
  Description of Artificial Sequence: Synthetic oligonucleotide
  Antisense strand to SEQ ID NO: 220664
uugagaacgcgaaagugga

SEQ ID NO: 220666 - RNA, 19 nt, Artificial Sequence
  Description of Artificial Sequence: Synthetic oligonucleotide
  Sense strand starting at position 1361 of SEQ ID NO: 2842
gagagauucugccucagca

SEQ ID NO: 220667 - RNA, 19 nt, Artificial Sequence
  Description of Artificial Sequence: Synthetic oligonucleotide
  Antisense strand to SEQ ID NO: 220666
ugcugaggcagaaucucuc

SEQ ID NO: 220668 - RNA, 19 nt, Artificial Sequence
  Description of Artificial Sequence: Synthetic oligonucleotide
  Sense strand starting at position 1363 of SEQ ID NO: 2842
gagauucugccucagcauu

SEQ ID NO: 220669 - RNA, 19 nt, Artificial Sequence
  Description of Artificial Sequence: Synthetic oligonucleotide
  Antisense strand to SEQ ID NO: 220668
aaugcugaggcagaaucuc

SEQ ID NO: 220670 - RNA, 19 nt, Artificial Sequence
  Description of Artificial Sequence: Synthetic oligonucleotide
  Sense strand starting at position 1408 of SEQ ID NO: 2842
ggaggagcuguuuaauuau

SEQ ID NO: 220671 - RNA, 19 nt, Artificial Sequence
  Description of Artificial Sequence: Synthetic oligonucleotide
  Antisense strand to SEQ ID NO: 220670
auaauuaaacagcuccucc

SEQ ID NO: 220672 - RNA, 19 nt, Artificial Sequence
  Description of Artificial Sequence: Synthetic oligonucleotide
  Sense strand starting at position 1456 of SEQ ID NO: 2842
ggugacaucuggucacgau

SEQ ID NO: 220673 - RNA, 19 nt, Artificial Sequence
  Description of Artificial Sequence: Synthetic oligonucleotide
  Antisense strand to SEQ ID NO: 220672
aucgugaccagaugucacc

SEQ ID NO: 220674 - RNA, 19 nt, Artificial Sequence
  Description of Artificial Sequence: Synthetic oligonucleotide
  Sense strand starting at position 1457 of SEQ ID NO: 2842
gugacaucuggucacgauu

SEQ ID NO: 220675 - RNA, 19 nt, Artificial Sequence
  Description of Artificial Sequence: Synthetic oligonucleotide
  Antisense strand to SEQ ID NO: 220674
aaucgugaccagaugucac

SEQ ID NO: 220676 - RNA, 19 nt, Artificial Sequence
  Description of Artificial Sequence: Synthetic oligonucleotide
  Sense strand starting at position 1466 of SEQ ID NO: 2842
ggucacgauucuuauuuau

SEQ ID NO: 220677 - RNA, 19 nt, Artificial Sequence
  Description of Artificial Sequence: Synthetic oligonucleotide
  Antisense strand to SEQ ID NO: 220676
auaaauaagaaucgugacc

SEQ ID NO: 220678 - RNA, 19 nt, Artificial Sequence
  Description of Artificial Sequence: Synthetic oligonucleotide
  Sense strand starting at position 1491 of SEQ ID NO: 2842
ugagaaauugguggcugua

SEQ ID NO: 220679 - RNA, 19 nt, Artificial Sequence
  Description of Artificial Sequence: Synthetic oligonucleotide
  Antisense strand to SEQ ID NO: 220678
uacagccaccaauuucuca

SEQ ID NO: 220680 - RNA, 19 nt, Artificial Sequence
  Description of Artificial Sequence: Synthetic oligonucleotide
  Sense strand starting at position 1493 of SEQ ID NO: 2842
agaaauugguggcuguauu

SEQ ID NO: 220681 - RNA, 19 nt, Artificial Sequence
  Description of Artificial Sequence: Synthetic oligonucleotide
  Antisense strand to SEQ ID NO: 220680
aauacagccaccaauuucu

SEQ ID NO: 220682 - RNA, 19 nt, Artificial Sequence
  Description of Artificial Sequence: Synthetic oligonucleotide
  Sense strand starting at position 1494 of SEQ ID NO: 2842
gaaauugguggcuguauuu

SEQ ID NO: 220683 - RNA, 19 nt, Artificial Sequence
  Description of Artificial Sequence: Synthetic oligonucleotide
  Antisense strand to SEQ ID NO: 220682
aaauacagccaccaauuuc

SEQ ID NO: 220684 - RNA, 19 nt, Artificial Sequence
  Description of Artificial Sequence: Synthetic oligonucleotide
  Sense strand starting at position 1629 of SEQ ID NO: 2842
gggccacgaucucuuggaa

SEQ ID NO: 220685 - RNA, 19 nt, Artificial Sequence
  Description of Artificial Sequence: Synthetic oligonucleotide
  Antisense strand to SEQ ID NO: 220684
uuccaagagaucguggccc

SEQ ID NO: 220686 - RNA, 19 nt, Artificial Sequence
  Description of Artificial Sequence: Synthetic oligonucleotide
  Sense strand starting at position 1688 of SEQ ID NO: 2842
cacagucugcuaugagaca

SEQ ID NO: 220687 - RNA, 19 nt, Artificial Sequence
  Description of Artificial Sequence: Synthetic oligonucleotide
  Antisense strand to SEQ ID NO: 220686
ugucucauagcagacugug

SEQ ID NO: 220688 - RNA, 19 nt, Artificial Sequence
  Description of Artificial Sequence: Synthetic oligonucleotide
  Sense strand starting at position 1821 of SEQ ID NO: 2842
uugucugccucgguuauca

SEQ ID NO: 220689 - RNA, 19 nt, Artificial Sequence
  Description of Artificial Sequence: Synthetic oligonucleotide
  Antisense strand to SEQ ID NO: 220688
ugauaaccgaggcagacaa

SEQ ID NO: 220690 - RNA, 19 nt, Artificial Sequence
  Description of Artificial Sequence: Synthetic oligonucleotide
  Sense strand starting at position 1830 of SEQ ID NO: 2842
ucgguuaucacugaaugga

SEQ ID NO: 220691 - RNA, 19 nt, Artificial Sequence
  Description of Artificial Sequence: Synthetic oligonucleotide
  Antisense strand to SEQ ID NO: 220690
uccauucagugauaaccga

SEQ ID NO: 220692 - RNA, 19 nt, Artificial Sequence
  Description of Artificial Sequence: Synthetic oligonucleotide
  Sense strand starting at position 1967 of SEQ ID NO: 2842
ggcucucaugucugggaga

SEQ ID NO: 220693 - RNA, 19 nt, Artificial Sequence
  Description of Artificial Sequence: Synthetic oligonucleotide
  Antisense strand to SEQ ID NO: 220692
ucucccagacaugagagcc

SEQ ID NO: 220694 - RNA, 19 nt, Artificial Sequence
  Description of Artificial Sequence: Synthetic oligonucleotide
  Sense strand starting at position 1969 of SEQ ID NO: 2842
cucucaugucugggagauc

SEQ ID NO: 220695 - RNA, 19 nt, Artificial Sequence
  Description of Artificial Sequence: Synthetic oligonucleotide
  Antisense strand to SEQ ID NO: 220694
gaucucccagacaugagag

SEQ ID NO: 220696 - RNA, 19 nt, Artificial Sequence
  Description of Artificial Sequence: Synthetic oligonucleotide
  Sense strand starting at position 1991 of SEQ ID NO: 2842
caaggagacugucugauau

SEQ ID NO: 220697 - RNA, 19 nt, Artificial Sequence
  Description of Artificial Sequence: Synthetic oligonucleotide
  Antisense strand to SEQ ID NO: 220696
auaucagacagucuccuug

SEQ ID NO: 220698 - RNA, 19 nt, Artificial Sequence
  Description of Artificial Sequence: Synthetic oligonucleotide
  Sense strand starting at position 1993 of SEQ ID NO: 2842
aggagacugucugauauca

SEQ ID NO: 220699 - RNA, 19 nt, Artificial Sequence
  Description of Artificial Sequence: Synthetic oligonucleotide
  Antisense strand to SEQ ID NO: 220698
ugauaucagacagucuccu

SEQ ID NO: 220700 - RNA, 19 nt, Artificial Sequence
  Description of Artificial Sequence: Synthetic oligonucleotide
  Sense strand starting at position 1995 of SEQ ID NO: 2842
gagacugucugauaucauu

SEQ ID NO: 220701 - RNA, 19 nt, Artificial Sequence
  Description of Artificial Sequence: Synthetic oligonucleotide
  Antisense strand to SEQ ID NO: 220700
aaugauaucagacagucuc

SEQ ID NO: 220702 - RNA, 19 nt, Artificial Sequence
  Description of Artificial Sequence: Synthetic oligonucleotide
  Sense strand starting at position 2054 of SEQ ID NO: 2842
ggaacucagcuuuggagga

SEQ ID NO: 220703 - RNA, 19 nt, Artificial Sequence
  Description of Artificial Sequence: Synthetic oligonucleotide
  Antisense strand to SEQ ID NO: 220702
uccuccaaagcugaguucc

SEQ ID NO: 220704 - RNA, 19 nt, Artificial Sequence
  Description of Artificial Sequence: Synthetic oligonucleotide
  Sense strand starting at position 2238 of SEQ ID NO: 2842
accauaucgcggucugcaa

SEQ ID NO: 220705 - RNA, 19 nt, Artificial Sequence
  Description of Artificial Sequence: Synthetic oligonucleotide
  Antisense strand to SEQ ID NO: 220704
uugcagaccgcgauauggu

SEQ ID NO: 220706 - RNA, 19 nt, Artificial Sequence
  Description of Artificial Sequence: Synthetic oligonucleotide
  Sense strand starting at position 2240 of SEQ ID NO: 2842
cauaucgcggucugcaaua

SEQ ID NO: 220707 - RNA, 19 nt, Artificial Sequence
  Description of Artificial Sequence: Synthetic oligonucleotide
  Antisense strand to SEQ ID NO: 220706
uauugcagaccgcgauaug

SEQ ID NO: 220708 - RNA, 19 nt, Artificial Sequence
  Description of Artificial Sequence: Synthetic oligonucleotide
  Sense strand starting at position 2245 of SEQ ID NO: 2842
cgcggucugcaauagauac

SEQ ID NO: 220709 - RNA, 19 nt, Artificial Sequence
  Description of Artificial Sequence: Synthetic oligonucleotide
  Antisense strand to SEQ ID NO: 220708
guaucuauugcagaccgcg

SEQ ID NO: 220710 - RNA, 19 nt, Artificial Sequence
  Description of Artificial Sequence: Synthetic oligonucleotide
  Sense strand starting at position 2247 of SEQ ID NO: 2842
cggucugcaauagauacua

SEQ ID NO: 220711 - RNA, 19 nt, Artificial Sequence
  Description of Artificial Sequence: Synthetic oligonucleotide
  Antisense strand to SEQ ID NO: 220710
uaguaucuauugcagaccg

SEQ ID NO: 220712 - RNA, 19 nt, Artificial Sequence
  Description of Artificial Sequence: Synthetic oligonucleotide
  Sense strand starting at position 2323 of SEQ ID NO: 2842
gcugcaauaccauggagaa

SEQ ID NO: 220713 - RNA, 19 nt, Artificial Sequence
  Description of Artificial Sequence: Synthetic oligonucleotide
  Antisense strand to SEQ ID NO: 220712
uucuccaugguauugcagc

SEQ ID NO: 220714 - RNA, 19 nt, Artificial Sequence
  Description of Artificial Sequence: Synthetic oligonucleotide
  Sense strand starting at position 2324 of SEQ ID NO: 2842
cugcaauaccauggagaaa

SEQ ID NO: 220715 - RNA, 19 nt, Artificial Sequence
  Description of Artificial Sequence: Synthetic oligonucleotide
  Antisense strand to SEQ ID NO: 220714
uuucuccaugguauugcag

SEQ ID NO: 220716 - RNA, 19 nt, Artificial Sequence
  Description of Artificial Sequence: Synthetic oligonucleotide
  Sense strand starting at position 2384 of SEQ ID NO: 2842
auaaacauccugugugcua

SEQ ID NO: 220717 - RNA, 19 nt, Artificial Sequence
  Description of Artificial Sequence: Synthetic oligonucleotide
  Antisense strand to SEQ ID NO: 220716
uagcacacaggauguuuau

SEQ ID NO: 220718 - RNA, 19 nt, Artificial Sequence
  Description of Artificial Sequence: Synthetic oligonucleotide
  Sense strand starting at position 2386 of SEQ ID NO: 2842
aaacauccugugugcuaga

SEQ ID NO: 220719 - RNA, 19 nt, Artificial Sequence
  Description of Artificial Sequence: Synthetic oligonucleotide
  Antisense strand to SEQ ID NO: 220718
ucuagcacacaggauguuu

SEQ ID NO: 220720 - RNA, 19 nt, Artificial Sequence
  Description of Artificial Sequence: Synthetic oligonucleotide
  Sense strand starting at position 2469 of SEQ ID NO: 2842
acauauugcugagauaaac

SEQ ID NO: 220721 - RNA, 19 nt, Artificial Sequence
  Description of Artificial Sequence: Synthetic oligonucleotide
  Antisense strand to SEQ ID NO: 220720
guuuaucucagcaauaugu

SEQ ID NO: 220722 - RNA, 19 nt, Artificial Sequence
  Description of Artificial Sequence: Synthetic oligonucleotide
  Sense strand starting at position 2817 of SEQ ID NO: 2842
aggcaugaucauggaaguu

SEQ ID NO: 220723 - RNA, 19 nt, Artificial Sequence
  Description of Artificial Sequence: Synthetic oligonucleotide
  Antisense strand to SEQ ID NO: 220722
aacuuccaugaucaugccu

SEQ ID NO: 220724 - RNA, 19 nt, Artificial Sequence
  Description of Artificial Sequence: Synthetic oligonucleotide
  Sense strand starting at position 2841 of SEQ ID NO: 2842
auucuuuagggauauguuu

SEQ ID NO: 220725 - RNA, 19 nt, Artificial Sequence
  Description of Artificial Sequence: Synthetic oligonucleotide
  Antisense strand to SEQ ID NO: 220724
aaacauaucccuaaagaau

SEQ ID NO: 220726 - RNA, 19 nt, Artificial Sequence
  Description of Artificial Sequence: Synthetic oligonucleotide
  Sense strand starting at position 2866 of SEQ ID NO: 2842
cuaccuuagcugugugaag

SEQ ID NO: 220727 - RNA, 19 nt, Artificial Sequence
  Description of Artificial Sequence: Synthetic oligonucleotide
  Antisense strand to SEQ ID NO: 220726
cuucacacagcuaagguag

SEQ ID NO: 220728 - RNA, 19 nt, Artificial Sequence
  Description of Artificial Sequence: Synthetic oligonucleotide
  Sense strand starting at position 2868 of SEQ ID NO: 2842
accuuagcugugugaagca

SEQ ID NO: 220729 - RNA, 19 nt, Artificial Sequence
  Description of Artificial Sequence: Synthetic oligonucleotide
  Antisense strand to SEQ ID NO: 220728
ugcuucacacagcuaaggu

SEQ ID NO: 220730 - RNA, 19 nt, Artificial Sequence
  Description of Artificial Sequence: Synthetic oligonucleotide
  Sense strand starting at position 2898 of SEQ ID NO: 2842
augucauuauaagagacaa

SEQ ID NO: 220731 - RNA, 19 nt, Artificial Sequence
  Description of Artificial Sequence: Synthetic oligonucleotide
  Antisense strand to SEQ ID NO: 220730
uugucucuuauaaugacau

SEQ ID NO: 220732 - RNA, 19 nt, Artificial Sequence
  Description of Artificial Sequence: Synthetic oligonucleotide
  Sense strand starting at position 3074 of SEQ ID NO: 2842
acaucuggauuggaaauga

SEQ ID NO: 220733 - RNA, 19 nt, Artificial Sequence
  Description of Artificial Sequence: Synthetic oligonucleotide
  Antisense strand to SEQ ID NO: 220732
ucauuuccaauccagaugu

SEQ ID NO: 220734 - RNA, 19 nt, Artificial Sequence
  Description of Artificial Sequence: Synthetic oligonucleotide
  Sense strand starting at position 3104 of SEQ ID NO: 2842
uaucucuauuggcagauga

SEQ ID NO: 220735 - RNA, 19 nt, Artificial Sequence
  Description of Artificial Sequence: Synthetic oligonucleotide
  Antisense strand to SEQ ID NO: 220734
ucaucugccaauagagaua

SEQ ID NO: 220736 - RNA, 19 nt, Artificial Sequence
  Description of Artificial Sequence: Synthetic oligonucleotide
  Sense strand starting at position 3114 of SEQ ID NO: 2842
ggcagaugacgugaucuca

SEQ ID NO: 220737 - RNA, 19 nt, Artificial Sequence
  Description of Artificial Sequence: Synthetic oligonucleotide
  Antisense strand to SEQ ID NO: 220736
ugagaucacgucaucugcc

SEQ ID NO: 220738 - RNA, 19 nt, Artificial Sequence
  Description of Artificial Sequence: Synthetic oligonucleotide
  Sense strand starting at position 3466 of SEQ ID NO: 2842
gccuguacucucugcacuu

SEQ ID NO: 220739 - RNA, 19 nt, Artificial Sequence
  Description of Artificial Sequence: Synthetic oligonucleotide
  Antisense strand to SEQ ID NO: 220738
aagugcagagaguacaggc

SEQ ID NO: 220740 - RNA, 19 nt, Artificial Sequence
  Description of Artificial Sequence: Synthetic oligonucleotide
  Sense strand starting at position 3850 of SEQ ID NO: 2842
ugaagauuguaccaccaca

SEQ ID NO: 220741 - RNA, 19 nt, Artificial Sequence
  Description of Artificial Sequence: Synthetic oligonucleotide
  Antisense strand to SEQ ID NO: 220740
uguggugguacaaucuuca

SEQ ID NO: 220742 - RNA, 19 nt, Artificial Sequence
  Description of Artificial Sequence: Synthetic oligonucleotide
  Sense strand starting at position 18 of SEQ ID NO: 2843
auggaauacccuuggcaug

SEQ ID NO: 220743 - RNA, 19 nt, Artificial Sequence
  Description of Artificial Sequence: Synthetic oligonucleotide
  Antisense strand to SEQ ID NO: 220742
caugccaaggguauuccau

SEQ ID NO: 220744 - RNA, 19 nt, Artificial Sequence
  Description of Artificial Sequence: Synthetic oligonucleotide
  Sense strand starting at position 49 of SEQ ID NO: 2843
cuggcauacucuccuaaga

SEQ ID NO: 220745 - RNA, 19 nt, Artificial Sequence
  Description of Artificial Sequence: Synthetic oligonucleotide
  Antisense strand to SEQ ID NO: 220744
ucuuaggagaguaugccag

SEQ ID NO: 220746 - RNA, 19 nt, Artificial Sequence
  Description of Artificial Sequence: Synthetic oligonucleotide
  Sense strand starting at position 112 of SEQ ID NO: 2843
ugacauuaggcaugagguu

SEQ ID NO: 220747 - RNA, 19 nt, Artificial Sequence
  Description of Artificial Sequence: Synthetic oligonucleotide
  Antisense strand to SEQ ID NO: 220746
aaccucaugccuaauguca

SEQ ID NO: 220748 - RNA, 19 nt, Artificial Sequence
  Description of Artificial Sequence: Synthetic oligonucleotide
  Sense strand starting at position 121 of SEQ ID NO: 2843
gcaugagguucucucugca

SEQ ID NO: 220749 - RNA, 19 nt, Artificial Sequence
  Description of Artificial Sequence: Synthetic oligonucleotide
  Antisense strand to SEQ ID NO: 220748
ugcagagagaaccucaugc

SEQ ID NO: 220750 - RNA, 19 nt, Artificial Sequence
  Description of Artificial Sequence: Synthetic oligonucleotide
  Sense strand starting at position 125 of SEQ ID NO: 2843
gagguucucucugcacaga

SEQ ID NO: 220751 - RNA, 19 nt, Artificial Sequence
  Description of Artificial Sequence: Synthetic oligonucleotide
  Antisense strand to SEQ ID NO: 220750
ucugugcagagagaaccuc

SEQ ID NO: 220752 - RNA, 19 nt, Artificial Sequence
  Description of Artificial Sequence: Synthetic oligonucleotide
  Sense strand starting at position 126 of SEQ ID NO: 2843
agguucucucugcacagaa

SEQ ID NO: 220753 - RNA, 19 nt, Artificial Sequence
  Description of Artificial Sequence: Synthetic oligonucleotide
  Antisense strand to SEQ ID NO: 220752
uucugugcagagagaaccu

SEQ ID NO: 220754 - RNA, 19 nt, Artificial Sequence
  Description of Artificial Sequence: Synthetic oligonucleotide
  Sense strand starting at position 128 of SEQ ID NO: 2843
guucucucugcacagaacu

SEQ ID NO: 220755 - RNA, 19 nt, Artificial Sequence
  Description of Artificial Sequence: Synthetic oligonucleotide
  Antisense strand to SEQ ID NO: 220754
aguucugugcagagagaac

SEQ ID NO: 220756 - RNA, 19 nt, Artificial Sequence
  Description of Artificial Sequence: Synthetic oligonucleotide
  Sense strand starting at position 142 of SEQ ID NO: 2843
gaacuugcugccuggauca

SEQ ID NO: 220757 - RNA, 19 nt, Artificial Sequence
  Description of Artificial Sequence: Synthetic oligonucleotide
  Antisense strand to SEQ ID NO: 220756
ugauccaggcagcaaguuc

SEQ ID NO: 220758 - RNA, 19 nt, Artificial Sequence
  Description of Artificial Sequence: Synthetic oligonucleotide
  Sense strand starting at position 411 of SEQ ID NO: 2843
agcagucaccaugaugaau

SEQ ID NO: 220759 - RNA, 19 nt, Artificial Sequence
  Description of Artificial Sequence: Synthetic oligonucleotide
  Antisense strand to SEQ ID NO: 220758
auucaucauggugacugcu

SEQ ID NO: 220760 - RNA, 19 nt, Artificial Sequence
  Description of Artificial Sequence: Synthetic oligonucleotide
  Sense strand starting at position 532 of SEQ ID NO: 2843
gccuccuugcuauguguga

SEQ ID NO: 220761 - RNA, 19 nt, Artificial Sequence
  Description of Artificial Sequence: Synthetic oligonucleotide
  Antisense strand to SEQ ID NO: 220760
ucacacauagcaaggaggc

SEQ ID NO: 220762 - RNA, 19 nt, Artificial Sequence
  Description of Artificial Sequence: Synthetic oligonucleotide
  Sense strand starting at position 533 of SEQ ID NO: 2843
ccuccuugcuaugugugaa

SEQ ID NO: 220763 - RNA, 19 nt, Artificial Sequence
  Description of Artificial Sequence: Synthetic oligonucleotide
  Antisense strand to SEQ ID NO: 220762
uucacacauagcaaggagg

SEQ ID NO: 220764 - RNA, 19 nt, Artificial Sequence
  Description of Artificial Sequence: Synthetic oligonucleotide
  Sense strand starting at position 543 of SEQ ID NO: 2843
augugugaauuccucccaa

SEQ ID NO: 220765 - RNA, 19 nt, Artificial Sequence
  Description of Artificial Sequence: Synthetic oligonucleotide
  Antisense strand to SEQ ID NO: 220764
uugggaggaauucacacau

SEQ ID NO: 220766 - RNA, 19 nt, Artificial Sequence
  Description of Artificial Sequence: Synthetic oligonucleotide
  Sense strand starting at position 567 of SEQ ID NO: 2843
ucagcuauuuguccaggca

SEQ ID NO: 220767 - RNA, 19 nt, Artificial Sequence
  Description of Artificial Sequence: Synthetic oligonucleotide
  Antisense strand to SEQ ID NO: 220766
ugccuggacaaauagcuga

SEQ ID NO: 220768 - RNA, 19 nt, Artificial Sequence
  Description of Artificial Sequence: Synthetic oligonucleotide
  Sense strand starting at position 570 of SEQ ID NO: 2843
gcuauuuguccaggcagug

SEQ ID NO: 220769 - RNA, 19 nt, Artificial Sequence
  Description of Artificial Sequence: Synthetic oligonucleotide
  Antisense strand to SEQ ID NO: 220768
cacugccuggacaaauagc

SEQ ID NO: 220770 - RNA, 19 nt, Artificial Sequence
  Description of Artificial Sequence: Synthetic oligonucleotide
  Sense strand starting at position 575 of SEQ ID NO: 2843
uuguccaggcaguguuaua

SEQ ID NO: 220771 - RNA, 19 nt, Artificial Sequence
  Description of Artificial Sequence: Synthetic oligonucleotide
  Antisense strand to SEQ ID NO: 220770
uauaacacugccuggacaa

SEQ ID NO: 220772 - RNA, 19 nt, Artificial Sequence
  Description of Artificial Sequence: Synthetic oligonucleotide
  Sense strand starting at position 580 of SEQ ID NO: 2843
caggcaguguuauauaacu

SEQ ID NO: 220773 - RNA, 19 nt, Artificial Sequence
  Description of Artificial Sequence: Synthetic oligonucleotide
  Antisense strand to SEQ ID NO: 220772
aguuauauaacacugccug

SEQ ID NO: 220774 - RNA, 19 nt, Artificial Sequence
  Description of Artificial Sequence: Synthetic oligonucleotide
  Sense strand starting at position 599 of SEQ ID NO: 2843
gcaggcugaugugguauua

SEQ ID NO: 220775 - RNA, 19 nt, Artificial Sequence
  Description of Artificial Sequence: Synthetic oligonucleotide
  Antisense strand to SEQ ID NO: 220774
uaauaccacaucagccugc

SEQ ID NO: 220776 - RNA, 19 nt, Artificial Sequence
  Description of Artificial Sequence: Synthetic oligonucleotide
  Sense strand starting at position 608 of SEQ ID NO: 2843
ugugguauuaaaggaaucu

SEQ ID NO: 220777 - RNA, 19 nt, Artificial Sequence
  Description of Artificial Sequence: Synthetic oligonucleotide
  Antisense strand to SEQ ID NO: 220776
agauuccuuuaauaccaca

SEQ ID NO: 220778 - RNA, 19 nt, Artificial Sequence
  Description of Artificial Sequence: Synthetic oligonucleotide
  Sense strand starting at position 778 of SEQ ID NO: 2843
aggauuccuuggugcggua

SEQ ID NO: 220779 - RNA, 19 nt, Artificial Sequence
  Description of Artificial Sequence: Synthetic oligonucleotide
  Antisense strand to SEQ ID NO: 220778
uaccgcaccaaggaauccu

SEQ ID NO: 220780 - RNA, 19 nt, Artificial Sequence
  Description of Artificial Sequence: Synthetic oligonucleotide
  Sense strand starting at position 898 of SEQ ID NO: 2843
gggagcggauguuaaagau

SEQ ID NO: 220781 - RNA, 19 nt, Artificial Sequence
  Description of Artificial Sequence: Synthetic oligonucleotide
  Antisense strand to SEQ ID NO: 220780
aucuuuaacauccgcuccc

SEQ ID NO: 220782 - RNA, 19 nt, Artificial Sequence
  Description of Artificial Sequence: Synthetic oligonucleotide
  Sense strand starting at position 939 of SEQ ID NO: 2843
agcgaagacgguugccaaa

SEQ ID NO: 220783 - RNA, 19 nt, Artificial Sequence
  Description of Artificial Sequence: Synthetic oligonucleotide
  Antisense strand to SEQ ID NO: 220782
uuuggcaaccgucuucgcu

SEQ ID NO: 220784 - RNA, 19 nt, Artificial Sequence
  Description of Artificial Sequence: Synthetic oligonucleotide
  Sense strand starting at position 992 of SEQ ID NO: 2843
caggacuguuauuacgagu

SEQ ID NO: 220785 - RNA, 19 nt, Artificial Sequence
  Description of Artificial Sequence: Synthetic oligonucleotide
  Antisense strand to SEQ ID NO: 220784
acucguaauaacaguccug

SEQ ID NO: 220786 - RNA, 19 nt, Artificial Sequence
  Description of Artificial Sequence: Synthetic oligonucleotide
  Sense strand starting at position 1005 of SEQ ID NO: 2843
acgaguauucagggagaga

SEQ ID NO: 220787 - RNA, 19 nt, Artificial Sequence
  Description of Artificial Sequence: Synthetic oligonucleotide
  Antisense strand to SEQ ID NO: 220786
ucucucccugaauacucgu

SEQ ID NO: 220788 - RNA, 19 nt, Artificial Sequence
  Description of Artificial Sequence: Synthetic oligonucleotide
  Sense strand starting at position 1041 of SEQ ID NO: 2843
gagauuccgcagcauccua

SEQ ID NO: 220789 - RNA, 19 nt, Artificial Sequence
  Description of Artificial Sequence: Synthetic oligonucleotide
  Antisense strand to SEQ ID NO: 220788
uaggaugcugcggaaucuc

SEQ ID NO: 220790 - RNA, 19 nt, Artificial Sequence
  Description of Artificial Sequence: Synthetic oligonucleotide
  Sense strand starting at position 2237 of SEQ ID NO: 2843
ccggcugaguuuguucauu

SEQ ID NO: 220791 - RNA, 19 nt, Artificial Sequence
  Description of Artificial Sequence: Synthetic oligonucleotide
  Antisense strand to SEQ ID NO: 220790
aaugaacaaacucagccgg

SEQ ID NO: 220792 - RNA, 19 nt, Artificial Sequence
  Description of Artificial Sequence: Synthetic oligonucleotide
  Sense strand starting at position 2532 of SEQ ID NO: 2843
cuggaugugugaagguuga

SEQ ID NO: 220793 - RNA, 19 nt, Artificial Sequence
  Description of Artificial Sequence: Synthetic oligonucleotide
  Antisense strand to SEQ ID NO: 220792
ucaaccuucacacauccag

SEQ ID NO: 220794 - RNA, 19 nt, Artificial Sequence
  Description of Artificial Sequence: Synthetic oligonucleotide
  Sense strand starting at position 2543 of SEQ ID NO: 2843
aagguugagccucaucaaa

SEQ ID NO: 220795 - RNA, 19 nt, Artificial Sequence
  Description of Artificial Sequence: Synthetic oligonucleotide
  Antisense strand to SEQ ID NO: 220794
uuugaugaggcucaaccuu

SEQ ID NO: 220796 - RNA, 19 nt, Artificial Sequence
  Description of Artificial Sequence: Synthetic oligonucleotide
  Sense strand starting at position 2676 of SEQ ID NO: 2843
cuaggugguggucauaagu

SEQ ID NO: 220797 - RNA, 19 nt, Artificial Sequence
  Description of Artificial Sequence: Synthetic oligonucleotide
  Antisense strand to SEQ ID NO: 220796
acuuaugaccaccaccuag

SEQ ID NO: 220798 - RNA, 19 nt, Artificial Sequence
  Description of Artificial Sequence: Synthetic oligonucleotide
  Sense strand starting at position 2684 of SEQ ID NO: 2843
uggucauaagucuagcuuu

SEQ ID NO: 220799 - RNA, 19 nt, Artificial Sequence
  Description of Artificial Sequence: Synthetic oligonucleotide
  Antisense strand to SEQ ID NO: 220798
aaagcuagacuuaugacca

SEQ ID NO: 220800 - RNA, 19 nt, Artificial Sequence
  Description of Artificial Sequence: Synthetic oligonucleotide
  Sense strand starting at position 2819 of SEQ ID NO: 2843
guugguugguucuguguuu

SEQ ID NO: 220801 - RNA, 19 nt, Artificial Sequence
  Description of Artificial Sequence: Synthetic oligonucleotide
  Antisense strand to SEQ ID NO: 220800
aaacacagaaccaaccaac

SEQ ID NO: 220802 - RNA, 19 nt, Artificial Sequence
  Description of Artificial Sequence: Synthetic oligonucleotide
  Sense strand starting at position 2847 of SEQ ID NO: 2843
gugauuacuuccuucccuu

SEQ ID NO: 220803 - RNA, 19 nt, Artificial Sequence
  Description of Artificial Sequence: Synthetic oligonucleotide
  Antisense strand to SEQ ID NO: 220802
aagggaaggaaguaaucac

SEQ ID NO: 220804 - RNA, 19 nt, Artificial Sequence
  Description of Artificial Sequence: Synthetic oligonucleotide
  Sense strand starting at position 2925 of SEQ ID NO: 2843
ggguuuaacucaccuaucu

SEQ ID NO: 220805 - RNA, 19 nt, Artificial Sequence
  Description of Artificial Sequence: Synthetic oligonucleotide
  Antisense strand to SEQ ID NO: 220804
agauaggugaguuaaaccc

SEQ ID NO: 220806 - RNA, 19 nt, Artificial Sequence
  Description of Artificial Sequence: Synthetic oligonucleotide
  Sense strand starting at position 2962 of SEQ ID NO: 2843
uauccugauugauuggauu

SEQ ID NO: 220807 - RNA, 19 nt, Artificial Sequence
  Description of Artificial Sequence: Synthetic oligonucleotide
  Antisense strand to SEQ ID NO: 220806
aauccaaucaaucaggaua

SEQ ID NO: 220808 - RNA, 19 nt, Artificial Sequence
  Description of Artificial Sequence: Synthetic oligonucleotide
  Sense strand starting at position 2965 of SEQ ID NO: 2843
ccugauugauuggauucca

SEQ ID NO: 220809 - RNA, 19 nt, Artificial Sequence
  Description of Artificial Sequence: Synthetic oligonucleotide
  Antisense strand to SEQ ID NO: 220808
uggaauccaaucaaucagg

SEQ ID NO: 220810 - RNA, 19 nt, Artificial Sequence
  Description of Artificial Sequence: Synthetic oligonucleotide
  Sense strand starting at position 2970 of SEQ ID NO: 2843
uugauuggauuccagaaua

SEQ ID NO: 220811 - RNA, 19 nt, Artificial Sequence
  Description of Artificial Sequence: Synthetic oligonucleotide
  Antisense strand to SEQ ID NO: 220810
uauucuggaauccaaucaa

SEQ ID NO: 220812 - RNA, 19 nt, Artificial Sequence
  Description of Artificial Sequence: Synthetic oligonucleotide
  Sense strand starting at position 3531 of SEQ ID NO: 2843
agcagaucacuuuagguga

SEQ ID NO: 220813 - RNA, 19 nt, Artificial Sequence
  Description of Artificial Sequence: Synthetic oligonucleotide
  Antisense strand to SEQ ID NO: 220812
ucaccuaaagugaucugcu

SEQ ID NO: 220814 - RNA, 19 nt, Artificial Sequence
  Description of Artificial Sequence: Synthetic oligonucleotide
  Sense strand starting at position 3538 of SEQ ID NO: 2843
cacuuuaggugaggaguuu

SEQ ID NO: 220815 - RNA, 19 nt, Artificial Sequence
  Description of Artificial Sequence: Synthetic oligonucleotide
  Antisense strand to SEQ ID NO: 220814
aaacuccucaccuaaagug

SEQ ID NO: 220816 - RNA, 19 nt, Artificial Sequence
  Description of Artificial Sequence: Synthetic oligonucleotide
  Sense strand starting at position 241 of SEQ ID NO: 2844
cuuguaggugcucagaaac

SEQ ID NO: 220817 - RNA, 19 nt, Artificial Sequence
  Description of Artificial Sequence: Synthetic oligonucleotide
  Antisense strand to SEQ ID NO: 220816
guuucugagcaccuacaag

SEQ ID NO: 220818 - RNA, 19 nt, Artificial Sequence
  Description of Artificial Sequence: Synthetic oligonucleotide
  Sense strand starting at position 271 of SEQ ID NO: 2844
uugaauugcaugggcuaga

SEQ ID NO: 220819 - RNA, 19 nt, Artificial Sequence
  Description of Artificial Sequence: Synthetic oligonucleotide
  Antisense strand to SEQ ID NO: 220818
ucuagcccaugcaauucaa

SEQ ID NO: 220820 - RNA, 19 nt, Artificial Sequence
  Description of Artificial Sequence: Synthetic oligonucleotide
  Sense strand starting at position 415 of SEQ ID NO: 2844
gaaccauaguuggugugau

SEQ ID NO: 220821 - RNA, 19 nt, Artificial Sequence
  Description of Artificial Sequence: Synthetic oligonucleotide
  Antisense strand to SEQ ID NO: 220820
aucacaccaacuaugguuc

SEQ ID NO: 220822 - RNA, 19 nt, Artificial Sequence
  Description of Artificial Sequence: Synthetic oligonucleotide
  Sense strand starting at position 526 of SEQ ID NO: 2844
cagguuguagauugauaaa

SEQ ID NO: 220823 - RNA, 19 nt, Artificial Sequence
  Description of Artificial Sequence: Synthetic oligonucleotide
  Antisense strand to SEQ ID NO: 220822
uuuaucaaucuacaaccug

SEQ ID NO: 220824 - RNA, 19 nt, Artificial Sequence
  Description of Artificial Sequence: Synthetic oligonucleotide
  Sense strand starting at position 579 of SEQ ID NO: 2844
agcacuuuagauugagaac

SEQ ID NO: 220825 - RNA, 19 nt, Artificial Sequence
  Description of Artificial Sequence: Synthetic oligonucleotide
  Antisense strand to SEQ ID NO: 220824
guucucaaucuaaagugcu

SEQ ID NO: 220826 - RNA, 19 nt, Artificial Sequence
  Description of Artificial Sequence: Synthetic oligonucleotide
  Sense strand starting at position 738 of SEQ ID NO: 2844
uuacgagaagcacaugauu

SEQ ID NO: 220827 - RNA, 19 nt, Artificial Sequence
  Description of Artificial Sequence: Synthetic oligonucleotide
  Antisense strand to SEQ ID NO: 220826
aaucaugugcuucucguaa

SEQ ID NO: 220828 - RNA, 19 nt, Artificial Sequence
  Description of Artificial Sequence: Synthetic oligonucleotide
  Sense strand starting at position 740 of SEQ ID NO: 2844
acgagaagcacaugauugu

SEQ ID NO: 220829 - RNA, 19 nt, Artificial Sequence
  Description of Artificial Sequence: Synthetic oligonucleotide
  Antisense strand to SEQ ID NO: 220828
acaaucaugugcuucucgu

SEQ ID NO: 220830 - RNA, 19 nt, Artificial Sequence
  Description of Artificial Sequence: Synthetic oligonucleotide
  Sense strand starting at position 741 of SEQ ID NO: 2844
cgagaagcacaugauugua

SEQ ID NO: 220831 - RNA, 19 nt, Artificial Sequence
  Description of Artificial Sequence: Synthetic oligonucleotide
  Antisense strand to SEQ ID NO: 220830
uacaaucaugugcuucucg

SEQ ID NO: 220832 - RNA, 19 nt, Artificial Sequence
  Description of Artificial Sequence: Synthetic oligonucleotide
  Sense strand starting at position 744 of SEQ ID NO: 2844
gaagcacaugauuguacau

SEQ ID NO: 220833 - RNA, 19 nt, Artificial Sequence
  Description of Artificial Sequence: Synthetic oligonucleotide
  Antisense strand to SEQ ID NO: 220832
auguacaaucaugugcuuc

SEQ ID NO: 220834 - RNA, 19 nt, Artificial Sequence
  Description of Artificial Sequence: Synthetic oligonucleotide
  Sense strand starting at position 755 of SEQ ID NO: 2844
uuguacaugcaagacuuaa

SEQ ID NO: 220835 - RNA, 19 nt, Artificial Sequence
  Description of Artificial Sequence: Synthetic oligonucleotide
  Antisense strand to SEQ ID NO: 220834
uuaagucuugcauguacaa

SEQ ID NO: 220836 - RNA, 19 nt, Artificial Sequence
  Description of Artificial Sequence: Synthetic oligonucleotide
  Sense strand starting at position 815 of SEQ ID NO: 2844
guagaaaugcuacaucgaa

SEQ ID NO: 220837 - RNA, 19 nt, Artificial Sequence
  Description of Artificial Sequence: Synthetic oligonucleotide
  Antisense strand to SEQ ID NO: 220836
uucgauguagcauuucuac

SEQ ID NO: 220838 - RNA, 19 nt, Artificial Sequence
  Description of Artificial Sequence: Synthetic oligonucleotide
  Sense strand starting at position 1081 of SEQ ID NO: 2844
cugcacaguuccuuauuua

SEQ ID NO: 220839 - RNA, 19 nt, Artificial Sequence
  Description of Artificial Sequence: Synthetic oligonucleotide
  Antisense strand to SEQ ID NO: 220838
uaaauaaggaacugugcag

SEQ ID NO: 220840 - RNA, 19 nt, Artificial Sequence
  Description of Artificial Sequence: Synthetic oligonucleotide
  Sense strand starting at position 1113 of SEQ ID NO: 2844
cccaauaagggugguucua

SEQ ID NO: 220841 - RNA, 19 nt, Artificial Sequence
  Description of Artificial Sequence: Synthetic oligonucleotide
  Antisense strand to SEQ ID NO: 220840
uagaaccacccuuauuggg

SEQ ID NO: 220842 - RNA, 19 nt, Artificial Sequence
  Description of Artificial Sequence: Synthetic oligonucleotide
  Sense strand starting at position 1115 of SEQ ID NO: 2844
caauaagggugguucuauu

SEQ ID NO: 220843 - RNA, 19 nt, Artificial Sequence
  Description of Artificial Sequence: Synthetic oligonucleotide
  Antisense strand to SEQ ID NO: 220842
aauagaaccacccuuauug

SEQ ID NO: 220844 - RNA, 19 nt, Artificial Sequence
  Description of Artificial Sequence: Synthetic oligonucleotide
  Sense strand starting at position 1265 of SEQ ID NO: 2844
uuuccaauagccugaggua

SEQ ID NO: 220845 - RNA, 19 nt, Artificial Sequence
  Description of Artificial Sequence: Synthetic oligonucleotide
  Antisense strand to SEQ ID NO: 220844
uaccucaggcuauuggaaa

SEQ ID NO: 220846 - RNA, 19 nt, Artificial Sequence
  Description of Artificial Sequence: Synthetic oligonucleotide
  Sense strand starting at position 1266 of SEQ ID NO: 2844
uuccaauagccugagguau

SEQ ID NO: 220847 - RNA, 19 nt, Artificial Sequence
  Description of Artificial Sequence: Synthetic oligonucleotide
  Antisense strand to SEQ ID NO: 220846
auaccucaggcuauuggaa

SEQ ID NO: 220848 - RNA, 19 nt, Artificial Sequence
  Description of Artificial Sequence: Synthetic oligonucleotide
  Sense strand starting at position 1300 of SEQ ID NO: 2844
agcugaagauaauuaguca

SEQ ID NO: 220849 - RNA, 19 nt, Artificial Sequence
  Description of Artificial Sequence: Synthetic oligonucleotide
  Antisense strand to SEQ ID NO: 220848
ugacuaauuaucuucagcu

SEQ ID NO: 220850 - RNA, 19 nt, Artificial Sequence
  Description of Artificial Sequence: Synthetic oligonucleotide
  Sense strand starting at position 1573 of SEQ ID NO: 2844
ggucucaaaucuuuggacu

SEQ ID NO: 220851 - RNA, 19 nt, Artificial Sequence
  Description of Artificial Sequence: Synthetic oligonucleotide
  Antisense strand to SEQ ID NO: 220850
aguccaaagauuugagacc

SEQ ID NO: 220852 - RNA, 19 nt, Artificial Sequence
  Description of Artificial Sequence: Synthetic oligonucleotide
  Sense strand starting at position 1574 of SEQ ID NO: 2844
gucucaaaucuuuggacug

SEQ ID NO: 220853 - RNA, 19 nt, Artificial Sequence
  Description of Artificial Sequence: Synthetic oligonucleotide
  Antisense strand to SEQ ID NO: 220852
caguccaaagauuugagac

SEQ ID NO: 220854 - RNA, 19 nt, Artificial Sequence
  Description of Artificial Sequence: Synthetic oligonucleotide
  Sense strand starting at position 1698 of SEQ ID NO: 2844
ucacucugcccucaagaga

SEQ ID NO: 220855 - RNA, 19 nt, Artificial Sequence
  Description of Artificial Sequence: Synthetic oligonucleotide
  Antisense strand to SEQ ID NO: 220854
ucucuugagggcagaguga

SEQ ID NO: 220856 - RNA, 19 nt, Artificial Sequence
  Description of Artificial Sequence: Synthetic oligonucleotide
  Sense strand starting at position 1907 of SEQ ID NO: 2844
gcaggagccuuuguaaaga

SEQ ID NO: 220857 - RNA, 19 nt, Artificial Sequence
  Description of Artificial Sequence: Synthetic oligonucleotide
  Antisense strand to SEQ ID NO: 220856
ucuuuacaaaggcuccugc

SEQ ID NO: 220858 - RNA, 19 nt, Artificial Sequence
  Description of Artificial Sequence: Synthetic oligonucleotide
  Sense strand starting at position 1917 of SEQ ID NO: 2844
uuguaaagacauugugaau

SEQ ID NO: 220859 - RNA, 19 nt, Artificial Sequence
  Description of Artificial Sequence: Synthetic oligonucleotide
  Antisense strand to SEQ ID NO: 220858
auucacaaugucuuuacaa

SEQ ID NO: 220860 - RNA, 19 nt, Artificial Sequence
  Description of Artificial Sequence: Synthetic oligonucleotide
  Sense strand starting at position 2045 of SEQ ID NO: 2844
accucugugguuugaggaa

SEQ ID NO: 220861 - RNA, 19 nt, Artificial Sequence
  Description of Artificial Sequence: Synthetic oligonucleotide
  Antisense strand to SEQ ID NO: 220860
uuccucaaaccacagaggu

SEQ ID NO: 220862 - RNA, 19 nt, Artificial Sequence
  Description of Artificial Sequence: Synthetic oligonucleotide
  Sense strand starting at position 2054 of SEQ ID NO: 2844
guuugaggaacuuguuaca

SEQ ID NO: 220863 - RNA, 19 nt, Artificial Sequence
  Description of Artificial Sequence: Synthetic oligonucleotide
  Antisense strand to SEQ ID NO: 220862
uguaacaaguuccucaaac

SEQ ID NO: 220864 - RNA, 19 nt, Artificial Sequence
  Description of Artificial Sequence: Synthetic oligonucleotide
  Sense strand starting at position 2372 of SEQ ID NO: 2844
uugugaauaugggcaagaa

SEQ ID NO: 220865 - RNA, 19 nt, Artificial Sequence
  Description of Artificial Sequence: Synthetic oligonucleotide
  Antisense strand to SEQ ID NO: 220864
uucuugcccauauucacaa

SEQ ID NO: 220866 - RNA, 19 nt, Artificial Sequence
  Description of Artificial Sequence: Synthetic oligonucleotide
  Sense strand starting at position 2437 of SEQ ID NO: 2844
uguacuuucccugaaguau

SEQ ID NO: 220867 - RNA, 19 nt, Artificial Sequence
  Description of Artificial Sequence: Synthetic oligonucleotide
  Antisense strand to SEQ ID NO: 220866
auacuucagggaaaguaca

SEQ ID NO: 220868 - RNA, 19 nt, Artificial Sequence
  Description of Artificial Sequence: Synthetic oligonucleotide
  Sense strand starting at position 2446 of SEQ ID NO: 2844
ccugaaguauacccuagau

SEQ ID NO: 220869 - RNA, 19 nt, Artificial Sequence
  Description of Artificial Sequence: Synthetic oligonucleotide
  Antisense strand to SEQ ID NO: 220868
aucuaggguauacuucagg

SEQ ID NO: 220870 - RNA, 19 nt, Artificial Sequence
  Description of Artificial Sequence: Synthetic oligonucleotide
  Sense strand starting at position 2638 of SEQ ID NO: 2844
cgagacuuugcggcagcau

SEQ ID NO: 220871 - RNA, 19 nt, Artificial Sequence
  Description of Artificial Sequence: Synthetic oligonucleotide
  Antisense strand to SEQ ID NO: 220870
augcugccgcaaagucucg

SEQ ID NO: 220872 - RNA, 19 nt, Artificial Sequence
  Description of Artificial Sequence: Synthetic oligonucleotide
  Sense strand starting at position 2850 of SEQ ID NO: 2844
cugguuucaguggaggagu

SEQ ID NO: 220873 - RNA, 19 nt, Artificial Sequence
  Description of Artificial Sequence: Synthetic oligonucleotide
  Antisense strand to SEQ ID NO: 220872
acuccuccacugaaaccag

SEQ ID NO: 220874 - RNA, 19 nt, Artificial Sequence
  Description of Artificial Sequence: Synthetic oligonucleotide
  Sense strand starting at position 2979 of SEQ ID NO: 2844
uugaaagaguuagcaaauc

SEQ ID NO: 220875 - RNA, 19 nt, Artificial Sequence
  Description of Artificial Sequence: Synthetic oligonucleotide
  Antisense strand to SEQ ID NO: 220874
gauuugcuaacucuuucaa

SEQ ID NO: 220876 - RNA, 19 nt, Artificial Sequence
  Description of Artificial Sequence: Synthetic oligonucleotide
  Sense strand starting at position 2987 of SEQ ID NO: 2844
guuagcaaaucuuugaacu

SEQ ID NO: 220877 - RNA, 19 nt, Artificial Sequence
  Description of Artificial Sequence: Synthetic oligonucleotide
  Antisense strand to SEQ ID NO: 220876
aguucaaagauuugcuaac

SEQ ID NO: 220878 - RNA, 19 nt, Artificial Sequence
  Description of Artificial Sequence: Synthetic oligonucleotide
  Sense strand starting at position 3020 of SEQ ID NO: 2844
guguacuggaagugaagau

SEQ ID NO: 220879 - RNA, 19 nt, Artificial Sequence
  Description of Artificial Sequence: Synthetic oligonucleotide
  Antisense strand to SEQ ID NO: 220878
aucuucacuuccaguacac

SEQ ID NO: 220880 - RNA, 19 nt, Artificial Sequence
  Description of Artificial Sequence: Synthetic oligonucleotide
  Sense strand starting at position 3284 of SEQ ID NO: 2844
ugguaaauaccuuggcaac

SEQ ID NO: 220881 - RNA, 19 nt, Artificial Sequence
  Description of Artificial Sequence: Synthetic oligonucleotide
  Antisense strand to SEQ ID NO: 220880
guugccaagguauuuacca

SEQ ID NO: 220882 - RNA, 19 nt, Artificial Sequence
  Description of Artificial Sequence: Synthetic oligonucleotide
  Sense strand starting at position 3285 of SEQ ID NO: 2844
gguaaauaccuuggcaacu

SEQ ID NO: 220883 - RNA, 19 nt, Artificial Sequence
  Description of Artificial Sequence: Synthetic oligonucleotide
  Antisense strand to SEQ ID NO: 220882
aguugccaagguauuuacc

SEQ ID NO: 220884 - RNA, 19 nt, Artificial Sequence
  Description of Artificial Sequence: Synthetic oligonucleotide
  Sense strand starting at position 3286 of SEQ ID NO: 2844
guaaauaccuuggcaacua

SEQ ID NO: 220885 - RNA, 19 nt, Artificial Sequence
  Description of Artificial Sequence: Synthetic oligonucleotide
  Antisense strand to SEQ ID NO: 220884
uaguugccaagguauuuac

SEQ ID NO: 220886 - RNA, 19 nt, Artificial Sequence
  Description of Artificial Sequence: Synthetic oligonucleotide
  Sense strand starting at position 3512 of SEQ ID NO: 2844
uccacuguacccuaggaau

SEQ ID NO: 220887 - RNA, 19 nt, Artificial Sequence
  Description of Artificial Sequence: Synthetic oligonucleotide
  Antisense strand to SEQ ID NO: 220886
auuccuaggguacagugga

SEQ ID NO: 220888 - RNA, 19 nt, Artificial Sequence
  Description of Artificial Sequence: Synthetic oligonucleotide
  Sense strand starting at position 3681 of SEQ ID NO: 2844
uuguaauacugaccuuaag

SEQ ID NO: 220889 - RNA, 19 nt, Artificial Sequence
  Description of Artificial Sequence: Synthetic oligonucleotide
  Antisense strand to SEQ ID NO: 220888
cuuaaggucaguauuacaa

SEQ ID NO: 220890 - RNA, 19 nt, Artificial Sequence
  Description of Artificial Sequence: Synthetic oligonucleotide
  Sense strand starting at position 3690 of SEQ ID NO: 2844
ugaccuuaagcugauguaa

SEQ ID NO: 220891 - RNA, 19 nt, Artificial Sequence
  Description of Artificial Sequence: Synthetic oligonucleotide
  Antisense strand to SEQ ID NO: 220890
uuacaucagcuuaagguca

SEQ ID NO: 220892 - RNA, 19 nt, Artificial Sequence
  Description of Artificial Sequence: Synthetic oligonucleotide
  Sense strand starting at position 3920 of SEQ ID NO: 2844
cugucagugccugugucau

SEQ ID NO: 220893 - RNA, 19 nt, Artificial Sequence
  Description of Artificial Sequence: Synthetic oligonucleotide
  Antisense strand to SEQ ID NO: 220892
augacacaggcacugacag

SEQ ID NO: 220894 - RNA, 19 nt, Artificial Sequence
  Description of Artificial Sequence: Synthetic oligonucleotide
  Sense strand starting at position 3928 of SEQ ID NO: 2844
gccugugucaugccaguca

SEQ ID NO: 220895 - RNA, 19 nt, Artificial Sequence
  Description of Artificial Sequence: Synthetic oligonucleotide
  Antisense strand to SEQ ID NO: 220894
ugacuggcaugacacaggc

SEQ ID NO: 220896 - RNA, 19 nt, Artificial Sequence
  Description of Artificial Sequence: Synthetic oligonucleotide
  Sense strand starting at position 185 of SEQ ID NO: 2845
gccuccagagcuuagagaa

SEQ ID NO: 220897 - RNA, 19 nt, Artificial Sequence
  Description of Artificial Sequence: Synthetic oligonucleotide
  Antisense strand to SEQ ID NO: 220896
uucucuaagcucuggaggc

SEQ ID NO: 220898 - RNA, 19 nt, Artificial Sequence
  Description of Artificial Sequence: Synthetic oligonucleotide
  Sense strand starting at position 290 of SEQ ID NO: 2845
gugagaucauaguccacua

SEQ ID NO: 220899 - RNA, 19 nt, Artificial Sequence
  Description of Artificial Sequence: Synthetic oligonucleotide
  Antisense strand to SEQ ID NO: 220898
uaguggacuaugaucucac

SEQ ID NO: 220900 - RNA, 19 nt, Artificial Sequence
  Description of Artificial Sequence: Synthetic oligonucleotide
  Sense strand starting at position 782 of SEQ ID NO: 2845
gagugaaacuccgugacug

SEQ ID NO: 220901 - RNA, 19 nt, Artificial Sequence
  Description of Artificial Sequence: Synthetic oligonucleotide
  Antisense strand to SEQ ID NO: 220900
cagucacggaguuucacuc

SEQ ID NO: 220902 - RNA, 19 nt, Artificial Sequence
  Description of Artificial Sequence: Synthetic oligonucleotide
  Sense strand starting at position 888 of SEQ ID NO: 2845
gcgacucguucguggucau

SEQ ID NO: 220903 - RNA, 19 nt, Artificial Sequence
  Description of Artificial Sequence: Synthetic oligonucleotide
  Antisense strand to SEQ ID NO: 220902
augaccacgaacgagucgc

SEQ ID NO: 220904 - RNA, 19 nt, Artificial Sequence
  Description of Artificial Sequence: Synthetic oligonucleotide
  Sense strand starting at position 889 of SEQ ID NO: 2845
cgacucguucguggucauu

SEQ ID NO: 220905 - RNA, 19 nt, Artificial Sequence
  Description of Artificial Sequence: Synthetic oligonucleotide
  Antisense strand to SEQ ID NO: 220904
aaugaccacgaacgagucg

SEQ ID NO: 220906 - RNA, 19 nt, Artificial Sequence
  Description of Artificial Sequence: Synthetic oligonucleotide
  Sense strand starting at position 891 of SEQ ID NO: 2845
acucguucguggucauuca

SEQ ID NO: 220907 - RNA, 19 nt, Artificial Sequence
  Description of Artificial Sequence: Synthetic oligonucleotide
  Antisense strand to SEQ ID NO: 220906
ugaaugaccacgaacgagu

SEQ ID NO: 220908 - RNA, 19 nt, Artificial Sequence
  Description of Artificial Sequence: Synthetic oligonucleotide
  Sense strand starting at position 979 of SEQ ID NO: 2845
guucucagcccgcuuugaa

SEQ ID NO: 220909 - RNA, 19 nt, Artificial Sequence
  Description of Artificial Sequence: Synthetic oligonucleotide
  Antisense strand to SEQ ID NO: 220908
uucaaagcgggcugagaac

SEQ ID NO: 220910 - RNA, 19 nt, Artificial Sequence
  Description of Artificial Sequence: Synthetic oligonucleotide
  Sense strand starting at position 1450 of SEQ ID NO: 2845
ggaaguggccaaggguaau

SEQ ID NO: 220911 - RNA, 19 nt, Artificial Sequence
  Description of Artificial Sequence: Synthetic oligonucleotide
  Antisense strand to SEQ ID NO: 220910
auuacccuuggccacuucc

SEQ ID NO: 220912 - RNA, 19 nt, Artificial Sequence
  Description of Artificial Sequence: Synthetic oligonucleotide
  Sense strand starting at position 1477 of SEQ ID NO: 2845
uuaugcacguuguacaaau

SEQ ID NO: 220913 - RNA, 19 nt, Artificial Sequence
  Description of Artificial Sequence: Synthetic oligonucleotide
  Antisense strand to SEQ ID NO: 220912
auuuguacaacgugcauaa

SEQ ID NO: 220914 - RNA, 19 nt, Artificial Sequence
  Description of Artificial Sequence: Synthetic oligonucleotide
  Sense strand starting at position 1495 of SEQ ID NO: 2845
uugaaacacgcuugcagaa

SEQ ID NO: 220915 - RNA, 19 nt, Artificial Sequence
  Description of Artificial Sequence: Synthetic oligonucleotide
  Antisense strand to SEQ ID NO: 220914
uucugcaagcguguuucaa

SEQ ID NO: 220916 - RNA, 19 nt, Artificial Sequence
  Description of Artificial Sequence: Synthetic oligonucleotide
  Sense strand starting at position 2234 of SEQ ID NO: 2845
gcuggaggguucuccagaa

SEQ ID NO: 220917 - RNA, 19 nt, Artificial Sequence
  Description of Artificial Sequence: Synthetic oligonucleotide
  Antisense strand to SEQ ID NO: 220916
uucuggagaacccuccagc

SEQ ID NO: 220918 - RNA, 19 nt, Artificial Sequence
  Description of Artificial Sequence: Synthetic oligonucleotide
  Sense strand starting at position 2892 of SEQ ID NO: 2845
augccaaucucugagcaga

SEQ ID NO: 220919 - RNA, 19 nt, Artificial Sequence
  Description of Artificial Sequence: Synthetic oligonucleotide
  Antisense strand to SEQ ID NO: 220918
ucugcucagagauuggcau

SEQ ID NO: 220920 - RNA, 19 nt, Artificial Sequence
  Description of Artificial Sequence: Synthetic oligonucleotide
  Sense strand starting at position 2894 of SEQ ID NO: 2845
gccaaucucugagcagaug

SEQ ID NO: 220921 - RNA, 19 nt, Artificial Sequence
  Description of Artificial Sequence: Synthetic oligonucleotide
  Antisense strand to SEQ ID NO: 220920
caucugcucagagauuggc

SEQ ID NO: 220922 - RNA, 19 nt, Artificial Sequence
  Description of Artificial Sequence: Synthetic oligonucleotide
  Sense strand starting at position 2993 of SEQ ID NO: 2845
gcagauggguccugguagu

SEQ ID NO: 220923 - RNA, 19 nt, Artificial Sequence
  Description of Artificial Sequence: Synthetic oligonucleotide
  Antisense strand to SEQ ID NO: 220922
acuaccaggacccaucugc

SEQ ID NO: 220924 - RNA, 19 nt, Artificial Sequence
  Description of Artificial Sequence: Synthetic oligonucleotide
  Sense strand starting at position 3031 of SEQ ID NO: 2845
cuggauuuguccuggugau

SEQ ID NO: 220925 - RNA, 19 nt, Artificial Sequence
  Description of Artificial Sequence: Synthetic oligonucleotide
  Antisense strand to SEQ ID NO: 220924
aucaccaggacaaauccag

SEQ ID NO: 220926 - RNA, 19 nt, Artificial Sequence
  Description of Artificial Sequence: Synthetic oligonucleotide
  Sense strand starting at position 3118 of SEQ ID NO: 2845
accuucuucccaggugaau

SEQ ID NO: 220927 - RNA, 19 nt, Artificial Sequence
  Description of Artificial Sequence: Synthetic oligonucleotide
  Antisense strand to SEQ ID NO: 220926
auucaccugggaagaaggu

SEQ ID NO: 220928 - RNA, 19 nt, Artificial Sequence
  Description of Artificial Sequence: Synthetic oligonucleotide
  Sense strand starting at position 3190 of SEQ ID NO: 2845
gcccuugcucugcagauga

SEQ ID NO: 220929 - RNA, 19 nt, Artificial Sequence
  Description of Artificial Sequence: Synthetic oligonucleotide
  Antisense strand to SEQ ID NO: 220928
ucaucugcagagcaagggc

SEQ ID NO: 220930 - RNA, 19 nt, Artificial Sequence
  Description of Artificial Sequence: Synthetic oligonucleotide
  Sense strand starting at position 3192 of SEQ ID NO: 2845
ccuugcucugcagaugagu

SEQ ID NO: 220931 - RNA, 19 nt, Artificial Sequence
  Description of Artificial Sequence: Synthetic oligonucleotide
  Antisense strand to SEQ ID NO: 220930
acucaucugcagagcaagg

SEQ ID NO: 220932 - RNA, 19 nt, Artificial Sequence
  Description of Artificial Sequence: Synthetic oligonucleotide
  Sense strand starting at position 3201 of SEQ ID NO: 2845
gcagaugagugugggaguu

SEQ ID NO: 220933 - RNA, 19 nt, Artificial Sequence
  Description of Artificial Sequence: Synthetic oligonucleotide
  Antisense strand to SEQ ID NO: 220932
aacucccacacucaucugc

SEQ ID NO: 220934 - RNA, 19 nt, Artificial Sequence
  Description of Artificial Sequence: Synthetic oligonucleotide
  Sense strand starting at position 3211 of SEQ ID NO: 2845
gugggaguuugcccauugu

SEQ ID NO: 220935 - RNA, 19 nt, Artificial Sequence
  Description of Artificial Sequence: Synthetic oligonucleotide
  Antisense strand to SEQ ID NO: 220934
acaaugggcaaacucccac

SEQ ID NO: 220936 - RNA, 19 nt, Artificial Sequence
  Description of Artificial Sequence: Synthetic oligonucleotide
  Sense strand starting at position 3215 of SEQ ID NO: 2845
gaguuugcccauugucaag

SEQ ID NO: 220937 - RNA, 19 nt, Artificial Sequence
  Description of Artificial Sequence: Synthetic oligonucleotide
  Antisense strand to SEQ ID NO: 220936
cuugacaaugggcaaacuc

SEQ ID NO: 220938 - RNA, 19 nt, Artificial Sequence
  Description of Artificial Sequence: Synthetic oligonucleotide
  Sense strand starting at position 3221 of SEQ ID NO: 2845
gcccauugucaaggguaac

SEQ ID NO: 220939 - RNA, 19 nt, Artificial Sequence
  Description of Artificial Sequence: Synthetic oligonucleotide
  Antisense strand to SEQ ID NO: 220938
guuacccuugacaaugggc

SEQ ID NO: 220940 - RNA, 19 nt, Artificial Sequence
  Description of Artificial Sequence: Synthetic oligonucleotide
  Sense strand starting at position 3231 of SEQ ID NO: 2845
aaggguaacuguugcaauu

SEQ ID NO: 220941 - RNA, 19 nt, Artificial Sequence
  Description of Artificial Sequence: Synthetic oligonucleotide
  Antisense strand to SEQ ID NO: 220940
aauugcaacaguuacccuu

SEQ ID NO: 220942 - RNA, 19 nt, Artificial Sequence
  Description of Artificial Sequence: Synthetic oligonucleotide
  Sense strand starting at position 3233 of SEQ ID NO: 2845
ggguaacuguugcaauuac

SEQ ID NO: 220943 - RNA, 19 nt, Artificial Sequence
  Description of Artificial Sequence: Synthetic oligonucleotide
  Antisense strand to SEQ ID NO: 220942
guaauugcaacaguuaccc

SEQ ID NO: 220944 - RNA, 19 nt, Artificial Sequence
  Description of Artificial Sequence: Synthetic oligonucleotide
  Sense strand starting at position 3956 of SEQ ID NO: 2845
ggaguuuagagacgacugu

SEQ ID NO: 220945 - RNA, 19 nt, Artificial Sequence
  Description of Artificial Sequence: Synthetic oligonucleotide
  Antisense strand to SEQ ID NO: 220944
acagucgucucuaaacucc

SEQ ID NO: 220946 - RNA, 19 nt, Artificial Sequence
  Description of Artificial Sequence: Synthetic oligonucleotide
  Sense strand starting at position 3957 of SEQ ID NO: 2845
gaguuuagagacgacugua

SEQ ID NO: 220947 - RNA, 19 nt, Artificial Sequence
  Description of Artificial Sequence: Synthetic oligonucleotide
  Antisense strand to SEQ ID NO: 220946
uacagucgucucuaaacuc

SEQ ID NO: 220948 - RNA, 19 nt, Artificial Sequence
  Description of Artificial Sequence: Synthetic oligonucleotide
  Sense strand starting at position 90 of SEQ ID NO: 2846
gaaacucaggcucgaagau

SEQ ID NO: 220949 - RNA, 19 nt, Artificial Sequence
  Description of Artificial Sequence: Synthetic oligonucleotide
  Antisense strand to SEQ ID NO: 220948
aucuucgagccugaguuuc

SEQ ID NO: 220950 - RNA, 19 nt, Artificial Sequence
  Description of Artificial Sequence: Synthetic oligonucleotide
  Sense strand starting at position 96 of SEQ ID NO: 2846
caggcucgaagaugugaaa

SEQ ID NO: 220951 - RNA, 19 nt, Artificial Sequence
  Description of Artificial Sequence: Synthetic oligonucleotide
  Antisense strand to SEQ ID NO: 220950
uuucacaucuucgagccug

SEQ ID NO: 220952 - RNA, 19 nt, Artificial Sequence
  Description of Artificial Sequence: Synthetic oligonucleotide
  Sense strand starting at position 109 of SEQ ID NO: 2846
gugaaaugaaguugagguu

SEQ ID NO: 220953 - RNA, 19 nt, Artificial Sequence
  Description of Artificial Sequence: Synthetic oligonucleotide
  Antisense strand to SEQ ID NO: 220952
aaccucaacuucauuucac

SEQ ID NO: 220954 - RNA, 19 nt, Artificial Sequence
  Description of Artificial Sequence: Synthetic oligonucleotide
  Sense strand starting at position 145 of SEQ ID NO: 2846
gauuccaaaggcuauguau

SEQ ID NO: 220955 - RNA, 19 nt, Artificial Sequence
  Description of Artificial Sequence: Synthetic oligonucleotide
  Antisense strand to SEQ ID NO: 220954
auacauagccuuuggaauc

SEQ ID NO: 220956 - RNA, 19 nt, Artificial Sequence
  Description of Artificial Sequence: Synthetic oligonucleotide
  Sense strand starting at position 339 of SEQ ID NO: 2846
ggaugacacuucuuuguuc

SEQ ID NO: 220957 - RNA, 19 nt, Artificial Sequence
  Description of Artificial Sequence: Synthetic oligonucleotide
  Antisense strand to SEQ ID NO: 220956
gaacaaagaagugucaucc

SEQ ID NO: 220958 - RNA, 19 nt, Artificial Sequence
  Description of Artificial Sequence: Synthetic oligonucleotide
  Sense strand starting at position 451 of SEQ ID NO: 2846
auugucaugccagaggcau

SEQ ID NO: 220959 - RNA, 19 nt, Artificial Sequence
  Description of Artificial Sequence: Synthetic oligonucleotide
  Antisense strand to SEQ ID NO: 220958
augccucuggcaugacaau

SEQ ID NO: 220960 - RNA, 19 nt, Artificial Sequence
  Description of Artificial Sequence: Synthetic oligonucleotide
  Sense strand starting at position 469 of SEQ ID NO: 2846
uugugacaugcuugaugga

SEQ ID NO: 220961 - RNA, 19 nt, Artificial Sequence
  Description of Artificial Sequence: Synthetic oligonucleotide
  Antisense strand to SEQ ID NO: 220960
uccaucaagcaugucacaa

SEQ ID NO: 220962 - RNA, 19 nt, Artificial Sequence
  Description of Artificial Sequence: Synthetic oligonucleotide
  Sense strand starting at position 474 of SEQ ID NO: 2846
acaugcuugauggagucau

SEQ ID NO: 220963 - RNA, 19 nt, Artificial Sequence
  Description of Artificial Sequence: Synthetic oligonucleotide
  Antisense strand to SEQ ID NO: 220962
augacuccaucaagcaugu

SEQ ID NO: 220964 - RNA, 19 nt, Artificial Sequence
  Description of Artificial Sequence: Synthetic oligonucleotide
  Sense strand starting at position 496 of SEQ ID NO: 2846
gugcuauguacacagagua

SEQ ID NO: 220965 - RNA, 19 nt, Artificial Sequence
  Description of Artificial Sequence: Synthetic oligonucleotide
  Antisense strand to SEQ ID NO: 220964
uacucuguguacauagcac

SEQ ID NO: 220966 - RNA, 19 nt, Artificial Sequence
  Description of Artificial Sequence: Synthetic oligonucleotide
  Sense strand starting at position 713 of SEQ ID NO: 2846
uaaggagccugucuuccaa

SEQ ID NO: 220967 - RNA, 19 nt, Artificial Sequence
  Description of Artificial Sequence: Synthetic oligonucleotide
  Antisense strand to SEQ ID NO: 220966
uuggaagacaggcuccuua

SEQ ID NO: 220968 - RNA, 19 nt, Artificial Sequence
  Description of Artificial Sequence: Synthetic oligonucleotide
  Sense strand starting at position 853 of SEQ ID NO: 2846
gaccaagaugucuagagcu

SEQ ID NO: 220969 - RNA, 19 nt, Artificial Sequence
  Description of Artificial Sequence: Synthetic oligonucleotide
  Antisense strand to SEQ ID NO: 220968
agcucuagacaucuugguc

SEQ ID NO: 220970 - RNA, 19 nt, Artificial Sequence
  Description of Artificial Sequence: Synthetic oligonucleotide
  Sense strand starting at position 860 of SEQ ID NO: 2846
augucuagagcuggaaacu

SEQ ID NO: 220971 - RNA, 19 nt, Artificial Sequence
  Description of Artificial Sequence: Synthetic oligonucleotide
  Antisense strand to SEQ ID NO: 220970
aguuuccagcucuagacau

SEQ ID NO: 220972 - RNA, 19 nt, Artificial Sequence
  Description of Artificial Sequence: Synthetic oligonucleotide
  Sense strand starting at position 1185 of SEQ ID NO: 2846
augaacauaugguuaagua

SEQ ID NO: 220973 - RNA, 19 nt, Artificial Sequence
  Description of Artificial Sequence: Synthetic oligonucleotide
  Antisense strand to SEQ ID NO: 220972
uacuuaaccauauguucau

SEQ ID NO: 220974 - RNA, 19 nt, Artificial Sequence
  Description of Artificial Sequence: Synthetic oligonucleotide
  Sense strand starting at position 1189 of SEQ ID NO: 2846
acauaugguuaaguacaau

SEQ ID NO: 220975 - RNA, 19 nt, Artificial Sequence
  Description of Artificial Sequence: Synthetic oligonucleotide
  Antisense strand to SEQ ID NO: 220974
auuguacuuaaccauaugu

SEQ ID NO: 220976 - RNA, 19 nt, Artificial Sequence
  Description of Artificial Sequence: Synthetic oligonucleotide
  Sense strand starting at position 1217 of SEQ ID NO: 2846
uuccauauuccagagaguc

SEQ ID NO: 220977 - RNA, 19 nt, Artificial Sequence
  Description of Artificial Sequence: Synthetic oligonucleotide
  Antisense strand to SEQ ID NO: 220976
gacucucuggaauauggaa

SEQ ID NO: 220978 - RNA, 19 nt, Artificial Sequence
  Description of Artificial Sequence: Synthetic oligonucleotide
  Sense strand starting at position 1323 of SEQ ID NO: 2846
aguccugugucuuuauuua

SEQ ID NO: 220979 - RNA, 19 nt, Artificial Sequence
  Description of Artificial Sequence: Synthetic oligonucleotide
  Antisense strand to SEQ ID NO: 220978
uaaauaaagacacaggacu

SEQ ID NO: 220980 - RNA, 19 nt, Artificial Sequence
  Description of Artificial Sequence: Synthetic oligonucleotide
  Sense strand starting at position 1398 of SEQ ID NO: 2846
aaagaaaugugauuguugu

SEQ ID NO: 220981 - RNA, 19 nt, Artificial Sequence
  Description of Artificial Sequence: Synthetic oligonucleotide
  Antisense strand to SEQ ID NO: 220980
acaacaaucacauuucuuu

SEQ ID NO: 220982 - RNA, 19 nt, Artificial Sequence
  Description of Artificial Sequence: Synthetic oligonucleotide
  Sense strand starting at position 1399 of SEQ ID NO: 2846
aagaaaugugauuguuguc

SEQ ID NO: 220983 - RNA, 19 nt, Artificial Sequence
  Description of Artificial Sequence: Synthetic oligonucleotide
  Antisense strand to SEQ ID NO: 220982
gacaacaaucacauuucuu

SEQ ID NO: 220984 - RNA, 19 nt, Artificial Sequence
  Description of Artificial Sequence: Synthetic oligonucleotide
  Sense strand starting at position 1507 of SEQ ID NO: 2846
agagaaagguuuccauggu

SEQ ID NO: 220985 - RNA, 19 nt, Artificial Sequence
  Description of Artificial Sequence: Synthetic oligonucleotide
  Antisense strand to SEQ ID NO: 220984
accauggaaaccuuucucu

SEQ ID NO: 220986 - RNA, 19 nt, Artificial Sequence
  Description of Artificial Sequence: Synthetic oligonucleotide
  Sense strand starting at position 1774 of SEQ ID NO: 2846
aagucauacuggguagaca

SEQ ID NO: 220987 - RNA, 19 nt, Artificial Sequence
  Description of Artificial Sequence: Synthetic oligonucleotide
  Antisense strand to SEQ ID NO: 220986
ugucuacccaguaugacuu

SEQ ID NO: 220988 - RNA, 19 nt, Artificial Sequence
  Description of Artificial Sequence: Synthetic oligonucleotide
  Sense strand starting at position 2170 of SEQ ID NO: 2846
gguagaugucugcaggaga

SEQ ID NO: 220989 - RNA, 19 nt, Artificial Sequence
  Description of Artificial Sequence: Synthetic oligonucleotide
  Antisense strand to SEQ ID NO: 220988
ucuccugcagacaucuacc

SEQ ID NO: 220990 - RNA, 19 nt, Artificial Sequence
  Description of Artificial Sequence: Synthetic oligonucleotide
  Sense strand starting at position 2238 of SEQ ID NO: 2846
uggaguucaguggaauucu

SEQ ID NO: 220991 - RNA, 19 nt, Artificial Sequence
  Description of Artificial Sequence: Synthetic oligonucleotide
  Antisense strand to SEQ ID NO: 220990
agaauuccacugaacucca

SEQ ID NO: 220992 - RNA, 19 nt, Artificial Sequence
  Description of Artificial Sequence: Synthetic oligonucleotide
  Sense strand starting at position 2363 of SEQ ID NO: 2846
ucaggacaucuguagucuu

SEQ ID NO: 220993 - RNA, 19 nt, Artificial Sequence
  Description of Artificial Sequence: Synthetic oligonucleotide
  Antisense strand to SEQ ID NO: 220992
aagacuacagauguccuga

SEQ ID NO: 220994 - RNA, 19 nt, Artificial Sequence
  Description of Artificial Sequence: Synthetic oligonucleotide
  Sense strand starting at position 2371 of SEQ ID NO: 2846
ucuguagucuuucuaaaga

SEQ ID NO: 220995 - RNA, 19 nt, Artificial Sequence
  Description of Artificial Sequence: Synthetic oligonucleotide
  Antisense strand to SEQ ID NO: 220994
ucuuuagaaagacuacaga

SEQ ID NO: 220996 - RNA, 19 nt, Artificial Sequence
  Description of Artificial Sequence: Synthetic oligonucleotide
  Sense strand starting at position 2496 of SEQ ID NO: 2846
ugggaaucauaugcuucuu

SEQ ID NO: 220997 - RNA, 19 nt, Artificial Sequence
  Description of Artificial Sequence: Synthetic oligonucleotide
  Antisense strand to SEQ ID NO: 220996
aagaagcauaugauuccca

SEQ ID NO: 220998 - RNA, 19 nt, Artificial Sequence
  Description of Artificial Sequence: Synthetic oligonucleotide
  Sense strand starting at position 2584 of SEQ ID NO: 2846
aagaaaucacugugagagu

SEQ ID NO: 220999 - RNA, 19 nt, Artificial Sequence
  Description of Artificial Sequence: Synthetic oligonucleotide
  Antisense strand to SEQ ID NO: 220998
acucucacagugauuucuu

SEQ ID NO: 221000 - RNA, 19 nt, Artificial Sequence
  Description of Artificial Sequence: Synthetic oligonucleotide
  Sense strand starting at position 2595 of SEQ ID NO: 2846
gugagaguauaccuuacaa

SEQ ID NO: 221001 - RNA, 19 nt, Artificial Sequence
  Description of Artificial Sequence: Synthetic oligonucleotide
  Antisense strand to SEQ ID NO: 221000
uuguaagguauacucucac

SEQ ID NO: 221002 - RNA, 19 nt, Artificial Sequence
  Description of Artificial Sequence: Synthetic oligonucleotide
  Sense strand starting at position 3122 of SEQ ID NO: 2846
uauguauuaggauggcuca

SEQ ID NO: 221003 - RNA, 19 nt, Artificial Sequence
  Description of Artificial Sequence: Synthetic oligonucleotide
  Antisense strand to SEQ ID NO: 221002
ugagccauccuaauacaua

SEQ ID NO: 221004 - RNA, 19 nt, Artificial Sequence
  Description of Artificial Sequence: Synthetic oligonucleotide
  Sense strand starting at position 3123 of SEQ ID NO: 2846
auguauuaggauggcucaa

SEQ ID NO: 221005 - RNA, 19 nt, Artificial Sequence
  Description of Artificial Sequence: Synthetic oligonucleotide
  Antisense strand to SEQ ID NO: 221004
uugagccauccuaauacau

SEQ ID NO: 221006 - RNA, 19 nt, Artificial Sequence
  Description of Artificial Sequence: Synthetic oligonucleotide
  Sense strand starting at position 3125 of SEQ ID NO: 2846
guauuaggauggcucaaga

SEQ ID NO: 221007 - RNA, 19 nt, Artificial Sequence
  Description of Artificial Sequence: Synthetic oligonucleotide
  Antisense strand to SEQ ID NO: 221006
ucuugagccauccuaauac

SEQ ID NO: 221008 - RNA, 19 nt, Artificial Sequence
  Description of Artificial Sequence: Synthetic oligonucleotide
  Sense strand starting at position 3227 of SEQ ID NO: 2846
aagcaaagguguucuggaa

SEQ ID NO: 221009 - RNA, 19 nt, Artificial Sequence
  Description of Artificial Sequence: Synthetic oligonucleotide
  Antisense strand to SEQ ID NO: 221008
uuccagaacaccuuugcuu

SEQ ID NO: 221010 - RNA, 19 nt, Artificial Sequence
  Description of Artificial Sequence: Synthetic oligonucleotide
  Sense strand starting at position 3231 of SEQ ID NO: 2846
aaagguguucuggaaguca

SEQ ID NO: 221011 - RNA, 19 nt, Artificial Sequence
  Description of Artificial Sequence: Synthetic oligonucleotide
  Antisense strand to SEQ ID NO: 221010
ugacuuccagaacaccuuu

SEQ ID NO: 221012 - RNA, 19 nt, Artificial Sequence
  Description of Artificial Sequence: Synthetic oligonucleotide
  Sense strand starting at position 3302 of SEQ ID NO: 2846
auccaauugcuaggaauuc

SEQ ID NO: 221013 - RNA, 19 nt, Artificial Sequence
  Description of Artificial Sequence: Synthetic oligonucleotide
  Antisense strand to SEQ ID NO: 221012
gaauuccuagcaauuggau

SEQ ID NO: 221014 - RNA, 19 nt, Artificial Sequence
  Description of Artificial Sequence: Synthetic oligonucleotide
  Sense strand starting at position 3361 of SEQ ID NO: 2846
ugugcaaauguuuauaaca

SEQ ID NO: 221015 - RNA, 19 nt, Artificial Sequence
  Description of Artificial Sequence: Synthetic oligonucleotide
  Antisense strand to SEQ ID NO: 221014
uguuauaaacauuugcaca

SEQ ID NO: 221016 - RNA, 19 nt, Artificial Sequence
  Description of Artificial Sequence: Synthetic oligonucleotide
  Sense strand starting at position 3381 of SEQ ID NO: 2846
cucuaucaggauugccaaa

SEQ ID NO: 221017 - RNA, 19 nt, Artificial Sequence
  Description of Artificial Sequence: Synthetic oligonucleotide
  Antisense strand to SEQ ID NO: 221016
uuuggcaauccugauagag

SEQ ID NO: 221018 - RNA, 19 nt, Artificial Sequence
  Description of Artificial Sequence: Synthetic oligonucleotide
  Sense strand starting at position 3424 of SEQ ID NO: 2846
acuguagaauggguaaaca

SEQ ID NO: 221019 - RNA, 19 nt, Artificial Sequence
  Description of Artificial Sequence: Synthetic oligonucleotide
  Antisense strand to SEQ ID NO: 221018
uguuuacccauucuacagu

SEQ ID NO: 221020 - RNA, 19 nt, Artificial Sequence
  Description of Artificial Sequence: Synthetic oligonucleotide
  Sense strand starting at position 3441 of SEQ ID NO: 2846
cagauugugguguaucuau

SEQ ID NO: 221021 - RNA, 19 nt, Artificial Sequence
  Description of Artificial Sequence: Synthetic oligonucleotide
  Antisense strand to SEQ ID NO: 221020
auagauacaccacaaucug

SEQ ID NO: 221022 - RNA, 19 nt, Artificial Sequence
  Description of Artificial Sequence: Synthetic oligonucleotide
  Sense strand starting at position 3641 of SEQ ID NO: 2846
gggagaguggcuuaauuac

SEQ ID NO: 221023 - RNA, 19 nt, Artificial Sequence
  Description of Artificial Sequence: Synthetic oligonucleotide
  Antisense strand to SEQ ID NO: 221022
guaauuaagccacucuccc

SEQ ID NO: 221024 - RNA, 19 nt, Artificial Sequence
  Description of Artificial Sequence: Synthetic oligonucleotide
  Sense strand starting at position 3691 of SEQ ID NO: 2846
ggaaauaauuuguaucuug

SEQ ID NO: 221025 - RNA, 19 nt, Artificial Sequence
  Description of Artificial Sequence: Synthetic oligonucleotide
  Antisense strand to SEQ ID NO: 221024
caagauacaaauuauuucc

SEQ ID NO: 221026 - RNA, 19 nt, Artificial Sequence
  Description of Artificial Sequence: Synthetic oligonucleotide
  Sense strand starting at position 3869 of SEQ ID NO: 2846
gggaguauuacauguggau

SEQ ID NO: 221027 - RNA, 19 nt, Artificial Sequence
  Description of Artificial Sequence: Synthetic oligonucleotide
  Antisense strand to SEQ ID NO: 221026
auccacauguaauacuccc

SEQ ID NO: 221028 - RNA, 19 nt, Artificial Sequence
  Description of Artificial Sequence: Synthetic oligonucleotide
  Sense strand starting at position 245 of SEQ ID NO: 2847
acuggagaugcuggguaua

SEQ ID NO: 221029 - RNA, 19 nt, Artificial Sequence
  Description of Artificial Sequence: Synthetic oligonucleotide
  Antisense strand to SEQ ID NO: 221028
uauacccagcaucuccagu

SEQ ID NO: 221030 - RNA, 19 nt, Artificial Sequence
  Description of Artificial Sequence: Synthetic oligonucleotide
  Sense strand starting at position 247 of SEQ ID NO: 2847
uggagaugcuggguauaag

SEQ ID NO: 221031 - RNA, 19 nt, Artificial Sequence
  Description of Artificial Sequence: Synthetic oligonucleotide
  Antisense strand to SEQ ID NO: 221030
cuuauacccagcaucucca

SEQ ID NO: 221032 - RNA, 19 nt, Artificial Sequence
  Description of Artificial Sequence: Synthetic oligonucleotide
  Sense strand starting at position 348 of SEQ ID NO: 2847
guuacaggaguuugacacu

SEQ ID NO: 221033 - RNA, 19 nt, Artificial Sequence
  Description of Artificial Sequence: Synthetic oligonucleotide
  Antisense strand to SEQ ID NO: 221032
agugucaaacuccuguaac

SEQ ID NO: 221034 - RNA, 19 nt, Artificial Sequence
  Description of Artificial Sequence: Synthetic oligonucleotide
  Sense strand starting at position 354 of SEQ ID NO: 2847
ggaguuugacacugacaau

SEQ ID NO: 221035 - RNA, 19 nt, Artificial Sequence
  Description of Artificial Sequence: Synthetic oligonucleotide
  Antisense strand to SEQ ID NO: 221034
auugucagugucaaacucc

SEQ ID NO: 221036 - RNA, 19 nt, Artificial Sequence
  Description of Artificial Sequence: Synthetic oligonucleotide
  Sense strand starting at position 390 of SEQ ID NO: 2847
cuuguuacagauuagaguu

SEQ ID NO: 221037 - RNA, 19 nt, Artificial Sequence
  Description of Artificial Sequence: Synthetic oligonucleotide
  Antisense strand to SEQ ID NO: 221036
aacucuaaucuguaacaag

SEQ ID NO: 221038 - RNA, 19 nt, Artificial Sequence
  Description of Artificial Sequence: Synthetic oligonucleotide
  Sense strand starting at position 431 of SEQ ID NO: 2847
aggguccaaucuguuaaca

SEQ ID NO: 221039 - RNA, 19 nt, Artificial Sequence
  Description of Artificial Sequence: Synthetic oligonucleotide
  Antisense strand to SEQ ID NO: 221038
uguuaacagauuggacccu

SEQ ID NO: 221040 - RNA, 19 nt, Artificial Sequence
  Description of Artificial Sequence: Synthetic oligonucleotide
  Sense strand starting at position 465 of SEQ ID NO: 2847
auagauaaguggccuuuau

SEQ ID NO: 221041 - RNA, 19 nt, Artificial Sequence
  Description of Artificial Sequence: Synthetic oligonucleotide
  Antisense strand to SEQ ID NO: 221040
auaaaggccacuuaucuau

SEQ ID NO: 221042 - RNA, 19 nt, Artificial Sequence
  Description of Artificial Sequence: Synthetic oligonucleotide
  Sense strand starting at position 535 of SEQ ID NO: 2847
uggcauaacucugccacaa

SEQ ID NO: 221043 - RNA, 19 nt, Artificial Sequence
  Description of Artificial Sequence: Synthetic oligonucleotide
  Antisense strand to SEQ ID NO: 221042
uuguggcagaguuaugcca

SEQ ID NO: 221044 - RNA, 19 nt, Artificial Sequence
  Description of Artificial Sequence: Synthetic oligonucleotide
  Sense strand starting at position 574 of SEQ ID NO: 2847
cuauacuaucuguaagggu

SEQ ID NO: 221045 - RNA, 19 nt, Artificial Sequence
  Description of Artificial Sequence: Synthetic oligonucleotide
  Antisense strand to SEQ ID NO: 221044
acccuuacagauaguauag

SEQ ID NO: 221046 - RNA, 19 nt, Artificial Sequence
  Description of Artificial Sequence: Synthetic oligonucleotide
  Sense strand starting at position 716 of SEQ ID NO: 2847
ggaauccucuccuuuagag

SEQ ID NO: 221047 - RNA, 19 nt, Artificial Sequence
  Description of Artificial Sequence: Synthetic oligonucleotide
  Antisense strand to SEQ ID NO: 221046
cucuaaaggagaggauucc

SEQ ID NO: 221048 - RNA, 19 nt, Artificial Sequence
  Description of Artificial Sequence: Synthetic oligonucleotide
  Sense strand starting at position 874 of SEQ ID NO: 2847
aggagauuaaauuguguga

SEQ ID NO: 221049 - RNA, 19 nt, Artificial Sequence
  Description of Artificial Sequence: Synthetic oligonucleotide
  Antisense strand to SEQ ID NO: 221048
ucacacaauuuaaucuccu

SEQ ID NO: 221050 - RNA, 19 nt, Artificial Sequence
  Description of Artificial Sequence: Synthetic oligonucleotide
  Sense strand starting at position 878 of SEQ ID NO: 2847
gauuaaauugugugaagga

SEQ ID NO: 221051 - RNA, 19 nt, Artificial Sequence
  Description of Artificial Sequence: Synthetic oligonucleotide
  Antisense strand to SEQ ID NO: 221050
uccuucacacaauuuaauc

SEQ ID NO: 221052 - RNA, 19 nt, Artificial Sequence
  Description of Artificial Sequence: Synthetic oligonucleotide
  Sense strand starting at position 976 of SEQ ID NO: 2847
ucucauguugcuuaccaca

SEQ ID NO: 221053 - RNA, 19 nt, Artificial Sequence
  Description of Artificial Sequence: Synthetic oligonucleotide
  Antisense strand to SEQ ID NO: 221052
ugugguaagcaacaugaga

SEQ ID NO: 221054 - RNA, 19 nt, Artificial Sequence
  Description of Artificial Sequence: Synthetic oligonucleotide
  Sense strand starting at position 1109 of SEQ ID NO: 2847
gaaggaucacuggguguua

SEQ ID NO: 221055 - RNA, 19 nt, Artificial Sequence
  Description of Artificial Sequence: Synthetic oligonucleotide
  Antisense strand to SEQ ID NO: 221054
uaacacccagugauccuuc

SEQ ID NO: 221056 - RNA, 19 nt, Artificial Sequence
  Description of Artificial Sequence: Synthetic oligonucleotide
  Sense strand starting at position 1110 of SEQ ID NO: 2847
aaggaucacuggguguuau

SEQ ID NO: 221057 - RNA, 19 nt, Artificial Sequence
  Description of Artificial Sequence: Synthetic oligonucleotide
  Antisense strand to SEQ ID NO: 221056
auaacacccagugauccuu

SEQ ID NO: 221058 - RNA, 19 nt, Artificial Sequence
  Description of Artificial Sequence: Synthetic oligonucleotide
  Sense strand starting at position 1127 of SEQ ID NO: 2847
augaauuauccacgugauu

SEQ ID NO: 221059 - RNA, 19 nt, Artificial Sequence
  Description of Artificial Sequence: Synthetic oligonucleotide
  Antisense strand to SEQ ID NO: 221058
aaucacguggauaauucau

SEQ ID NO: 221060 - RNA, 19 nt, Artificial Sequence
  Description of Artificial Sequence: Synthetic oligonucleotide
  Sense strand starting at position 1231 of SEQ ID NO: 2847
ugacauguguucuuuaaag

SEQ ID NO: 221061 - RNA, 19 nt, Artificial Sequence
  Description of Artificial Sequence: Synthetic oligonucleotide
  Antisense strand to SEQ ID NO: 221060
cuuuaaagaacacauguca

SEQ ID NO: 221062 - RNA, 19 nt, Artificial Sequence
  Description of Artificial Sequence: Synthetic oligonucleotide
  Sense strand starting at position 1233 of SEQ ID NO: 2847
acauguguucuuuaaagcu

SEQ ID NO: 221063 - RNA, 19 nt, Artificial Sequence
  Description of Artificial Sequence: Synthetic oligonucleotide
  Antisense strand to SEQ ID NO: 221062
agcuuuaaagaacacaugu

SEQ ID NO: 221064 - RNA, 19 nt, Artificial Sequence
  Description of Artificial Sequence: Synthetic oligonucleotide
  Sense strand starting at position 1248 of SEQ ID NO: 2847
agcugucacaugggaaaug

SEQ ID NO: 221065 - RNA, 19 nt, Artificial Sequence
  Description of Artificial Sequence: Synthetic oligonucleotide
  Antisense strand to SEQ ID NO: 221064
cauuucccaugugacagcu

SEQ ID NO: 221066 - RNA, 19 nt, Artificial Sequence
  Description of Artificial Sequence: Synthetic oligonucleotide
  Sense strand starting at position 1274 of SEQ ID NO: 2847
aacauauuggcagaugguu

SEQ ID NO: 221067 - RNA, 19 nt, Artificial Sequence
  Description of Artificial Sequence: Synthetic oligonucleotide
  Antisense strand to SEQ ID NO: 221066
aaccaucugccaauauguu

SEQ ID NO: 221068 - RNA, 19 nt, Artificial Sequence
  Description of Artificial Sequence: Synthetic oligonucleotide
  Sense strand starting at position 1343 of SEQ ID NO: 2847
guacauaucgauuacuagu

SEQ ID NO: 221069 - RNA, 19 nt, Artificial Sequence
  Description of Artificial Sequence: Synthetic oligonucleotide
  Antisense strand to SEQ ID NO: 221068
acuaguaaucgauauguac

SEQ ID NO: 221070 - RNA, 19 nt, Artificial Sequence
  Description of Artificial Sequence: Synthetic oligonucleotide
  Sense strand starting at position 2034 of SEQ ID NO: 2847
cccggaguuggagggaauu

SEQ ID NO: 221071 - RNA, 19 nt, Artificial Sequence
  Description of Artificial Sequence: Synthetic oligonucleotide
  Antisense strand to SEQ ID NO: 221070
aauucccuccaacuccggg

SEQ ID NO: 221072 - RNA, 19 nt, Artificial Sequence
  Description of Artificial Sequence: Synthetic oligonucleotide
  Sense strand starting at position 2044 of SEQ ID NO: 2847
gagggaauucccgggaauu

SEQ ID NO: 221073 - RNA, 19 nt, Artificial Sequence
  Description of Artificial Sequence: Synthetic oligonucleotide
  Antisense strand to SEQ ID NO: 221072
aauucccgggaauucccuc

SEQ ID NO: 221074 - RNA, 19 nt, Artificial Sequence
  Description of Artificial Sequence: Synthetic oligonucleotide
  Sense strand starting at position 2045 of SEQ ID NO: 2847
agggaauucccgggaauuc

SEQ ID NO: 221075 - RNA, 19 nt, Artificial Sequence
  Description of Artificial Sequence: Synthetic oligonucleotide
  Antisense strand to SEQ ID NO: 221074
gaauucccgggaauucccu

SEQ ID NO: 221076 - RNA, 19 nt, Artificial Sequence
  Description of Artificial Sequence: Synthetic oligonucleotide
  Sense strand starting at position 2055 of SEQ ID NO: 2847
cgggaauucgcgguaguuu

SEQ ID NO: 221077 - RNA, 19 nt, Artificial Sequence
  Description of Artificial Sequence: Synthetic oligonucleotide
  Antisense strand to SEQ ID NO: 221076
aaacuaccgcgaauucccg

SEQ ID NO: 221078 - RNA, 19 nt, Artificial Sequence
  Description of Artificial Sequence: Synthetic oligonucleotide
  Sense strand starting at position 2132 of SEQ ID NO: 2847
ggcgaaugccagcucucuu

SEQ ID NO: 221079 - RNA, 19 nt, Artificial Sequence
  Description of Artificial Sequence: Synthetic oligonucleotide
  Antisense strand to SEQ ID NO: 221078
aagagagcuggcauucgcc

SEQ ID NO: 221080 - RNA, 19 nt, Artificial Sequence
  Description of Artificial Sequence: Synthetic oligonucleotide
  Sense strand starting at position 2417 of SEQ ID NO: 2847
guaagugagguguaaauac

SEQ ID NO: 221081 - RNA, 19 nt, Artificial Sequence
  Description of Artificial Sequence: Synthetic oligonucleotide
  Antisense strand to SEQ ID NO: 221080
guauuuacaccucacuuac

SEQ ID NO: 221082 - RNA, 19 nt, Artificial Sequence
  Description of Artificial Sequence: Synthetic oligonucleotide
  Sense strand starting at position 2469 of SEQ ID NO: 2847
cauugauugccuggaucug

SEQ ID NO: 221083 - RNA, 19 nt, Artificial Sequence
  Description of Artificial Sequence: Synthetic oligonucleotide
  Antisense strand to SEQ ID NO: 221082
cagauccaggcaaucaaug

SEQ ID NO: 221084 - RNA, 19 nt, Artificial Sequence
  Description of Artificial Sequence: Synthetic oligonucleotide
  Sense strand starting at position 2953 of SEQ ID NO: 2847
acagguaccuaggcugaua

SEQ ID NO: 221085 - RNA, 19 nt, Artificial Sequence
  Description of Artificial Sequence: Synthetic oligonucleotide
  Antisense strand to SEQ ID NO: 221084
uaucagccuagguaccugu

SEQ ID NO: 221086 - RNA, 19 nt, Artificial Sequence
  Description of Artificial Sequence: Synthetic oligonucleotide
  Sense strand starting at position 2956 of SEQ ID NO: 2847
gguaccuaggcugauagau

SEQ ID NO: 221087 - RNA, 19 nt, Artificial Sequence
  Description of Artificial Sequence: Synthetic oligonucleotide
  Antisense strand to SEQ ID NO: 221086
aucuaucagccuagguacc

SEQ ID NO: 221088 - RNA, 19 nt, Artificial Sequence
  Description of Artificial Sequence: Synthetic oligonucleotide
  Sense strand starting at position 3070 of SEQ ID NO: 2847
uaguuuauuggcgagaaca

SEQ ID NO: 221089 - RNA, 19 nt, Artificial Sequence
  Description of Artificial Sequence: Synthetic oligonucleotide
  Antisense strand to SEQ ID NO: 221088
uguucucgccaauaaacua

SEQ ID NO: 221090 - RNA, 19 nt, Artificial Sequence
  Description of Artificial Sequence: Synthetic oligonucleotide
  Sense strand starting at position 3072 of SEQ ID NO: 2847
guuuauuggcgagaacaag

SEQ ID NO: 221091 - RNA, 19 nt, Artificial Sequence
  Description of Artificial Sequence: Synthetic oligonucleotide
  Antisense strand to SEQ ID NO: 221090
cuuguucucgccaauaaac

SEQ ID NO: 221092 - RNA, 19 nt, Artificial Sequence
  Description of Artificial Sequence: Synthetic oligonucleotide
  Sense strand starting at position 3269 of SEQ ID NO: 2847
cuuggauugccucaaucag

SEQ ID NO: 221093 - RNA, 19 nt, Artificial Sequence
  Description of Artificial Sequence: Synthetic oligonucleotide
  Antisense strand to SEQ ID NO: 221092
cugauugaggcaauccaag

SEQ ID NO: 221094 - RNA, 19 nt, Artificial Sequence
  Description of Artificial Sequence: Synthetic oligonucleotide
  Sense strand starting at position 3297 of SEQ ID NO: 2847
uaauguauggacugguuau

SEQ ID NO: 221095 - RNA, 19 nt, Artificial Sequence
  Description of Artificial Sequence: Synthetic oligonucleotide
  Antisense strand to SEQ ID NO: 221094
auaaccaguccauacauua

SEQ ID NO: 221096 - RNA, 19 nt, Artificial Sequence
  Description of Artificial Sequence: Synthetic oligonucleotide
  Sense strand starting at position 3566 of SEQ ID NO: 2847
aagaaucugcuguaguaaa

SEQ ID NO: 221097 - RNA, 19 nt, Artificial Sequence
  Description of Artificial Sequence: Synthetic oligonucleotide
  Antisense strand to SEQ ID NO: 221096
uuuacuacagcagauucuu

SEQ ID NO: 221098 - RNA, 19 nt, Artificial Sequence
  Description of Artificial Sequence: Synthetic oligonucleotide
  Sense strand starting at position 3636 of SEQ ID NO: 2847
acugucaaguuccugaauu

SEQ ID NO: 221099 - RNA, 19 nt, Artificial Sequence
  Description of Artificial Sequence: Synthetic oligonucleotide
  Antisense strand to SEQ ID NO: 221098
aauucaggaacuugacagu

SEQ ID NO: 221100 - RNA, 19 nt, Artificial Sequence
  Description of Artificial Sequence: Synthetic oligonucleotide
  Sense strand starting at position 3646 of SEQ ID NO: 2847
uccugaauuugucugguuu

SEQ ID NO: 221101 - RNA, 19 nt, Artificial Sequence
  Description of Artificial Sequence: Synthetic oligonucleotide
  Antisense strand to SEQ ID NO: 221100
aaaccagacaaauucagga

SEQ ID NO: 221102 - RNA, 19 nt, Artificial Sequence
  Description of Artificial Sequence: Synthetic oligonucleotide
  Sense strand starting at position 3671 of SEQ ID NO: 2847
gagccacaccggugacaau

SEQ ID NO: 221103 - RNA, 19 nt, Artificial Sequence
  Description of Artificial Sequence: Synthetic oligonucleotide
  Antisense strand to SEQ ID NO: 221102
auugucaccgguguggcuc

SEQ ID NO: 221104 - RNA, 19 nt, Artificial Sequence
  Description of Artificial Sequence: Synthetic oligonucleotide
  Sense strand starting at position 3713 of SEQ ID NO: 2847
ccauuacgucuuuaagggu

SEQ ID NO: 221105 - RNA, 19 nt, Artificial Sequence
  Description of Artificial Sequence: Synthetic oligonucleotide
  Antisense strand to SEQ ID NO: 221104
acccuuaaagacguaaugg

SEQ ID NO: 221106 - RNA, 19 nt, Artificial Sequence
  Description of Artificial Sequence: Synthetic oligonucleotide
  Sense strand starting at position 3977 of SEQ ID NO: 2847
ugugauccugcuggaacau

SEQ ID NO: 221107 - RNA, 19 nt, Artificial Sequence
  Description of Artificial Sequence: Synthetic oligonucleotide
  Antisense strand to SEQ ID NO: 221106
auguuccagcaggaucaca

SEQ ID NO: 221108 - RNA, 19 nt, Artificial Sequence
  Description of Artificial Sequence: Synthetic oligonucleotide
  Sense strand starting at position 28 of SEQ ID NO: 2848
ucaacuucccauuggagaa

SEQ ID NO: 221109 - RNA, 19 nt, Artificial Sequence
  Description of Artificial Sequence: Synthetic oligonucleotide
  Antisense strand to SEQ ID NO: 221108
uucuccaaugggaaguuga

SEQ ID NO: 221110 - RNA, 19 nt, Artificial Sequence
  Description of Artificial Sequence: Synthetic oligonucleotide
  Sense strand starting at position 83 of SEQ ID NO: 2848
agcagcaucccuuaagauu

SEQ ID NO: 221111 - RNA, 19 nt, Artificial Sequence
  Description of Artificial Sequence: Synthetic oligonucleotide
  Antisense strand to SEQ ID NO: 221110
aaucuuaagggaugcugcu

SEQ ID NO: 221112 - RNA, 19 nt, Artificial Sequence
  Description of Artificial Sequence: Synthetic oligonucleotide
  Sense strand starting at position 251 of SEQ ID NO: 2848
agaucuuaguucucacgaa

SEQ ID NO: 221113 - RNA, 19 nt, Artificial Sequence
  Description of Artificial Sequence: Synthetic oligonucleotide
  Antisense strand to SEQ ID NO: 221112
uucgugagaacuaagaucu

SEQ ID NO: 221114 - RNA, 19 nt, Artificial Sequence
  Description of Artificial Sequence: Synthetic oligonucleotide
  Sense strand starting at position 350 of SEQ ID NO: 2848
cacuuuauggcauagagua

SEQ ID NO: 221115 - RNA, 19 nt, Artificial Sequence
  Description of Artificial Sequence: Synthetic oligonucleotide
  Antisense strand to SEQ ID NO: 221114
uacucuaugccauaaagug

SEQ ID NO: 221116 - RNA, 19 nt, Artificial Sequence
  Description of Artificial Sequence: Synthetic oligonucleotide
  Sense strand starting at position 386 of SEQ ID NO: 2848
uuugaauagguaggaaagu

SEQ ID NO: 221117 - RNA, 19 nt, Artificial Sequence
  Description of Artificial Sequence: Synthetic oligonucleotide
  Antisense strand to SEQ ID NO: 221116
acuuuccuaccuauucaaa

SEQ ID NO: 221118 - RNA, 19 nt, Artificial Sequence
  Description of Artificial Sequence: Synthetic oligonucleotide
  Sense strand starting at position 397 of SEQ ID NO: 2848
aggaaagucucuucaggug

SEQ ID NO: 221119 - RNA, 19 nt, Artificial Sequence
  Description of Artificial Sequence: Synthetic oligonucleotide
  Antisense strand to SEQ ID NO: 221118
caccugaagagacuuuccu

SEQ ID NO: 221120 - RNA, 19 nt, Artificial Sequence
  Description of Artificial Sequence: Synthetic oligonucleotide
  Sense strand starting at position 412 of SEQ ID NO: 2848
ggugguugacauugauuga

SEQ ID NO: 221121 - RNA, 19 nt, Artificial Sequence
  Description of Artificial Sequence: Synthetic oligonucleotide
  Antisense strand to SEQ ID NO: 221120
ucaaucaaugucaaccacc

SEQ ID NO: 221122 - RNA, 19 nt, Artificial Sequence
  Description of Artificial Sequence: Synthetic oligonucleotide
  Sense strand starting at position 413 of SEQ ID NO: 2848
gugguugacauugauugaa

SEQ ID NO: 221123 - RNA, 19 nt, Artificial Sequence
  Description of Artificial Sequence: Synthetic oligonucleotide
  Antisense strand to SEQ ID NO: 221122
uucaaucaaugucaaccac

SEQ ID NO: 221124 - RNA, 19 nt, Artificial Sequence
  Description of Artificial Sequence: Synthetic oligonucleotide
  Sense strand starting at position 415 of SEQ ID NO: 2848
gguugacauugauugaaac

SEQ ID NO: 221125 - RNA, 19 nt, Artificial Sequence
  Description of Artificial Sequence: Synthetic oligonucleotide
  Antisense strand to SEQ ID NO: 221124
guuucaaucaaugucaacc

SEQ ID NO: 221126 - RNA, 19 nt, Artificial Sequence
  Description of Artificial Sequence: Synthetic oligonucleotide
  Sense strand starting at position 416 of SEQ ID NO: 2848
guugacauugauugaaacu

SEQ ID NO: 221127 - RNA, 19 nt, Artificial Sequence
  Description of Artificial Sequence: Synthetic oligonucleotide
  Antisense strand to SEQ ID NO: 221126
aguuucaaucaaugucaac

SEQ ID NO: 221128 - RNA, 19 nt, Artificial Sequence
  Description of Artificial Sequence: Synthetic oligonucleotide
  Sense strand starting at position 469 of SEQ ID NO: 2848
agggaaagcuggguccaaa

SEQ ID NO: 221129 - RNA, 19 nt, Artificial Sequence
  Description of Artificial Sequence: Synthetic oligonucleotide
  Antisense strand to SEQ ID NO: 221128
uuuggacccagcuuucccu

SEQ ID NO: 221130 - RNA, 19 nt, Artificial Sequence
  Description of Artificial Sequence: Synthetic oligonucleotide
  Sense strand starting at position 556 of SEQ ID NO: 2848
aggguagacaagugaaguu

SEQ ID NO: 221131 - RNA, 19 nt, Artificial Sequence
  Description of Artificial Sequence: Synthetic oligonucleotide
  Antisense strand to SEQ ID NO: 221130
aacuucacuugucuacccu

SEQ ID NO: 221132 - RNA, 19 nt, Artificial Sequence
  Description of Artificial Sequence: Synthetic oligonucleotide
  Sense strand starting at position 677 of SEQ ID NO: 2848
cuccuaguggcagauggau

SEQ ID NO: 221133 - RNA, 19 nt, Artificial Sequence
  Description of Artificial Sequence: Synthetic oligonucleotide
  Antisense strand to SEQ ID NO: 221132
auccaucugccacuaggag

SEQ ID NO: 221134 - RNA, 19 nt, Artificial Sequence
  Description of Artificial Sequence: Synthetic oligonucleotide
  Sense strand starting at position 758 of SEQ ID NO: 2848
agggaaugguggcuggaau

SEQ ID NO: 221135 - RNA, 19 nt, Artificial Sequence
  Description of Artificial Sequence: Synthetic oligonucleotide
  Antisense strand to SEQ ID NO: 221134
auuccagccaccauucccu

SEQ ID NO: 221136 - RNA, 19 nt, Artificial Sequence
  Description of Artificial Sequence: Synthetic oligonucleotide
  Sense strand starting at position 817 of SEQ ID NO: 2848
ccaagaaaucugugcuaug

SEQ ID NO: 221137 - RNA, 19 nt, Artificial Sequence
  Description of Artificial Sequence: Synthetic oligonucleotide
  Antisense strand to SEQ ID NO: 221136
cauagcacagauuucuugg

SEQ ID NO: 221138 - RNA, 19 nt, Artificial Sequence
  Description of Artificial Sequence: Synthetic oligonucleotide
  Sense strand starting at position 822 of SEQ ID NO: 2848
aaaucugugcuauggaaag

SEQ ID NO: 221139 - RNA, 19 nt, Artificial Sequence
  Description of Artificial Sequence: Synthetic oligonucleotide
  Antisense strand to SEQ ID NO: 221138
cuuuccauagcacagauuu

SEQ ID NO: 221140 - RNA, 19 nt, Artificial Sequence
  Description of Artificial Sequence: Synthetic oligonucleotide
  Sense strand starting at position 872 of SEQ ID NO: 2848
uggacuuagagcuggcaga

SEQ ID NO: 221141 - RNA, 19 nt, Artificial Sequence
  Description of Artificial Sequence: Synthetic oligonucleotide
  Antisense strand to SEQ ID NO: 221140
ucugccagcucuaagucca

SEQ ID NO: 221142 - RNA, 19 nt, Artificial Sequence
  Description of Artificial Sequence: Synthetic oligonucleotide
  Sense strand starting at position 873 of SEQ ID NO: 2848
ggacuuagagcuggcagaa

SEQ ID NO: 221143 - RNA, 19 nt, Artificial Sequence
  Description of Artificial Sequence: Synthetic oligonucleotide
  Antisense strand to SEQ ID NO: 221142
uucugccagcucuaagucc

SEQ ID NO: 221144 - RNA, 19 nt, Artificial Sequence
  Description of Artificial Sequence: Synthetic oligonucleotide
  Sense strand starting at position 1037 of SEQ ID NO: 2848
gcaggauugggaugggacu

SEQ ID NO: 221145 - RNA, 19 nt, Artificial Sequence
  Description of Artificial Sequence: Synthetic oligonucleotide
  Antisense strand to SEQ ID NO: 221144
agucccaucccaauccugc

SEQ ID NO: 221146 - RNA, 19 nt, Artificial Sequence
  Description of Artificial Sequence: Synthetic oligonucleotide
  Sense strand starting at position 1068 of SEQ ID NO: 2848
ucaugagaucucuaugcga

SEQ ID NO: 221147 - RNA, 19 nt, Artificial Sequence
  Description of Artificial Sequence: Synthetic oligonucleotide
  Antisense strand to SEQ ID NO: 221146
ucgcauagagaucucauga

SEQ ID NO: 221148 - RNA, 19 nt, Artificial Sequence
  Description of Artificial Sequence: Synthetic oligonucleotide
  Sense strand starting at position 1070 of SEQ ID NO: 2848
augagaucucuaugcgaua

SEQ ID NO: 221149 - RNA, 19 nt, Artificial Sequence
  Description of Artificial Sequence: Synthetic oligonucleotide
  Antisense strand to SEQ ID NO: 221148
uaucgcauagagaucucau

SEQ ID NO: 221150 - RNA, 19 nt, Artificial Sequence
  Description of Artificial Sequence: Synthetic oligonucleotide
  Sense strand starting at position 1075 of SEQ ID NO: 2848
aucucuaugcgauaccuca

SEQ ID NO: 221151 - RNA, 19 nt, Artificial Sequence
  Description of Artificial Sequence: Synthetic oligonucleotide
  Antisense strand to SEQ ID NO: 221150
ugagguaucgcauagagau

SEQ ID NO: 221152 - RNA, 19 nt, Artificial Sequence
  Description of Artificial Sequence: Synthetic oligonucleotide
  Sense strand starting at position 1256 of SEQ ID NO: 2848
gggcaaguguauuugguua

SEQ ID NO: 221153 - RNA, 19 nt, Artificial Sequence
  Description of Artificial Sequence: Synthetic oligonucleotide
  Antisense strand to SEQ ID NO: 221152
uaaccaaauacacuugccc

SEQ ID NO: 221154 - RNA, 19 nt, Artificial Sequence
  Description of Artificial Sequence: Synthetic oligonucleotide
  Sense strand starting at position 1260 of SEQ ID NO: 2848
aaguguauuugguuaucuu

SEQ ID NO: 221155 - RNA, 19 nt, Artificial Sequence
  Description of Artificial Sequence: Synthetic oligonucleotide
  Antisense strand to SEQ ID NO: 221154
aagauaaccaaauacacuu

SEQ ID NO: 221156 - RNA, 19 nt, Artificial Sequence
  Description of Artificial Sequence: Synthetic oligonucleotide
  Sense strand starting at position 1405 of SEQ ID NO: 2848
cuaagaagcugggugauca

SEQ ID NO: 221157 - RNA, 19 nt, Artificial Sequence
  Description of Artificial Sequence: Synthetic oligonucleotide
  Antisense strand to SEQ ID NO: 221156
ugaucacccagcuucuuag

SEQ ID NO: 221158 - RNA, 19 nt, Artificial Sequence
  Description of Artificial Sequence: Synthetic oligonucleotide
  Sense strand starting at position 1406 of SEQ ID NO: 2848
uaagaagcugggugaucaa

SEQ ID NO: 221159 - RNA, 19 nt, Artificial Sequence
  Description of Artificial Sequence: Synthetic oligonucleotide
  Antisense strand to SEQ ID NO: 221158
uugaucacccagcuucuua

SEQ ID NO: 221160 - RNA, 19 nt, Artificial Sequence
  Description of Artificial Sequence: Synthetic oligonucleotide
  Sense strand starting at position 1430 of SEQ ID NO: 2848
gucacuuauucuuuaaagg

SEQ ID NO: 221161 - RNA, 19 nt, Artificial Sequence
  Description of Artificial Sequence: Synthetic oligonucleotide
  Antisense strand to SEQ ID NO: 221160
ccuuuaaagaauaagugac

SEQ ID NO: 221162 - RNA, 19 nt, Artificial Sequence
  Description of Artificial Sequence: Synthetic oligonucleotide
  Sense strand starting at position 1483 of SEQ ID NO: 2848
aggauuagguaauuaaugu

SEQ ID NO: 221163 - RNA, 19 nt, Artificial Sequence
  Description of Artificial Sequence: Synthetic oligonucleotide
  Antisense strand to SEQ ID NO: 221162
acauuaauuaccuaauccu

SEQ ID NO: 221164 - RNA, 19 nt, Artificial Sequence
  Description of Artificial Sequence: Synthetic oligonucleotide
  Sense strand starting at position 1580 of SEQ ID NO: 2848
ucuuuaaagguccauagca

SEQ ID NO: 221165 - RNA, 19 nt, Artificial Sequence
  Description of Artificial Sequence: Synthetic oligonucleotide
  Antisense strand to SEQ ID NO: 221164
ugcuauggaccuuuaaaga

SEQ ID NO: 221166 - RNA, 19 nt, Artificial Sequence
  Description of Artificial Sequence: Synthetic oligonucleotide
  Sense strand starting at position 1582 of SEQ ID NO: 2848
uuuaaagguccauagcaga

SEQ ID NO: 221167 - RNA, 19 nt, Artificial Sequence
  Description of Artificial Sequence: Synthetic oligonucleotide
  Antisense strand to SEQ ID NO: 221166
ucugcuauggaccuuuaaa

SEQ ID NO: 221168 - RNA, 19 nt, Artificial Sequence
  Description of Artificial Sequence: Synthetic oligonucleotide
  Sense strand starting at position 1717 of SEQ ID NO: 2848
ccagcaucugaaggaauga

SEQ ID NO: 221169 - RNA, 19 nt, Artificial Sequence
  Description of Artificial Sequence: Synthetic oligonucleotide
  Antisense strand to SEQ ID NO: 221168
ucauuccuucagaugcugg

SEQ ID NO: 221170 - RNA, 19 nt, Artificial Sequence
  Description of Artificial Sequence: Synthetic oligonucleotide
  Sense strand starting at position 2428 of SEQ ID NO: 2848
ugaguuaugcaccacuucu

SEQ ID NO: 221171 - RNA, 19 nt, Artificial Sequence
  Description of Artificial Sequence: Synthetic oligonucleotide
  Antisense strand to SEQ ID NO: 221170
agaaguggugcauaacuca

SEQ ID NO: 221172 - RNA, 19 nt, Artificial Sequence
  Description of Artificial Sequence: Synthetic oligonucleotide
  Sense strand starting at position 2441 of SEQ ID NO: 2848
acuucuuaaggaugaagua

SEQ ID NO: 221173 - RNA, 19 nt, Artificial Sequence
  Description of Artificial Sequence: Synthetic oligonucleotide
  Antisense strand to SEQ ID NO: 221172
uacuucauccuuaagaagu

SEQ ID NO: 221174 - RNA, 19 nt, Artificial Sequence
  Description of Artificial Sequence: Synthetic oligonucleotide
  Sense strand starting at position 2568 of SEQ ID NO: 2848
cucucaaccugggcuuaaa

SEQ ID NO: 221175 - RNA, 19 nt, Artificial Sequence
  Description of Artificial Sequence: Synthetic oligonucleotide
  Antisense strand to SEQ ID NO: 221174
uuuaagcccagguugagag

SEQ ID NO: 221176 - RNA, 19 nt, Artificial Sequence
  Description of Artificial Sequence: Synthetic oligonucleotide
  Sense strand starting at position 2644 of SEQ ID NO: 2848
ccacguuuccaugagaaag

SEQ ID NO: 221177 - RNA, 19 nt, Artificial Sequence
  Description of Artificial Sequence: Synthetic oligonucleotide
  Antisense strand to SEQ ID NO: 221176
cuuucucauggaaacgugg

SEQ ID NO: 221178 - RNA, 19 nt, Artificial Sequence
  Description of Artificial Sequence: Synthetic oligonucleotide
  Sense strand starting at position 2799 of SEQ ID NO: 2848
agagauccauaccuaaguu

SEQ ID NO: 221179 - RNA, 19 nt, Artificial Sequence
  Description of Artificial Sequence: Synthetic oligonucleotide
  Antisense strand to SEQ ID NO: 221178
aacuuagguauggaucucu

SEQ ID NO: 221180 - RNA, 19 nt, Artificial Sequence
  Description of Artificial Sequence: Synthetic oligonucleotide
  Sense strand starting at position 3039 of SEQ ID NO: 2848
uugaauugcuuguuaaagg

SEQ ID NO: 221181 - RNA, 19 nt, Artificial Sequence
  Description of Artificial Sequence: Synthetic oligonucleotide
  Antisense strand to SEQ ID NO: 221180
ccuuuaacaagcaauucaa

SEQ ID NO: 221182 - RNA, 19 nt, Artificial Sequence
  Description of Artificial Sequence: Synthetic oligonucleotide
  Sense strand starting at position 3292 of SEQ ID NO: 2848
gguguacgcaaagagaauu

SEQ ID NO: 221183 - RNA, 19 nt, Artificial Sequence
  Description of Artificial Sequence: Synthetic oligonucleotide
  Antisense strand to SEQ ID NO: 221182
aauucucuuugcguacacc

SEQ ID NO: 221184 - RNA, 19 nt, Artificial Sequence
  Description of Artificial Sequence: Synthetic oligonucleotide
  Sense strand starting at position 3302 of SEQ ID NO: 2848
aagagaauugugggucugu

SEQ ID NO: 221185 - RNA, 19 nt, Artificial Sequence
  Description of Artificial Sequence: Synthetic oligonucleotide
  Antisense strand to SEQ ID NO: 221184
acagacccacaauucucuu

SEQ ID NO: 221186 - RNA, 19 nt, Artificial Sequence
  Description of Artificial Sequence: Synthetic oligonucleotide
  Sense strand starting at position 3303 of SEQ ID NO: 2848
agagaauugugggucugug

SEQ ID NO: 221187 - RNA, 19 nt, Artificial Sequence
  Description of Artificial Sequence: Synthetic oligonucleotide
  Antisense strand to SEQ ID NO: 221186
cacagacccacaauucucu

SEQ ID NO: 221188 - RNA, 19 nt, Artificial Sequence
  Description of Artificial Sequence: Synthetic oligonucleotide
  Sense strand starting at position 162 of SEQ ID NO: 2849
acagacuuguuagcgaaau

SEQ ID NO: 221189 - RNA, 19 nt, Artificial Sequence
  Description of Artificial Sequence: Synthetic oligonucleotide
  Antisense strand to SEQ ID NO: 221188
auuucgcuaacaagucugu

SEQ ID NO: 221190 - RNA, 19 nt, Artificial Sequence
  Description of Artificial Sequence: Synthetic oligonucleotide
  Sense strand starting at position 295 of SEQ ID NO: 2849
agcugaacggcucaacaau

SEQ ID NO: 221191 - RNA, 19 nt, Artificial Sequence
  Description of Artificial Sequence: Synthetic oligonucleotide
  Antisense strand to SEQ ID NO: 221190
auuguugagccguucagcu

SEQ ID NO: 221192 - RNA, 19 nt, Artificial Sequence
  Description of Artificial Sequence: Synthetic oligonucleotide
  Sense strand starting at position 313 of SEQ ID NO: 2849
ugauacuacugagcugaga

SEQ ID NO: 221193 - RNA, 19 nt, Artificial Sequence
  Description of Artificial Sequence: Synthetic oligonucleotide
  Antisense strand to SEQ ID NO: 221192
ucucagcucaguaguauca

SEQ ID NO: 221194 - RNA, 19 nt, Artificial Sequence
  Description of Artificial Sequence: Synthetic oligonucleotide
  Sense strand starting at position 364 of SEQ ID NO: 2849
uugcuucuucccuaguaga

SEQ ID NO: 221195 - RNA, 19 nt, Artificial Sequence
  Description of Artificial Sequence: Synthetic oligonucleotide
  Antisense strand to SEQ ID NO: 221194
ucuacuagggaagaagcaa

SEQ ID NO: 221196 - RNA, 19 nt, Artificial Sequence
  Description of Artificial Sequence: Synthetic oligonucleotide
  Sense strand starting at position 391 of SEQ ID NO: 2849
gcuggugauaaccaguaaa

SEQ ID NO: 221197 - RNA, 19 nt, Artificial Sequence
  Description of Artificial Sequence: Synthetic oligonucleotide
  Antisense strand to SEQ ID NO: 221196
uuuacugguuaucaccagc

SEQ ID NO: 221198 - RNA, 19 nt, Artificial Sequence
  Description of Artificial Sequence: Synthetic oligonucleotide
  Sense strand starting at position 2256 of SEQ ID NO: 2849
aacggagguccuuauguuu

SEQ ID NO: 221199 - RNA, 19 nt, Artificial Sequence
  Description of Artificial Sequence: Synthetic oligonucleotide
  Antisense strand to SEQ ID NO: 221198
aaacauaaggaccuccguu

SEQ ID NO: 221200 - RNA, 19 nt, Artificial Sequence
  Description of Artificial Sequence: Synthetic oligonucleotide
  Sense strand starting at position 2314 of SEQ ID NO: 2849
gaaguugcaucucuggaca

SEQ ID NO: 221201 - RNA, 19 nt, Artificial Sequence
  Description of Artificial Sequence: Synthetic oligonucleotide
  Antisense strand to SEQ ID NO: 221200
uguccagagaugcaacuuc

SEQ ID NO: 221202 - RNA, 19 nt, Artificial Sequence
  Description of Artificial Sequence: Synthetic oligonucleotide
  Sense strand starting at position 2317 of SEQ ID NO: 2849
guugcaucucuggacaagu

SEQ ID NO: 221203 - RNA, 19 nt, Artificial Sequence
  Description of Artificial Sequence: Synthetic oligonucleotide
  Antisense strand to SEQ ID NO: 221202
acuuguccagagaugcaac

SEQ ID NO: 221204 - RNA, 19 nt, Artificial Sequence
  Description of Artificial Sequence: Synthetic oligonucleotide
  Sense strand starting at position 2319 of SEQ ID NO: 2849
ugcaucucuggacaaguaa

SEQ ID NO: 221205 - RNA, 19 nt, Artificial Sequence
  Description of Artificial Sequence: Synthetic oligonucleotide
  Antisense strand to SEQ ID NO: 221204
uuacuuguccagagaugca

SEQ ID NO: 221206 - RNA, 19 nt, Artificial Sequence
  Description of Artificial Sequence: Synthetic oligonucleotide
  Sense strand starting at position 2400 of SEQ ID NO: 2849
cggagauggucccugauga

SEQ ID NO: 221207 - RNA, 19 nt, Artificial Sequence
  Description of Artificial Sequence: Synthetic oligonucleotide
  Antisense strand to SEQ ID NO: 221206
ucaucagggaccaucuccg

SEQ ID NO: 221208 - RNA, 19 nt, Artificial Sequence
  Description of Artificial Sequence: Synthetic oligonucleotide
  Sense strand starting at position 2401 of SEQ ID NO: 2849
ggagauggucccugaugag

SEQ ID NO: 221209 - RNA, 19 nt, Artificial Sequence
  Description of Artificial Sequence: Synthetic oligonucleotide
  Antisense strand to SEQ ID NO: 221208
cucaucagggaccaucucc

SEQ ID NO: 221210 - RNA, 19 nt, Artificial Sequence
  Description of Artificial Sequence: Synthetic oligonucleotide
  Sense strand starting at position 2438 of SEQ ID NO: 2849
cuggacuggucucccgaaa

SEQ ID NO: 221211 - RNA, 19 nt, Artificial Sequence
  Description of Artificial Sequence: Synthetic oligonucleotide
  Antisense strand to SEQ ID NO: 221210
uuucgggagaccaguccag

SEQ ID NO: 221212 - RNA, 19 nt, Artificial Sequence
  Description of Artificial Sequence: Synthetic oligonucleotide
  Sense strand starting at position 2515 of SEQ ID NO: 2849
cguagugucaggccuguau

SEQ ID NO: 221213 - RNA, 19 nt, Artificial Sequence
  Description of Artificial Sequence: Synthetic oligonucleotide
  Antisense strand to SEQ ID NO: 221212
auacaggccugacacuacg

SEQ ID NO: 221214 - RNA, 19 nt, Artificial Sequence
  Description of Artificial Sequence: Synthetic oligonucleotide
  Sense strand starting at position 2526 of SEQ ID NO: 2849
gccuguauugcacauuuau

SEQ ID NO: 221215 - RNA, 19 nt, Artificial Sequence
  Description of Artificial Sequence: Synthetic oligonucleotide
  Antisense strand to SEQ ID NO: 221214
auaaaugugcaauacaggc

SEQ ID NO: 221216 - RNA, 19 nt, Artificial Sequence
  Description of Artificial Sequence: Synthetic oligonucleotide
  Sense strand starting at position 2538 of SEQ ID NO: 2849
cauuuaugucuguggugca

SEQ ID NO: 221217 - RNA, 19 nt, Artificial Sequence
  Description of Artificial Sequence: Synthetic oligonucleotide
  Antisense strand to SEQ ID NO: 221216
ugcaccacagacauaaaug

SEQ ID NO: 221218 - RNA, 19 nt, Artificial Sequence
  Description of Artificial Sequence: Synthetic oligonucleotide
  Sense strand starting at position 2588 of SEQ ID NO: 2849
ggugucuuauuugucuuga

SEQ ID NO: 221219 - RNA, 19 nt, Artificial Sequence
  Description of Artificial Sequence: Synthetic oligonucleotide
  Antisense strand to SEQ ID NO: 221218
ucaagacaaauaagacacc

SEQ ID NO: 221220 - RNA, 19 nt, Artificial Sequence
  Description of Artificial Sequence: Synthetic oligonucleotide
  Sense strand starting at position 2589 of SEQ ID NO: 2849
gugucuuauuugucuugau

SEQ ID NO: 221221 - RNA, 19 nt, Artificial Sequence
  Description of Artificial Sequence: Synthetic oligonucleotide
  Antisense strand to SEQ ID NO: 221220
aucaagacaaauaagacac

SEQ ID NO: 221222 - RNA, 19 nt, Artificial Sequence
  Description of Artificial Sequence: Synthetic oligonucleotide
  Sense strand starting at position 2590 of SEQ ID NO: 2849
ugucuuauuugucuugauu

SEQ ID NO: 221223 - RNA, 19 nt, Artificial Sequence
  Description of Artificial Sequence: Synthetic oligonucleotide
  Antisense strand to SEQ ID NO: 221222
aaucaagacaaauaagaca

SEQ ID NO: 221224 - RNA, 19 nt, Artificial Sequence
  Description of Artificial Sequence: Synthetic oligonucleotide
  Sense strand starting at position 2624 of SEQ ID NO: 2849
ggacgaagugcucagcaaa

SEQ ID NO: 221225 - RNA, 19 nt, Artificial Sequence
  Description of Artificial Sequence: Synthetic oligonucleotide
  Antisense strand to SEQ ID NO: 221224
uuugcugagcacuucgucc

SEQ ID NO: 221226 - RNA, 19 nt, Artificial Sequence
  Description of Artificial Sequence: Synthetic oligonucleotide
  Sense strand starting at position 2627 of SEQ ID NO: 2849
cgaagugcucagcaaauau

SEQ ID NO: 221227 - RNA, 19 nt, Artificial Sequence
  Description of Artificial Sequence: Synthetic oligonucleotide
  Antisense strand to SEQ ID NO: 221226
auauuugcugagcacuucg

SEQ ID NO: 221228 - RNA, 19 nt, Artificial Sequence
  Description of Artificial Sequence: Synthetic oligonucleotide
  Sense strand starting at position 2649 of SEQ ID NO: 2849
uuaaaugaauggcuguuua

SEQ ID NO: 221229 - RNA, 19 nt, Artificial Sequence
  Description of Artificial Sequence: Synthetic oligonucleotide
  Antisense strand to SEQ ID NO: 221228
uaaacagccauucauuuaa

SEQ ID NO: 221230 - RNA, 19 nt, Artificial Sequence
  Description of Artificial Sequence: Synthetic oligonucleotide
  Sense strand starting at position 2653 of SEQ ID NO: 2849
augaauggcuguuuauuga

SEQ ID NO: 221231 - RNA, 19 nt, Artificial Sequence
  Description of Artificial Sequence: Synthetic oligonucleotide
  Antisense strand to SEQ ID NO: 221230
ucaauaaacagccauucau

SEQ ID NO: 221232 - RNA, 19 nt, Artificial Sequence
  Description of Artificial Sequence: Synthetic oligonucleotide
  Sense strand starting at position 2694 of SEQ ID NO: 2849
uguucuagaccuuggcaga

SEQ ID NO: 221233 - RNA, 19 nt, Artificial Sequence
  Description of Artificial Sequence: Synthetic oligonucleotide
  Antisense strand to SEQ ID NO: 221232
ucugccaaggucuagaaca

SEQ ID NO: 221234 - RNA, 19 nt, Artificial Sequence
  Description of Artificial Sequence: Synthetic oligonucleotide
  Sense strand starting at position 2730 of SEQ ID NO: 2849
ggugaaucccugcaaucuu

SEQ ID NO: 221235 - RNA, 19 nt, Artificial Sequence
  Description of Artificial Sequence: Synthetic oligonucleotide
  Antisense strand to SEQ ID NO: 221234
aagauugcagggauucacc

SEQ ID NO: 221236 - RNA, 19 nt, Artificial Sequence
  Description of Artificial Sequence: Synthetic oligonucleotide
  Sense strand starting at position 2737 of SEQ ID NO: 2849
cccugcaaucuuggaacuu

SEQ ID NO: 221237 - RNA, 19 nt, Artificial Sequence
  Description of Artificial Sequence: Synthetic oligonucleotide
  Antisense strand to SEQ ID NO: 221236
aaguuccaagauugcaggg

SEQ ID NO: 221238 - RNA, 19 nt, Artificial Sequence
  Description of Artificial Sequence: Synthetic oligonucleotide
  Sense strand starting at position 2807 of SEQ ID NO: 2849
ggcuuagagaguuggaagu

SEQ ID NO: 221239 - RNA, 19 nt, Artificial Sequence
  Description of Artificial Sequence: Synthetic oligonucleotide
  Antisense strand to SEQ ID NO: 221238
acuuccaacucucuaagcc

SEQ ID NO: 221240 - RNA, 19 nt, Artificial Sequence
  Description of Artificial Sequence: Synthetic oligonucleotide
  Sense strand starting at position 2848 of SEQ ID NO: 2849
gggaguauugagggaaggu

SEQ ID NO: 221241 - RNA, 19 nt, Artificial Sequence
  Description of Artificial Sequence: Synthetic oligonucleotide
  Antisense strand to SEQ ID NO: 221240
accuucccucaauacuccc

SEQ ID NO: 221242 - RNA, 19 nt, Artificial Sequence
  Description of Artificial Sequence: Synthetic oligonucleotide
  Sense strand starting at position 2857 of SEQ ID NO: 2849
gagggaaggugacauuuga

SEQ ID NO: 221243 - RNA, 19 nt, Artificial Sequence
  Description of Artificial Sequence: Synthetic oligonucleotide
  Antisense strand to SEQ ID NO: 221242
ucaaaugucaccuucccuc

SEQ ID NO: 221244 - RNA, 19 nt, Artificial Sequence
  Description of Artificial Sequence: Synthetic oligonucleotide
  Sense strand starting at position 2864 of SEQ ID NO: 2849
ggugacauuugagaaaguu

SEQ ID NO: 221245 - RNA, 19 nt, Artificial Sequence
  Description of Artificial Sequence: Synthetic oligonucleotide
  Antisense strand to SEQ ID NO: 221244
aacuuucucaaaugucacc

SEQ ID NO: 221246 - RNA, 19 nt, Artificial Sequence
  Description of Artificial Sequence: Synthetic oligonucleotide
  Sense strand starting at position 3005 of SEQ ID NO: 2849
gcagaaguuggccaucaca

SEQ ID NO: 221247 - RNA, 19 nt, Artificial Sequence
  Description of Artificial Sequence: Synthetic oligonucleotide
  Antisense strand to SEQ ID NO: 221246
ugugauggccaacuucugc

SEQ ID NO: 221248 - RNA, 19 nt, Artificial Sequence
  Description of Artificial Sequence: Synthetic oligonucleotide
  Sense strand starting at position 3124 of SEQ ID NO: 2849
gccuaaucuccaugggaac

SEQ ID NO: 221249 - RNA, 19 nt, Artificial Sequence
  Description of Artificial Sequence: Synthetic oligonucleotide
  Antisense strand to SEQ ID NO: 221248
guucccauggagauuaggc

SEQ ID NO: 221250 - RNA, 19 nt, Artificial Sequence
  Description of Artificial Sequence: Synthetic oligonucleotide
  Sense strand starting at position 3125 of SEQ ID NO: 2849
ccuaaucuccaugggaacu

SEQ ID NO: 221251 - RNA, 19 nt, Artificial Sequence
  Description of Artificial Sequence: Synthetic oligonucleotide
  Antisense strand to SEQ ID NO: 221250
aguucccauggagauuagg

SEQ ID NO: 221252 - RNA, 19 nt, Artificial Sequence
  Description of Artificial Sequence: Synthetic oligonucleotide
  Sense strand starting at position 3176 of SEQ ID NO: 2849
uaggaucgauguuuaagaa

SEQ ID NO: 221253 - RNA, 19 nt, Artificial Sequence
  Description of Artificial Sequence: Synthetic oligonucleotide
  Antisense strand to SEQ ID NO: 221252
uucuuaaacaucgauccua

SEQ ID NO: 221254 - RNA, 19 nt, Artificial Sequence
  Description of Artificial Sequence: Synthetic oligonucleotide
  Sense strand starting at position 3199 of SEQ ID NO: 2849
aaggaagacuucucuggca

SEQ ID NO: 221255 - RNA, 19 nt, Artificial Sequence
  Description of Artificial Sequence: Synthetic oligonucleotide
  Antisense strand to SEQ ID NO: 221254
ugccagagaagucuuccuu

SEQ ID NO: 221256 - RNA, 19 nt, Artificial Sequence
  Description of Artificial Sequence: Synthetic oligonucleotide
  Sense strand starting at position 3201 of SEQ ID NO: 2849
ggaagacuucucuggcagu

SEQ ID NO: 221257 - RNA, 19 nt, Artificial Sequence
  Description of Artificial Sequence: Synthetic oligonucleotide
  Antisense strand to SEQ ID NO: 221256
acugccagagaagucuucc

SEQ ID NO: 221258 - RNA, 19 nt, Artificial Sequence
  Description of Artificial Sequence: Synthetic oligonucleotide
  Sense strand starting at position 3552 of SEQ ID NO: 2849
aguacacugaaguguaaga

SEQ ID NO: 221259 - RNA, 19 nt, Artificial Sequence
  Description of Artificial Sequence: Synthetic oligonucleotide
  Antisense strand to SEQ ID NO: 221258
ucuuacacuucaguguacu

SEQ ID NO: 221260 - RNA, 19 nt, Artificial Sequence
  Description of Artificial Sequence: Synthetic oligonucleotide
  Sense strand starting at position 3563 of SEQ ID NO: 2849
guguaagaaaugcagguuu

SEQ ID NO: 221261 - RNA, 19 nt, Artificial Sequence
  Description of Artificial Sequence: Synthetic oligonucleotide
  Antisense strand to SEQ ID NO: 221260
aaaccugcauuucuuacac

SEQ ID NO: 221262 - RNA, 19 nt, Artificial Sequence
  Description of Artificial Sequence: Synthetic oligonucleotide
  Sense strand starting at position 3684 of SEQ ID NO: 2849
gcuugugugggccagauuu

SEQ ID NO: 221263 - RNA, 19 nt, Artificial Sequence
  Description of Artificial Sequence: Synthetic oligonucleotide
  Antisense strand to SEQ ID NO: 221262
aaaucuggcccacacaagc

SEQ ID NO: 221264 - RNA, 19 nt, Artificial Sequence
  Description of Artificial Sequence: Synthetic oligonucleotide
  Sense strand starting at position 3740 of SEQ ID NO: 2849
uaggguauuguugagauua

SEQ ID NO: 221265 - RNA, 19 nt, Artificial Sequence
  Description of Artificial Sequence: Synthetic oligonucleotide
  Antisense strand to SEQ ID NO: 221264
uaaucucaacaauacccua

SEQ ID NO: 221266 - RNA, 19 nt, Artificial Sequence
  Description of Artificial Sequence: Synthetic oligonucleotide
  Sense strand starting at position 3748 of SEQ ID NO: 2849
uguugagauuagguacuuu

SEQ ID NO: 221267 - RNA, 19 nt, Artificial Sequence
  Description of Artificial Sequence: Synthetic oligonucleotide
  Antisense strand to SEQ ID NO: 221266
aaaguaccuaaucucaaca

SEQ ID NO: 221268 - RNA, 19 nt, Artificial Sequence
  Description of Artificial Sequence: Synthetic oligonucleotide
  Sense strand starting at position 123 of SEQ ID NO: 2852
ugcgcuguugccucaguau

SEQ ID NO: 221269 - RNA, 19 nt, Artificial Sequence
  Description of Artificial Sequence: Synthetic oligonucleotide
  Antisense strand to SEQ ID NO: 221268
auacugaggcaacagcgca

SEQ ID NO: 221270 - RNA, 19 nt, Artificial Sequence
  Description of Artificial Sequence: Synthetic oligonucleotide
  Sense strand starting at position 286 of SEQ ID NO: 2852
acagacuuguuagcgaaau

SEQ ID NO: 221271 - RNA, 19 nt, Artificial Sequence
  Description of Artificial Sequence: Synthetic oligonucleotide
  Antisense strand to SEQ ID NO: 221270
auuucgcuaacaagucugu

SEQ ID NO: 221272 - RNA, 19 nt, Artificial Sequence
  Description of Artificial Sequence: Synthetic oligonucleotide
  Sense strand starting at position 419 of SEQ ID NO: 2852
agcugaacggcucaacaau

SEQ ID NO: 221273 - RNA, 19 nt, Artificial Sequence
  Description of Artificial Sequence: Synthetic oligonucleotide
  Antisense strand to SEQ ID NO: 221272
auuguugagccguucagcu

SEQ ID NO: 221274 - RNA, 19 nt, Artificial Sequence
  Description of Artificial Sequence: Synthetic oligonucleotide
  Sense strand starting at position 437 of SEQ ID NO: 2852
ugauacuacugagcugaga

SEQ ID NO: 221275 - RNA, 19 nt, Artificial Sequence
  Description of Artificial Sequence: Synthetic oligonucleotide
  Antisense strand to SEQ ID NO: 221274
ucucagcucaguaguauca

SEQ ID NO: 221276 - RNA, 19 nt, Artificial Sequence
  Description of Artificial Sequence: Synthetic oligonucleotide
  Sense strand starting at position 488 of SEQ ID NO: 2852
uugcuucuucccuaguaga

SEQ ID NO: 221277 - RNA, 19 nt, Artificial Sequence
  Description of Artificial Sequence: Synthetic oligonucleotide
  Antisense strand to SEQ ID NO: 221276
ucuacuagggaagaagcaa

SEQ ID NO: 221278 - RNA, 19 nt, Artificial Sequence
  Description of Artificial Sequence: Synthetic oligonucleotide
  Sense strand starting at position 515 of SEQ ID NO: 2852
gcuggugauaaccaguaaa

SEQ ID NO: 221279 - RNA, 19 nt, Artificial Sequence
  Description of Artificial Sequence: Synthetic oligonucleotide
  Antisense strand to SEQ ID NO: 221278
uuuacugguuaucaccagc

SEQ ID NO: 221280 - RNA, 19 nt, Artificial Sequence
  Description of Artificial Sequence: Synthetic oligonucleotide
  Sense strand starting at position 2380 of SEQ ID NO: 2852
aacggagguccuuauguuu

SEQ ID NO: 221281 - RNA, 19 nt, Artificial Sequence
  Description of Artificial Sequence: Synthetic oligonucleotide
  Antisense strand to SEQ ID NO: 221280
aaacauaaggaccuccguu

SEQ ID NO: 221282 - RNA, 19 nt, Artificial Sequence
  Description of Artificial Sequence: Synthetic oligonucleotide
  Sense strand starting at position 2438 of SEQ ID NO: 2852
gaaguugcaucucuggaca

SEQ ID NO: 221283 - RNA, 19 nt, Artificial Sequence
  Description of Artificial Sequence: Synthetic oligonucleotide
  Antisense strand to SEQ ID NO: 221282
uguccagagaugcaacuuc

SEQ ID NO: 221284 - RNA, 19 nt, Artificial Sequence
  Description of Artificial Sequence: Synthetic oligonucleotide
  Sense strand starting at position 2441 of SEQ ID NO: 2852
guugcaucucuggacaagu

SEQ ID NO: 221285 - RNA, 19 nt, Artificial Sequence
  Description of Artificial Sequence: Synthetic oligonucleotide
  Antisense strand to SEQ ID NO: 221284
acuuguccagagaugcaac

SEQ ID NO: 221286 - RNA, 19 nt, Artificial Sequence
  Description of Artificial Sequence: Synthetic oligonucleotide
  Sense strand starting at position 2443 of SEQ ID NO: 2852
ugcaucucuggacaaguaa

SEQ ID NO: 221287 - RNA, 19 nt, Artificial Sequence
  Description of Artificial Sequence: Synthetic oligonucleotide
  Antisense strand to SEQ ID NO: 221286
uuacuuguccagagaugca

SEQ ID NO: 221288 - RNA, 19 nt, Artificial Sequence
  Description of Artificial Sequence: Synthetic oligonucleotide
  Sense strand starting at position 2524 of SEQ ID NO: 2852
cggagauggucccugauga

SEQ ID NO: 221289 - RNA, 19 nt, Artificial Sequence
  Description of Artificial Sequence: Synthetic oligonucleotide
  Antisense strand to SEQ ID NO: 221288
ucaucagggaccaucuccg

SEQ ID NO: 221290 - RNA, 19 nt, Artificial Sequence
  Description of Artificial Sequence: Synthetic oligonucleotide
  Sense strand starting at position 2525 of SEQ ID NO: 2852
ggagauggucccugaugag

SEQ ID NO: 221291 - RNA, 19 nt, Artificial Sequence
  Description of Artificial Sequence: Synthetic oligonucleotide
  Antisense strand to SEQ ID NO: 221290
cucaucagggaccaucucc

SEQ ID NO: 221292 - RNA, 19 nt, Artificial Sequence
  Description of Artificial Sequence: Synthetic oligonucleotide
  Sense strand starting at position 2562 of SEQ ID NO: 2852
cuggacuggucucccgaaa

SEQ ID NO: 221293 - RNA, 19 nt, Artificial Sequence
  Description of Artificial Sequence: Synthetic oligonucleotide
  Antisense strand to SEQ ID NO: 221292
uuucgggagaccaguccag

SEQ ID NO: 221294 - RNA, 19 nt, Artificial Sequence
  Description of Artificial Sequence: Synthetic oligonucleotide
  Sense strand starting at position 2639 of SEQ ID NO: 2852
cguagugucaggccuguau

SEQ ID NO: 221295 - RNA, 19 nt, Artificial Sequence
  Description of Artificial Sequence: Synthetic oligonucleotide
  Antisense strand to SEQ ID NO: 221294
auacaggccugacacuacg

SEQ ID NO: 221296 - RNA, 19 nt, Artificial Sequence
  Description of Artificial Sequence: Synthetic oligonucleotide
  Sense strand starting at position 2650 of SEQ ID NO: 2852
gccuguauugcacauuuau

SEQ ID NO: 221297 - RNA, 19 nt, Artificial Sequence
  Description of Artificial Sequence: Synthetic oligonucleotide
  Antisense strand to SEQ ID NO: 221296
auaaaugugcaauacaggc

SEQ ID NO: 221298 - RNA, 19 nt, Artificial Sequence
  Description of Artificial Sequence: Synthetic oligonucleotide
  Sense strand starting at position 2662 of SEQ ID NO: 2852
cauuuaugucuguggugca

SEQ ID NO: 221299 - RNA, 19 nt, Artificial Sequence
  Description of Artificial Sequence: Synthetic oligonucleotide
  Antisense strand to SEQ ID NO: 221298
ugcaccacagacauaaaug

SEQ ID NO: 221300 - RNA, 19 nt, Artificial Sequence
  Description of Artificial Sequence: Synthetic oligonucleotide
  Sense strand starting at position 2712 of SEQ ID NO: 2852
ggugucuuauuugucuuga

SEQ ID NO: 221301 - RNA, 19 nt, Artificial Sequence
  Description of Artificial Sequence: Synthetic oligonucleotide
  Antisense strand to SEQ ID NO: 221300
ucaagacaaauaagacacc

SEQ ID NO: 221302 - RNA, 19 nt, Artificial Sequence
  Description of Artificial Sequence: Synthetic oligonucleotide
  Sense strand starting at position 2713 of SEQ ID NO: 2852
gugucuuauuugucuugau

SEQ ID NO: 221303 - RNA, 19 nt, Artificial Sequence
  Description of Artificial Sequence: Synthetic oligonucleotide
  Antisense strand to SEQ ID NO: 221302
aucaagacaaauaagacac

SEQ ID NO: 221304 - RNA, 19 nt, Artificial Sequence
  Description of Artificial Sequence: Synthetic oligonucleotide
  Sense strand starting at position 2714 of SEQ ID NO: 2852
ugucuuauuugucuugauu

SEQ ID NO: 221305 - RNA, 19 nt, Artificial Sequence
  Description of Artificial Sequence: Synthetic oligonucleotide
  Antisense strand to SEQ ID NO: 221304
aaucaagacaaauaagaca

SEQ ID NO: 221306 - RNA, 19 nt, Artificial Sequence
  Description of Artificial Sequence: Synthetic oligonucleotide
  Sense strand starting at position 2748 of SEQ ID NO: 2852
ggacgaagugcucagcaaa

SEQ ID NO: 221307 - RNA, 19 nt, Artificial Sequence
  Description of Artificial Sequence: Synthetic oligonucleotide
  Antisense strand to SEQ ID NO: 221306
uuugcugagcacuucgucc

SEQ ID NO: 221308 - RNA, 19 nt, Artificial Sequence
  Description of Artificial Sequence: Synthetic oligonucleotide
  Sense strand starting at position 2751 of SEQ ID NO: 2852
cgaagugcucagcaaauau

SEQ ID NO: 221309 - RNA, 19 nt, Artificial Sequence
  Description of Artificial Sequence: Synthetic oligonucleotide
  Antisense strand to SEQ ID NO: 221308
auauuugcugagcacuucg

SEQ ID NO: 221310 - RNA, 19 nt, Artificial Sequence
  Description of Artificial Sequence: Synthetic oligonucleotide
  Sense strand starting at position 2773 of SEQ ID NO: 2852
uuaaaugaauggcuguuua

SEQ ID NO: 221311 - RNA, 19 nt, Artificial Sequence
  Description of Artificial Sequence: Synthetic oligonucleotide
  Antisense strand to SEQ ID NO: 221310
uaaacagccauucauuuaa

SEQ ID NO: 221312 - RNA, 19 nt, Artificial Sequence
  Description of Artificial Sequence: Synthetic oligonucleotide
  Sense strand starting at position 2777 of SEQ ID NO: 2852
augaauggcuguuuauuga

SEQ ID NO: 221313 - RNA, 19 nt, Artificial Sequence
  Description of Artificial Sequence: Synthetic oligonucleotide
  Antisense strand to SEQ ID NO: 221312
ucaauaaacagccauucau

SEQ ID NO: 221314 - RNA, 19 nt, Artificial Sequence
  Description of Artificial Sequence: Synthetic oligonucleotide
  Sense strand starting at position 2854 of SEQ ID NO: 2852
ggugaaucccugcaaucuu

SEQ ID NO: 221315 - RNA, 19 nt, Artificial Sequence
  Description of Artificial Sequence: Synthetic oligonucleotide
  Antisense strand to SEQ ID NO: 221314
aagauugcagggauucacc

SEQ ID NO: 221316 - RNA, 19 nt, Artificial Sequence
  Description of Artificial Sequence: Synthetic oligonucleotide
  Sense strand starting at position 2861 of SEQ ID NO: 2852
cccugcaaucuuggaacuu

SEQ ID NO: 221317 - RNA, 19 nt, Artificial Sequence
  Description of Artificial Sequence: Synthetic oligonucleotide
  Antisense strand to SEQ ID NO: 221316
aaguuccaagauugcaggg

SEQ ID NO: 221318 - RNA, 19 nt, Artificial Sequence
  Description of Artificial Sequence: Synthetic oligonucleotide
  Sense strand starting at position 2931 of SEQ ID NO: 2852
ggcuuagagaguuggaagu

SEQ ID NO: 221319 - RNA, 19 nt, Artificial Sequence
  Description of Artificial Sequence: Synthetic oligonucleotide
  Antisense strand to SEQ ID NO: 221318
acuuccaacucucuaagcc

SEQ ID NO: 221320 - RNA, 19 nt, Artificial Sequence
  Description of Artificial Sequence: Synthetic oligonucleotide
  Sense strand starting at position 2972 of SEQ ID NO: 2852
gggaguauugagggaaggu

SEQ ID NO: 221321 - RNA, 19 nt, Artificial Sequence
  Description of Artificial Sequence: Synthetic oligonucleotide
  Antisense strand to SEQ ID NO: 221320
accuucccucaauacuccc

SEQ ID NO: 221322 - RNA, 19 nt, Artificial Sequence
  Description of Artificial Sequence: Synthetic oligonucleotide
  Sense strand starting at position 2981 of SEQ ID NO: 2852
gagggaaggugacauuuga

SEQ ID NO: 221323 - RNA, 19 nt, Artificial Sequence
  Description of Artificial Sequence: Synthetic oligonucleotide
  Antisense strand to SEQ ID NO: 221322
ucaaaugucaccuucccuc

SEQ ID NO: 221324 - RNA, 19 nt, Artificial Sequence
  Description of Artificial Sequence: Synthetic oligonucleotide
  Sense strand starting at position 2988 of SEQ ID NO: 2852
ggugacauuugagaaaguu

SEQ ID NO: 221325 - RNA, 19 nt, Artificial Sequence
  Description of Artificial Sequence: Synthetic oligonucleotide
  Antisense strand to SEQ ID NO: 221324
aacuuucucaaaugucacc

SEQ ID NO: 221326 - RNA, 19 nt, Artificial Sequence
  Description of Artificial Sequence: Synthetic oligonucleotide
  Sense strand starting at position 3129 of SEQ ID NO: 2852
gcagaaguuggccaucaca

SEQ ID NO: 221327 - RNA, 19 nt, Artificial Sequence
  Description of Artificial Sequence: Synthetic oligonucleotide
  Antisense strand to SEQ ID NO: 221326
ugugauggccaacuucugc

SEQ ID NO: 221328 - RNA, 19 nt, Artificial Sequence
  Description of Artificial Sequence: Synthetic oligonucleotide
  Sense strand starting at position 3248 of SEQ ID NO: 2852
gccuaaucuccaugggaac

SEQ ID NO: 221329 - RNA, 19 nt, Artificial Sequence
  Description of Artificial Sequence: Synthetic oligonucleotide
  Antisense strand to SEQ ID NO: 221328
guucccauggagauuaggc

SEQ ID NO: 221330 - RNA, 19 nt, Artificial Sequence
  Description of Artificial Sequence: Synthetic oligonucleotide
  Sense strand starting at position 3249 of SEQ ID NO: 2852
ccuaaucuccaugggaacu

SEQ ID NO: 221331 - RNA, 19 nt, Artificial Sequence
  Description of Artificial Sequence: Synthetic oligonucleotide
  Antisense strand to SEQ ID NO: 221330
aguucccauggagauuagg

SEQ ID NO: 221332 - RNA, 19 nt, Artificial Sequence
  Description of Artificial Sequence: Synthetic oligonucleotide
  Sense strand starting at position 3300 of SEQ ID NO: 2852
uaggaucgauguuuaagaa

SEQ ID NO: 221333 - RNA, 19 nt, Artificial Sequence
  Description of Artificial Sequence: Synthetic oligonucleotide
  Antisense strand to SEQ ID NO: 221332
uucuuaaacaucgauccua

SEQ ID NO: 221334 - RNA, 19 nt, Artificial Sequence
  Description of Artificial Sequence: Synthetic oligonucleotide
  Sense strand starting at position 3323 of SEQ ID NO: 2852
aaggaagacuucucuggca

SEQ ID NO: 221335 - RNA, 19 nt, Artificial Sequence
  Description of Artificial Sequence: Synthetic oligonucleotide
  Antisense strand to SEQ ID NO: 221334
ugccagagaagucuuccuu

SEQ ID NO: 221336 - RNA, 19 nt, Artificial Sequence
  Description of Artificial Sequence: Synthetic oligonucleotide
  Sense strand starting at position 3325 of SEQ ID NO: 2852
ggaagacuucucuggcagu

SEQ ID NO: 221337 - RNA, 19 nt, Artificial Sequence
  Description of Artificial Sequence: Synthetic oligonucleotide
  Antisense strand to SEQ ID NO: 221336
acugccagagaagucuucc

SEQ ID NO: 221338 - RNA, 19 nt, Artificial Sequence
  Description of Artificial Sequence: Synthetic oligonucleotide
  Sense strand starting at position 3676 of SEQ ID NO: 2852
aguacacugaaguguaaga

SEQ ID NO: 221339 - RNA, 19 nt, Artificial Sequence
  Description of Artificial Sequence: Synthetic oligonucleotide
  Antisense strand to SEQ ID NO: 221338
ucuuacacuucaguguacu

SEQ ID NO: 221340 - RNA, 19 nt, Artificial Sequence
  Description of Artificial Sequence: Synthetic oligonucleotide
  Sense strand starting at position 3687 of SEQ ID NO: 2852
guguaagaaaugcagguuu

SEQ ID NO: 221341 - RNA, 19 nt, Artificial Sequence
  Description of Artificial Sequence: Synthetic oligonucleotide
  Antisense strand to SEQ ID NO: 221340
aaaccugcauuucuuacac

SEQ ID NO: 221342 - RNA, 19 nt, Artificial Sequence
  Description of Artificial Sequence: Synthetic oligonucleotide
  Sense strand starting at position 3808 of SEQ ID NO: 2852
gcuugugugggccagauuu

SEQ ID NO: 221343 - RNA, 19 nt, Artificial Sequence
  Description of Artificial Sequence: Synthetic oligonucleotide
  Antisense strand to SEQ ID NO: 221342
aaaucuggcccacacaagc

SEQ ID NO: 221344 - RNA, 19 nt, Artificial Sequence
  Description of Artificial Sequence: Synthetic oligonucleotide
  Sense strand starting at position 3864 of SEQ ID NO: 2852
uaggguauuguugagauua

SEQ ID NO: 221345 - RNA, 19 nt, Artificial Sequence
  Description of Artificial Sequence: Synthetic oligonucleotide
  Antisense strand to SEQ ID NO: 221344
uaaucucaacaauacccua

SEQ ID NO: 221346 - RNA, 19 nt, Artificial Sequence
  Description of Artificial Sequence: Synthetic oligonucleotide
  Sense strand starting at position 3872 of SEQ ID NO: 2852
uguugagauuagguacuuu

SEQ ID NO: 221347 - RNA, 19 nt, Artificial Sequence
  Description of Artificial Sequence: Synthetic oligonucleotide
  Antisense strand to SEQ ID NO: 221346
aaaguaccuaaucucaaca

SEQ ID NO: 221348 - RNA, 19 nt, Artificial Sequence
  Description of Artificial Sequence: Synthetic oligonucleotide
  Sense strand starting at position 99 of SEQ ID NO: 2851
aacuaagugcuccauguga

SEQ ID NO: 221349 - RNA, 19 nt, Artificial Sequence
  Description of Artificial Sequence: Synthetic oligonucleotide
  Antisense strand to SEQ ID NO: 221348
ucacauggagcacuuaguu

SEQ ID NO: 221350 - RNA, 19 nt, Artificial Sequence
  Description of Artificial Sequence: Synthetic oligonucleotide
  Sense strand starting at position 122 of SEQ ID NO: 2851
caggguuugauaugguacu

SEQ ID NO: 221351 - RNA, 19 nt, Artificial Sequence
  Description of Artificial Sequence: Synthetic oligonucleotide
  Antisense strand to SEQ ID NO: 221350
aguaccauaucaaacccug

SEQ ID NO: 221352 - RNA, 19 nt, Artificial Sequence
  Description of Artificial Sequence: Synthetic oligonucleotide
  Sense strand starting at position 151 of SEQ ID NO: 2851
ugucauucuggguacuauu

SEQ ID NO: 221353 - RNA, 19 nt, Artificial Sequence
  Description of Artificial Sequence: Synthetic oligonucleotide
  Antisense strand to SEQ ID NO: 221352
aauaguacccagaaugaca

SEQ ID NO: 221354 - RNA, 19 nt, Artificial Sequence
  Description of Artificial Sequence: Synthetic oligonucleotide
  Sense strand starting at position 328 of SEQ ID NO: 2851
ugcgcuguugccucaguau

SEQ ID NO: 221355 - RNA, 19 nt, Artificial Sequence
  Description of Artificial Sequence: Synthetic oligonucleotide
  Antisense strand to SEQ ID NO: 221354
auacugaggcaacagcgca

SEQ ID NO: 221356 - RNA, 19 nt, Artificial Sequence
  Description of Artificial Sequence: Synthetic oligonucleotide
  Sense strand starting at position 491 of SEQ ID NO: 2851
acagacuuguuagcgaaau

SEQ ID NO: 221357 - RNA, 19 nt, Artificial Sequence
  Description of Artificial Sequence: Synthetic oligonucleotide
  Antisense strand to SEQ ID NO: 221356
auuucgcuaacaagucugu

SEQ ID NO: 221358 - RNA, 19 nt, Artificial Sequence
  Description of Artificial Sequence: Synthetic oligonucleotide
  Sense strand starting at position 624 of SEQ ID NO: 2851
agcugaacggcucaacaau

SEQ ID NO: 221359 - RNA, 19 nt, Artificial Sequence
  Description of Artificial Sequence: Synthetic oligonucleotide
  Antisense strand to SEQ ID NO: 221358
auuguugagccguucagcu

SEQ ID NO: 221360 - RNA, 19 nt, Artificial Sequence
  Description of Artificial Sequence: Synthetic oligonucleotide
  Sense strand starting at position 642 of SEQ ID NO: 2851
ugauacuacugagcugaga

SEQ ID NO: 221361 - RNA, 19 nt, Artificial Sequence
  Description of Artificial Sequence: Synthetic oligonucleotide
  Antisense strand to SEQ ID NO: 221360
ucucagcucaguaguauca

SEQ ID NO: 221362 - RNA, 19 nt, Artificial Sequence
  Description of Artificial Sequence: Synthetic oligonucleotide
  Sense strand starting at position 693 of SEQ ID NO: 2851
uugcuucuucccuaguaga

SEQ ID NO: 221363 - RNA, 19 nt, Artificial Sequence
  Description of Artificial Sequence: Synthetic oligonucleotide
  Antisense strand to SEQ ID NO: 221362
ucuacuagggaagaagcaa

SEQ ID NO: 221364 - RNA, 19 nt, Artificial Sequence
  Description of Artificial Sequence: Synthetic oligonucleotide
  Sense strand starting at position 720 of SEQ ID NO: 2851
gcuggugauaaccaguaaa

SEQ ID NO: 221365 - RNA, 19 nt, Artificial Sequence
  Description of Artificial Sequence: Synthetic oligonucleotide
  Antisense strand to SEQ ID NO: 221364
uuuacugguuaucaccagc

SEQ ID NO: 221366 - RNA, 19 nt, Artificial Sequence
  Description of Artificial Sequence: Synthetic oligonucleotide
  Sense strand starting at position 2585 of SEQ ID NO: 2851
aacggagguccuuauguuu

SEQ ID NO: 221367 - RNA, 19 nt, Artificial Sequence
  Description of Artificial Sequence: Synthetic oligonucleotide
  Antisense strand to SEQ ID NO: 221366
aaacauaaggaccuccguu

SEQ ID NO: 221368 - RNA, 19 nt, Artificial Sequence
  Description of Artificial Sequence: Synthetic oligonucleotide
  Sense strand starting at position 2643 of SEQ ID NO: 2851
gaaguugcaucucuggaca

SEQ ID NO: 221369 - RNA, 19 nt, Artificial Sequence
  Description of Artificial Sequence: Synthetic oligonucleotide
  Antisense strand to SEQ ID NO: 221368
uguccagagaugcaacuuc

SEQ ID NO: 221370 - RNA, 19 nt, Artificial Sequence
  Description of Artificial Sequence: Synthetic oligonucleotide
  Sense strand starting at position 2646 of SEQ ID NO: 2851
guugcaucucuggacaagu

SEQ ID NO: 221371 - RNA, 19 nt, Artificial Sequence
  Description of Artificial Sequence: Synthetic oligonucleotide
  Antisense strand to SEQ ID NO: 221370
acuuguccagagaugcaac

SEQ ID NO: 221372 - RNA, 19 nt, Artificial Sequence
  Description of Artificial Sequence: Synthetic oligonucleotide
  Sense strand starting at position 2648 of SEQ ID NO: 2851
ugcaucucuggacaaguaa

SEQ ID NO: 221373 - RNA, 19 nt, Artificial Sequence
  Description of Artificial Sequence: Synthetic oligonucleotide
  Antisense strand to SEQ ID NO: 221372
uuacuuguccagagaugca

SEQ ID NO: 221374 - RNA, 19 nt, Artificial Sequence
  Description of Artificial Sequence: Synthetic oligonucleotide
  Sense strand starting at position 2729 of SEQ ID NO: 2851
cggagauggucccugauga

SEQ ID NO: 221375 - RNA, 19 nt, Artificial Sequence
  Description of Artificial Sequence: Synthetic oligonucleotide
  Antisense strand to SEQ ID NO: 221374
ucaucagggaccaucuccg

SEQ ID NO: 221376 - RNA, 19 nt, Artificial Sequence
  Description of Artificial Sequence: Synthetic oligonucleotide
  Sense strand starting at position 2730 of SEQ ID NO: 2851
ggagauggucccugaugag

SEQ ID NO: 221377 - RNA, 19 nt, Artificial Sequence
  Description of Artificial Sequence: Synthetic oligonucleotide
  Antisense strand to SEQ ID NO: 221376
cucaucagggaccaucucc

SEQ ID NO: 221378 - RNA, 19 nt, Artificial Sequence
  Description of Artificial Sequence: Synthetic oligonucleotide
  Sense strand starting at position 2767 of SEQ ID NO: 2851
cuggacuggucucccgaaa

SEQ ID NO: 221379 - RNA, 19 nt, Artificial Sequence
  Description of Artificial Sequence: Synthetic oligonucleotide
  Antisense strand to SEQ ID NO: 221378
uuucgggagaccaguccag

SEQ ID NO: 221380 - RNA, 19 nt, Artificial Sequence
  Description of Artificial Sequence: Synthetic oligonucleotide
  Sense strand starting at position 2844 of SEQ ID NO: 2851
cguagugucaggccuguau

SEQ ID NO: 221381 - RNA, 19 nt, Artificial Sequence
  Description of Artificial Sequence: Synthetic oligonucleotide
  Antisense strand to SEQ ID NO: 221380
auacaggccugacacuacg

SEQ ID NO: 221382 - RNA, 19 nt, Artificial Sequence
  Description of Artificial Sequence: Synthetic oligonucleotide
  Sense strand starting at position 2855 of SEQ ID NO: 2851
gccuguauugcacauuuau

SEQ ID NO: 221383 - RNA, 19 nt, Artificial Sequence
  Description of Artificial Sequence: Synthetic oligonucleotide
  Antisense strand to SEQ ID NO: 221382
auaaaugugcaauacaggc

SEQ ID NO: 221384 - RNA, 19 nt, Artificial Sequence
  Description of Artificial Sequence: Synthetic oligonucleotide
  Sense strand starting at position 2867 of SEQ ID NO: 2851
cauuuaugucuguggugca

SEQ ID NO: 221385 - RNA, 19 nt, Artificial Sequence
  Description of Artificial Sequence: Synthetic oligonucleotide
  Antisense strand to SEQ ID NO: 221384
ugcaccacagacauaaaug

SEQ ID NO: 221386 - RNA, 19 nt, Artificial Sequence
  Description of Artificial Sequence: Synthetic oligonucleotide
  Sense strand starting at position 2917 of SEQ ID NO: 2851
ggugucuuauuugucuuga

SEQ ID NO: 221387 - RNA, 19 nt, Artificial Sequence
  Description of Artificial Sequence: Synthetic oligonucleotide
  Antisense strand to SEQ ID NO: 221386
ucaagacaaauaagacacc

SEQ ID NO: 221388 - RNA, 19 nt, Artificial Sequence
  Description of Artificial Sequence: Synthetic oligonucleotide
  Sense strand starting at position 2918 of SEQ ID NO: 2851
gugucuuauuugucuugau

SEQ ID NO: 221389 - RNA, 19 nt, Artificial Sequence
  Description of Artificial Sequence: Synthetic oligonucleotide
  Antisense strand to SEQ ID NO: 221388
aucaagacaaauaagacac

SEQ ID NO: 221390 - RNA, 19 nt, Artificial Sequence
  Description of Artificial Sequence: Synthetic oligonucleotide
  Sense strand starting at position 2919 of SEQ ID NO: 2851
ugucuuauuugucuugauu

SEQ ID NO: 221391 - RNA, 19 nt, Artificial Sequence
  Description of Artificial Sequence: Synthetic oligonucleotide
  Antisense strand to SEQ ID NO: 221390
aaucaagacaaauaagaca

SEQ ID NO: 221392 - RNA, 19 nt, Artificial Sequence
  Description of Artificial Sequence: Synthetic oligonucleotide
  Sense strand starting at position 2953 of SEQ ID NO: 2851
ggacgaagugcucagcaaa

SEQ ID NO: 221393 - RNA, 19 nt, Artificial Sequence
  Description of Artificial Sequence: Synthetic oligonucleotide
  Antisense strand to SEQ ID NO: 221392
uuugcugagcacuucgucc

SEQ ID NO: 221394 - RNA, 19 nt, Artificial Sequence
  Description of Artificial Sequence: Synthetic oligonucleotide
  Sense strand starting at position 2956 of SEQ ID NO: 2851
cgaagugcucagcaaauau

SEQ ID NO: 221395 - RNA, 19 nt, Artificial Sequence
  Description of Artificial Sequence: Synthetic oligonucleotide
  Antisense strand to SEQ ID NO: 221394
auauuugcugagcacuucg

SEQ ID NO: 221396 - RNA, 19 nt, Artificial Sequence
  Description of Artificial Sequence: Synthetic oligonucleotide
  Sense strand starting at position 2978 of SEQ ID NO: 2851
uuaaaugaauggcuguuua

SEQ ID NO: 221397 - RNA, 19 nt, Artificial Sequence
  Description of Artificial Sequence: Synthetic oligonucleotide
  Antisense strand to SEQ ID NO: 221396
uaaacagccauucauuuaa

SEQ ID NO: 221398 - RNA, 19 nt, Artificial Sequence
  Description of Artificial Sequence: Synthetic oligonucleotide
  Sense strand starting at position 2982 of SEQ ID NO: 2851
augaauggcuguuuauuga

SEQ ID NO: 221399 - RNA, 19 nt, Artificial Sequence
  Description of Artificial Sequence: Synthetic oligonucleotide
  Antisense strand to SEQ ID NO: 221398
ucaauaaacagccauucau

SEQ ID NO: 221400 - RNA, 19 nt, Artificial Sequence
  Description of Artificial Sequence: Synthetic oligonucleotide
  Sense strand starting at position 3059 of SEQ ID NO: 2851
ggugaaucccugcaaucuu

SEQ ID NO: 221401 - RNA, 19 nt, Artificial Sequence
  Description of Artificial Sequence: Synthetic oligonucleotide
  Antisense strand to SEQ ID NO: 221400
aagauugcagggauucacc

SEQ ID NO: 221402 - RNA, 19 nt, Artificial Sequence
  Description of Artificial Sequence: Synthetic oligonucleotide
  Sense strand starting at position 3066 of SEQ ID NO: 2851
cccugcaaucuuggaacuu

SEQ ID NO: 221403 - RNA, 19 nt, Artificial Sequence
  Description of Artificial Sequence: Synthetic oligonucleotide
  Antisense strand to SEQ ID NO: 221402
aaguuccaagauugcaggg

SEQ ID NO: 221404 - RNA, 19 nt, Artificial Sequence
  Description of Artificial Sequence: Synthetic oligonucleotide
  Sense strand starting at position 3136 of SEQ ID NO: 2851
ggcuuagagaguuggaagu

SEQ ID NO: 221405 - RNA, 19 nt, Artificial Sequence
  Description of Artificial Sequence: Synthetic oligonucleotide
  Antisense strand to SEQ ID NO: 221404
acuuccaacucucuaagcc

SEQ ID NO: 221406 - RNA, 19 nt, Artificial Sequence
  Description of Artificial Sequence: Synthetic oligonucleotide
  Sense strand starting at position 3177 of SEQ ID NO: 2851
gggaguauugagggaaggu

SEQ ID NO: 221407 - RNA, 19 nt, Artificial Sequence
  Description of Artificial Sequence: Synthetic oligonucleotide
  Antisense strand to SEQ ID NO: 221406
accuucccucaauacuccc

SEQ ID NO: 221408 - RNA, 19 nt, Artificial Sequence
  Description of Artificial Sequence: Synthetic oligonucleotide
  Sense strand starting at position 3186 of SEQ ID NO: 2851
gagggaaggugacauuuga

SEQ ID NO: 221409 - RNA, 19 nt, Artificial Sequence
  Description of Artificial Sequence: Synthetic oligonucleotide
  Antisense strand to SEQ ID NO: 221408
ucaaaugucaccuucccuc

SEQ ID NO: 221410 - RNA, 19 nt, Artificial Sequence
  Description of Artificial Sequence: Synthetic oligonucleotide
  Sense strand starting at position 3193 of SEQ ID NO: 2851
ggugacauuugagaaaguu

SEQ ID NO: 221411 - RNA, 19 nt, Artificial Sequence
  Description of Artificial Sequence: Synthetic oligonucleotide
  Antisense strand to SEQ ID NO: 221410
aacuuucucaaaugucacc

SEQ ID NO: 221412 - RNA, 19 nt, Artificial Sequence
  Description of Artificial Sequence: Synthetic oligonucleotide
  Sense strand starting at position 3334 of SEQ ID NO: 2851
gcagaaguuggccaucaca

SEQ ID NO: 221413 - RNA, 19 nt, Artificial Sequence
  Description of Artificial Sequence: Synthetic oligonucleotide
  Antisense strand to SEQ ID NO: 221412
ugugauggccaacuucugc

SEQ ID NO: 221414 - RNA, 19 nt, Artificial Sequence
  Description of Artificial Sequence: Synthetic oligonucleotide
  Sense strand starting at position 3453 of SEQ ID NO: 2851
gccuaaucuccaugggaac

SEQ ID NO: 221415 - RNA, 19 nt, Artificial Sequence
  Description of Artificial Sequence: Synthetic oligonucleotide
  Antisense strand to SEQ ID NO: 221414
guucccauggagauuaggc

SEQ ID NO: 221416 - RNA, 19 nt, Artificial Sequence
  Description of Artificial Sequence: Synthetic oligonucleotide
  Sense strand starting at position 3454 of SEQ ID NO: 2851
ccuaaucuccaugggaacu

SEQ ID NO: 221417 - RNA, 19 nt, Artificial Sequence
  Description of Artificial Sequence: Synthetic oligonucleotide
  Antisense strand to SEQ ID NO: 221416
aguucccauggagauuagg

SEQ ID NO: 221418 - RNA, 19 nt, Artificial Sequence
  Description of Artificial Sequence: Synthetic oligonucleotide
  Sense strand starting at position 3505 of SEQ ID NO: 2851
uaggaucgauguuuaagaa

SEQ ID NO: 221419 - RNA, 19 nt, Artificial Sequence
  Description of Artificial Sequence: Synthetic oligonucleotide
  Antisense strand to SEQ ID NO: 221418
uucuuaaacaucgauccua

SEQ ID NO: 221420 - RNA, 19 nt, Artificial Sequence
  Description of Artificial Sequence: Synthetic oligonucleotide
  Sense strand starting at position 3528 of SEQ ID NO: 2851
aaggaagacuucucuggca

SEQ ID NO: 221421 - RNA, 19 nt, Artificial Sequence
  Description of Artificial Sequence: Synthetic oligonucleotide
  Antisense strand to SEQ ID NO: 221420
ugccagagaagucuuccuu

SEQ ID NO: 221422 - RNA, 19 nt, Artificial Sequence
  Description of Artificial Sequence: Synthetic oligonucleotide
  Sense strand starting at position 3530 of SEQ ID NO: 2851
ggaagacuucucuggcagu

SEQ ID NO: 221423 - RNA, 19 nt, Artificial Sequence
  Description of Artificial Sequence: Synthetic oligonucleotide
  Antisense strand to SEQ ID NO: 221422
acugccagagaagucuucc

SEQ ID NO: 221424 - RNA, 19 nt, Artificial Sequence
  Description of Artificial Sequence: Synthetic oligonucleotide
  Sense strand starting at position 3881 of SEQ ID NO: 2851
aguacacugaaguguaaga

SEQ ID NO: 221425 - RNA, 19 nt, Artificial Sequence
  Description of Artificial Sequence: Synthetic oligonucleotide
  Antisense strand to SEQ ID NO: 221424
ucuuacacuucaguguacu

SEQ ID NO: 221426 - RNA, 19 nt, Artificial Sequence
  Description of Artificial Sequence: Synthetic oligonucleotide
  Sense strand starting at position 3892 of SEQ ID NO: 2851
guguaagaaaugcagguuu

SEQ ID NO: 221427 - RNA, 19 nt, Artificial Sequence
  Description of Artificial Sequence: Synthetic oligonucleotide
  Antisense strand to SEQ ID NO: 221426
aaaccugcauuucuuacac

SEQ ID NO: 221428 - RNA, 19 nt, Artificial Sequence
  Description of Artificial Sequence: Synthetic oligonucleotide
  Sense strand starting at position 223 of SEQ ID NO: 2850
ucguguuuggacuaucaug

SEQ ID NO: 221429 - RNA, 19 nt, Artificial Sequence
  Description of Artificial Sequence: Synthetic oligonucleotide
  Antisense strand to SEQ ID NO: 221428
caugauaguccaaacacga

SEQ ID NO: 221430 - RNA, 19 nt, Artificial Sequence
  Description of Artificial Sequence: Synthetic oligonucleotide
  Sense strand starting at position 243 of SEQ ID NO: 2850
uuuauaaucguguaauagg

SEQ ID NO: 221431 - RNA, 19 nt, Artificial Sequence
  Description of Artificial Sequence: Synthetic oligonucleotide
  Antisense strand to SEQ ID NO: 221430
ccuauuacacgauuauaaa

SEQ ID NO: 221432 - RNA, 19 nt, Artificial Sequence
  Description of Artificial Sequence: Synthetic oligonucleotide
  Sense strand starting at position 254 of SEQ ID NO: 2850
guaauagggcuguauagua

SEQ ID NO: 221433 - RNA, 19 nt, Artificial Sequence
  Description of Artificial Sequence: Synthetic oligonucleotide
  Antisense strand to SEQ ID NO: 221432
uacuauacagcccuauuac

SEQ ID NO: 221434 - RNA, 19 nt, Artificial Sequence
  Description of Artificial Sequence: Synthetic oligonucleotide
  Sense strand starting at position 298 of SEQ ID NO: 2850
cucuuugaucaguaaguga

SEQ ID NO: 221435 - RNA, 19 nt, Artificial Sequence
  Description of Artificial Sequence: Synthetic oligonucleotide
  Antisense strand to SEQ ID NO: 221434
ucacuuacugaucaaagag

SEQ ID NO: 221436 - RNA, 19 nt, Artificial Sequence
  Description of Artificial Sequence: Synthetic oligonucleotide
  Sense strand starting at position 302 of SEQ ID NO: 2850
uugaucaguaagugauaga

SEQ ID NO: 221437 - RNA, 19 nt, Artificial Sequence
  Description of Artificial Sequence: Synthetic oligonucleotide
  Antisense strand to SEQ ID NO: 221436
ucuaucacuuacugaucaa

SEQ ID NO: 221438 - RNA, 19 nt, Artificial Sequence
  Description of Artificial Sequence: Synthetic oligonucleotide
  Sense strand starting at position 329 of SEQ ID NO: 2850
ccagucuaucuagacucau

SEQ ID NO: 221439 - RNA, 19 nt, Artificial Sequence
  Description of Artificial Sequence: Synthetic oligonucleotide
  Antisense strand to SEQ ID NO: 221438
augagucuagauagacugg

SEQ ID NO: 221440 - RNA, 19 nt, Artificial Sequence
  Description of Artificial Sequence: Synthetic oligonucleotide
  Sense strand starting at position 521 of SEQ ID NO: 2850
aacuaagugcuccauguga

SEQ ID NO: 221441 - RNA, 19 nt, Artificial Sequence
  Description of Artificial Sequence: Synthetic oligonucleotide
  Antisense strand to SEQ ID NO: 221440
ucacauggagcacuuaguu

SEQ ID NO: 221442 - RNA, 19 nt, Artificial Sequence
  Description of Artificial Sequence: Synthetic oligonucleotide
  Sense strand starting at position 544 of SEQ ID NO: 2850
caggguuugauaugguacu

SEQ ID NO: 221443 - RNA, 19 nt, Artificial Sequence
  Description of Artificial Sequence: Synthetic oligonucleotide
  Antisense strand to SEQ ID NO: 221442
aguaccauaucaaacccug

SEQ ID NO: 221444 - RNA, 19 nt, Artificial Sequence
  Description of Artificial Sequence: Synthetic oligonucleotide
  Sense strand starting at position 573 of SEQ ID NO: 2850
ugucauucuggguacuauu

SEQ ID NO: 221445 - RNA, 19 nt, Artificial Sequence
  Description of Artificial Sequence: Synthetic oligonucleotide
  Antisense strand to SEQ ID NO: 221444
aauaguacccagaaugaca

SEQ ID NO: 221446 - RNA, 19 nt, Artificial Sequence
  Description of Artificial Sequence: Synthetic oligonucleotide
  Sense strand starting at position 913 of SEQ ID NO: 2850
acagacuuguuagcgaaau

SEQ ID NO: 221447 - RNA, 19 nt, Artificial Sequence
  Description of Artificial Sequence: Synthetic oligonucleotide
  Antisense strand to SEQ ID NO: 221446
auuucgcuaacaagucugu

SEQ ID NO: 221448 - RNA, 19 nt, Artificial Sequence
  Description of Artificial Sequence: Synthetic oligonucleotide
  Sense strand starting at position 1046 of SEQ ID NO: 2850
agcugaacggcucaacaau

SEQ ID NO: 221449 - RNA, 19 nt, Artificial Sequence
  Description of Artificial Sequence: Synthetic oligonucleotide
  Antisense strand to SEQ ID NO: 221448
auuguugagccguucagcu

SEQ ID NO: 221450 - RNA, 19 nt, Artificial Sequence
  Description of Artificial Sequence: Synthetic oligonucleotide
  Sense strand starting at position 1064 of SEQ ID NO: 2850
ugauacuacugagcugaga

SEQ ID NO: 221451 - RNA, 19 nt, Artificial Sequence
  Description of Artificial Sequence: Synthetic oligonucleotide
  Antisense strand to SEQ ID NO: 221450
ucucagcucaguaguauca

SEQ ID NO: 221452 - RNA, 19 nt, Artificial Sequence
  Description of Artificial Sequence: Synthetic oligonucleotide
  Sense strand starting at position 1142 of SEQ ID NO: 2850
gcuggugauaaccaguaaa

SEQ ID NO: 221453 - RNA, 19 nt, Artificial Sequence
  Description of Artificial Sequence: Synthetic oligonucleotide
  Antisense strand to SEQ ID NO: 221452
uuuacugguuaucaccagc

SEQ ID NO: 221454 - RNA, 19 nt, Artificial Sequence
  Description of Artificial Sequence: Synthetic oligonucleotide
  Sense strand starting at position 3007 of SEQ ID NO: 2850
aacggagguccuuauguuu

SEQ ID NO: 221455 - RNA, 19 nt, Artificial Sequence
  Description of Artificial Sequence: Synthetic oligonucleotide
  Antisense strand to SEQ ID NO: 221454
aaacauaaggaccuccguu

SEQ ID NO: 221456 - RNA, 19 nt, Artificial Sequence
  Description of Artificial Sequence: Synthetic oligonucleotide
  Sense strand starting at position 3065 of SEQ ID NO: 2850
gaaguugcaucucuggaca

SEQ ID NO: 221457 - RNA, 19 nt, Artificial Sequence
  Description of Artificial Sequence: Synthetic oligonucleotide
  Antisense strand to SEQ ID NO: 221456
uguccagagaugcaacuuc

SEQ ID NO: 221458 - RNA, 19 nt, Artificial Sequence
  Description of Artificial Sequence: Synthetic oligonucleotide
  Sense strand starting at position 3068 of SEQ ID NO: 2850
guugcaucucuggacaagu

SEQ ID NO: 221459 - RNA, 19 nt, Artificial Sequence
  Description of Artificial Sequence: Synthetic oligonucleotide
  Antisense strand to SEQ ID NO: 221458
acuuguccagagaugcaac

SEQ ID NO: 221460 - RNA, 19 nt, Artificial Sequence
  Description of Artificial Sequence: Synthetic oligonucleotide
  Sense strand starting at position 3070 of SEQ ID NO: 2850
ugcaucucuggacaaguaa

SEQ ID NO: 221461 - RNA, 19 nt, Artificial Sequence
  Description of Artificial Sequence: Synthetic oligonucleotide
  Antisense strand to SEQ ID NO: 221460
uuacuuguccagagaugca

SEQ ID NO: 221462 - RNA, 19 nt, Artificial Sequence
  Description of Artificial Sequence: Synthetic oligonucleotide
  Sense strand starting at position 3151 of SEQ ID NO: 2850
cggagauggucccugauga

SEQ ID NO: 221463 - RNA, 19 nt, Artificial Sequence
  Description of Artificial Sequence: Synthetic oligonucleotide
  Antisense strand to SEQ ID NO: 221462
ucaucagggaccaucuccg

SEQ ID NO: 221464 - RNA, 19 nt, Artificial Sequence
  Description of Artificial Sequence: Synthetic oligonucleotide
  Sense strand starting at position 3152 of SEQ ID NO: 2850
ggagauggucccugaugag

SEQ ID NO: 221465 - RNA, 19 nt, Artificial Sequence
  Description of Artificial Sequence: Synthetic oligonucleotide
  Antisense strand to SEQ ID NO: 221464
cucaucagggaccaucucc

SEQ ID NO: 221466 - RNA, 19 nt, Artificial Sequence
  Description of Artificial Sequence: Synthetic oligonucleotide
  Sense strand starting at position 3189 of SEQ ID NO: 2850
cuggacuggucucccgaaa

SEQ ID NO: 221467 - RNA, 19 nt, Artificial Sequence
  Description of Artificial Sequence: Synthetic oligonucleotide
  Antisense strand to SEQ ID NO: 221466
uuucgggagaccaguccag

SEQ ID NO: 221468 - RNA, 19 nt, Artificial Sequence
  Description of Artificial Sequence: Synthetic oligonucleotide
  Sense strand starting at position 3266 of SEQ ID NO: 2850
cguagugucaggccuguau

SEQ ID NO: 221469 - RNA, 19 nt, Artificial Sequence
  Description of Artificial Sequence: Synthetic oligonucleotide
  Antisense strand to SEQ ID NO: 221468
auacaggccugacacuacg

SEQ ID NO: 221470 - RNA, 19 nt, Artificial Sequence
  Description of Artificial Sequence: Synthetic oligonucleotide
  Sense strand starting at position 3277 of SEQ ID NO: 2850
gccuguauugcacauuuau

SEQ ID NO: 221471 - RNA, 19 nt, Artificial Sequence
  Description of Artificial Sequence: Synthetic oligonucleotide
  Antisense strand to SEQ ID NO: 221470
auaaaugugcaauacaggc

SEQ ID NO: 221472 - RNA, 19 nt, Artificial Sequence
  Description of Artificial Sequence: Synthetic oligonucleotide
  Sense strand starting at position 3289 of SEQ ID NO: 2850
cauuuaugucuguggugca

SEQ ID NO: 221473 - RNA, 19 nt, Artificial Sequence
  Description of Artificial Sequence: Synthetic oligonucleotide
  Antisense strand to SEQ ID NO: 221472
ugcaccacagacauaaaug

SEQ ID NO: 221474 - RNA, 19 nt, Artificial Sequence
  Description of Artificial Sequence: Synthetic oligonucleotide
  Sense strand starting at position 3339 of SEQ ID NO: 2850
ggugucuuauuugucuuga

SEQ ID NO: 221475 - RNA, 19 nt, Artificial Sequence
  Description of Artificial Sequence: Synthetic oligonucleotide
  Antisense strand to SEQ ID NO: 221474
ucaagacaaauaagacacc

SEQ ID NO: 221476 - RNA, 19 nt, Artificial Sequence
  Description of Artificial Sequence: Synthetic oligonucleotide
  Sense strand starting at position 3340 of SEQ ID NO: 2850
gugucuuauuugucuugau

SEQ ID NO: 221477 - RNA, 19 nt, Artificial Sequence
  Description of Artificial Sequence: Synthetic oligonucleotide
  Antisense strand to SEQ ID NO: 221476
aucaagacaaauaagacac

SEQ ID NO: 221478 - RNA, 19 nt, Artificial Sequence
  Description of Artificial Sequence: Synthetic oligonucleotide
  Sense strand starting at position 3341 of SEQ ID NO: 2850
ugucuuauuugucuugauu

SEQ ID NO: 221479 - RNA, 19 nt, Artificial Sequence
  Description of Artificial Sequence: Synthetic oligonucleotide
  Antisense strand to SEQ ID NO: 221478
aaucaagacaaauaagaca

SEQ ID NO: 221480 - RNA, 19 nt, Artificial Sequence
  Description of Artificial Sequence: Synthetic oligonucleotide
  Sense strand starting at position 3375 of SEQ ID NO: 2850
ggacgaagugcucagcaaa

SEQ ID NO: 221481 - RNA, 19 nt, Artificial Sequence
  Description of Artificial Sequence: Synthetic oligonucleotide
  Antisense strand to SEQ ID NO: 221480
uuugcugagcacuucgucc

SEQ ID NO: 221482 - RNA, 19 nt, Artificial Sequence
  Description of Artificial Sequence: Synthetic oligonucleotide
  Sense strand starting at position 3400 of SEQ ID NO: 2850
uuaaaugaauggcuguuua

SEQ ID NO: 221483 - RNA, 19 nt, Artificial Sequence
  Description of Artificial Sequence: Synthetic oligonucleotide
  Antisense strand to SEQ ID NO: 221482
uaaacagccauucauuuaa

SEQ ID NO: 221484 - RNA, 19 nt, Artificial Sequence
  Description of Artificial Sequence: Synthetic oligonucleotide
  Sense strand starting at position 3404 of SEQ ID NO: 2850
augaauggcuguuuauuga

SEQ ID NO: 221485 - RNA, 19 nt, Artificial Sequence
  Description of Artificial Sequence: Synthetic oligonucleotide
  Antisense strand to SEQ ID NO: 221484
ucaauaaacagccauucau

SEQ ID NO: 221486 - RNA, 19 nt, Artificial Sequence
  Description of Artificial Sequence: Synthetic oligonucleotide
  Sense strand starting at position 3481 of SEQ ID NO: 2850
ggugaaucccugcaaucuu

SEQ ID NO: 221487 - RNA, 19 nt, Artificial Sequence
  Description of Artificial Sequence: Synthetic oligonucleotide
  Antisense strand to SEQ ID NO: 221486
aagauugcagggauucacc

SEQ ID NO: 221488 - RNA, 19 nt, Artificial Sequence
  Description of Artificial Sequence: Synthetic oligonucleotide
  Sense strand starting at position 3558 of SEQ ID NO: 2850
ggcuuagagaguuggaagu

SEQ ID NO: 221489 - RNA, 19 nt, Artificial Sequence
  Description of Artificial Sequence: Synthetic oligonucleotide
  Antisense strand to SEQ ID NO: 221488
acuuccaacucucuaagcc

SEQ ID NO: 221490 - RNA, 19 nt, Artificial Sequence
  Description of Artificial Sequence: Synthetic oligonucleotide
  Sense strand starting at position 3599 of SEQ ID NO: 2850
gggaguauugagggaaggu

SEQ ID NO: 221491 - RNA, 19 nt, Artificial Sequence
  Description of Artificial Sequence: Synthetic oligonucleotide
  Antisense strand to SEQ ID NO: 221490
accuucccucaauacuccc

SEQ ID NO: 221492 - RNA, 19 nt, Artificial Sequence
  Description of Artificial Sequence: Synthetic oligonucleotide
  Sense strand starting at position 3608 of SEQ ID NO: 2850
gagggaaggugacauuuga

SEQ ID NO: 221493 - RNA, 19 nt, Artificial Sequence
  Description of Artificial Sequence: Synthetic oligonucleotide
  Antisense strand to SEQ ID NO: 221492
ucaaaugucaccuucccuc

SEQ ID NO: 221494 - RNA, 19 nt, Artificial Sequence
  Description of Artificial Sequence: Synthetic oligonucleotide
  Sense strand starting at position 3615 of SEQ ID NO: 2850
ggugacauuugagaaaguu

SEQ ID NO: 221495 - RNA, 19 nt, Artificial Sequence
  Description of Artificial Sequence: Synthetic oligonucleotide
  Antisense strand to SEQ ID NO: 221494
aacuuucucaaaugucacc

SEQ ID NO: 221496 - RNA, 19 nt, Artificial Sequence
  Description of Artificial Sequence: Synthetic oligonucleotide
  Sense strand starting at position 3756 of SEQ ID NO: 2850
gcagaaguuggccaucaca

SEQ ID NO: 221497 - RNA, 19 nt, Artificial Sequence
  Description of Artificial Sequence: Synthetic oligonucleotide
  Antisense strand to SEQ ID NO: 221496
ugugauggccaacuucugc

SEQ ID NO: 221498 - RNA, 19 nt, Artificial Sequence
  Description of Artificial Sequence: Synthetic oligonucleotide
  Sense strand starting at position 3875 of SEQ ID NO: 2850
gccuaaucuccaugggaac

SEQ ID NO: 221499 - RNA, 19 nt, Artificial Sequence
  Description of Artificial Sequence: Synthetic oligonucleotide
  Antisense strand to SEQ ID NO: 221498
guucccauggagauuaggc

SEQ ID NO: 221500 - RNA, 19 nt, Artificial Sequence
  Description of Artificial Sequence: Synthetic oligonucleotide
  Sense strand starting at position 3876 of SEQ ID NO: 2850
ccuaaucuccaugggaacu

SEQ ID NO: 221501 - RNA, 19 nt, Artificial Sequence
  Description of Artificial Sequence: Synthetic oligonucleotide
  Antisense strand to SEQ ID NO: 221500
aguucccauggagauuagg

SEQ ID NO: 221502 - RNA, 19 nt, Artificial Sequence
  Description of Artificial Sequence: Synthetic oligonucleotide
  Sense strand starting at position 3927 of SEQ ID NO: 2850
uaggaucgauguuuaagaa

SEQ ID NO: 221503 - RNA, 19 nt, Artificial Sequence
  Description of Artificial Sequence: Synthetic oligonucleotide
  Antisense strand to SEQ ID NO: 221502
uucuuaaacaucgauccua

SEQ ID NO: 221504 - RNA, 19 nt, Artificial Sequence
  Description of Artificial Sequence: Synthetic oligonucleotide
  Sense strand starting at position 3950 of SEQ ID NO: 2850
aaggaagacuucucuggca

SEQ ID NO: 221505 - RNA, 19 nt, Artificial Sequence
  Description of Artificial Sequence: Synthetic oligonucleotide
  Antisense strand to SEQ ID NO: 221504
ugccagagaagucuuccuu

SEQ ID NO: 221506 - RNA, 19 nt, Artificial Sequence
  Description of Artificial Sequence: Synthetic oligonucleotide
  Sense strand starting at position 3952 of SEQ ID NO: 2850
ggaagacuucucuggcagu

SEQ ID NO: 221507 - RNA, 19 nt, Artificial Sequence
  Description of Artificial Sequence: Synthetic oligonucleotide
  Antisense strand to SEQ ID NO: 221506
acugccagagaagucuucc

SEQ ID NO: 221508 - RNA, 19 nt, Artificial Sequence
  Description of Artificial Sequence: Synthetic oligonucleotide
  Sense strand starting at position 29 of SEQ ID NO: 2853
cugauaaacggauacguaa

SEQ ID NO: 221509 - RNA, 19 nt, Artificial Sequence
  Description of Artificial Sequence: Synthetic oligonucleotide
  Antisense strand to SEQ ID NO: 221508
uuacguauccguuuaucag

SEQ ID NO: 221510 - RNA, 19 nt, Artificial Sequence
  Description of Artificial Sequence: Synthetic oligonucleotide
  Sense strand starting at position 93 of SEQ ID NO: 2853
aauucugaugcaugugaca

SEQ ID NO: 221511 - RNA, 19 nt, Artificial Sequence
  Description of Artificial Sequence: Synthetic oligonucleotide
  Antisense strand to SEQ ID NO: 221510
ugucacaugcaucagaauu

SEQ ID NO: 221512 - RNA, 19 nt, Artificial Sequence
  Description of Artificial Sequence: Synthetic oligonucleotide
  Sense strand starting at position 225 of SEQ ID NO: 2853
acagacuagugguugcuua

SEQ ID NO: 221513 - RNA, 19 nt, Artificial Sequence
  Description of Artificial Sequence: Synthetic oligonucleotide
  Antisense strand to SEQ ID NO: 221512
uaagcaaccacuagucugu

SEQ ID NO: 221514 - RNA, 19 nt, Artificial Sequence
  Description of Artificial Sequence: Synthetic oligonucleotide
  Sense strand starting at position 263 of SEQ ID NO: 2853
uacugaggugacugcuuaa

SEQ ID NO: 221515 - RNA, 19 nt, Artificial Sequence
  Description of Artificial Sequence: Synthetic oligonucleotide
  Antisense strand to SEQ ID NO: 221514
uuaagcagucaccucagua

SEQ ID NO: 221516 - RNA, 19 nt, Artificial Sequence
  Description of Artificial Sequence: Synthetic oligonucleotide
  Sense strand starting at position 329 of SEQ ID NO: 2853
ugugguagugauuacaugu

SEQ ID NO: 221517 - RNA, 19 nt, Artificial Sequence
  Description of Artificial Sequence: Synthetic oligonucleotide
  Antisense strand to SEQ ID NO: 221516
acauguaaucacuaccaca

SEQ ID NO: 221518 - RNA, 19 nt, Artificial Sequence
  Description of Artificial Sequence: Synthetic oligonucleotide
  Sense strand starting at position 335 of SEQ ID NO: 2853
agugauuacauguaucugu

SEQ ID NO: 221519 - RNA, 19 nt, Artificial Sequence
  Description of Artificial Sequence: Synthetic oligonucleotide
  Antisense strand to SEQ ID NO: 221518
acagauacauguaaucacu

SEQ ID NO: 221520 - RNA, 19 nt, Artificial Sequence
  Description of Artificial Sequence: Synthetic oligonucleotide
  Sense strand starting at position 338 of SEQ ID NO: 2853
gauuacauguaucugugaa

SEQ ID NO: 221521 - RNA, 19 nt, Artificial Sequence
  Description of Artificial Sequence: Synthetic oligonucleotide
  Antisense strand to SEQ ID NO: 221520
uucacagauacauguaauc

SEQ ID NO: 221522 - RNA, 19 nt, Artificial Sequence
  Description of Artificial Sequence: Synthetic oligonucleotide
  Sense strand starting at position 340 of SEQ ID NO: 2853
uuacauguaucugugaaug

SEQ ID NO: 221523 - RNA, 19 nt, Artificial Sequence
  Description of Artificial Sequence: Synthetic oligonucleotide
  Antisense strand to SEQ ID NO: 221522
cauucacagauacauguaa

SEQ ID NO: 221524 - RNA, 19 nt, Artificial Sequence
  Description of Artificial Sequence: Synthetic oligonucleotide
  Sense strand starting at position 345 of SEQ ID NO: 2853
uguaucugugaaugcauua

SEQ ID NO: 221525 - RNA, 19 nt, Artificial Sequence
  Description of Artificial Sequence: Synthetic oligonucleotide
  Antisense strand to SEQ ID NO: 221524
uaaugcauucacagauaca

SEQ ID NO: 221526 - RNA, 19 nt, Artificial Sequence
  Description of Artificial Sequence: Synthetic oligonucleotide
  Sense strand starting at position 350 of SEQ ID NO: 2853
cugugaaugcauuaaauau

SEQ ID NO: 221527 - RNA, 19 nt, Artificial Sequence
  Description of Artificial Sequence: Synthetic oligonucleotide
  Antisense strand to SEQ ID NO: 221526
auauuuaaugcauucacag

SEQ ID NO: 221528 - RNA, 19 nt, Artificial Sequence
  Description of Artificial Sequence: Synthetic oligonucleotide
  Sense strand starting at position 463 of SEQ ID NO: 2853
acugauguauguuuagaau

SEQ ID NO: 221529 - RNA, 19 nt, Artificial Sequence
  Description of Artificial Sequence: Synthetic oligonucleotide
  Antisense strand to SEQ ID NO: 221528
auucuaaacauacaucagu

SEQ ID NO: 221530 - RNA, 19 nt, Artificial Sequence
  Description of Artificial Sequence: Synthetic oligonucleotide
  Sense strand starting at position 469 of SEQ ID NO: 2853
guauguuuagaauaugcuu

SEQ ID NO: 221531 - RNA, 19 nt, Artificial Sequence
  Description of Artificial Sequence: Synthetic oligonucleotide
  Antisense strand to SEQ ID NO: 221530
aagcauauucuaaacauac

SEQ ID NO: 221532 - RNA, 19 nt, Artificial Sequence
  Description of Artificial Sequence: Synthetic oligonucleotide
  Sense strand starting at position 533 of SEQ ID NO: 2853
guggcaaaucuugauaguu

SEQ ID NO: 221533 - RNA, 19 nt, Artificial Sequence
  Description of Artificial Sequence: Synthetic oligonucleotide
  Antisense strand to SEQ ID NO: 221532
aacuaucaagauuugccac

SEQ ID NO: 221534 - RNA, 19 nt, Artificial Sequence
  Description of Artificial Sequence: Synthetic oligonucleotide
  Sense strand starting at position 622 of SEQ ID NO: 2853
ggaugaggcugacuguuaa

SEQ ID NO: 221535 - RNA, 19 nt, Artificial Sequence
  Description of Artificial Sequence: Synthetic oligonucleotide
  Antisense strand to SEQ ID NO: 221534
uuaacagucagccucaucc

SEQ ID NO: 221536 - RNA, 19 nt, Artificial Sequence
  Description of Artificial Sequence: Synthetic oligonucleotide
  Sense strand starting at position 817 of SEQ ID NO: 2853
ucugaacaaucugugguuu

SEQ ID NO: 221537 - RNA, 19 nt, Artificial Sequence
  Description of Artificial Sequence: Synthetic oligonucleotide
  Antisense strand to SEQ ID NO: 221536
aaaccacagauuguucaga

SEQ ID NO: 221538 - RNA, 19 nt, Artificial Sequence
  Description of Artificial Sequence: Synthetic oligonucleotide
  Sense strand starting at position 853 of SEQ ID NO: 2853
ugcuuuaaguugguauuua

SEQ ID NO: 221539 - RNA, 19 nt, Artificial Sequence
  Description of Artificial Sequence: Synthetic oligonucleotide
  Antisense strand to SEQ ID NO: 221538
uaaauaccaacuuaaagca

SEQ ID NO: 221540 - RNA, 19 nt, Artificial Sequence
  Description of Artificial Sequence: Synthetic oligonucleotide
  Sense strand starting at position 927 of SEQ ID NO: 2853
uuuacugccuagucuuauu

SEQ ID NO: 221541 - RNA, 19 nt, Artificial Sequence
  Description of Artificial Sequence: Synthetic oligonucleotide
  Antisense strand to SEQ ID NO: 221540
aauaagacuaggcaguaaa

SEQ ID NO: 221542 - RNA, 19 nt, Artificial Sequence
  Description of Artificial Sequence: Synthetic oligonucleotide
  Sense strand starting at position 932 of SEQ ID NO: 2853
ugccuagucuuauuucgga

SEQ ID NO: 221543 - RNA, 19 nt, Artificial Sequence
  Description of Artificial Sequence: Synthetic oligonucleotide
  Antisense strand to SEQ ID NO: 221542
uccgaaauaagacuaggca

SEQ ID NO: 221544 - RNA, 19 nt, Artificial Sequence
  Description of Artificial Sequence: Synthetic oligonucleotide
  Sense strand starting at position 937 of SEQ ID NO: 2853
agucuuauuucggacccau

SEQ ID NO: 221545 - RNA, 19 nt, Artificial Sequence
  Description of Artificial Sequence: Synthetic oligonucleotide
  Antisense strand to SEQ ID NO: 221544
auggguccgaaauaagacu

SEQ ID NO: 221546 - RNA, 19 nt, Artificial Sequence
  Description of Artificial Sequence: Synthetic oligonucleotide
  Sense strand starting at position 986 of SEQ ID NO: 2853
guaggcaugugguucuaua

SEQ ID NO: 221547 - RNA, 19 nt, Artificial Sequence
  Description of Artificial Sequence: Synthetic oligonucleotide
  Antisense strand to SEQ ID NO: 221546
uauagaaccacaugccuac

SEQ ID NO: 221548 - RNA, 19 nt, Artificial Sequence
  Description of Artificial Sequence: Synthetic oligonucleotide
  Sense strand starting at position 1021 of SEQ ID NO: 2853
ucaacagugaggugaauua

SEQ ID NO: 221549 - RNA, 19 nt, Artificial Sequence
  Description of Artificial Sequence: Synthetic oligonucleotide
  Antisense strand to SEQ ID NO: 221548
uaauucaccucacuguuga

SEQ ID NO: 221550 - RNA, 19 nt, Artificial Sequence
  Description of Artificial Sequence: Synthetic oligonucleotide
  Sense strand starting at position 1204 of SEQ ID NO: 2853
acucuuaggcuuuaaguua

SEQ ID NO: 221551 - RNA, 19 nt, Artificial Sequence
  Description of Artificial Sequence: Synthetic oligonucleotide
  Antisense strand to SEQ ID NO: 221550
uaacuuaaagccuaagagu

SEQ ID NO: 221552 - RNA, 19 nt, Artificial Sequence
  Description of Artificial Sequence: Synthetic oligonucleotide
  Sense strand starting at position 1308 of SEQ ID NO: 2853
ggcuuaaugaggugaccaa

SEQ ID NO: 221553 - RNA, 19 nt, Artificial Sequence
  Description of Artificial Sequence: Synthetic oligonucleotide
  Antisense strand to SEQ ID NO: 221552
uuggucaccucauuaagcc

SEQ ID NO: 221554 - RNA, 19 nt, Artificial Sequence
  Description of Artificial Sequence: Synthetic oligonucleotide
  Sense strand starting at position 1333 of SEQ ID NO: 2853
gaauaauuguuuccaggua

SEQ ID NO: 221555 - RNA, 19 nt, Artificial Sequence
  Description of Artificial Sequence: Synthetic oligonucleotide
  Antisense strand to SEQ ID NO: 221554
uaccuggaaacaauuauuc

SEQ ID NO: 221556 - RNA, 19 nt, Artificial Sequence
  Description of Artificial Sequence: Synthetic oligonucleotide
  Sense strand starting at position 2018 of SEQ ID NO: 2853
cggcuucucccaggaacua

SEQ ID NO: 221557 - RNA, 19 nt, Artificial Sequence
  Description of Artificial Sequence: Synthetic oligonucleotide
  Antisense strand to SEQ ID NO: 221556
uaguuccugggagaagccg

SEQ ID NO: 221558 - RNA, 19 nt, Artificial Sequence
  Description of Artificial Sequence: Synthetic oligonucleotide
  Sense strand starting at position 2483 of SEQ ID NO: 2853
cugggauugaguuacucuu

SEQ ID NO: 221559 - RNA, 19 nt, Artificial Sequence
  Description of Artificial Sequence: Synthetic oligonucleotide
  Antisense strand to SEQ ID NO: 221558
aagaguaacucaaucccag

SEQ ID NO: 221560 - RNA, 19 nt, Artificial Sequence
  Description of Artificial Sequence: Synthetic oligonucleotide
  Sense strand starting at position 2495 of SEQ ID NO: 2853
uacucuuucccggaggcuu

SEQ ID NO: 221561 - RNA, 19 nt, Artificial Sequence
  Description of Artificial Sequence: Synthetic oligonucleotide
  Antisense strand to SEQ ID NO: 221560
aagccuccgggaaagagua

SEQ ID NO: 221562 - RNA, 19 nt, Artificial Sequence
  Description of Artificial Sequence: Synthetic oligonucleotide
  Sense strand starting at position 2642 of SEQ ID NO: 2853
cuaagauauuccucgucga

SEQ ID NO: 221563 - RNA, 19 nt, Artificial Sequence
  Description of Artificial Sequence: Synthetic oligonucleotide
  Antisense strand to SEQ ID NO: 221562
ucgacgaggaauaucuuag

SEQ ID NO: 221564 - RNA, 19 nt, Artificial Sequence
  Description of Artificial Sequence: Synthetic oligonucleotide
  Sense strand starting at position 2643 of SEQ ID NO: 2853
uaagauauuccucgucgau

SEQ ID NO: 221565 - RNA, 19 nt, Artificial Sequence
  Description of Artificial Sequence: Synthetic oligonucleotide
  Antisense strand to SEQ ID NO: 221564
aucgacgaggaauaucuua

SEQ ID NO: 221566 - RNA, 19 nt, Artificial Sequence
  Description of Artificial Sequence: Synthetic oligonucleotide
  Sense strand starting at position 2645 of SEQ ID NO: 2853
agauauuccucgucgaugu

SEQ ID NO: 221567 - RNA, 19 nt, Artificial Sequence
  Description of Artificial Sequence: Synthetic oligonucleotide
  Antisense strand to SEQ ID NO: 221566
acaucgacgaggaauaucu

SEQ ID NO: 221568 - RNA, 19 nt, Artificial Sequence
  Description of Artificial Sequence: Synthetic oligonucleotide
  Sense strand starting at position 2655 of SEQ ID NO: 2853
cgucgaugucucuaaguaa

SEQ ID NO: 221569 - RNA, 19 nt, Artificial Sequence
  Description of Artificial Sequence: Synthetic oligonucleotide
  Antisense strand to SEQ ID NO: 221568
uuacuuagagacaucgacg

SEQ ID NO: 221570 - RNA, 19 nt, Artificial Sequence
  Description of Artificial Sequence: Synthetic oligonucleotide
  Sense strand starting at position 3074 of SEQ ID NO: 2853
augaauuggccuugucugu

SEQ ID NO: 221571 - RNA, 19 nt, Artificial Sequence
  Description of Artificial Sequence: Synthetic oligonucleotide
  Antisense strand to SEQ ID NO: 221570
acagacaaggccaauucau

SEQ ID NO: 221572 - RNA, 19 nt, Artificial Sequence
  Description of Artificial Sequence: Synthetic oligonucleotide
  Sense strand starting at position 3459 of SEQ ID NO: 2853
ugaugacauuaagugagua

SEQ ID NO: 221573 - RNA, 19 nt, Artificial Sequence
  Description of Artificial Sequence: Synthetic oligonucleotide
  Antisense strand to SEQ ID NO: 221572
uacucacuuaaugucauca

SEQ ID NO: 221574 - RNA, 19 nt, Artificial Sequence
  Description of Artificial Sequence: Synthetic oligonucleotide
  Sense strand starting at position 3463 of SEQ ID NO: 2853
gacauuaagugaguacuua

SEQ ID NO: 221575 - RNA, 19 nt, Artificial Sequence
  Description of Artificial Sequence: Synthetic oligonucleotide
  Antisense strand to SEQ ID NO: 221574
uaaguacucacuuaauguc

SEQ ID NO: 221576 - RNA, 19 nt, Artificial Sequence
  Description of Artificial Sequence: Synthetic oligonucleotide
  Sense strand starting at position 3467 of SEQ ID NO: 2853
uuaagugaguacuuacagu

SEQ ID NO: 221577 - RNA, 19 nt, Artificial Sequence
  Description of Artificial Sequence: Synthetic oligonucleotide
  Antisense strand to SEQ ID NO: 221576
acuguaaguacucacuuaa

SEQ ID NO: 221578 - RNA, 19 nt, Artificial Sequence
  Description of Artificial Sequence: Synthetic oligonucleotide
  Sense strand starting at position 3504 of SEQ ID NO: 2853
gucacaguuuaaguguuua

SEQ ID NO: 221579 - RNA, 19 nt, Artificial Sequence
  Description of Artificial Sequence: Synthetic oligonucleotide
  Antisense strand to SEQ ID NO: 221578
uaaacacuuaaacugugac

SEQ ID NO: 221580 - RNA, 19 nt, Artificial Sequence
  Description of Artificial Sequence: Synthetic oligonucleotide
  Sense strand starting at position 3508 of SEQ ID NO: 2853
caguuuaaguguuuaguaa

SEQ ID NO: 221581 - RNA, 19 nt, Artificial Sequence
  Description of Artificial Sequence: Synthetic oligonucleotide
  Antisense strand to SEQ ID NO: 221580
uuacuaaacacuuaaacug

SEQ ID NO: 221582 - RNA, 19 nt, Artificial Sequence
  Description of Artificial Sequence: Synthetic oligonucleotide
  Sense strand starting at position 3614 of SEQ ID NO: 2853
gguagagugcuuuguauau

SEQ ID NO: 221583 - RNA, 19 nt, Artificial Sequence
  Description of Artificial Sequence: Synthetic oligonucleotide
  Antisense strand to SEQ ID NO: 221582
auauacaaagcacucuacc

SEQ ID NO: 221584 - RNA, 19 nt, Artificial Sequence
  Description of Artificial Sequence: Synthetic oligonucleotide
  Sense strand starting at position 3636 of SEQ ID NO: 2853
uagagagugcuacaauagu

SEQ ID NO: 221585 - RNA, 19 nt, Artificial Sequence
  Description of Artificial Sequence: Synthetic oligonucleotide
  Antisense strand to SEQ ID NO: 221584
acuauuguagcacucucua

SEQ ID NO: 221586 - RNA, 19 nt, Artificial Sequence
  Description of Artificial Sequence: Synthetic oligonucleotide
  Sense strand starting at position 3674 of SEQ ID NO: 2853
ugcagcugucacugagaaa

SEQ ID NO: 221587 - RNA, 19 nt, Artificial Sequence
  Description of Artificial Sequence: Synthetic oligonucleotide
  Antisense strand to SEQ ID NO: 221586
uuucucagugacagcugca

SEQ ID NO: 221588 - RNA, 19 nt, Artificial Sequence
  Description of Artificial Sequence: Synthetic oligonucleotide
  Sense strand starting at position 114 of SEQ ID NO: 2854
auuguaaaucagcacugaa

SEQ ID NO: 221589 - RNA, 19 nt, Artificial Sequence
  Description of Artificial Sequence: Synthetic oligonucleotide
  Antisense strand to SEQ ID NO: 221588
uucagugcugauuuacaau

SEQ ID NO: 221590 - RNA, 19 nt, Artificial Sequence
  Description of Artificial Sequence: Synthetic oligonucleotide
  Sense strand starting at position 134 of SEQ ID NO: 2854
acuggauccuggguaggau

SEQ ID NO: 221591 - RNA, 19 nt, Artificial Sequence
  Description of Artificial Sequence: Synthetic oligonucleotide
  Antisense strand to SEQ ID NO: 221590
auccuacccaggauccagu

SEQ ID NO: 221592 - RNA, 19 nt, Artificial Sequence
  Description of Artificial Sequence: Synthetic oligonucleotide
  Sense strand starting at position 151 of SEQ ID NO: 2854
augucaguucuagauauuc

SEQ ID NO: 221593 - RNA, 19 nt, Artificial Sequence
  Description of Artificial Sequence: Synthetic oligonucleotide
  Antisense strand to SEQ ID NO: 221592
gaauaucuagaacugacau

SEQ ID NO: 221594 - RNA, 19 nt, Artificial Sequence
  Description of Artificial Sequence: Synthetic oligonucleotide
  Sense strand starting at position 381 of SEQ ID NO: 2854
ugcaaaugccacuaagaau

SEQ ID NO: 221595 - RNA, 19 nt, Artificial Sequence
  Description of Artificial Sequence: Synthetic oligonucleotide
  Antisense strand to SEQ ID NO: 221594
auucuuaguggcauuugca

SEQ ID NO: 221596 - RNA, 19 nt, Artificial Sequence
  Description of Artificial Sequence: Synthetic oligonucleotide
  Sense strand starting at position 498 of SEQ ID NO: 2854
cggagagcauuugaaagaa

SEQ ID NO: 221597 - RNA, 19 nt, Artificial Sequence
  Description of Artificial Sequence: Synthetic oligonucleotide
  Antisense strand to SEQ ID NO: 221596
uucuuucaaaugcucuccg

SEQ ID NO: 221598 - RNA, 19 nt, Artificial Sequence
  Description of Artificial Sequence: Synthetic oligonucleotide
  Sense strand starting at position 550 of SEQ ID NO: 2854
uuaucucagcccugaagaa

SEQ ID NO: 221599 - RNA, 19 nt, Artificial Sequence
  Description of Artificial Sequence: Synthetic oligonucleotide
  Antisense strand to SEQ ID NO: 221598
uucuucagggcugagauaa

SEQ ID NO: 221600 - RNA, 19 nt, Artificial Sequence
  Description of Artificial Sequence: Synthetic oligonucleotide
  Sense strand starting at position 684 of SEQ ID NO: 2854
ggcugcaauaaugggauua

SEQ ID NO: 221601 - RNA, 19 nt, Artificial Sequence
  Description of Artificial Sequence: Synthetic oligonucleotide
  Antisense strand to SEQ ID NO: 221600
uaaucccauuauugcagcc

SEQ ID NO: 221602 - RNA, 19 nt, Artificial Sequence
  Description of Artificial Sequence: Synthetic oligonucleotide
  Sense strand starting at position 715 of SEQ ID NO: 2854
gugggagggcaauaguuua

SEQ ID NO: 221603 - RNA, 19 nt, Artificial Sequence
  Description of Artificial Sequence: Synthetic oligonucleotide
  Antisense strand to SEQ ID NO: 221602
uaaacuauugcccucccac

SEQ ID NO: 221604 - RNA, 19 nt, Artificial Sequence
  Description of Artificial Sequence: Synthetic oligonucleotide
  Sense strand starting at position 723 of SEQ ID NO: 2854
gcaauaguuuaauuaaagg

SEQ ID NO: 221605 - RNA, 19 nt, Artificial Sequence
  Description of Artificial Sequence: Synthetic oligonucleotide
  Antisense strand to SEQ ID NO: 221604
ccuuuaauuaaacuauugc

SEQ ID NO: 221606 - RNA, 19 nt, Artificial Sequence
  Description of Artificial Sequence: Synthetic oligonucleotide
  Sense strand starting at position 790 of SEQ ID NO: 2854
gggucacccugagcgauuu

SEQ ID NO: 221607 - RNA, 19 nt, Artificial Sequence
  Description of Artificial Sequence: Synthetic oligonucleotide
  Antisense strand to SEQ ID NO: 221606
aaaucgcucagggugaccc

SEQ ID NO: 221608 - RNA, 19 nt, Artificial Sequence
  Description of Artificial Sequence: Synthetic oligonucleotide
  Sense strand starting at position 2156 of SEQ ID NO: 2854
gggacaggugauuggguaa

SEQ ID NO: 221609 - RNA, 19 nt, Artificial Sequence
  Description of Artificial Sequence: Synthetic oligonucleotide
  Antisense strand to SEQ ID NO: 221608
uuacccaaucaccuguccc

SEQ ID NO: 221610 - RNA, 19 nt, Artificial Sequence
  Description of Artificial Sequence: Synthetic oligonucleotide
  Sense strand starting at position 2467 of SEQ ID NO: 2854
cuuugaucuuagguugaau

SEQ ID NO: 221611 - RNA, 19 nt, Artificial Sequence
  Description of Artificial Sequence: Synthetic oligonucleotide
  Antisense strand to SEQ ID NO: 221610
auucaaccuaagaucaaag

SEQ ID NO: 221612 - RNA, 19 nt, Artificial Sequence
  Description of Artificial Sequence: Synthetic oligonucleotide
  Sense strand starting at position 2479 of SEQ ID NO: 2854
guugaauuugaccgguuca

SEQ ID NO: 221613 - RNA, 19 nt, Artificial Sequence
  Description of Artificial Sequence: Synthetic oligonucleotide
  Antisense strand to SEQ ID NO: 221612
ugaaccggucaaauucaac

SEQ ID NO: 221614 - RNA, 19 nt, Artificial Sequence
  Description of Artificial Sequence: Synthetic oligonucleotide
  Sense strand starting at position 2624 of SEQ ID NO: 2854
aggcgcgugccauucagaa

SEQ ID NO: 221615 - RNA, 19 nt, Artificial Sequence
  Description of Artificial Sequence: Synthetic oligonucleotide
  Antisense strand to SEQ ID NO: 221614
uucugaauggcacgcgccu

SEQ ID NO: 221616 - RNA, 19 nt, Artificial Sequence
  Description of Artificial Sequence: Synthetic oligonucleotide
  Sense strand starting at position 2678 of SEQ ID NO: 2854
gggucuuuggaagaaucgu

SEQ ID NO: 221617 - RNA, 19 nt, Artificial Sequence
  Description of Artificial Sequence: Synthetic oligonucleotide
  Antisense strand to SEQ ID NO: 221616
acgauucuuccaaagaccc

SEQ ID NO: 221618 - RNA, 19 nt, Artificial Sequence
  Description of Artificial Sequence: Synthetic oligonucleotide
  Sense strand starting at position 2684 of SEQ ID NO: 2854
uuggaagaaucguuccuac

SEQ ID NO: 221619 - RNA, 19 nt, Artificial Sequence
  Description of Artificial Sequence: Synthetic oligonucleotide
  Antisense strand to SEQ ID NO: 221618
guaggaacgauucuuccaa

SEQ ID NO: 221620 - RNA, 19 nt, Artificial Sequence
  Description of Artificial Sequence: Synthetic oligonucleotide
  Sense strand starting at position 2687 of SEQ ID NO: 2854
gaagaaucguuccuacucu

SEQ ID NO: 221621 - RNA, 19 nt, Artificial Sequence
  Description of Artificial Sequence: Synthetic oligonucleotide
  Antisense strand to SEQ ID NO: 221620
agaguaggaacgauucuuc

SEQ ID NO: 221622 - RNA, 19 nt, Artificial Sequence
  Description of Artificial Sequence: Synthetic oligonucleotide
  Sense strand starting at position 2695 of SEQ ID NO: 2854
guuccuacucuggguaaag

SEQ ID NO: 221623 - RNA, 19 nt, Artificial Sequence
  Description of Artificial Sequence: Synthetic oligonucleotide
  Antisense strand to SEQ ID NO: 221622
cuuuacccagaguaggaac

SEQ ID NO: 221624 - RNA, 19 nt, Artificial Sequence
  Description of Artificial Sequence: Synthetic oligonucleotide
  Sense strand starting at position 2696 of SEQ ID NO: 2854
uuccuacucuggguaaaga

SEQ ID NO: 221625 - RNA, 19 nt, Artificial Sequence
  Description of Artificial Sequence: Synthetic oligonucleotide
  Antisense strand to SEQ ID NO: 221624
ucuuuacccagaguaggaa

SEQ ID NO: 221626 - RNA, 19 nt, Artificial Sequence
  Description of Artificial Sequence: Synthetic oligonucleotide
  Sense strand starting at position 2745 of SEQ ID NO: 2854
gucaguaggcuacauguua

SEQ ID NO: 221627 - RNA, 19 nt, Artificial Sequence
  Description of Artificial Sequence: Synthetic oligonucleotide
  Antisense strand to SEQ ID NO: 221626
uaacauguagccuacugac

SEQ ID NO: 221628 - RNA, 19 nt, Artificial Sequence
  Description of Artificial Sequence: Synthetic oligonucleotide
  Sense strand starting at position 2833 of SEQ ID NO: 2854
aaaguaguuccguagagac

SEQ ID NO: 221629 - RNA, 19 nt, Artificial Sequence
  Description of Artificial Sequence: Synthetic oligonucleotide
  Antisense strand to SEQ ID NO: 221628
gucucuacggaacuacuuu

SEQ ID NO: 221630 - RNA, 19 nt, Artificial Sequence
  Description of Artificial Sequence: Synthetic oligonucleotide
  Sense strand starting at position 2835 of SEQ ID NO: 2854
aguaguuccguagagacca

SEQ ID NO: 221631 - RNA, 19 nt, Artificial Sequence
  Description of Artificial Sequence: Synthetic oligonucleotide
  Antisense strand to SEQ ID NO: 221630
uggucucuacggaacuacu

SEQ ID NO: 221632 - RNA, 19 nt, Artificial Sequence
  Description of Artificial Sequence: Synthetic oligonucleotide
  Sense strand starting at position 2915 of SEQ ID NO: 2854
agaucaauuugugagacga

SEQ ID NO: 221633 - RNA, 19 nt, Artificial Sequence
  Description of Artificial Sequence: Synthetic oligonucleotide
  Antisense strand to SEQ ID NO: 221632
ucgucucacaaauugaucu

SEQ ID NO: 221634 - RNA, 19 nt, Artificial Sequence
  Description of Artificial Sequence: Synthetic oligonucleotide
  Sense strand starting at position 3252 of SEQ ID NO: 2854
agguccuagucuguuaaca

SEQ ID NO: 221635 - RNA, 19 nt, Artificial Sequence
  Description of Artificial Sequence: Synthetic oligonucleotide
  Antisense strand to SEQ ID NO: 221634
uguuaacagacuaggaccu

SEQ ID NO: 221636 - RNA, 19 nt, Artificial Sequence
  Description of Artificial Sequence: Synthetic oligonucleotide
  Sense strand starting at position 3260 of SEQ ID NO: 2854
gucuguuaacaggacaugu

SEQ ID NO: 221637 - RNA, 19 nt, Artificial Sequence
  Description of Artificial Sequence: Synthetic oligonucleotide
  Antisense strand to SEQ ID NO: 221636
acauguccuguuaacagac

SEQ ID NO: 221638 - RNA, 19 nt, Artificial Sequence
  Description of Artificial Sequence: Synthetic oligonucleotide
  Sense strand starting at position 3271 of SEQ ID NO: 2854
ggacauguguggccgaaug

SEQ ID NO: 221639 - RNA, 19 nt, Artificial Sequence
  Description of Artificial Sequence: Synthetic oligonucleotide
  Antisense strand to SEQ ID NO: 221638
cauucggccacacaugucc

SEQ ID NO: 221640 - RNA, 19 nt, Artificial Sequence
  Description of Artificial Sequence: Synthetic oligonucleotide
  Sense strand starting at position 3303 of SEQ ID NO: 2854
ggcaaaccuuuggcuuaga

SEQ ID NO: 221641 - RNA, 19 nt, Artificial Sequence
  Description of Artificial Sequence: Synthetic oligonucleotide
  Antisense strand to SEQ ID NO: 221640
ucuaagccaaagguuugcc

SEQ ID NO: 221642 - RNA, 19 nt, Artificial Sequence
  Description of Artificial Sequence: Synthetic oligonucleotide
  Sense strand starting at position 3312 of SEQ ID NO: 2854
uuggcuuagacuuaaccga

SEQ ID NO: 221643 - RNA, 19 nt, Artificial Sequence
  Description of Artificial Sequence: Synthetic oligonucleotide
  Antisense strand to SEQ ID NO: 221642
ucgguuaagucuaagccaa

SEQ ID NO: 221644 - RNA, 19 nt, Artificial Sequence
  Description of Artificial Sequence: Synthetic oligonucleotide
  Sense strand starting at position 3461 of SEQ ID NO: 2854
cccaucaguuguuucuaau

SEQ ID NO: 221645 - RNA, 19 nt, Artificial Sequence
  Description of Artificial Sequence: Synthetic oligonucleotide
  Antisense strand to SEQ ID NO: 221644
auuagaaacaacugauggg

SEQ ID NO: 221646 - RNA, 19 nt, Artificial Sequence
  Description of Artificial Sequence: Synthetic oligonucleotide
  Sense strand starting at position 3530 of SEQ ID NO: 2854
uuggucucucccggagauu

SEQ ID NO: 221647 - RNA, 19 nt, Artificial Sequence
  Description of Artificial Sequence: Synthetic oligonucleotide
  Antisense strand to SEQ ID NO: 221646
aaucuccgggagagaccaa

SEQ ID NO: 221648 - RNA, 19 nt, Artificial Sequence
  Description of Artificial Sequence: Synthetic oligonucleotide
  Sense strand starting at position 3531 of SEQ ID NO: 2854
uggucucucccggagauua

SEQ ID NO: 221649 - RNA, 19 nt, Artificial Sequence
  Description of Artificial Sequence: Synthetic oligonucleotide
  Antisense strand to SEQ ID NO: 221648
uaaucuccgggagagacca

SEQ ID NO: 221650 - RNA, 19 nt, Artificial Sequence
  Description of Artificial Sequence: Synthetic oligonucleotide
  Sense strand starting at position 3533 of SEQ ID NO: 2854
gucucucccggagauuauu

SEQ ID NO: 221651 - RNA, 19 nt, Artificial Sequence
  Description of Artificial Sequence: Synthetic oligonucleotide
  Antisense strand to SEQ ID NO: 221650
aauaaucuccgggagagac

SEQ ID NO: 221652 - RNA, 19 nt, Artificial Sequence
  Description of Artificial Sequence: Synthetic oligonucleotide
  Sense strand starting at position 3659 of SEQ ID NO: 2854
ccauuagagcuuuaaaugu

SEQ ID NO: 221653 - RNA, 19 nt, Artificial Sequence
  Description of Artificial Sequence: Synthetic oligonucleotide
  Antisense strand to SEQ ID NO: 221652
acauuuaaagcucuaaugg

SEQ ID NO: 221654 - RNA, 19 nt, Artificial Sequence
  Description of Artificial Sequence: Synthetic oligonucleotide
  Sense strand starting at position 3713 of SEQ ID NO: 2854
agagacauguuuccacgua

SEQ ID NO: 221655 - RNA, 19 nt, Artificial Sequence
  Description of Artificial Sequence: Synthetic oligonucleotide
  Antisense strand to SEQ ID NO: 221654
uacguggaaacaugucucu

SEQ ID NO: 221656 - RNA, 19 nt, Artificial Sequence
  Description of Artificial Sequence: Synthetic oligonucleotide
  Sense strand starting at position 3725 of SEQ ID NO: 2854
ccacguauguauucugaac

SEQ ID NO: 221657 - RNA, 19 nt, Artificial Sequence
  Description of Artificial Sequence: Synthetic oligonucleotide
  Antisense strand to SEQ ID NO: 221656
guucagaauacauacgugg

SEQ ID NO: 221658 - RNA, 19 nt, Artificial Sequence
  Description of Artificial Sequence: Synthetic oligonucleotide
  Sense strand starting at position 3805 of SEQ ID NO: 2854
cuucuuaaaguuugcagau

SEQ ID NO: 221659 - RNA, 19 nt, Artificial Sequence
  Description of Artificial Sequence: Synthetic oligonucleotide
  Antisense strand to SEQ ID NO: 221658
aucugcaaacuuuaagaag

SEQ ID NO: 221660 - RNA, 19 nt, Artificial Sequence
  Description of Artificial Sequence: Synthetic oligonucleotide
  Sense strand starting at position 3806 of SEQ ID NO: 2854
uucuuaaaguuugcagaua

SEQ ID NO: 221661 - RNA, 19 nt, Artificial Sequence
  Description of Artificial Sequence: Synthetic oligonucleotide
  Antisense strand to SEQ ID NO: 221660
uaucugcaaacuuuaagaa

SEQ ID NO: 221662 - RNA, 19 nt, Artificial Sequence
  Description of Artificial Sequence: Synthetic oligonucleotide
  Sense strand starting at position 3895 of SEQ ID NO: 2854
aagagaaucuuagggaaau

SEQ ID NO: 221663 - RNA, 19 nt, Artificial Sequence
  Description of Artificial Sequence: Synthetic oligonucleotide
  Antisense strand to SEQ ID NO: 221662
auuucccuaagauucucuu

SEQ ID NO: 221664 - RNA, 19 nt, Artificial Sequence
  Description of Artificial Sequence: Synthetic oligonucleotide
  Sense strand starting at position 3924 of SEQ ID NO: 2854
gagugcuggauccgaauaa

SEQ ID NO: 221665 - RNA, 19 nt, Artificial Sequence
  Description of Artificial Sequence: Synthetic oligonucleotide
  Antisense strand to SEQ ID NO: 221664
uuauucggauccagcacuc

SEQ ID NO: 221666 - RNA, 19 nt, Artificial Sequence
  Description of Artificial Sequence: Synthetic oligonucleotide
  Sense strand starting at position 3928 of SEQ ID NO: 2854
gcuggauccgaauaacaug

SEQ ID NO: 221667 - RNA, 19 nt, Artificial Sequence
  Description of Artificial Sequence: Synthetic oligonucleotide
  Antisense strand to SEQ ID NO: 221666
cauguuauucggauccagc

SEQ ID NO: 221668 - RNA, 19 nt, Artificial Sequence
  Description of Artificial Sequence: Synthetic oligonucleotide
  Sense strand starting at position 203 of SEQ ID NO: 2856
cgaguuguggucuggacag

SEQ ID NO: 221669 - RNA, 19 nt, Artificial Sequence
  Description of Artificial Sequence: Synthetic oligonucleotide
  Antisense strand to SEQ ID NO: 221668
cuguccagaccacaacucg

SEQ ID NO: 221670 - RNA, 19 nt, Artificial Sequence
  Description of Artificial Sequence: Synthetic oligonucleotide
  Sense strand starting at position 372 of SEQ ID NO: 2856
agugaaucacuguauuccu

SEQ ID NO: 221671 - RNA, 19 nt, Artificial Sequence
  Description of Artificial Sequence: Synthetic oligonucleotide
  Antisense strand to SEQ ID NO: 221670
aggaauacagugauucacu

SEQ ID NO: 221672 - RNA, 19 nt, Artificial Sequence
  Description of Artificial Sequence: Synthetic oligonucleotide
  Sense strand starting at position 500 of SEQ ID NO: 2856
uaggcugagccauagaaca

SEQ ID NO: 221673 - RNA, 19 nt, Artificial Sequence
  Description of Artificial Sequence: Synthetic oligonucleotide
  Antisense strand to SEQ ID NO: 221672
uguucuauggcucagccua

SEQ ID NO: 221674 - RNA, 19 nt, Artificial Sequence
  Description of Artificial Sequence: Synthetic oligonucleotide
  Sense strand starting at position 686 of SEQ ID NO: 2856
augugacgagcguaaucua

SEQ ID NO: 221675 - RNA, 19 nt, Artificial Sequence
  Description of Artificial Sequence: Synthetic oligonucleotide
  Antisense strand to SEQ ID NO: 221674
uagauuacgcucgucacau

SEQ ID NO: 221676 - RNA, 19 nt, Artificial Sequence
  Description of Artificial Sequence: Synthetic oligonucleotide
  Sense strand starting at position 694 of SEQ ID NO: 2856
agcguaaucuaagcccaga

SEQ ID NO: 221677 - RNA, 19 nt, Artificial Sequence
  Description of Artificial Sequence: Synthetic oligonucleotide
  Antisense strand to SEQ ID NO: 221676
ucugggcuuagauuacgcu

SEQ ID NO: 221678 - RNA, 19 nt, Artificial Sequence
  Description of Artificial Sequence: Synthetic oligonucleotide
  Sense strand starting at position 697 of SEQ ID NO: 2856
guaaucuaagcccagaaau

SEQ ID NO: 221679 - RNA, 19 nt, Artificial Sequence
  Description of Artificial Sequence: Synthetic oligonucleotide
  Antisense strand to SEQ ID NO: 221678
auuucugggcuuagauuac

SEQ ID NO: 221680 - RNA, 19 nt, Artificial Sequence
  Description of Artificial Sequence: Synthetic oligonucleotide
  Sense strand starting at position 798 of SEQ ID NO: 2856
ucccgaucacuagggaaga

SEQ ID NO: 221681 - RNA, 19 nt, Artificial Sequence
  Description of Artificial Sequence: Synthetic oligonucleotide
  Antisense strand to SEQ ID NO: 221680
ucuucccuagugaucggga

SEQ ID NO: 221682 - RNA, 19 nt, Artificial Sequence
  Description of Artificial Sequence: Synthetic oligonucleotide
  Sense strand starting at position 825 of SEQ ID NO: 2856
gugucaggaccaugaauau

SEQ ID NO: 221683 - RNA, 19 nt, Artificial Sequence
  Description of Artificial Sequence: Synthetic oligonucleotide
  Antisense strand to SEQ ID NO: 221682
auauucaugguccugacac

SEQ ID NO: 221684 - RNA, 19 nt, Artificial Sequence
  Description of Artificial Sequence: Synthetic oligonucleotide
  Sense strand starting at position 837 of SEQ ID NO: 2856
ugaauauugcauuagcaga

SEQ ID NO: 221685 - RNA, 19 nt, Artificial Sequence
  Description of Artificial Sequence: Synthetic oligonucleotide
  Antisense strand to SEQ ID NO: 221684
ucugcuaaugcaauauuca

SEQ ID NO: 221686 - RNA, 19 nt, Artificial Sequence
  Description of Artificial Sequence: Synthetic oligonucleotide
  Sense strand starting at position 858 of SEQ ID NO: 2856
cccagagcucagcaaagua

SEQ ID NO: 221687 - RNA, 19 nt, Artificial Sequence
  Description of Artificial Sequence: Synthetic oligonucleotide
  Antisense strand to SEQ ID NO: 221686
uacuuugcugagcucuggg

SEQ ID NO: 221688 - RNA, 19 nt, Artificial Sequence
  Description of Artificial Sequence: Synthetic oligonucleotide
  Sense strand starting at position 1003 of SEQ ID NO: 2856
ccaguaucucacugcucua

SEQ ID NO: 221689 - RNA, 19 nt, Artificial Sequence
  Description of Artificial Sequence: Synthetic oligonucleotide
  Antisense strand to SEQ ID NO: 221688
uagagcagugagauacugg

SEQ ID NO: 221690 - RNA, 19 nt, Artificial Sequence
  Description of Artificial Sequence: Synthetic oligonucleotide
  Sense strand starting at position 1115 of SEQ ID NO: 2856
gucaaagacuauucuaggu

SEQ ID NO: 221691 - RNA, 19 nt, Artificial Sequence
  Description of Artificial Sequence: Synthetic oligonucleotide
  Antisense strand to SEQ ID NO: 221690
accuagaauagucuuugac

SEQ ID NO: 221692 - RNA, 19 nt, Artificial Sequence
  Description of Artificial Sequence: Synthetic oligonucleotide
  Sense strand starting at position 1147 of SEQ ID NO: 2856
cugguaaagugcccugaua

SEQ ID NO: 221693 - RNA, 19 nt, Artificial Sequence
  Description of Artificial Sequence: Synthetic oligonucleotide
  Antisense strand to SEQ ID NO: 221692
uaucagggcacuuuaccag

SEQ ID NO: 221694 - RNA, 19 nt, Artificial Sequence
  Description of Artificial Sequence: Synthetic oligonucleotide
  Sense strand starting at position 1149 of SEQ ID NO: 2856
gguaaagugcccugauaca

SEQ ID NO: 221695 - RNA, 19 nt, Artificial Sequence
  Description of Artificial Sequence: Synthetic oligonucleotide
  Antisense strand to SEQ ID NO: 221694
uguaucagggcacuuuacc

SEQ ID NO: 221696 - RNA, 19 nt, Artificial Sequence
  Description of Artificial Sequence: Synthetic oligonucleotide
  Sense strand starting at position 1356 of SEQ ID NO: 2856
gguguuaaggccuggaaca

SEQ ID NO: 221697 - RNA, 19 nt, Artificial Sequence
  Description of Artificial Sequence: Synthetic oligonucleotide
  Antisense strand to SEQ ID NO: 221696
uguuccaggccuuaacacc

SEQ ID NO: 221698 - RNA, 19 nt, Artificial Sequence
  Description of Artificial Sequence: Synthetic oligonucleotide
  Sense strand starting at position 1605 of SEQ ID NO: 2856
ccugucucaucauugcaga

SEQ ID NO: 221699 - RNA, 19 nt, Artificial Sequence
  Description of Artificial Sequence: Synthetic oligonucleotide
  Antisense strand to SEQ ID NO: 221698
ucugcaaugaugagacagg

SEQ ID NO: 221700 - RNA, 19 nt, Artificial Sequence
  Description of Artificial Sequence: Synthetic oligonucleotide
  Sense strand starting at position 1606 of SEQ ID NO: 2856
cugucucaucauugcagaa

SEQ ID NO: 221701 - RNA, 19 nt, Artificial Sequence
  Description of Artificial Sequence: Synthetic oligonucleotide
  Antisense strand to SEQ ID NO: 221700
uucugcaaugaugagacag

SEQ ID NO: 221702 - RNA, 19 nt, Artificial Sequence
  Description of Artificial Sequence: Synthetic oligonucleotide
  Sense strand starting at position 2486 of SEQ ID NO: 2856
ccugguuguagacagguua

SEQ ID NO: 221703 - RNA, 19 nt, Artificial Sequence
  Description of Artificial Sequence: Synthetic oligonucleotide
  Antisense strand to SEQ ID NO: 221702
uaaccugucuacaaccagg

SEQ ID NO: 221704 - RNA, 19 nt, Artificial Sequence
  Description of Artificial Sequence: Synthetic oligonucleotide
  Sense strand starting at position 2501 of SEQ ID NO: 2856
guuaaagccugucucuaaa

SEQ ID NO: 221705 - RNA, 19 nt, Artificial Sequence
  Description of Artificial Sequence: Synthetic oligonucleotide
  Antisense strand to SEQ ID NO: 221704
uuuagagacaggcuuuaac

SEQ ID NO: 221706 - RNA, 19 nt, Artificial Sequence
  Description of Artificial Sequence: Synthetic oligonucleotide
  Sense strand starting at position 2538 of SEQ ID NO: 2856
aggcacuuugcagagacau

SEQ ID NO: 221707 - RNA, 19 nt, Artificial Sequence
  Description of Artificial Sequence: Synthetic oligonucleotide
  Antisense strand to SEQ ID NO: 221706
augucucugcaaagugccu

SEQ ID NO: 221708 - RNA, 19 nt, Artificial Sequence
  Description of Artificial Sequence: Synthetic oligonucleotide
  Sense strand starting at position 2546 of SEQ ID NO: 2856
ugcagagacaucugaguuu

SEQ ID NO: 221709 - RNA, 19 nt, Artificial Sequence
  Description of Artificial Sequence: Synthetic oligonucleotide
  Antisense strand to SEQ ID NO: 221708
aaacucagaugucucugca

SEQ ID NO: 221710 - RNA, 19 nt, Artificial Sequence
  Description of Artificial Sequence: Synthetic oligonucleotide
  Sense strand starting at position 2613 of SEQ ID NO: 2856
cccugauccacauggguga

SEQ ID NO: 221711 - RNA, 19 nt, Artificial Sequence
  Description of Artificial Sequence: Synthetic oligonucleotide
  Antisense strand to SEQ ID NO: 221710
ucacccauguggaucaggg

SEQ ID NO: 221712 - RNA, 19 nt, Artificial Sequence
  Description of Artificial Sequence: Synthetic oligonucleotide
  Sense strand starting at position 2702 of SEQ ID NO: 2856
ucaacugucugauugacac

SEQ ID NO: 221713 - RNA, 19 nt, Artificial Sequence
  Description of Artificial Sequence: Synthetic oligonucleotide
  Antisense strand to SEQ ID NO: 221712
gugucaaucagacaguuga

SEQ ID NO: 221714 - RNA, 19 nt, Artificial Sequence
  Description of Artificial Sequence: Synthetic oligonucleotide
  Sense strand starting at position 2712 of SEQ ID NO: 2856
gauugacacuuuccaacgu

SEQ ID NO: 221715 - RNA, 19 nt, Artificial Sequence
  Description of Artificial Sequence: Synthetic oligonucleotide
  Antisense strand to SEQ ID NO: 221714
acguuggaaagugucaauc

SEQ ID NO: 221716 - RNA, 19 nt, Artificial Sequence
  Description of Artificial Sequence: Synthetic oligonucleotide
  Sense strand starting at position 2716 of SEQ ID NO: 2856
gacacuuuccaacgugagu

SEQ ID NO: 221717 - RNA, 19 nt, Artificial Sequence
  Description of Artificial Sequence: Synthetic oligonucleotide
  Antisense strand to SEQ ID NO: 221716
acucacguuggaaaguguc

SEQ ID NO: 221718 - RNA, 19 nt, Artificial Sequence
  Description of Artificial Sequence: Synthetic oligonucleotide
  Sense strand starting at position 2961 of SEQ ID NO: 2856
uuucuaugacucugaaaug

SEQ ID NO: 221719 - RNA, 19 nt, Artificial Sequence
  Description of Artificial Sequence: Synthetic oligonucleotide
  Antisense strand to SEQ ID NO: 221718
cauuucagagucauagaaa

SEQ ID NO: 221720 - RNA, 19 nt, Artificial Sequence
  Description of Artificial Sequence: Synthetic oligonucleotide
  Sense strand starting at position 3043 of SEQ ID NO: 2856
gcauguggucucuaccaug

SEQ ID NO: 221721 - RNA, 19 nt, Artificial Sequence
  Description of Artificial Sequence: Synthetic oligonucleotide
  Antisense strand to SEQ ID NO: 221720
caugguagagaccacaugc

SEQ ID NO: 221722 - RNA, 19 nt, Artificial Sequence
  Description of Artificial Sequence: Synthetic oligonucleotide
  Sense strand starting at position 3049 of SEQ ID NO: 2856
ggucucuaccauggcaaga

SEQ ID NO: 221723 - RNA, 19 nt, Artificial Sequence
  Description of Artificial Sequence: Synthetic oligonucleotide
  Antisense strand to SEQ ID NO: 221722
ucuugccaugguagagacc

SEQ ID NO: 221724 - RNA, 19 nt, Artificial Sequence
  Description of Artificial Sequence: Synthetic oligonucleotide
  Sense strand starting at position 3157 of SEQ ID NO: 2856
cucuccaugcaaugucaga

SEQ ID NO: 221725 - RNA, 19 nt, Artificial Sequence
  Description of Artificial Sequence: Synthetic oligonucleotide
  Antisense strand to SEQ ID NO: 221724
ucugacauugcauggagag

SEQ ID NO: 221726 - RNA, 19 nt, Artificial Sequence
  Description of Artificial Sequence: Synthetic oligonucleotide
  Sense strand starting at position 3170 of SEQ ID NO: 2856
gucagaauggccugagaua

SEQ ID NO: 221727 - RNA, 19 nt, Artificial Sequence
  Description of Artificial Sequence: Synthetic oligonucleotide
  Antisense strand to SEQ ID NO: 221726
uaucucaggccauucugac

SEQ ID NO: 221728 - RNA, 19 nt, Artificial Sequence
  Description of Artificial Sequence: Synthetic oligonucleotide
  Sense strand starting at position 3301 of SEQ ID NO: 2856
ugaggaaguggucauggca

SEQ ID NO: 221729 - RNA, 19 nt, Artificial Sequence
  Description of Artificial Sequence: Synthetic oligonucleotide
  Antisense strand to SEQ ID NO: 221728
ugccaugaccacuuccuca

SEQ ID NO: 221730 - RNA, 19 nt, Artificial Sequence
  Description of Artificial Sequence: Synthetic oligonucleotide
  Sense strand starting at position 3309 of SEQ ID NO: 2856
uggucauggcagugaucua

SEQ ID NO: 221731 - RNA, 19 nt, Artificial Sequence
  Description of Artificial Sequence: Synthetic oligonucleotide
  Antisense strand to SEQ ID NO: 221730
uagaucacugccaugacca

SEQ ID NO: 221732 - RNA, 19 nt, Artificial Sequence
  Description of Artificial Sequence: Synthetic oligonucleotide
  Sense strand starting at position 3310 of SEQ ID NO: 2856
ggucauggcagugaucuaa

SEQ ID NO: 221733 - RNA, 19 nt, Artificial Sequence
  Description of Artificial Sequence: Synthetic oligonucleotide
  Antisense strand to SEQ ID NO: 221732
uuagaucacugccaugacc

SEQ ID NO: 221734 - RNA, 19 nt, Artificial Sequence
  Description of Artificial Sequence: Synthetic oligonucleotide
  Sense strand starting at position 3314 of SEQ ID NO: 2856
auggcagugaucuaagagu

SEQ ID NO: 221735 - RNA, 19 nt, Artificial Sequence
  Description of Artificial Sequence: Synthetic oligonucleotide
  Antisense strand to SEQ ID NO: 221734
acucuuagaucacugccau

SEQ ID NO: 221736 - RNA, 19 nt, Artificial Sequence
  Description of Artificial Sequence: Synthetic oligonucleotide
  Sense strand starting at position 3384 of SEQ ID NO: 2856
cuccaaugaugguugauga

SEQ ID NO: 221737 - RNA, 19 nt, Artificial Sequence
  Description of Artificial Sequence: Synthetic oligonucleotide
  Antisense strand to SEQ ID NO: 221736
ucaucaaccaucauuggag

SEQ ID NO: 221738 - RNA, 19 nt, Artificial Sequence
  Description of Artificial Sequence: Synthetic oligonucleotide
  Sense strand starting at position 3385 of SEQ ID NO: 2856
uccaaugaugguugaugaa

SEQ ID NO: 221739 - RNA, 19 nt, Artificial Sequence
  Description of Artificial Sequence: Synthetic oligonucleotide
  Antisense strand to SEQ ID NO: 221738
uucaucaaccaucauugga

SEQ ID NO: 221740 - RNA, 19 nt, Artificial Sequence
  Description of Artificial Sequence: Synthetic oligonucleotide
  Sense strand starting at position 3496 of SEQ ID NO: 2856
uauuuauggcugugcccau

SEQ ID NO: 221741 - RNA, 19 nt, Artificial Sequence
  Description of Artificial Sequence: Synthetic oligonucleotide
  Antisense strand to SEQ ID NO: 221740
augggcacagccauaaaua

SEQ ID NO: 221742 - RNA, 19 nt, Artificial Sequence
  Description of Artificial Sequence: Synthetic oligonucleotide
  Sense strand starting at position 3731 of SEQ ID NO: 2856
acagucaaaugcuuauagu

SEQ ID NO: 221743 - RNA, 19 nt, Artificial Sequence
  Description of Artificial Sequence: Synthetic oligonucleotide
  Antisense strand to SEQ ID NO: 221742
acuauaagcauuugacugu

SEQ ID NO: 221744 - RNA, 19 nt, Artificial Sequence
  Description of Artificial Sequence: Synthetic oligonucleotide
  Sense strand starting at position 3804 of SEQ ID NO: 2856
augagugcuaccuggguau

SEQ ID NO: 221745 - RNA, 19 nt, Artificial Sequence
  Description of Artificial Sequence: Synthetic oligonucleotide
  Antisense strand to SEQ ID NO: 221744
auacccagguagcacucau

SEQ ID NO: 221746 - RNA, 19 nt, Artificial Sequence
  Description of Artificial Sequence: Synthetic oligonucleotide
  Sense strand starting at position 3823 of SEQ ID NO: 2856
ggacacugagccugauguu

SEQ ID NO: 221747 - RNA, 19 nt, Artificial Sequence
  Description of Artificial Sequence: Synthetic oligonucleotide
  Antisense strand to SEQ ID NO: 221746
aacaucaggcucagugucc

SEQ ID NO: 221748 - RNA, 19 nt, Artificial Sequence
  Description of Artificial Sequence: Synthetic oligonucleotide
  Sense strand starting at position 59 of SEQ ID NO: 2855
ugccaaugauauucuaaga

SEQ ID NO: 221749 - RNA, 19 nt, Artificial Sequence
  Description of Artificial Sequence: Synthetic oligonucleotide
  Antisense strand to SEQ ID NO: 221748
ucuuagaauaucauuggca

SEQ ID NO: 221750 - RNA, 19 nt, Artificial Sequence
  Description of Artificial Sequence: Synthetic oligonucleotide
  Sense strand starting at position 145 of SEQ ID NO: 2855
cauugaccagucugugaau

SEQ ID NO: 221751 - RNA, 19 nt, Artificial Sequence
  Description of Artificial Sequence: Synthetic oligonucleotide
  Antisense strand to SEQ ID NO: 221750
auucacagacuggucaaug

SEQ ID NO: 221752 - RNA, 19 nt, Artificial Sequence
  Description of Artificial Sequence: Synthetic oligonucleotide
  Sense strand starting at position 156 of SEQ ID NO: 2855
cugugaaugucaccacaug

SEQ ID NO: 221753 - RNA, 19 nt, Artificial Sequence
  Description of Artificial Sequence: Synthetic oligonucleotide
  Antisense strand to SEQ ID NO: 221752
cauguggugacauucacag

SEQ ID NO: 221754 - RNA, 19 nt, Artificial Sequence
  Description of Artificial Sequence: Synthetic oligonucleotide
  Sense strand starting at position 235 of SEQ ID NO: 2855
gcaaauaacucaguuuaga

SEQ ID NO: 221755 - RNA, 19 nt, Artificial Sequence
  Description of Artificial Sequence: Synthetic oligonucleotide
  Antisense strand to SEQ ID NO: 221754
ucuaaacugaguuauuugc

SEQ ID NO: 221756 - RNA, 19 nt, Artificial Sequence
  Description of Artificial Sequence: Synthetic oligonucleotide
  Sense strand starting at position 590 of SEQ ID NO: 2855
ucuggagauucuucuccau

SEQ ID NO: 221757 - RNA, 19 nt, Artificial Sequence
  Description of Artificial Sequence: Synthetic oligonucleotide
  Antisense strand to SEQ ID NO: 221756
auggagaagaaucuccaga

SEQ ID NO: 221758 - RNA, 19 nt, Artificial Sequence
  Description of Artificial Sequence: Synthetic oligonucleotide
  Sense strand starting at position 641 of SEQ ID NO: 2855
aaguaaauuggguggaucu

SEQ ID NO: 221759 - RNA, 19 nt, Artificial Sequence
  Description of Artificial Sequence: Synthetic oligonucleotide
  Antisense strand to SEQ ID NO: 221758
agauccacccaauuuacuu

SEQ ID NO: 221760 - RNA, 19 nt, Artificial Sequence
  Description of Artificial Sequence: Synthetic oligonucleotide
  Sense strand starting at position 642 of SEQ ID NO: 2855
aguaaauuggguggaucua

SEQ ID NO: 221761 - RNA, 19 nt, Artificial Sequence
  Description of Artificial Sequence: Synthetic oligonucleotide
  Antisense strand to SEQ ID NO: 221760
uagauccacccaauuuacu

SEQ ID NO: 221762 - RNA, 19 nt, Artificial Sequence
  Description of Artificial Sequence: Synthetic oligonucleotide
  Sense strand starting at position 685 of SEQ ID NO: 2855
ugcucagugguccaaauga

SEQ ID NO: 221763 - RNA, 19 nt, Artificial Sequence
  Description of Artificial Sequence: Synthetic oligonucleotide
  Antisense strand to SEQ ID NO: 221762
ucauuuggaccacugagca

SEQ ID NO: 221764 - RNA, 19 nt, Artificial Sequence
  Description of Artificial Sequence: Synthetic oligonucleotide
  Sense strand starting at position 693 of SEQ ID NO: 2855
gguccaaaugaaugguuua

SEQ ID NO: 221765 - RNA, 19 nt, Artificial Sequence
  Description of Artificial Sequence: Synthetic oligonucleotide
  Antisense strand to SEQ ID NO: 221764
uaaaccauucauuuggacc

SEQ ID NO: 221766 - RNA, 19 nt, Artificial Sequence
  Description of Artificial Sequence: Synthetic oligonucleotide
  Sense strand starting at position 696 of SEQ ID NO: 2855
ccaaaugaaugguuuauca

SEQ ID NO: 221767 - RNA, 19 nt, Artificial Sequence
  Description of Artificial Sequence: Synthetic oligonucleotide
  Antisense strand to SEQ ID NO: 221766
ugauaaaccauucauuugg

SEQ ID NO: 221768 - RNA, 19 nt, Artificial Sequence
  Description of Artificial Sequence: Synthetic oligonucleotide
  Sense strand starting at position 706 of SEQ ID NO: 2855
gguuuaucacuccacagau

SEQ ID NO: 221769 - RNA, 19 nt, Artificial Sequence
  Description of Artificial Sequence: Synthetic oligonucleotide
  Antisense strand to SEQ ID NO: 221768
aucuguggagugauaaacc

SEQ ID NO: 221770 - RNA, 19 nt, Artificial Sequence
  Description of Artificial Sequence: Synthetic oligonucleotide
  Sense strand starting at position 819 of SEQ ID NO: 2855
caaauaggcccaugguuua

SEQ ID NO: 221771 - RNA, 19 nt, Artificial Sequence
  Description of Artificial Sequence: Synthetic oligonucleotide
  Antisense strand to SEQ ID NO: 221770
uaaaccaugggccuauuug

SEQ ID NO: 221772 - RNA, 19 nt, Artificial Sequence
  Description of Artificial Sequence: Synthetic oligonucleotide
  Sense strand starting at position 1164 of SEQ ID NO: 2855
aggaauugccagugauaua

SEQ ID NO: 221773 - RNA, 19 nt, Artificial Sequence
  Description of Artificial Sequence: Synthetic oligonucleotide
  Antisense strand to SEQ ID NO: 221772
uauaucacuggcaauuccu

SEQ ID NO: 221774 - RNA, 19 nt, Artificial Sequence
  Description of Artificial Sequence: Synthetic oligonucleotide
  Sense strand starting at position 1415 of SEQ ID NO: 2855
gccaauuagagucagaggu

SEQ ID NO: 221775 - RNA, 19 nt, Artificial Sequence
  Description of Artificial Sequence: Synthetic oligonucleotide
  Antisense strand to SEQ ID NO: 221774
accucugacucuaauuggc

SEQ ID NO: 221776 - RNA, 19 nt, Artificial Sequence
  Description of Artificial Sequence: Synthetic oligonucleotide
  Sense strand starting at position 1957 of SEQ ID NO: 2855
gcgcuagugcugcucuaga

SEQ ID NO: 221777 - RNA, 19 nt, Artificial Sequence
  Description of Artificial Sequence: Synthetic oligonucleotide
  Antisense strand to SEQ ID NO: 221776
ucuagagcagcacuagcgc

SEQ ID NO: 221778 - RNA, 19 nt, Artificial Sequence
  Description of Artificial Sequence: Synthetic oligonucleotide
  Sense strand starting at position 1959 of SEQ ID NO: 2855
gcuagugcugcucuagacu

SEQ ID NO: 221779 - RNA, 19 nt, Artificial Sequence
  Description of Artificial Sequence: Synthetic oligonucleotide
  Antisense strand to SEQ ID NO: 221778
agucuagagcagcacuagc

SEQ ID NO: 221780 - RNA, 19 nt, Artificial Sequence
  Description of Artificial Sequence: Synthetic oligonucleotide
  Sense strand starting at position 1968 of SEQ ID NO: 2855
gcucuagacuugucaggaa

SEQ ID NO: 221781 - RNA, 19 nt, Artificial Sequence
  Description of Artificial Sequence: Synthetic oligonucleotide
  Antisense strand to SEQ ID NO: 221780
uuccugacaagucuagagc

SEQ ID NO: 221782 - RNA, 19 nt, Artificial Sequence
  Description of Artificial Sequence: Synthetic oligonucleotide
  Sense strand starting at position 2186 of SEQ ID NO: 2855
gcccauaagcaucaaguga

SEQ ID NO: 221783 - RNA, 19 nt, Artificial Sequence
  Description of Artificial Sequence: Synthetic oligonucleotide
  Antisense strand to SEQ ID NO: 221782
ucacuugaugcuuaugggc

SEQ ID NO: 221784 - RNA, 19 nt, Artificial Sequence
  Description of Artificial Sequence: Synthetic oligonucleotide
  Sense strand starting at position 2393 of SEQ ID NO: 2855
gcaagagaagggcaguaau

SEQ ID NO: 221785 - RNA, 19 nt, Artificial Sequence
  Description of Artificial Sequence: Synthetic oligonucleotide
  Antisense strand to SEQ ID NO: 221784
auuacugcccuucucuugc

SEQ ID NO: 221786 - RNA, 19 nt, Artificial Sequence
  Description of Artificial Sequence: Synthetic oligonucleotide
  Sense strand starting at position 2557 of SEQ ID NO: 2855
uggauuacuaaaggcagua

SEQ ID NO: 221787 - RNA, 19 nt, Artificial Sequence
  Description of Artificial Sequence: Synthetic oligonucleotide
  Antisense strand to SEQ ID NO: 221786
uacugccuuuaguaaucca

SEQ ID NO: 221788 - RNA, 19 nt, Artificial Sequence
  Description of Artificial Sequence: Synthetic oligonucleotide
  Sense strand starting at position 2778 of SEQ ID NO: 2855
augcauucuaaugagaggu

SEQ ID NO: 221789 - RNA, 19 nt, Artificial Sequence
  Description of Artificial Sequence: Synthetic oligonucleotide
  Antisense strand to SEQ ID NO: 221788
accucucauuagaaugcau

SEQ ID NO: 221790 - RNA, 19 nt, Artificial Sequence
  Description of Artificial Sequence: Synthetic oligonucleotide
  Sense strand starting at position 2803 of SEQ ID NO: 2855
gggacuauguuaccacacu

SEQ ID NO: 221791 - RNA, 19 nt, Artificial Sequence
  Description of Artificial Sequence: Synthetic oligonucleotide
  Antisense strand to SEQ ID NO: 221790
agugugguaacauaguccc

SEQ ID NO: 221792 - RNA, 19 nt, Artificial Sequence
  Description of Artificial Sequence: Synthetic oligonucleotide
  Sense strand starting at position 2920 of SEQ ID NO: 2855
ggcuccacugaguauggua

SEQ ID NO: 221793 - RNA, 19 nt, Artificial Sequence
  Description of Artificial Sequence: Synthetic oligonucleotide
  Antisense strand to SEQ ID NO: 221792
uaccauacucaguggagcc

SEQ ID NO: 221794 - RNA, 19 nt, Artificial Sequence
  Description of Artificial Sequence: Synthetic oligonucleotide
  Sense strand starting at position 2927 of SEQ ID NO: 2855
cugaguaugguauggaucu

SEQ ID NO: 221795 - RNA, 19 nt, Artificial Sequence
  Description of Artificial Sequence: Synthetic oligonucleotide
  Antisense strand to SEQ ID NO: 221794
agauccauaccauacucag

SEQ ID NO: 221796 - RNA, 19 nt, Artificial Sequence
  Description of Artificial Sequence: Synthetic oligonucleotide
  Sense strand starting at position 2997 of SEQ ID NO: 2855
cuggcagaacagugacuuu

SEQ ID NO: 221797 - RNA, 19 nt, Artificial Sequence
  Description of Artificial Sequence: Synthetic oligonucleotide
  Antisense strand to SEQ ID NO: 221796
aaagucacuguucugccag

SEQ ID NO: 221798 - RNA, 19 nt, Artificial Sequence
  Description of Artificial Sequence: Synthetic oligonucleotide
  Sense strand starting at position 3241 of SEQ ID NO: 2855
acauguucggagcacuuua

SEQ ID NO: 221799 - RNA, 19 nt, Artificial Sequence
  Description of Artificial Sequence: Synthetic oligonucleotide
  Antisense strand to SEQ ID NO: 221798
uaaagugcuccgaacaugu

SEQ ID NO: 221800 - RNA, 19 nt, Artificial Sequence
  Description of Artificial Sequence: Synthetic oligonucleotide
  Sense strand starting at position 3290 of SEQ ID NO: 2855
uuuauagaaccaugguuga

SEQ ID NO: 221801 - RNA, 19 nt, Artificial Sequence
  Description of Artificial Sequence: Synthetic oligonucleotide
  Antisense strand to SEQ ID NO: 221800
ucaaccaugguucuauaaa

SEQ ID NO: 221802 - RNA, 19 nt, Artificial Sequence
  Description of Artificial Sequence: Synthetic oligonucleotide
  Sense strand starting at position 3293 of SEQ ID NO: 2855
auagaaccaugguugagua

SEQ ID NO: 221803 - RNA, 19 nt, Artificial Sequence
  Description of Artificial Sequence: Synthetic oligonucleotide
  Antisense strand to SEQ ID NO: 221802
uacucaaccaugguucuau

SEQ ID NO: 221804 - RNA, 19 nt, Artificial Sequence
  Description of Artificial Sequence: Synthetic oligonucleotide
  Sense strand starting at position 3345 of SEQ ID NO: 2855
aucacuugguagcuacaua

SEQ ID NO: 221805 - RNA, 19 nt, Artificial Sequence
  Description of Artificial Sequence: Synthetic oligonucleotide
  Antisense strand to SEQ ID NO: 221804
uauguagcuaccaagugau

SEQ ID NO: 221806 - RNA, 19 nt, Artificial Sequence
  Description of Artificial Sequence: Synthetic oligonucleotide
  Sense strand starting at position 3359 of SEQ ID NO: 2855
acauaaacuuggucuaguu

SEQ ID NO: 221807 - RNA, 19 nt, Artificial Sequence
  Description of Artificial Sequence: Synthetic oligonucleotide
  Antisense strand to SEQ ID NO: 221806
aacuagaccaaguuuaugu

SEQ ID NO: 221808 - RNA, 19 nt, Artificial Sequence
  Description of Artificial Sequence: Synthetic oligonucleotide
  Sense strand starting at position 3368 of SEQ ID NO: 2855
uggucuaguuacuuaacau

SEQ ID NO: 221809 - RNA, 19 nt, Artificial Sequence
  Description of Artificial Sequence: Synthetic oligonucleotide
  Antisense strand to SEQ ID NO: 221808
auguuaaguaacuagacca

SEQ ID NO: 221810 - RNA, 19 nt, Artificial Sequence
  Description of Artificial Sequence: Synthetic oligonucleotide
  Sense strand starting at position 3407 of SEQ ID NO: 2855
auccgucauagggaaguaa

SEQ ID NO: 221811 - RNA, 19 nt, Artificial Sequence
  Description of Artificial Sequence: Synthetic oligonucleotide
  Antisense strand to SEQ ID NO: 221810
uuacuucccuaugacggau

SEQ ID NO: 221812 - RNA, 19 nt, Artificial Sequence
  Description of Artificial Sequence: Synthetic oligonucleotide
  Sense strand starting at position 3448 of SEQ ID NO: 2855
uaucgugaggauuagcuga

SEQ ID NO: 221813 - RNA, 19 nt, Artificial Sequence
  Description of Artificial Sequence: Synthetic oligonucleotide
  Antisense strand to SEQ ID NO: 221812
ucagcuaauccucacgaua

SEQ ID NO: 221814 - RNA, 19 nt, Artificial Sequence
  Description of Artificial Sequence: Synthetic oligonucleotide
  Sense strand starting at position 3528 of SEQ ID NO: 2855
agcuaagaacaaugucauc

SEQ ID NO: 221815 - RNA, 19 nt, Artificial Sequence
  Description of Artificial Sequence: Synthetic oligonucleotide
  Antisense strand to SEQ ID NO: 221814
gaugacauuguucuuagcu

SEQ ID NO: 221816 - RNA, 19 nt, Artificial Sequence
  Description of Artificial Sequence: Synthetic oligonucleotide
  Sense strand starting at position 3575 of SEQ ID NO: 2855
agagguuggccagggauga

SEQ ID NO: 221817 - RNA, 19 nt, Artificial Sequence
  Description of Artificial Sequence: Synthetic oligonucleotide
  Antisense strand to SEQ ID NO: 221816
ucaucccuggccaaccucu

SEQ ID NO: 221818 - RNA, 19 nt, Artificial Sequence
  Description of Artificial Sequence: Synthetic oligonucleotide
  Sense strand starting at position 3576 of SEQ ID NO: 2855
gagguuggccagggaugau

SEQ ID NO: 221819 - RNA, 19 nt, Artificial Sequence
  Description of Artificial Sequence: Synthetic oligonucleotide
  Antisense strand to SEQ ID NO: 221818
aucaucccuggccaaccuc

SEQ ID NO: 221820 - RNA, 19 nt, Artificial Sequence
  Description of Artificial Sequence: Synthetic oligonucleotide
  Sense strand starting at position 3604 of SEQ ID NO: 2855
gcaacugagucuuugagaa

SEQ ID NO: 221821 - RNA, 19 nt, Artificial Sequence
  Description of Artificial Sequence: Synthetic oligonucleotide
  Antisense strand to SEQ ID NO: 221820
uucucaaagacucaguugc

SEQ ID NO: 221822 - RNA, 19 nt, Artificial Sequence
  Description of Artificial Sequence: Synthetic oligonucleotide
  Sense strand starting at position 3612 of SEQ ID NO: 2855
gucuuugagaacugagcaa

SEQ ID NO: 221823 - RNA, 19 nt, Artificial Sequence
  Description of Artificial Sequence: Synthetic oligonucleotide
  Antisense strand to SEQ ID NO: 221822
uugcucaguucucaaagac

SEQ ID NO: 221824 - RNA, 19 nt, Artificial Sequence
  Description of Artificial Sequence: Synthetic oligonucleotide
  Sense strand starting at position 3624 of SEQ ID NO: 2855
ugagcaacuucccugaaga

SEQ ID NO: 221825 - RNA, 19 nt, Artificial Sequence
  Description of Artificial Sequence: Synthetic oligonucleotide
  Antisense strand to SEQ ID NO: 221824
ucuucagggaaguugcuca

SEQ ID NO: 221826 - RNA, 19 nt, Artificial Sequence
  Description of Artificial Sequence: Synthetic oligonucleotide
  Sense strand starting at position 3730 of SEQ ID NO: 2855
agacauaucuaggcuucca

SEQ ID NO: 221827 - RNA, 19 nt, Artificial Sequence
  Description of Artificial Sequence: Synthetic oligonucleotide
  Antisense strand to SEQ ID NO: 221826
uggaagccuagauaugucu

SEQ ID NO: 221828 - RNA, 19 nt, Artificial Sequence
  Description of Artificial Sequence: Synthetic oligonucleotide
  Sense strand starting at position 159 of SEQ ID NO: 2857
gucaucuaauacuuggagu

SEQ ID NO: 221829 - RNA, 19 nt, Artificial Sequence
  Description of Artificial Sequence: Synthetic oligonucleotide
  Antisense strand to SEQ ID NO: 221828
acuccaaguauuagaugac

SEQ ID NO: 221830 - RNA, 19 nt, Artificial Sequence
  Description of Artificial Sequence: Synthetic oligonucleotide
  Sense strand starting at position 207 of SEQ ID NO: 2857
uuuccuguuugauuguuaa

SEQ ID NO: 221831 - RNA, 19 nt, Artificial Sequence
  Description of Artificial Sequence: Synthetic oligonucleotide
  Antisense strand to SEQ ID NO: 221830
uuaacaaucaaacaggaaa

SEQ ID NO: 221832 - RNA, 19 nt, Artificial Sequence
  Description of Artificial Sequence: Synthetic oligonucleotide
  Sense strand starting at position 210 of SEQ ID NO: 2857
ccuguuugauuguuaagag

SEQ ID NO: 221833 - RNA, 19 nt, Artificial Sequence
  Description of Artificial Sequence: Synthetic oligonucleotide
  Antisense strand to SEQ ID NO: 221832
cucuuaacaaucaaacagg

SEQ ID NO: 221834 - RNA, 19 nt, Artificial Sequence
  Description of Artificial Sequence: Synthetic oligonucleotide
  Sense strand starting at position 250 of SEQ ID NO: 2857
ggaaguugcagagauguau

SEQ ID NO: 221835 - RNA, 19 nt, Artificial Sequence
  Description of Artificial Sequence: Synthetic oligonucleotide
  Antisense strand to SEQ ID NO: 221834
auacaucucugcaacuucc

SEQ ID NO: 221836 - RNA, 19 nt, Artificial Sequence
  Description of Artificial Sequence: Synthetic oligonucleotide
  Sense strand starting at position 279 of SEQ ID NO: 2857
ugaagaacuuccuucuuga

SEQ ID NO: 221837 - RNA, 19 nt, Artificial Sequence
  Description of Artificial Sequence: Synthetic oligonucleotide
  Antisense strand to SEQ ID NO: 221836
ucaagaaggaaguucuuca

SEQ ID NO: 221838 - RNA, 19 nt, Artificial Sequence
  Description of Artificial Sequence: Synthetic oligonucleotide
  Sense strand starting at position 322 of SEQ ID NO: 2857
gcccuauaugcagauaauu

SEQ ID NO: 221839 - RNA, 19 nt, Artificial Sequence
  Description of Artificial Sequence: Synthetic oligonucleotide
  Antisense strand to SEQ ID NO: 221838
aauuaucugcauauagggc

SEQ ID NO: 221840 - RNA, 19 nt, Artificial Sequence
  Description of Artificial Sequence: Synthetic oligonucleotide
  Sense strand starting at position 330 of SEQ ID NO: 2857
ugcagauaauugcccauua

SEQ ID NO: 221841 - RNA, 19 nt, Artificial Sequence
  Description of Artificial Sequence: Synthetic oligonucleotide
  Antisense strand to SEQ ID NO: 221840
uaaugggcaauuaucugca

SEQ ID NO: 221842 - RNA, 19 nt, Artificial Sequence
  Description of Artificial Sequence: Synthetic oligonucleotide
  Sense strand starting at position 331 of SEQ ID NO: 2857
gcagauaauugcccauuau

SEQ ID NO: 221843 - RNA, 19 nt, Artificial Sequence
  Description of Artificial Sequence: Synthetic oligonucleotide
  Antisense strand to SEQ ID NO: 221842
auaaugggcaauuaucugc

SEQ ID NO: 221844 - RNA, 19 nt, Artificial Sequence
  Description of Artificial Sequence: Synthetic oligonucleotide
  Sense strand starting at position 461 of SEQ ID NO: 2857
agaaauauuugagaucuug

SEQ ID NO: 221845 - RNA, 19 nt, Artificial Sequence
  Description of Artificial Sequence: Synthetic oligonucleotide
  Antisense strand to SEQ ID NO: 221844
caagaucucaaauauuucu

SEQ ID NO: 221846 - RNA, 19 nt, Artificial Sequence
  Description of Artificial Sequence: Synthetic oligonucleotide
  Sense strand starting at position 471 of SEQ ID NO: 2857
gagaucuuguaguccagac

SEQ ID NO: 221847 - RNA, 19 nt, Artificial Sequence
  Description of Artificial Sequence: Synthetic oligonucleotide
  Antisense strand to SEQ ID NO: 221846
gucuggacuacaagaucuc

SEQ ID NO: 221848 - RNA, 19 nt, Artificial Sequence
  Description of Artificial Sequence: Synthetic oligonucleotide
  Sense strand starting at position 495 of SEQ ID NO: 2857
ccuuauaggccuggacaga

SEQ ID NO: 221849 - RNA, 19 nt, Artificial Sequence
  Description of Artificial Sequence: Synthetic oligonucleotide
  Antisense strand to SEQ ID NO: 221848
ucuguccaggccuauaagg

SEQ ID NO: 221850 - RNA, 19 nt, Artificial Sequence
  Description of Artificial Sequence: Synthetic oligonucleotide
  Sense strand starting at position 533 of SEQ ID NO: 2857
cagcacaucuguucuggaa

SEQ ID NO: 221851 - RNA, 19 nt, Artificial Sequence
  Description of Artificial Sequence: Synthetic oligonucleotide
  Antisense strand to SEQ ID NO: 221850
uuccagaacagaugugcug

SEQ ID NO: 221852 - RNA, 19 nt, Artificial Sequence
  Description of Artificial Sequence: Synthetic oligonucleotide
  Sense strand starting at position 681 of SEQ ID NO: 2857
acgagaucgcauuacaugu

SEQ ID NO: 221853 - RNA, 19 nt, Artificial Sequence
  Description of Artificial Sequence: Synthetic oligonucleotide
  Antisense strand to SEQ ID NO: 221852
acauguaaugcgaucucgu

SEQ ID NO: 221854 - RNA, 19 nt, Artificial Sequence
  Description of Artificial Sequence: Synthetic oligonucleotide
  Sense strand starting at position 694 of SEQ ID NO: 2857
acaugugcacgccauuaaa

SEQ ID NO: 221855 - RNA, 19 nt, Artificial Sequence
  Description of Artificial Sequence: Synthetic oligonucleotide
  Antisense strand to SEQ ID NO: 221854
uuuaauggcgugcacaugu

SEQ ID NO: 221856 - RNA, 19 nt, Artificial Sequence
  Description of Artificial Sequence: Synthetic oligonucleotide
  Sense strand starting at position 793 of SEQ ID NO: 2857
acauguuagccagaggcau

SEQ ID NO: 221857 - RNA, 19 nt, Artificial Sequence
  Description of Artificial Sequence: Synthetic oligonucleotide
  Antisense strand to SEQ ID NO: 221856
augccucuggcuaacaugu

SEQ ID NO: 221858 - RNA, 19 nt, Artificial Sequence
  Description of Artificial Sequence: Synthetic oligonucleotide
  Sense strand starting at position 821 of SEQ ID NO: 2857
auaacaguauauccuagua

SEQ ID NO: 221859 - RNA, 19 nt, Artificial Sequence
  Description of Artificial Sequence: Synthetic oligonucleotide
  Antisense strand to SEQ ID NO: 221858
uacuaggauauacuguuau

SEQ ID NO: 221860 - RNA, 19 nt, Artificial Sequence
  Description of Artificial Sequence: Synthetic oligonucleotide
  Sense strand starting at position 903 of SEQ ID NO: 2857
auuaaaggcucugcaauau

SEQ ID NO: 221861 - RNA, 19 nt, Artificial Sequence
  Description of Artificial Sequence: Synthetic oligonucleotide
  Antisense strand to SEQ ID NO: 221860
auauugcagagccuuuaau

SEQ ID NO: 221862 - RNA, 19 nt, Artificial Sequence
  Description of Artificial Sequence: Synthetic oligonucleotide
  Sense strand starting at position 913 of SEQ ID NO: 2857
cugcaauauucuguaguaa

SEQ ID NO: 221863 - RNA, 19 nt, Artificial Sequence
  Description of Artificial Sequence: Synthetic oligonucleotide
  Antisense strand to SEQ ID NO: 221862
uuacuacagaauauugcag

SEQ ID NO: 221864 - RNA, 19 nt, Artificial Sequence
  Description of Artificial Sequence: Synthetic oligonucleotide
  Sense strand starting at position 914 of SEQ ID NO: 2857
ugcaauauucuguaguaaa

SEQ ID NO: 221865 - RNA, 19 nt, Artificial Sequence
  Description of Artificial Sequence: Synthetic oligonucleotide
  Antisense strand to SEQ ID NO: 221864
uuuacuacagaauauugca

SEQ ID NO: 221866 - RNA, 19 nt, Artificial Sequence
  Description of Artificial Sequence: Synthetic oligonucleotide
  Sense strand starting at position 927 of SEQ ID NO: 2857
aguaaaguuuaaccacgaa

SEQ ID NO: 221867 - RNA, 19 nt, Artificial Sequence
  Description of Artificial Sequence: Synthetic oligonucleotide
  Antisense strand to SEQ ID NO: 221866
uucgugguuaaacuuuacu

SEQ ID NO: 221868 - RNA, 19 nt, Artificial Sequence
  Description of Artificial Sequence: Synthetic oligonucleotide
  Sense strand starting at position 1024 of SEQ ID NO: 2857
aggcuuuggcaguacauua

SEQ ID NO: 221869 - RNA, 19 nt, Artificial Sequence
  Description of Artificial Sequence: Synthetic oligonucleotide
  Antisense strand to SEQ ID NO: 221868
uaauguacugccaaagccu

SEQ ID NO: 221870 - RNA, 19 nt, Artificial Sequence
  Description of Artificial Sequence: Synthetic oligonucleotide
  Sense strand starting at position 1029 of SEQ ID NO: 2857
uuggcaguacauuaaguaa

SEQ ID NO: 221871 - RNA, 19 nt, Artificial Sequence
  Description of Artificial Sequence: Synthetic oligonucleotide
  Antisense strand to SEQ ID NO: 221870
uuacuuaauguacugccaa

SEQ ID NO: 221872 - RNA, 19 nt, Artificial Sequence
  Description of Artificial Sequence: Synthetic oligonucleotide
  Sense strand starting at position 1040 of SEQ ID NO: 2857
uuaaguaaaggaugucaau

SEQ ID NO: 221873 - RNA, 19 nt, Artificial Sequence
  Description of Artificial Sequence: Synthetic oligonucleotide
  Antisense strand to SEQ ID NO: 221872
auugacauccuuuacuuaa

SEQ ID NO: 221874 - RNA, 19 nt, Artificial Sequence
  Description of Artificial Sequence: Synthetic oligonucleotide
  Sense strand starting at position 1144 of SEQ ID NO: 2857
gcaauaaaugacgguaagu

SEQ ID NO: 221875 - RNA, 19 nt, Artificial Sequence
  Description of Artificial Sequence: Synthetic oligonucleotide
  Antisense strand to SEQ ID NO: 221874
acuuaccgucauuuauugc

SEQ ID NO: 221876 - RNA, 19 nt, Artificial Sequence
  Description of Artificial Sequence: Synthetic oligonucleotide
  Sense strand starting at position 1146 of SEQ ID NO: 2857
aauaaaugacgguaaguuu

SEQ ID NO: 221877 - RNA, 19 nt, Artificial Sequence
  Description of Artificial Sequence: Synthetic oligonucleotide
  Antisense strand to SEQ ID NO: 221876
aaacuuaccgucauuuauu

SEQ ID NO: 221878 - RNA, 19 nt, Artificial Sequence
  Description of Artificial Sequence: Synthetic oligonucleotide
  Sense strand starting at position 1186 of SEQ ID NO: 2857
agcagagauccuuaucugu

SEQ ID NO: 221879 - RNA, 19 nt, Artificial Sequence
  Description of Artificial Sequence: Synthetic oligonucleotide
  Antisense strand to SEQ ID NO: 221878
acagauaaggaucucugcu

SEQ ID NO: 221880 - RNA, 19 nt, Artificial Sequence
  Description of Artificial Sequence: Synthetic oligonucleotide
  Sense strand starting at position 1188 of SEQ ID NO: 2857
cagagauccuuaucugugu

SEQ ID NO: 221881 - RNA, 19 nt, Artificial Sequence
  Description of Artificial Sequence: Synthetic oligonucleotide
  Antisense strand to SEQ ID NO: 221880
acacagauaaggaucucug

SEQ ID NO: 221882 - RNA, 19 nt, Artificial Sequence
  Description of Artificial Sequence: Synthetic oligonucleotide
  Sense strand starting at position 1191 of SEQ ID NO: 2857
agauccuuaucugugugau

SEQ ID NO: 221883 - RNA, 19 nt, Artificial Sequence
  Description of Artificial Sequence: Synthetic oligonucleotide
  Antisense strand to SEQ ID NO: 221882
aucacacagauaaggaucu

SEQ ID NO: 221884 - RNA, 19 nt, Artificial Sequence
  Description of Artificial Sequence: Synthetic oligonucleotide
  Sense strand starting at position 1192 of SEQ ID NO: 2857
gauccuuaucugugugauu

SEQ ID NO: 221885 - RNA, 19 nt, Artificial Sequence
  Description of Artificial Sequence: Synthetic oligonucleotide
  Antisense strand to SEQ ID NO: 221884
aaucacacagauaaggauc

SEQ ID NO: 221886 - RNA, 19 nt, Artificial Sequence
  Description of Artificial Sequence: Synthetic oligonucleotide
  Sense strand starting at position 1193 of SEQ ID NO: 2857
auccuuaucugugugauuu

SEQ ID NO: 221887 - RNA, 19 nt, Artificial Sequence
  Description of Artificial Sequence: Synthetic oligonucleotide
  Antisense strand to SEQ ID NO: 221886
aaaucacacagauaaggau

SEQ ID NO: 221888 - RNA, 19 nt, Artificial Sequence
  Description of Artificial Sequence: Synthetic oligonucleotide
  Sense strand starting at position 1194 of SEQ ID NO: 2857
uccuuaucugugugauuua

SEQ ID NO: 221889 - RNA, 19 nt, Artificial Sequence
  Description of Artificial Sequence: Synthetic oligonucleotide
  Antisense strand to SEQ ID NO: 221888
uaaaucacacagauaagga

SEQ ID NO: 221890 - RNA, 19 nt, Artificial Sequence
  Description of Artificial Sequence: Synthetic oligonucleotide
  Sense strand starting at position 1197 of SEQ ID NO: 2857
uuaucugugugauuuagcu

SEQ ID NO: 221891 - RNA, 19 nt, Artificial Sequence
  Description of Artificial Sequence: Synthetic oligonucleotide
  Antisense strand to SEQ ID NO: 221890
agcuaaaucacacagauaa

SEQ ID NO: 221892 - RNA, 19 nt, Artificial Sequence
  Description of Artificial Sequence: Synthetic oligonucleotide
  Sense strand starting at position 1203 of SEQ ID NO: 2857
gugugauuuagcugugguu

SEQ ID NO: 221893 - RNA, 19 nt, Artificial Sequence
  Description of Artificial Sequence: Synthetic oligonucleotide
  Antisense strand to SEQ ID NO: 221892
aaccacagcuaaaucacac

SEQ ID NO: 221894 - RNA, 19 nt, Artificial Sequence
  Description of Artificial Sequence: Synthetic oligonucleotide
  Sense strand starting at position 1205 of SEQ ID NO: 2857
gugauuuagcugugguucu

SEQ ID NO: 221895 - RNA, 19 nt, Artificial Sequence
  Description of Artificial Sequence: Synthetic oligonucleotide
  Antisense strand to SEQ ID NO: 221894
agaaccacagcuaaaucac

SEQ ID NO: 221896 - RNA, 19 nt, Artificial Sequence
  Description of Artificial Sequence: Synthetic oligonucleotide
  Sense strand starting at position 1215 of SEQ ID NO: 2857
ugugguucugucuaaagac

SEQ ID NO: 221897 - RNA, 19 nt, Artificial Sequence
  Description of Artificial Sequence: Synthetic oligonucleotide
  Antisense strand to SEQ ID NO: 221896
gucuuuagacagaaccaca

SEQ ID NO: 221898 - RNA, 19 nt, Artificial Sequence
  Description of Artificial Sequence: Synthetic oligonucleotide
  Sense strand starting at position 1257 of SEQ ID NO: 2857
aggaucaucuugccagcua

SEQ ID NO: 221899 - RNA, 19 nt, Artificial Sequence
  Description of Artificial Sequence: Synthetic oligonucleotide
  Antisense strand to SEQ ID NO: 221898
uagcuggcaagaugauccu

SEQ ID NO: 221900 - RNA, 19 nt, Artificial Sequence
  Description of Artificial Sequence: Synthetic oligonucleotide
  Sense strand starting at position 1329 of SEQ ID NO: 2857
cugugaguccuuuacgauu

SEQ ID NO: 221901 - RNA, 19 nt, Artificial Sequence
  Description of Artificial Sequence: Synthetic oligonucleotide
  Antisense strand to SEQ ID NO: 221900
aaucguaaaggacucacag

SEQ ID NO: 221902 - RNA, 19 nt, Artificial Sequence
  Description of Artificial Sequence: Synthetic oligonucleotide
  Sense strand starting at position 1362 of SEQ ID NO: 2857
agacgaauuucucaaccau

SEQ ID NO: 221903 - RNA, 19 nt, Artificial Sequence
  Description of Artificial Sequence: Synthetic oligonucleotide
  Antisense strand to SEQ ID NO: 221902
augguugagaaauucgucu

SEQ ID NO: 221904 - RNA, 19 nt, Artificial Sequence
  Description of Artificial Sequence: Synthetic oligonucleotide
  Sense strand starting at position 3805 of SEQ ID NO: 2857
ucaaccauccuuggauuga

SEQ ID NO: 221905 - RNA, 19 nt, Artificial Sequence
  Description of Artificial Sequence: Synthetic oligonucleotide
  Antisense strand to SEQ ID NO: 221904
ucaauccaaggaugguuga

SEQ ID NO: 221906 - RNA, 19 nt, Artificial Sequence
  Description of Artificial Sequence: Synthetic oligonucleotide
  Sense strand starting at position 3843 of SEQ ID NO: 2857
gaugguugugucuauagua

SEQ ID NO: 221907 - RNA, 19 nt, Artificial Sequence
  Description of Artificial Sequence: Synthetic oligonucleotide
  Antisense strand to SEQ ID NO: 221906
uacuauagacacaaccauc

SEQ ID NO: 221908 - RNA, 19 nt, Artificial Sequence
  Description of Artificial Sequence: Synthetic oligonucleotide
  Sense strand starting at position 85 of SEQ ID NO: 2858
guaccauucuggucauguu

SEQ ID NO: 221909 - RNA, 19 nt, Artificial Sequence
  Description of Artificial Sequence: Synthetic oligonucleotide
  Antisense strand to SEQ ID NO: 221908
aacaugaccagaaugguac

SEQ ID NO: 221910 - RNA, 19 nt, Artificial Sequence
  Description of Artificial Sequence: Synthetic oligonucleotide
  Sense strand starting at position 97 of SEQ ID NO: 2858
ucauguucccugcaaguuu

SEQ ID NO: 221911 - RNA, 19 nt, Artificial Sequence
  Description of Artificial Sequence: Synthetic oligonucleotide
  Antisense strand to SEQ ID NO: 221910
aaacuugcagggaacauga

SEQ ID NO: 221912 - RNA, 19 nt, Artificial Sequence
  Description of Artificial Sequence: Synthetic oligonucleotide
  Sense strand starting at position 121 of SEQ ID NO: 2858
gaaagcggaccuuaaguau

SEQ ID NO: 221913 - RNA, 19 nt, Artificial Sequence
  Description of Artificial Sequence: Synthetic oligonucleotide
  Antisense strand to SEQ ID NO: 221912
auacuuaagguccgcuuuc

SEQ ID NO: 221914 - RNA, 19 nt, Artificial Sequence
  Description of Artificial Sequence: Synthetic oligonucleotide
  Sense strand starting at position 124 of SEQ ID NO: 2858
agcggaccuuaaguauaau

SEQ ID NO: 221915 - RNA, 19 nt, Artificial Sequence
  Description of Artificial Sequence: Synthetic oligonucleotide
  Antisense strand to SEQ ID NO: 221914
auuauacuuaagguccgcu

SEQ ID NO: 221916 - RNA, 19 nt, Artificial Sequence
  Description of Artificial Sequence: Synthetic oligonucleotide
  Sense strand starting at position 125 of SEQ ID NO: 2858
gcggaccuuaaguauaaua

SEQ ID NO: 221917 - RNA, 19 nt, Artificial Sequence
  Description of Artificial Sequence: Synthetic oligonucleotide
  Antisense strand to SEQ ID NO: 221916
uauuauacuuaagguccgc

SEQ ID NO: 221918 - RNA, 19 nt, Artificial Sequence
  Description of Artificial Sequence: Synthetic oligonucleotide
  Sense strand starting at position 165 of SEQ ID NO: 2858
uuagaaacauucgugaaau

SEQ ID NO: 221919 - RNA, 19 nt, Artificial Sequence
  Description of Artificial Sequence: Synthetic oligonucleotide
  Antisense strand to SEQ ID NO: 221918
auuucacgaauguuucuaa

SEQ ID NO: 221920 - RNA, 19 nt, Artificial Sequence
  Description of Artificial Sequence: Synthetic oligonucleotide
  Sense strand starting at position 240 of SEQ ID NO: 2858
ucaugaaauuuguguauga

SEQ ID NO: 221921 - RNA, 19 nt, Artificial Sequence
  Description of Artificial Sequence: Synthetic oligonucleotide
  Antisense strand to SEQ ID NO: 221920
ucauacacaaauuucauga

SEQ ID NO: 221922 - RNA, 19 nt, Artificial Sequence
  Description of Artificial Sequence: Synthetic oligonucleotide
  Sense strand starting at position 379 of SEQ ID NO: 2858
auugaauccuauuagaaga

SEQ ID NO: 221923 - RNA, 19 nt, Artificial Sequence
  Description of Artificial Sequence: Synthetic oligonucleotide
  Antisense strand to SEQ ID NO: 221922
ucuucuaauaggauucaau

SEQ ID NO: 221924 - RNA, 19 nt, Artificial Sequence
  Description of Artificial Sequence: Synthetic oligonucleotide
  Sense strand starting at position 835 of SEQ ID NO: 2858
uaggccuaacgugauacau

SEQ ID NO: 221925 - RNA, 19 nt, Artificial Sequence
  Description of Artificial Sequence: Synthetic oligonucleotide
  Antisense strand to SEQ ID NO: 221924
auguaucacguuaggccua

SEQ ID NO: 221926 - RNA, 19 nt, Artificial Sequence
  Description of Artificial Sequence: Synthetic oligonucleotide
  Sense strand starting at position 845 of SEQ ID NO: 2858
gugauacauuuauauagca

SEQ ID NO: 221927 - RNA, 19 nt, Artificial Sequence
  Description of Artificial Sequence: Synthetic oligonucleotide
  Antisense strand to SEQ ID NO: 221926
ugcuauauaaauguaucac

SEQ ID NO: 221928 - RNA, 19 nt, Artificial Sequence
  Description of Artificial Sequence: Synthetic oligonucleotide
  Sense strand starting at position 860 of SEQ ID NO: 2858
agcaauaaacguuacauaa

SEQ ID NO: 221929 - RNA, 19 nt, Artificial Sequence
  Description of Artificial Sequence: Synthetic oligonucleotide
  Antisense strand to SEQ ID NO: 221928
uuauguaacguuuauugcu

SEQ ID NO: 221930 - RNA, 19 nt, Artificial Sequence
  Description of Artificial Sequence: Synthetic oligonucleotide
  Sense strand starting at position 895 of SEQ ID NO: 2858
ucacguuuagcgcauuuaa

SEQ ID NO: 221931 - RNA, 19 nt, Artificial Sequence
  Description of Artificial Sequence: Synthetic oligonucleotide
  Antisense strand to SEQ ID NO: 221930
uuaaaugcgcuaaacguga

SEQ ID NO: 221932 - RNA, 19 nt, Artificial Sequence
  Description of Artificial Sequence: Synthetic oligonucleotide
  Sense strand starting at position 981 of SEQ ID NO: 2858
aacuguaggguucgauaag

SEQ ID NO: 221933 - RNA, 19 nt, Artificial Sequence
  Description of Artificial Sequence: Synthetic oligonucleotide
  Antisense strand to SEQ ID NO: 221932
cuuaucgaacccuacaguu

SEQ ID NO: 221934 - RNA, 19 nt, Artificial Sequence
  Description of Artificial Sequence: Synthetic oligonucleotide
  Sense strand starting at position 987 of SEQ ID NO: 2858
aggguucgauaagccauau

SEQ ID NO: 221935 - RNA, 19 nt, Artificial Sequence
  Description of Artificial Sequence: Synthetic oligonucleotide
  Antisense strand to SEQ ID NO: 221934
auauggcuuaucgaacccu

SEQ ID NO: 221936 - RNA, 19 nt, Artificial Sequence
  Description of Artificial Sequence: Synthetic oligonucleotide
  Sense strand starting at position 991 of SEQ ID NO: 2858
uucgauaagccauaucaaa

SEQ ID NO: 221937 - RNA, 19 nt, Artificial Sequence
  Description of Artificial Sequence: Synthetic oligonucleotide
  Antisense strand to SEQ ID NO: 221936
uuugauauggcuuaucgaa

SEQ ID NO: 221938 - RNA, 19 nt, Artificial Sequence
  Description of Artificial Sequence: Synthetic oligonucleotide
  Sense strand starting at position 1477 of SEQ ID NO: 2858
gaagaaucguccuccgaac

SEQ ID NO: 221939 - RNA, 19 nt, Artificial Sequence
  Description of Artificial Sequence: Synthetic oligonucleotide
  Antisense strand to SEQ ID NO: 221938
guucggaggacgauucuuc

SEQ ID NO: 221940 - RNA, 19 nt, Artificial Sequence
  Description of Artificial Sequence: Synthetic oligonucleotide
  Sense strand starting at position 1986 of SEQ ID NO: 2858
gauguuuggugauuagggu

SEQ ID NO: 221941 - RNA, 19 nt, Artificial Sequence
  Description of Artificial Sequence: Synthetic oligonucleotide
  Antisense strand to SEQ ID NO: 221940
acccuaaucaccaaacauc

SEQ ID NO: 221942 - RNA, 19 nt, Artificial Sequence
  Description of Artificial Sequence: Synthetic oligonucleotide
  Sense strand starting at position 2076 of SEQ ID NO: 2858
agggccuuggugugugaau

SEQ ID NO: 221943 - RNA, 19 nt, Artificial Sequence
  Description of Artificial Sequence: Synthetic oligonucleotide
  Antisense strand to SEQ ID NO: 221942
auucacacaccaaggcccu

SEQ ID NO: 221944 - RNA, 19 nt, Artificial Sequence
  Description of Artificial Sequence: Synthetic oligonucleotide
  Sense strand starting at position 2078 of SEQ ID NO: 2858
ggccuuggugugugaauga

SEQ ID NO: 221945 - RNA, 19 nt, Artificial Sequence
  Description of Artificial Sequence: Synthetic oligonucleotide
  Antisense strand to SEQ ID NO: 221944
ucauucacacaccaaggcc

SEQ ID NO: 221946 - RNA, 19 nt, Artificial Sequence
  Description of Artificial Sequence: Synthetic oligonucleotide
  Sense strand starting at position 2088 of SEQ ID NO: 2858
ugugaaugacccggagaga

SEQ ID NO: 221947 - RNA, 19 nt, Artificial Sequence
  Description of Artificial Sequence: Synthetic oligonucleotide
  Antisense strand to SEQ ID NO: 221946
ucucuccgggucauucaca

SEQ ID NO: 221948 - RNA, 19 nt, Artificial Sequence
  Description of Artificial Sequence: Synthetic oligonucleotide
  Sense strand starting at position 2159 of SEQ ID NO: 2858
guagguauuuguuacauuu

SEQ ID NO: 221949 - RNA, 19 nt, Artificial Sequence
  Description of Artificial Sequence: Synthetic oligonucleotide
  Antisense strand to SEQ ID NO: 221948
aaauguaacaaauaccuac

SEQ ID NO: 221950 - RNA, 19 nt, Artificial Sequence
  Description of Artificial Sequence: Synthetic oligonucleotide
  Sense strand starting at position 2220 of SEQ ID NO: 2858
ccauguuugaugucgcuuu

SEQ ID NO: 221951 - RNA, 19 nt, Artificial Sequence
  Description of Artificial Sequence: Synthetic oligonucleotide
  Antisense strand to SEQ ID NO: 221950
aaagcgacaucaaacaugg

SEQ ID NO: 221952 - RNA, 19 nt, Artificial Sequence
  Description of Artificial Sequence: Synthetic oligonucleotide
  Sense strand starting at position 2250 of SEQ ID NO: 2858
guuugacuuccaugcaauu

SEQ ID NO: 221953 - RNA, 19 nt, Artificial Sequence
  Description of Artificial Sequence: Synthetic oligonucleotide
  Antisense strand to SEQ ID NO: 221952
aauugcauggaagucaaac

SEQ ID NO: 221954 - RNA, 19 nt, Artificial Sequence
  Description of Artificial Sequence: Synthetic oligonucleotide
  Sense strand starting at position 2277 of SEQ ID NO: 2858
uuucucuuugcagagagau

SEQ ID NO: 221955 - RNA, 19 nt, Artificial Sequence
  Description of Artificial Sequence: Synthetic oligonucleotide
  Antisense strand to SEQ ID NO: 221954
aucucucugcaaagagaaa

SEQ ID NO: 221956 - RNA, 19 nt, Artificial Sequence
  Description of Artificial Sequence: Synthetic oligonucleotide
  Sense strand starting at position 2332 of SEQ ID NO: 2858
ucacucugucaggaaggua

SEQ ID NO: 221957 - RNA, 19 nt, Artificial Sequence
  Description of Artificial Sequence: Synthetic oligonucleotide
  Antisense strand to SEQ ID NO: 221956
uaccuuccugacagaguga

SEQ ID NO: 221958 - RNA, 19 nt, Artificial Sequence
  Description of Artificial Sequence: Synthetic oligonucleotide
  Sense strand starting at position 2335 of SEQ ID NO: 2858
cucugucaggaagguauua

SEQ ID NO: 221959 - RNA, 19 nt, Artificial Sequence
  Description of Artificial Sequence: Synthetic oligonucleotide
  Antisense strand to SEQ ID NO: 221958
uaauaccuuccugacagag

SEQ ID NO: 221960 - RNA, 19 nt, Artificial Sequence
  Description of Artificial Sequence: Synthetic oligonucleotide
  Sense strand starting at position 2340 of SEQ ID NO: 2858
ucaggaagguauuagaauc

SEQ ID NO: 221961 - RNA, 19 nt, Artificial Sequence
  Description of Artificial Sequence: Synthetic oligonucleotide
  Antisense strand to SEQ ID NO: 221960
gauucuaauaccuuccuga

SEQ ID NO: 221962 - RNA, 19 nt, Artificial Sequence
  Description of Artificial Sequence: Synthetic oligonucleotide
  Sense strand starting at position 2348 of SEQ ID NO: 2858
guauuagaaucuuuagaug

SEQ ID NO: 221963 - RNA, 19 nt, Artificial Sequence
  Description of Artificial Sequence: Synthetic oligonucleotide
  Antisense strand to SEQ ID NO: 221962
caucuaaagauucuaauac

SEQ ID NO: 221964 - RNA, 19 nt, Artificial Sequence
  Description of Artificial Sequence: Synthetic oligonucleotide
  Sense strand starting at position 2381 of SEQ ID NO: 2858
cgggaaaguuaagucacuu

SEQ ID NO: 221965 - RNA, 19 nt, Artificial Sequence
  Description of Artificial Sequence: Synthetic oligonucleotide
  Antisense strand to SEQ ID NO: 221964
aagugacuuaacuuucccg

SEQ ID NO: 221966 - RNA, 19 nt, Artificial Sequence
  Description of Artificial Sequence: Synthetic oligonucleotide
  Sense strand starting at position 3034 of SEQ ID NO: 2858
ggguuagaaguacagaguu

SEQ ID NO: 221967 - RNA, 19 nt, Artificial Sequence
  Description of Artificial Sequence: Synthetic oligonucleotide
  Antisense strand to SEQ ID NO: 221966
aacucuguacuucuaaccc

SEQ ID NO: 221968 - RNA, 19 nt, Artificial Sequence
  Description of Artificial Sequence: Synthetic oligonucleotide
  Sense strand starting at position 3052 of SEQ ID NO: 2858
ugggaaccauauucugagu

SEQ ID NO: 221969 - RNA, 19 nt, Artificial Sequence
  Description of Artificial Sequence: Synthetic oligonucleotide
  Antisense strand to SEQ ID NO: 221968
acucagaauaugguuccca

SEQ ID NO: 221970 - RNA, 19 nt, Artificial Sequence
  Description of Artificial Sequence: Synthetic oligonucleotide
  Sense strand starting at position 3057 of SEQ ID NO: 2858
accauauucugaguuugga

SEQ ID NO: 221971 - RNA, 19 nt, Artificial Sequence
  Description of Artificial Sequence: Synthetic oligonucleotide
  Antisense strand to SEQ ID NO: 221970
uccaaacucagaauauggu

SEQ ID NO: 221972 - RNA, 19 nt, Artificial Sequence
  Description of Artificial Sequence: Synthetic oligonucleotide
  Sense strand starting at position 3109 of SEQ ID NO: 2858
ugaacaagucaugaagcuu

SEQ ID NO: 221973 - RNA, 19 nt, Artificial Sequence
  Description of Artificial Sequence: Synthetic oligonucleotide
  Antisense strand to SEQ ID NO: 221972
aagcuucaugacuuguuca

SEQ ID NO: 221974 - RNA, 19 nt, Artificial Sequence
  Description of Artificial Sequence: Synthetic oligonucleotide
  Sense strand starting at position 3137 of SEQ ID NO: 2858
ucaguuuacuuaccuguga

SEQ ID NO: 221975 - RNA, 19 nt, Artificial Sequence
  Description of Artificial Sequence: Synthetic oligonucleotide
  Antisense strand to SEQ ID NO: 221974
ucacagguaaguaaacuga

SEQ ID NO: 221976 - RNA, 19 nt, Artificial Sequence
  Description of Artificial Sequence: Synthetic oligonucleotide
  Sense strand starting at position 3181 of SEQ ID NO: 2858
cucauaugauaguuaugag

SEQ ID NO: 221977 - RNA, 19 nt, Artificial Sequence
  Description of Artificial Sequence: Synthetic oligonucleotide
  Antisense strand to SEQ ID NO: 221976
cucauaacuaucauaugag

SEQ ID NO: 221978 - RNA, 19 nt, Artificial Sequence
  Description of Artificial Sequence: Synthetic oligonucleotide
  Sense strand starting at position 3258 of SEQ ID NO: 2858
cuagcucuguuauuacuau

SEQ ID NO: 221979 - RNA, 19 nt, Artificial Sequence
  Description of Artificial Sequence: Synthetic oligonucleotide
  Antisense strand to SEQ ID NO: 221978
auaguaauaacagagcuag

SEQ ID NO: 221980 - RNA, 19 nt, Artificial Sequence
  Description of Artificial Sequence: Synthetic oligonucleotide
  Sense strand starting at position 3408 of SEQ ID NO: 2858
cugagaguuaugcagugua

SEQ ID NO: 221981 - RNA, 19 nt, Artificial Sequence
  Description of Artificial Sequence: Synthetic oligonucleotide
  Antisense strand to SEQ ID NO: 221980
uacacugcauaacucucag

SEQ ID NO: 221982 - RNA, 19 nt, Artificial Sequence
  Description of Artificial Sequence: Synthetic oligonucleotide
  Sense strand starting at position 3411 of SEQ ID NO: 2858
agaguuaugcaguguacca

SEQ ID NO: 221983 - RNA, 19 nt, Artificial Sequence
  Description of Artificial Sequence: Synthetic oligonucleotide
  Antisense strand to SEQ ID NO: 221982
ugguacacugcauaacucu

SEQ ID NO: 221984 - RNA, 19 nt, Artificial Sequence
  Description of Artificial Sequence: Synthetic oligonucleotide
  Sense strand starting at position 3921 of SEQ ID NO: 2858
gggaaauacucugagaacu

SEQ ID NO: 221985 - RNA, 19 nt, Artificial Sequence
  Description of Artificial Sequence: Synthetic oligonucleotide
  Antisense strand to SEQ ID NO: 221984
aguucucagaguauuuccc

SEQ ID NO: 221986 - RNA, 19 nt, Artificial Sequence
  Description of Artificial Sequence: Synthetic oligonucleotide
  Sense strand starting at position 3964 of SEQ ID NO: 2858
uaaggacugcucugagaag

SEQ ID NO: 221987 - RNA, 19 nt, Artificial Sequence
  Description of Artificial Sequence: Synthetic oligonucleotide
  Antisense strand to SEQ ID NO: 221986
cuucucagagcaguccuua

SEQ ID NO: 221988 - RNA, 19 nt, Artificial Sequence
  Description of Artificial Sequence: Synthetic oligonucleotide
  Sense strand starting at position 475 of SEQ ID NO: 2859
gucuauaguguacaguaau

SEQ ID NO: 221989 - RNA, 19 nt, Artificial Sequence
  Description of Artificial Sequence: Synthetic oligonucleotide
  Antisense strand to SEQ ID NO: 221988
auuacuguacacuauagac

SEQ ID NO: 221990 - RNA, 19 nt, Artificial Sequence
  Description of Artificial Sequence: Synthetic oligonucleotide
  Sense strand starting at position 568 of SEQ ID NO: 2859
ugguaaguacuguauacag

SEQ ID NO: 221991 - RNA, 19 nt, Artificial Sequence
  Description of Artificial Sequence: Synthetic oligonucleotide
  Antisense strand to SEQ ID NO: 221990
cuguauacaguacuuacca

SEQ ID NO: 221992 - RNA, 19 nt, Artificial Sequence
  Description of Artificial Sequence: Synthetic oligonucleotide
  Sense strand starting at position 679 of SEQ ID NO: 2859
uguuacaauucucugagua

SEQ ID NO: 221993 - RNA, 19 nt, Artificial Sequence
  Description of Artificial Sequence: Synthetic oligonucleotide
  Antisense strand to SEQ ID NO: 221992
uacucagagaauuguaaca

SEQ ID NO: 221994 - RNA, 19 nt, Artificial Sequence
  Description of Artificial Sequence: Synthetic oligonucleotide
  Sense strand starting at position 683 of SEQ ID NO: 2859
acaauucucugaguauagu

SEQ ID NO: 221995 - RNA, 19 nt, Artificial Sequence
  Description of Artificial Sequence: Synthetic oligonucleotide
  Antisense strand to SEQ ID NO: 221994
acuauacucagagaauugu

SEQ ID NO: 221996 - RNA, 19 nt, Artificial Sequence
  Description of Artificial Sequence: Synthetic oligonucleotide
  Sense strand starting at position 777 of SEQ ID NO: 2859
agguuuguguaacuagaua

SEQ ID NO: 221997 - RNA, 19 nt, Artificial Sequence
  Description of Artificial Sequence: Synthetic oligonucleotide
  Antisense strand to SEQ ID NO: 221996
uaucuaguuacacaaaccu

SEQ ID NO: 221998 - RNA, 19 nt, Artificial Sequence
  Description of Artificial Sequence: Synthetic oligonucleotide
  Sense strand starting at position 866 of SEQ ID NO: 2859
gcaugacuguaccugagaa

SEQ ID NO: 221999 - RNA, 19 nt, Artificial Sequence
  Description of Artificial Sequence: Synthetic oligonucleotide
  Antisense strand to SEQ ID NO: 221998
uucucagguacagucaugc

SEQ ID NO: 222000 - RNA, 19 nt, Artificial Sequence
  Description of Artificial Sequence: Synthetic oligonucleotide
  Sense strand starting at position 1074 of SEQ ID NO: 2859
ucaauuaaugucuguugaa

SEQ ID NO: 222001 - RNA, 19 nt, Artificial Sequence
  Description of Artificial Sequence: Synthetic oligonucleotide
  Antisense strand to SEQ ID NO: 222000
uucaacagacauuaauuga

SEQ ID NO: 222002 - RNA, 19 nt, Artificial Sequence
  Description of Artificial Sequence: Synthetic oligonucleotide
  Sense strand starting at position 1135 of SEQ ID NO: 2859
gggaguuuguaucuuaacc

SEQ ID NO: 222003 - RNA, 19 nt, Artificial Sequence
  Description of Artificial Sequence: Synthetic oligonucleotide
  Antisense strand to SEQ ID NO: 222002
gguuaagauacaaacuccc

SEQ ID NO: 222004 - RNA, 19 nt, Artificial Sequence
  Description of Artificial Sequence: Synthetic oligonucleotide
  Sense strand starting at position 1143 of SEQ ID NO: 2859
guaucuuaaccuggacaac

SEQ ID NO: 222005 - RNA, 19 nt, Artificial Sequence
  Description of Artificial Sequence: Synthetic oligonucleotide
  Antisense strand to SEQ ID NO: 222004
guuguccagguuaagauac

SEQ ID NO: 222006 - RNA, 19 nt, Artificial Sequence
  Description of Artificial Sequence: Synthetic oligonucleotide
  Sense strand starting at position 1214 of SEQ ID NO: 2859
cugcaaaugagguagguaa

SEQ ID NO: 222007 - RNA, 19 nt, Artificial Sequence
  Description of Artificial Sequence: Synthetic oligonucleotide
  Antisense strand to SEQ ID NO: 222006
uuaccuaccucauuugcag

SEQ ID NO: 222008 - RNA, 19 nt, Artificial Sequence
  Description of Artificial Sequence: Synthetic oligonucleotide
  Sense strand starting at position 1216 of SEQ ID NO: 2859
gcaaaugagguagguaaga

SEQ ID NO: 222009 - RNA, 19 nt, Artificial Sequence
  Description of Artificial Sequence: Synthetic oligonucleotide
  Antisense strand to SEQ ID NO: 222008
ucuuaccuaccucauuugc

SEQ ID NO: 222010 - RNA, 19 nt, Artificial Sequence
  Description of Artificial Sequence: Synthetic oligonucleotide
  Sense strand starting at position 1306 of SEQ ID NO: 2859
gagaaagugcuacgagaac

SEQ ID NO: 222011 - RNA, 19 nt, Artificial Sequence
  Description of Artificial Sequence: Synthetic oligonucleotide
  Antisense strand to SEQ ID NO: 222010
guucucguagcacuuucuc

SEQ ID NO: 222012 - RNA, 19 nt, Artificial Sequence
  Description of Artificial Sequence: Synthetic oligonucleotide
  Sense strand starting at position 1357 of SEQ ID NO: 2859
caaagaagcucuguggaaa

SEQ ID NO: 222013 - RNA, 19 nt, Artificial Sequence
  Description of Artificial Sequence: Synthetic oligonucleotide
  Antisense strand to SEQ ID NO: 222012
uuuccacagagcuucuuug

SEQ ID NO: 222014 - RNA, 19 nt, Artificial Sequence
  Description of Artificial Sequence: Synthetic oligonucleotide
  Sense strand starting at position 1358 of SEQ ID NO: 2859
aaagaagcucuguggaaac

SEQ ID NO: 222015 - RNA, 19 nt, Artificial Sequence
  Description of Artificial Sequence: Synthetic oligonucleotide
  Antisense strand to SEQ ID NO: 222014
guuuccacagagcuucuuu

SEQ ID NO: 222016 - RNA, 19 nt, Artificial Sequence
  Description of Artificial Sequence: Synthetic oligonucleotide
  Sense strand starting at position 1453 of SEQ ID NO: 2859
gcagcauaaccggaaauga

SEQ ID NO: 222017 - RNA, 19 nt, Artificial Sequence
  Description of Artificial Sequence: Synthetic oligonucleotide
  Antisense strand to SEQ ID NO: 222016
ucauuuccgguuaugcugc

SEQ ID NO: 222018 - RNA, 19 nt, Artificial Sequence
  Description of Artificial Sequence: Synthetic oligonucleotide
  Sense strand starting at position 1540 of SEQ ID NO: 2859
ggguuagucguaagccuag

SEQ ID NO: 222019 - RNA, 19 nt, Artificial Sequence
  Description of Artificial Sequence: Synthetic oligonucleotide
  Antisense strand to SEQ ID NO: 222018
cuaggcuuacgacuaaccc

SEQ ID NO: 222020 - RNA, 19 nt, Artificial Sequence
  Description of Artificial Sequence: Synthetic oligonucleotide
  Sense strand starting at position 1597 of SEQ ID NO: 2859
agacacugauugcucagaa

SEQ ID NO: 222021 - RNA, 19 nt, Artificial Sequence
  Description of Artificial Sequence: Synthetic oligonucleotide
  Antisense strand to SEQ ID NO: 222020
uucugagcaaucagugucu

SEQ ID NO: 222022 - RNA, 19 nt, Artificial Sequence
  Description of Artificial Sequence: Synthetic oligonucleotide
  Sense strand starting at position 2087 of SEQ ID NO: 2859
gauaucuuuggcgaccaaa

SEQ ID NO: 222023 - RNA, 19 nt, Artificial Sequence
  Description of Artificial Sequence: Synthetic oligonucleotide
  Antisense strand to SEQ ID NO: 222022
uuuggucgccaaagauauc

SEQ ID NO: 222024 - RNA, 19 nt, Artificial Sequence
  Description of Artificial Sequence: Synthetic oligonucleotide
  Sense strand starting at position 2399 of SEQ ID NO: 2859
gguuguauaagguauuaua

SEQ ID NO: 222025 - RNA, 19 nt, Artificial Sequence
  Description of Artificial Sequence: Synthetic oligonucleotide
  Antisense strand to SEQ ID NO: 222024
uauaauaccuuauacaacc

SEQ ID NO: 222026 - RNA, 19 nt, Artificial Sequence
  Description of Artificial Sequence: Synthetic oligonucleotide
  Sense strand starting at position 2511 of SEQ ID NO: 2859
agauauugguacccauaga

SEQ ID NO: 222027 - RNA, 19 nt, Artificial Sequence
  Description of Artificial Sequence: Synthetic oligonucleotide
  Antisense strand to SEQ ID NO: 222026
ucuauggguaccaauaucu

SEQ ID NO: 222028 - RNA, 19 nt, Artificial Sequence
  Description of Artificial Sequence: Synthetic oligonucleotide
  Sense strand starting at position 2538 of SEQ ID NO: 2859
gacucaaucccuuguggau

SEQ ID NO: 222029 - RNA, 19 nt, Artificial Sequence
  Description of Artificial Sequence: Synthetic oligonucleotide
  Antisense strand to SEQ ID NO: 222028
auccacaagggauugaguc

SEQ ID NO: 222030 - RNA, 19 nt, Artificial Sequence
  Description of Artificial Sequence: Synthetic oligonucleotide
  Sense strand starting at position 2625 of SEQ ID NO: 2859
uggccacucuccucagaaa

SEQ ID NO: 222031 - RNA, 19 nt, Artificial Sequence
  Description of Artificial Sequence: Synthetic oligonucleotide
  Antisense strand to SEQ ID NO: 222030
uuucugaggagaguggcca

SEQ ID NO: 222032 - RNA, 19 nt, Artificial Sequence
  Description of Artificial Sequence: Synthetic oligonucleotide
  Sense strand starting at position 2626 of SEQ ID NO: 2859
ggccacucuccucagaaau

SEQ ID NO: 222033 - RNA, 19 nt, Artificial Sequence
  Description of Artificial Sequence: Synthetic oligonucleotide
  Antisense strand to SEQ ID NO: 222032
auuucugaggagaguggcc

SEQ ID NO: 222034 - RNA, 19 nt, Artificial Sequence
  Description of Artificial Sequence: Synthetic oligonucleotide
  Sense strand starting at position 2648 of SEQ ID NO: 2859
auuucugugucacuuggua

SEQ ID NO: 222035 - RNA, 19 nt, Artificial Sequence
  Description of Artificial Sequence: Synthetic oligonucleotide
  Antisense strand to SEQ ID NO: 222034
uaccaagugacacagaaau

SEQ ID NO: 222036 - RNA, 19 nt, Artificial Sequence
  Description of Artificial Sequence: Synthetic oligonucleotide
  Sense strand starting at position 3217 of SEQ ID NO: 2859
guuuaaacagaaugugaag

SEQ ID NO: 222037 - RNA, 19 nt, Artificial Sequence
  Description of Artificial Sequence: Synthetic oligonucleotide
  Antisense strand to SEQ ID NO: 222036
cuucacauucuguuuaaac

SEQ ID NO: 222038 - RNA, 19 nt, Artificial Sequence
  Description of Artificial Sequence: Synthetic oligonucleotide
  Sense strand starting at position 3234 of SEQ ID NO: 2859
aggaauugacuucgaaauc

SEQ ID NO: 222039 - RNA, 19 nt, Artificial Sequence
  Description of Artificial Sequence: Synthetic oligonucleotide
  Antisense strand to SEQ ID NO: 222038
gauuucgaagucaauuccu

SEQ ID NO: 222040 - RNA, 19 nt, Artificial Sequence
  Description of Artificial Sequence: Synthetic oligonucleotide
  Sense strand starting at position 3245 of SEQ ID NO: 2859
ucgaaaucacauuggauug

SEQ ID NO: 222041 - RNA, 19 nt, Artificial Sequence
  Description of Artificial Sequence: Synthetic oligonucleotide
  Antisense strand to SEQ ID NO: 222040
caauccaaugugauuucga

SEQ ID NO: 222042 - RNA, 19 nt, Artificial Sequence
  Description of Artificial Sequence: Synthetic oligonucleotide
  Sense strand starting at position 3367 of SEQ ID NO: 2859
cgcaaacauuuaucucagu

SEQ ID NO: 222043 - RNA, 19 nt, Artificial Sequence
  Description of Artificial Sequence: Synthetic oligonucleotide
  Antisense strand to SEQ ID NO: 222042
acugagauaaauguuugcg

SEQ ID NO: 222044 - RNA, 19 nt, Artificial Sequence
  Description of Artificial Sequence: Synthetic oligonucleotide
  Sense strand starting at position 3509 of SEQ ID NO: 2859
uugggucugugacuuugaa

SEQ ID NO: 222045 - RNA, 19 nt, Artificial Sequence
  Description of Artificial Sequence: Synthetic oligonucleotide
  Antisense strand to SEQ ID NO: 222044
uucaaagucacagacccaa

SEQ ID NO: 222046 - RNA, 19 nt, Artificial Sequence
  Description of Artificial Sequence: Synthetic oligonucleotide
  Sense strand starting at position 3615 of SEQ ID NO: 2859
guaguaguaauggaaaggu

SEQ ID NO: 222047 - RNA, 19 nt, Artificial Sequence
  Description of Artificial Sequence: Synthetic oligonucleotide
  Antisense strand to SEQ ID NO: 222046
accuuuccauuacuacuac

SEQ ID NO: 222048 - RNA, 19 nt, Artificial Sequence
  Description of Artificial Sequence: Synthetic oligonucleotide
  Sense strand starting at position 3671 of SEQ ID NO: 2859
uagugaagauuggcaguca

SEQ ID NO: 222049 - RNA, 19 nt, Artificial Sequence
  Description of Artificial Sequence: Synthetic oligonucleotide
  Antisense strand to SEQ ID NO: 222048
ugacugccaaucuucacua

SEQ ID NO: 222050 - RNA, 19 nt, Artificial Sequence
  Description of Artificial Sequence: Synthetic oligonucleotide
  Sense strand starting at position 3711 of SEQ ID NO: 2859
ccacauuuacgagguguuu

SEQ ID NO: 222051 - RNA, 19 nt, Artificial Sequence
  Description of Artificial Sequence: Synthetic oligonucleotide
  Antisense strand to SEQ ID NO: 222050
aaacaccucguaaaugugg

SEQ ID NO: 222052 - RNA, 19 nt, Artificial Sequence
  Description of Artificial Sequence: Synthetic oligonucleotide
  Sense strand starting at position 3717 of SEQ ID NO: 2859
uuacgagguguuuaagaca

SEQ ID NO: 222053 - RNA, 19 nt, Artificial Sequence
  Description of Artificial Sequence: Synthetic oligonucleotide
  Antisense strand to SEQ ID NO: 222052
ugucuuaaacaccucguaa

SEQ ID NO: 222054 - RNA, 19 nt, Artificial Sequence
  Description of Artificial Sequence: Synthetic oligonucleotide
  Sense strand starting at position 3728 of SEQ ID NO: 2859
uuaagacauuuagaucaga

SEQ ID NO: 222055 - RNA, 19 nt, Artificial Sequence
  Description of Artificial Sequence: Synthetic oligonucleotide
  Antisense strand to SEQ ID NO: 222054
ucugaucuaaaugucuuaa

SEQ ID NO: 222056 - RNA, 19 nt, Artificial Sequence
  Description of Artificial Sequence: Synthetic oligonucleotide
  Sense strand starting at position 3767 of SEQ ID NO: 2859
cauggaaaugcuuaacguu

SEQ ID NO: 222057 - RNA, 19 nt, Artificial Sequence
  Description of Artificial Sequence: Synthetic oligonucleotide
  Antisense strand to SEQ ID NO: 222056
aacguuaagcauuuccaug

SEQ ID NO: 222058 - RNA, 19 nt, Artificial Sequence
  Description of Artificial Sequence: Synthetic oligonucleotide
  Sense strand starting at position 3773 of SEQ ID NO: 2859
aaugcuuaacguuagggau

SEQ ID NO: 222059 - RNA, 19 nt, Artificial Sequence
  Description of Artificial Sequence: Synthetic oligonucleotide
  Antisense strand to SEQ ID NO: 222058
aucccuaacguuaagcauu

SEQ ID NO: 222060 - RNA, 19 nt, Artificial Sequence
  Description of Artificial Sequence: Synthetic oligonucleotide
  Sense strand starting at position 3777 of SEQ ID NO: 2859
cuuaacguuagggauugau

SEQ ID NO: 222061 - RNA, 19 nt, Artificial Sequence
  Description of Artificial Sequence: Synthetic oligonucleotide
  Antisense strand to SEQ ID NO: 222060
aucaaucccuaacguuaag

SEQ ID NO: 222062 - RNA, 19 nt, Artificial Sequence
  Description of Artificial Sequence: Synthetic oligonucleotide
  Sense strand starting at position 3780 of SEQ ID NO: 2859
aacguuagggauugauaac

SEQ ID NO: 222063 - RNA, 19 nt, Artificial Sequence
  Description of Artificial Sequence: Synthetic oligonucleotide
  Antisense strand to SEQ ID NO: 222062
guuaucaaucccuaacguu

SEQ ID NO: 222064 - RNA, 19 nt, Artificial Sequence
  Description of Artificial Sequence: Synthetic oligonucleotide
  Sense strand starting at position 3850 of SEQ ID NO: 2859
gaagaagaaugagaaauua

SEQ ID NO: 222065 - RNA, 19 nt, Artificial Sequence
  Description of Artificial Sequence: Synthetic oligonucleotide
  Antisense strand to SEQ ID NO: 222064
uaauuucucauucuucuuc

SEQ ID NO: 222066 - RNA, 19 nt, Artificial Sequence
  Description of Artificial Sequence: Synthetic oligonucleotide
  Sense strand starting at position 3960 of SEQ ID NO: 2859
aaacaaugucauuggguua

SEQ ID NO: 222067 - RNA, 19 nt, Artificial Sequence
  Description of Artificial Sequence: Synthetic oligonucleotide
  Antisense strand to SEQ ID NO: 222066
uaacccaaugacauuguuu

SEQ ID NO: 222068 - RNA, 19 nt, Artificial Sequence
  Description of Artificial Sequence: Synthetic oligonucleotide
  Sense strand starting at position 306 of SEQ ID NO: 2860
cagacaguugcgggugaua

SEQ ID NO: 222069 - RNA, 19 nt, Artificial Sequence
  Description of Artificial Sequence: Synthetic oligonucleotide
  Antisense strand to SEQ ID NO: 222068
uaucacccgcaacugucug

SEQ ID NO: 222070 - RNA, 19 nt, Artificial Sequence
  Description of Artificial Sequence: Synthetic oligonucleotide
  Sense strand starting at position 308 of SEQ ID NO: 2860
gacaguugcgggugauaaa

SEQ ID NO: 222071 - RNA, 19 nt, Artificial Sequence
  Description of Artificial Sequence: Synthetic oligonucleotide
  Antisense strand to SEQ ID NO: 222070
uuuaucacccgcaacuguc

SEQ ID NO: 222072 - RNA, 19 nt, Artificial Sequence
  Description of Artificial Sequence: Synthetic oligonucleotide
  Sense strand starting at position 317 of SEQ ID NO: 2860
gggugauaaagcuggcagu

SEQ ID NO: 222073 - RNA, 19 nt, Artificial Sequence
  Description of Artificial Sequence: Synthetic oligonucleotide
  Antisense strand to SEQ ID NO: 222072
acugccagcuuuaucaccc

SEQ ID NO: 222074 - RNA, 19 nt, Artificial Sequence
  Description of Artificial Sequence: Synthetic oligonucleotide
  Sense strand starting at position 647 of SEQ ID NO: 2860
gcucacuuggccugucaga

SEQ ID NO: 222075 - RNA, 19 nt, Artificial Sequence
  Description of Artificial Sequence: Synthetic oligonucleotide
  Antisense strand to SEQ ID NO: 222074
ucugacaggccaagugagc

SEQ ID NO: 222076 - RNA, 19 nt, Artificial Sequence
  Description of Artificial Sequence: Synthetic oligonucleotide
  Sense strand starting at position 705 of SEQ ID NO: 2860
guucuuggagccuggugaa

SEQ ID NO: 222077 - RNA, 19 nt, Artificial Sequence
  Description of Artificial Sequence: Synthetic oligonucleotide
  Antisense strand to SEQ ID NO: 222076
uucaccaggcuccaagaac

SEQ ID NO: 222078 - RNA, 19 nt, Artificial Sequence
  Description of Artificial Sequence: Synthetic oligonucleotide
  Sense strand starting at position 890 of SEQ ID NO: 2860
gagagcuguugcuuggacu

SEQ ID NO: 222079 - RNA, 19 nt, Artificial Sequence
  Description of Artificial Sequence: Synthetic oligonucleotide
  Antisense strand to SEQ ID NO: 222078
aguccaagcaacagcucuc

SEQ ID NO: 222080 - RNA, 19 nt, Artificial Sequence
  Description of Artificial Sequence: Synthetic oligonucleotide
  Sense strand starting at position 2026 of SEQ ID NO: 2860
uuguaucccuccugacauc

SEQ ID NO: 222081 - RNA, 19 nt, Artificial Sequence
  Description of Artificial Sequence: Synthetic oligonucleotide
  Antisense strand to SEQ ID NO: 222080
gaugucaggagggauacaa

SEQ ID NO: 222082 - RNA, 19 nt, Artificial Sequence
  Description of Artificial Sequence: Synthetic oligonucleotide
  Sense strand starting at position 2356 of SEQ ID NO: 2860
aggagagacuuugggucau

SEQ ID NO: 222083 - RNA, 19 nt, Artificial Sequence
  Description of Artificial Sequence: Synthetic oligonucleotide
  Antisense strand to SEQ ID NO: 222082
augacccaaagucucuccu

SEQ ID NO: 222084 - RNA, 19 nt, Artificial Sequence
  Description of Artificial Sequence: Synthetic oligonucleotide
  Sense strand starting at position 2388 of SEQ ID NO: 2860
aaggccuguucccaggaaa

SEQ ID NO: 222085 - RNA, 19 nt, Artificial Sequence
  Description of Artificial Sequence: Synthetic oligonucleotide
  Antisense strand to SEQ ID NO: 222084
uuuccugggaacaggccuu

SEQ ID NO: 222086 - RNA, 19 nt, Artificial Sequence
  Description of Artificial Sequence: Synthetic oligonucleotide
  Sense strand starting at position 2438 of SEQ ID NO: 2860
cuugaagucgaagagguuu

SEQ ID NO: 222087 - RNA, 19 nt, Artificial Sequence
  Description of Artificial Sequence: Synthetic oligonucleotide
  Antisense strand to SEQ ID NO: 222086
aaaccucuucgacuucaag

SEQ ID NO: 222088 - RNA, 19 nt, Artificial Sequence
  Description of Artificial Sequence: Synthetic oligonucleotide
  Sense strand starting at position 2446 of SEQ ID NO: 2860
cgaagagguuugggucuca

SEQ ID NO: 222089 - RNA, 19 nt, Artificial Sequence
  Description of Artificial Sequence: Synthetic oligonucleotide
  Antisense strand to SEQ ID NO: 222088
ugagacccaaaccucuucg

SEQ ID NO: 222090 - RNA, 19 nt, Artificial Sequence
  Description of Artificial Sequence: Synthetic oligonucleotide
  Sense strand starting at position 2565 of SEQ ID NO: 2860
cauguaugucuaugggcga

SEQ ID NO: 222091 - RNA, 19 nt, Artificial Sequence
  Description of Artificial Sequence: Synthetic oligonucleotide
  Antisense strand to SEQ ID NO: 222090
ucgcccauagacauacaug

SEQ ID NO: 222092 - RNA, 19 nt, Artificial Sequence
  Description of Artificial Sequence: Synthetic oligonucleotide
  Sense strand starting at position 2598 of SEQ ID NO: 2860
ucaguuucccucuggacua

SEQ ID NO: 222093 - RNA, 19 nt, Artificial Sequence
  Description of Artificial Sequence: Synthetic oligonucleotide
  Antisense strand to SEQ ID NO: 222092
uaguccagagggaaacuga

SEQ ID NO: 222094 - RNA, 19 nt, Artificial Sequence
  Description of Artificial Sequence: Synthetic oligonucleotide
  Sense strand starting at position 2675 of SEQ ID NO: 2860
ugggcugauuuccagaaag

SEQ ID NO: 222095 - RNA, 19 nt, Artificial Sequence
  Description of Artificial Sequence: Synthetic oligonucleotide
  Antisense strand to SEQ ID NO: 222094
cuuucuggaaaucagccca

SEQ ID NO: 222096 - RNA, 19 nt, Artificial Sequence
  Description of Artificial Sequence: Synthetic oligonucleotide
  Sense strand starting at position 2913 of SEQ ID NO: 2860
gcggguauuuauagaggag

SEQ ID NO: 222097 - RNA, 19 nt, Artificial Sequence
  Description of Artificial Sequence: Synthetic oligonucleotide
  Antisense strand to SEQ ID NO: 222096
cuccucuauaaauacccgc

SEQ ID NO: 222098 - RNA, 19 nt, Artificial Sequence
  Description of Artificial Sequence: Synthetic oligonucleotide
  Sense strand starting at position 2997 of SEQ ID NO: 2860
augggugggcgucagauaa

SEQ ID NO: 222099 - RNA, 19 nt, Artificial Sequence
  Description of Artificial Sequence: Synthetic oligonucleotide
  Antisense strand to SEQ ID NO: 222098
uuaucugacgcccacccau

SEQ ID NO: 222100 - RNA, 19 nt, Artificial Sequence
  Description of Artificial Sequence: Synthetic oligonucleotide
  Sense strand starting at position 3001 of SEQ ID NO: 2860
gugggcgucagauaaggaa

SEQ ID NO: 222101 - RNA, 19 nt, Artificial Sequence
  Description of Artificial Sequence: Synthetic oligonucleotide
  Antisense strand to SEQ ID NO: 222100
uuccuuaucugacgcccac

SEQ ID NO: 222102 - RNA, 19 nt, Artificial Sequence
  Description of Artificial Sequence: Synthetic oligonucleotide
  Sense strand starting at position 3381 of SEQ ID NO: 2860
cccagcuugucagauauaa

SEQ ID NO: 222103 - RNA, 19 nt, Artificial Sequence
  Description of Artificial Sequence: Synthetic oligonucleotide
  Antisense strand to SEQ ID NO: 222102
uuauaucugacaagcuggg

SEQ ID NO: 222104 - RNA, 19 nt, Artificial Sequence
  Description of Artificial Sequence: Synthetic oligonucleotide
  Sense strand starting at position 3385 of SEQ ID NO: 2860
gcuugucagauauaaagug

SEQ ID NO: 222105 - RNA, 19 nt, Artificial Sequence
  Description of Artificial Sequence: Synthetic oligonucleotide
  Antisense strand to SEQ ID NO: 222104
cacuuuauaucugacaagc

SEQ ID NO: 222106 - RNA, 19 nt, Artificial Sequence
  Description of Artificial Sequence: Synthetic oligonucleotide
  Sense strand starting at position 3406 of SEQ ID NO: 2860
gaugguuagccuugccaug

SEQ ID NO: 222107 - RNA, 19 nt, Artificial Sequence
  Description of Artificial Sequence: Synthetic oligonucleotide
  Antisense strand to SEQ ID NO: 222106
cauggcaaggcuaaccauc

SEQ ID NO: 222108 - RNA, 19 nt, Artificial Sequence
  Description of Artificial Sequence: Synthetic oligonucleotide
  Sense strand starting at position 3457 of SEQ ID NO: 2860
cuacuaauguauguagcaa

SEQ ID NO: 222109 - RNA, 19 nt, Artificial Sequence
  Description of Artificial Sequence: Synthetic oligonucleotide
  Antisense strand to SEQ ID NO: 222108
uugcuacauacauuaguag

SEQ ID NO: 222110 - RNA, 19 nt, Artificial Sequence
  Description of Artificial Sequence: Synthetic oligonucleotide
  Sense strand starting at position 3565 of SEQ ID NO: 2860
gguagacacuagcaucauu

SEQ ID NO: 222111 - RNA, 19 nt, Artificial Sequence
  Description of Artificial Sequence: Synthetic oligonucleotide
  Antisense strand to SEQ ID NO: 222110
aaugaugcuagugucuacc

SEQ ID NO: 222112 - RNA, 19 nt, Artificial Sequence
  Description of Artificial Sequence: Synthetic oligonucleotide
  Sense strand starting at position 3642 of SEQ ID NO: 2860
ucaggaugggugugaaugu

SEQ ID NO: 222113 - RNA, 19 nt, Artificial Sequence
  Description of Artificial Sequence: Synthetic oligonucleotide
  Antisense strand to SEQ ID NO: 222112
acauucacacccauccuga

SEQ ID NO: 222114 - RNA, 19 nt, Artificial Sequence
  Description of Artificial Sequence: Synthetic oligonucleotide
  Sense strand starting at position 3651 of SEQ ID NO: 2860
gugugaaugugccggguaa

SEQ ID NO: 222115 - RNA, 19 nt, Artificial Sequence
  Description of Artificial Sequence: Synthetic oligonucleotide
  Antisense strand to SEQ ID NO: 222114
uuacccggcacauucacac

SEQ ID NO: 222116 - RNA, 19 nt, Artificial Sequence
  Description of Artificial Sequence: Synthetic oligonucleotide
  Sense strand starting at position 3652 of SEQ ID NO: 2860
ugugaaugugccggguaaa

SEQ ID NO: 222117 - RNA, 19 nt, Artificial Sequence
  Description of Artificial Sequence: Synthetic oligonucleotide
  Antisense strand to SEQ ID NO: 222116
uuuacccggcacauucaca

SEQ ID NO: 222118 - RNA, 19 nt, Artificial Sequence
  Description of Artificial Sequence: Synthetic oligonucleotide
  Sense strand starting at position 3653 of SEQ ID NO: 2860
gugaaugugccggguaaau

SEQ ID NO: 222119 - RNA, 19 nt, Artificial Sequence
  Description of Artificial Sequence: Synthetic oligonucleotide
  Antisense strand to SEQ ID NO: 222118
auuuacccggcacauucac

SEQ ID NO: 222120 - RNA, 19 nt, Artificial Sequence
  Description of Artificial Sequence: Synthetic oligonucleotide
  Sense strand starting at position 3655 of SEQ ID NO: 2860
gaaugugccggguaaauug

SEQ ID NO: 222121 - RNA, 19 nt, Artificial Sequence
  Description of Artificial Sequence: Synthetic oligonucleotide
  Antisense strand to SEQ ID NO: 222120
caauuuacccggcacauuc

SEQ ID NO: 222122 - RNA, 19 nt, Artificial Sequence
  Description of Artificial Sequence: Synthetic oligonucleotide
  Sense strand starting at position 3707 of SEQ ID NO: 2860
gcccuuucccauuaagugu

SEQ ID NO: 222123 - RNA, 19 nt, Artificial Sequence
  Description of Artificial Sequence: Synthetic oligonucleotide
  Antisense strand to SEQ ID NO: 222122
acacuuaaugggaaagggc

SEQ ID NO: 222124 - RNA, 19 nt, Artificial Sequence
  Description of Artificial Sequence: Synthetic oligonucleotide
  Sense strand starting at position 3742 of SEQ ID NO: 2860
agacaagcuucugaaauag

SEQ ID NO: 222125 - RNA, 19 nt, Artificial Sequence
  Description of Artificial Sequence: Synthetic oligonucleotide
  Antisense strand to SEQ ID NO: 222124
cuauuucagaagcuugucu

SEQ ID NO: 222126 - RNA, 19 nt, Artificial Sequence
  Description of Artificial Sequence: Synthetic oligonucleotide
  Sense strand starting at position 3806 of SEQ ID NO: 2860
agcuguuguguucugguua

SEQ ID NO: 222127 - RNA, 19 nt, Artificial Sequence
  Description of Artificial Sequence: Synthetic oligonucleotide
  Antisense strand to SEQ ID NO: 222126
uaaccagaacacaacagcu

SEQ ID NO: 222128 - RNA, 19 nt, Artificial Sequence
  Description of Artificial Sequence: Synthetic oligonucleotide
  Sense strand starting at position 3807 of SEQ ID NO: 2860
gcuguuguguucugguuau

SEQ ID NO: 222129 - RNA, 19 nt, Artificial Sequence
  Description of Artificial Sequence: Synthetic oligonucleotide
  Antisense strand to SEQ ID NO: 222128
auaaccagaacacaacagc

SEQ ID NO: 222130 - RNA, 19 nt, Artificial Sequence
  Description of Artificial Sequence: Synthetic oligonucleotide
  Sense strand starting at position 3851 of SEQ ID NO: 2860
acuguaugcuccuggagga

SEQ ID NO: 222131 - RNA, 19 nt, Artificial Sequence
  Description of Artificial Sequence: Synthetic oligonucleotide
  Antisense strand to SEQ ID NO: 222130
uccuccaggagcauacagu

SEQ ID NO: 222132 - RNA, 19 nt, Artificial Sequence
  Description of Artificial Sequence: Synthetic oligonucleotide
  Sense strand starting at position 3852 of SEQ ID NO: 2860
cuguaugcuccuggaggau

SEQ ID NO: 222133 - RNA, 19 nt, Artificial Sequence
  Description of Artificial Sequence: Synthetic oligonucleotide
  Antisense strand to SEQ ID NO: 222132
auccuccaggagcauacag

SEQ ID NO: 222134 - RNA, 19 nt, Artificial Sequence
  Description of Artificial Sequence: Synthetic oligonucleotide
  Sense strand starting at position 3910 of SEQ ID NO: 2860
ccgucuuucucauugucau

SEQ ID NO: 222135 - RNA, 19 nt, Artificial Sequence
  Description of Artificial Sequence: Synthetic oligonucleotide
  Antisense strand to SEQ ID NO: 222134
augacaaugagaaagacgg

SEQ ID NO: 222136 - RNA, 19 nt, Artificial Sequence
  Description of Artificial Sequence: Synthetic oligonucleotide
  Sense strand starting at position 3911 of SEQ ID NO: 2860
cgucuuucucauugucauu

SEQ ID NO: 222137 - RNA, 19 nt, Artificial Sequence
  Description of Artificial Sequence: Synthetic oligonucleotide
  Antisense strand to SEQ ID NO: 222136
aaugacaaugagaaagacg

SEQ ID NO: 222138 - RNA, 19 nt, Artificial Sequence
  Description of Artificial Sequence: Synthetic oligonucleotide
  Sense strand starting at position 164 of SEQ ID NO: 2861
guaguuuaccacuguauaa

SEQ ID NO: 222139 - RNA, 19 nt, Artificial Sequence
  Description of Artificial Sequence: Synthetic oligonucleotide
  Antisense strand to SEQ ID NO: 222138
uuauacagugguaaacuac

SEQ ID NO: 222140 - RNA, 19 nt, Artificial Sequence
  Description of Artificial Sequence: Synthetic oligonucleotide
  Sense strand starting at position 166 of SEQ ID NO: 2861
aguuuaccacuguauaauu

SEQ ID NO: 222141 - RNA, 19 nt, Artificial Sequence
  Description of Artificial Sequence: Synthetic oligonucleotide
  Antisense strand to SEQ ID NO: 222140
aauuauacagugguaaacu

SEQ ID NO: 222142 - RNA, 19 nt, Artificial Sequence
  Description of Artificial Sequence: Synthetic oligonucleotide
  Sense strand starting at position 216 of SEQ ID NO: 2861
auuauagaucaacggugua

SEQ ID NO: 222143 - RNA, 19 nt, Artificial Sequence
  Description of Artificial Sequence: Synthetic oligonucleotide
  Antisense strand to SEQ ID NO: 222142
uacaccguugaucuauaau

SEQ ID NO: 222144 - RNA, 19 nt, Artificial Sequence
  Description of Artificial Sequence: Synthetic oligonucleotide
  Sense strand starting at position 242 of SEQ ID NO: 2861
augcuaagagcauguuuaa

SEQ ID NO: 222145 - RNA, 19 nt, Artificial Sequence
  Description of Artificial Sequence: Synthetic oligonucleotide
  Antisense strand to SEQ ID NO: 222144
uuaaacaugcucuuagcau

SEQ ID NO: 222146 - RNA, 19 nt, Artificial Sequence
  Description of Artificial Sequence: Synthetic oligonucleotide
  Sense strand starting at position 245 of SEQ ID NO: 2861
cuaagagcauguuuaacuu

SEQ ID NO: 222147 - RNA, 19 nt, Artificial Sequence
  Description of Artificial Sequence: Synthetic oligonucleotide
  Antisense strand to SEQ ID NO: 222146
aaguuaaacaugcucuuag

SEQ ID NO: 222148 - RNA, 19 nt, Artificial Sequence
  Description of Artificial Sequence: Synthetic oligonucleotide
  Sense strand starting at position 249 of SEQ ID NO: 2861
gagcauguuuaacuuggaa

SEQ ID NO: 222149 - RNA, 19 nt, Artificial Sequence
  Description of Artificial Sequence: Synthetic oligonucleotide
  Antisense strand to SEQ ID NO: 222148
uuccaaguuaaacaugcuc

SEQ ID NO: 222150 - RNA, 19 nt, Artificial Sequence
  Description of Artificial Sequence: Synthetic oligonucleotide
  Sense strand starting at position 251 of SEQ ID NO: 2861
gcauguuuaacuuggaaug

SEQ ID NO: 222151 - RNA, 19 nt, Artificial Sequence
  Description of Artificial Sequence: Synthetic oligonucleotide
  Antisense strand to SEQ ID NO: 222150
cauuccaaguuaaacaugc

SEQ ID NO: 222152 - RNA, 19 nt, Artificial Sequence
  Description of Artificial Sequence: Synthetic oligonucleotide
  Sense strand starting at position 261 of SEQ ID NO: 2861
cuuggaauggcaggcuaua

SEQ ID NO: 222153 - RNA, 19 nt, Artificial Sequence
  Description of Artificial Sequence: Synthetic oligonucleotide
  Antisense strand to SEQ ID NO: 222152
uauagccugccauuccaag

SEQ ID NO: 222154 - RNA, 19 nt, Artificial Sequence
  Description of Artificial Sequence: Synthetic oligonucleotide
  Sense strand starting at position 320 of SEQ ID NO: 2861
gaccaaugucuaugauaag

SEQ ID NO: 222155 - RNA, 19 nt, Artificial Sequence
  Description of Artificial Sequence: Synthetic oligonucleotide
  Antisense strand to SEQ ID NO: 222154
cuuaucauagacauugguc

SEQ ID NO: 222156 - RNA, 19 nt, Artificial Sequence
  Description of Artificial Sequence: Synthetic oligonucleotide
  Sense strand starting at position 353 of SEQ ID NO: 2861
gugauuugccacuggcaau

SEQ ID NO: 222157 - RNA, 19 nt, Artificial Sequence
  Description of Artificial Sequence: Synthetic oligonucleotide
  Antisense strand to SEQ ID NO: 222156
auugccaguggcaaaucac

SEQ ID NO: 222158 - RNA, 19 nt, Artificial Sequence
  Description of Artificial Sequence: Synthetic oligonucleotide
  Sense strand starting at position 391 of SEQ ID NO: 2861
cauauagugcugugggaag

SEQ ID NO: 222159 - RNA, 19 nt, Artificial Sequence
  Description of Artificial Sequence: Synthetic oligonucleotide
  Antisense strand to SEQ ID NO: 222158
cuucccacagcacuauaug

SEQ ID NO: 222160 - RNA, 19 nt, Artificial Sequence
  Description of Artificial Sequence: Synthetic oligonucleotide
  Sense strand starting at position 428 of SEQ ID NO: 2861
aacgauagucccggauaca

SEQ ID NO: 222161 - RNA, 19 nt, Artificial Sequence
  Description of Artificial Sequence: Synthetic oligonucleotide
  Antisense strand to SEQ ID NO: 222160
uguauccgggacuaucguu

SEQ ID NO: 222162 - RNA, 19 nt, Artificial Sequence
  Description of Artificial Sequence: Synthetic oligonucleotide
  Sense strand starting at position 429 of SEQ ID NO: 2861
acgauagucccggauacaa

SEQ ID NO: 222163 - RNA, 19 nt, Artificial Sequence
  Description of Artificial Sequence: Synthetic oligonucleotide
  Antisense strand to SEQ ID NO: 222162
uuguauccgggacuaucgu

SEQ ID NO: 222164 - RNA, 19 nt, Artificial Sequence
  Description of Artificial Sequence: Synthetic oligonucleotide
  Sense strand starting at position 431 of SEQ ID NO: 2861
gauagucccggauacaauc

SEQ ID NO: 222165 - RNA, 19 nt, Artificial Sequence
  Description of Artificial Sequence: Synthetic oligonucleotide
  Antisense strand to SEQ ID NO: 222164
gauuguauccgggacuauc

SEQ ID NO: 222166 - RNA, 19 nt, Artificial Sequence
  Description of Artificial Sequence: Synthetic oligonucleotide
  Sense strand starting at position 535 of SEQ ID NO: 2861
uggcauacagcucauugau

SEQ ID NO: 222167 - RNA, 19 nt, Artificial Sequence
  Description of Artificial Sequence: Synthetic oligonucleotide
  Antisense strand to SEQ ID NO: 222166
aucaaugagcuguaugcca

SEQ ID NO: 222168 - RNA, 19 nt, Artificial Sequence
  Description of Artificial Sequence: Synthetic oligonucleotide
  Sense strand starting at position 542 of SEQ ID NO: 2861
cagcucauugauugagcau

SEQ ID NO: 222169 - RNA, 19 nt, Artificial Sequence
  Description of Artificial Sequence: Synthetic oligonucleotide
  Antisense strand to SEQ ID NO: 222168
augcucaaucaaugagcug

SEQ ID NO: 222170 - RNA, 19 nt, Artificial Sequence
  Description of Artificial Sequence: Synthetic oligonucleotide
  Sense strand starting at position 702 of SEQ ID NO: 2861
agugguuucuuacucugaa

SEQ ID NO: 222171 - RNA, 19 nt, Artificial Sequence
  Description of Artificial Sequence: Synthetic oligonucleotide
  Antisense strand to SEQ ID NO: 222170
uucagaguaagaaaccacu

SEQ ID NO: 222172 - RNA, 19 nt, Artificial Sequence
  Description of Artificial Sequence: Synthetic oligonucleotide
  Sense strand starting at position 703 of SEQ ID NO: 2861
gugguuucuuacucugaag

SEQ ID NO: 222173 - RNA, 19 nt, Artificial Sequence
  Description of Artificial Sequence: Synthetic oligonucleotide
  Antisense strand to SEQ ID NO: 222172
cuucagaguaagaaaccac

SEQ ID NO: 222174 - RNA, 19 nt, Artificial Sequence
  Description of Artificial Sequence: Synthetic oligonucleotide
  Sense strand starting at position 917 of SEQ ID NO: 2861
gugaaauacugacuaugua

SEQ ID NO: 222175 - RNA, 19 nt, Artificial Sequence
  Description of Artificial Sequence: Synthetic oligonucleotide
  Antisense strand to SEQ ID NO: 222174
uacauagucaguauuucac

SEQ ID NO: 222176 - RNA, 19 nt, Artificial Sequence
  Description of Artificial Sequence: Synthetic oligonucleotide
  Sense strand starting at position 967 of SEQ ID NO: 2861
gauggauaguaaucuauau

SEQ ID NO: 222177 - RNA, 19 nt, Artificial Sequence
  Description of Artificial Sequence: Synthetic oligonucleotide
  Antisense strand to SEQ ID NO: 222176
auauagauuacuauccauc

SEQ ID NO: 222178 - RNA, 19 nt, Artificial Sequence
  Description of Artificial Sequence: Synthetic oligonucleotide
  Sense strand starting at position 1479 of SEQ ID NO: 2861
cuuccauaacaccgaguaa

SEQ ID NO: 222179 - RNA, 19 nt, Artificial Sequence
  Description of Artificial Sequence: Synthetic oligonucleotide
  Antisense strand to SEQ ID NO: 222178
uuacucgguguuauggaag

SEQ ID NO: 222180 - RNA, 19 nt, Artificial Sequence
  Description of Artificial Sequence: Synthetic oligonucleotide
  Sense strand starting at position 2549 of SEQ ID NO: 2861
agaggcauucuggguaaag

SEQ ID NO: 222181 - RNA, 19 nt, Artificial Sequence
  Description of Artificial Sequence: Synthetic oligonucleotide
  Antisense strand to SEQ ID NO: 222180
cuuuacccagaaugccucu

SEQ ID NO: 222182 - RNA, 19 nt, Artificial Sequence
  Description of Artificial Sequence: Synthetic oligonucleotide
  Sense strand starting at position 2550 of SEQ ID NO: 2861
gaggcauucuggguaaagc

SEQ ID NO: 222183 - RNA, 19 nt, Artificial Sequence
  Description of Artificial Sequence: Synthetic oligonucleotide
  Antisense strand to SEQ ID NO: 222182
gcuuuacccagaaugccuc

SEQ ID NO: 222184 - RNA, 19 nt, Artificial Sequence
  Description of Artificial Sequence: Synthetic oligonucleotide
  Sense strand starting at position 2717 of SEQ ID NO: 2861
gggaagggaucgucagguu

SEQ ID NO: 222185 - RNA, 19 nt, Artificial Sequence
  Description of Artificial Sequence: Synthetic oligonucleotide
  Antisense strand to SEQ ID NO: 222184
aaccugacgaucccuuccc

SEQ ID NO: 222186 - RNA, 19 nt, Artificial Sequence
  Description of Artificial Sequence: Synthetic oligonucleotide
  Sense strand starting at position 2718 of SEQ ID NO: 2861
ggaagggaucgucagguuu

SEQ ID NO: 222187 - RNA, 19 nt, Artificial Sequence
  Description of Artificial Sequence: Synthetic oligonucleotide
  Antisense strand to SEQ ID NO: 222186
aaaccugacgaucccuucc

SEQ ID NO: 222188 - RNA, 19 nt, Artificial Sequence
  Description of Artificial Sequence: Synthetic oligonucleotide
  Sense strand starting at position 2766 of SEQ ID NO: 2861
cccuguucuguugagaauc

SEQ ID NO: 222189 - RNA, 19 nt, Artificial Sequence
  Description of Artificial Sequence: Synthetic oligonucleotide
  Antisense strand to SEQ ID NO: 222188
gauucucaacagaacaggg

SEQ ID NO: 222190 - RNA, 19 nt, Artificial Sequence
  Description of Artificial Sequence: Synthetic oligonucleotide
  Sense strand starting at position 3108 of SEQ ID NO: 2861
ccaguuuaugaaugugaaa

SEQ ID NO: 222191 - RNA, 19 nt, Artificial Sequence
  Description of Artificial Sequence: Synthetic oligonucleotide
  Antisense strand to SEQ ID NO: 222190
uuucacauucauaaacugg

SEQ ID NO: 222192 - RNA, 19 nt, Artificial Sequence
  Description of Artificial Sequence: Synthetic oligonucleotide
  Sense strand starting at position 3110 of SEQ ID NO: 2861
aguuuaugaaugugaaaga

SEQ ID NO: 222193 - RNA, 19 nt, Artificial Sequence
  Description of Artificial Sequence: Synthetic oligonucleotide
  Antisense strand to SEQ ID NO: 222192
ucuuucacauucauaaacu

SEQ ID NO: 222194 - RNA, 19 nt, Artificial Sequence
  Description of Artificial Sequence: Synthetic oligonucleotide
  Sense strand starting at position 3119 of SEQ ID NO: 2861
augugaaagaucugaugug

SEQ ID NO: 222195 - RNA, 19 nt, Artificial Sequence
  Description of Artificial Sequence: Synthetic oligonucleotide
  Antisense strand to SEQ ID NO: 222194
cacaucagaucuuucacau

SEQ ID NO: 222196 - RNA, 19 nt, Artificial Sequence
  Description of Artificial Sequence: Synthetic oligonucleotide
  Sense strand starting at position 3165 of SEQ ID NO: 2861
agaguaaccguuggugaca

SEQ ID NO: 222197 - RNA, 19 nt, Artificial Sequence
  Description of Artificial Sequence: Synthetic oligonucleotide
  Antisense strand to SEQ ID NO: 222196
ugucaccaacgguuacucu

SEQ ID NO: 222198 - RNA, 19 nt, Artificial Sequence
  Description of Artificial Sequence: Synthetic oligonucleotide
  Sense strand starting at position 3168 of SEQ ID NO: 2861
guaaccguuggugacauaa

SEQ ID NO: 222199 - RNA, 19 nt, Artificial Sequence
  Description of Artificial Sequence: Synthetic oligonucleotide
  Antisense strand to SEQ ID NO: 222198
uuaugucaccaacgguuac

SEQ ID NO: 222200 - RNA, 19 nt, Artificial Sequence
  Description of Artificial Sequence: Synthetic oligonucleotide
  Sense strand starting at position 3228 of SEQ ID NO: 2861
uggguuggcagucaauacu

SEQ ID NO: 222201 - RNA, 19 nt, Artificial Sequence
  Description of Artificial Sequence: Synthetic oligonucleotide
  Antisense strand to SEQ ID NO: 222200
aguauugacugccaaccca

SEQ ID NO: 222202 - RNA, 19 nt, Artificial Sequence
  Description of Artificial Sequence: Synthetic oligonucleotide
  Sense strand starting at position 3506 of SEQ ID NO: 2861
agguucuuggagcagucau

SEQ ID NO: 222203 - RNA, 19 nt, Artificial Sequence
  Description of Artificial Sequence: Synthetic oligonucleotide
  Antisense strand to SEQ ID NO: 222202
augacugcuccaagaaccu

SEQ ID NO: 222204 - RNA, 19 nt, Artificial Sequence
  Description of Artificial Sequence: Synthetic oligonucleotide
  Sense strand starting at position 3795 of SEQ ID NO: 2861
aaguaacaugcguauagca

SEQ ID NO: 222205 - RNA, 19 nt, Artificial Sequence
  Description of Artificial Sequence: Synthetic oligonucleotide
  Antisense strand to SEQ ID NO: 222204
ugcuauacgcauguuacuu

SEQ ID NO: 222206 - RNA, 19 nt, Artificial Sequence
  Description of Artificial Sequence: Synthetic oligonucleotide
  Sense strand starting at position 3819 of SEQ ID NO: 2861
gucacaaagcaaugaaauu

SEQ ID NO: 222207 - RNA, 19 nt, Artificial Sequence
  Description of Artificial Sequence: Synthetic oligonucleotide
  Antisense strand to SEQ ID NO: 222206
aauuucauugcuuugugac

SEQ ID NO: 222208 - RNA, 19 nt, Artificial Sequence
  Description of Artificial Sequence: Synthetic oligonucleotide
  Sense strand starting at position 3860 of SEQ ID NO: 2861
gucugugagcuugagcaaa

SEQ ID NO: 222209 - RNA, 19 nt, Artificial Sequence
  Description of Artificial Sequence: Synthetic oligonucleotide
  Antisense strand to SEQ ID NO: 222208
uuugcucaagcucacagac

SEQ ID NO: 222210 - RNA, 19 nt, Artificial Sequence
  Description of Artificial Sequence: Synthetic oligonucleotide
  Sense strand starting at position 3873 of SEQ ID NO: 2861
agcaaaugauaacuaaagu

SEQ ID NO: 222211 - RNA, 19 nt, Artificial Sequence
  Description of Artificial Sequence: Synthetic oligonucleotide
  Antisense strand to SEQ ID NO: 222210
acuuuaguuaucauuugcu

SEQ ID NO: 222212 - RNA, 19 nt, Artificial Sequence
  Description of Artificial Sequence: Synthetic oligonucleotide
  Sense strand starting at position 3889 of SEQ ID NO: 2861
aguugcucauuuguaaaug

SEQ ID NO: 222213 - RNA, 19 nt, Artificial Sequence
  Description of Artificial Sequence: Synthetic oligonucleotide
  Antisense strand to SEQ ID NO: 222212
cauuuacaaaugagcaacu

SEQ ID NO: 222214 - RNA, 19 nt, Artificial Sequence
  Description of Artificial Sequence: Synthetic oligonucleotide
  Sense strand starting at position 3898 of SEQ ID NO: 2861
uuuguaaauguggacauua

SEQ ID NO: 222215 - RNA, 19 nt, Artificial Sequence
  Description of Artificial Sequence: Synthetic oligonucleotide
  Antisense strand to SEQ ID NO: 222214
uaauguccacauuuacaaa

SEQ ID NO: 222216 - RNA, 19 nt, Artificial Sequence
  Description of Artificial Sequence: Synthetic oligonucleotide
  Sense strand starting at position 3900 of SEQ ID NO: 2861
uguaaauguggacauuauu

SEQ ID NO: 222217 - RNA, 19 nt, Artificial Sequence
  Description of Artificial Sequence: Synthetic oligonucleotide
  Antisense strand to SEQ ID NO: 222216
aauaauguccacauuuaca

SEQ ID NO: 222218 - RNA, 19 nt, Artificial Sequence
  Description of Artificial Sequence: Synthetic oligonucleotide
  Sense strand starting at position 231 of SEQ ID NO: 2863
aagucuaaucaacgugauc

SEQ ID NO: 222219 - RNA, 19 nt, Artificial Sequence
  Description of Artificial Sequence: Synthetic oligonucleotide
  Antisense strand to SEQ ID NO: 222218
gaucacguugauuagacuu

SEQ ID NO: 222220 - RNA, 19 nt, Artificial Sequence
  Description of Artificial Sequence: Synthetic oligonucleotide
  Sense strand starting at position 335 of SEQ ID NO: 2863
cccacuuagccuggugaau

SEQ ID NO: 222221 - RNA, 19 nt, Artificial Sequence
  Description of Artificial Sequence: Synthetic oligonucleotide
  Antisense strand to SEQ ID NO: 222220
auucaccaggcuaaguggg

SEQ ID NO: 222222 - RNA, 19 nt, Artificial Sequence
  Description of Artificial Sequence: Synthetic oligonucleotide
  Sense strand starting at position 346 of SEQ ID NO: 2863
uggugaauucuuuaucccu

SEQ ID NO: 222223 - RNA, 19 nt, Artificial Sequence
  Description of Artificial Sequence: Synthetic oligonucleotide
  Antisense strand to SEQ ID NO: 222222
agggauaaagaauucacca

SEQ ID NO: 222224 - RNA, 19 nt, Artificial Sequence
  Description of Artificial Sequence: Synthetic oligonucleotide
  Sense strand starting at position 420 of SEQ ID NO: 2863
cgaguuuccgcggcacuua

SEQ ID NO: 222225 - RNA, 19 nt, Artificial Sequence
  Description of Artificial Sequence: Synthetic oligonucleotide
  Antisense strand to SEQ ID NO: 222224
uaagugccgcggaaacucg

SEQ ID NO: 222226 - RNA, 19 nt, Artificial Sequence
  Description of Artificial Sequence: Synthetic oligonucleotide
  Sense strand starting at position 485 of SEQ ID NO: 2863
ugagaaucccuagguguag

SEQ ID NO: 222227 - RNA, 19 nt, Artificial Sequence
  Description of Artificial Sequence: Synthetic oligonucleotide
  Antisense strand to SEQ ID NO: 222226
cuacaccuagggauucuca

SEQ ID NO: 222228 - RNA, 19 nt, Artificial Sequence
  Description of Artificial Sequence: Synthetic oligonucleotide
  Sense strand starting at position 486 of SEQ ID NO: 2863
gagaaucccuagguguaga

SEQ ID NO: 222229 - RNA, 19 nt, Artificial Sequence
  Description of Artificial Sequence: Synthetic oligonucleotide
  Antisense strand to SEQ ID NO: 222228
ucuacaccuagggauucuc

SEQ ID NO: 222230 - RNA, 19 nt, Artificial Sequence
  Description of Artificial Sequence: Synthetic oligonucleotide
  Sense strand starting at position 487 of SEQ ID NO: 2863
agaaucccuagguguagaa

SEQ ID NO: 222231 - RNA, 19 nt, Artificial Sequence
  Description of Artificial Sequence: Synthetic oligonucleotide
  Antisense strand to SEQ ID NO: 222230
uucuacaccuagggauucu

SEQ ID NO: 222232 - RNA, 19 nt, Artificial Sequence
  Description of Artificial Sequence: Synthetic oligonucleotide
  Sense strand starting at position 499 of SEQ ID NO: 2863
uguagaaacugccuuccau

SEQ ID NO: 222233 - RNA, 19 nt, Artificial Sequence
  Description of Artificial Sequence: Synthetic oligonucleotide
  Antisense strand to SEQ ID NO: 222232
auggaaggcaguuucuaca

SEQ ID NO: 222234 - RNA, 19 nt, Artificial Sequence
  Description of Artificial Sequence: Synthetic oligonucleotide
  Sense strand starting at position 638 of SEQ ID NO: 2863
ccaacuuauuggguucuca

SEQ ID NO: 222235 - RNA, 19 nt, Artificial Sequence
  Description of Artificial Sequence: Synthetic oligonucleotide
  Antisense strand to SEQ ID NO: 222234
ugagaacccaauaaguugg

SEQ ID NO: 222236 - RNA, 19 nt, Artificial Sequence
  Description of Artificial Sequence: Synthetic oligonucleotide
  Sense strand starting at position 646 of SEQ ID NO: 2863
uuggguucucaccaguacu

SEQ ID NO: 222237 - RNA, 19 nt, Artificial Sequence
  Description of Artificial Sequence: Synthetic oligonucleotide
  Antisense strand to SEQ ID NO: 222236
aguacuggugagaacccaa

SEQ ID NO: 222238 - RNA, 19 nt, Artificial Sequence
  Description of Artificial Sequence: Synthetic oligonucleotide
  Sense strand starting at position 649 of SEQ ID NO: 2863
gguucucaccaguacuaau

SEQ ID NO: 222239 - RNA, 19 nt, Artificial Sequence
  Description of Artificial Sequence: Synthetic oligonucleotide
  Antisense strand to SEQ ID NO: 222238
auuaguacuggugagaacc

SEQ ID NO: 222240 - RNA, 19 nt, Artificial Sequence
  Description of Artificial Sequence: Synthetic oligonucleotide
  Sense strand starting at position 678 of SEQ ID NO: 2863
ugucaagugcuguaaagcu

SEQ ID NO: 222241 - RNA, 19 nt, Artificial Sequence
  Description of Artificial Sequence: Synthetic oligonucleotide
  Antisense strand to SEQ ID NO: 222240
agcuuuacagcacuugaca

SEQ ID NO: 222242 - RNA, 19 nt, Artificial Sequence
  Description of Artificial Sequence: Synthetic oligonucleotide
  Sense strand starting at position 778 of SEQ ID NO: 2863
acuguuauacccggaacaa

SEQ ID NO: 222243 - RNA, 19 nt, Artificial Sequence
  Description of Artificial Sequence: Synthetic oligonucleotide
  Antisense strand to SEQ ID NO: 222242
uuguuccggguauaacagu

SEQ ID NO: 222244 - RNA, 19 nt, Artificial Sequence
  Description of Artificial Sequence: Synthetic oligonucleotide
  Sense strand starting at position 779 of SEQ ID NO: 2863
cuguuauacccggaacaaa

SEQ ID NO: 222245 - RNA, 19 nt, Artificial Sequence
  Description of Artificial Sequence: Synthetic oligonucleotide
  Antisense strand to SEQ ID NO: 222244
uuuguuccggguauaacag

SEQ ID NO: 222246 - RNA, 19 nt, Artificial Sequence
  Description of Artificial Sequence: Synthetic oligonucleotide
  Sense strand starting at position 798 of SEQ ID NO: 2863
gcagguguucgguaccuau

SEQ ID NO: 222247 - RNA, 19 nt, Artificial Sequence
  Description of Artificial Sequence: Synthetic oligonucleotide
  Antisense strand to SEQ ID NO: 222246
auagguaccgaacaccugc

SEQ ID NO: 222248 - RNA, 19 nt, Artificial Sequence
  Description of Artificial Sequence: Synthetic oligonucleotide
  Sense strand starting at position 819 of SEQ ID NO: 2863
gcugaauaacuggagcacu

SEQ ID NO: 222249 - RNA, 19 nt, Artificial Sequence
  Description of Artificial Sequence: Synthetic oligonucleotide
  Antisense strand to SEQ ID NO: 222248
agugcuccaguuauucagc

SEQ ID NO: 222250 - RNA, 19 nt, Artificial Sequence
  Description of Artificial Sequence: Synthetic oligonucleotide
  Sense strand starting at position 889 of SEQ ID NO: 2863
gguaucaaaggcugacaga

SEQ ID NO: 222251 - RNA, 19 nt, Artificial Sequence
  Description of Artificial Sequence: Synthetic oligonucleotide
  Antisense strand to SEQ ID NO: 222250
ucugucagccuuugauacc

SEQ ID NO: 222252 - RNA, 19 nt, Artificial Sequence
  Description of Artificial Sequence: Synthetic oligonucleotide
  Sense strand starting at position 979 of SEQ ID NO: 2863
aggagaaaguccgugccaa

SEQ ID NO: 222253 - RNA, 19 nt, Artificial Sequence
  Description of Artificial Sequence: Synthetic oligonucleotide
  Antisense strand to SEQ ID NO: 222252
uuggcacggacuuucuccu

SEQ ID NO: 222254 - RNA, 19 nt, Artificial Sequence
  Description of Artificial Sequence: Synthetic oligonucleotide
  Sense strand starting at position 980 of SEQ ID NO: 2863
ggagaaaguccgugccaac

SEQ ID NO: 222255 - RNA, 19 nt, Artificial Sequence
  Description of Artificial Sequence: Synthetic oligonucleotide
  Antisense strand to SEQ ID NO: 222254
guuggcacggacuuucucc

SEQ ID NO: 222256 - RNA, 19 nt, Artificial Sequence
  Description of Artificial Sequence: Synthetic oligonucleotide
  Sense strand starting at position 1202 of SEQ ID NO: 2863
ucaggaguucuccguggag

SEQ ID NO: 222257 - RNA, 19 nt, Artificial Sequence
  Description of Artificial Sequence: Synthetic oligonucleotide
  Antisense strand to SEQ ID NO: 222256
cuccacggagaacuccuga

SEQ ID NO: 222258 - RNA, 19 nt, Artificial Sequence
  Description of Artificial Sequence: Synthetic oligonucleotide
  Sense strand starting at position 1204 of SEQ ID NO: 2863
aggaguucuccguggagag

SEQ ID NO: 222259 - RNA, 19 nt, Artificial Sequence
  Description of Artificial Sequence: Synthetic oligonucleotide
  Antisense strand to SEQ ID NO: 222258
cucuccacggagaacuccu

SEQ ID NO: 222260 - RNA, 19 nt, Artificial Sequence
  Description of Artificial Sequence: Synthetic oligonucleotide
  Sense strand starting at position 1205 of SEQ ID NO: 2863
ggaguucuccguggagagu

SEQ ID NO: 222261 - RNA, 19 nt, Artificial Sequence
  Description of Artificial Sequence: Synthetic oligonucleotide
  Antisense strand to SEQ ID NO: 222260
acucuccacggagaacucc

SEQ ID NO: 222262 - RNA, 19 nt, Artificial Sequence
  Description of Artificial Sequence: Synthetic oligonucleotide
  Sense strand starting at position 1206 of SEQ ID NO: 2863
gaguucuccguggagaguu

SEQ ID NO: 222263 - RNA, 19 nt, Artificial Sequence
  Description of Artificial Sequence: Synthetic oligonucleotide
  Antisense strand to SEQ ID NO: 222262
aacucuccacggagaacuc

SEQ ID NO: 222264 - RNA, 19 nt, Artificial Sequence
  Description of Artificial Sequence: Synthetic oligonucleotide
  Sense strand starting at position 1406 of SEQ ID NO: 2863
uccugagaaacgugcagaa

SEQ ID NO: 222265 - RNA, 19 nt, Artificial Sequence
  Description of Artificial Sequence: Synthetic oligonucleotide
  Antisense strand to SEQ ID NO: 222264
uucugcacguuucucagga

SEQ ID NO: 222266 - RNA, 19 nt, Artificial Sequence
  Description of Artificial Sequence: Synthetic oligonucleotide
  Sense strand starting at position 2208 of SEQ ID NO: 2863
uggcuucuguguguuauuu

SEQ ID NO: 222267 - RNA, 19 nt, Artificial Sequence
  Description of Artificial Sequence: Synthetic oligonucleotide
  Antisense strand to SEQ ID NO: 222266
aaauaacacacagaagcca

SEQ ID NO: 222268 - RNA, 19 nt, Artificial Sequence
  Description of Artificial Sequence: Synthetic oligonucleotide
  Sense strand starting at position 2234 of SEQ ID NO: 2863
gccguuuguguucuuguuu

SEQ ID NO: 222269 - RNA, 19 nt, Artificial Sequence
  Description of Artificial Sequence: Synthetic oligonucleotide
  Antisense strand to SEQ ID NO: 222268
aaacaagaacacaaacggc

SEQ ID NO: 222270 - RNA, 19 nt, Artificial Sequence
  Description of Artificial Sequence: Synthetic oligonucleotide
  Sense strand starting at position 2237 of SEQ ID NO: 2863
guuuguguucuuguuucua

SEQ ID NO: 222271 - RNA, 19 nt, Artificial Sequence
  Description of Artificial Sequence: Synthetic oligonucleotide
  Antisense strand to SEQ ID NO: 222270
uagaaacaagaacacaaac

SEQ ID NO: 222272 - RNA, 19 nt, Artificial Sequence
  Description of Artificial Sequence: Synthetic oligonucleotide
  Sense strand starting at position 2276 of SEQ ID NO: 2863
ucuacucuuccgcaucaga

SEQ ID NO: 222273 - RNA, 19 nt, Artificial Sequence
  Description of Artificial Sequence: Synthetic oligonucleotide
  Antisense strand to SEQ ID NO: 222272
ucugaugcggaagaguaga

SEQ ID NO: 222274 - RNA, 19 nt, Artificial Sequence
  Description of Artificial Sequence: Synthetic oligonucleotide
  Sense strand starting at position 2499 of SEQ ID NO: 2863
gugagcaggaguugugacu

SEQ ID NO: 222275 - RNA, 19 nt, Artificial Sequence
  Description of Artificial Sequence: Synthetic oligonucleotide
  Antisense strand to SEQ ID NO: 222274
agucacaacuccugcucac

SEQ ID NO: 222276 - RNA, 19 nt, Artificial Sequence
  Description of Artificial Sequence: Synthetic oligonucleotide
  Sense strand starting at position 2508 of SEQ ID NO: 2863
aguugugacuagagaggga

SEQ ID NO: 222277 - RNA, 19 nt, Artificial Sequence
  Description of Artificial Sequence: Synthetic oligonucleotide
  Antisense strand to SEQ ID NO: 222276
ucccucucuagucacaacu

SEQ ID NO: 222278 - RNA, 19 nt, Artificial Sequence
  Description of Artificial Sequence: Synthetic oligonucleotide
  Sense strand starting at position 2543 of SEQ ID NO: 2863
agaccagauuugugcaaag

SEQ ID NO: 222279 - RNA, 19 nt, Artificial Sequence
  Description of Artificial Sequence: Synthetic oligonucleotide
  Antisense strand to SEQ ID NO: 222278
cuuugcacaaaucuggucu

SEQ ID NO: 222280 - RNA, 19 nt, Artificial Sequence
  Description of Artificial Sequence: Synthetic oligonucleotide
  Sense strand starting at position 2639 of SEQ ID NO: 2863
ggcauuaagauaugagccu

SEQ ID NO: 222281 - RNA, 19 nt, Artificial Sequence
  Description of Artificial Sequence: Synthetic oligonucleotide
  Antisense strand to SEQ ID NO: 222280
aggcucauaucuuaaugcc

SEQ ID NO: 222282 - RNA, 19 nt, Artificial Sequence
  Description of Artificial Sequence: Synthetic oligonucleotide
  Sense strand starting at position 2783 of SEQ ID NO: 2863
ugaaguuaucagggcaggu

SEQ ID NO: 222283 - RNA, 19 nt, Artificial Sequence
  Description of Artificial Sequence: Synthetic oligonucleotide
  Antisense strand to SEQ ID NO: 222282
accugcccugauaacuuca

SEQ ID NO: 222284 - RNA, 19 nt, Artificial Sequence
  Description of Artificial Sequence: Synthetic oligonucleotide
  Sense strand starting at position 3050 of SEQ ID NO: 2863
ggaaaugcuguccaucugu

SEQ ID NO: 222285 - RNA, 19 nt, Artificial Sequence
  Description of Artificial Sequence: Synthetic oligonucleotide
  Antisense strand to SEQ ID NO: 222284
acagauggacagcauuucc

SEQ ID NO: 222286 - RNA, 19 nt, Artificial Sequence
  Description of Artificial Sequence: Synthetic oligonucleotide
  Sense strand starting at position 3142 of SEQ ID NO: 2863
agagaccucgccugccaau

SEQ ID NO: 222287 - RNA, 19 nt, Artificial Sequence
  Description of Artificial Sequence: Synthetic oligonucleotide
  Antisense strand to SEQ ID NO: 222286
auuggcaggcgaggucucu

SEQ ID NO: 222288 - RNA, 19 nt, Artificial Sequence
  Description of Artificial Sequence: Synthetic oligonucleotide
  Sense strand starting at position 3491 of SEQ ID NO: 2863
cagaaaguucugcagcaca

SEQ ID NO: 222289 - RNA, 19 nt, Artificial Sequence
  Description of Artificial Sequence: Synthetic oligonucleotide
  Antisense strand to SEQ ID NO: 222288
ugugcugcagaacuuucug

SEQ ID NO: 222290 - RNA, 19 nt, Artificial Sequence
  Description of Artificial Sequence: Synthetic oligonucleotide
  Sense strand starting at position 3523 of SEQ ID NO: 2863
cuguguccucccguaauuc

SEQ ID NO: 222291 - RNA, 19 nt, Artificial Sequence
  Description of Artificial Sequence: Synthetic oligonucleotide
  Antisense strand to SEQ ID NO: 222290
gaauuacgggaggacacag

SEQ ID NO: 222292 - RNA, 19 nt, Artificial Sequence
  Description of Artificial Sequence: Synthetic oligonucleotide
  Sense strand starting at position 3637 of SEQ ID NO: 2863
ggugaucccuaauccggua

SEQ ID NO: 222293 - RNA, 19 nt, Artificial Sequence
  Description of Artificial Sequence: Synthetic oligonucleotide
  Antisense strand to SEQ ID NO: 222292
uaccggauuagggaucacc

SEQ ID NO: 222294 - RNA, 19 nt, Artificial Sequence
  Description of Artificial Sequence: Synthetic oligonucleotide
  Sense strand starting at position 3826 of SEQ ID NO: 2863
cgucaauuccuguggugga

SEQ ID NO: 222295 - RNA, 19 nt, Artificial Sequence
  Description of Artificial Sequence: Synthetic oligonucleotide
  Antisense strand to SEQ ID NO: 222294
uccaccacaggaauugacg

SEQ ID NO: 222296 - RNA, 19 nt, Artificial Sequence
  Description of Artificial Sequence: Synthetic oligonucleotide
  Sense strand starting at position 3948 of SEQ ID NO: 2863
cuacauguggagugauaca

SEQ ID NO: 222297 - RNA, 19 nt, Artificial Sequence
  Description of Artificial Sequence: Synthetic oligonucleotide
  Antisense strand to SEQ ID NO: 222296
uguaucacuccacauguag

SEQ ID NO: 222298 - RNA, 19 nt, Artificial Sequence
  Description of Artificial Sequence: Synthetic oligonucleotide
  Sense strand starting at position 58 of SEQ ID NO: 2862
uguauuuacuacugucaau

SEQ ID NO: 222299 - RNA, 19 nt, Artificial Sequence
  Description of Artificial Sequence: Synthetic oligonucleotide
  Antisense strand to SEQ ID NO: 222298
auugacaguaguaaauaca

SEQ ID NO: 222300 - RNA, 19 nt, Artificial Sequence
  Description of Artificial Sequence: Synthetic oligonucleotide
  Sense strand starting at position 96 of SEQ ID NO: 2862
ugugaaguauguucucaca

SEQ ID NO: 222301 - RNA, 19 nt, Artificial Sequence
  Description of Artificial Sequence: Synthetic oligonucleotide
  Antisense strand to SEQ ID NO: 222300
ugugagaacauacuucaca

SEQ ID NO: 222302 - RNA, 19 nt, Artificial Sequence
  Description of Artificial Sequence: Synthetic oligonucleotide
  Sense strand starting at position 98 of SEQ ID NO: 2862
ugaaguauguucucacaca

SEQ ID NO: 222303 - RNA, 19 nt, Artificial Sequence
  Description of Artificial Sequence: Synthetic oligonucleotide
  Antisense strand to SEQ ID NO: 222302
ugugugagaacauacuuca

SEQ ID NO: 222304 - RNA, 19 nt, Artificial Sequence
  Description of Artificial Sequence: Synthetic oligonucleotide
  Sense strand starting at position 99 of SEQ ID NO: 2862
gaaguauguucucacacag

SEQ ID NO: 222305 - RNA, 19 nt, Artificial Sequence
  Description of Artificial Sequence: Synthetic oligonucleotide
  Antisense strand to SEQ ID NO: 222304
cugugugagaacauacuuc

SEQ ID NO: 222306 - RNA, 19 nt, Artificial Sequence
  Description of Artificial Sequence: Synthetic oligonucleotide
  Sense strand starting at position 169 of SEQ ID NO: 2862
uggcuuguuccuccagcga

SEQ ID NO: 222307 - RNA, 19 nt, Artificial Sequence
  Description of Artificial Sequence: Synthetic oligonucleotide
  Antisense strand to SEQ ID NO: 222306
ucgcuggaggaacaagcca

SEQ ID NO: 222308 - RNA, 19 nt, Artificial Sequence
  Description of Artificial Sequence: Synthetic oligonucleotide
  Sense strand starting at position 257 of SEQ ID NO: 2862
gggucuggccgugaaagga

SEQ ID NO: 222309 - RNA, 19 nt, Artificial Sequence
  Description of Artificial Sequence: Synthetic oligonucleotide
  Antisense strand to SEQ ID NO: 222308
uccuuucacggccagaccc

SEQ ID NO: 222310 - RNA, 19 nt, Artificial Sequence
  Description of Artificial Sequence: Synthetic oligonucleotide
  Sense strand starting at position 293 of SEQ ID NO: 2862
gaaggauccugguccugga

SEQ ID NO: 222311 - RNA, 19 nt, Artificial Sequence
  Description of Artificial Sequence: Synthetic oligonucleotide
  Antisense strand to SEQ ID NO: 222310
uccaggaccaggauccuuc

SEQ ID NO: 222312 - RNA, 19 nt, Artificial Sequence
  Description of Artificial Sequence: Synthetic oligonucleotide
  Sense strand starting at position 297 of SEQ ID NO: 2862
gauccugguccuggagaga

SEQ ID NO: 222313 - RNA, 19 nt, Artificial Sequence
  Description of Artificial Sequence: Synthetic oligonucleotide
  Antisense strand to SEQ ID NO: 222312
ucucuccaggaccaggauc

SEQ ID NO: 222314 - RNA, 19 nt, Artificial Sequence
  Description of Artificial Sequence: Synthetic oligonucleotide
  Sense strand starting at position 406 of SEQ ID NO: 2862
gccuccuguuucccuuaua

SEQ ID NO: 222315 - RNA, 19 nt, Artificial Sequence
  Description of Artificial Sequence: Synthetic oligonucleotide
  Antisense strand to SEQ ID NO: 222314
uauaagggaaacaggaggc

SEQ ID NO: 222316 - RNA, 19 nt, Artificial Sequence
  Description of Artificial Sequence: Synthetic oligonucleotide
  Sense strand starting at position 644 of SEQ ID NO: 2862
ugcaguaacuuucuaggga

SEQ ID NO: 222317 - RNA, 19 nt, Artificial Sequence
  Description of Artificial Sequence: Synthetic oligonucleotide
  Antisense strand to SEQ ID NO: 222316
ucccuagaaaguuacugca

SEQ ID NO: 222318 - RNA, 19 nt, Artificial Sequence
  Description of Artificial Sequence: Synthetic oligonucleotide
  Sense strand starting at position 647 of SEQ ID NO: 2862
aguaacuuucuagggauau

SEQ ID NO: 222319 - RNA, 19 nt, Artificial Sequence
  Description of Artificial Sequence: Synthetic oligonucleotide
  Antisense strand to SEQ ID NO: 222318
auaucccuagaaaguuacu

SEQ ID NO: 222320 - RNA, 19 nt, Artificial Sequence
  Description of Artificial Sequence: Synthetic oligonucleotide
  Sense strand starting at position 648 of SEQ ID NO: 2862
guaacuuucuagggauaug

SEQ ID NO: 222321 - RNA, 19 nt, Artificial Sequence
  Description of Artificial Sequence: Synthetic oligonucleotide
  Antisense strand to SEQ ID NO: 222320
cauaucccuagaaaguuac

SEQ ID NO: 222322 - RNA, 19 nt, Artificial Sequence
  Description of Artificial Sequence: Synthetic oligonucleotide
  Sense strand starting at position 801 of SEQ ID NO: 2862
ccgcuuaaacauggcagua

SEQ ID NO: 222323 - RNA, 19 nt, Artificial Sequence
  Description of Artificial Sequence: Synthetic oligonucleotide
  Antisense strand to SEQ ID NO: 222322
uacugccauguuuaagcgg

SEQ ID NO: 222324 - RNA, 19 nt, Artificial Sequence
  Description of Artificial Sequence: Synthetic oligonucleotide
  Sense strand starting at position 811 of SEQ ID NO: 2862
auggcaguaaucugugacu

SEQ ID NO: 222325 - RNA, 19 nt, Artificial Sequence
  Description of Artificial Sequence: Synthetic oligonucleotide
  Antisense strand to SEQ ID NO: 222324
agucacagauuacugccau

SEQ ID NO: 222326 - RNA, 19 nt, Artificial Sequence
  Description of Artificial Sequence: Synthetic oligonucleotide
  Sense strand starting at position 813 of SEQ ID NO: 2862
ggcaguaaucugugacuuu

SEQ ID NO: 222327 - RNA, 19 nt, Artificial Sequence
  Description of Artificial Sequence: Synthetic oligonucleotide
  Antisense strand to SEQ ID NO: 222326
aaagucacagauuacugcc

SEQ ID NO: 222328 - RNA, 19 nt, Artificial Sequence
  Description of Artificial Sequence: Synthetic oligonucleotide
  Sense strand starting at position 864 of SEQ ID NO: 2862
uggugcuucuagcuuuaaa

SEQ ID NO: 222329 - RNA, 19 nt, Artificial Sequence
  Description of Artificial Sequence: Synthetic oligonucleotide
  Antisense strand to SEQ ID NO: 222328
uuuaaagcuagaagcacca

SEQ ID NO: 222330 - RNA, 19 nt, Artificial Sequence
  Description of Artificial Sequence: Synthetic oligonucleotide
  Sense strand starting at position 910 of SEQ ID NO: 2862
aagguuaauugcuagaaag

SEQ ID NO: 222331 - RNA, 19 nt, Artificial Sequence
  Description of Artificial Sequence: Synthetic oligonucleotide
  Antisense strand to SEQ ID NO: 222330
cuuucuagcaauuaaccuu

SEQ ID NO: 222332 - RNA, 19 nt, Artificial Sequence
  Description of Artificial Sequence: Synthetic oligonucleotide
  Sense strand starting at position 1986 of SEQ ID NO: 2862
acauauucgugucucuaac

SEQ ID NO: 222333 - RNA, 19 nt, Artificial Sequence
  Description of Artificial Sequence: Synthetic oligonucleotide
  Antisense strand to SEQ ID NO: 222332
guuagagacacgaauaugu

SEQ ID NO: 222334 - RNA, 19 nt, Artificial Sequence
  Description of Artificial Sequence: Synthetic oligonucleotide
  Sense strand starting at position 2315 of SEQ ID NO: 2862
ugccauuucucaggaugcu

SEQ ID NO: 222335 - RNA, 19 nt, Artificial Sequence
  Description of Artificial Sequence: Synthetic oligonucleotide
  Antisense strand to SEQ ID NO: 222334
agcauccugagaaauggca

SEQ ID NO: 222336 - RNA, 19 nt, Artificial Sequence
  Description of Artificial Sequence: Synthetic oligonucleotide
  Sense strand starting at position 2514 of SEQ ID NO: 2862
acaagacguucucuuacga

SEQ ID NO: 222337 - RNA, 19 nt, Artificial Sequence
  Description of Artificial Sequence: Synthetic oligonucleotide
  Antisense strand to SEQ ID NO: 222336
ucguaagagaacgucuugu

SEQ ID NO: 222338 - RNA, 19 nt, Artificial Sequence
  Description of Artificial Sequence: Synthetic oligonucleotide
  Sense strand starting at position 2521 of SEQ ID NO: 2862
guucucuuacgagaaucca

SEQ ID NO: 222339 - RNA, 19 nt, Artificial Sequence
  Description of Artificial Sequence: Synthetic oligonucleotide
  Antisense strand to SEQ ID NO: 222338
uggauucucguaagagaac

SEQ ID NO: 222340 - RNA, 19 nt, Artificial Sequence
  Description of Artificial Sequence: Synthetic oligonucleotide
  Sense strand starting at position 2546 of SEQ ID NO: 2862
gauuauacgguccacucau

SEQ ID NO: 222341 - RNA, 19 nt, Artificial Sequence
  Description of Artificial Sequence: Synthetic oligonucleotide
  Antisense strand to SEQ ID NO: 222340
augaguggaccguauaauc

SEQ ID NO: 222342 - RNA, 19 nt, Artificial Sequence
  Description of Artificial Sequence: Synthetic oligonucleotide
  Sense strand starting at position 2649 of SEQ ID NO: 2862
acaucaaaugcguaacuaa

SEQ ID NO: 222343 - RNA, 19 nt, Artificial Sequence
  Description of Artificial Sequence: Synthetic oligonucleotide
  Antisense strand to SEQ ID NO: 222342
uuaguuacgcauuugaugu

SEQ ID NO: 222344 - RNA, 19 nt, Artificial Sequence
  Description of Artificial Sequence: Synthetic oligonucleotide
  Sense strand starting at position 2660 of SEQ ID NO: 2862
guaacuaacuacuugguca

SEQ ID NO: 222345 - RNA, 19 nt, Artificial Sequence
  Description of Artificial Sequence: Synthetic oligonucleotide
  Antisense strand to SEQ ID NO: 222344
ugaccaaguaguuaguuac

SEQ ID NO: 222346 - RNA, 19 nt, Artificial Sequence
  Description of Artificial Sequence: Synthetic oligonucleotide
  Sense strand starting at position 2667 of SEQ ID NO: 2862
acuacuuggucaugagaug

SEQ ID NO: 222347 - RNA, 19 nt, Artificial Sequence
  Description of Artificial Sequence: Synthetic oligonucleotide
  Antisense strand to SEQ ID NO: 222346
caucucaugaccaaguagu

SEQ ID NO: 222348 - RNA, 19 nt, Artificial Sequence
  Description of Artificial Sequence: Synthetic oligonucleotide
  Sense strand starting at position 2668 of SEQ ID NO: 2862
cuacuuggucaugagaugu

SEQ ID NO: 222349 - RNA, 19 nt, Artificial Sequence
  Description of Artificial Sequence: Synthetic oligonucleotide
  Antisense strand to SEQ ID NO: 222348
acaucucaugaccaaguag

SEQ ID NO: 222350 - RNA, 19 nt, Artificial Sequence
  Description of Artificial Sequence: Synthetic oligonucleotide
  Sense strand starting at position 2761 of SEQ ID NO: 2862
gcguucgcacacuauguua

SEQ ID NO: 222351 - RNA, 19 nt, Artificial Sequence
  Description of Artificial Sequence: Synthetic oligonucleotide
  Antisense strand to SEQ ID NO: 222350
uaacauagugugcgaacgc

SEQ ID NO: 222352 - RNA, 19 nt, Artificial Sequence
  Description of Artificial Sequence: Synthetic oligonucleotide
  Sense strand starting at position 2812 of SEQ ID NO: 2862
ggagccucagcauggaaau

SEQ ID NO: 222353 - RNA, 19 nt, Artificial Sequence
  Description of Artificial Sequence: Synthetic oligonucleotide
  Antisense strand to SEQ ID NO: 222352
auuuccaugcugaggcucc

SEQ ID NO: 222354 - RNA, 19 nt, Artificial Sequence
  Description of Artificial Sequence: Synthetic oligonucleotide
  Sense strand starting at position 2949 of SEQ ID NO: 2862
uguacaaaguucuuaagua

SEQ ID NO: 222355 - RNA, 19 nt, Artificial Sequence
  Description of Artificial Sequence: Synthetic oligonucleotide
  Antisense strand to SEQ ID NO: 222354
uacuuaagaacuuuguaca

SEQ ID NO: 222356 - RNA, 19 nt, Artificial Sequence
  Description of Artificial Sequence: Synthetic oligonucleotide
  Sense strand starting at position 2957 of SEQ ID NO: 2862
guucuuaaguauccacaaa

SEQ ID NO: 222357 - RNA, 19 nt, Artificial Sequence
  Description of Artificial Sequence: Synthetic oligonucleotide
  Antisense strand to SEQ ID NO: 222356
uuuguggauacuuaagaac

SEQ ID NO: 222358 - RNA, 19 nt, Artificial Sequence
  Description of Artificial Sequence: Synthetic oligonucleotide
  Sense strand starting at position 3034 of SEQ ID NO: 2862
ccaccuaugccagaaugca

SEQ ID NO: 222359 - RNA, 19 nt, Artificial Sequence
  Description of Artificial Sequence: Synthetic oligonucleotide
  Antisense strand to SEQ ID NO: 222358
ugcauucuggcauaggugg

SEQ ID NO: 222360 - RNA, 19 nt, Artificial Sequence
  Description of Artificial Sequence: Synthetic oligonucleotide
  Sense strand starting at position 3408 of SEQ ID NO: 2862
ggcagagcugcugaagaau

SEQ ID NO: 222361 - RNA, 19 nt, Artificial Sequence
  Description of Artificial Sequence: Synthetic oligonucleotide
  Antisense strand to SEQ ID NO: 222360
auucuucagcagcucugcc

SEQ ID NO: 222362 - RNA, 19 nt, Artificial Sequence
  Description of Artificial Sequence: Synthetic oligonucleotide
  Sense strand starting at position 3419 of SEQ ID NO: 2862
ugaagaaucuacugacuca

SEQ ID NO: 222363 - RNA, 19 nt, Artificial Sequence
  Description of Artificial Sequence: Synthetic oligonucleotide
  Antisense strand to SEQ ID NO: 222362
ugagucaguagauucuuca

SEQ ID NO: 222364 - RNA, 19 nt, Artificial Sequence
  Description of Artificial Sequence: Synthetic oligonucleotide
  Sense strand starting at position 3431 of SEQ ID NO: 2862
ugacucauucuuggcuuau

SEQ ID NO: 222365 - RNA, 19 nt, Artificial Sequence
  Description of Artificial Sequence: Synthetic oligonucleotide
  Antisense strand to SEQ ID NO: 222364
auaagccaagaaugaguca

SEQ ID NO: 222366 - RNA, 19 nt, Artificial Sequence
  Description of Artificial Sequence: Synthetic oligonucleotide
  Sense strand starting at position 3561 of SEQ ID NO: 2862
ugacgcuuguuugccagaa

SEQ ID NO: 222367 - RNA, 19 nt, Artificial Sequence
  Description of Artificial Sequence: Synthetic oligonucleotide
  Antisense strand to SEQ ID NO: 222366
uucuggcaaacaagcguca

SEQ ID NO: 222368 - RNA, 19 nt, Artificial Sequence
  Description of Artificial Sequence: Synthetic oligonucleotide
  Sense strand starting at position 3562 of SEQ ID NO: 2862
gacgcuuguuugccagaag

SEQ ID NO: 222369 - RNA, 19 nt, Artificial Sequence
  Description of Artificial Sequence: Synthetic oligonucleotide
  Antisense strand to SEQ ID NO: 222368
cuucuggcaaacaagcguc

SEQ ID NO: 222370 - RNA, 19 nt, Artificial Sequence
  Description of Artificial Sequence: Synthetic oligonucleotide
  Sense strand starting at position 3565 of SEQ ID NO: 2862
gcuuguuugccagaaguga

SEQ ID NO: 222371 - RNA, 19 nt, Artificial Sequence
  Description of Artificial Sequence: Synthetic oligonucleotide
  Antisense strand to SEQ ID NO: 222370
ucacuucuggcaaacaagc

SEQ ID NO: 222372 - RNA, 19 nt, Artificial Sequence
  Description of Artificial Sequence: Synthetic oligonucleotide
  Sense strand starting at position 3703 of SEQ ID NO: 2862
gauucugguagcgaggaua

SEQ ID NO: 222373 - RNA, 19 nt, Artificial Sequence
  Description of Artificial Sequence: Synthetic oligonucleotide
  Antisense strand to SEQ ID NO: 222372
uauccucgcuaccagaauc

SEQ ID NO: 222374 - RNA, 19 nt, Artificial Sequence
  Description of Artificial Sequence: Synthetic oligonucleotide
  Sense strand starting at position 3706 of SEQ ID NO: 2862
ucugguagcgaggauauaa

SEQ ID NO: 222375 - RNA, 19 nt, Artificial Sequence
  Description of Artificial Sequence: Synthetic oligonucleotide
  Antisense strand to SEQ ID NO: 222374
uuauauccucgcuaccaga

SEQ ID NO: 222376 - RNA, 19 nt, Artificial Sequence
  Description of Artificial Sequence: Synthetic oligonucleotide
  Sense strand starting at position 3736 of SEQ ID NO: 2862
gugugaaggacugggaaau

SEQ ID NO: 222377 - RNA, 19 nt, Artificial Sequence
  Description of Artificial Sequence: Synthetic oligonucleotide
  Antisense strand to SEQ ID NO: 222376
auuucccaguccuucacac

SEQ ID NO: 222378 - RNA, 19 nt, Artificial Sequence
  Description of Artificial Sequence: Synthetic oligonucleotide
  Sense strand starting at position 106 of SEQ ID NO: 2864
cuacccaucucgguaagau

SEQ ID NO: 222379 - RNA, 19 nt, Artificial Sequence
  Description of Artificial Sequence: Synthetic oligonucleotide
  Antisense strand to SEQ ID NO: 222378
aucuuaccgagauggguag

SEQ ID NO: 222380 - RNA, 19 nt, Artificial Sequence
  Description of Artificial Sequence: Synthetic oligonucleotide
  Sense strand starting at position 107 of SEQ ID NO: 2864
uacccaucucgguaagauu

SEQ ID NO: 222381 - RNA, 19 nt, Artificial Sequence
  Description of Artificial Sequence: Synthetic oligonucleotide
  Antisense strand to SEQ ID NO: 222380
aaucuuaccgagaugggua

SEQ ID NO: 222382 - RNA, 19 nt, Artificial Sequence
  Description of Artificial Sequence: Synthetic oligonucleotide
  Sense strand starting at position 277 of SEQ ID NO: 2864
ucacucugccuagaagauu

SEQ ID NO: 222383 - RNA, 19 nt, Artificial Sequence
  Description of Artificial Sequence: Synthetic oligonucleotide
  Antisense strand to SEQ ID NO: 222382
aaucuucuaggcagaguga

SEQ ID NO: 222384 - RNA, 19 nt, Artificial Sequence
  Description of Artificial Sequence: Synthetic oligonucleotide
  Sense strand starting at position 289 of SEQ ID NO: 2864
gaagauucuucucccaggu

SEQ ID NO: 222385 - RNA, 19 nt, Artificial Sequence
  Description of Artificial Sequence: Synthetic oligonucleotide
  Antisense strand to SEQ ID NO: 222384
accugggagaagaaucuuc

SEQ ID NO: 222386 - RNA, 19 nt, Artificial Sequence
  Description of Artificial Sequence: Synthetic oligonucleotide
  Sense strand starting at position 303 of SEQ ID NO: 2864
cagguauccacgugauuug

SEQ ID NO: 222387 - RNA, 19 nt, Artificial Sequence
  Description of Artificial Sequence: Synthetic oligonucleotide
  Antisense strand to SEQ ID NO: 222386
caaaucacguggauaccug

SEQ ID NO: 222388 - RNA, 19 nt, Artificial Sequence
  Description of Artificial Sequence: Synthetic oligonucleotide
  Sense strand starting at position 314 of SEQ ID NO: 2864
gugauuugcucccucaucu

SEQ ID NO: 222389 - RNA, 19 nt, Artificial Sequence
  Description of Artificial Sequence: Synthetic oligonucleotide
  Antisense strand to SEQ ID NO: 222388
agaugagggagcaaaucac

SEQ ID NO: 222390 - RNA, 19 nt, Artificial Sequence
  Description of Artificial Sequence: Synthetic oligonucleotide
  Sense strand starting at position 806 of SEQ ID NO: 2864
acuugaguuccaugagagc

SEQ ID NO: 222391 - RNA, 19 nt, Artificial Sequence
  Description of Artificial Sequence: Synthetic oligonucleotide
  Antisense strand to SEQ ID NO: 222390
gcucucauggaacucaagu

SEQ ID NO: 222392 - RNA, 19 nt, Artificial Sequence
  Description of Artificial Sequence: Synthetic oligonucleotide
  Sense strand starting at position 989 of SEQ ID NO: 2864
cucagugacuugguagaua

SEQ ID NO: 222393 - RNA, 19 nt, Artificial Sequence
  Description of Artificial Sequence: Synthetic oligonucleotide
  Antisense strand to SEQ ID NO: 222392
uaucuaccaagucacugag

SEQ ID NO: 222394 - RNA, 19 nt, Artificial Sequence
  Description of Artificial Sequence: Synthetic oligonucleotide
  Sense strand starting at position 1010 of SEQ ID NO: 2864
aguaucaagucagaauuua

SEQ ID NO: 222395 - RNA, 19 nt, Artificial Sequence
  Description of Artificial Sequence: Synthetic oligonucleotide
  Antisense strand to SEQ ID NO: 222394
uaaauucugacuugauacu

SEQ ID NO: 222396 - RNA, 19 nt, Artificial Sequence
  Description of Artificial Sequence: Synthetic oligonucleotide
  Sense strand starting at position 1150 of SEQ ID NO: 2864
aagugagguucuucuaaga

SEQ ID NO: 222397 - RNA, 19 nt, Artificial Sequence
  Description of Artificial Sequence: Synthetic oligonucleotide
  Antisense strand to SEQ ID NO: 222396
ucuuagaagaaccucacuu

SEQ ID NO: 222398 - RNA, 19 nt, Artificial Sequence
  Description of Artificial Sequence: Synthetic oligonucleotide
  Sense strand starting at position 1259 of SEQ ID NO: 2864
uucgaauaggguugccaga

SEQ ID NO: 222399 - RNA, 19 nt, Artificial Sequence
  Description of Artificial Sequence: Synthetic oligonucleotide
  Antisense strand to SEQ ID NO: 222398
ucuggcaacccuauucgaa

SEQ ID NO: 222400 - RNA, 19 nt, Artificial Sequence
  Description of Artificial Sequence: Synthetic oligonucleotide
  Sense strand starting at position 1261 of SEQ ID NO: 2864
cgaauaggguugccagaua

SEQ ID NO: 222401 - RNA, 19 nt, Artificial Sequence
  Description of Artificial Sequence: Synthetic oligonucleotide
  Antisense strand to SEQ ID NO: 222400
uaucuggcaacccuauucg

SEQ ID NO: 222402 - RNA, 19 nt, Artificial Sequence
  Description of Artificial Sequence: Synthetic oligonucleotide
  Sense strand starting at position 1312 of SEQ ID NO: 2864
augagugauuucguuguug

SEQ ID NO: 222403 - RNA, 19 nt, Artificial Sequence
  Description of Artificial Sequence: Synthetic oligonucleotide
  Antisense strand to SEQ ID NO: 222402
caacaacgaaaucacucau

SEQ ID NO: 222404 - RNA, 19 nt, Artificial Sequence
  Description of Artificial Sequence: Synthetic oligonucleotide
  Sense strand starting at position 1314 of SEQ ID NO: 2864
gagugauuucguuguuguu

SEQ ID NO: 222405 - RNA, 19 nt, Artificial Sequence
  Description of Artificial Sequence: Synthetic oligonucleotide
  Antisense strand to SEQ ID NO: 222404
aacaacaacgaaaucacuc

SEQ ID NO: 222406 - RNA, 19 nt, Artificial Sequence
  Description of Artificial Sequence: Synthetic oligonucleotide
  Sense strand starting at position 1336 of SEQ ID NO: 2864
cuguaaggaugucccaaau

SEQ ID NO: 222407 - RNA, 19 nt, Artificial Sequence
  Description of Artificial Sequence: Synthetic oligonucleotide
  Antisense strand to SEQ ID NO: 222406
auuugggacauccuuacag

SEQ ID NO: 222408 - RNA, 19 nt, Artificial Sequence
  Description of Artificial Sequence: Synthetic oligonucleotide
  Sense strand starting at position 2074 of SEQ ID NO: 2864
cgcuaucgcgauguuugua

SEQ ID NO: 222409 - RNA, 19 nt, Artificial Sequence
  Description of Artificial Sequence: Synthetic oligonucleotide
  Antisense strand to SEQ ID NO: 222408
uacaaacaucgcgauagcg

SEQ ID NO: 222410 - RNA, 19 nt, Artificial Sequence
  Description of Artificial Sequence: Synthetic oligonucleotide
  Sense strand starting at position 2075 of SEQ ID NO: 2864
gcuaucgcgauguuuguaa

SEQ ID NO: 222411 - RNA, 19 nt, Artificial Sequence
  Description of Artificial Sequence: Synthetic oligonucleotide
  Antisense strand to SEQ ID NO: 222410
uuacaaacaucgcgauagc

SEQ ID NO: 222412 - RNA, 19 nt, Artificial Sequence
  Description of Artificial Sequence: Synthetic oligonucleotide
  Sense strand starting at position 2091 of SEQ ID NO: 2864
uaaagaagcguugagugaa

SEQ ID NO: 222413 - RNA, 19 nt, Artificial Sequence
  Description of Artificial Sequence: Synthetic oligonucleotide
  Antisense strand to SEQ ID NO: 222412
uucacucaacgcuucuuua

SEQ ID NO: 222414 - RNA, 19 nt, Artificial Sequence
  Description of Artificial Sequence: Synthetic oligonucleotide
  Sense strand starting at position 2099 of SEQ ID NO: 2864
cguugagugaaggaaguuu

SEQ ID NO: 222415 - RNA, 19 nt, Artificial Sequence
  Description of Artificial Sequence: Synthetic oligonucleotide
  Antisense strand to SEQ ID NO: 222414
aaacuuccuucacucaacg

SEQ ID NO: 222416 - RNA, 19 nt, Artificial Sequence
  Description of Artificial Sequence: Synthetic oligonucleotide
  Sense strand starting at position 2123 of SEQ ID NO: 2864
cggugcagaauuugauagu

SEQ ID NO: 222417 - RNA, 19 nt, Artificial Sequence
  Description of Artificial Sequence: Synthetic oligonucleotide
  Antisense strand to SEQ ID NO: 222416
acuaucaaauucugcaccg

SEQ ID NO: 222418 - RNA, 19 nt, Artificial Sequence
  Description of Artificial Sequence: Synthetic oligonucleotide
  Sense strand starting at position 2126 of SEQ ID NO: 2864
ugcagaauuugauaguaaa

SEQ ID NO: 222419 - RNA, 19 nt, Artificial Sequence
  Description of Artificial Sequence: Synthetic oligonucleotide
  Antisense strand to SEQ ID NO: 222418
uuuacuaucaaauucugca

SEQ ID NO: 222420 - RNA, 19 nt, Artificial Sequence
  Description of Artificial Sequence: Synthetic oligonucleotide
  Sense strand starting at position 2442 of SEQ ID NO: 2864
gcuggcauauuauugacua

SEQ ID NO: 222421 - RNA, 19 nt, Artificial Sequence
  Description of Artificial Sequence: Synthetic oligonucleotide
  Antisense strand to SEQ ID NO: 222420
uagucaauaauaugccagc

SEQ ID NO: 222422 - RNA, 19 nt, Artificial Sequence
  Description of Artificial Sequence: Synthetic oligonucleotide
  Sense strand starting at position 2502 of SEQ ID NO: 2864
uugugucuugaauaaguaa

SEQ ID NO: 222423 - RNA, 19 nt, Artificial Sequence
  Description of Artificial Sequence: Synthetic oligonucleotide
  Antisense strand to SEQ ID NO: 222422
uuacuuauucaagacacaa

SEQ ID NO: 222424 - RNA, 19 nt, Artificial Sequence
  Description of Artificial Sequence: Synthetic oligonucleotide
  Sense strand starting at position 2518 of SEQ ID NO: 2864
uaaauaaauguucggucaa

SEQ ID NO: 222425 - RNA, 19 nt, Artificial Sequence
  Description of Artificial Sequence: Synthetic oligonucleotide
  Antisense strand to SEQ ID NO: 222424
uugaccgaacauuuauuua

SEQ ID NO: 222426 - RNA, 19 nt, Artificial Sequence
  Description of Artificial Sequence: Synthetic oligonucleotide
  Sense strand starting at position 2520 of SEQ ID NO: 2864
aauaaauguucggucaauc

SEQ ID NO: 222427 - RNA, 19 nt, Artificial Sequence
  Description of Artificial Sequence: Synthetic oligonucleotide
  Antisense strand to SEQ ID NO: 222426
gauugaccgaacauuuauu

SEQ ID NO: 222428 - RNA, 19 nt, Artificial Sequence
  Description of Artificial Sequence: Synthetic oligonucleotide
  Sense strand starting at position 2531 of SEQ ID NO: 2864
ggucaaucgauuugcauua

SEQ ID NO: 222429 - RNA, 19 nt, Artificial Sequence
  Description of Artificial Sequence: Synthetic oligonucleotide
  Antisense strand to SEQ ID NO: 222428
uaaugcaaaucgauugacc

SEQ ID NO: 222430 - RNA, 19 nt, Artificial Sequence
  Description of Artificial Sequence: Synthetic oligonucleotide
  Sense strand starting at position 2532 of SEQ ID NO: 2864
gucaaucgauuugcauuau

SEQ ID NO: 222431 - RNA, 19 nt, Artificial Sequence
  Description of Artificial Sequence: Synthetic oligonucleotide
  Antisense strand to SEQ ID NO: 222430
auaaugcaaaucgauugac

SEQ ID NO: 222432 - RNA, 19 nt, Artificial Sequence
  Description of Artificial Sequence: Synthetic oligonucleotide
  Sense strand starting at position 2586 of SEQ ID NO: 2864
ucagguaugugacuggaaa

SEQ ID NO: 222433 - RNA, 19 nt, Artificial Sequence
  Description of Artificial Sequence: Synthetic oligonucleotide
  Antisense strand to SEQ ID NO: 222432
uuuccagucacauaccuga

SEQ ID NO: 222434 - RNA, 19 nt, Artificial Sequence
  Description of Artificial Sequence: Synthetic oligonucleotide
  Sense strand starting at position 2587 of SEQ ID NO: 2864
cagguaugugacuggaaau

SEQ ID NO: 222435 - RNA, 19 nt, Artificial Sequence
  Description of Artificial Sequence: Synthetic oligonucleotide
  Antisense strand to SEQ ID NO: 222434
auuuccagucacauaccug

SEQ ID NO: 222436 - RNA, 19 nt, Artificial Sequence
  Description of Artificial Sequence: Synthetic oligonucleotide
  Sense strand starting at position 2588 of SEQ ID NO: 2864
agguaugugacuggaaauu

SEQ ID NO: 222437 - RNA, 19 nt, Artificial Sequence
  Description of Artificial Sequence: Synthetic oligonucleotide
  Antisense strand to SEQ ID NO: 222436
aauuuccagucacauaccu

SEQ ID NO: 222438 - RNA, 19 nt, Artificial Sequence
  Description of Artificial Sequence: Synthetic oligonucleotide
  Sense strand starting at position 2594 of SEQ ID NO: 2864
gugacuggaaauuguuuaa

SEQ ID NO: 222439 - RNA, 19 nt, Artificial Sequence
  Description of Artificial Sequence: Synthetic oligonucleotide
  Antisense strand to SEQ ID NO: 222438
uuaaacaauuuccagucac

SEQ ID NO: 222440 - RNA, 19 nt, Artificial Sequence
  Description of Artificial Sequence: Synthetic oligonucleotide
  Sense strand starting at position 2626 of SEQ ID NO: 2864
gguucuuggacguaagcaa

SEQ ID NO: 222441 - RNA, 19 nt, Artificial Sequence
  Description of Artificial Sequence: Synthetic oligonucleotide
  Antisense strand to SEQ ID NO: 222440
uugcuuacguccaagaacc

SEQ ID NO: 222442 - RNA, 19 nt, Artificial Sequence
  Description of Artificial Sequence: Synthetic oligonucleotide
  Sense strand starting at position 2648 of SEQ ID NO: 2864
cgaguagagacuuguauaa

SEQ ID NO: 222443 - RNA, 19 nt, Artificial Sequence
  Description of Artificial Sequence: Synthetic oligonucleotide
  Antisense strand to SEQ ID NO: 222442
uuauacaagucucuacucg

SEQ ID NO: 222444 - RNA, 19 nt, Artificial Sequence
  Description of Artificial Sequence: Synthetic oligonucleotide
  Sense strand starting at position 2684 of SEQ ID NO: 2864
cggugaagugugcucugca

SEQ ID NO: 222445 - RNA, 19 nt, Artificial Sequence
  Description of Artificial Sequence: Synthetic oligonucleotide
  Antisense strand to SEQ ID NO: 222444
ugcagagcacacuucaccg

SEQ ID NO: 222446 - RNA, 19 nt, Artificial Sequence
  Description of Artificial Sequence: Synthetic oligonucleotide
  Sense strand starting at position 2814 of SEQ ID NO: 2864
guuccaaucgcuuaaauca

SEQ ID NO: 222447 - RNA, 19 nt, Artificial Sequence
  Description of Artificial Sequence: Synthetic oligonucleotide
  Antisense strand to SEQ ID NO: 222446
ugauuuaagcgauuggaac

SEQ ID NO: 222448 - RNA, 19 nt, Artificial Sequence
  Description of Artificial Sequence: Synthetic oligonucleotide
  Sense strand starting at position 2822 of SEQ ID NO: 2864
cgcuuaaaucaccaacagu

SEQ ID NO: 222449 - RNA, 19 nt, Artificial Sequence
  Description of Artificial Sequence: Synthetic oligonucleotide
  Antisense strand to SEQ ID NO: 222448
acuguuggugauuuaagcg

SEQ ID NO: 222450 - RNA, 19 nt, Artificial Sequence
  Description of Artificial Sequence: Synthetic oligonucleotide
  Sense strand starting at position 2951 of SEQ ID NO: 2864
ugggauaccugucuugaag

SEQ ID NO: 222451 - RNA, 19 nt, Artificial Sequence
  Description of Artificial Sequence: Synthetic oligonucleotide
  Antisense strand to SEQ ID NO: 222450
cuucaagacagguauccca

SEQ ID NO: 222452 - RNA, 19 nt, Artificial Sequence
  Description of Artificial Sequence: Synthetic oligonucleotide
  Sense strand starting at position 3027 of SEQ ID NO: 2864
ugaggucauguuuauauau

SEQ ID NO: 222453 - RNA, 19 nt, Artificial Sequence
  Description of Artificial Sequence: Synthetic oligonucleotide
  Antisense strand to SEQ ID NO: 222452
auauauaaacaugaccuca

SEQ ID NO: 222454 - RNA, 19 nt, Artificial Sequence
  Description of Artificial Sequence: Synthetic oligonucleotide
  Sense strand starting at position 3775 of SEQ ID NO: 2864
caaggaguguucuuugaug

SEQ ID NO: 222455 - RNA, 19 nt, Artificial Sequence
  Description of Artificial Sequence: Synthetic oligonucleotide
  Antisense strand to SEQ ID NO: 222454
caucaaagaacacuccuug

SEQ ID NO: 222456 - RNA, 19 nt, Artificial Sequence
  Description of Artificial Sequence: Synthetic oligonucleotide
  Sense strand starting at position 3777 of SEQ ID NO: 2864
aggaguguucuuugaugua

SEQ ID NO: 222457 - RNA, 19 nt, Artificial Sequence
  Description of Artificial Sequence: Synthetic oligonucleotide
  Antisense strand to SEQ ID NO: 222456
uacaucaaagaacacuccu

SEQ ID NO: 222458 - RNA, 19 nt, Artificial Sequence
  Description of Artificial Sequence: Synthetic oligonucleotide
  Sense strand starting at position 7 of SEQ ID NO: 2867
uaaaguggucucuggaacu

SEQ ID NO: 222459 - RNA, 19 nt, Artificial Sequence
  Description of Artificial Sequence: Synthetic oligonucleotide
  Antisense strand to SEQ ID NO: 222458
aguuccagagaccacuuua

SEQ ID NO: 222460 - RNA, 19 nt, Artificial Sequence
  Description of Artificial Sequence: Synthetic oligonucleotide
  Sense strand starting at position 76 of SEQ ID NO: 2867
ugugucagaguugaucaca

SEQ ID NO: 222461 - RNA, 19 nt, Artificial Sequence
  Description of Artificial Sequence: Synthetic oligonucleotide
  Antisense strand to SEQ ID NO: 222460
ugugaucaacucugacaca

SEQ ID NO: 222462 - RNA, 19 nt, Artificial Sequence
  Description of Artificial Sequence: Synthetic oligonucleotide
  Sense strand starting at position 79 of SEQ ID NO: 2867
gucagaguugaucacaguu

SEQ ID NO: 222463 - RNA, 19 nt, Artificial Sequence
  Description of Artificial Sequence: Synthetic oligonucleotide
  Antisense strand to SEQ ID NO: 222462
aacugugaucaacucugac

SEQ ID NO: 222464 - RNA, 19 nt, Artificial Sequence
  Description of Artificial Sequence: Synthetic oligonucleotide
  Sense strand starting at position 358 of SEQ ID NO: 2867
gaacauaucugucuaggua

SEQ ID NO: 222465 - RNA, 19 nt, Artificial Sequence
  Description of Artificial Sequence: Synthetic oligonucleotide
  Antisense strand to SEQ ID NO: 222464
uaccuagacagauauguuc

SEQ ID NO: 222466 - RNA, 19 nt, Artificial Sequence
  Description of Artificial Sequence: Synthetic oligonucleotide
  Sense strand starting at position 359 of SEQ ID NO: 2867
aacauaucugucuagguag

SEQ ID NO: 222467 - RNA, 19 nt, Artificial Sequence
  Description of Artificial Sequence: Synthetic oligonucleotide
  Antisense strand to SEQ ID NO: 222466
cuaccuagacagauauguu

SEQ ID NO: 222468 - RNA, 19 nt, Artificial Sequence
  Description of Artificial Sequence: Synthetic oligonucleotide
  Sense strand starting at position 791 of SEQ ID NO: 2867
ucauaaguauggcuuaaau

SEQ ID NO: 222469 - RNA, 19 nt, Artificial Sequence
  Description of Artificial Sequence: Synthetic oligonucleotide
  Antisense strand to SEQ ID NO: 222468
auuuaagccauacuuauga

SEQ ID NO: 222470 - RNA, 19 nt, Artificial Sequence
  Description of Artificial Sequence: Synthetic oligonucleotide
  Sense strand starting at position 892 of SEQ ID NO: 2867
cuguuauugucacuaagag

SEQ ID NO: 222471 - RNA, 19 nt, Artificial Sequence
  Description of Artificial Sequence: Synthetic oligonucleotide
  Antisense strand to SEQ ID NO: 222470
cucuuagugacaauaacag

SEQ ID NO: 222472 - RNA, 19 nt, Artificial Sequence
  Description of Artificial Sequence: Synthetic oligonucleotide
  Sense strand starting at position 893 of SEQ ID NO: 2867
uguuauugucacuaagagg

SEQ ID NO: 222473 - RNA, 19 nt, Artificial Sequence
  Description of Artificial Sequence: Synthetic oligonucleotide
  Antisense strand to SEQ ID NO: 222472
ccucuuagugacaauaaca

SEQ ID NO: 222474 - RNA, 19 nt, Artificial Sequence
  Description of Artificial Sequence: Synthetic oligonucleotide
  Sense strand starting at position 1016 of SEQ ID NO: 2867
agugcagccguguuucaaa

SEQ ID NO: 222475 - RNA, 19 nt, Artificial Sequence
  Description of Artificial Sequence: Synthetic oligonucleotide
  Antisense strand to SEQ ID NO: 222474
uuugaaacacggcugcacu

SEQ ID NO: 222476 - RNA, 19 nt, Artificial Sequence
  Description of Artificial Sequence: Synthetic oligonucleotide
  Sense strand starting at position 1210 of SEQ ID NO: 2867
cacauaggcgaucaguuaa

SEQ ID NO: 222477 - RNA, 19 nt, Artificial Sequence
  Description of Artificial Sequence: Synthetic oligonucleotide
  Antisense strand to SEQ ID NO: 222476
uuaacugaucgccuaugug

SEQ ID NO: 222478 - RNA, 19 nt, Artificial Sequence
  Description of Artificial Sequence: Synthetic oligonucleotide
  Sense strand starting at position 1218 of SEQ ID NO: 2867
cgaucaguuaaugaaguca

SEQ ID NO: 222479 - RNA, 19 nt, Artificial Sequence
  Description of Artificial Sequence: Synthetic oligonucleotide
  Antisense strand to SEQ ID NO: 222478
ugacuucauuaacugaucg

SEQ ID NO: 222480 - RNA, 19 nt, Artificial Sequence
  Description of Artificial Sequence: Synthetic oligonucleotide
  Sense strand starting at position 1245 of SEQ ID NO: 2867
gugucuuauccagacugua

SEQ ID NO: 222481 - RNA, 19 nt, Artificial Sequence
  Description of Artificial Sequence: Synthetic oligonucleotide
  Antisense strand to SEQ ID NO: 222480
uacagucuggauaagacac

SEQ ID NO: 222482 - RNA, 19 nt, Artificial Sequence
  Description of Artificial Sequence: Synthetic oligonucleotide
  Sense strand starting at position 1481 of SEQ ID NO: 2867
uaauguuuguagguggaau

SEQ ID NO: 222483 - RNA, 19 nt, Artificial Sequence
  Description of Artificial Sequence: Synthetic oligonucleotide
  Antisense strand to SEQ ID NO: 222482
auuccaccuacaaacauua

SEQ ID NO: 222484 - RNA, 19 nt, Artificial Sequence
  Description of Artificial Sequence: Synthetic oligonucleotide
  Sense strand starting at position 1489 of SEQ ID NO: 2867
guagguggaauguaaguau

SEQ ID NO: 222485 - RNA, 19 nt, Artificial Sequence
  Description of Artificial Sequence: Synthetic oligonucleotide
  Antisense strand to SEQ ID NO: 222484
auacuuacauuccaccuac

SEQ ID NO: 222486 - RNA, 19 nt, Artificial Sequence
  Description of Artificial Sequence: Synthetic oligonucleotide
  Sense strand starting at position 1492 of SEQ ID NO: 2867
gguggaauguaaguauaca

SEQ ID NO: 222487 - RNA, 19 nt, Artificial Sequence
  Description of Artificial Sequence: Synthetic oligonucleotide
  Antisense strand to SEQ ID NO: 222486
uguauacuuacauuccacc

SEQ ID NO: 222488 - RNA, 19 nt, Artificial Sequence
  Description of Artificial Sequence: Synthetic oligonucleotide
  Sense strand starting at position 1493 of SEQ ID NO: 2867
guggaauguaaguauacag

SEQ ID NO: 222489 - RNA, 19 nt, Artificial Sequence
  Description of Artificial Sequence: Synthetic oligonucleotide
  Antisense strand to SEQ ID NO: 222488
cuguauacuuacauuccac

SEQ ID NO: 222490 - RNA, 19 nt, Artificial Sequence
  Description of Artificial Sequence: Synthetic oligonucleotide
  Sense strand starting at position 1671 of SEQ ID NO: 2867
ggagacauacguuaggcuu

SEQ ID NO: 222491 - RNA, 19 nt, Artificial Sequence
  Description of Artificial Sequence: Synthetic oligonucleotide
  Antisense strand to SEQ ID NO: 222490
aagccuaacguaugucucc

SEQ ID NO: 222492 - RNA, 19 nt, Artificial Sequence
  Description of Artificial Sequence: Synthetic oligonucleotide
  Sense strand starting at position 2129 of SEQ ID NO: 2867
ggagcuuuguuacccauuu

SEQ ID NO: 222493 - RNA, 19 nt, Artificial Sequence
  Description of Artificial Sequence: Synthetic oligonucleotide
  Antisense strand to SEQ ID NO: 222492
aaauggguaacaaagcucc

SEQ ID NO: 222494 - RNA, 19 nt, Artificial Sequence
  Description of Artificial Sequence: Synthetic oligonucleotide
  Sense strand starting at position 2247 of SEQ ID NO: 2867
gggaacauuugauagauuc

SEQ ID NO: 222495 - RNA, 19 nt, Artificial Sequence
  Description of Artificial Sequence: Synthetic oligonucleotide
  Antisense strand to SEQ ID NO: 222494
gaaucuaucaaauguuccc

SEQ ID NO: 222496 - RNA, 19 nt, Artificial Sequence
  Description of Artificial Sequence: Synthetic oligonucleotide
  Sense strand starting at position 2363 of SEQ ID NO: 2867
gggaauuauuguucuggua

SEQ ID NO: 222497 - RNA, 19 nt, Artificial Sequence
  Description of Artificial Sequence: Synthetic oligonucleotide
  Antisense strand to SEQ ID NO: 222496
uaccagaacaauaauuccc

SEQ ID NO: 222498 - RNA, 19 nt, Artificial Sequence
  Description of Artificial Sequence: Synthetic oligonucleotide
  Sense strand starting at position 2523 of SEQ ID NO: 2867
ugguaugaccaucacaugu

SEQ ID NO: 222499 - RNA, 19 nt, Artificial Sequence
  Description of Artificial Sequence: Synthetic oligonucleotide
  Antisense strand to SEQ ID NO: 222498
acaugugauggucauacca

SEQ ID NO: 222500 - RNA, 19 nt, Artificial Sequence
  Description of Artificial Sequence: Synthetic oligonucleotide
  Sense strand starting at position 2570 of SEQ ID NO: 2867
cuggcuuaagaaugaucuu

SEQ ID NO: 222501 - RNA, 19 nt, Artificial Sequence
  Description of Artificial Sequence: Synthetic oligonucleotide
  Antisense strand to SEQ ID NO: 222500
aagaucauucuuaagccag

SEQ ID NO: 222502 - RNA, 19 nt, Artificial Sequence
  Description of Artificial Sequence: Synthetic oligonucleotide
  Sense strand starting at position 2573 of SEQ ID NO: 2867
gcuuaagaaugaucuuccu

SEQ ID NO: 222503 - RNA, 19 nt, Artificial Sequence
  Description of Artificial Sequence: Synthetic oligonucleotide
  Antisense strand to SEQ ID NO: 222502
aggaagaucauucuuaagc

SEQ ID NO: 222504 - RNA, 19 nt, Artificial Sequence
  Description of Artificial Sequence: Synthetic oligonucleotide
  Sense strand starting at position 2726 of SEQ ID NO: 2867
aguacuauccagugggaaa

SEQ ID NO: 222505 - RNA, 19 nt, Artificial Sequence
  Description of Artificial Sequence: Synthetic oligonucleotide
  Antisense strand to SEQ ID NO: 222504
uuucccacuggauaguacu

SEQ ID NO: 222506 - RNA, 19 nt, Artificial Sequence
  Description of Artificial Sequence: Synthetic oligonucleotide
  Sense strand starting at position 2727 of SEQ ID NO: 2867
guacuauccagugggaaag

SEQ ID NO: 222507 - RNA, 19 nt, Artificial Sequence
  Description of Artificial Sequence: Synthetic oligonucleotide
  Antisense strand to SEQ ID NO: 222506
cuuucccacuggauaguac

SEQ ID NO: 222508 - RNA, 19 nt, Artificial Sequence
  Description of Artificial Sequence: Synthetic oligonucleotide
  Sense strand starting at position 2776 of SEQ ID NO: 2867
gugaguuagagacaacugu

SEQ ID NO: 222509 - RNA, 19 nt, Artificial Sequence
  Description of Artificial Sequence: Synthetic oligonucleotide
  Antisense strand to SEQ ID NO: 222508
acaguugucucuaacucac

SEQ ID NO: 222510 - RNA, 19 nt, Artificial Sequence
  Description of Artificial Sequence: Synthetic oligonucleotide
  Sense strand starting at position 2930 of SEQ ID NO: 2867
ggccuuucuauugaggaau

SEQ ID NO: 222511 - RNA, 19 nt, Artificial Sequence
  Description of Artificial Sequence: Synthetic oligonucleotide
  Antisense strand to SEQ ID NO: 222510
auuccucaauagaaaggcc

SEQ ID NO: 222512 - RNA, 19 nt, Artificial Sequence
  Description of Artificial Sequence: Synthetic oligonucleotide
  Sense strand starting at position 2954 of SEQ ID NO: 2867
acuguuagcucauuuauug

SEQ ID NO: 222513 - RNA, 19 nt, Artificial Sequence
  Description of Artificial Sequence: Synthetic oligonucleotide
  Antisense strand to SEQ ID NO: 222512
caauaaaugagcuaacagu

SEQ ID NO: 222514 - RNA, 19 nt, Artificial Sequence
  Description of Artificial Sequence: Synthetic oligonucleotide
  Sense strand starting at position 2961 of SEQ ID NO: 2867
gcucauuuauugcugagua

SEQ ID NO: 222515 - RNA, 19 nt, Artificial Sequence
  Description of Artificial Sequence: Synthetic oligonucleotide
  Antisense strand to SEQ ID NO: 222514
uacucagcaauaaaugagc

SEQ ID NO: 222516 - RNA, 19 nt, Artificial Sequence
  Description of Artificial Sequence: Synthetic oligonucleotide
  Sense strand starting at position 2966 of SEQ ID NO: 2867
uuuauugcugaguaaggaa

SEQ ID NO: 222517 - RNA, 19 nt, Artificial Sequence
  Description of Artificial Sequence: Synthetic oligonucleotide
  Antisense strand to SEQ ID NO: 222516
uuccuuacucagcaauaaa

SEQ ID NO: 222518 - RNA, 19 nt, Artificial Sequence
  Description of Artificial Sequence: Synthetic oligonucleotide
  Sense strand starting at position 3072 of SEQ ID NO: 2867
uuauccuuugcugauggau

SEQ ID NO: 222519 - RNA, 19 nt, Artificial Sequence
  Description of Artificial Sequence: Synthetic oligonucleotide
  Antisense strand to SEQ ID NO: 222518
auccaucagcaaaggauaa

SEQ ID NO: 222520 - RNA, 19 nt, Artificial Sequence
  Description of Artificial Sequence: Synthetic oligonucleotide
  Sense strand starting at position 3080 of SEQ ID NO: 2867
ugcugauggauaugugaau

SEQ ID NO: 222521 - RNA, 19 nt, Artificial Sequence
  Description of Artificial Sequence: Synthetic oligonucleotide
  Antisense strand to SEQ ID NO: 222520
auucacauauccaucagca

SEQ ID NO: 222522 - RNA, 19 nt, Artificial Sequence
  Description of Artificial Sequence: Synthetic oligonucleotide
  Sense strand starting at position 3081 of SEQ ID NO: 2867
gcugauggauaugugaauu

SEQ ID NO: 222523 - RNA, 19 nt, Artificial Sequence
  Description of Artificial Sequence: Synthetic oligonucleotide
  Antisense strand to SEQ ID NO: 222522
aauucacauauccaucagc

SEQ ID NO: 222524 - RNA, 19 nt, Artificial Sequence
  Description of Artificial Sequence: Synthetic oligonucleotide
  Sense strand starting at position 3087 of SEQ ID NO: 2867
ggauaugugaauugcuaca

SEQ ID NO: 222525 - RNA, 19 nt, Artificial Sequence
  Description of Artificial Sequence: Synthetic oligonucleotide
  Antisense strand to SEQ ID NO: 222524
uguagcaauucacauaucc

SEQ ID NO: 222526 - RNA, 19 nt, Artificial Sequence
  Description of Artificial Sequence: Synthetic oligonucleotide
  Sense strand starting at position 3112 of SEQ ID NO: 2867
uuugaaagcuguccagaaa

SEQ ID NO: 222527 - RNA, 19 nt, Artificial Sequence
  Description of Artificial Sequence: Synthetic oligonucleotide
  Antisense strand to SEQ ID NO: 222526
uuucuggacagcuuucaaa

SEQ ID NO: 222528 - RNA, 19 nt, Artificial Sequence
  Description of Artificial Sequence: Synthetic oligonucleotide
  Sense strand starting at position 3394 of SEQ ID NO: 2867
gcaaacucuguguacauau

SEQ ID NO: 222529 - RNA, 19 nt, Artificial Sequence
  Description of Artificial Sequence: Synthetic oligonucleotide
  Antisense strand to SEQ ID NO: 222528
auauguacacagaguuugc

SEQ ID NO: 222530 - RNA, 19 nt, Artificial Sequence
  Description of Artificial Sequence: Synthetic oligonucleotide
  Sense strand starting at position 3401 of SEQ ID NO: 2867
cuguguacauauguaaaga

SEQ ID NO: 222531 - RNA, 19 nt, Artificial Sequence
  Description of Artificial Sequence: Synthetic oligonucleotide
  Antisense strand to SEQ ID NO: 222530
ucuuuacauauguacacag

SEQ ID NO: 222532 - RNA, 19 nt, Artificial Sequence
  Description of Artificial Sequence: Synthetic oligonucleotide
  Sense strand starting at position 3952 of SEQ ID NO: 2867
uucaguauaugggugauga

SEQ ID NO: 222533 - RNA, 19 nt, Artificial Sequence
  Description of Artificial Sequence: Synthetic oligonucleotide
  Antisense strand to SEQ ID NO: 222532
ucaucacccauauacugaa

SEQ ID NO: 222534 - RNA, 19 nt, Artificial Sequence
  Description of Artificial Sequence: Synthetic oligonucleotide
  Sense strand starting at position 3953 of SEQ ID NO: 2867
ucaguauaugggugaugag

SEQ ID NO: 222535 - RNA, 19 nt, Artificial Sequence
  Description of Artificial Sequence: Synthetic oligonucleotide
  Antisense strand to SEQ ID NO: 222534
cucaucacccauauacuga

SEQ ID NO: 222536 - RNA, 19 nt, Artificial Sequence
  Description of Artificial Sequence: Synthetic oligonucleotide
  Sense strand starting at position 3954 of SEQ ID NO: 2867
caguauaugggugaugagu

SEQ ID NO: 222537 - RNA, 19 nt, Artificial Sequence
  Description of Artificial Sequence: Synthetic oligonucleotide
  Antisense strand to SEQ ID NO: 222536
acucaucacccauauacug

SEQ ID NO: 222538 - RNA, 19 nt, Artificial Sequence
  Description of Artificial Sequence: Synthetic oligonucleotide
  Sense strand starting at position 339 of SEQ ID NO: 2865
aacaucuaccuuggagagu

SEQ ID NO: 222539 - RNA, 19 nt, Artificial Sequence
  Description of Artificial Sequence: Synthetic oligonucleotide
  Antisense strand to SEQ ID NO: 222538
acucuccaagguagauguu

SEQ ID NO: 222540 - RNA, 19 nt, Artificial Sequence
  Description of Artificial Sequence: Synthetic oligonucleotide
  Sense strand starting at position 351 of SEQ ID NO: 2865
ggagaguacugggugaagu

SEQ ID NO: 222541 - RNA, 19 nt, Artificial Sequence
  Description of Artificial Sequence: Synthetic oligonucleotide
  Antisense strand to SEQ ID NO: 222540
acuucacccaguacucucc

SEQ ID NO: 222542 - RNA, 19 nt, Artificial Sequence
  Description of Artificial Sequence: Synthetic oligonucleotide
  Sense strand starting at position 352 of SEQ ID NO: 2865
gagaguacugggugaagug

SEQ ID NO: 222543 - RNA, 19 nt, Artificial Sequence
  Description of Artificial Sequence: Synthetic oligonucleotide
  Antisense strand to SEQ ID NO: 222542
cacuucacccaguacucuc

SEQ ID NO: 222544 - RNA, 19 nt, Artificial Sequence
  Description of Artificial Sequence: Synthetic oligonucleotide
  Sense strand starting at position 362 of SEQ ID NO: 2865
ggugaagugaccuaauguc

SEQ ID NO: 222545 - RNA, 19 nt, Artificial Sequence
  Description of Artificial Sequence: Synthetic oligonucleotide
  Antisense strand to SEQ ID NO: 222544
gacauuaggucacuucacc

SEQ ID NO: 222546 - RNA, 19 nt, Artificial Sequence
  Description of Artificial Sequence: Synthetic oligonucleotide
  Sense strand starting at position 374 of SEQ ID NO: 2865
uaaugucugccguuacagu

SEQ ID NO: 222547 - RNA, 19 nt, Artificial Sequence
  Description of Artificial Sequence: Synthetic oligonucleotide
  Antisense strand to SEQ ID NO: 222546
acuguaacggcagacauua

SEQ ID NO: 222548 - RNA, 19 nt, Artificial Sequence
  Description of Artificial Sequence: Synthetic oligonucleotide
  Sense strand starting at position 477 of SEQ ID NO: 2865
ugauuccucuaacugagua

SEQ ID NO: 222549 - RNA, 19 nt, Artificial Sequence
  Description of Artificial Sequence: Synthetic oligonucleotide
  Antisense strand to SEQ ID NO: 222548
uacucaguuagaggaauca

SEQ ID NO: 222550 - RNA, 19 nt, Artificial Sequence
  Description of Artificial Sequence: Synthetic oligonucleotide
  Sense strand starting at position 747 of SEQ ID NO: 2865
uggaaacuuagucauuggu

SEQ ID NO: 222551 - RNA, 19 nt, Artificial Sequence
  Description of Artificial Sequence: Synthetic oligonucleotide
  Antisense strand to SEQ ID NO: 222550
accaaugacuaaguuucca

SEQ ID NO: 222552 - RNA, 19 nt, Artificial Sequence
  Description of Artificial Sequence: Synthetic oligonucleotide
  Sense strand starting at position 772 of SEQ ID NO: 2865
guaguaucacauugaugag

SEQ ID NO: 222553 - RNA, 19 nt, Artificial Sequence
  Description of Artificial Sequence: Synthetic oligonucleotide
  Antisense strand to SEQ ID NO: 222552
cucaucaaugugauacuac

SEQ ID NO: 222554 - RNA, 19 nt, Artificial Sequence
  Description of Artificial Sequence: Synthetic oligonucleotide
  Sense strand starting at position 816 of SEQ ID NO: 2865
aaaguuggguuacuuauaa

SEQ ID NO: 222555 - RNA, 19 nt, Artificial Sequence
  Description of Artificial Sequence: Synthetic oligonucleotide
  Antisense strand to SEQ ID NO: 222554
uuauaaguaacccaacuuu

SEQ ID NO: 222556 - RNA, 19 nt, Artificial Sequence
  Description of Artificial Sequence: Synthetic oligonucleotide
  Sense strand starting at position 1170 of SEQ ID NO: 2865
uguuguaggccguuuccua

SEQ ID NO: 222557 - RNA, 19 nt, Artificial Sequence
  Description of Artificial Sequence: Synthetic oligonucleotide
  Antisense strand to SEQ ID NO: 222556
uaggaaacggccuacaaca

SEQ ID NO: 222558 - RNA, 19 nt, Artificial Sequence
  Description of Artificial Sequence: Synthetic oligonucleotide
  Sense strand starting at position 1300 of SEQ ID NO: 2865
uggcaauuccgggacugau

SEQ ID NO: 222559 - RNA, 19 nt, Artificial Sequence
  Description of Artificial Sequence: Synthetic oligonucleotide
  Antisense strand to SEQ ID NO: 222558
aucagucccggaauugcca

SEQ ID NO: 222560 - RNA, 19 nt, Artificial Sequence
  Description of Artificial Sequence: Synthetic oligonucleotide
  Sense strand starting at position 1439 of SEQ ID NO: 2865
aauguuguacagcaaagaa

SEQ ID NO: 222561 - RNA, 19 nt, Artificial Sequence
  Description of Artificial Sequence: Synthetic oligonucleotide
  Antisense strand to SEQ ID NO: 222560
uucuuugcuguacaacauu

SEQ ID NO: 222562 - RNA, 19 nt, Artificial Sequence
  Description of Artificial Sequence: Synthetic oligonucleotide
  Sense strand starting at position 1515 of SEQ ID NO: 2865
uuggauuaaucuuugagac

SEQ ID NO: 222563 - RNA, 19 nt, Artificial Sequence
  Description of Artificial Sequence: Synthetic oligonucleotide
  Antisense strand to SEQ ID NO: 222562
gucucaaagauuaauccaa

SEQ ID NO: 222564 - RNA, 19 nt, Artificial Sequence
  Description of Artificial Sequence: Synthetic oligonucleotide
  Sense strand starting at position 1516 of SEQ ID NO: 2865
uggauuaaucuuugagacc

SEQ ID NO: 222565 - RNA, 19 nt, Artificial Sequence
  Description of Artificial Sequence: Synthetic oligonucleotide
  Antisense strand to SEQ ID NO: 222564
ggucucaaagauuaaucca

SEQ ID NO: 222566 - RNA, 19 nt, Artificial Sequence
  Description of Artificial Sequence: Synthetic oligonucleotide
  Sense strand starting at position 1619 of SEQ ID NO: 2865
uugggaaguguuuauguaa

SEQ ID NO: 222567 - RNA, 19 nt, Artificial Sequence
  Description of Artificial Sequence: Synthetic oligonucleotide
  Antisense strand to SEQ ID NO: 222566
uuacauaaacacuucccaa

SEQ ID NO: 222568 - RNA, 19 nt, Artificial Sequence
  Description of Artificial Sequence: Synthetic oligonucleotide
  Sense strand starting at position 1735 of SEQ ID NO: 2865
acucuaaacugugugaaag

SEQ ID NO: 222569 - RNA, 19 nt, Artificial Sequence
  Description of Artificial Sequence: Synthetic oligonucleotide
  Antisense strand to SEQ ID NO: 222568
cuuucacacaguuuagagu

SEQ ID NO: 222570 - RNA, 19 nt, Artificial Sequence
  Description of Artificial Sequence: Synthetic oligonucleotide
  Sense strand starting at position 1736 of SEQ ID NO: 2865
cucuaaacugugugaaaga

SEQ ID NO: 222571 - RNA, 19 nt, Artificial Sequence
  Description of Artificial Sequence: Synthetic oligonucleotide
  Antisense strand to SEQ ID NO: 222570
ucuuucacacaguuuagag

SEQ ID NO: 222572 - RNA, 19 nt, Artificial Sequence
  Description of Artificial Sequence: Synthetic oligonucleotide
  Sense strand starting at position 1781 of SEQ ID NO: 2865
acauuaucagucgacagca

SEQ ID NO: 222573 - RNA, 19 nt, Artificial Sequence
  Description of Artificial Sequence: Synthetic oligonucleotide
  Antisense strand to SEQ ID NO: 222572
ugcugucgacugauaaugu

SEQ ID NO: 222574 - RNA, 19 nt, Artificial Sequence
  Description of Artificial Sequence: Synthetic oligonucleotide
  Sense strand starting at position 2148 of SEQ ID NO: 2865
gaguucuuucuagauaguu

SEQ ID NO: 222575 - RNA, 19 nt, Artificial Sequence
  Description of Artificial Sequence: Synthetic oligonucleotide
  Antisense strand to SEQ ID NO: 222574
aacuaucuagaaagaacuc

SEQ ID NO: 222576 - RNA, 19 nt, Artificial Sequence
  Description of Artificial Sequence: Synthetic oligonucleotide
  Sense strand starting at position 2157 of SEQ ID NO: 2865
cuagauaguuccucccaga

SEQ ID NO: 222577 - RNA, 19 nt, Artificial Sequence
  Description of Artificial Sequence: Synthetic oligonucleotide
  Antisense strand to SEQ ID NO: 222576
ucugggaggaacuaucuag

SEQ ID NO: 222578 - RNA, 19 nt, Artificial Sequence
  Description of Artificial Sequence: Synthetic oligonucleotide
  Sense strand starting at position 2404 of SEQ ID NO: 2865
uggcuuucugaauacugaa

SEQ ID NO: 222579 - RNA, 19 nt, Artificial Sequence
  Description of Artificial Sequence: Synthetic oligonucleotide
  Antisense strand to SEQ ID NO: 222578
uucaguauucagaaagcca

SEQ ID NO: 222580 - RNA, 19 nt, Artificial Sequence
  Description of Artificial Sequence: Synthetic oligonucleotide
  Sense strand starting at position 2417 of SEQ ID NO: 2865
acugaaagccacugaacau

SEQ ID NO: 222581 - RNA, 19 nt, Artificial Sequence
  Description of Artificial Sequence: Synthetic oligonucleotide
  Antisense strand to SEQ ID NO: 222580
auguucaguggcuuucagu

SEQ ID NO: 222582 - RNA, 19 nt, Artificial Sequence
  Description of Artificial Sequence: Synthetic oligonucleotide
  Sense strand starting at position 2642 of SEQ ID NO: 2865
aauuauguuucugugagaa

SEQ ID NO: 222583 - RNA, 19 nt, Artificial Sequence
  Description of Artificial Sequence: Synthetic oligonucleotide
  Antisense strand to SEQ ID NO: 222582
uucucacagaaacauaauu

SEQ ID NO: 222584 - RNA, 19 nt, Artificial Sequence
  Description of Artificial Sequence: Synthetic oligonucleotide
  Sense strand starting at position 2762 of SEQ ID NO: 2865
uugagagucugacugaaau

SEQ ID NO: 222585 - RNA, 19 nt, Artificial Sequence
  Description of Artificial Sequence: Synthetic oligonucleotide
  Antisense strand to SEQ ID NO: 222584
auuucagucagacucucaa

SEQ ID NO: 222586 - RNA, 19 nt, Artificial Sequence
  Description of Artificial Sequence: Synthetic oligonucleotide
  Sense strand starting at position 2796 of SEQ ID NO: 2865
uauuaugcugcugaugaua

SEQ ID NO: 222587 - RNA, 19 nt, Artificial Sequence
  Description of Artificial Sequence: Synthetic oligonucleotide
  Antisense strand to SEQ ID NO: 222586
uaucaucagcagcauaaua

SEQ ID NO: 222588 - RNA, 19 nt, Artificial Sequence
  Description of Artificial Sequence: Synthetic oligonucleotide
  Sense strand starting at position 2807 of SEQ ID NO: 2865
ugaugauauaguugaguug

SEQ ID NO: 222589 - RNA, 19 nt, Artificial Sequence
  Description of Artificial Sequence: Synthetic oligonucleotide
  Antisense strand to SEQ ID NO: 222588
caacucaacuauaucauca

SEQ ID NO: 222590 - RNA, 19 nt, Artificial Sequence
  Description of Artificial Sequence: Synthetic oligonucleotide
  Sense strand starting at position 2813 of SEQ ID NO: 2865
uauaguugaguugguauuu

SEQ ID NO: 222591 - RNA, 19 nt, Artificial Sequence
  Description of Artificial Sequence: Synthetic oligonucleotide
  Antisense strand to SEQ ID NO: 222590
aaauaccaacucaacuaua

SEQ ID NO: 222592 - RNA, 19 nt, Artificial Sequence
  Description of Artificial Sequence: Synthetic oligonucleotide
  Sense strand starting at position 2818 of SEQ ID NO: 2865
uugaguugguauuuaucgu

SEQ ID NO: 222593 - RNA, 19 nt, Artificial Sequence
  Description of Artificial Sequence: Synthetic oligonucleotide
  Antisense strand to SEQ ID NO: 222592
acgauaaauaccaacucaa

SEQ ID NO: 222594 - RNA, 19 nt, Artificial Sequence
  Description of Artificial Sequence: Synthetic oligonucleotide
  Sense strand starting at position 2852 of SEQ ID NO: 2865
ucccuuacucaauggauga

SEQ ID NO: 222595 - RNA, 19 nt, Artificial Sequence
  Description of Artificial Sequence: Synthetic oligonucleotide
  Antisense strand to SEQ ID NO: 222594
ucauccauugaguaaggga

SEQ ID NO: 222596 - RNA, 19 nt, Artificial Sequence
  Description of Artificial Sequence: Synthetic oligonucleotide
  Sense strand starting at position 2890 of SEQ ID NO: 2865
aguuacauuugcccuugau

SEQ ID NO: 222597 - RNA, 19 nt, Artificial Sequence
  Description of Artificial Sequence: Synthetic oligonucleotide
  Antisense strand to SEQ ID NO: 222596
aucaagggcaaauguaacu

SEQ ID NO: 222598 - RNA, 19 nt, Artificial Sequence
  Description of Artificial Sequence: Synthetic oligonucleotide
  Sense strand starting at position 2991 of SEQ ID NO: 2865
guguacuuccacuacagau

SEQ ID NO: 222599 - RNA, 19 nt, Artificial Sequence
  Description of Artificial Sequence: Synthetic oligonucleotide
  Antisense strand to SEQ ID NO: 222598
aucuguaguggaaguacac

SEQ ID NO: 222600 - RNA, 19 nt, Artificial Sequence
  Description of Artificial Sequence: Synthetic oligonucleotide
  Sense strand starting at position 3078 of SEQ ID NO: 2865
uagggaagaucugcuggau

SEQ ID NO: 222601 - RNA, 19 nt, Artificial Sequence
  Description of Artificial Sequence: Synthetic oligonucleotide
  Antisense strand to SEQ ID NO: 222600
auccagcagaucuucccua

SEQ ID NO: 222602 - RNA, 19 nt, Artificial Sequence
  Description of Artificial Sequence: Synthetic oligonucleotide
  Sense strand starting at position 3218 of SEQ ID NO: 2865
cccuccuagguuuauuauu

SEQ ID NO: 222603 - RNA, 19 nt, Artificial Sequence
  Description of Artificial Sequence: Synthetic oligonucleotide
  Antisense strand to SEQ ID NO: 222602
aauaauaaaccuaggaggg

SEQ ID NO: 222604 - RNA, 19 nt, Artificial Sequence
  Description of Artificial Sequence: Synthetic oligonucleotide
  Sense strand starting at position 3237 of SEQ ID NO: 2865
uugacaauguuuccugaca

SEQ ID NO: 222605 - RNA, 19 nt, Artificial Sequence
  Description of Artificial Sequence: Synthetic oligonucleotide
  Antisense strand to SEQ ID NO: 222604
ugucaggaaacauugucaa

SEQ ID NO: 222606 - RNA, 19 nt, Artificial Sequence
  Description of Artificial Sequence: Synthetic oligonucleotide
  Sense strand starting at position 3238 of SEQ ID NO: 2865
ugacaauguuuccugacag

SEQ ID NO: 222607 - RNA, 19 nt, Artificial Sequence
  Description of Artificial Sequence: Synthetic oligonucleotide
  Antisense strand to SEQ ID NO: 222606
cugucaggaaacauuguca

SEQ ID NO: 222608 - RNA, 19 nt, Artificial Sequence
  Description of Artificial Sequence: Synthetic oligonucleotide
  Sense strand starting at position 3256 of SEQ ID NO: 2865
guauuagcagguuacaaau

SEQ ID NO: 222609 - RNA, 19 nt, Artificial Sequence
  Description of Artificial Sequence: Synthetic oligonucleotide
  Antisense strand to SEQ ID NO: 222608
auuuguaaccugcuaauac

SEQ ID NO: 222610 - RNA, 19 nt, Artificial Sequence
  Description of Artificial Sequence: Synthetic oligonucleotide
  Sense strand starting at position 3303 of SEQ ID NO: 2865
auggucacugcauaacaau

SEQ ID NO: 222611 - RNA, 19 nt, Artificial Sequence
  Description of Artificial Sequence: Synthetic oligonucleotide
  Antisense strand to SEQ ID NO: 222610
auuguuaugcagugaccau

SEQ ID NO: 222612 - RNA, 19 nt, Artificial Sequence
  Description of Artificial Sequence: Synthetic oligonucleotide
  Sense strand starting at position 3319 of SEQ ID NO: 2865
aauugcuaucugggaaaga

SEQ ID NO: 222613 - RNA, 19 nt, Artificial Sequence
  Description of Artificial Sequence: Synthetic oligonucleotide
  Antisense strand to SEQ ID NO: 222612
ucuuucccagauagcaauu

SEQ ID NO: 222614 - RNA, 19 nt, Artificial Sequence
  Description of Artificial Sequence: Synthetic oligonucleotide
  Sense strand starting at position 3352 of SEQ ID NO: 2865
caguuaucauuuguaguca

SEQ ID NO: 222615 - RNA, 19 nt, Artificial Sequence
  Description of Artificial Sequence: Synthetic oligonucleotide
  Antisense strand to SEQ ID NO: 222614
ugacuacaaaugauaacug

SEQ ID NO: 222616 - RNA, 19 nt, Artificial Sequence
  Description of Artificial Sequence: Synthetic oligonucleotide
  Sense strand starting at position 3454 of SEQ ID NO: 2865
agugaucuuugagcagaag

SEQ ID NO: 222617 - RNA, 19 nt, Artificial Sequence
  Description of Artificial Sequence: Synthetic oligonucleotide
  Antisense strand to SEQ ID NO: 222616
cuucugcucaaagaucacu

SEQ ID NO: 222618 - RNA, 19 nt, Artificial Sequence
  Description of Artificial Sequence: Synthetic oligonucleotide
  Sense strand starting at position 8 of SEQ ID NO: 2866
acugaaacucugugaguga

SEQ ID NO: 222619 - RNA, 19 nt, Artificial Sequence
  Description of Artificial Sequence: Synthetic oligonucleotide
  Antisense strand to SEQ ID NO: 222618
ucacucacagaguuucagu

SEQ ID NO: 222620 - RNA, 19 nt, Artificial Sequence
  Description of Artificial Sequence: Synthetic oligonucleotide
  Sense strand starting at position 21 of SEQ ID NO: 2866
gagugagucuuucugcuuu

SEQ ID NO: 222621 - RNA, 19 nt, Artificial Sequence
  Description of Artificial Sequence: Synthetic oligonucleotide
  Antisense strand to SEQ ID NO: 222620
aaagcagaaagacucacuc

SEQ ID NO: 222622 - RNA, 19 nt, Artificial Sequence
  Description of Artificial Sequence: Synthetic oligonucleotide
  Sense strand starting at position 323 of SEQ ID NO: 2866
ccugccuugcuagauagua

SEQ ID NO: 222623 - RNA, 19 nt, Artificial Sequence
  Description of Artificial Sequence: Synthetic oligonucleotide
  Antisense strand to SEQ ID NO: 222622
uacuaucuagcaaggcagg

SEQ ID NO: 222624 - RNA, 19 nt, Artificial Sequence
  Description of Artificial Sequence: Synthetic oligonucleotide
  Sense strand starting at position 358 of SEQ ID NO: 2866
auauaauguucuguaugga

SEQ ID NO: 222625 - RNA, 19 nt, Artificial Sequence
  Description of Artificial Sequence: Synthetic oligonucleotide
  Antisense strand to SEQ ID NO: 222624
uccauacagaacauuauau

SEQ ID NO: 222626 - RNA, 19 nt, Artificial Sequence
  Description of Artificial Sequence: Synthetic oligonucleotide
  Sense strand starting at position 359 of SEQ ID NO: 2866
uauaauguucuguauggac

SEQ ID NO: 222627 - RNA, 19 nt, Artificial Sequence
  Description of Artificial Sequence: Synthetic oligonucleotide
  Antisense strand to SEQ ID NO: 222626
guccauacagaacauuaua

SEQ ID NO: 222628 - RNA, 19 nt, Artificial Sequence
  Description of Artificial Sequence: Synthetic oligonucleotide
  Sense strand starting at position 361 of SEQ ID NO: 2866
uaauguucuguauggacaa

SEQ ID NO: 222629 - RNA, 19 nt, Artificial Sequence
  Description of Artificial Sequence: Synthetic oligonucleotide
  Antisense strand to SEQ ID NO: 222628
uuguccauacagaacauua

SEQ ID NO: 222630 - RNA, 19 nt, Artificial Sequence
  Description of Artificial Sequence: Synthetic oligonucleotide
  Sense strand starting at position 375 of SEQ ID NO: 2866
gacaaagagugauaucaau

SEQ ID NO: 222631 - RNA, 19 nt, Artificial Sequence
  Description of Artificial Sequence: Synthetic oligonucleotide
  Antisense strand to SEQ ID NO: 222630
auugauaucacucuuuguc

SEQ ID NO: 222632 - RNA, 19 nt, Artificial Sequence
  Description of Artificial Sequence: Synthetic oligonucleotide
  Sense strand starting at position 498 of SEQ ID NO: 2866
aucgaagccuuaucaaauc

SEQ ID NO: 222633 - RNA, 19 nt, Artificial Sequence
  Description of Artificial Sequence: Synthetic oligonucleotide
  Antisense strand to SEQ ID NO: 222632
gauuugauaaggcuucgau

SEQ ID NO: 222634 - RNA, 19 nt, Artificial Sequence
  Description of Artificial Sequence: Synthetic oligonucleotide
  Sense strand starting at position 539 of SEQ ID NO: 2866
ucagcuacaugaucaagau

SEQ ID NO: 222635 - RNA, 19 nt, Artificial Sequence
  Description of Artificial Sequence: Synthetic oligonucleotide
  Antisense strand to SEQ ID NO: 222634
aucuugaucauguagcuga

SEQ ID NO: 222636 - RNA, 19 nt, Artificial Sequence
  Description of Artificial Sequence: Synthetic oligonucleotide
  Sense strand starting at position 547 of SEQ ID NO: 2866
augaucaagaugugcuaga

SEQ ID NO: 222637 - RNA, 19 nt, Artificial Sequence
  Description of Artificial Sequence: Synthetic oligonucleotide
  Antisense strand to SEQ ID NO: 222636
ucuagcacaucuugaucau

SEQ ID NO: 222638 - RNA, 19 nt, Artificial Sequence
  Description of Artificial Sequence: Synthetic oligonucleotide
  Sense strand starting at position 548 of SEQ ID NO: 2866
ugaucaagaugugcuagaa

SEQ ID NO: 222639 - RNA, 19 nt, Artificial Sequence
  Description of Artificial Sequence: Synthetic oligonucleotide
  Antisense strand to SEQ ID NO: 222638
uucuagcacaucuugauca

SEQ ID NO: 222640 - RNA, 19 nt, Artificial Sequence
  Description of Artificial Sequence: Synthetic oligonucleotide
  Sense strand starting at position 793 of SEQ ID NO: 2866
augugugagcuuuagaauc

SEQ ID NO: 222641 - RNA, 19 nt, Artificial Sequence
  Description of Artificial Sequence: Synthetic oligonucleotide
  Antisense strand to SEQ ID NO: 222640
gauucuaaagcucacacau

SEQ ID NO: 222642 - RNA, 19 nt, Artificial Sequence
  Description of Artificial Sequence: Synthetic oligonucleotide
  Sense strand starting at position 836 of SEQ ID NO: 2866
agguauccagauggcaauu

SEQ ID NO: 222643 - RNA, 19 nt, Artificial Sequence
  Description of Artificial Sequence: Synthetic oligonucleotide
  Antisense strand to SEQ ID NO: 222642
aauugccaucuggauaccu

SEQ ID NO: 222644 - RNA, 19 nt, Artificial Sequence
  Description of Artificial Sequence: Synthetic oligonucleotide
  Sense strand starting at position 1069 of SEQ ID NO: 2866
auccuaagauuagagaagu

SEQ ID NO: 222645 - RNA, 19 nt, Artificial Sequence
  Description of Artificial Sequence: Synthetic oligonucleotide
  Antisense strand to SEQ ID NO: 222644
acuucucuaaucuuaggau

SEQ ID NO: 222646 - RNA, 19 nt, Artificial Sequence
  Description of Artificial Sequence: Synthetic oligonucleotide
  Sense strand starting at position 1093 of SEQ ID NO: 2866
gccgguauuuaggaaacau

SEQ ID NO: 222647 - RNA, 19 nt, Artificial Sequence
  Description of Artificial Sequence: Synthetic oligonucleotide
  Antisense strand to SEQ ID NO: 222646
auguuuccuaaauaccggc

SEQ ID NO: 222648 - RNA, 19 nt, Artificial Sequence
  Description of Artificial Sequence: Synthetic oligonucleotide
  Sense strand starting at position 1573 of SEQ ID NO: 2866
agaagaugguguccugagu

SEQ ID NO: 222649 - RNA, 19 nt, Artificial Sequence
  Description of Artificial Sequence: Synthetic oligonucleotide
  Antisense strand to SEQ ID NO: 222648
acucaggacaccaucuucu

SEQ ID NO: 222650 - RNA, 19 nt, Artificial Sequence
  Description of Artificial Sequence: Synthetic oligonucleotide
  Sense strand starting at position 1579 of SEQ ID NO: 2866
ugguguccugaguguucaa

SEQ ID NO: 222651 - RNA, 19 nt, Artificial Sequence
  Description of Artificial Sequence: Synthetic oligonucleotide
  Antisense strand to SEQ ID NO: 222650
uugaacacucaggacacca

SEQ ID NO: 222652 - RNA, 19 nt, Artificial Sequence
  Description of Artificial Sequence: Synthetic oligonucleotide
  Sense strand starting at position 1582 of SEQ ID NO: 2866
uguccugaguguucaaagu

SEQ ID NO: 222653 - RNA, 19 nt, Artificial Sequence
  Description of Artificial Sequence: Synthetic oligonucleotide
  Antisense strand to SEQ ID NO: 222652
acuuugaacacucaggaca

SEQ ID NO: 222654 - RNA, 19 nt, Artificial Sequence
  Description of Artificial Sequence: Synthetic oligonucleotide
  Sense strand starting at position 1647 of SEQ ID NO: 2866
acugaugaauuugagauau

SEQ ID NO: 222655 - RNA, 19 nt, Artificial Sequence
  Description of Artificial Sequence: Synthetic oligonucleotide
  Antisense strand to SEQ ID NO: 222654
auaucucaaauucaucagu

SEQ ID NO: 222656 - RNA, 19 nt, Artificial Sequence
  Description of Artificial Sequence: Synthetic oligonucleotide
  Sense strand starting at position 1669 of SEQ ID NO: 2866
aaugcauuaguguggauaa

SEQ ID NO: 222657 - RNA, 19 nt, Artificial Sequence
  Description of Artificial Sequence: Synthetic oligonucleotide
  Antisense strand to SEQ ID NO: 222656
uuauccacacuaaugcauu

SEQ ID NO: 222658 - RNA, 19 nt, Artificial Sequence
  Description of Artificial Sequence: Synthetic oligonucleotide
  Sense strand starting at position 1671 of SEQ ID NO: 2866
ugcauuaguguggauaaau

SEQ ID NO: 222659 - RNA, 19 nt, Artificial Sequence
  Description of Artificial Sequence: Synthetic oligonucleotide
  Antisense strand to SEQ ID NO: 222658
auuuauccacacuaaugca

SEQ ID NO: 222660 - RNA, 19 nt, Artificial Sequence
  Description of Artificial Sequence: Synthetic oligonucleotide
  Sense strand starting at position 1717 of SEQ ID NO: 2866
uuugguuguuuguugggaa

SEQ ID NO: 222661 - RNA, 19 nt, Artificial Sequence
  Description of Artificial Sequence: Synthetic oligonucleotide
  Antisense strand to SEQ ID NO: 222660
uucccaacaaacaaccaaa

SEQ ID NO: 222662 - RNA, 19 nt, Artificial Sequence
  Description of Artificial Sequence: Synthetic oligonucleotide
  Sense strand starting at position 1752 of SEQ ID NO: 2866
auaaaucguuccucuaaag

SEQ ID NO: 222663 - RNA, 19 nt, Artificial Sequence
  Description of Artificial Sequence: Synthetic oligonucleotide
  Antisense strand to SEQ ID NO: 222662
cuuuagaggaacgauuuau

SEQ ID NO: 222664 - RNA, 19 nt, Artificial Sequence
  Description of Artificial Sequence: Synthetic oligonucleotide
  Sense strand starting at position 1875 of SEQ ID NO: 2866
uggagcuauguggagugau

SEQ ID NO: 222665 - RNA, 19 nt, Artificial Sequence
  Description of Artificial Sequence: Synthetic oligonucleotide
  Antisense strand to SEQ ID NO: 222664
aucacuccacauagcucca

SEQ ID NO: 222666 - RNA, 19 nt, Artificial Sequence
  Description of Artificial Sequence: Synthetic oligonucleotide
  Sense strand starting at position 1876 of SEQ ID NO: 2866
ggagcuauguggagugaug

SEQ ID NO: 222667 - RNA, 19 nt, Artificial Sequence
  Description of Artificial Sequence: Synthetic oligonucleotide
  Antisense strand to SEQ ID NO: 222666
caucacuccacauagcucc

SEQ ID NO: 222668 - RNA, 19 nt, Artificial Sequence
  Description of Artificial Sequence: Synthetic oligonucleotide
  Sense strand starting at position 1915 of SEQ ID NO: 2866
cucgucuaucaggaagaca

SEQ ID NO: 222669 - RNA, 19 nt, Artificial Sequence
  Description of Artificial Sequence: Synthetic oligonucleotide
  Antisense strand to SEQ ID NO: 222668
ugucuuccugauagacgag

SEQ ID NO: 222670 - RNA, 19 nt, Artificial Sequence
  Description of Artificial Sequence: Synthetic oligonucleotide
  Sense strand starting at position 2177 of SEQ ID NO: 2866
caaugcagaugaguauuaa

SEQ ID NO: 222671 - RNA, 19 nt, Artificial Sequence
  Description of Artificial Sequence: Synthetic oligonucleotide
  Antisense strand to SEQ ID NO: 222670
uuaauacucaucugcauug

SEQ ID NO: 222672 - RNA, 19 nt, Artificial Sequence
  Description of Artificial Sequence: Synthetic oligonucleotide
  Sense strand starting at position 2231 of SEQ ID NO: 2866
caagauaaaugggaaguga

SEQ ID NO: 222673 - RNA, 19 nt, Artificial Sequence
  Description of Artificial Sequence: Synthetic oligonucleotide
  Antisense strand to SEQ ID NO: 222672
ucacuucccauuuaucuug

SEQ ID NO: 222674 - RNA, 19 nt, Artificial Sequence
  Description of Artificial Sequence: Synthetic oligonucleotide
  Sense strand starting at position 2254 of SEQ ID NO: 2866
gagggaaaugcuggccaau

SEQ ID NO: 222675 - RNA, 19 nt, Artificial Sequence
  Description of Artificial Sequence: Synthetic oligonucleotide
  Antisense strand to SEQ ID NO: 222674
auuggccagcauuucccuc

SEQ ID NO: 222676 - RNA, 19 nt, Artificial Sequence
  Description of Artificial Sequence: Synthetic oligonucleotide
  Sense strand starting at position 2303 of SEQ ID NO: 2866
cccaaauucugucuucugu

SEQ ID NO: 222677 - RNA, 19 nt, Artificial Sequence
  Description of Artificial Sequence: Synthetic oligonucleotide
  Antisense strand to SEQ ID NO: 222676
acagaagacagaauuuggg

SEQ ID NO: 222678 - RNA, 19 nt, Artificial Sequence
  Description of Artificial Sequence: Synthetic oligonucleotide
  Sense strand starting at position 2309 of SEQ ID NO: 2866
uucugucuucugugaacac

SEQ ID NO: 222679 - RNA, 19 nt, Artificial Sequence
  Description of Artificial Sequence: Synthetic oligonucleotide
  Antisense strand to SEQ ID NO: 222678
guguucacagaagacagaa

SEQ ID NO: 222680 - RNA, 19 nt, Artificial Sequence
  Description of Artificial Sequence: Synthetic oligonucleotide
  Sense strand starting at position 2326 of SEQ ID NO: 2866
accagucuccugugagaaa

SEQ ID NO: 222681 - RNA, 19 nt, Artificial Sequence
  Description of Artificial Sequence: Synthetic oligonucleotide
  Antisense strand to SEQ ID NO: 222680
uuucucacaggagacuggu

SEQ ID NO: 222682 - RNA, 19 nt, Artificial Sequence
  Description of Artificial Sequence: Synthetic oligonucleotide
  Sense strand starting at position 2372 of SEQ ID NO: 2866
aagcaaauguaugcuguaa

SEQ ID NO: 222683 - RNA, 19 nt, Artificial Sequence
  Description of Artificial Sequence: Synthetic oligonucleotide
  Antisense strand to SEQ ID NO: 222682
uuacagcauacauuugcuu

SEQ ID NO: 222684 - RNA, 19 nt, Artificial Sequence
  Description of Artificial Sequence: Synthetic oligonucleotide
  Sense strand starting at position 2394 of SEQ ID NO: 2866
ggaagcuuugaccauaugu

SEQ ID NO: 222685 - RNA, 19 nt, Artificial Sequence
  Description of Artificial Sequence: Synthetic oligonucleotide
  Antisense strand to SEQ ID NO: 222684
acauauggucaaagcuucc

SEQ ID NO: 222686 - RNA, 19 nt, Artificial Sequence
  Description of Artificial Sequence: Synthetic oligonucleotide
  Sense strand starting at position 2405 of SEQ ID NO: 2866
ccauaugugcagcagaacu

SEQ ID NO: 222687 - RNA, 19 nt, Artificial Sequence
  Description of Artificial Sequence: Synthetic oligonucleotide
  Antisense strand to SEQ ID NO: 222686
aguucugcugcacauaugg

SEQ ID NO: 222688 - RNA, 19 nt, Artificial Sequence
  Description of Artificial Sequence: Synthetic oligonucleotide
  Sense strand starting at position 2758 of SEQ ID NO: 2866
gcucucugagccuguggaa

SEQ ID NO: 222689 - RNA, 19 nt, Artificial Sequence
  Description of Artificial Sequence: Synthetic oligonucleotide
  Antisense strand to SEQ ID NO: 222688
uuccacaggcucagagagc

SEQ ID NO: 222690 - RNA, 19 nt, Artificial Sequence
  Description of Artificial Sequence: Synthetic oligonucleotide
  Sense strand starting at position 2935 of SEQ ID NO: 2866
ucaauaggcccugaguuga

SEQ ID NO: 222691 - RNA, 19 nt, Artificial Sequence
  Description of Artificial Sequence: Synthetic oligonucleotide
  Antisense strand to SEQ ID NO: 222690
ucaacucagggccuauuga

SEQ ID NO: 222692 - RNA, 19 nt, Artificial Sequence
  Description of Artificial Sequence: Synthetic oligonucleotide
  Sense strand starting at position 3034 of SEQ ID NO: 2866
guuuauagacuuuggacuu

SEQ ID NO: 222693 - RNA, 19 nt, Artificial Sequence
  Description of Artificial Sequence: Synthetic oligonucleotide
  Antisense strand to SEQ ID NO: 222692
aaguccaaagucuauaaac

SEQ ID NO: 222694 - RNA, 19 nt, Artificial Sequence
  Description of Artificial Sequence: Synthetic oligonucleotide
  Sense strand starting at position 3710 of SEQ ID NO: 2866
ucuucuguauuuguaaagu

SEQ ID NO: 222695 - RNA, 19 nt, Artificial Sequence
  Description of Artificial Sequence: Synthetic oligonucleotide
  Antisense strand to SEQ ID NO: 222694
acuuuacaaauacagaaga

SEQ ID NO: 222696 - RNA, 19 nt, Artificial Sequence
  Description of Artificial Sequence: Synthetic oligonucleotide
  Sense strand starting at position 3805 of SEQ ID NO: 2866
uuuacugcuguuugagaaa

SEQ ID NO: 222697 - RNA, 19 nt, Artificial Sequence
  Description of Artificial Sequence: Synthetic oligonucleotide
  Antisense strand to SEQ ID NO: 222696
uuucucaaacagcaguaaa

SEQ ID NO: 222698 - RNA, 19 nt, Artificial Sequence
  Description of Artificial Sequence: Synthetic oligonucleotide
  Sense strand starting at position 19 of SEQ ID NO: 2868
ggaagaaauugacagaaug

SEQ ID NO: 222699 - RNA, 19 nt, Artificial Sequence
  Description of Artificial Sequence: Synthetic oligonucleotide
  Antisense strand to SEQ ID NO: 222698
cauucugucaauuucuucc

SEQ ID NO: 222700 - RNA, 19 nt, Artificial Sequence
  Description of Artificial Sequence: Synthetic oligonucleotide
  Sense strand starting at position 180 of SEQ ID NO: 2868
uuugcauuccaggaauacu

SEQ ID NO: 222701 - RNA, 19 nt, Artificial Sequence
  Description of Artificial Sequence: Synthetic oligonucleotide
  Antisense strand to SEQ ID NO: 222700
aguauuccuggaaugcaaa

SEQ ID NO: 222702 - RNA, 19 nt, Artificial Sequence
  Description of Artificial Sequence: Synthetic oligonucleotide
  Sense strand starting at position 234 of SEQ ID NO: 2868
acuggaucuugcucuauca

SEQ ID NO: 222703 - RNA, 19 nt, Artificial Sequence
  Description of Artificial Sequence: Synthetic oligonucleotide
  Antisense strand to SEQ ID NO: 222702
ugauagagcaagauccagu

SEQ ID NO: 222704 - RNA, 19 nt, Artificial Sequence
  Description of Artificial Sequence: Synthetic oligonucleotide
  Sense strand starting at position 982 of SEQ ID NO: 2868
aacugaauucuguaagguu

SEQ ID NO: 222705 - RNA, 19 nt, Artificial Sequence
  Description of Artificial Sequence: Synthetic oligonucleotide
  Antisense strand to SEQ ID NO: 222704
aaccuuacagaauucaguu

SEQ ID NO: 222706 - RNA, 19 nt, Artificial Sequence
  Description of Artificial Sequence: Synthetic oligonucleotide
  Sense strand starting at position 995 of SEQ ID NO: 2868
aagguugugcaccaauaau

SEQ ID NO: 222707 - RNA, 19 nt, Artificial Sequence
  Description of Artificial Sequence: Synthetic oligonucleotide
  Antisense strand to SEQ ID NO: 222706
auuauuggugcacaaccuu

SEQ ID NO: 222708 - RNA, 19 nt, Artificial Sequence
  Description of Artificial Sequence: Synthetic oligonucleotide
  Sense strand starting at position 1133 of SEQ ID NO: 2868
gaggauacuuacgcugaau

SEQ ID NO: 222709 - RNA, 19 nt, Artificial Sequence
  Description of Artificial Sequence: Synthetic oligonucleotide
  Antisense strand to SEQ ID NO: 222708
auucagcguaaguauccuc

SEQ ID NO: 222710 - RNA, 19 nt, Artificial Sequence
  Description of Artificial Sequence: Synthetic oligonucleotide
  Sense strand starting at position 1135 of SEQ ID NO: 2868
ggauacuuacgcugaauca

SEQ ID NO: 222711 - RNA, 19 nt, Artificial Sequence
  Description of Artificial Sequence: Synthetic oligonucleotide
  Antisense strand to SEQ ID NO: 222710
ugauucagcguaaguaucc

SEQ ID NO: 222712 - RNA, 19 nt, Artificial Sequence
  Description of Artificial Sequence: Synthetic oligonucleotide
  Sense strand starting at position 1206 of SEQ ID NO: 2868
gagauaugcgcuuaacauu

SEQ ID NO: 222713 - RNA, 19 nt, Artificial Sequence
  Description of Artificial Sequence: Synthetic oligonucleotide
  Antisense strand to SEQ ID NO: 222712
aauguuaagcgcauaucuc

SEQ ID NO: 222714 - RNA, 19 nt, Artificial Sequence
  Description of Artificial Sequence: Synthetic oligonucleotide
  Sense strand starting at position 1288 of SEQ ID NO: 2868
uaggaauuagguuguauaa

SEQ ID NO: 222715 - RNA, 19 nt, Artificial Sequence
  Description of Artificial Sequence: Synthetic oligonucleotide
  Antisense strand to SEQ ID NO: 222714
uuauacaaccuaauuccua

SEQ ID NO: 222716 - RNA, 19 nt, Artificial Sequence
  Description of Artificial Sequence: Synthetic oligonucleotide
  Sense strand starting at position 1302 of SEQ ID NO: 2868
uauaauccacgugguuaga

SEQ ID NO: 222717 - RNA, 19 nt, Artificial Sequence
  Description of Artificial Sequence: Synthetic oligonucleotide
  Antisense strand to SEQ ID NO: 222716
ucuaaccacguggauuaua

SEQ ID NO: 222718 - RNA, 19 nt, Artificial Sequence
  Description of Artificial Sequence: Synthetic oligonucleotide
  Sense strand starting at position 1315 of SEQ ID NO: 2868
guuagauuccacuaucuau

SEQ ID NO: 222719 - RNA, 19 nt, Artificial Sequence
  Description of Artificial Sequence: Synthetic oligonucleotide
  Antisense strand to SEQ ID NO: 222718
auagauaguggaaucuaac

SEQ ID NO: 222720 - RNA, 19 nt, Artificial Sequence
  Description of Artificial Sequence: Synthetic oligonucleotide
  Sense strand starting at position 1389 of SEQ ID NO: 2868
uaaguuuggcuguaagagu

SEQ ID NO: 222721 - RNA, 19 nt, Artificial Sequence
  Description of Artificial Sequence: Synthetic oligonucleotide
  Antisense strand to SEQ ID NO: 222720
acucuuacagccaaacuua

SEQ ID NO: 222722 - RNA, 19 nt, Artificial Sequence
  Description of Artificial Sequence: Synthetic oligonucleotide
  Sense strand starting at position 1402 of SEQ ID NO: 2868
aagaguauucuuuguuuga

SEQ ID NO: 222723 - RNA, 19 nt, Artificial Sequence
  Description of Artificial Sequence: Synthetic oligonucleotide
  Antisense strand to SEQ ID NO: 222722
ucaaacaaagaauacucuu

SEQ ID NO: 222724 - RNA, 19 nt, Artificial Sequence
  Description of Artificial Sequence: Synthetic oligonucleotide
  Sense strand starting at position 1403 of SEQ ID NO: 2868
agaguauucuuuguuugau

SEQ ID NO: 222725 - RNA, 19 nt, Artificial Sequence
  Description of Artificial Sequence: Synthetic oligonucleotide
  Antisense strand to SEQ ID NO: 222724
aucaaacaaagaauacucu

SEQ ID NO: 222726 - RNA, 19 nt, Artificial Sequence
  Description of Artificial Sequence: Synthetic oligonucleotide
  Sense strand starting at position 1404 of SEQ ID NO: 2868
gaguauucuuuguuugaua

SEQ ID NO: 222727 - RNA, 19 nt, Artificial Sequence
  Description of Artificial Sequence: Synthetic oligonucleotide
  Antisense strand to SEQ ID NO: 222726
uaucaaacaaagaauacuc

SEQ ID NO: 222728 - RNA, 19 nt, Artificial Sequence
  Description of Artificial Sequence: Synthetic oligonucleotide
  Sense strand starting at position 1405 of SEQ ID NO: 2868
aguauucuuuguuugauag

SEQ ID NO: 222729 - RNA, 19 nt, Artificial Sequence
  Description of Artificial Sequence: Synthetic oligonucleotide
  Antisense strand to SEQ ID NO: 222728
cuaucaaacaaagaauacu

SEQ ID NO: 222730 - RNA, 19 nt, Artificial Sequence
  Description of Artificial Sequence: Synthetic oligonucleotide
  Sense strand starting at position 1413 of SEQ ID NO: 2868
uuguuugauagccaaggca

SEQ ID NO: 222731 - RNA, 19 nt, Artificial Sequence
  Description of Artificial Sequence: Synthetic oligonucleotide
  Antisense strand to SEQ ID NO: 222730
ugccuuggcuaucaaacaa

SEQ ID NO: 222732 - RNA, 19 nt, Artificial Sequence
  Description of Artificial Sequence: Synthetic oligonucleotide
  Sense strand starting at position 1462 of SEQ ID NO: 2868
caggcagaucucugacuga

SEQ ID NO: 222733 - RNA, 19 nt, Artificial Sequence
  Description of Artificial Sequence: Synthetic oligonucleotide
  Antisense strand to SEQ ID NO: 222732
ucagucagagaucugccug

SEQ ID NO: 222734 - RNA, 19 nt, Artificial Sequence
  Description of Artificial Sequence: Synthetic oligonucleotide
  Sense strand starting at position 1465 of SEQ ID NO: 2868
gcagaucucugacugauca

SEQ ID NO: 222735 - RNA, 19 nt, Artificial Sequence
  Description of Artificial Sequence: Synthetic oligonucleotide
  Antisense strand to SEQ ID NO: 222734
ugaucagucagagaucugc

SEQ ID NO: 222736 - RNA, 19 nt, Artificial Sequence
  Description of Artificial Sequence: Synthetic oligonucleotide
  Sense strand starting at position 1992 of SEQ ID NO: 2868
acgauucucacuuggagca

SEQ ID NO: 222737 - RNA, 19 nt, Artificial Sequence
  Description of Artificial Sequence: Synthetic oligonucleotide
  Antisense strand to SEQ ID NO: 222736
ugcuccaagugagaaucgu

SEQ ID NO: 222738 - RNA, 19 nt, Artificial Sequence
  Description of Artificial Sequence: Synthetic oligonucleotide
  Sense strand starting at position 2385 of SEQ ID NO: 2868
cugggaaucuagcucugau

SEQ ID NO: 222739 - RNA, 19 nt, Artificial Sequence
  Description of Artificial Sequence: Synthetic oligonucleotide
  Antisense strand to SEQ ID NO: 222738
aucagagcuagauucccag

SEQ ID NO: 222740 - RNA, 19 nt, Artificial Sequence
  Description of Artificial Sequence: Synthetic oligonucleotide
  Sense strand starting at position 2388 of SEQ ID NO: 2868
ggaaucuagcucugauucu

SEQ ID NO: 222741 - RNA, 19 nt, Artificial Sequence
  Description of Artificial Sequence: Synthetic oligonucleotide
  Antisense strand to SEQ ID NO: 222740
agaaucagagcuagauucc

SEQ ID NO: 222742 - RNA, 19 nt, Artificial Sequence
  Description of Artificial Sequence: Synthetic oligonucleotide
  Sense strand starting at position 2517 of SEQ ID NO: 2868
ccaaguuucgaauguagaa

SEQ ID NO: 222743 - RNA, 19 nt, Artificial Sequence
  Description of Artificial Sequence: Synthetic oligonucleotide
  Antisense strand to SEQ ID NO: 222742
uucuacauucgaaacuugg

SEQ ID NO: 222744 - RNA, 19 nt, Artificial Sequence
  Description of Artificial Sequence: Synthetic oligonucleotide
  Sense strand starting at position 2556 of SEQ ID NO: 2868
acaguccaguuucugauau

SEQ ID NO: 222745 - RNA, 19 nt, Artificial Sequence
  Description of Artificial Sequence: Synthetic oligonucleotide
  Antisense strand to SEQ ID NO: 222744
auaucagaaacuggacugu

SEQ ID NO: 222746 - RNA, 19 nt, Artificial Sequence
  Description of Artificial Sequence: Synthetic oligonucleotide
  Sense strand starting at position 2566 of SEQ ID NO: 2868
uucugauaugauuacguuu

SEQ ID NO: 222747 - RNA, 19 nt, Artificial Sequence
  Description of Artificial Sequence: Synthetic oligonucleotide
  Antisense strand to SEQ ID NO: 222746
aaacguaaucauaucagaa

SEQ ID NO: 222748 - RNA, 19 nt, Artificial Sequence
  Description of Artificial Sequence: Synthetic oligonucleotide
  Sense strand starting at position 2572 of SEQ ID NO: 2868
uaugauuacguuuaaugcu

SEQ ID NO: 222749 - RNA, 19 nt, Artificial Sequence
  Description of Artificial Sequence: Synthetic oligonucleotide
  Antisense strand to SEQ ID NO: 222748
agcauuaaacguaaucaua

SEQ ID NO: 222750 - RNA, 19 nt, Artificial Sequence
  Description of Artificial Sequence: Synthetic oligonucleotide
  Sense strand starting at position 2647 of SEQ ID NO: 2868
cuguuacuauuaguacuaa

SEQ ID NO: 222751 - RNA, 19 nt, Artificial Sequence
  Description of Artificial Sequence: Synthetic oligonucleotide
  Antisense strand to SEQ ID NO: 222750
uuaguacuaauaguaacag

SEQ ID NO: 222752 - RNA, 19 nt, Artificial Sequence
  Description of Artificial Sequence: Synthetic oligonucleotide
  Sense strand starting at position 2829 of SEQ ID NO: 2868
gagucugagguugacaagu

SEQ ID NO: 222753 - RNA, 19 nt, Artificial Sequence
  Description of Artificial Sequence: Synthetic oligonucleotide
  Antisense strand to SEQ ID NO: 222752
acuugucaaccucagacuc

SEQ ID NO: 222754 - RNA, 19 nt, Artificial Sequence
  Description of Artificial Sequence: Synthetic oligonucleotide
  Sense strand starting at position 2853 of SEQ ID NO: 2868
gaagaaaggcuuuguggga

SEQ ID NO: 222755 - RNA, 19 nt, Artificial Sequence
  Description of Artificial Sequence: Synthetic oligonucleotide
  Antisense strand to SEQ ID NO: 222754
ucccacaaagccuuucuuc

SEQ ID NO: 222756 - RNA, 19 nt, Artificial Sequence
  Description of Artificial Sequence: Synthetic oligonucleotide
  Sense strand starting at position 2922 of SEQ ID NO: 2868
gaguuuagacacugggcua

SEQ ID NO: 222757 - RNA, 19 nt, Artificial Sequence
  Description of Artificial Sequence: Synthetic oligonucleotide
  Antisense strand to SEQ ID NO: 222756
uagcccagugucuaaacuc

SEQ ID NO: 222758 - RNA, 19 nt, Artificial Sequence
  Description of Artificial Sequence: Synthetic oligonucleotide
  Sense strand starting at position 2923 of SEQ ID NO: 2868
aguuuagacacugggcuaa

SEQ ID NO: 222759 - RNA, 19 nt, Artificial Sequence
  Description of Artificial Sequence: Synthetic oligonucleotide
  Antisense strand to SEQ ID NO: 222758
uuagcccagugucuaaacu

SEQ ID NO: 222760 - RNA, 19 nt, Artificial Sequence
  Description of Artificial Sequence: Synthetic oligonucleotide
  Sense strand starting at position 2936 of SEQ ID NO: 2868
ggcuaagugcuuuaacuag

SEQ ID NO: 222761 - RNA, 19 nt, Artificial Sequence
  Description of Artificial Sequence: Synthetic oligonucleotide
  Antisense strand to SEQ ID NO: 222760
cuaguuaaagcacuuagcc

SEQ ID NO: 222762 - RNA, 19 nt, Artificial Sequence
  Description of Artificial Sequence: Synthetic oligonucleotide
  Sense strand starting at position 3130 of SEQ ID NO: 2868
agcaguuaaccagguaaag

SEQ ID NO: 222763 - RNA, 19 nt, Artificial Sequence
  Description of Artificial Sequence: Synthetic oligonucleotide
  Antisense strand to SEQ ID NO: 222762
cuuuaccugguuaacugcu

SEQ ID NO: 222764 - RNA, 19 nt, Artificial Sequence
  Description of Artificial Sequence: Synthetic oligonucleotide
  Sense strand starting at position 3156 of SEQ ID NO: 2868
ggguguuccacccagagua

SEQ ID NO: 222765 - RNA, 19 nt, Artificial Sequence
  Description of Artificial Sequence: Synthetic oligonucleotide
  Antisense strand to SEQ ID NO: 222764
uacucuggguggaacaccc

SEQ ID NO: 222766 - RNA, 19 nt, Artificial Sequence
  Description of Artificial Sequence: Synthetic oligonucleotide
  Sense strand starting at position 3179 of SEQ ID NO: 2868
auggcaucugugggaaacu

SEQ ID NO: 222767 - RNA, 19 nt, Artificial Sequence
  Description of Artificial Sequence: Synthetic oligonucleotide
  Antisense strand to SEQ ID NO: 222766
aguuucccacagaugccau

SEQ ID NO: 222768 - RNA, 19 nt, Artificial Sequence
  Description of Artificial Sequence: Synthetic oligonucleotide
  Sense strand starting at position 3203 of SEQ ID NO: 2868
cagaucugguaaucuaguu

SEQ ID NO: 222769 - RNA, 19 nt, Artificial Sequence
  Description of Artificial Sequence: Synthetic oligonucleotide
  Antisense strand to SEQ ID NO: 222768
aacuagauuaccagaucug

SEQ ID NO: 222770 - RNA, 19 nt, Artificial Sequence
  Description of Artificial Sequence: Synthetic oligonucleotide
  Sense strand starting at position 3209 of SEQ ID NO: 2868
ugguaaucuaguuaguuau

SEQ ID NO: 222771 - RNA, 19 nt, Artificial Sequence
  Description of Artificial Sequence: Synthetic oligonucleotide
  Antisense strand to SEQ ID NO: 222770
auaacuaacuagauuacca

SEQ ID NO: 222772 - RNA, 19 nt, Artificial Sequence
  Description of Artificial Sequence: Synthetic oligonucleotide
  Sense strand starting at position 3215 of SEQ ID NO: 2868
ucuaguuaguuaucauuag

SEQ ID NO: 222773 - RNA, 19 nt, Artificial Sequence
  Description of Artificial Sequence: Synthetic oligonucleotide
  Antisense strand to SEQ ID NO: 222772
cuaaugauaacuaacuaga

SEQ ID NO: 222774 - RNA, 19 nt, Artificial Sequence
  Description of Artificial Sequence: Synthetic oligonucleotide
  Sense strand starting at position 3467 of SEQ ID NO: 2868
cccugcucucuuggaauuu

SEQ ID NO: 222775 - RNA, 19 nt, Artificial Sequence
  Description of Artificial Sequence: Synthetic oligonucleotide
  Antisense strand to SEQ ID NO: 222774
aaauuccaagagagcaggg

SEQ ID NO: 222776 - RNA, 19 nt, Artificial Sequence
  Description of Artificial Sequence: Synthetic oligonucleotide
  Sense strand starting at position 3485 of SEQ ID NO: 2868
ucacaucuugcagacaugu

SEQ ID NO: 222777 - RNA, 19 nt, Artificial Sequence
  Description of Artificial Sequence: Synthetic oligonucleotide
  Antisense strand to SEQ ID NO: 222776
acaugucugcaagauguga

SEQ ID NO: 222778 - RNA, 19 nt, Artificial Sequence
  Description of Artificial Sequence: Synthetic oligonucleotide
  Sense strand starting at position 39 of SEQ ID NO: 2869
ggaguaauaaagggagugu

SEQ ID NO: 222779 - RNA, 19 nt, Artificial Sequence
  Description of Artificial Sequence: Synthetic oligonucleotide
  Antisense strand to SEQ ID NO: 222778
acacucccuuuauuacucc

SEQ ID NO: 222780 - RNA, 19 nt, Artificial Sequence
  Description of Artificial Sequence: Synthetic oligonucleotide
  Sense strand starting at position 159 of SEQ ID NO: 2869
ggaacuugguauucuuauc

SEQ ID NO: 222781 - RNA, 19 nt, Artificial Sequence
  Description of Artificial Sequence: Synthetic oligonucleotide
  Antisense strand to SEQ ID NO: 222780
gauaagaauaccaaguucc

SEQ ID NO: 222782 - RNA, 19 nt, Artificial Sequence
  Description of Artificial Sequence: Synthetic oligonucleotide
  Sense strand starting at position 307 of SEQ ID NO: 2869
uauuuauuaggucggcuau

SEQ ID NO: 222783 - RNA, 19 nt, Artificial Sequence
  Description of Artificial Sequence: Synthetic oligonucleotide
  Antisense strand to SEQ ID NO: 222782
auagccgaccuaauaaaua

SEQ ID NO: 222784 - RNA, 19 nt, Artificial Sequence
  Description of Artificial Sequence: Synthetic oligonucleotide
  Sense strand starting at position 308 of SEQ ID NO: 2869
auuuauuaggucggcuauu

SEQ ID NO: 222785 - RNA, 19 nt, Artificial Sequence
  Description of Artificial Sequence: Synthetic oligonucleotide
  Antisense strand to SEQ ID NO: 222784
aauagccgaccuaauaaau

SEQ ID NO: 222786 - RNA, 19 nt, Artificial Sequence
  Description of Artificial Sequence: Synthetic oligonucleotide
  Sense strand starting at position 623 of SEQ ID NO: 2869
auccaagagcuguaucuuu

SEQ ID NO: 222787 - RNA, 19 nt, Artificial Sequence
  Description of Artificial Sequence: Synthetic oligonucleotide
  Antisense strand to SEQ ID NO: 222786
aaagauacagcucuuggau

SEQ ID NO: 222788 - RNA, 19 nt, Artificial Sequence
  Description of Artificial Sequence: Synthetic oligonucleotide
  Sense strand starting at position 649 of SEQ ID NO: 2869
cuuuguguuaguuccuguu

SEQ ID NO: 222789 - RNA, 19 nt, Artificial Sequence
  Description of Artificial Sequence: Synthetic oligonucleotide
  Antisense strand to SEQ ID NO: 222788
aacaggaacuaacacaaag

SEQ ID NO: 222790 - RNA, 19 nt, Artificial Sequence
  Description of Artificial Sequence: Synthetic oligonucleotide
  Sense strand starting at position 667 of SEQ ID NO: 2869
ucaugugugggagaacauu

SEQ ID NO: 222791 - RNA, 19 nt, Artificial Sequence
  Description of Artificial Sequence: Synthetic oligonucleotide
  Antisense strand to SEQ ID NO: 222790
aauguucucccacacauga

SEQ ID NO: 222792 - RNA, 19 nt, Artificial Sequence
  Description of Artificial Sequence: Synthetic oligonucleotide
  Sense strand starting at position 676 of SEQ ID NO: 2869
ggagaacauuggucaguga

SEQ ID NO: 222793 - RNA, 19 nt, Artificial Sequence
  Description of Artificial Sequence: Synthetic oligonucleotide
  Antisense strand to SEQ ID NO: 222792
ucacugaccaauguucucc

SEQ ID NO: 222794 - RNA, 19 nt, Artificial Sequence
  Description of Artificial Sequence: Synthetic oligonucleotide
  Sense strand starting at position 679 of SEQ ID NO: 2869
gaacauuggucagugacuc

SEQ ID NO: 222795 - RNA, 19 nt, Artificial Sequence
  Description of Artificial Sequence: Synthetic oligonucleotide
  Antisense strand to SEQ ID NO: 222794
gagucacugaccaauguuc

SEQ ID NO: 222796 - RNA, 19 nt, Artificial Sequence
  Description of Artificial Sequence: Synthetic oligonucleotide
  Sense strand starting at position 680 of SEQ ID NO: 2869
aacauuggucagugacuca

SEQ ID NO: 222797 - RNA, 19 nt, Artificial Sequence
  Description of Artificial Sequence: Synthetic oligonucleotide
  Antisense strand to SEQ ID NO: 222796
ugagucacugaccaauguu

SEQ ID NO: 222798 - RNA, 19 nt, Artificial Sequence
  Description of Artificial Sequence: Synthetic oligonucleotide
  Sense strand starting at position 993 of SEQ ID NO: 2869
auuuaugacugucaugaga

SEQ ID NO: 222799 - RNA, 19 nt, Artificial Sequence
  Description of Artificial Sequence: Synthetic oligonucleotide
  Antisense strand to SEQ ID NO: 222798
ucucaugacagucauaaau

SEQ ID NO: 222800 - RNA, 19 nt, Artificial Sequence
  Description of Artificial Sequence: Synthetic oligonucleotide
  Sense strand starting at position 1498 of SEQ ID NO: 2869
augacauagucacuuauca

SEQ ID NO: 222801 - RNA, 19 nt, Artificial Sequence
  Description of Artificial Sequence: Synthetic oligonucleotide
  Antisense strand to SEQ ID NO: 222800
ugauaagugacuaugucau

SEQ ID NO: 222802 - RNA, 19 nt, Artificial Sequence
  Description of Artificial Sequence: Synthetic oligonucleotide
  Sense strand starting at position 1609 of SEQ ID NO: 2869
gucuauuaucacuaguaag

SEQ ID NO: 222803 - RNA, 19 nt, Artificial Sequence
  Description of Artificial Sequence: Synthetic oligonucleotide
  Antisense strand to SEQ ID NO: 222802
cuuacuagugauaauagac

SEQ ID NO: 222804 - RNA, 19 nt, Artificial Sequence
  Description of Artificial Sequence: Synthetic oligonucleotide
  Sense strand starting at position 1712 of SEQ ID NO: 2869
uugagaaaugagugccaua

SEQ ID NO: 222805 - RNA, 19 nt, Artificial Sequence
  Description of Artificial Sequence: Synthetic oligonucleotide
  Antisense strand to SEQ ID NO: 222804
uauggcacucauuucucaa

SEQ ID NO: 222806 - RNA, 19 nt, Artificial Sequence
  Description of Artificial Sequence: Synthetic oligonucleotide
  Sense strand starting at position 1766 of SEQ ID NO: 2869
uuuccuucuggugaugaga

SEQ ID NO: 222807 - RNA, 19 nt, Artificial Sequence
  Description of Artificial Sequence: Synthetic oligonucleotide
  Antisense strand to SEQ ID NO: 222806
ucucaucaccagaaggaaa

SEQ ID NO: 222808 - RNA, 19 nt, Artificial Sequence
  Description of Artificial Sequence: Synthetic oligonucleotide
  Sense strand starting at position 1857 of SEQ ID NO: 2869
ugaggagaaagauguguua

SEQ ID NO: 222809 - RNA, 19 nt, Artificial Sequence
  Description of Artificial Sequence: Synthetic oligonucleotide
  Antisense strand to SEQ ID NO: 222808
uaacacaucuuucuccuca

SEQ ID NO: 222810 - RNA, 19 nt, Artificial Sequence
  Description of Artificial Sequence: Synthetic oligonucleotide
  Sense strand starting at position 1860 of SEQ ID NO: 2869
ggagaaagauguguuagcu

SEQ ID NO: 222811 - RNA, 19 nt, Artificial Sequence
  Description of Artificial Sequence: Synthetic oligonucleotide
  Antisense strand to SEQ ID NO: 222810
agcuaacacaucuuucucc

SEQ ID NO: 222812 - RNA, 19 nt, Artificial Sequence
  Description of Artificial Sequence: Synthetic oligonucleotide
  Sense strand starting at position 2220 of SEQ ID NO: 2869
ucaguaguccuuuacacau

SEQ ID NO: 222813 - RNA, 19 nt, Artificial Sequence
  Description of Artificial Sequence: Synthetic oligonucleotide
  Antisense strand to SEQ ID NO: 222812
auguguaaaggacuacuga

SEQ ID NO: 222814 - RNA, 19 nt, Artificial Sequence
  Description of Artificial Sequence: Synthetic oligonucleotide
  Sense strand starting at position 2254 of SEQ ID NO: 2869
aguaguuuggcauaacuaa

SEQ ID NO: 222815 - RNA, 19 nt, Artificial Sequence
  Description of Artificial Sequence: Synthetic oligonucleotide
  Antisense strand to SEQ ID NO: 222814
uuaguuaugccaaacuacu

SEQ ID NO: 222816 - RNA, 19 nt, Artificial Sequence
  Description of Artificial Sequence: Synthetic oligonucleotide
  Sense strand starting at position 2371 of SEQ ID NO: 2869
ggacuuaagagcugaaagu

SEQ ID NO: 222817 - RNA, 19 nt, Artificial Sequence
  Description of Artificial Sequence: Synthetic oligonucleotide
  Antisense strand to SEQ ID NO: 222816
acuuucagcucuuaagucc

SEQ ID NO: 222818 - RNA, 19 nt, Artificial Sequence
  Description of Artificial Sequence: Synthetic oligonucleotide
  Sense strand starting at position 2380 of SEQ ID NO: 2869
agcugaaagugaucauaaa

SEQ ID NO: 222819 - RNA, 19 nt, Artificial Sequence
  Description of Artificial Sequence: Synthetic oligonucleotide
  Antisense strand to SEQ ID NO: 222818
uuuaugaucacuuucagcu

SEQ ID NO: 222820 - RNA, 19 nt, Artificial Sequence
  Description of Artificial Sequence: Synthetic oligonucleotide
  Sense strand starting at position 2419 of SEQ ID NO: 2869
ucuugagauacagguugaa

SEQ ID NO: 222821 - RNA, 19 nt, Artificial Sequence
  Description of Artificial Sequence: Synthetic oligonucleotide
  Antisense strand to SEQ ID NO: 222820
uucaaccuguaucucaaga

SEQ ID NO: 222822 - RNA, 19 nt, Artificial Sequence
  Description of Artificial Sequence: Synthetic oligonucleotide
  Sense strand starting at position 2640 of SEQ ID NO: 2869
auuaacacaucuguguaaa

SEQ ID NO: 222823 - RNA, 19 nt, Artificial Sequence
  Description of Artificial Sequence: Synthetic oligonucleotide
  Antisense strand to SEQ ID NO: 222822
uuuacacagauguguuaau

SEQ ID NO: 222824 - RNA, 19 nt, Artificial Sequence
  Description of Artificial Sequence: Synthetic oligonucleotide
  Sense strand starting at position 2774 of SEQ ID NO: 2869
gugacaguucaagaaguga

SEQ ID NO: 222825 - RNA, 19 nt, Artificial Sequence
  Description of Artificial Sequence: Synthetic oligonucleotide
  Antisense strand to SEQ ID NO: 222824
ucacuucuugaacugucac

SEQ ID NO: 222826 - RNA, 19 nt, Artificial Sequence
  Description of Artificial Sequence: Synthetic oligonucleotide
  Sense strand starting at position 2809 of SEQ ID NO: 2869
cuaugauaggcaugggcaa

SEQ ID NO: 222827 - RNA, 19 nt, Artificial Sequence
  Description of Artificial Sequence: Synthetic oligonucleotide
  Antisense strand to SEQ ID NO: 222826
uugcccaugccuaucauag

SEQ ID NO: 222828 - RNA, 19 nt, Artificial Sequence
  Description of Artificial Sequence: Synthetic oligonucleotide
  Sense strand starting at position 2811 of SEQ ID NO: 2869
augauaggcaugggcaauu

SEQ ID NO: 222829 - RNA, 19 nt, Artificial Sequence
  Description of Artificial Sequence: Synthetic oligonucleotide
  Antisense strand to SEQ ID NO: 222828
aauugcccaugccuaucau

SEQ ID NO: 222830 - RNA, 19 nt, Artificial Sequence
  Description of Artificial Sequence: Synthetic oligonucleotide
  Sense strand starting at position 2830 of SEQ ID NO: 2869
uagagcucagucuggacaa

SEQ ID NO: 222831 - RNA, 19 nt, Artificial Sequence
  Description of Artificial Sequence: Synthetic oligonucleotide
  Antisense strand to SEQ ID NO: 222830
uuguccagacugagcucua

SEQ ID NO: 222832 - RNA, 19 nt, Artificial Sequence
  Description of Artificial Sequence: Synthetic oligonucleotide
  Sense strand starting at position 2841 of SEQ ID NO: 2869
cuggacaaucggugaugau

SEQ ID NO: 222833 - RNA, 19 nt, Artificial Sequence
  Description of Artificial Sequence: Synthetic oligonucleotide
  Antisense strand to SEQ ID NO: 222832
aucaucaccgauuguccag

SEQ ID NO: 222834 - RNA, 19 nt, Artificial Sequence
  Description of Artificial Sequence: Synthetic oligonucleotide
  Sense strand starting at position 2842 of SEQ ID NO: 2869
uggacaaucggugaugauu

SEQ ID NO: 222835 - RNA, 19 nt, Artificial Sequence
  Description of Artificial Sequence: Synthetic oligonucleotide
  Antisense strand to SEQ ID NO: 222834
aaucaucaccgauugucca

SEQ ID NO: 222836 - RNA, 19 nt, Artificial Sequence
  Description of Artificial Sequence: Synthetic oligonucleotide
  Sense strand starting at position 2848 of SEQ ID NO: 2869
aucggugaugauuaaucuu

SEQ ID NO: 222837 - RNA, 19 nt, Artificial Sequence
  Description of Artificial Sequence: Synthetic oligonucleotide
  Antisense strand to SEQ ID NO: 222836
aagauuaaucaucaccgau

SEQ ID NO: 222838 - RNA, 19 nt, Artificial Sequence
  Description of Artificial Sequence: Synthetic oligonucleotide
  Sense strand starting at position 2851 of SEQ ID NO: 2869
ggugaugauuaaucuuaag

SEQ ID NO: 222839 - RNA, 19 nt, Artificial Sequence
  Description of Artificial Sequence: Synthetic oligonucleotide
  Antisense strand to SEQ ID NO: 222838
cuuaagauuaaucaucacc

SEQ ID NO: 222840 - RNA, 19 nt, Artificial Sequence
  Description of Artificial Sequence: Synthetic oligonucleotide
  Sense strand starting at position 2974 of SEQ ID NO: 2869
aacuaauuguagucaugga

SEQ ID NO: 222841 - RNA, 19 nt, Artificial Sequence
  Description of Artificial Sequence: Synthetic oligonucleotide
  Antisense strand to SEQ ID NO: 222840
uccaugacuacaauuaguu

SEQ ID NO: 222842 - RNA, 19 nt, Artificial Sequence
  Description of Artificial Sequence: Synthetic oligonucleotide
  Sense strand starting at position 3044 of SEQ ID NO: 2869
uguaacauuguuuaccuua

SEQ ID NO: 222843 - RNA, 19 nt, Artificial Sequence
  Description of Artificial Sequence: Synthetic oligonucleotide
  Antisense strand to SEQ ID NO: 222842
uaagguaaacaauguuaca

SEQ ID NO: 222844 - RNA, 19 nt, Artificial Sequence
  Description of Artificial Sequence: Synthetic oligonucleotide
  Sense strand starting at position 3072 of SEQ ID NO: 2869
ucauaaauugacuacguua

SEQ ID NO: 222845 - RNA, 19 nt, Artificial Sequence
  Description of Artificial Sequence: Synthetic oligonucleotide
  Antisense strand to SEQ ID NO: 222844
uaacguagucaauuuauga

SEQ ID NO: 222846 - RNA, 19 nt, Artificial Sequence
  Description of Artificial Sequence: Synthetic oligonucleotide
  Sense strand starting at position 3075 of SEQ ID NO: 2869
uaaauugacuacguuauga

SEQ ID NO: 222847 - RNA, 19 nt, Artificial Sequence
  Description of Artificial Sequence: Synthetic oligonucleotide
  Antisense strand to SEQ ID NO: 222846
ucauaacguagucaauuua

SEQ ID NO: 222848 - RNA, 19 nt, Artificial Sequence
  Description of Artificial Sequence: Synthetic oligonucleotide
  Sense strand starting at position 3173 of SEQ ID NO: 2869
guuuauagugacuauugua

SEQ ID NO: 222849 - RNA, 19 nt, Artificial Sequence
  Description of Artificial Sequence: Synthetic oligonucleotide
  Antisense strand to SEQ ID NO: 222848
uacaauagucacuauaaac

SEQ ID NO: 222850 - RNA, 19 nt, Artificial Sequence
  Description of Artificial Sequence: Synthetic oligonucleotide
  Sense strand starting at position 3311 of SEQ ID NO: 2869
cagggcugauacuuccaua

SEQ ID NO: 222851 - RNA, 19 nt, Artificial Sequence
  Description of Artificial Sequence: Synthetic oligonucleotide
  Antisense strand to SEQ ID NO: 222850
uauggaaguaucagcccug

SEQ ID NO: 222852 - RNA, 19 nt, Artificial Sequence
  Description of Artificial Sequence: Synthetic oligonucleotide
  Sense strand starting at position 3772 of SEQ ID NO: 2869
ucuauugauguguagugau

SEQ ID NO: 222853 - RNA, 19 nt, Artificial Sequence
  Description of Artificial Sequence: Synthetic oligonucleotide
  Antisense strand to SEQ ID NO: 222852
aucacuacacaucaauaga

SEQ ID NO: 222854 - RNA, 19 nt, Artificial Sequence
  Description of Artificial Sequence: Synthetic oligonucleotide
  Sense strand starting at position 3853 of SEQ ID NO: 2869
cacaguuggaguugaggaa

SEQ ID NO: 222855 - RNA, 19 nt, Artificial Sequence
  Description of Artificial Sequence: Synthetic oligonucleotide
  Antisense strand to SEQ ID NO: 222854
uuccucaacuccaacugug

SEQ ID NO: 222856 - RNA, 19 nt, Artificial Sequence
  Description of Artificial Sequence: Synthetic oligonucleotide
  Sense strand starting at position 3920 of SEQ ID NO: 2869
guuuauacagaauguggau

SEQ ID NO: 222857 - RNA, 19 nt, Artificial Sequence
  Description of Artificial Sequence: Synthetic oligonucleotide
  Antisense strand to SEQ ID NO: 222856
auccacauucuguauaaac

SEQ ID NO: 222858 - RNA, 19 nt, Artificial Sequence
  Description of Artificial Sequence: Synthetic oligonucleotide
  Sense strand starting at position 98 of SEQ ID NO: 2870
ccagaaucccuauggaacu

SEQ ID NO: 222859 - RNA, 19 nt, Artificial Sequence
  Description of Artificial Sequence: Synthetic oligonucleotide
  Antisense strand to SEQ ID NO: 222858
aguuccauagggauucugg

SEQ ID NO: 222860 - RNA, 19 nt, Artificial Sequence
  Description of Artificial Sequence: Synthetic oligonucleotide
  Sense strand starting at position 349 of SEQ ID NO: 2870
ucauuaggcucccuuggaa

SEQ ID NO: 222861 - RNA, 19 nt, Artificial Sequence
  Description of Artificial Sequence: Synthetic oligonucleotide
  Antisense strand to SEQ ID NO: 222860
uuccaagggagccuaauga

SEQ ID NO: 222862 - RNA, 19 nt, Artificial Sequence
  Description of Artificial Sequence: Synthetic oligonucleotide
  Sense strand starting at position 478 of SEQ ID NO: 2870
cccacuguuggguauauaa

SEQ ID NO: 222863 - RNA, 19 nt, Artificial Sequence
  Description of Artificial Sequence: Synthetic oligonucleotide
  Antisense strand to SEQ ID NO: 222862
uuauauacccaacaguggg

SEQ ID NO: 222864 - RNA, 19 nt, Artificial Sequence
  Description of Artificial Sequence: Synthetic oligonucleotide
  Sense strand starting at position 705 of SEQ ID NO: 2870
aggccauaauccuaaacga

SEQ ID NO: 222865 - RNA, 19 nt, Artificial Sequence
  Description of Artificial Sequence: Synthetic oligonucleotide
  Antisense strand to SEQ ID NO: 222864
ucguuuaggauuauggccu

SEQ ID NO: 222866 - RNA, 19 nt, Artificial Sequence
  Description of Artificial Sequence: Synthetic oligonucleotide
  Sense strand starting at position 791 of SEQ ID NO: 2870
acacuuacaagugggagua

SEQ ID NO: 222867 - RNA, 19 nt, Artificial Sequence
  Description of Artificial Sequence: Synthetic oligonucleotide
  Antisense strand to SEQ ID NO: 222866
uacucccacuuguaagugu

SEQ ID NO: 222868 - RNA, 19 nt, Artificial Sequence
  Description of Artificial Sequence: Synthetic oligonucleotide
  Sense strand starting at position 1243 of SEQ ID NO: 2870
gcaauauacccaugugacu

SEQ ID NO: 222869 - RNA, 19 nt, Artificial Sequence
  Description of Artificial Sequence: Synthetic oligonucleotide
  Antisense strand to SEQ ID NO: 222868
agucacauggguauauugc

SEQ ID NO: 222870 - RNA, 19 nt, Artificial Sequence
  Description of Artificial Sequence: Synthetic oligonucleotide
  Sense strand starting at position 1333 of SEQ ID NO: 2870
uaaaguguaucacugugga

SEQ ID NO: 222871 - RNA, 19 nt, Artificial Sequence
  Description of Artificial Sequence: Synthetic oligonucleotide
  Antisense strand to SEQ ID NO: 222870
uccacagugauacacuuua

SEQ ID NO: 222872 - RNA, 19 nt, Artificial Sequence
  Description of Artificial Sequence: Synthetic oligonucleotide
  Sense strand starting at position 1336 of SEQ ID NO: 2870
aguguaucacuguggaaag

SEQ ID NO: 222873 - RNA, 19 nt, Artificial Sequence
  Description of Artificial Sequence: Synthetic oligonucleotide
  Antisense strand to SEQ ID NO: 222872
cuuuccacagugauacacu

SEQ ID NO: 222874 - RNA, 19 nt, Artificial Sequence
  Description of Artificial Sequence: Synthetic oligonucleotide
  Sense strand starting at position 1358 of SEQ ID NO: 2870
aaacgucaaggacauguua

SEQ ID NO: 222875 - RNA, 19 nt, Artificial Sequence
  Description of Artificial Sequence: Synthetic oligonucleotide
  Antisense strand to SEQ ID NO: 222874
uaacauguccuugacguuu

SEQ ID NO: 222876 - RNA, 19 nt, Artificial Sequence
  Description of Artificial Sequence: Synthetic oligonucleotide
  Sense strand starting at position 1360 of SEQ ID NO: 2870
acgucaaggacauguuaua

SEQ ID NO: 222877 - RNA, 19 nt, Artificial Sequence
  Description of Artificial Sequence: Synthetic oligonucleotide
  Antisense strand to SEQ ID NO: 222876
uauaacauguccuugacgu

SEQ ID NO: 222878 - RNA, 19 nt, Artificial Sequence
  Description of Artificial Sequence: Synthetic oligonucleotide
  Sense strand starting at position 2228 of SEQ ID NO: 2870
guuacaaggcuuugcucau

SEQ ID NO: 222879 - RNA, 19 nt, Artificial Sequence
  Description of Artificial Sequence: Synthetic oligonucleotide
  Antisense strand to SEQ ID NO: 222878
augagcaaagccuuguaac

SEQ ID NO: 222880 - RNA, 19 nt, Artificial Sequence
  Description of Artificial Sequence: Synthetic oligonucleotide
  Sense strand starting at position 2229 of SEQ ID NO: 2870
uuacaaggcuuugcucauu

SEQ ID NO: 222881 - RNA, 19 nt, Artificial Sequence
  Description of Artificial Sequence: Synthetic oligonucleotide
  Antisense strand to SEQ ID NO: 222880
aaugagcaaagccuuguaa

SEQ ID NO: 222882 - RNA, 19 nt, Artificial Sequence
  Description of Artificial Sequence: Synthetic oligonucleotide
  Sense strand starting at position 2262 of SEQ ID NO: 2870
cugcucauuuauuggacaa

SEQ ID NO: 222883 - RNA, 19 nt, Artificial Sequence
  Description of Artificial Sequence: Synthetic oligonucleotide
  Antisense strand to SEQ ID NO: 222882
uuguccaauaaaugagcag

SEQ ID NO: 222884 - RNA, 19 nt, Artificial Sequence
  Description of Artificial Sequence: Synthetic oligonucleotide
  Sense strand starting at position 2264 of SEQ ID NO: 2870
gcucauuuauuggacaacu

SEQ ID NO: 222885 - RNA, 19 nt, Artificial Sequence
  Description of Artificial Sequence: Synthetic oligonucleotide
  Antisense strand to SEQ ID NO: 222884
aguuguccaauaaaugagc

SEQ ID NO: 222886 - RNA, 19 nt, Artificial Sequence
  Description of Artificial Sequence: Synthetic oligonucleotide
  Sense strand starting at position 2572 of SEQ ID NO: 2870
ggaagcguguugagaggaa

SEQ ID NO: 222887 - RNA, 19 nt, Artificial Sequence
  Description of Artificial Sequence: Synthetic oligonucleotide
  Antisense strand to SEQ ID NO: 222886
uuccucucaacacgcuucc

SEQ ID NO: 222888 - RNA, 19 nt, Artificial Sequence
  Description of Artificial Sequence: Synthetic oligonucleotide
  Sense strand starting at position 2576 of SEQ ID NO: 2870
gcguguugagaggaaacaa

SEQ ID NO: 222889 - RNA, 19 nt, Artificial Sequence
  Description of Artificial Sequence: Synthetic oligonucleotide
  Antisense strand to SEQ ID NO: 222888
uuguuuccucucaacacgc

SEQ ID NO: 222890 - RNA, 19 nt, Artificial Sequence
  Description of Artificial Sequence: Synthetic oligonucleotide
  Sense strand starting at position 2586 of SEQ ID NO: 2870
aggaaacaaucguuaagua

SEQ ID NO: 222891 - RNA, 19 nt, Artificial Sequence
  Description of Artificial Sequence: Synthetic oligonucleotide
  Antisense strand to SEQ ID NO: 222890
uacuuaacgauuguuuccu

SEQ ID NO: 222892 - RNA, 19 nt, Artificial Sequence
  Description of Artificial Sequence: Synthetic oligonucleotide
  Sense strand starting at position 2587 of SEQ ID NO: 2870
ggaaacaaucguuaaguac

SEQ ID NO: 222893 - RNA, 19 nt, Artificial Sequence
  Description of Artificial Sequence: Synthetic oligonucleotide
  Antisense strand to SEQ ID NO: 222892
guacuuaacgauuguuucc

SEQ ID NO: 222894 - RNA, 19 nt, Artificial Sequence
  Description of Artificial Sequence: Synthetic oligonucleotide
  Sense strand starting at position 2595 of SEQ ID NO: 2870
ucguuaaguacgggaccua

SEQ ID NO: 222895 - RNA, 19 nt, Artificial Sequence
  Description of Artificial Sequence: Synthetic oligonucleotide
  Antisense strand to SEQ ID NO: 222894
uaggucccguacuuaacga

SEQ ID NO: 222896 - RNA, 19 nt, Artificial Sequence
  Description of Artificial Sequence: Synthetic oligonucleotide
  Sense strand starting at position 2618 of SEQ ID NO: 2870
acaccaauauuguagaugu

SEQ ID NO: 222897 - RNA, 19 nt, Artificial Sequence
  Description of Artificial Sequence: Synthetic oligonucleotide
  Antisense strand to SEQ ID NO: 222896
acaucuacaauauuggugu

SEQ ID NO: 222898 - RNA, 19 nt, Artificial Sequence
  Description of Artificial Sequence: Synthetic oligonucleotide
  Sense strand starting at position 2628 of SEQ ID NO: 2870
uguagaugugagcaaagga

SEQ ID NO: 222899 - RNA, 19 nt, Artificial Sequence
  Description of Artificial Sequence: Synthetic oligonucleotide
  Antisense strand to SEQ ID NO: 222898
uccuuugcucacaucuaca

SEQ ID NO: 222900 - RNA, 19 nt, Artificial Sequence
  Description of Artificial Sequence: Synthetic oligonucleotide
  Sense strand starting at position 2722 of SEQ ID NO: 2870
auucucaagcuauggagau

SEQ ID NO: 222901 - RNA, 19 nt, Artificial Sequence
  Description of Artificial Sequence: Synthetic oligonucleotide
  Antisense strand to SEQ ID NO: 222900
aucuccauagcuugagaau

SEQ ID NO: 222902 - RNA, 19 nt, Artificial Sequence
  Description of Artificial Sequence: Synthetic oligonucleotide
  Sense strand starting at position 2744 of SEQ ID NO: 2870
guguccauuggugaccaua

SEQ ID NO: 222903 - RNA, 19 nt, Artificial Sequence
  Description of Artificial Sequence: Synthetic oligonucleotide
  Antisense strand to SEQ ID NO: 222902
uauggucaccaauggacac

SEQ ID NO: 222904 - RNA, 19 nt, Artificial Sequence
  Description of Artificial Sequence: Synthetic oligonucleotide
  Sense strand starting at position 2746 of SEQ ID NO: 2870
guccauuggugaccauaga

SEQ ID NO: 222905 - RNA, 19 nt, Artificial Sequence
  Description of Artificial Sequence: Synthetic oligonucleotide
  Antisense strand to SEQ ID NO: 222904
ucuauggucaccaauggac

SEQ ID NO: 222906 - RNA, 19 nt, Artificial Sequence
  Description of Artificial Sequence: Synthetic oligonucleotide
  Sense strand starting at position 2928 of SEQ ID NO: 2870
gcuggugaaucgcuuuaac

SEQ ID NO: 222907 - RNA, 19 nt, Artificial Sequence
  Description of Artificial Sequence: Synthetic oligonucleotide
  Antisense strand to SEQ ID NO: 222906
guuaaagcgauucaccagc

SEQ ID NO: 222908 - RNA, 19 nt, Artificial Sequence
  Description of Artificial Sequence: Synthetic oligonucleotide
  Sense strand starting at position 3046 of SEQ ID NO: 2870
ggaucaaacuucgggaaua

SEQ ID NO: 222909 - RNA, 19 nt, Artificial Sequence
  Description of Artificial Sequence: Synthetic oligonucleotide
  Antisense strand to SEQ ID NO: 222908
uauucccgaaguuugaucc

SEQ ID NO: 222910 - RNA, 19 nt, Artificial Sequence
  Description of Artificial Sequence: Synthetic oligonucleotide
  Sense strand starting at position 3070 of SEQ ID NO: 2870
uggacagaugcuugaacca

SEQ ID NO: 222911 - RNA, 19 nt, Artificial Sequence
  Description of Artificial Sequence: Synthetic oligonucleotide
  Antisense strand to SEQ ID NO: 222910
ugguucaagcaucugucca

SEQ ID NO: 222912 - RNA, 19 nt, Artificial Sequence
  Description of Artificial Sequence: Synthetic oligonucleotide
  Sense strand starting at position 3089 of SEQ ID NO: 2870
ccguaugcuccauauugaa

SEQ ID NO: 222913 - RNA, 19 nt, Artificial Sequence
  Description of Artificial Sequence: Synthetic oligonucleotide
  Antisense strand to SEQ ID NO: 222912
uucaauauggagcauacgg

SEQ ID NO: 222914 - RNA, 19 nt, Artificial Sequence
  Description of Artificial Sequence: Synthetic oligonucleotide
  Sense strand starting at position 3122 of SEQ ID NO: 2870
gcauuaaauugugccuaua

SEQ ID NO: 222915 - RNA, 19 nt, Artificial Sequence
  Description of Artificial Sequence: Synthetic oligonucleotide
  Antisense strand to SEQ ID NO: 222914
uauaggcacaauuuaaugc

SEQ ID NO: 222916 - RNA, 19 nt, Artificial Sequence
  Description of Artificial Sequence: Synthetic oligonucleotide
  Sense strand starting at position 3437 of SEQ ID NO: 2870
guugcaguagucuaagaaa

SEQ ID NO: 222917 - RNA, 19 nt, Artificial Sequence
  Description of Artificial Sequence: Synthetic oligonucleotide
  Antisense strand to SEQ ID NO: 222916
uuucuuagacuacugcaac

SEQ ID NO: 222918 - RNA, 19 nt, Artificial Sequence
  Description of Artificial Sequence: Synthetic oligonucleotide
  Sense strand starting at position 3459 of SEQ ID NO: 2870
caggguuucccuuaguaac

SEQ ID NO: 222919 - RNA, 19 nt, Artificial Sequence
  Description of Artificial Sequence: Synthetic oligonucleotide
  Antisense strand to SEQ ID NO: 222918
guuacuaagggaaacccug

SEQ ID NO: 222920 - RNA, 19 nt, Artificial Sequence
  Description of Artificial Sequence: Synthetic oligonucleotide
  Sense strand starting at position 3461 of SEQ ID NO: 2870
ggguuucccuuaguaacua

SEQ ID NO: 222921 - RNA, 19 nt, Artificial Sequence
  Description of Artificial Sequence: Synthetic oligonucleotide
  Antisense strand to SEQ ID NO: 222920
uaguuacuaagggaaaccc

SEQ ID NO: 222922 - RNA, 19 nt, Artificial Sequence
  Description of Artificial Sequence: Synthetic oligonucleotide
  Sense strand starting at position 3477 of SEQ ID NO: 2870
cuaugagcuccaugaaggu

SEQ ID NO: 222923 - RNA, 19 nt, Artificial Sequence
  Description of Artificial Sequence: Synthetic oligonucleotide
  Antisense strand to SEQ ID NO: 222922
accuucauggagcucauag

SEQ ID NO: 222924 - RNA, 19 nt, Artificial Sequence
  Description of Artificial Sequence: Synthetic oligonucleotide
  Sense strand starting at position 3534 of SEQ ID NO: 2870
gccucaaucgauguuugcu

SEQ ID NO: 222925 - RNA, 19 nt, Artificial Sequence
  Description of Artificial Sequence: Synthetic oligonucleotide
  Antisense strand to SEQ ID NO: 222924
agcaaacaucgauugaggc

SEQ ID NO: 222926 - RNA, 19 nt, Artificial Sequence
  Description of Artificial Sequence: Synthetic oligonucleotide
  Sense strand starting at position 3536 of SEQ ID NO: 2870
cucaaucgauguuugcuua

SEQ ID NO: 222927 - RNA, 19 nt, Artificial Sequence
  Description of Artificial Sequence: Synthetic oligonucleotide
  Antisense strand to SEQ ID NO: 222926
uaagcaaacaucgauugag

SEQ ID NO: 222928 - RNA, 19 nt, Artificial Sequence
  Description of Artificial Sequence: Synthetic oligonucleotide
  Sense strand starting at position 3537 of SEQ ID NO: 2870
ucaaucgauguuugcuuaa

SEQ ID NO: 222929 - RNA, 19 nt, Artificial Sequence
  Description of Artificial Sequence: Synthetic oligonucleotide
  Antisense strand to SEQ ID NO: 222928
uuaagcaaacaucgauuga

SEQ ID NO: 222930 - RNA, 19 nt, Artificial Sequence
  Description of Artificial Sequence: Synthetic oligonucleotide
  Sense strand starting at position 3539 of SEQ ID NO: 2870
aaucgauguuugcuuaaag

SEQ ID NO: 222931 - RNA, 19 nt, Artificial Sequence
  Description of Artificial Sequence: Synthetic oligonucleotide
  Antisense strand to SEQ ID NO: 222930
cuuuaagcaaacaucgauu

SEQ ID NO: 222932 - RNA, 19 nt, Artificial Sequence
  Description of Artificial Sequence: Synthetic oligonucleotide
  Sense strand starting at position 3540 of SEQ ID NO: 2870
aucgauguuugcuuaaaga

SEQ ID NO: 222933 - RNA, 19 nt, Artificial Sequence
  Description of Artificial Sequence: Synthetic oligonucleotide
  Antisense strand to SEQ ID NO: 222932
ucuuuaagcaaacaucgau

SEQ ID NO: 222934 - RNA, 19 nt, Artificial Sequence
  Description of Artificial Sequence: Synthetic oligonucleotide
  Sense strand starting at position 3644 of SEQ ID NO: 2870
uugucuuugaaauguagag

SEQ ID NO: 222935 - RNA, 19 nt, Artificial Sequence
  Description of Artificial Sequence: Synthetic oligonucleotide
  Antisense strand to SEQ ID NO: 222934
cucuacauuucaaagacaa

SEQ ID NO: 222936 - RNA, 19 nt, Artificial Sequence
  Description of Artificial Sequence: Synthetic oligonucleotide
  Sense strand starting at position 3650 of SEQ ID NO: 2870
uugaaauguagaggguaga

SEQ ID NO: 222937 - RNA, 19 nt, Artificial Sequence
  Description of Artificial Sequence: Synthetic oligonucleotide
  Antisense strand to SEQ ID NO: 222936
ucuacccucuacauuucaa

SEQ ID NO: 222938 - RNA, 19 nt, Artificial Sequence
  Description of Artificial Sequence: Synthetic oligonucleotide
  Sense strand starting at position 134 of SEQ ID NO: 2871
ggucccguuucuucucuaa

SEQ ID NO: 222939 - RNA, 19 nt, Artificial Sequence
  Description of Artificial Sequence: Synthetic oligonucleotide
  Antisense strand to SEQ ID NO: 222938
uuagagaagaaacgggacc

SEQ ID NO: 222940 - RNA, 19 nt, Artificial Sequence
  Description of Artificial Sequence: Synthetic oligonucleotide
  Sense strand starting at position 137 of SEQ ID NO: 2871
cccguuucuucucuaaggu

SEQ ID NO: 222941 - RNA, 19 nt, Artificial Sequence
  Description of Artificial Sequence: Synthetic oligonucleotide
  Antisense strand to SEQ ID NO: 222940
accuuagagaagaaacggg

SEQ ID NO: 222942 - RNA, 19 nt, Artificial Sequence
  Description of Artificial Sequence: Synthetic oligonucleotide
  Sense strand starting at position 256 of SEQ ID NO: 2871
ccgagugauuagucacaca

SEQ ID NO: 222943 - RNA, 19 nt, Artificial Sequence
  Description of Artificial Sequence: Synthetic oligonucleotide
  Antisense strand to SEQ ID NO: 222942
ugugugacuaaucacucgg

SEQ ID NO: 222944 - RNA, 19 nt, Artificial Sequence
  Description of Artificial Sequence: Synthetic oligonucleotide
  Sense strand starting at position 291 of SEQ ID NO: 2871
gggauuaagcccggagucu

SEQ ID NO: 222945 - RNA, 19 nt, Artificial Sequence
  Description of Artificial Sequence: Synthetic oligonucleotide
  Antisense strand to SEQ ID NO: 222944
agacuccgggcuuaauccc

SEQ ID NO: 222946 - RNA, 19 nt, Artificial Sequence
  Description of Artificial Sequence: Synthetic oligonucleotide
  Sense strand starting at position 292 of SEQ ID NO: 2871
ggauuaagcccggagucua

SEQ ID NO: 222947 - RNA, 19 nt, Artificial Sequence
  Description of Artificial Sequence: Synthetic oligonucleotide
  Antisense strand to SEQ ID NO: 222946
uagacuccgggcuuaaucc

SEQ ID NO: 222948 - RNA, 19 nt, Artificial Sequence
  Description of Artificial Sequence: Synthetic oligonucleotide
  Sense strand starting at position 302 of SEQ ID NO: 2871
cggagucuauuguuccagu

SEQ ID NO: 222949 - RNA, 19 nt, Artificial Sequence
  Description of Artificial Sequence: Synthetic oligonucleotide
  Antisense strand to SEQ ID NO: 222948
acuggaacaauagacuccg

SEQ ID NO: 222950 - RNA, 19 nt, Artificial Sequence
  Description of Artificial Sequence: Synthetic oligonucleotide
  Sense strand starting at position 303 of SEQ ID NO: 2871
ggagucuauuguuccaguu

SEQ ID NO: 222951 - RNA, 19 nt, Artificial Sequence
  Description of Artificial Sequence: Synthetic oligonucleotide
  Antisense strand to SEQ ID NO: 222950
aacuggaacaauagacucc

SEQ ID NO: 222952 - RNA, 19 nt, Artificial Sequence
  Description of Artificial Sequence: Synthetic oligonucleotide
  Sense strand starting at position 330 of SEQ ID NO: 2871
acgugugaccucugaguuc

SEQ ID NO: 222953 - RNA, 19 nt, Artificial Sequence
  Description of Artificial Sequence: Synthetic oligonucleotide
  Antisense strand to SEQ ID NO: 222952
gaacucagaggucacacgu

SEQ ID NO: 222954 - RNA, 19 nt, Artificial Sequence
  Description of Artificial Sequence: Synthetic oligonucleotide
  Sense strand starting at position 385 of SEQ ID NO: 2871
uaaucagauuguccaggga

SEQ ID NO: 222955 - RNA, 19 nt, Artificial Sequence
  Description of Artificial Sequence: Synthetic oligonucleotide
  Antisense strand to SEQ ID NO: 222954
ucccuggacaaucugauua

SEQ ID NO: 222956 - RNA, 19 nt, Artificial Sequence
  Description of Artificial Sequence: Synthetic oligonucleotide
  Sense strand starting at position 427 of SEQ ID NO: 2871
ucgggauaccgagagcagu

SEQ ID NO: 222957 - RNA, 19 nt, Artificial Sequence
  Description of Artificial Sequence: Synthetic oligonucleotide
  Antisense strand to SEQ ID NO: 222956
acugcucucgguaucccga

SEQ ID NO: 222958 - RNA, 19 nt, Artificial Sequence
  Description of Artificial Sequence: Synthetic oligonucleotide
  Sense strand starting at position 1042 of SEQ ID NO: 2871
cugccuuugcagggaaagu

SEQ ID NO: 222959 - RNA, 19 nt, Artificial Sequence
  Description of Artificial Sequence: Synthetic oligonucleotide
  Antisense strand to SEQ ID NO: 222958
acuuucccugcaaaggcag

SEQ ID NO: 222960 - RNA, 19 nt, Artificial Sequence
  Description of Artificial Sequence: Synthetic oligonucleotide
  Sense strand starting at position 1043 of SEQ ID NO: 2871
ugccuuugcagggaaaguu

SEQ ID NO: 222961 - RNA, 19 nt, Artificial Sequence
  Description of Artificial Sequence: Synthetic oligonucleotide
  Antisense strand to SEQ ID NO: 222960
aacuuucccugcaaaggca

SEQ ID NO: 222962 - RNA, 19 nt, Artificial Sequence
  Description of Artificial Sequence: Synthetic oligonucleotide
  Sense strand starting at position 1079 of SEQ ID NO: 2871
guaguugagguuuaauuac

SEQ ID NO: 222963 - RNA, 19 nt, Artificial Sequence
  Description of Artificial Sequence: Synthetic oligonucleotide
  Antisense strand to SEQ ID NO: 222962
guaauuaaaccucaacuac

SEQ ID NO: 222964 - RNA, 19 nt, Artificial Sequence
  Description of Artificial Sequence: Synthetic oligonucleotide
  Sense strand starting at position 1121 of SEQ ID NO: 2871
agcgcuacgcaauaaauaa

SEQ ID NO: 222965 - RNA, 19 nt, Artificial Sequence
  Description of Artificial Sequence: Synthetic oligonucleotide
  Antisense strand to SEQ ID NO: 222964
uuauuuauugcguagcgcu

SEQ ID NO: 222966 - RNA, 19 nt, Artificial Sequence
  Description of Artificial Sequence: Synthetic oligonucleotide
  Sense strand starting at position 1147 of SEQ ID NO: 2871
gacuaauacgugcacaugu

SEQ ID NO: 222967 - RNA, 19 nt, Artificial Sequence
  Description of Artificial Sequence: Synthetic oligonucleotide
  Antisense strand to SEQ ID NO: 222966
acaugugcacguauuaguc

SEQ ID NO: 222968 - RNA, 19 nt, Artificial Sequence
  Description of Artificial Sequence: Synthetic oligonucleotide
  Sense strand starting at position 1235 of SEQ ID NO: 2871
aggagacgcucugggauuu

SEQ ID NO: 222969 - RNA, 19 nt, Artificial Sequence
  Description of Artificial Sequence: Synthetic oligonucleotide
  Antisense strand to SEQ ID NO: 222968
aaaucccagagcgucuccu

SEQ ID NO: 222970 - RNA, 19 nt, Artificial Sequence
  Description of Artificial Sequence: Synthetic oligonucleotide
  Sense strand starting at position 1252 of SEQ ID NO: 2871
uuauccuuggcuggauagu

SEQ ID NO: 222971 - RNA, 19 nt, Artificial Sequence
  Description of Artificial Sequence: Synthetic oligonucleotide
  Antisense strand to SEQ ID NO: 222970
acuauccagccaaggauaa

SEQ ID NO: 222972 - RNA, 19 nt, Artificial Sequence
  Description of Artificial Sequence: Synthetic oligonucleotide
  Sense strand starting at position 1253 of SEQ ID NO: 2871
uauccuuggcuggauaguu

SEQ ID NO: 222973 - RNA, 19 nt, Artificial Sequence
  Description of Artificial Sequence: Synthetic oligonucleotide
  Antisense strand to SEQ ID NO: 222972
aacuauccagccaaggaua

SEQ ID NO: 222974 - RNA, 19 nt, Artificial Sequence
  Description of Artificial Sequence: Synthetic oligonucleotide
  Sense strand starting at position 1304 of SEQ ID NO: 2871
ugcugugacaaggaucuau

SEQ ID NO: 222975 - RNA, 19 nt, Artificial Sequence
  Description of Artificial Sequence: Synthetic oligonucleotide
  Antisense strand to SEQ ID NO: 222974
auagauccuugucacagca

SEQ ID NO: 222976 - RNA, 19 nt, Artificial Sequence
  Description of Artificial Sequence: Synthetic oligonucleotide
  Sense strand starting at position 2002 of SEQ ID NO: 2871
ugacucagcgaaggucaua

SEQ ID NO: 222977 - RNA, 19 nt, Artificial Sequence
  Description of Artificial Sequence: Synthetic oligonucleotide
  Antisense strand to SEQ ID NO: 222976
uaugaccuucgcugaguca

SEQ ID NO: 222978 - RNA, 19 nt, Artificial Sequence
  Description of Artificial Sequence: Synthetic oligonucleotide
  Sense strand starting at position 2005 of SEQ ID NO: 2871
cucagcgaaggucauaaau

SEQ ID NO: 222979 - RNA, 19 nt, Artificial Sequence
  Description of Artificial Sequence: Synthetic oligonucleotide
  Antisense strand to SEQ ID NO: 222978
auuuaugaccuucgcugag

SEQ ID NO: 222980 - RNA, 19 nt, Artificial Sequence
  Description of Artificial Sequence: Synthetic oligonucleotide
  Sense strand starting at position 2049 of SEQ ID NO: 2871
guccgcugucuugcauaau

SEQ ID NO: 222981 - RNA, 19 nt, Artificial Sequence
  Description of Artificial Sequence: Synthetic oligonucleotide
  Antisense strand to SEQ ID NO: 222980
auuaugcaagacagcggac

SEQ ID NO: 222982 - RNA, 19 nt, Artificial Sequence
  Description of Artificial Sequence: Synthetic oligonucleotide
  Sense strand starting at position 2479 of SEQ ID NO: 2871
gacagagguucuccuaaga

SEQ ID NO: 222983 - RNA, 19 nt, Artificial Sequence
  Description of Artificial Sequence: Synthetic oligonucleotide
  Antisense strand to SEQ ID NO: 222982
ucuuaggagaaccucuguc

SEQ ID NO: 222984 - RNA, 19 nt, Artificial Sequence
  Description of Artificial Sequence: Synthetic oligonucleotide
  Sense strand starting at position 2681 of SEQ ID NO: 2871
gcugcacgggucugauuaa

SEQ ID NO: 222985 - RNA, 19 nt, Artificial Sequence
  Description of Artificial Sequence: Synthetic oligonucleotide
  Antisense strand to SEQ ID NO: 222984
uuaaucagacccgugcagc

SEQ ID NO: 222986 - RNA, 19 nt, Artificial Sequence
  Description of Artificial Sequence: Synthetic oligonucleotide
  Sense strand starting at position 2962 of SEQ ID NO: 2871
gcgcgacuuccagaguuua

SEQ ID NO: 222987 - RNA, 19 nt, Artificial Sequence
  Description of Artificial Sequence: Synthetic oligonucleotide
  Antisense strand to SEQ ID NO: 222986
uaaacucuggaagucgcgc

SEQ ID NO: 222988 - RNA, 19 nt, Artificial Sequence
  Description of Artificial Sequence: Synthetic oligonucleotide
  Sense strand starting at position 3033 of SEQ ID NO: 2871
ucccuuaucuauguguaga

SEQ ID NO: 222989 - RNA, 19 nt, Artificial Sequence
  Description of Artificial Sequence: Synthetic oligonucleotide
  Antisense strand to SEQ ID NO: 222988
ucuacacauagauaaggga

SEQ ID NO: 222990 - RNA, 19 nt, Artificial Sequence
  Description of Artificial Sequence: Synthetic oligonucleotide
  Sense strand starting at position 3044 of SEQ ID NO: 2871
uguguagacgucucucguu

SEQ ID NO: 222991 - RNA, 19 nt, Artificial Sequence
  Description of Artificial Sequence: Synthetic oligonucleotide
  Antisense strand to SEQ ID NO: 222990
aacgagagacgucuacaca

SEQ ID NO: 222992 - RNA, 19 nt, Artificial Sequence
  Description of Artificial Sequence: Synthetic oligonucleotide
  Sense strand starting at position 3311 of SEQ ID NO: 2871
ccaaauuacuuuguuaggu

SEQ ID NO: 222993 - RNA, 19 nt, Artificial Sequence
  Description of Artificial Sequence: Synthetic oligonucleotide
  Antisense strand to SEQ ID NO: 222992
accuaacaaaguaauuugg

SEQ ID NO: 222994 - RNA, 19 nt, Artificial Sequence
  Description of Artificial Sequence: Synthetic oligonucleotide
  Sense strand starting at position 3328 of SEQ ID NO: 2871
guaauuagaaaguguugau

SEQ ID NO: 222995 - RNA, 19 nt, Artificial Sequence
  Description of Artificial Sequence: Synthetic oligonucleotide
  Antisense strand to SEQ ID NO: 222994
aucaacacuuucuaauuac

SEQ ID NO: 222996 - RNA, 19 nt, Artificial Sequence
  Description of Artificial Sequence: Synthetic oligonucleotide
  Sense strand starting at position 3358 of SEQ ID NO: 2871
ucauaauuuagcgguguga

SEQ ID NO: 222997 - RNA, 19 nt, Artificial Sequence
  Description of Artificial Sequence: Synthetic oligonucleotide
  Antisense strand to SEQ ID NO: 222996
ucacaccgcuaaauuauga

SEQ ID NO: 222998 - RNA, 19 nt, Artificial Sequence
  Description of Artificial Sequence: Synthetic oligonucleotide
  Sense strand starting at position 3442 of SEQ ID NO: 2871
auuaaaugguagucucaag

SEQ ID NO: 222999 - RNA, 19 nt, Artificial Sequence
  Description of Artificial Sequence: Synthetic oligonucleotide
  Antisense strand to SEQ ID NO: 222998
cuugagacuaccauuuaau

SEQ ID NO: 223000 - RNA, 19 nt, Artificial Sequence
  Description of Artificial Sequence: Synthetic oligonucleotide
  Sense strand starting at position 3490 of SEQ ID NO: 2871
uuagcauaacacugauguu

SEQ ID NO: 223001 - RNA, 19 nt, Artificial Sequence
  Description of Artificial Sequence: Synthetic oligonucleotide
  Antisense strand to SEQ ID NO: 223000
aacaucaguguuaugcuaa

SEQ ID NO: 223002 - RNA, 19 nt, Artificial Sequence
  Description of Artificial Sequence: Synthetic oligonucleotide
  Sense strand starting at position 3519 of SEQ ID NO: 2871
acgcauaauuagccauaua

SEQ ID NO: 223003 - RNA, 19 nt, Artificial Sequence
  Description of Artificial Sequence: Synthetic oligonucleotide
  Antisense strand to SEQ ID NO: 223002
uauauggcuaauuaugcgu

SEQ ID NO: 223004 - RNA, 19 nt, Artificial Sequence
  Description of Artificial Sequence: Synthetic oligonucleotide
  Sense strand starting at position 3583 of SEQ ID NO: 2871
gggauuugaucuggccuga

SEQ ID NO: 223005 - RNA, 19 nt, Artificial Sequence
  Description of Artificial Sequence: Synthetic oligonucleotide
  Antisense strand to SEQ ID NO: 223004
ucaggccagaucaaauccc

SEQ ID NO: 223006 - RNA, 19 nt, Artificial Sequence
  Description of Artificial Sequence: Synthetic oligonucleotide
  Sense strand starting at position 3653 of SEQ ID NO: 2871
aggacaaaccucuguaauc

SEQ ID NO: 223007 - RNA, 19 nt, Artificial Sequence
  Description of Artificial Sequence: Synthetic oligonucleotide
  Antisense strand to SEQ ID NO: 223006
gauuacagagguuuguccu

SEQ ID NO: 223008 - RNA, 19 nt, Artificial Sequence
  Description of Artificial Sequence: Synthetic oligonucleotide
  Sense strand starting at position 3654 of SEQ ID NO: 2871
ggacaaaccucuguaauca

SEQ ID NO: 223009 - RNA, 19 nt, Artificial Sequence
  Description of Artificial Sequence: Synthetic oligonucleotide
  Antisense strand to SEQ ID NO: 223008
ugauuacagagguuugucc

SEQ ID NO: 223010 - RNA, 19 nt, Artificial Sequence
  Description of Artificial Sequence: Synthetic oligonucleotide
  Sense strand starting at position 3733 of SEQ ID NO: 2871
gcugucguuacagauauua

SEQ ID NO: 223011 - RNA, 19 nt, Artificial Sequence
  Description of Artificial Sequence: Synthetic oligonucleotide
  Antisense strand to SEQ ID NO: 223010
uaauaucuguaacgacagc

SEQ ID NO: 223012 - RNA, 19 nt, Artificial Sequence
  Description of Artificial Sequence: Synthetic oligonucleotide
  Sense strand starting at position 3735 of SEQ ID NO: 2871
ugucguuacagauauuagu

SEQ ID NO: 223013 - RNA, 19 nt, Artificial Sequence
  Description of Artificial Sequence: Synthetic oligonucleotide
  Antisense strand to SEQ ID NO: 223012
acuaauaucuguaacgaca

SEQ ID NO: 223014 - RNA, 19 nt, Artificial Sequence
  Description of Artificial Sequence: Synthetic oligonucleotide
  Sense strand starting at position 3808 of SEQ ID NO: 2871
auuccucuccuuugguuua

SEQ ID NO: 223015 - RNA, 19 nt, Artificial Sequence
  Description of Artificial Sequence: Synthetic oligonucleotide
  Antisense strand to SEQ ID NO: 223014
uaaaccaaaggagaggaau

SEQ ID NO: 223016 - RNA, 19 nt, Artificial Sequence
  Description of Artificial Sequence: Synthetic oligonucleotide
  Sense strand starting at position 3858 of SEQ ID NO: 2871
ggcagagugguuggagcaa

SEQ ID NO: 223017 - RNA, 19 nt, Artificial Sequence
  Description of Artificial Sequence: Synthetic oligonucleotide
  Antisense strand to SEQ ID NO: 223016
uugcuccaaccacucugcc

SEQ ID NO: 223018 - RNA, 19 nt, Artificial Sequence
  Description of Artificial Sequence: Synthetic oligonucleotide
  Sense strand starting at position 211 of SEQ ID NO: 2872
cugagcauuaguggaggaa

SEQ ID NO: 223019 - RNA, 19 nt, Artificial Sequence
  Description of Artificial Sequence: Synthetic oligonucleotide
  Antisense strand to SEQ ID NO: 223018
uuccuccacuaaugcucag

SEQ ID NO: 223020 - RNA, 19 nt, Artificial Sequence
  Description of Artificial Sequence: Synthetic oligonucleotide
  Sense strand starting at position 406 of SEQ ID NO: 2872
gguguacgugcacugugau

SEQ ID NO: 223021 - RNA, 19 nt, Artificial Sequence
  Description of Artificial Sequence: Synthetic oligonucleotide
  Antisense strand to SEQ ID NO: 223020
aucacagugcacguacacc

SEQ ID NO: 223022 - RNA, 19 nt, Artificial Sequence
  Description of Artificial Sequence: Synthetic oligonucleotide
  Sense strand starting at position 888 of SEQ ID NO: 2872
ccuccuucucugcaacgau

SEQ ID NO: 223023 - RNA, 19 nt, Artificial Sequence
  Description of Artificial Sequence: Synthetic oligonucleotide
  Antisense strand to SEQ ID NO: 223022
aucguugcagagaaggagg

SEQ ID NO: 223024 - RNA, 19 nt, Artificial Sequence
  Description of Artificial Sequence: Synthetic oligonucleotide
  Sense strand starting at position 891 of SEQ ID NO: 2872
ccuucucugcaacgauaaa

SEQ ID NO: 223025 - RNA, 19 nt, Artificial Sequence
  Description of Artificial Sequence: Synthetic oligonucleotide
  Antisense strand to SEQ ID NO: 223024
uuuaucguugcagagaagg

SEQ ID NO: 223026 - RNA, 19 nt, Artificial Sequence
  Description of Artificial Sequence: Synthetic oligonucleotide
  Sense strand starting at position 902 of SEQ ID NO: 2872
acgauaaagaaucguaaga

SEQ ID NO: 223027 - RNA, 19 nt, Artificial Sequence
  Description of Artificial Sequence: Synthetic oligonucleotide
  Antisense strand to SEQ ID NO: 223026
ucuuacgauucuuuaucgu

SEQ ID NO: 223028 - RNA, 19 nt, Artificial Sequence
  Description of Artificial Sequence: Synthetic oligonucleotide
  Sense strand starting at position 975 of SEQ ID NO: 2872
gggacuuggcuugagcaaa

SEQ ID NO: 223029 - RNA, 19 nt, Artificial Sequence
  Description of Artificial Sequence: Synthetic oligonucleotide
  Antisense strand to SEQ ID NO: 223028
uuugcucaagccaaguccc

SEQ ID NO: 223030 - RNA, 19 nt, Artificial Sequence
  Description of Artificial Sequence: Synthetic oligonucleotide
  Sense strand starting at position 1770 of SEQ ID NO: 2872
ugucaaagacuccagucau

SEQ ID NO: 223031 - RNA, 19 nt, Artificial Sequence
  Description of Artificial Sequence: Synthetic oligonucleotide
  Antisense strand to SEQ ID NO: 223030
augacuggagucuuugaca

SEQ ID NO: 223032 - RNA, 19 nt, Artificial Sequence
  Description of Artificial Sequence: Synthetic oligonucleotide
  Sense strand starting at position 1782 of SEQ ID NO: 2872
cagucauccuggcccgaga

SEQ ID NO: 223033 - RNA, 19 nt, Artificial Sequence
  Description of Artificial Sequence: Synthetic oligonucleotide
  Antisense strand to SEQ ID NO: 223032
ucucgggccaggaugacug

SEQ ID NO: 223034 - RNA, 19 nt, Artificial Sequence
  Description of Artificial Sequence: Synthetic oligonucleotide
  Sense strand starting at position 1868 of SEQ ID NO: 2872
uccagcagccaauguaauu

SEQ ID NO: 223035 - RNA, 19 nt, Artificial Sequence
  Description of Artificial Sequence: Synthetic oligonucleotide
  Antisense strand to SEQ ID NO: 223034
aauuacauuggcugcugga

SEQ ID NO: 223036 - RNA, 19 nt, Artificial Sequence
  Description of Artificial Sequence: Synthetic oligonucleotide
  Sense strand starting at position 2162 of SEQ ID NO: 2872
uccugaagugugggcauuu

SEQ ID NO: 223037 - RNA, 19 nt, Artificial Sequence
  Description of Artificial Sequence: Synthetic oligonucleotide
  Antisense strand to SEQ ID NO: 223036
aaaugcccacacuucagga

SEQ ID NO: 223038 - RNA, 19 nt, Artificial Sequence
  Description of Artificial Sequence: Synthetic oligonucleotide
  Sense strand starting at position 2464 of SEQ ID NO: 2872
ucucccauucugugagcaa

SEQ ID NO: 223039 - RNA, 19 nt, Artificial Sequence
  Description of Artificial Sequence: Synthetic oligonucleotide
  Antisense strand to SEQ ID NO: 223038
uugcucacagaaugggaga

SEQ ID NO: 223040 - RNA, 19 nt, Artificial Sequence
  Description of Artificial Sequence: Synthetic oligonucleotide
  Sense strand starting at position 2506 of SEQ ID NO: 2872
uuucauguccgaggucagu

SEQ ID NO: 223041 - RNA, 19 nt, Artificial Sequence
  Description of Artificial Sequence: Synthetic oligonucleotide
  Antisense strand to SEQ ID NO: 223040
acugaccucggacaugaaa

SEQ ID NO: 223042 - RNA, 19 nt, Artificial Sequence
  Description of Artificial Sequence: Synthetic oligonucleotide
  Sense strand starting at position 2662 of SEQ ID NO: 2872
cguguaaugcucgcuucuu

SEQ ID NO: 223043 - RNA, 19 nt, Artificial Sequence
  Description of Artificial Sequence: Synthetic oligonucleotide
  Antisense strand to SEQ ID NO: 223042
aagaagcgagcauuacacg

SEQ ID NO: 223044 - RNA, 19 nt, Artificial Sequence
  Description of Artificial Sequence: Synthetic oligonucleotide
  Sense strand starting at position 2681 of SEQ ID NO: 2872
aaccaauccgcagggauau

SEQ ID NO: 223045 - RNA, 19 nt, Artificial Sequence
  Description of Artificial Sequence: Synthetic oligonucleotide
  Antisense strand to SEQ ID NO: 223044
auaucccugcggauugguu

SEQ ID NO: 223046 - RNA, 19 nt, Artificial Sequence
  Description of Artificial Sequence: Synthetic oligonucleotide
  Sense strand starting at position 2682 of SEQ ID NO: 2872
accaauccgcagggauauu

SEQ ID NO: 223047 - RNA, 19 nt, Artificial Sequence
  Description of Artificial Sequence: Synthetic oligonucleotide
  Antisense strand to SEQ ID NO: 223046
aauaucccugcggauuggu

SEQ ID NO: 223048 - RNA, 19 nt, Artificial Sequence
  Description of Artificial Sequence: Synthetic oligonucleotide
  Sense strand starting at position 2683 of SEQ ID NO: 2872
ccaauccgcagggauauua

SEQ ID NO: 223049 - RNA, 19 nt, Artificial Sequence
  Description of Artificial Sequence: Synthetic oligonucleotide
  Antisense strand to SEQ ID NO: 223048
uaauaucccugcggauugg

SEQ ID NO: 223050 - RNA, 19 nt, Artificial Sequence
  Description of Artificial Sequence: Synthetic oligonucleotide
  Sense strand starting at position 2691 of SEQ ID NO: 2872
cagggauauuaggacaauu

SEQ ID NO: 223051 - RNA, 19 nt, Artificial Sequence
  Description of Artificial Sequence: Synthetic oligonucleotide
  Antisense strand to SEQ ID NO: 223050
aauuguccuaauaucccug

SEQ ID NO: 223052 - RNA, 19 nt, Artificial Sequence
  Description of Artificial Sequence: Synthetic oligonucleotide
  Sense strand starting at position 2716 of SEQ ID NO: 2872
auaauauugaaacggguuu

SEQ ID NO: 223053 - RNA, 19 nt, Artificial Sequence
  Description of Artificial Sequence: Synthetic oligonucleotide
  Antisense strand to SEQ ID NO: 223052
aaacccguuucaauauuau

SEQ ID NO: 223054 - RNA, 19 nt, Artificial Sequence
  Description of Artificial Sequence: Synthetic oligonucleotide
  Sense strand starting at position 2770 of SEQ ID NO: 2872
aagguauuauugcuaauag

SEQ ID NO: 223055 - RNA, 19 nt, Artificial Sequence
  Description of Artificial Sequence: Synthetic oligonucleotide
  Antisense strand to SEQ ID NO: 223054
cuauuagcaauaauaccuu

SEQ ID NO: 223056 - RNA, 19 nt, Artificial Sequence
  Description of Artificial Sequence: Synthetic oligonucleotide
  Sense strand starting at position 2827 of SEQ ID NO: 2872
gcgagacucugaguaauua

SEQ ID NO: 223057 - RNA, 19 nt, Artificial Sequence
  Description of Artificial Sequence: Synthetic oligonucleotide
  Antisense strand to SEQ ID NO: 223056
uaauuacucagagucucgc

SEQ ID NO: 223058 - RNA, 19 nt, Artificial Sequence
  Description of Artificial Sequence: Synthetic oligonucleotide
  Sense strand starting at position 2828 of SEQ ID NO: 2872
cgagacucugaguaauuau

SEQ ID NO: 223059 - RNA, 19 nt, Artificial Sequence
  Description of Artificial Sequence: Synthetic oligonucleotide
  Antisense strand to SEQ ID NO: 223058
auaauuacucagagucucg

SEQ ID NO: 223060 - RNA, 19 nt, Artificial Sequence
  Description of Artificial Sequence: Synthetic oligonucleotide
  Sense strand starting at position 2848 of SEQ ID NO: 2872
uacguuugauaaguaaaug

SEQ ID NO: 223061 - RNA, 19 nt, Artificial Sequence
  Description of Artificial Sequence: Synthetic oligonucleotide
  Antisense strand to SEQ ID NO: 223060
cauuuacuuaucaaacgua

SEQ ID NO: 223062 - RNA, 19 nt, Artificial Sequence
  Description of Artificial Sequence: Synthetic oligonucleotide
  Sense strand starting at position 2903 of SEQ ID NO: 2872
gguggaaagguucaccagu

SEQ ID NO: 223063 - RNA, 19 nt, Artificial Sequence
  Description of Artificial Sequence: Synthetic oligonucleotide
  Antisense strand to SEQ ID NO: 223062
acuggugaaccuuuccacc

SEQ ID NO: 223064 - RNA, 19 nt, Artificial Sequence
  Description of Artificial Sequence: Synthetic oligonucleotide
  Sense strand starting at position 2962 of SEQ ID NO: 2872
gauaauaggugagauuaua

SEQ ID NO: 223065 - RNA, 19 nt, Artificial Sequence
  Description of Artificial Sequence: Synthetic oligonucleotide
  Antisense strand to SEQ ID NO: 223064
uauaaucucaccuauuauc

SEQ ID NO: 223066 - RNA, 19 nt, Artificial Sequence
  Description of Artificial Sequence: Synthetic oligonucleotide
  Sense strand starting at position 2987 of SEQ ID NO: 2872
ucaaguagauacuagauuu

SEQ ID NO: 223067 - RNA, 19 nt, Artificial Sequence
  Description of Artificial Sequence: Synthetic oligonucleotide
  Antisense strand to SEQ ID NO: 223066
aaaucuaguaucuacuuga

SEQ ID NO: 223068 - RNA, 19 nt, Artificial Sequence
  Description of Artificial Sequence: Synthetic oligonucleotide
  Sense strand starting at position 3043 of SEQ ID NO: 2872
uuuaucugguuuguugaau

SEQ ID NO: 223069 - RNA, 19 nt, Artificial Sequence
  Description of Artificial Sequence: Synthetic oligonucleotide
  Antisense strand to SEQ ID NO: 223068
auucaacaaaccagauaaa

SEQ ID NO: 223070 - RNA, 19 nt, Artificial Sequence
  Description of Artificial Sequence: Synthetic oligonucleotide
  Sense strand starting at position 3044 of SEQ ID NO: 2872
uuaucugguuuguugaauu

SEQ ID NO: 223071 - RNA, 19 nt, Artificial Sequence
  Description of Artificial Sequence: Synthetic oligonucleotide
  Antisense strand to SEQ ID NO: 223070
aauucaacaaaccagauaa

SEQ ID NO: 223072 - RNA, 19 nt, Artificial Sequence
  Description of Artificial Sequence: Synthetic oligonucleotide
  Sense strand starting at position 3158 of SEQ ID NO: 2872
gugacuuccucugucucua

SEQ ID NO: 223073 - RNA, 19 nt, Artificial Sequence
  Description of Artificial Sequence: Synthetic oligonucleotide
  Antisense strand to SEQ ID NO: 223072
uagagacagaggaagucac

SEQ ID NO: 223074 - RNA, 19 nt, Artificial Sequence
  Description of Artificial Sequence: Synthetic oligonucleotide
  Sense strand starting at position 3171 of SEQ ID NO: 2872
ucucuauaaccuuguaguu

SEQ ID NO: 223075 - RNA, 19 nt, Artificial Sequence
  Description of Artificial Sequence: Synthetic oligonucleotide
  Antisense strand to SEQ ID NO: 223074
aacuacaagguuauagaga

SEQ ID NO: 223076 - RNA, 19 nt, Artificial Sequence
  Description of Artificial Sequence: Synthetic oligonucleotide
  Sense strand starting at position 3433 of SEQ ID NO: 2872
cauaacaugucgcugaaag

SEQ ID NO: 223077 - RNA, 19 nt, Artificial Sequence
  Description of Artificial Sequence: Synthetic oligonucleotide
  Antisense strand to SEQ ID NO: 223076
cuuucagcgacauguuaug

SEQ ID NO: 223078 - RNA, 19 nt, Artificial Sequence
  Description of Artificial Sequence: Synthetic oligonucleotide
  Sense strand starting at position 3434 of SEQ ID NO: 2872
auaacaugucgcugaaaga

SEQ ID NO: 223079 - RNA, 19 nt, Artificial Sequence
  Description of Artificial Sequence: Synthetic oligonucleotide
  Antisense strand to SEQ ID NO: 223078
ucuuucagcgacauguuau

SEQ ID NO: 223080 - RNA, 19 nt, Artificial Sequence
  Description of Artificial Sequence: Synthetic oligonucleotide
  Sense strand starting at position 3435 of SEQ ID NO: 2872
uaacaugucgcugaaagaa

SEQ ID NO: 223081 - RNA, 19 nt, Artificial Sequence
  Description of Artificial Sequence: Synthetic oligonucleotide
  Antisense strand to SEQ ID NO: 223080
uucuuucagcgacauguua

SEQ ID NO: 223082 - RNA, 19 nt, Artificial Sequence
  Description of Artificial Sequence: Synthetic oligonucleotide
  Sense strand starting at position 3529 of SEQ ID NO: 2872
aaagcaaguguguaauuaa

SEQ ID NO: 223083 - RNA, 19 nt, Artificial Sequence
  Description of Artificial Sequence: Synthetic oligonucleotide
  Antisense strand to SEQ ID NO: 223082
uuaauuacacacuugcuuu

SEQ ID NO: 223084 - RNA, 19 nt, Artificial Sequence
  Description of Artificial Sequence: Synthetic oligonucleotide
  Sense strand starting at position 3566 of SEQ ID NO: 2872
gagaaauaaugagauaggu

SEQ ID NO: 223085 - RNA, 19 nt, Artificial Sequence
  Description of Artificial Sequence: Synthetic oligonucleotide
  Antisense strand to SEQ ID NO: 223084
accuaucucauuauuucuc

SEQ ID NO: 223086 - RNA, 19 nt, Artificial Sequence
  Description of Artificial Sequence: Synthetic oligonucleotide
  Sense strand starting at position 3582 of SEQ ID NO: 2872
gguaaugcgccuuuaaguc

SEQ ID NO: 223087 - RNA, 19 nt, Artificial Sequence
  Description of Artificial Sequence: Synthetic oligonucleotide
  Antisense strand to SEQ ID NO: 223086
gacuuaaaggcgcauuacc

SEQ ID NO: 223088 - RNA, 19 nt, Artificial Sequence
  Description of Artificial Sequence: Synthetic oligonucleotide
  Sense strand starting at position 3592 of SEQ ID NO: 2872
cuuuaagucuaccuggauu

SEQ ID NO: 223089 - RNA, 19 nt, Artificial Sequence
  Description of Artificial Sequence: Synthetic oligonucleotide
  Antisense strand to SEQ ID NO: 223088
aauccagguagacuuaaag

SEQ ID NO: 223090 - RNA, 19 nt, Artificial Sequence
  Description of Artificial Sequence: Synthetic oligonucleotide
  Sense strand starting at position 3605 of SEQ ID NO: 2872
uggauuuaguucccagcuu

SEQ ID NO: 223091 - RNA, 19 nt, Artificial Sequence
  Description of Artificial Sequence: Synthetic oligonucleotide
  Antisense strand to SEQ ID NO: 223090
aagcugggaacuaaaucca

SEQ ID NO: 223092 - RNA, 19 nt, Artificial Sequence
  Description of Artificial Sequence: Synthetic oligonucleotide
  Sense strand starting at position 3606 of SEQ ID NO: 2872
ggauuuaguucccagcuuu

SEQ ID NO: 223093 - RNA, 19 nt, Artificial Sequence
  Description of Artificial Sequence: Synthetic oligonucleotide
  Antisense strand to SEQ ID NO: 223092
aaagcugggaacuaaaucc

SEQ ID NO: 223094 - RNA, 19 nt, Artificial Sequence
  Description of Artificial Sequence: Synthetic oligonucleotide
  Sense strand starting at position 3662 of SEQ ID NO: 2872
gcuuaugagaaacguugga

SEQ ID NO: 223095 - RNA, 19 nt, Artificial Sequence
  Description of Artificial Sequence: Synthetic oligonucleotide
  Antisense strand to SEQ ID NO: 223094
uccaacguuucucauaagc

SEQ ID NO: 223096 - RNA, 19 nt, Artificial Sequence
  Description of Artificial Sequence: Synthetic oligonucleotide
  Sense strand starting at position 3769 of SEQ ID NO: 2872
uugaaacaugauugccuuu

SEQ ID NO: 223097 - RNA, 19 nt, Artificial Sequence
  Description of Artificial Sequence: Synthetic oligonucleotide
  Antisense strand to SEQ ID NO: 223096
aaaggcaaucauguuucaa

SEQ ID NO: 223098 - RNA, 19 nt, Artificial Sequence
  Description of Artificial Sequence: Synthetic oligonucleotide
  Sense strand starting at position 22 of SEQ ID NO: 2873
aaaggcauguacuuugaaa

SEQ ID NO: 223099 - RNA, 19 nt, Artificial Sequence
  Description of Artificial Sequence: Synthetic oligonucleotide
  Antisense strand to SEQ ID NO: 223098
uuucaaaguacaugccuuu

SEQ ID NO: 223100 - RNA, 19 nt, Artificial Sequence
  Description of Artificial Sequence: Synthetic oligonucleotide
  Sense strand starting at position 74 of SEQ ID NO: 2873
cuaaacuucucaguguuaa

SEQ ID NO: 223101 - RNA, 19 nt, Artificial Sequence
  Description of Artificial Sequence: Synthetic oligonucleotide
  Antisense strand to SEQ ID NO: 223100
uuaacacugagaaguuuag

SEQ ID NO: 223102 - RNA, 19 nt, Artificial Sequence
  Description of Artificial Sequence: Synthetic oligonucleotide
  Sense strand starting at position 88 of SEQ ID NO: 2873
guuaaaugguacccuaaua

SEQ ID NO: 223103 - RNA, 19 nt, Artificial Sequence
  Description of Artificial Sequence: Synthetic oligonucleotide
  Antisense strand to SEQ ID NO: 223102
uauuaggguaccauuuaac

SEQ ID NO: 223104 - RNA, 19 nt, Artificial Sequence
  Description of Artificial Sequence: Synthetic oligonucleotide
  Sense strand starting at position 140 of SEQ ID NO: 2873
aucuguauuguacauaauc

SEQ ID NO: 223105 - RNA, 19 nt, Artificial Sequence
  Description of Artificial Sequence: Synthetic oligonucleotide
  Antisense strand to SEQ ID NO: 223104
gauuauguacaauacagau

SEQ ID NO: 223106 - RNA, 19 nt, Artificial Sequence
  Description of Artificial Sequence: Synthetic oligonucleotide
  Sense strand starting at position 163 of SEQ ID NO: 2873
agaggacuuaucugccuga

SEQ ID NO: 223107 - RNA, 19 nt, Artificial Sequence
  Description of Artificial Sequence: Synthetic oligonucleotide
  Antisense strand to SEQ ID NO: 223106
ucaggcagauaaguccucu

SEQ ID NO: 223108 - RNA, 19 nt, Artificial Sequence
  Description of Artificial Sequence: Synthetic oligonucleotide
  Sense strand starting at position 164 of SEQ ID NO: 2873
gaggacuuaucugccugaa

SEQ ID NO: 223109 - RNA, 19 nt, Artificial Sequence
  Description of Artificial Sequence: Synthetic oligonucleotide
  Antisense strand to SEQ ID NO: 223108
uucaggcagauaaguccuc

SEQ ID NO: 223110 - RNA, 19 nt, Artificial Sequence
  Description of Artificial Sequence: Synthetic oligonucleotide
  Sense strand starting at position 775 of SEQ ID NO: 2873
cccagucuucccgaacuga

SEQ ID NO: 223111 - RNA, 19 nt, Artificial Sequence
  Description of Artificial Sequence: Synthetic oligonucleotide
  Antisense strand to SEQ ID NO: 223110
ucaguucgggaagacuggg

SEQ ID NO: 223112 - RNA, 19 nt, Artificial Sequence
  Description of Artificial Sequence: Synthetic oligonucleotide
  Sense strand starting at position 925 of SEQ ID NO: 2873
agaccacacuggucuagau

SEQ ID NO: 223113 - RNA, 19 nt, Artificial Sequence
  Description of Artificial Sequence: Synthetic oligonucleotide
  Antisense strand to SEQ ID NO: 223112
aucuagaccaguguggucu

SEQ ID NO: 223114 - RNA, 19 nt, Artificial Sequence
  Description of Artificial Sequence: Synthetic oligonucleotide
  Sense strand starting at position 969 of SEQ ID NO: 2873
uaguauugagaucaauguu

SEQ ID NO: 223115 - RNA, 19 nt, Artificial Sequence
  Description of Artificial Sequence: Synthetic oligonucleotide
  Antisense strand to SEQ ID NO: 223114
aacauugaucucaauacua

SEQ ID NO: 223116 - RNA, 19 nt, Artificial Sequence
  Description of Artificial Sequence: Synthetic oligonucleotide
  Sense strand starting at position 975 of SEQ ID NO: 2873
ugagaucaauguuucucau

SEQ ID NO: 223117 - RNA, 19 nt, Artificial Sequence
  Description of Artificial Sequence: Synthetic oligonucleotide
  Antisense strand to SEQ ID NO: 223116
augagaaacauugaucuca

SEQ ID NO: 223118 - RNA, 19 nt, Artificial Sequence
  Description of Artificial Sequence: Synthetic oligonucleotide
  Sense strand starting at position 1051 of SEQ ID NO: 2873
caguauagguacucaagaa

SEQ ID NO: 223119 - RNA, 19 nt, Artificial Sequence
  Description of Artificial Sequence: Synthetic oligonucleotide
  Antisense strand to SEQ ID NO: 223118
uucuugaguaccuauacug

SEQ ID NO: 223120 - RNA, 19 nt, Artificial Sequence
  Description of Artificial Sequence: Synthetic oligonucleotide
  Sense strand starting at position 1392 of SEQ ID NO: 2873
agagcuuuguaugcaauuu

SEQ ID NO: 223121 - RNA, 19 nt, Artificial Sequence
  Description of Artificial Sequence: Synthetic oligonucleotide
  Antisense strand to SEQ ID NO: 223120
aaauugcauacaaagcucu

SEQ ID NO: 223122 - RNA, 19 nt, Artificial Sequence
  Description of Artificial Sequence: Synthetic oligonucleotide
  Sense strand starting at position 1583 of SEQ ID NO: 2873
auaugagcacauugcaauu

SEQ ID NO: 223123 - RNA, 19 nt, Artificial Sequence
  Description of Artificial Sequence: Synthetic oligonucleotide
  Antisense strand to SEQ ID NO: 223122
aauugcaaugugcucauau

SEQ ID NO: 223124 - RNA, 19 nt, Artificial Sequence
  Description of Artificial Sequence: Synthetic oligonucleotide
  Sense strand starting at position 1617 of SEQ ID NO: 2873
aggucuaaagauuaccgua

SEQ ID NO: 223125 - RNA, 19 nt, Artificial Sequence
  Description of Artificial Sequence: Synthetic oligonucleotide
  Antisense strand to SEQ ID NO: 223124
uacgguaaucuuuagaccu

SEQ ID NO: 223126 - RNA, 19 nt, Artificial Sequence
  Description of Artificial Sequence: Synthetic oligonucleotide
  Sense strand starting at position 1741 of SEQ ID NO: 2873
gcagacaaucacugaaaug

SEQ ID NO: 223127 - RNA, 19 nt, Artificial Sequence
  Description of Artificial Sequence: Synthetic oligonucleotide
  Antisense strand to SEQ ID NO: 223126
cauuucagugauugucugc

SEQ ID NO: 223128 - RNA, 19 nt, Artificial Sequence
  Description of Artificial Sequence: Synthetic oligonucleotide
  Sense strand starting at position 1753 of SEQ ID NO: 2873
ugaaaugccuuuccauuga

SEQ ID NO: 223129 - RNA, 19 nt, Artificial Sequence
  Description of Artificial Sequence: Synthetic oligonucleotide
  Antisense strand to SEQ ID NO: 223128
ucaauggaaaggcauuuca

SEQ ID NO: 223130 - RNA, 19 nt, Artificial Sequence
  Description of Artificial Sequence: Synthetic oligonucleotide
  Sense strand starting at position 2199 of SEQ ID NO: 2873
gccaaaggaggugguuaau

SEQ ID NO: 223131 - RNA, 19 nt, Artificial Sequence
  Description of Artificial Sequence: Synthetic oligonucleotide
  Antisense strand to SEQ ID NO: 223130
auuaaccaccuccuuuggc

SEQ ID NO: 223132 - RNA, 19 nt, Artificial Sequence
  Description of Artificial Sequence: Synthetic oligonucleotide
  Sense strand starting at position 2297 of SEQ ID NO: 2873
aggcguaagacugacuuga

SEQ ID NO: 223133 - RNA, 19 nt, Artificial Sequence
  Description of Artificial Sequence: Synthetic oligonucleotide
  Antisense strand to SEQ ID NO: 223132
ucaagucagucuuacgccu

SEQ ID NO: 223134 - RNA, 19 nt, Artificial Sequence
  Description of Artificial Sequence: Synthetic oligonucleotide
  Sense strand starting at position 2329 of SEQ ID NO: 2873
agaaauuuauccgaaagag

SEQ ID NO: 223135 - RNA, 19 nt, Artificial Sequence
  Description of Artificial Sequence: Synthetic oligonucleotide
  Antisense strand to SEQ ID NO: 223134
cucuuucggauaaauuucu

SEQ ID NO: 223136 - RNA, 19 nt, Artificial Sequence
  Description of Artificial Sequence: Synthetic oligonucleotide
  Sense strand starting at position 2337 of SEQ ID NO: 2873
auccgaaagagucgagaau

SEQ ID NO: 223137 - RNA, 19 nt, Artificial Sequence
  Description of Artificial Sequence: Synthetic oligonucleotide
  Antisense strand to SEQ ID NO: 223136
auucucgacucuuucggau

SEQ ID NO: 223138 - RNA, 19 nt, Artificial Sequence
  Description of Artificial Sequence: Synthetic oligonucleotide
  Sense strand starting at position 2338 of SEQ ID NO: 2873
uccgaaagagucgagaauu

SEQ ID NO: 223139 - RNA, 19 nt, Artificial Sequence
  Description of Artificial Sequence: Synthetic oligonucleotide
  Antisense strand to SEQ ID NO: 223138
aauucucgacucuuucgga

SEQ ID NO: 223140 - RNA, 19 nt, Artificial Sequence
  Description of Artificial Sequence: Synthetic oligonucleotide
  Sense strand starting at position 2346 of SEQ ID NO: 2873
agucgagaauuucaggaga

SEQ ID NO: 223141 - RNA, 19 nt, Artificial Sequence
  Description of Artificial Sequence: Synthetic oligonucleotide
  Antisense strand to SEQ ID NO: 223140
ucuccugaaauucucgacu

SEQ ID NO: 223142 - RNA, 19 nt, Artificial Sequence
  Description of Artificial Sequence: Synthetic oligonucleotide
  Sense strand starting at position 2348 of SEQ ID NO: 2873
ucgagaauuucaggagagg

SEQ ID NO: 223143 - RNA, 19 nt, Artificial Sequence
  Description of Artificial Sequence: Synthetic oligonucleotide
  Antisense strand to SEQ ID NO: 223142
ccucuccugaaauucucga

SEQ ID NO: 223144 - RNA, 19 nt, Artificial Sequence
  Description of Artificial Sequence: Synthetic oligonucleotide
  Sense strand starting at position 2370 of SEQ ID NO: 2873
guggguuguguagacaaau

SEQ ID NO: 223145 - RNA, 19 nt, Artificial Sequence
  Description of Artificial Sequence: Synthetic oligonucleotide
  Antisense strand to SEQ ID NO: 223144
auuugucuacacaacccac

SEQ ID NO: 223146 - RNA, 19 nt, Artificial Sequence
  Description of Artificial Sequence: Synthetic oligonucleotide
  Sense strand starting at position 2455 of SEQ ID NO: 2873
ugucuuaaggcucaagaaa

SEQ ID NO: 223147 - RNA, 19 nt, Artificial Sequence
  Description of Artificial Sequence: Synthetic oligonucleotide
  Antisense strand to SEQ ID NO: 223146
uuucuugagccuuaagaca

SEQ ID NO: 223148 - RNA, 19 nt, Artificial Sequence
  Description of Artificial Sequence: Synthetic oligonucleotide
  Sense strand starting at position 2535 of SEQ ID NO: 2873
gaagguaaccuagguguca

SEQ ID NO: 223149 - RNA, 19 nt, Artificial Sequence
  Description of Artificial Sequence: Synthetic oligonucleotide
  Antisense strand to SEQ ID NO: 223148
ugacaccuagguuaccuuc

SEQ ID NO: 223150 - RNA, 19 nt, Artificial Sequence
  Description of Artificial Sequence: Synthetic oligonucleotide
  Sense strand starting at position 2544 of SEQ ID NO: 2873
cuaggugucaggcauagga

SEQ ID NO: 223151 - RNA, 19 nt, Artificial Sequence
  Description of Artificial Sequence: Synthetic oligonucleotide
  Antisense strand to SEQ ID NO: 223150
uccuaugccugacaccuag

SEQ ID NO: 223152 - RNA, 19 nt, Artificial Sequence
  Description of Artificial Sequence: Synthetic oligonucleotide
  Sense strand starting at position 2649 of SEQ ID NO: 2873
aagugacuguugcuaauuu

SEQ ID NO: 223153 - RNA, 19 nt, Artificial Sequence
  Description of Artificial Sequence: Synthetic oligonucleotide
  Antisense strand to SEQ ID NO: 223152
aaauuagcaacagucacuu

SEQ ID NO: 223154 - RNA, 19 nt, Artificial Sequence
  Description of Artificial Sequence: Synthetic oligonucleotide
  Sense strand starting at position 2889 of SEQ ID NO: 2873
augugaaguucuuuacauu

SEQ ID NO: 223155 - RNA, 19 nt, Artificial Sequence
  Description of Artificial Sequence: Synthetic oligonucleotide
  Antisense strand to SEQ ID NO: 223154
aauguaaagaacuucacau

SEQ ID NO: 223156 - RNA, 19 nt, Artificial Sequence
  Description of Artificial Sequence: Synthetic oligonucleotide
  Sense strand starting at position 2890 of SEQ ID NO: 2873
ugugaaguucuuuacauua

SEQ ID NO: 223157 - RNA, 19 nt, Artificial Sequence
  Description of Artificial Sequence: Synthetic oligonucleotide
  Antisense strand to SEQ ID NO: 223156
uaauguaaagaacuucaca

SEQ ID NO: 223158 - RNA, 19 nt, Artificial Sequence
  Description of Artificial Sequence: Synthetic oligonucleotide
  Sense strand starting at position 2964 of SEQ ID NO: 2873
augguaguaugauucucua

SEQ ID NO: 223159 - RNA, 19 nt, Artificial Sequence
  Description of Artificial Sequence: Synthetic oligonucleotide
  Antisense strand to SEQ ID NO: 223158
uagagaaucauacuaccau

SEQ ID NO: 223160 - RNA, 19 nt, Artificial Sequence
  Description of Artificial Sequence: Synthetic oligonucleotide
  Sense strand starting at position 2967 of SEQ ID NO: 2873
guaguaugauucucuaaau

SEQ ID NO: 223161 - RNA, 19 nt, Artificial Sequence
  Description of Artificial Sequence: Synthetic oligonucleotide
  Antisense strand to SEQ ID NO: 223160
auuuagagaaucauacuac

SEQ ID NO: 223162 - RNA, 19 nt, Artificial Sequence
  Description of Artificial Sequence: Synthetic oligonucleotide
  Sense strand starting at position 3063 of SEQ ID NO: 2873
agagaaagcaagugcuuua

SEQ ID NO: 223163 - RNA, 19 nt, Artificial Sequence
  Description of Artificial Sequence: Synthetic oligonucleotide
  Antisense strand to SEQ ID NO: 223162
uaaagcacuugcuuucucu

SEQ ID NO: 223164 - RNA, 19 nt, Artificial Sequence
  Description of Artificial Sequence: Synthetic oligonucleotide
  Sense strand starting at position 3097 of SEQ ID NO: 2873
cuaguugugccacagacaa

SEQ ID NO: 223165 - RNA, 19 nt, Artificial Sequence
  Description of Artificial Sequence: Synthetic oligonucleotide
  Antisense strand to SEQ ID NO: 223164
uugucuguggcacaacuag

SEQ ID NO: 223166 - RNA, 19 nt, Artificial Sequence
  Description of Artificial Sequence: Synthetic oligonucleotide
  Sense strand starting at position 3166 of SEQ ID NO: 2873
agaguaaagucaguuuaga

SEQ ID NO: 223167 - RNA, 19 nt, Artificial Sequence
  Description of Artificial Sequence: Synthetic oligonucleotide
  Antisense strand to SEQ ID NO: 223166
ucuaaacugacuuuacucu

SEQ ID NO: 223168 - RNA, 19 nt, Artificial Sequence
  Description of Artificial Sequence: Synthetic oligonucleotide
  Sense strand starting at position 3437 of SEQ ID NO: 2873
aaguuuaugcaauggagac

SEQ ID NO: 223169 - RNA, 19 nt, Artificial Sequence
  Description of Artificial Sequence: Synthetic oligonucleotide
  Antisense strand to SEQ ID NO: 223168
gucuccauugcauaaacuu

SEQ ID NO: 223170 - RNA, 19 nt, Artificial Sequence
  Description of Artificial Sequence: Synthetic oligonucleotide
  Sense strand starting at position 3438 of SEQ ID NO: 2873
aguuuaugcaauggagaca

SEQ ID NO: 223171 - RNA, 19 nt, Artificial Sequence
  Description of Artificial Sequence: Synthetic oligonucleotide
  Antisense strand to SEQ ID NO: 223170
ugucuccauugcauaaacu

SEQ ID NO: 223172 - RNA, 19 nt, Artificial Sequence
  Description of Artificial Sequence: Synthetic oligonucleotide
  Sense strand starting at position 3500 of SEQ ID NO: 2873
guggauuguacacaacugu

SEQ ID NO: 223173 - RNA, 19 nt, Artificial Sequence
  Description of Artificial Sequence: Synthetic oligonucleotide
  Antisense strand to SEQ ID NO: 223172
acaguuguguacaauccac

SEQ ID NO: 223174 - RNA, 19 nt, Artificial Sequence
  Description of Artificial Sequence: Synthetic oligonucleotide
  Sense strand starting at position 3909 of SEQ ID NO: 2873
gguuacaaaugguuacuca

SEQ ID NO: 223175 - RNA, 19 nt, Artificial Sequence
  Description of Artificial Sequence: Synthetic oligonucleotide
  Antisense strand to SEQ ID NO: 223174
ugaguaaccauuuguaacc

SEQ ID NO: 223176 - RNA, 19 nt, Artificial Sequence
  Description of Artificial Sequence: Synthetic oligonucleotide
  Sense strand starting at position 3983 of SEQ ID NO: 2873
gguuaagauuuauauacca

SEQ ID NO: 223177 - RNA, 19 nt, Artificial Sequence
  Description of Artificial Sequence: Synthetic oligonucleotide
  Antisense strand to SEQ ID NO: 223176
ugguauauaaaucuuaacc

SEQ ID NO: 223178 - RNA, 19 nt, Artificial Sequence
  Description of Artificial Sequence: Synthetic oligonucleotide
  Sense strand starting at position 203 of SEQ ID NO: 2874
uggaaaucauguccauucu

SEQ ID NO: 223179 - RNA, 19 nt, Artificial Sequence
  Description of Artificial Sequence: Synthetic oligonucleotide
  Antisense strand to SEQ ID NO: 223178
agaauggacaugauuucca

SEQ ID NO: 223180 - RNA, 19 nt, Artificial Sequence
  Description of Artificial Sequence: Synthetic oligonucleotide
  Sense strand starting at position 204 of SEQ ID NO: 2874
ggaaaucauguccauucuu

SEQ ID NO: 223181 - RNA, 19 nt, Artificial Sequence
  Description of Artificial Sequence: Synthetic oligonucleotide
  Antisense strand to SEQ ID NO: 223180
aagaauggacaugauuucc

SEQ ID NO: 223182 - RNA, 19 nt, Artificial Sequence
  Description of Artificial Sequence: Synthetic oligonucleotide
  Sense strand starting at position 274 of SEQ ID NO: 2874
gagagacuagggugucauu

SEQ ID NO: 223183 - RNA, 19 nt, Artificial Sequence
  Description of Artificial Sequence: Synthetic oligonucleotide
  Antisense strand to SEQ ID NO: 223182
aaugacacccuagucucuc

SEQ ID NO: 223184 - RNA, 19 nt, Artificial Sequence
  Description of Artificial Sequence: Synthetic oligonucleotide
  Sense strand starting at position 365 of SEQ ID NO: 2874
uuuaguuguagauggguaa

SEQ ID NO: 223185 - RNA, 19 nt, Artificial Sequence
  Description of Artificial Sequence: Synthetic oligonucleotide
  Antisense strand to SEQ ID NO: 223184
uuacccaucuacaacuaaa

SEQ ID NO: 223186 - RNA, 19 nt, Artificial Sequence
  Description of Artificial Sequence: Synthetic oligonucleotide
  Sense strand starting at position 368 of SEQ ID NO: 2874
aguuguagauggguaaguu

SEQ ID NO: 223187 - RNA, 19 nt, Artificial Sequence
  Description of Artificial Sequence: Synthetic oligonucleotide
  Antisense strand to SEQ ID NO: 223186
aacuuacccaucuacaacu

SEQ ID NO: 223188 - RNA, 19 nt, Artificial Sequence
  Description of Artificial Sequence: Synthetic oligonucleotide
  Sense strand starting at position 369 of SEQ ID NO: 2874
guuguagauggguaaguua

SEQ ID NO: 223189 - RNA, 19 nt, Artificial Sequence
  Description of Artificial Sequence: Synthetic oligonucleotide
  Antisense strand to SEQ ID NO: 223188
uaacuuacccaucuacaac

SEQ ID NO: 223190 - RNA, 19 nt, Artificial Sequence
  Description of Artificial Sequence: Synthetic oligonucleotide
  Sense strand starting at position 475 of SEQ ID NO: 2874
caagaucuggccgaagacu

SEQ ID NO: 223191 - RNA, 19 nt, Artificial Sequence
  Description of Artificial Sequence: Synthetic oligonucleotide
  Antisense strand to SEQ ID NO: 223190
agucuucggccagaucuug

SEQ ID NO: 223192 - RNA, 19 nt, Artificial Sequence
  Description of Artificial Sequence: Synthetic oligonucleotide
  Sense strand starting at position 486 of SEQ ID NO: 2874
cgaagacuaacuugggcaa

SEQ ID NO: 223193 - RNA, 19 nt, Artificial Sequence
  Description of Artificial Sequence: Synthetic oligonucleotide
  Antisense strand to SEQ ID NO: 223192
uugcccaaguuagucuucg

SEQ ID NO: 223194 - RNA, 19 nt, Artificial Sequence
  Description of Artificial Sequence: Synthetic oligonucleotide
  Sense strand starting at position 632 of SEQ ID NO: 2874
gguuacuuguaucugaacu

SEQ ID NO: 223195 - RNA, 19 nt, Artificial Sequence
  Description of Artificial Sequence: Synthetic oligonucleotide
  Antisense strand to SEQ ID NO: 223194
aguucagauacaaguaacc

SEQ ID NO: 223196 - RNA, 19 nt, Artificial Sequence
  Description of Artificial Sequence: Synthetic oligonucleotide
  Sense strand starting at position 725 of SEQ ID NO: 2874
guccauuucuuaguucuua

SEQ ID NO: 223197 - RNA, 19 nt, Artificial Sequence
  Description of Artificial Sequence: Synthetic oligonucleotide
  Antisense strand to SEQ ID NO: 223196
uaagaacuaagaaauggac

SEQ ID NO: 223198 - RNA, 19 nt, Artificial Sequence
  Description of Artificial Sequence: Synthetic oligonucleotide
  Sense strand starting at position 850 of SEQ ID NO: 2874
guuaguaauguacaacuca

SEQ ID NO: 223199 - RNA, 19 nt, Artificial Sequence
  Description of Artificial Sequence: Synthetic oligonucleotide
  Antisense strand to SEQ ID NO: 223198
ugaguuguacauuacuaac

SEQ ID NO: 223200 - RNA, 19 nt, Artificial Sequence
  Description of Artificial Sequence: Synthetic oligonucleotide
  Sense strand starting at position 1063 of SEQ ID NO: 2874
uacguagaaagcuagaguu

SEQ ID NO: 223201 - RNA, 19 nt, Artificial Sequence
  Description of Artificial Sequence: Synthetic oligonucleotide
  Antisense strand to SEQ ID NO: 223200
aacucuagcuuucuacgua

SEQ ID NO: 223202 - RNA, 19 nt, Artificial Sequence
  Description of Artificial Sequence: Synthetic oligonucleotide
  Sense strand starting at position 1065 of SEQ ID NO: 2874
cguagaaagcuagaguuau

SEQ ID NO: 223203 - RNA, 19 nt, Artificial Sequence
  Description of Artificial Sequence: Synthetic oligonucleotide
  Antisense strand to SEQ ID NO: 223202
auaacucuagcuuucuacg

SEQ ID NO: 223204 - RNA, 19 nt, Artificial Sequence
  Description of Artificial Sequence: Synthetic oligonucleotide
  Sense strand starting at position 1086 of SEQ ID NO: 2874
ucuagcuagccagaauaau

SEQ ID NO: 223205 - RNA, 19 nt, Artificial Sequence
  Description of Artificial Sequence: Synthetic oligonucleotide
  Antisense strand to SEQ ID NO: 223204
auuauucuggcuagcuaga

SEQ ID NO: 223206 - RNA, 19 nt, Artificial Sequence
  Description of Artificial Sequence: Synthetic oligonucleotide
  Sense strand starting at position 1095 of SEQ ID NO: 2874
ccagaauaaugaccacguu

SEQ ID NO: 223207 - RNA, 19 nt, Artificial Sequence
  Description of Artificial Sequence: Synthetic oligonucleotide
  Antisense strand to SEQ ID NO: 223206
aacguggucauuauucugg

SEQ ID NO: 223208 - RNA, 19 nt, Artificial Sequence
  Description of Artificial Sequence: Synthetic oligonucleotide
  Sense strand starting at position 1096 of SEQ ID NO: 2874
cagaauaaugaccacguuu

SEQ ID NO: 223209 - RNA, 19 nt, Artificial Sequence
  Description of Artificial Sequence: Synthetic oligonucleotide
  Antisense strand to SEQ ID NO: 223208
aaacguggucauuauucug

SEQ ID NO: 223210 - RNA, 19 nt, Artificial Sequence
  Description of Artificial Sequence: Synthetic oligonucleotide
  Sense strand starting at position 1124 of SEQ ID NO: 2874
ccauucugugcugauauua

SEQ ID NO: 223211 - RNA, 19 nt, Artificial Sequence
  Description of Artificial Sequence: Synthetic oligonucleotide
  Antisense strand to SEQ ID NO: 223210
uaauaucagcacagaaugg

SEQ ID NO: 223212 - RNA, 19 nt, Artificial Sequence
  Description of Artificial Sequence: Synthetic oligonucleotide
  Sense strand starting at position 1134 of SEQ ID NO: 2874
cugauauuaagacgacuga

SEQ ID NO: 223213 - RNA, 19 nt, Artificial Sequence
  Description of Artificial Sequence: Synthetic oligonucleotide
  Antisense strand to SEQ ID NO: 223212
ucagucgucuuaauaucag

SEQ ID NO: 223214 - RNA, 19 nt, Artificial Sequence
  Description of Artificial Sequence: Synthetic oligonucleotide
  Sense strand starting at position 1156 of SEQ ID NO: 2874
uuguucugccuuucuguua

SEQ ID NO: 223215 - RNA, 19 nt, Artificial Sequence
  Description of Artificial Sequence: Synthetic oligonucleotide
  Antisense strand to SEQ ID NO: 223214
uaacagaaaggcagaacaa

SEQ ID NO: 223216 - RNA, 19 nt, Artificial Sequence
  Description of Artificial Sequence: Synthetic oligonucleotide
  Sense strand starting at position 1315 of SEQ ID NO: 2874
uaagaagugccauauguca

SEQ ID NO: 223217 - RNA, 19 nt, Artificial Sequence
  Description of Artificial Sequence: Synthetic oligonucleotide
  Antisense strand to SEQ ID NO: 223216
ugacauauggcacuucuua

SEQ ID NO: 223218 - RNA, 19 nt, Artificial Sequence
  Description of Artificial Sequence: Synthetic oligonucleotide
  Sense strand starting at position 1387 of SEQ ID NO: 2874
gguaucuaauuugaaauug

SEQ ID NO: 223219 - RNA, 19 nt, Artificial Sequence
  Description of Artificial Sequence: Synthetic oligonucleotide
  Antisense strand to SEQ ID NO: 223218
caauuucaaauuagauacc

SEQ ID NO: 223220 - RNA, 19 nt, Artificial Sequence
  Description of Artificial Sequence: Synthetic oligonucleotide
  Sense strand starting at position 2156 of SEQ ID NO: 2874
gccaguguugugaggucua

SEQ ID NO: 223221 - RNA, 19 nt, Artificial Sequence
  Description of Artificial Sequence: Synthetic oligonucleotide
  Antisense strand to SEQ ID NO: 223220
uagaccucacaacacuggc

SEQ ID NO: 223222 - RNA, 19 nt, Artificial Sequence
  Description of Artificial Sequence: Synthetic oligonucleotide
  Sense strand starting at position 2180 of SEQ ID NO: 2874
ugcguugaauaaccaaaga

SEQ ID NO: 223223 - RNA, 19 nt, Artificial Sequence
  Description of Artificial Sequence: Synthetic oligonucleotide
  Antisense strand to SEQ ID NO: 223222
ucuuugguuauucaacgca

SEQ ID NO: 223224 - RNA, 19 nt, Artificial Sequence
  Description of Artificial Sequence: Synthetic oligonucleotide
  Sense strand starting at position 2205 of SEQ ID NO: 2874
gugggucuccuccaauauc

SEQ ID NO: 223225 - RNA, 19 nt, Artificial Sequence
  Description of Artificial Sequence: Synthetic oligonucleotide
  Antisense strand to SEQ ID NO: 223224
gauauuggaggagacccac

SEQ ID NO: 223226 - RNA, 19 nt, Artificial Sequence
  Description of Artificial Sequence: Synthetic oligonucleotide
  Sense strand starting at position 2305 of SEQ ID NO: 2874
cucagaggucucggagaaa

SEQ ID NO: 223227 - RNA, 19 nt, Artificial Sequence
  Description of Artificial Sequence: Synthetic oligonucleotide
  Antisense strand to SEQ ID NO: 223226
uuucuccgagaccucugag

SEQ ID NO: 223228 - RNA, 19 nt, Artificial Sequence
  Description of Artificial Sequence: Synthetic oligonucleotide
  Sense strand starting at position 2370 of SEQ ID NO: 2874
ggaguaaugcgaggcagga

SEQ ID NO: 223229 - RNA, 19 nt, Artificial Sequence
  Description of Artificial Sequence: Synthetic oligonucleotide
  Antisense strand to SEQ ID NO: 223228
uccugccucgcauuacucc

SEQ ID NO: 223230 - RNA, 19 nt, Artificial Sequence
  Description of Artificial Sequence: Synthetic oligonucleotide
  Sense strand starting at position 2434 of SEQ ID NO: 2874
uguugacucuucccacacu

SEQ ID NO: 223231 - RNA, 19 nt, Artificial Sequence
  Description of Artificial Sequence: Synthetic oligonucleotide
  Antisense strand to SEQ ID NO: 223230
agugugggaagagucaaca

SEQ ID NO: 223232 - RNA, 19 nt, Artificial Sequence
  Description of Artificial Sequence: Synthetic oligonucleotide
  Sense strand starting at position 2544 of SEQ ID NO: 2874
uggugugcuaagcacaaau

SEQ ID NO: 223233 - RNA, 19 nt, Artificial Sequence
  Description of Artificial Sequence: Synthetic oligonucleotide
  Antisense strand to SEQ ID NO: 223232
auuugugcuuagcacacca

SEQ ID NO: 223234 - RNA, 19 nt, Artificial Sequence
  Description of Artificial Sequence: Synthetic oligonucleotide
  Sense strand starting at position 2644 of SEQ ID NO: 2874
ggcaguccucagugagaac

SEQ ID NO: 223235 - RNA, 19 nt, Artificial Sequence
  Description of Artificial Sequence: Synthetic oligonucleotide
  Antisense strand to SEQ ID NO: 223234
guucucacugaggacugcc

SEQ ID NO: 223236 - RNA, 19 nt, Artificial Sequence
  Description of Artificial Sequence: Synthetic oligonucleotide
  Sense strand starting at position 2645 of SEQ ID NO: 2874
gcaguccucagugagaaca

SEQ ID NO: 223237 - RNA, 19 nt, Artificial Sequence
  Description of Artificial Sequence: Synthetic oligonucleotide
  Antisense strand to SEQ ID NO: 223236
uguucucacugaggacugc

SEQ ID NO: 223238 - RNA, 19 nt, Artificial Sequence
  Description of Artificial Sequence: Synthetic oligonucleotide
  Sense strand starting at position 2729 of SEQ ID NO: 2874
gaagaaaugccaggcaaag

SEQ ID NO: 223239 - RNA, 19 nt, Artificial Sequence
  Description of Artificial Sequence: Synthetic oligonucleotide
  Antisense strand to SEQ ID NO: 223238
cuuugccuggcauuucuuc

SEQ ID NO: 223240 - RNA, 19 nt, Artificial Sequence
  Description of Artificial Sequence: Synthetic oligonucleotide
  Sense strand starting at position 2819 of SEQ ID NO: 2874
augguucugagaggucgau

SEQ ID NO: 223241 - RNA, 19 nt, Artificial Sequence
  Description of Artificial Sequence: Synthetic oligonucleotide
  Antisense strand to SEQ ID NO: 223240
aucgaccucucagaaccau

SEQ ID NO: 223242 - RNA, 19 nt, Artificial Sequence
  Description of Artificial Sequence: Synthetic oligonucleotide
  Sense strand starting at position 2823 of SEQ ID NO: 2874
uucugagaggucgaugagu

SEQ ID NO: 223243 - RNA, 19 nt, Artificial Sequence
  Description of Artificial Sequence: Synthetic oligonucleotide
  Antisense strand to SEQ ID NO: 223242
acucaucgaccucucagaa

SEQ ID NO: 223244 - RNA, 19 nt, Artificial Sequence
  Description of Artificial Sequence: Synthetic oligonucleotide
  Sense strand starting at position 2825 of SEQ ID NO: 2874
cugagaggucgaugaguag

SEQ ID NO: 223245 - RNA, 19 nt, Artificial Sequence
  Description of Artificial Sequence: Synthetic oligonucleotide
  Antisense strand to SEQ ID NO: 223244
cuacucaucgaccucucag

SEQ ID NO: 223246 - RNA, 19 nt, Artificial Sequence
  Description of Artificial Sequence: Synthetic oligonucleotide
  Sense strand starting at position 2886 of SEQ ID NO: 2874
aggugauaagcaggugaua

SEQ ID NO: 223247 - RNA, 19 nt, Artificial Sequence
  Description of Artificial Sequence: Synthetic oligonucleotide
  Antisense strand to SEQ ID NO: 223246
uaucaccugcuuaucaccu

SEQ ID NO: 223248 - RNA, 19 nt, Artificial Sequence
  Description of Artificial Sequence: Synthetic oligonucleotide
  Sense strand starting at position 2888 of SEQ ID NO: 2874
gugauaagcaggugauaua

SEQ ID NO: 223249 - RNA, 19 nt, Artificial Sequence
  Description of Artificial Sequence: Synthetic oligonucleotide
  Antisense strand to SEQ ID NO: 223248
uauaucaccugcuuaucac

SEQ ID NO: 223250 - RNA, 19 nt, Artificial Sequence
  Description of Artificial Sequence: Synthetic oligonucleotide
  Sense strand starting at position 3000 of SEQ ID NO: 2874
uccugaaauuaacaaggaa

SEQ ID NO: 223251 - RNA, 19 nt, Artificial Sequence
  Description of Artificial Sequence: Synthetic oligonucleotide
  Antisense strand to SEQ ID NO: 223250
uuccuuguuaauuucagga

SEQ ID NO: 223252 - RNA, 19 nt, Artificial Sequence
  Description of Artificial Sequence: Synthetic oligonucleotide
  Sense strand starting at position 3108 of SEQ ID NO: 2874
agacuauagugaccuuaac

SEQ ID NO: 223253 - RNA, 19 nt, Artificial Sequence
  Description of Artificial Sequence: Synthetic oligonucleotide
  Antisense strand to SEQ ID NO: 223252
guuaaggucacuauagucu

SEQ ID NO: 223254 - RNA, 19 nt, Artificial Sequence
  Description of Artificial Sequence: Synthetic oligonucleotide
  Sense strand starting at position 3363 of SEQ ID NO: 2874
acaauucggcugcaucaga

SEQ ID NO: 223255 - RNA, 19 nt, Artificial Sequence
  Description of Artificial Sequence: Synthetic oligonucleotide
  Antisense strand to SEQ ID NO: 223254
ucugaugcagccgaauugu

SEQ ID NO: 223256 - RNA, 19 nt, Artificial Sequence
  Description of Artificial Sequence: Synthetic oligonucleotide
  Sense strand starting at position 3756 of SEQ ID NO: 2874
aggagauauuugcaaaucu

SEQ ID NO: 223257 - RNA, 19 nt, Artificial Sequence
  Description of Artificial Sequence: Synthetic oligonucleotide
  Antisense strand to SEQ ID NO: 223256
agauuugcaaauaucuccu

SEQ ID NO: 223258 - RNA, 19 nt, Artificial Sequence
  Description of Artificial Sequence: Synthetic oligonucleotide
  Sense strand starting at position 316 of SEQ ID NO: 2875
ggugauagaaccugccuca

SEQ ID NO: 223259 - RNA, 19 nt, Artificial Sequence
  Description of Artificial Sequence: Synthetic oligonucleotide
  Antisense strand to SEQ ID NO: 223258
ugaggcagguucuaucacc

SEQ ID NO: 223260 - RNA, 19 nt, Artificial Sequence
  Description of Artificial Sequence: Synthetic oligonucleotide
  Sense strand starting at position 1023 of SEQ ID NO: 2875
acauguggccucgaagagu

SEQ ID NO: 223261 - RNA, 19 nt, Artificial Sequence
  Description of Artificial Sequence: Synthetic oligonucleotide
  Antisense strand to SEQ ID NO: 223260
acucuucgaggccacaugu

SEQ ID NO: 223262 - RNA, 19 nt, Artificial Sequence
  Description of Artificial Sequence: Synthetic oligonucleotide
  Sense strand starting at position 1101 of SEQ ID NO: 2875
gccugagaaugcccaaauc

SEQ ID NO: 223263 - RNA, 19 nt, Artificial Sequence
  Description of Artificial Sequence: Synthetic oligonucleotide
  Antisense strand to SEQ ID NO: 223262
gauuugggcauucucaggc

SEQ ID NO: 223264 - RNA, 19 nt, Artificial Sequence
  Description of Artificial Sequence: Synthetic oligonucleotide
  Sense strand starting at position 1280 of SEQ ID NO: 2875
gcaggugucacucggaaga

SEQ ID NO: 223265 - RNA, 19 nt, Artificial Sequence
  Description of Artificial Sequence: Synthetic oligonucleotide
  Antisense strand to SEQ ID NO: 223264
ucuuccgagugacaccugc

SEQ ID NO: 223266 - RNA, 19 nt, Artificial Sequence
  Description of Artificial Sequence: Synthetic oligonucleotide
  Sense strand starting at position 2185 of SEQ ID NO: 2875
ucuuauaaacaugagcgau

SEQ ID NO: 223267 - RNA, 19 nt, Artificial Sequence
  Description of Artificial Sequence: Synthetic oligonucleotide
  Antisense strand to SEQ ID NO: 223266
aucgcucauguuuauaaga

SEQ ID NO: 223268 - RNA, 19 nt, Artificial Sequence
  Description of Artificial Sequence: Synthetic oligonucleotide
  Sense strand starting at position 2188 of SEQ ID NO: 2875
uauaaacaugagcgaugau

SEQ ID NO: 223269 - RNA, 19 nt, Artificial Sequence
  Description of Artificial Sequence: Synthetic oligonucleotide
  Antisense strand to SEQ ID NO: 223268
aucaucgcucauguuuaua

SEQ ID NO: 223270 - RNA, 19 nt, Artificial Sequence
  Description of Artificial Sequence: Synthetic oligonucleotide
  Sense strand starting at position 2191 of SEQ ID NO: 2875
aaacaugagcgaugaucca

SEQ ID NO: 223271 - RNA, 19 nt, Artificial Sequence
  Description of Artificial Sequence: Synthetic oligonucleotide
  Antisense strand to SEQ ID NO: 223270
uggaucaucgcucauguuu

SEQ ID NO: 223272 - RNA, 19 nt, Artificial Sequence
  Description of Artificial Sequence: Synthetic oligonucleotide
  Sense strand starting at position 2328 of SEQ ID NO: 2875
ggcuuuccugaguagguca

SEQ ID NO: 223273 - RNA, 19 nt, Artificial Sequence
  Description of Artificial Sequence: Synthetic oligonucleotide
  Antisense strand to SEQ ID NO: 223272
ugaccuacucaggaaagcc

SEQ ID NO: 223274 - RNA, 19 nt, Artificial Sequence
  Description of Artificial Sequence: Synthetic oligonucleotide
  Sense strand starting at position 2331 of SEQ ID NO: 2875
uuuccugaguaggucagaa

SEQ ID NO: 223275 - RNA, 19 nt, Artificial Sequence
  Description of Artificial Sequence: Synthetic oligonucleotide
  Antisense strand to SEQ ID NO: 223274
uucugaccuacucaggaaa

SEQ ID NO: 223276 - RNA, 19 nt, Artificial Sequence
  Description of Artificial Sequence: Synthetic oligonucleotide
  Sense strand starting at position 2333 of SEQ ID NO: 2875
uccugaguaggucagaacu

SEQ ID NO: 223277 - RNA, 19 nt, Artificial Sequence
  Description of Artificial Sequence: Synthetic oligonucleotide
  Antisense strand to SEQ ID NO: 223276
aguucugaccuacucagga

SEQ ID NO: 223278 - RNA, 19 nt, Artificial Sequence
  Description of Artificial Sequence: Synthetic oligonucleotide
  Sense strand starting at position 2390 of SEQ ID NO: 2875
uuguuagagccacaaauua

SEQ ID NO: 223279 - RNA, 19 nt, Artificial Sequence
  Description of Artificial Sequence: Synthetic oligonucleotide
  Antisense strand to SEQ ID NO: 223278
uaauuuguggcucuaacaa

SEQ ID NO: 223280 - RNA, 19 nt, Artificial Sequence
  Description of Artificial Sequence: Synthetic oligonucleotide
  Sense strand starting at position 2529 of SEQ ID NO: 2875
aaacuacccgugggaugaa

SEQ ID NO: 223281 - RNA, 19 nt, Artificial Sequence
  Description of Artificial Sequence: Synthetic oligonucleotide
  Antisense strand to SEQ ID NO: 223280
uucaucccacggguaguuu

SEQ ID NO: 223282 - RNA, 19 nt, Artificial Sequence
  Description of Artificial Sequence: Synthetic oligonucleotide
  Sense strand starting at position 2532 of SEQ ID NO: 2875
cuacccgugggaugaauaa

SEQ ID NO: 223283 - RNA, 19 nt, Artificial Sequence
  Description of Artificial Sequence: Synthetic oligonucleotide
  Antisense strand to SEQ ID NO: 223282
uuauucaucccacggguag

SEQ ID NO: 223284 - RNA, 19 nt, Artificial Sequence
  Description of Artificial Sequence: Synthetic oligonucleotide
  Sense strand starting at position 2920 of SEQ ID NO: 2875
agaguacaaccuggcauua

SEQ ID NO: 223285 - RNA, 19 nt, Artificial Sequence
  Description of Artificial Sequence: Synthetic oligonucleotide
  Antisense strand to SEQ ID NO: 223284
uaaugccagguuguacucu

SEQ ID NO: 223286 - RNA, 19 nt, Artificial Sequence
  Description of Artificial Sequence: Synthetic oligonucleotide
  Sense strand starting at position 2930 of SEQ ID NO: 2875
cuggcauuacugugagacu

SEQ ID NO: 223287 - RNA, 19 nt, Artificial Sequence
  Description of Artificial Sequence: Synthetic oligonucleotide
  Antisense strand to SEQ ID NO: 223286
agucucacaguaaugccag

SEQ ID NO: 223288 - RNA, 19 nt, Artificial Sequence
  Description of Artificial Sequence: Synthetic oligonucleotide
  Sense strand starting at position 2995 of SEQ ID NO: 2875
ugccuaggguuguuugaaa

SEQ ID NO: 223289 - RNA, 19 nt, Artificial Sequence
  Description of Artificial Sequence: Synthetic oligonucleotide
  Antisense strand to SEQ ID NO: 223288
uuucaaacaacccuaggca

SEQ ID NO: 223290 - RNA, 19 nt, Artificial Sequence
  Description of Artificial Sequence: Synthetic oligonucleotide
  Sense strand starting at position 3020 of SEQ ID NO: 2875
ugagacaugguacgaauua

SEQ ID NO: 223291 - RNA, 19 nt, Artificial Sequence
  Description of Artificial Sequence: Synthetic oligonucleotide
  Antisense strand to SEQ ID NO: 223290
uaauucguaccaugucuca

SEQ ID NO: 223292 - RNA, 19 nt, Artificial Sequence
  Description of Artificial Sequence: Synthetic oligonucleotide
  Sense strand starting at position 3063 of SEQ ID NO: 2875
ucgugauuggcucaagcaa

SEQ ID NO: 223293 - RNA, 19 nt, Artificial Sequence
  Description of Artificial Sequence: Synthetic oligonucleotide
  Antisense strand to SEQ ID NO: 223292
uugcuugagccaaucacga

SEQ ID NO: 223294 - RNA, 19 nt, Artificial Sequence
  Description of Artificial Sequence: Synthetic oligonucleotide
  Sense strand starting at position 3077 of SEQ ID NO: 2875
agcaauaaugguuauguga

SEQ ID NO: 223295 - RNA, 19 nt, Artificial Sequence
  Description of Artificial Sequence: Synthetic oligonucleotide
  Antisense strand to SEQ ID NO: 223294
ucacauaaccauuauugcu

SEQ ID NO: 223296 - RNA, 19 nt, Artificial Sequence
  Description of Artificial Sequence: Synthetic oligonucleotide
  Sense strand starting at position 3084 of SEQ ID NO: 2875
augguuaugugaguccaga

SEQ ID NO: 223297 - RNA, 19 nt, Artificial Sequence
  Description of Artificial Sequence: Synthetic oligonucleotide
  Antisense strand to SEQ ID NO: 223296
ucuggacucacauaaccau

SEQ ID NO: 223298 - RNA, 19 nt, Artificial Sequence
  Description of Artificial Sequence: Synthetic oligonucleotide
  Sense strand starting at position 3125 of SEQ ID NO: 2875
ccaggaauacuucgccaac

SEQ ID NO: 223299 - RNA, 19 nt, Artificial Sequence
  Description of Artificial Sequence: Synthetic oligonucleotide
  Antisense strand to SEQ ID NO: 223298
guuggcgaaguauuccugg

SEQ ID NO: 223300 - RNA, 19 nt, Artificial Sequence
  Description of Artificial Sequence: Synthetic oligonucleotide
  Sense strand starting at position 3127 of SEQ ID NO: 2875
aggaauacuucgccaacga

SEQ ID NO: 223301 - RNA, 19 nt, Artificial Sequence
  Description of Artificial Sequence: Synthetic oligonucleotide
  Antisense strand to SEQ ID NO: 223300
ucguuggcgaaguauuccu

SEQ ID NO: 223302 - RNA, 19 nt, Artificial Sequence
  Description of Artificial Sequence: Synthetic oligonucleotide
  Sense strand starting at position 3128 of SEQ ID NO: 2875
ggaauacuucgccaacgag

SEQ ID NO: 223303 - RNA, 19 nt, Artificial Sequence
  Description of Artificial Sequence: Synthetic oligonucleotide
  Antisense strand to SEQ ID NO: 223302
cucguuggcgaaguauucc

SEQ ID NO: 223304 - RNA, 19 nt, Artificial Sequence
  Description of Artificial Sequence: Synthetic oligonucleotide
  Sense strand starting at position 3337 of SEQ ID NO: 2875
agacaugagcuccgccaau

SEQ ID NO: 223305 - RNA, 19 nt, Artificial Sequence
  Description of Artificial Sequence: Synthetic oligonucleotide
  Antisense strand to SEQ ID NO: 223304
auuggcggagcucaugucu

SEQ ID NO: 223306 - RNA, 19 nt, Artificial Sequence
  Description of Artificial Sequence: Synthetic oligonucleotide
  Sense strand starting at position 3462 of SEQ ID NO: 2875
gccucuagugucuggagga

SEQ ID NO: 223307 - RNA, 19 nt, Artificial Sequence
  Description of Artificial Sequence: Synthetic oligonucleotide
  Antisense strand to SEQ ID NO: 223306
uccuccagacacuagaggc

SEQ ID NO: 223308 - RNA, 19 nt, Artificial Sequence
  Description of Artificial Sequence: Synthetic oligonucleotide
  Sense strand starting at position 3465 of SEQ ID NO: 2875
ucuagugucuggaggagga

SEQ ID NO: 223309 - RNA, 19 nt, Artificial Sequence
  Description of Artificial Sequence: Synthetic oligonucleotide
  Antisense strand to SEQ ID NO: 223308
uccuccuccagacacuaga

SEQ ID NO: 223310 - RNA, 19 nt, Artificial Sequence
  Description of Artificial Sequence: Synthetic oligonucleotide
  Sense strand starting at position 3478 of SEQ ID NO: 2875
ggaggaagugucagcgcua

SEQ ID NO: 223311 - RNA, 19 nt, Artificial Sequence
  Description of Artificial Sequence: Synthetic oligonucleotide
  Antisense strand to SEQ ID NO: 223310
uagcgcugacacuuccucc

SEQ ID NO: 223312 - RNA, 19 nt, Artificial Sequence
  Description of Artificial Sequence: Synthetic oligonucleotide
  Sense strand starting at position 3672 of SEQ ID NO: 2875
gcuauccgauaucucuaua

SEQ ID NO: 223313 - RNA, 19 nt, Artificial Sequence
  Description of Artificial Sequence: Synthetic oligonucleotide
  Antisense strand to SEQ ID NO: 223312
uauagagauaucggauagc

SEQ ID NO: 223314 - RNA, 19 nt, Artificial Sequence
  Description of Artificial Sequence: Synthetic oligonucleotide
  Sense strand starting at position 3677 of SEQ ID NO: 2875
ccgauaucucuauaauugu

SEQ ID NO: 223315 - RNA, 19 nt, Artificial Sequence
  Description of Artificial Sequence: Synthetic oligonucleotide
  Antisense strand to SEQ ID NO: 223314
acaauuauagagauaucgg

SEQ ID NO: 223316 - RNA, 19 nt, Artificial Sequence
  Description of Artificial Sequence: Synthetic oligonucleotide
  Sense strand starting at position 3712 of SEQ ID NO: 2875
gaaacaauuugccaguuag

SEQ ID NO: 223317 - RNA, 19 nt, Artificial Sequence
  Description of Artificial Sequence: Synthetic oligonucleotide
  Antisense strand to SEQ ID NO: 223316
cuaacuggcaaauuguuuc

SEQ ID NO: 223318 - RNA, 19 nt, Artificial Sequence
  Description of Artificial Sequence: Synthetic oligonucleotide
  Sense strand starting at position 3730 of SEQ ID NO: 2875
gcuucugcuguuuauaaga

SEQ ID NO: 223319 - RNA, 19 nt, Artificial Sequence
  Description of Artificial Sequence: Synthetic oligonucleotide
  Antisense strand to SEQ ID NO: 223318
ucuuauaaacagcagaagc

SEQ ID NO: 223320 - RNA, 19 nt, Artificial Sequence
  Description of Artificial Sequence: Synthetic oligonucleotide
  Sense strand starting at position 3745 of SEQ ID NO: 2875
aagaguccugacugacaca

SEQ ID NO: 223321 - RNA, 19 nt, Artificial Sequence
  Description of Artificial Sequence: Synthetic oligonucleotide
  Antisense strand to SEQ ID NO: 223320
ugugucagucaggacucuu

SEQ ID NO: 223322 - RNA, 19 nt, Artificial Sequence
  Description of Artificial Sequence: Synthetic oligonucleotide
  Sense strand starting at position 3770 of SEQ ID NO: 2875
aaggguuagacuugguaua

SEQ ID NO: 223323 - RNA, 19 nt, Artificial Sequence
  Description of Artificial Sequence: Synthetic oligonucleotide
  Antisense strand to SEQ ID NO: 223322
uauaccaagucuaacccuu

SEQ ID NO: 223324 - RNA, 19 nt, Artificial Sequence
  Description of Artificial Sequence: Synthetic oligonucleotide
  Sense strand starting at position 3771 of SEQ ID NO: 2875
aggguuagacuugguauaa

SEQ ID NO: 223325 - RNA, 19 nt, Artificial Sequence
  Description of Artificial Sequence: Synthetic oligonucleotide
  Antisense strand to SEQ ID NO: 223324
uuauaccaagucuaacccu

SEQ ID NO: 223326 - RNA, 19 nt, Artificial Sequence
  Description of Artificial Sequence: Synthetic oligonucleotide
  Sense strand starting at position 3772 of SEQ ID NO: 2875
ggguuagacuugguauaag

SEQ ID NO: 223327 - RNA, 19 nt, Artificial Sequence
  Description of Artificial Sequence: Synthetic oligonucleotide
  Antisense strand to SEQ ID NO: 223326
cuuauaccaagucuaaccc

SEQ ID NO: 223328 - RNA, 19 nt, Artificial Sequence
  Description of Artificial Sequence: Synthetic oligonucleotide
  Sense strand starting at position 3792 of SEQ ID NO: 2875
ggaaggagugguuggguua

SEQ ID NO: 223329 - RNA, 19 nt, Artificial Sequence
  Description of Artificial Sequence: Synthetic oligonucleotide
  Antisense strand to SEQ ID NO: 223328
uaacccaaccacuccuucc

SEQ ID NO: 223330 - RNA, 19 nt, Artificial Sequence
  Description of Artificial Sequence: Synthetic oligonucleotide
  Sense strand starting at position 3793 of SEQ ID NO: 2875
gaaggagugguuggguuaa

SEQ ID NO: 223331 - RNA, 19 nt, Artificial Sequence
  Description of Artificial Sequence: Synthetic oligonucleotide
  Antisense strand to SEQ ID NO: 223330
uuaacccaaccacuccuuc

SEQ ID NO: 223332 - RNA, 19 nt, Artificial Sequence
  Description of Artificial Sequence: Synthetic oligonucleotide
  Sense strand starting at position 3795 of SEQ ID NO: 2875
aggagugguuggguuaagu

SEQ ID NO: 223333 - RNA, 19 nt, Artificial Sequence
  Description of Artificial Sequence: Synthetic oligonucleotide
  Antisense strand to SEQ ID NO: 223332
acuuaacccaaccacuccu

SEQ ID NO: 223334 - RNA, 19 nt, Artificial Sequence
  Description of Artificial Sequence: Synthetic oligonucleotide
  Sense strand starting at position 3804 of SEQ ID NO: 2875
uggguuaagucacuccaaa

SEQ ID NO: 223335 - RNA, 19 nt, Artificial Sequence
  Description of Artificial Sequence: Synthetic oligonucleotide
  Antisense strand to SEQ ID NO: 223334
uuuggagugacuuaaccca

SEQ ID NO: 223336 - RNA, 19 nt, Artificial Sequence
  Description of Artificial Sequence: Synthetic oligonucleotide
  Sense strand starting at position 3888 of SEQ ID NO: 2875
cguguaugucuuguuauau

SEQ ID NO: 223337 - RNA, 19 nt, Artificial Sequence
  Description of Artificial Sequence: Synthetic oligonucleotide
  Antisense strand to SEQ ID NO: 223336
auauaacaagacauacacg

SEQ ID NO: 223338 - RNA, 19 nt, Artificial Sequence
  Description of Artificial Sequence: Synthetic oligonucleotide
  Sense strand starting at position 242 of SEQ ID NO: 2876
acagcaagccugugauaag

SEQ ID NO: 223339 - RNA, 19 nt, Artificial Sequence
  Description of Artificial Sequence: Synthetic oligonucleotide
  Antisense strand to SEQ ID NO: 223338
cuuaucacaggcuugcugu

SEQ ID NO: 223340 - RNA, 19 nt, Artificial Sequence
  Description of Artificial Sequence: Synthetic oligonucleotide
  Sense strand starting at position 327 of SEQ ID NO: 2876
gcuaauuaucugcagcaga

SEQ ID NO: 223341 - RNA, 19 nt, Artificial Sequence
  Description of Artificial Sequence: Synthetic oligonucleotide
  Antisense strand to SEQ ID NO: 223340
ucugcugcagauaauuagc

SEQ ID NO: 223342 - RNA, 19 nt, Artificial Sequence
  Description of Artificial Sequence: Synthetic oligonucleotide
  Sense strand starting at position 385 of SEQ ID NO: 2876
guaguuuaggaacaccuua

SEQ ID NO: 223343 - RNA, 19 nt, Artificial Sequence
  Description of Artificial Sequence: Synthetic oligonucleotide
  Antisense strand to SEQ ID NO: 223342
uaagguguuccuaaacuac

SEQ ID NO: 223344 - RNA, 19 nt, Artificial Sequence
  Description of Artificial Sequence: Synthetic oligonucleotide
  Sense strand starting at position 473 of SEQ ID NO: 2876
uaggcaucauggcuaucau

SEQ ID NO: 223345 - RNA, 19 nt, Artificial Sequence
  Description of Artificial Sequence: Synthetic oligonucleotide
  Antisense strand to SEQ ID NO: 223344
augauagccaugaugccua

SEQ ID NO: 223346 - RNA, 19 nt, Artificial Sequence
  Description of Artificial Sequence: Synthetic oligonucleotide
  Sense strand starting at position 619 of SEQ ID NO: 2876
cuaguauaccaccgaccaa

SEQ ID NO: 223347 - RNA, 19 nt, Artificial Sequence
  Description of Artificial Sequence: Synthetic oligonucleotide
  Antisense strand to SEQ ID NO: 223346
uuggucggugguauacuag

SEQ ID NO: 223348 - RNA, 19 nt, Artificial Sequence
  Description of Artificial Sequence: Synthetic oligonucleotide
  Sense strand starting at position 650 of SEQ ID NO: 2876
aagguuuguccucagccuu

SEQ ID NO: 223349 - RNA, 19 nt, Artificial Sequence
  Description of Artificial Sequence: Synthetic oligonucleotide
  Antisense strand to SEQ ID NO: 223348
aaggcugaggacaaaccuu

SEQ ID NO: 223350 - RNA, 19 nt, Artificial Sequence
  Description of Artificial Sequence: Synthetic oligonucleotide
  Sense strand starting at position 883 of SEQ ID NO: 2876
aaagguaaugcucaaagug

SEQ ID NO: 223351 - RNA, 19 nt, Artificial Sequence
  Description of Artificial Sequence: Synthetic oligonucleotide
  Antisense strand to SEQ ID NO: 223350
cacuuugagcauuaccuuu

SEQ ID NO: 223352 - RNA, 19 nt, Artificial Sequence
  Description of Artificial Sequence: Synthetic oligonucleotide
  Sense strand starting at position 892 of SEQ ID NO: 2876
gcucaaagugcugaacuga

SEQ ID NO: 223353 - RNA, 19 nt, Artificial Sequence
  Description of Artificial Sequence: Synthetic oligonucleotide
  Antisense strand to SEQ ID NO: 223352
ucaguucagcacuuugagc

SEQ ID NO: 223354 - RNA, 19 nt, Artificial Sequence
  Description of Artificial Sequence: Synthetic oligonucleotide
  Sense strand starting at position 1028 of SEQ ID NO: 2876
uguagucccaacgauaaga

SEQ ID NO: 223355 - RNA, 19 nt, Artificial Sequence
  Description of Artificial Sequence: Synthetic oligonucleotide
  Antisense strand to SEQ ID NO: 223354
ucuuaucguugggacuaca

SEQ ID NO: 223356 - RNA, 19 nt, Artificial Sequence
  Description of Artificial Sequence: Synthetic oligonucleotide
  Sense strand starting at position 1049 of SEQ ID NO: 2876
agguguuggcaugaagugu

SEQ ID NO: 223357 - RNA, 19 nt, Artificial Sequence
  Description of Artificial Sequence: Synthetic oligonucleotide
  Antisense strand to SEQ ID NO: 223356
acacuucaugccaacaccu

SEQ ID NO: 223358 - RNA, 19 nt, Artificial Sequence
  Description of Artificial Sequence: Synthetic oligonucleotide
  Sense strand starting at position 1057 of SEQ ID NO: 2876
gcaugaaguguuuauaaau

SEQ ID NO: 223359 - RNA, 19 nt, Artificial Sequence
  Description of Artificial Sequence: Synthetic oligonucleotide
  Antisense strand to SEQ ID NO: 223358
auuuauaaacacuucaugc

SEQ ID NO: 223360 - RNA, 19 nt, Artificial Sequence
  Description of Artificial Sequence: Synthetic oligonucleotide
  Sense strand starting at position 1139 of SEQ ID NO: 2876
uccagaugugcuuaaaguc

SEQ ID NO: 223361 - RNA, 19 nt, Artificial Sequence
  Description of Artificial Sequence: Synthetic oligonucleotide
  Antisense strand to SEQ ID NO: 223360
gacuuuaagcacaucugga

SEQ ID NO: 223362 - RNA, 19 nt, Artificial Sequence
  Description of Artificial Sequence: Synthetic oligonucleotide
  Sense strand starting at position 1156 of SEQ ID NO: 2876
ucaaauguggacuggaauu

SEQ ID NO: 223363 - RNA, 19 nt, Artificial Sequence
  Description of Artificial Sequence: Synthetic oligonucleotide
  Antisense strand to SEQ ID NO: 223362
aauuccaguccacauuuga

SEQ ID NO: 223364 - RNA, 19 nt, Artificial Sequence
  Description of Artificial Sequence: Synthetic oligonucleotide
  Sense strand starting at position 1205 of SEQ ID NO: 2876
ugcuauuuauuaugaagga

SEQ ID NO: 223365 - RNA, 19 nt, Artificial Sequence
  Description of Artificial Sequence: Synthetic oligonucleotide
  Antisense strand to SEQ ID NO: 223364
uccuucauaauaaauagca

SEQ ID NO: 223366 - RNA, 19 nt, Artificial Sequence
  Description of Artificial Sequence: Synthetic oligonucleotide
  Sense strand starting at position 1206 of SEQ ID NO: 2876
gcuauuuauuaugaaggac

SEQ ID NO: 223367 - RNA, 19 nt, Artificial Sequence
  Description of Artificial Sequence: Synthetic oligonucleotide
  Antisense strand to SEQ ID NO: 223366
guccuucauaauaaauagc

SEQ ID NO: 223368 - RNA, 19 nt, Artificial Sequence
  Description of Artificial Sequence: Synthetic oligonucleotide
  Sense strand starting at position 1589 of SEQ ID NO: 2876
cgaagaacucccugaagac

SEQ ID NO: 223369 - RNA, 19 nt, Artificial Sequence
  Description of Artificial Sequence: Synthetic oligonucleotide
  Antisense strand to SEQ ID NO: 223368
gucuucagggaguucuucg

SEQ ID NO: 223370 - RNA, 19 nt, Artificial Sequence
  Description of Artificial Sequence: Synthetic oligonucleotide
  Sense strand starting at position 1717 of SEQ ID NO: 2876
cguuucuuggcguccgaca

SEQ ID NO: 223371 - RNA, 19 nt, Artificial Sequence
  Description of Artificial Sequence: Synthetic oligonucleotide
  Antisense strand to SEQ ID NO: 223370
ugucggacgccaagaaacg

SEQ ID NO: 223372 - RNA, 19 nt, Artificial Sequence
  Description of Artificial Sequence: Synthetic oligonucleotide
  Sense strand starting at position 1718 of SEQ ID NO: 2876
guuucuuggcguccgacaa

SEQ ID NO: 223373 - RNA, 19 nt, Artificial Sequence
  Description of Artificial Sequence: Synthetic oligonucleotide
  Antisense strand to SEQ ID NO: 223372
uugucggacgccaagaaac

SEQ ID NO: 223374 - RNA, 19 nt, Artificial Sequence
  Description of Artificial Sequence: Synthetic oligonucleotide
  Sense strand starting at position 1841 of SEQ ID NO: 2876
ucuugauggccucggauga

SEQ ID NO: 223375 - RNA, 19 nt, Artificial Sequence
  Description of Artificial Sequence: Synthetic oligonucleotide
  Antisense strand to SEQ ID NO: 223374
ucauccgaggccaucaaga

SEQ ID NO: 223376 - RNA, 19 nt, Artificial Sequence
  Description of Artificial Sequence: Synthetic oligonucleotide
  Sense strand starting at position 2024 of SEQ ID NO: 2876
gccacaucucauuggucga

SEQ ID NO: 223377 - RNA, 19 nt, Artificial Sequence
  Description of Artificial Sequence: Synthetic oligonucleotide
  Antisense strand to SEQ ID NO: 223376
ucgaccaaugagauguggc

SEQ ID NO: 223378 - RNA, 19 nt, Artificial Sequence
  Description of Artificial Sequence: Synthetic oligonucleotide
  Sense strand starting at position 2306 of SEQ ID NO: 2876
gagugaguuuagucugacu

SEQ ID NO: 223379 - RNA, 19 nt, Artificial Sequence
  Description of Artificial Sequence: Synthetic oligonucleotide
  Antisense strand to SEQ ID NO: 223378
agucagacuaaacucacuc

SEQ ID NO: 223380 - RNA, 19 nt, Artificial Sequence
  Description of Artificial Sequence: Synthetic oligonucleotide
  Sense strand starting at position 2352 of SEQ ID NO: 2876
acugcaguucuccaacguu

SEQ ID NO: 223381 - RNA, 19 nt, Artificial Sequence
  Description of Artificial Sequence: Synthetic oligonucleotide
  Antisense strand to SEQ ID NO: 223380
aacguuggagaacugcagu

SEQ ID NO: 223382 - RNA, 19 nt, Artificial Sequence
  Description of Artificial Sequence: Synthetic oligonucleotide
  Sense strand starting at position 2401 of SEQ ID NO: 2876
uguggauuauaucuaucau

SEQ ID NO: 223383 - RNA, 19 nt, Artificial Sequence
  Description of Artificial Sequence: Synthetic oligonucleotide
  Antisense strand to SEQ ID NO: 223382
augauagauauaauccaca

SEQ ID NO: 223384 - RNA, 19 nt, Artificial Sequence
  Description of Artificial Sequence: Synthetic oligonucleotide
  Sense strand starting at position 2419 of SEQ ID NO: 2876
uacguacugcauuagagau

SEQ ID NO: 223385 - RNA, 19 nt, Artificial Sequence
  Description of Artificial Sequence: Synthetic oligonucleotide
  Antisense strand to SEQ ID NO: 223384
aucucuaaugcaguacgua

SEQ ID NO: 223386 - RNA, 19 nt, Artificial Sequence
  Description of Artificial Sequence: Synthetic oligonucleotide
  Sense strand starting at position 2466 of SEQ ID NO: 2876
ugggcaauuuaguaagaau

SEQ ID NO: 223387 - RNA, 19 nt, Artificial Sequence
  Description of Artificial Sequence: Synthetic oligonucleotide
  Antisense strand to SEQ ID NO: 223386
auucuuacuaaauugccca

SEQ ID NO: 223388 - RNA, 19 nt, Artificial Sequence
  Description of Artificial Sequence: Synthetic oligonucleotide
  Sense strand starting at position 2826 of SEQ ID NO: 2876
cagaguaguccuugguauu

SEQ ID NO: 223389 - RNA, 19 nt, Artificial Sequence
  Description of Artificial Sequence: Synthetic oligonucleotide
  Antisense strand to SEQ ID NO: 223388
aauaccaaggacuacucug

SEQ ID NO: 223390 - RNA, 19 nt, Artificial Sequence
  Description of Artificial Sequence: Synthetic oligonucleotide
  Sense strand starting at position 2827 of SEQ ID NO: 2876
agaguaguccuugguauuc

SEQ ID NO: 223391 - RNA, 19 nt, Artificial Sequence
  Description of Artificial Sequence: Synthetic oligonucleotide
  Antisense strand to SEQ ID NO: 223390
gaauaccaaggacuacucu

SEQ ID NO: 223392 - RNA, 19 nt, Artificial Sequence
  Description of Artificial Sequence: Synthetic oligonucleotide
  Sense strand starting at position 3269 of SEQ ID NO: 2876
gggauaaacgugggaugca

SEQ ID NO: 223393 - RNA, 19 nt, Artificial Sequence
  Description of Artificial Sequence: Synthetic oligonucleotide
  Antisense strand to SEQ ID NO: 223392
ugcaucccacguuuauccc

SEQ ID NO: 223394 - RNA, 19 nt, Artificial Sequence
  Description of Artificial Sequence: Synthetic oligonucleotide
  Sense strand starting at position 3278 of SEQ ID NO: 2876
gugggaugcagugauuauu

SEQ ID NO: 223395 - RNA, 19 nt, Artificial Sequence
  Description of Artificial Sequence: Synthetic oligonucleotide
  Antisense strand to SEQ ID NO: 223394
aauaaucacugcaucccac

SEQ ID NO: 223396 - RNA, 19 nt, Artificial Sequence
  Description of Artificial Sequence: Synthetic oligonucleotide
  Sense strand starting at position 3284 of SEQ ID NO: 2876
ugcagugauuauuuccacu

SEQ ID NO: 223397 - RNA, 19 nt, Artificial Sequence
  Description of Artificial Sequence: Synthetic oligonucleotide
  Antisense strand to SEQ ID NO: 223396
aguggaaauaaucacugca

SEQ ID NO: 223398 - RNA, 19 nt, Artificial Sequence
  Description of Artificial Sequence: Synthetic oligonucleotide
  Sense strand starting at position 3287 of SEQ ID NO: 2876
agugauuauuuccacuaga

SEQ ID NO: 223399 - RNA, 19 nt, Artificial Sequence
  Description of Artificial Sequence: Synthetic oligonucleotide
  Antisense strand to SEQ ID NO: 223398
ucuaguggaaauaaucacu

SEQ ID NO: 223400 - RNA, 19 nt, Artificial Sequence
  Description of Artificial Sequence: Synthetic oligonucleotide
  Sense strand starting at position 3301 of SEQ ID NO: 2876
cuagaacugcuauaucaug

SEQ ID NO: 223401 - RNA, 19 nt, Artificial Sequence
  Description of Artificial Sequence: Synthetic oligonucleotide
  Antisense strand to SEQ ID NO: 223400
caugauauagcaguucuag

SEQ ID NO: 223402 - RNA, 19 nt, Artificial Sequence
  Description of Artificial Sequence: Synthetic oligonucleotide
  Sense strand starting at position 3307 of SEQ ID NO: 2876
cugcuauaucaugaccaug

SEQ ID NO: 223403 - RNA, 19 nt, Artificial Sequence
  Description of Artificial Sequence: Synthetic oligonucleotide
  Antisense strand to SEQ ID NO: 223402
cauggucaugauauagcag

SEQ ID NO: 223404 - RNA, 19 nt, Artificial Sequence
  Description of Artificial Sequence: Synthetic oligonucleotide
  Sense strand starting at position 3309 of SEQ ID NO: 2876
gcuauaucaugaccaugaa

SEQ ID NO: 223405 - RNA, 19 nt, Artificial Sequence
  Description of Artificial Sequence: Synthetic oligonucleotide
  Antisense strand to SEQ ID NO: 223404
uucauggucaugauauagc

SEQ ID NO: 223406 - RNA, 19 nt, Artificial Sequence
  Description of Artificial Sequence: Synthetic oligonucleotide
  Sense strand starting at position 3425 of SEQ ID NO: 2876
uaguaaaggucacucaguu

SEQ ID NO: 223407 - RNA, 19 nt, Artificial Sequence
  Description of Artificial Sequence: Synthetic oligonucleotide
  Antisense strand to SEQ ID NO: 223406
aacugagugaccuuuacua

SEQ ID NO: 223408 - RNA, 19 nt, Artificial Sequence
  Description of Artificial Sequence: Synthetic oligonucleotide
  Sense strand starting at position 3479 of SEQ ID NO: 2876
gauuuccuauaggguauua

SEQ ID NO: 223409 - RNA, 19 nt, Artificial Sequence
  Description of Artificial Sequence: Synthetic oligonucleotide
  Antisense strand to SEQ ID NO: 223408
uaauacccuauaggaaauc

SEQ ID NO: 223410 - RNA, 19 nt, Artificial Sequence
  Description of Artificial Sequence: Synthetic oligonucleotide
  Sense strand starting at position 3511 of SEQ ID NO: 2876
uguguuaugucaccagaac

SEQ ID NO: 223411 - RNA, 19 nt, Artificial Sequence
  Description of Artificial Sequence: Synthetic oligonucleotide
  Antisense strand to SEQ ID NO: 223410
guucuggugacauaacaca

SEQ ID NO: 223412 - RNA, 19 nt, Artificial Sequence
  Description of Artificial Sequence: Synthetic oligonucleotide
  Sense strand starting at position 3512 of SEQ ID NO: 2876
guguuaugucaccagaaca

SEQ ID NO: 223413 - RNA, 19 nt, Artificial Sequence
  Description of Artificial Sequence: Synthetic oligonucleotide
  Antisense strand to SEQ ID NO: 223412
uguucuggugacauaacac

SEQ ID NO: 223414 - RNA, 19 nt, Artificial Sequence
  Description of Artificial Sequence: Synthetic oligonucleotide
  Sense strand starting at position 3627 of SEQ ID NO: 2876
gguagaguucagugugaac

SEQ ID NO: 223415 - RNA, 19 nt, Artificial Sequence
  Description of Artificial Sequence: Synthetic oligonucleotide
  Antisense strand to SEQ ID NO: 223414
guucacacugaacucuacc

SEQ ID NO: 223416 - RNA, 19 nt, Artificial Sequence
  Description of Artificial Sequence: Synthetic oligonucleotide
  Sense strand starting at position 3821 of SEQ ID NO: 2876
uuucuucugugcccaggaa

SEQ ID NO: 223417 - RNA, 19 nt, Artificial Sequence
  Description of Artificial Sequence: Synthetic oligonucleotide
  Antisense strand to SEQ ID NO: 223416
uuccugggcacagaagaaa

SEQ ID NO: 223418 - RNA, 19 nt, Artificial Sequence
  Description of Artificial Sequence: Synthetic oligonucleotide
  Sense strand starting at position 201 of SEQ ID NO: 2877
aauggcaaaucagugugaa

SEQ ID NO: 223419 - RNA, 19 nt, Artificial Sequence
  Description of Artificial Sequence: Synthetic oligonucleotide
  Antisense strand to SEQ ID NO: 223418
uucacacugauuugccauu

SEQ ID NO: 223420 - RNA, 19 nt, Artificial Sequence
  Description of Artificial Sequence: Synthetic oligonucleotide
  Sense strand starting at position 202 of SEQ ID NO: 2877
auggcaaaucagugugaau

SEQ ID NO: 223421 - RNA, 19 nt, Artificial Sequence
  Description of Artificial Sequence: Synthetic oligonucleotide
  Antisense strand to SEQ ID NO: 223420
auucacacugauuugccau

SEQ ID NO: 223422 - RNA, 19 nt, Artificial Sequence
  Description of Artificial Sequence: Synthetic oligonucleotide
  Sense strand starting at position 249 of SEQ ID NO: 2877
acauccauguagcuagauu

SEQ ID NO: 223423 - RNA, 19 nt, Artificial Sequence
  Description of Artificial Sequence: Synthetic oligonucleotide
  Antisense strand to SEQ ID NO: 223422
aaucuagcuacauggaugu

SEQ ID NO: 223424 - RNA, 19 nt, Artificial Sequence
  Description of Artificial Sequence: Synthetic oligonucleotide
  Sense strand starting at position 267 of SEQ ID NO: 2877
uugugaaaucacugaagau

SEQ ID NO: 223425 - RNA, 19 nt, Artificial Sequence
  Description of Artificial Sequence: Synthetic oligonucleotide
  Antisense strand to SEQ ID NO: 223424
aucuucagugauuucacaa

SEQ ID NO: 223426 - RNA, 19 nt, Artificial Sequence
  Description of Artificial Sequence: Synthetic oligonucleotide
  Sense strand starting at position 295 of SEQ ID NO: 2877
aaggucaugagugguagua

SEQ ID NO: 223427 - RNA, 19 nt, Artificial Sequence
  Description of Artificial Sequence: Synthetic oligonucleotide
  Antisense strand to SEQ ID NO: 223426
uacuaccacucaugaccuu

SEQ ID NO: 223428 - RNA, 19 nt, Artificial Sequence
  Description of Artificial Sequence: Synthetic oligonucleotide
  Sense strand starting at position 422 of SEQ ID NO: 2877
aguuauagcguugccugua

SEQ ID NO: 223429 - RNA, 19 nt, Artificial Sequence
  Description of Artificial Sequence: Synthetic oligonucleotide
  Antisense strand to SEQ ID NO: 223428
uacaggcaacgcuauaacu

SEQ ID NO: 223430 - RNA, 19 nt, Artificial Sequence
  Description of Artificial Sequence: Synthetic oligonucleotide
  Sense strand starting at position 638 of SEQ ID NO: 2877
cccggaguuuccucagaag

SEQ ID NO: 223431 - RNA, 19 nt, Artificial Sequence
  Description of Artificial Sequence: Synthetic oligonucleotide
  Antisense strand to SEQ ID NO: 223430
cuucugaggaaacuccggg

SEQ ID NO: 223432 - RNA, 19 nt, Artificial Sequence
  Description of Artificial Sequence: Synthetic oligonucleotide
  Sense strand starting at position 649 of SEQ ID NO: 2877
cucagaaggugcuuauacu

SEQ ID NO: 223433 - RNA, 19 nt, Artificial Sequence
  Description of Artificial Sequence: Synthetic oligonucleotide
  Antisense strand to SEQ ID NO: 223432
aguauaagcaccuucugag

SEQ ID NO: 223434 - RNA, 19 nt, Artificial Sequence
  Description of Artificial Sequence: Synthetic oligonucleotide
  Sense strand starting at position 744 of SEQ ID NO: 2877
ucauguuugguguaaguag

SEQ ID NO: 223435 - RNA, 19 nt, Artificial Sequence
  Description of Artificial Sequence: Synthetic oligonucleotide
  Antisense strand to SEQ ID NO: 223434
cuacuuacaccaaacauga

SEQ ID NO: 223436 - RNA, 19 nt, Artificial Sequence
  Description of Artificial Sequence: Synthetic oligonucleotide
  Sense strand starting at position 778 of SEQ ID NO: 2877
agagaagggaaucgguuau

SEQ ID NO: 223437 - RNA, 19 nt, Artificial Sequence
  Description of Artificial Sequence: Synthetic oligonucleotide
  Antisense strand to SEQ ID NO: 223436
auaaccgauucccuucucu

SEQ ID NO: 223438 - RNA, 19 nt, Artificial Sequence
  Description of Artificial Sequence: Synthetic oligonucleotide
  Sense strand starting at position 868 of SEQ ID NO: 2877
uuccaaagagaucguaaug

SEQ ID NO: 223439 - RNA, 19 nt, Artificial Sequence
  Description of Artificial Sequence: Synthetic oligonucleotide
  Antisense strand to SEQ ID NO: 223438
cauuacgaucucuuuggaa

SEQ ID NO: 223440 - RNA, 19 nt, Artificial Sequence
  Description of Artificial Sequence: Synthetic oligonucleotide
  Sense strand starting at position 1364 of SEQ ID NO: 2877
gagggaaucgcugggcaga

SEQ ID NO: 223441 - RNA, 19 nt, Artificial Sequence
  Description of Artificial Sequence: Synthetic oligonucleotide
  Antisense strand to SEQ ID NO: 223440
ucugcccagcgauucccuc

SEQ ID NO: 223442 - RNA, 19 nt, Artificial Sequence
  Description of Artificial Sequence: Synthetic oligonucleotide
  Sense strand starting at position 2344 of SEQ ID NO: 2877
ucuggauucugagucauac

SEQ ID NO: 223443 - RNA, 19 nt, Artificial Sequence
  Description of Artificial Sequence: Synthetic oligonucleotide
  Antisense strand to SEQ ID NO: 223442
guaugacucagaauccaga

SEQ ID NO: 223444 - RNA, 19 nt, Artificial Sequence
  Description of Artificial Sequence: Synthetic oligonucleotide
  Sense strand starting at position 2550 of SEQ ID NO: 2877
auaaguugugauugguaac

SEQ ID NO: 223445 - RNA, 19 nt, Artificial Sequence
  Description of Artificial Sequence: Synthetic oligonucleotide
  Antisense strand to SEQ ID NO: 223444
guuaccaaucacaacuuau

SEQ ID NO: 223446 - RNA, 19 nt, Artificial Sequence
  Description of Artificial Sequence: Synthetic oligonucleotide
  Sense strand starting at position 2621 of SEQ ID NO: 2877
aggaucuauggcuaagcua

SEQ ID NO: 223447 - RNA, 19 nt, Artificial Sequence
  Description of Artificial Sequence: Synthetic oligonucleotide
  Antisense strand to SEQ ID NO: 223446
uagcuuagccauagauccu

SEQ ID NO: 223448 - RNA, 19 nt, Artificial Sequence
  Description of Artificial Sequence: Synthetic oligonucleotide
  Sense strand starting at position 2624 of SEQ ID NO: 2877
aucuauggcuaagcuaaua

SEQ ID NO: 223449 - RNA, 19 nt, Artificial Sequence
  Description of Artificial Sequence: Synthetic oligonucleotide
  Antisense strand to SEQ ID NO: 223448
uauuagcuuagccauagau

SEQ ID NO: 223450 - RNA, 19 nt, Artificial Sequence
  Description of Artificial Sequence: Synthetic oligonucleotide
  Sense strand starting at position 2634 of SEQ ID NO: 2877
aagcuaauacuugguagga

SEQ ID NO: 223451 - RNA, 19 nt, Artificial Sequence
  Description of Artificial Sequence: Synthetic oligonucleotide
  Antisense strand to SEQ ID NO: 223450
uccuaccaaguauuagcuu

SEQ ID NO: 223452 - RNA, 19 nt, Artificial Sequence
  Description of Artificial Sequence: Synthetic oligonucleotide
  Sense strand starting at position 2635 of SEQ ID NO: 2877
agcuaauacuugguaggaa

SEQ ID NO: 223453 - RNA, 19 nt, Artificial Sequence
  Description of Artificial Sequence: Synthetic oligonucleotide
  Antisense strand to SEQ ID NO: 223452
uuccuaccaaguauuagcu

SEQ ID NO: 223454 - RNA, 19 nt, Artificial Sequence
  Description of Artificial Sequence: Synthetic oligonucleotide
  Sense strand starting at position 2719 of SEQ ID NO: 2877
gucucaggaacuggucuaa

SEQ ID NO: 223455 - RNA, 19 nt, Artificial Sequence
  Description of Artificial Sequence: Synthetic oligonucleotide
  Antisense strand to SEQ ID NO: 223454
uuagaccaguuccugagac

SEQ ID NO: 223456 - RNA, 19 nt, Artificial Sequence
  Description of Artificial Sequence: Synthetic oligonucleotide
  Sense strand starting at position 2745 of SEQ ID NO: 2877
uguaguaacucauuuaguc

SEQ ID NO: 223457 - RNA, 19 nt, Artificial Sequence
  Description of Artificial Sequence: Synthetic oligonucleotide
  Antisense strand to SEQ ID NO: 223456
gacuaaaugaguuacuaca

SEQ ID NO: 223458 - RNA, 19 nt, Artificial Sequence
  Description of Artificial Sequence: Synthetic oligonucleotide
  Sense strand starting at position 2778 of SEQ ID NO: 2877
acaagauaguggcuccuau

SEQ ID NO: 223459 - RNA, 19 nt, Artificial Sequence
  Description of Artificial Sequence: Synthetic oligonucleotide
  Antisense strand to SEQ ID NO: 223458
auaggagccacuaucuugu

SEQ ID NO: 223460 - RNA, 19 nt, Artificial Sequence
  Description of Artificial Sequence: Synthetic oligonucleotide
  Sense strand starting at position 2874 of SEQ ID NO: 2877
cuaugauguuaagcauuau

SEQ ID NO: 223461 - RNA, 19 nt, Artificial Sequence
  Description of Artificial Sequence: Synthetic oligonucleotide
  Antisense strand to SEQ ID NO: 223460
auaaugcuuaacaucauag

SEQ ID NO: 223462 - RNA, 19 nt, Artificial Sequence
  Description of Artificial Sequence: Synthetic oligonucleotide
  Sense strand starting at position 2878 of SEQ ID NO: 2877
gauguuaagcauuaugaca

SEQ ID NO: 223463 - RNA, 19 nt, Artificial Sequence
  Description of Artificial Sequence: Synthetic oligonucleotide
  Antisense strand to SEQ ID NO: 223462
ugucauaaugcuuaacauc

SEQ ID NO: 223464 - RNA, 19 nt, Artificial Sequence
  Description of Artificial Sequence: Synthetic oligonucleotide
  Sense strand starting at position 2911 of SEQ ID NO: 2877
uuuguuacacacuguaaca

SEQ ID NO: 223465 - RNA, 19 nt, Artificial Sequence
  Description of Artificial Sequence: Synthetic oligonucleotide
  Antisense strand to SEQ ID NO: 223464
uguuacaguguguaacaaa

SEQ ID NO: 223466 - RNA, 19 nt, Artificial Sequence
  Description of Artificial Sequence: Synthetic oligonucleotide
  Sense strand starting at position 3027 of SEQ ID NO: 2877
ucuaucucuuaggugauga

SEQ ID NO: 223467 - RNA, 19 nt, Artificial Sequence
  Description of Artificial Sequence: Synthetic oligonucleotide
  Antisense strand to SEQ ID NO: 223466
ucaucaccuaagagauaga

SEQ ID NO: 223468 - RNA, 19 nt, Artificial Sequence
  Description of Artificial Sequence: Synthetic oligonucleotide
  Sense strand starting at position 3028 of SEQ ID NO: 2877
cuaucucuuaggugaugag

SEQ ID NO: 223469 - RNA, 19 nt, Artificial Sequence
  Description of Artificial Sequence: Synthetic oligonucleotide
  Antisense strand to SEQ ID NO: 223468
cucaucaccuaagagauag

SEQ ID NO: 223470 - RNA, 19 nt, Artificial Sequence
  Description of Artificial Sequence: Synthetic oligonucleotide
  Sense strand starting at position 3158 of SEQ ID NO: 2877
uaggguaaaugcuuuaaga

SEQ ID NO: 223471 - RNA, 19 nt, Artificial Sequence
  Description of Artificial Sequence: Synthetic oligonucleotide
  Antisense strand to SEQ ID NO: 223470
ucuuaaagcauuuacccua

SEQ ID NO: 223472 - RNA, 19 nt, Artificial Sequence
  Description of Artificial Sequence: Synthetic oligonucleotide
  Sense strand starting at position 3474 of SEQ ID NO: 2877
guaagagauggugauuggu

SEQ ID NO: 223473 - RNA, 19 nt, Artificial Sequence
  Description of Artificial Sequence: Synthetic oligonucleotide
  Antisense strand to SEQ ID NO: 223472
accaaucaccaucucuuac

SEQ ID NO: 223474 - RNA, 19 nt, Artificial Sequence
  Description of Artificial Sequence: Synthetic oligonucleotide
  Sense strand starting at position 3480 of SEQ ID NO: 2877
gauggugauugguuggaua

SEQ ID NO: 223475 - RNA, 19 nt, Artificial Sequence
  Description of Artificial Sequence: Synthetic oligonucleotide
  Antisense strand to SEQ ID NO: 223474
uauccaaccaaucaccauc

SEQ ID NO: 223476 - RNA, 19 nt, Artificial Sequence
  Description of Artificial Sequence: Synthetic oligonucleotide
  Sense strand starting at position 3482 of SEQ ID NO: 2877
uggugauugguuggauaug

SEQ ID NO: 223477 - RNA, 19 nt, Artificial Sequence
  Description of Artificial Sequence: Synthetic oligonucleotide
  Antisense strand to SEQ ID NO: 223476
cauauccaaccaaucacca

SEQ ID NO: 223478 - RNA, 19 nt, Artificial Sequence
  Description of Artificial Sequence: Synthetic oligonucleotide
  Sense strand starting at position 3534 of SEQ ID NO: 2877
acuucuuauggcugaauac

SEQ ID NO: 223479 - RNA, 19 nt, Artificial Sequence
  Description of Artificial Sequence: Synthetic oligonucleotide
  Antisense strand to SEQ ID NO: 223478
guauucagccauaagaagu

SEQ ID NO: 223480 - RNA, 19 nt, Artificial Sequence
  Description of Artificial Sequence: Synthetic oligonucleotide
  Sense strand starting at position 3535 of SEQ ID NO: 2877
cuucuuauggcugaauacu

SEQ ID NO: 223481 - RNA, 19 nt, Artificial Sequence
  Description of Artificial Sequence: Synthetic oligonucleotide
  Antisense strand to SEQ ID NO: 223480
aguauucagccauaagaag

SEQ ID NO: 223482 - RNA, 19 nt, Artificial Sequence
  Description of Artificial Sequence: Synthetic oligonucleotide
  Sense strand starting at position 3544 of SEQ ID NO: 2877
gcugaauacuacccacuga

SEQ ID NO: 223483 - RNA, 19 nt, Artificial Sequence
  Description of Artificial Sequence: Synthetic oligonucleotide
  Antisense strand to SEQ ID NO: 223482
ucaguggguaguauucagc

SEQ ID NO: 223484 - RNA, 19 nt, Artificial Sequence
  Description of Artificial Sequence: Synthetic oligonucleotide
  Sense strand starting at position 3590 of SEQ ID NO: 2877
aggguucugacuuggacau

SEQ ID NO: 223485 - RNA, 19 nt, Artificial Sequence
  Description of Artificial Sequence: Synthetic oligonucleotide
  Antisense strand to SEQ ID NO: 223484
auguccaagucagaacccu

SEQ ID NO: 223486 - RNA, 19 nt, Artificial Sequence
  Description of Artificial Sequence: Synthetic oligonucleotide
  Sense strand starting at position 3591 of SEQ ID NO: 2877
ggguucugacuuggacaua

SEQ ID NO: 223487 - RNA, 19 nt, Artificial Sequence
  Description of Artificial Sequence: Synthetic oligonucleotide
  Antisense strand to SEQ ID NO: 223486
uauguccaagucagaaccc

SEQ ID NO: 223488 - RNA, 19 nt, Artificial Sequence
  Description of Artificial Sequence: Synthetic oligonucleotide
  Sense strand starting at position 3640 of SEQ ID NO: 2877
gugaauauacccugcauaa

SEQ ID NO: 223489 - RNA, 19 nt, Artificial Sequence
  Description of Artificial Sequence: Synthetic oligonucleotide
  Antisense strand to SEQ ID NO: 223488
uuaugcaggguauauucac

SEQ ID NO: 223490 - RNA, 19 nt, Artificial Sequence
  Description of Artificial Sequence: Synthetic oligonucleotide
  Sense strand starting at position 3664 of SEQ ID NO: 2877
auggguaaugucuagauug

SEQ ID NO: 223491 - RNA, 19 nt, Artificial Sequence
  Description of Artificial Sequence: Synthetic oligonucleotide
  Antisense strand to SEQ ID NO: 223490
caaucuagacauuacccau

SEQ ID NO: 223492 - RNA, 19 nt, Artificial Sequence
  Description of Artificial Sequence: Synthetic oligonucleotide
  Sense strand starting at position 3716 of SEQ ID NO: 2877
caaagaaagugugcagaau

SEQ ID NO: 223493 - RNA, 19 nt, Artificial Sequence
  Description of Artificial Sequence: Synthetic oligonucleotide
  Antisense strand to SEQ ID NO: 223492
auucugcacacuuucuuug

SEQ ID NO: 223494 - RNA, 19 nt, Artificial Sequence
  Description of Artificial Sequence: Synthetic oligonucleotide
  Sense strand starting at position 3722 of SEQ ID NO: 2877
aagugugcagaauaaguaa

SEQ ID NO: 223495 - RNA, 19 nt, Artificial Sequence
  Description of Artificial Sequence: Synthetic oligonucleotide
  Antisense strand to SEQ ID NO: 223494
uuacuuauucugcacacuu

SEQ ID NO: 223496 - RNA, 19 nt, Artificial Sequence
  Description of Artificial Sequence: Synthetic oligonucleotide
  Sense strand starting at position 3866 of SEQ ID NO: 2877
cuguucuuacuauauggua

SEQ ID NO: 223497 - RNA, 19 nt, Artificial Sequence
  Description of Artificial Sequence: Synthetic oligonucleotide
  Antisense strand to SEQ ID NO: 223496
uaccauauaguaagaacag

SEQ ID NO: 223498 - RNA, 19 nt, Artificial Sequence
  Description of Artificial Sequence: Synthetic oligonucleotide
  Sense strand starting at position 1 of SEQ ID NO: 2878
aguuuaaaccuaggaacuu

SEQ ID NO: 223499 - RNA, 19 nt, Artificial Sequence
  Description of Artificial Sequence: Synthetic oligonucleotide
  Antisense strand to SEQ ID NO: 223498
aaguuccuagguuuaaacu

SEQ ID NO: 223500 - RNA, 19 nt, Artificial Sequence
  Description of Artificial Sequence: Synthetic oligonucleotide
  Sense strand starting at position 72 of SEQ ID NO: 2878
ugaauauaauuuggacaca

SEQ ID NO: 223501 - RNA, 19 nt, Artificial Sequence
  Description of Artificial Sequence: Synthetic oligonucleotide
  Antisense strand to SEQ ID NO: 223500
uguguccaaauuauauuca

SEQ ID NO: 223502 - RNA, 19 nt, Artificial Sequence
  Description of Artificial Sequence: Synthetic oligonucleotide
  Sense strand starting at position 188 of SEQ ID NO: 2878
acaaucguauuauuagcaa

SEQ ID NO: 223503 - RNA, 19 nt, Artificial Sequence
  Description of Artificial Sequence: Synthetic oligonucleotide
  Antisense strand to SEQ ID NO: 223502
uugcuaauaauacgauugu

SEQ ID NO: 223504 - RNA, 19 nt, Artificial Sequence
  Description of Artificial Sequence: Synthetic oligonucleotide
  Sense strand starting at position 617 of SEQ ID NO: 2878
ucccaaagugcugauguau

SEQ ID NO: 223505 - RNA, 19 nt, Artificial Sequence
  Description of Artificial Sequence: Synthetic oligonucleotide
  Antisense strand to SEQ ID NO: 223504
auacaucagcacuuuggga

SEQ ID NO: 223506 - RNA, 19 nt, Artificial Sequence
  Description of Artificial Sequence: Synthetic oligonucleotide
  Sense strand starting at position 628 of SEQ ID NO: 2878
ugauguauuacaggccuga

SEQ ID NO: 223507 - RNA, 19 nt, Artificial Sequence
  Description of Artificial Sequence: Synthetic oligonucleotide
  Antisense strand to SEQ ID NO: 223506
ucaggccuguaauacauca

SEQ ID NO: 223508 - RNA, 19 nt, Artificial Sequence
  Description of Artificial Sequence: Synthetic oligonucleotide
  Sense strand starting at position 752 of SEQ ID NO: 2878
guaguacgggaucaugcua

SEQ ID NO: 223509 - RNA, 19 nt, Artificial Sequence
  Description of Artificial Sequence: Synthetic oligonucleotide
  Antisense strand to SEQ ID NO: 223508
uagcaugaucccguacuac

SEQ ID NO: 223510 - RNA, 19 nt, Artificial Sequence
  Description of Artificial Sequence: Synthetic oligonucleotide
  Sense strand starting at position 947 of SEQ ID NO: 2878
uuugaugaccuugggaagu

SEQ ID NO: 223511 - RNA, 19 nt, Artificial Sequence
  Description of Artificial Sequence: Synthetic oligonucleotide
  Antisense strand to SEQ ID NO: 223510
acuucccaaggucaucaaa

SEQ ID NO: 223512 - RNA, 19 nt, Artificial Sequence
  Description of Artificial Sequence: Synthetic oligonucleotide
  Sense strand starting at position 960 of SEQ ID NO: 2878
ggaaguucuuaaccaacag

SEQ ID NO: 223513 - RNA, 19 nt, Artificial Sequence
  Description of Artificial Sequence: Synthetic oligonucleotide
  Antisense strand to SEQ ID NO: 223512
cuguugguuaagaacuucc

SEQ ID NO: 223514 - RNA, 19 nt, Artificial Sequence
  Description of Artificial Sequence: Synthetic oligonucleotide
  Sense strand starting at position 1078 of SEQ ID NO: 2878
cguacuaaaggagaguuua

SEQ ID NO: 223515 - RNA, 19 nt, Artificial Sequence
  Description of Artificial Sequence: Synthetic oligonucleotide
  Antisense strand to SEQ ID NO: 223514
uaaacucuccuuuaguacg

SEQ ID NO: 223516 - RNA, 19 nt, Artificial Sequence
  Description of Artificial Sequence: Synthetic oligonucleotide
  Sense strand starting at position 1088 of SEQ ID NO: 2878
gagaguuuauagcugauga

SEQ ID NO: 223517 - RNA, 19 nt, Artificial Sequence
  Description of Artificial Sequence: Synthetic oligonucleotide
  Antisense strand to SEQ ID NO: 223516
ucaucagcuauaaacucuc

SEQ ID NO: 223518 - RNA, 19 nt, Artificial Sequence
  Description of Artificial Sequence: Synthetic oligonucleotide
  Sense strand starting at position 1089 of SEQ ID NO: 2878
agaguuuauagcugaugaa

SEQ ID NO: 223519 - RNA, 19 nt, Artificial Sequence
  Description of Artificial Sequence: Synthetic oligonucleotide
  Antisense strand to SEQ ID NO: 223518
uucaucagcuauaaacucu

SEQ ID NO: 223520 - RNA, 19 nt, Artificial Sequence
  Description of Artificial Sequence: Synthetic oligonucleotide
  Sense strand starting at position 1090 of SEQ ID NO: 2878
gaguuuauagcugaugaac

SEQ ID NO: 223521 - RNA, 19 nt, Artificial Sequence
  Description of Artificial Sequence: Synthetic oligonucleotide
  Antisense strand to SEQ ID NO: 223520
guucaucagcuauaaacuc

SEQ ID NO: 223522 - RNA, 19 nt, Artificial Sequence
  Description of Artificial Sequence: Synthetic oligonucleotide
  Sense strand starting at position 2240 of SEQ ID NO: 2878
gugucucguccguuuggga

SEQ ID NO: 223523 - RNA, 19 nt, Artificial Sequence
  Description of Artificial Sequence: Synthetic oligonucleotide
  Antisense strand to SEQ ID NO: 223522
ucccaaacggacgagacac

SEQ ID NO: 223524 - RNA, 19 nt, Artificial Sequence
  Description of Artificial Sequence: Synthetic oligonucleotide
  Sense strand starting at position 2439 of SEQ ID NO: 2878
uucugaaucugguuccuau

SEQ ID NO: 223525 - RNA, 19 nt, Artificial Sequence
  Description of Artificial Sequence: Synthetic oligonucleotide
  Antisense strand to SEQ ID NO: 223524
auaggaaccagauucagaa

SEQ ID NO: 223526 - RNA, 19 nt, Artificial Sequence
  Description of Artificial Sequence: Synthetic oligonucleotide
  Sense strand starting at position 2490 of SEQ ID NO: 2878
gagucaaggcaagaguguu

SEQ ID NO: 223527 - RNA, 19 nt, Artificial Sequence
  Description of Artificial Sequence: Synthetic oligonucleotide
  Antisense strand to SEQ ID NO: 223526
aacacucuugccuugacuc

SEQ ID NO: 223528 - RNA, 19 nt, Artificial Sequence
  Description of Artificial Sequence: Synthetic oligonucleotide
  Sense strand starting at position 2528 of SEQ ID NO: 2878
acagaucucugauggauuu

SEQ ID NO: 223529 - RNA, 19 nt, Artificial Sequence
  Description of Artificial Sequence: Synthetic oligonucleotide
  Antisense strand to SEQ ID NO: 223528
aaauccaucagagaucugu

SEQ ID NO: 223530 - RNA, 19 nt, Artificial Sequence
  Description of Artificial Sequence: Synthetic oligonucleotide
  Sense strand starting at position 2548 of SEQ ID NO: 2878
uugacuccucugugggaga

SEQ ID NO: 223531 - RNA, 19 nt, Artificial Sequence
  Description of Artificial Sequence: Synthetic oligonucleotide
  Antisense strand to SEQ ID NO: 223530
ucucccacagaggagucaa

SEQ ID NO: 223532 - RNA, 19 nt, Artificial Sequence
  Description of Artificial Sequence: Synthetic oligonucleotide
  Sense strand starting at position 2550 of SEQ ID NO: 2878
gacuccucugugggagaaa

SEQ ID NO: 223533 - RNA, 19 nt, Artificial Sequence
  Description of Artificial Sequence: Synthetic oligonucleotide
  Antisense strand to SEQ ID NO: 223532
uuucucccacagaggaguc

SEQ ID NO: 223534 - RNA, 19 nt, Artificial Sequence
  Description of Artificial Sequence: Synthetic oligonucleotide
  Sense strand starting at position 2561 of SEQ ID NO: 2878
gggagaaaggcuuggucua

SEQ ID NO: 223535 - RNA, 19 nt, Artificial Sequence
  Description of Artificial Sequence: Synthetic oligonucleotide
  Antisense strand to SEQ ID NO: 223534
uagaccaagccuuucuccc

SEQ ID NO: 223536 - RNA, 19 nt, Artificial Sequence
  Description of Artificial Sequence: Synthetic oligonucleotide
  Sense strand starting at position 2562 of SEQ ID NO: 2878
ggagaaaggcuuggucuac

SEQ ID NO: 223537 - RNA, 19 nt, Artificial Sequence
  Description of Artificial Sequence: Synthetic oligonucleotide
  Antisense strand to SEQ ID NO: 223536
guagaccaagccuuucucc

SEQ ID NO: 223538 - RNA, 19 nt, Artificial Sequence
  Description of Artificial Sequence: Synthetic oligonucleotide
  Sense strand starting at position 2563 of SEQ ID NO: 2878
gagaaaggcuuggucuacu

SEQ ID NO: 223539 - RNA, 19 nt, Artificial Sequence
  Description of Artificial Sequence: Synthetic oligonucleotide
  Antisense strand to SEQ ID NO: 223538
aguagaccaagccuuucuc

SEQ ID NO: 223540 - RNA, 19 nt, Artificial Sequence
  Description of Artificial Sequence: Synthetic oligonucleotide
  Sense strand starting at position 2695 of SEQ ID NO: 2878
augugacagugcuugaaua

SEQ ID NO: 223541 - RNA, 19 nt, Artificial Sequence
  Description of Artificial Sequence: Synthetic oligonucleotide
  Antisense strand to SEQ ID NO: 223540
uauucaagcacugucacau

SEQ ID NO: 223542 - RNA, 19 nt, Artificial Sequence
  Description of Artificial Sequence: Synthetic oligonucleotide
  Sense strand starting at position 2696 of SEQ ID NO: 2878
ugugacagugcuugaauaa

SEQ ID NO: 223543 - RNA, 19 nt, Artificial Sequence
  Description of Artificial Sequence: Synthetic oligonucleotide
  Antisense strand to SEQ ID NO: 223542
uuauucaagcacugucaca

SEQ ID NO: 223544 - RNA, 19 nt, Artificial Sequence
  Description of Artificial Sequence: Synthetic oligonucleotide
  Sense strand starting at position 2697 of SEQ ID NO: 2878
gugacagugcuugaauaaa

SEQ ID NO: 223545 - RNA, 19 nt, Artificial Sequence
  Description of Artificial Sequence: Synthetic oligonucleotide
  Antisense strand to SEQ ID NO: 223544
uuuauucaagcacugucac

SEQ ID NO: 223546 - RNA, 19 nt, Artificial Sequence
  Description of Artificial Sequence: Synthetic oligonucleotide
  Sense strand starting at position 2721 of SEQ ID NO: 2878
gucugacaggaacgguaau

SEQ ID NO: 223547 - RNA, 19 nt, Artificial Sequence
  Description of Artificial Sequence: Synthetic oligonucleotide
  Antisense strand to SEQ ID NO: 223546
auuaccguuccugucagac

SEQ ID NO: 223548 - RNA, 19 nt, Artificial Sequence
  Description of Artificial Sequence: Synthetic oligonucleotide
  Sense strand starting at position 2919 of SEQ ID NO: 2878
ugagcaaaggcucaacauu

SEQ ID NO: 223549 - RNA, 19 nt, Artificial Sequence
  Description of Artificial Sequence: Synthetic oligonucleotide
  Antisense strand to SEQ ID NO: 223548
aauguugagccuuugcuca

SEQ ID NO: 223550 - RNA, 19 nt, Artificial Sequence
  Description of Artificial Sequence: Synthetic oligonucleotide
  Sense strand starting at position 3006 of SEQ ID NO: 2878
agacaaguuuauucuggau

SEQ ID NO: 223551 - RNA, 19 nt, Artificial Sequence
  Description of Artificial Sequence: Synthetic oligonucleotide
  Antisense strand to SEQ ID NO: 223550
auccagaauaaacuugucu

SEQ ID NO: 223552 - RNA, 19 nt, Artificial Sequence
  Description of Artificial Sequence: Synthetic oligonucleotide
  Sense strand starting at position 3010 of SEQ ID NO: 2878
aaguuuauucuggauuguu

SEQ ID NO: 223553 - RNA, 19 nt, Artificial Sequence
  Description of Artificial Sequence: Synthetic oligonucleotide
  Antisense strand to SEQ ID NO: 223552
aacaauccagaauaaacuu

SEQ ID NO: 223554 - RNA, 19 nt, Artificial Sequence
  Description of Artificial Sequence: Synthetic oligonucleotide
  Sense strand starting at position 3089 of SEQ ID NO: 2878
aauauaaguccugguuaga

SEQ ID NO: 223555 - RNA, 19 nt, Artificial Sequence
  Description of Artificial Sequence: Synthetic oligonucleotide
  Antisense strand to SEQ ID NO: 223554
ucuaaccaggacuuauauu

SEQ ID NO: 223556 - RNA, 19 nt, Artificial Sequence
  Description of Artificial Sequence: Synthetic oligonucleotide
  Sense strand starting at position 3092 of SEQ ID NO: 2878
auaaguccugguuagaauu

SEQ ID NO: 223557 - RNA, 19 nt, Artificial Sequence
  Description of Artificial Sequence: Synthetic oligonucleotide
  Antisense strand to SEQ ID NO: 223556
aauucuaaccaggacuuau

SEQ ID NO: 223558 - RNA, 19 nt, Artificial Sequence
  Description of Artificial Sequence: Synthetic oligonucleotide
  Sense strand starting at position 3184 of SEQ ID NO: 2878
auguaauuucuucgacagu

SEQ ID NO: 223559 - RNA, 19 nt, Artificial Sequence
  Description of Artificial Sequence: Synthetic oligonucleotide
  Antisense strand to SEQ ID NO: 223558
acugucgaagaaauuacau

SEQ ID NO: 223560 - RNA, 19 nt, Artificial Sequence
  Description of Artificial Sequence: Synthetic oligonucleotide
  Sense strand starting at position 3217 of SEQ ID NO: 2878
guaauaggguaacugguau

SEQ ID NO: 223561 - RNA, 19 nt, Artificial Sequence
  Description of Artificial Sequence: Synthetic oligonucleotide
  Antisense strand to SEQ ID NO: 223560
auaccaguuacccuauuac

SEQ ID NO: 223562 - RNA, 19 nt, Artificial Sequence
  Description of Artificial Sequence: Synthetic oligonucleotide
  Sense strand starting at position 3269 of SEQ ID NO: 2878
agcuguuaugauugauuaa

SEQ ID NO: 223563 - RNA, 19 nt, Artificial Sequence
  Description of Artificial Sequence: Synthetic oligonucleotide
  Antisense strand to SEQ ID NO: 223562
uuaaucaaucauaacagcu

SEQ ID NO: 223564 - RNA, 19 nt, Artificial Sequence
  Description of Artificial Sequence: Synthetic oligonucleotide
  Sense strand starting at position 3297 of SEQ ID NO: 2878
uguugagacuaagcaguaa

SEQ ID NO: 223565 - RNA, 19 nt, Artificial Sequence
  Description of Artificial Sequence: Synthetic oligonucleotide
  Antisense strand to SEQ ID NO: 223564
uuacugcuuagucucaaca

SEQ ID NO: 223566 - RNA, 19 nt, Artificial Sequence
  Description of Artificial Sequence: Synthetic oligonucleotide
  Sense strand starting at position 3524 of SEQ ID NO: 2878
ccgguauacgcagauaauu

SEQ ID NO: 223567 - RNA, 19 nt, Artificial Sequence
  Description of Artificial Sequence: Synthetic oligonucleotide
  Antisense strand to SEQ ID NO: 223566
aauuaucugcguauaccgg

SEQ ID NO: 223568 - RNA, 19 nt, Artificial Sequence
  Description of Artificial Sequence: Synthetic oligonucleotide
  Sense strand starting at position 3715 of SEQ ID NO: 2878
uucuacuguguguauuaaa

SEQ ID NO: 223569 - RNA, 19 nt, Artificial Sequence
  Description of Artificial Sequence: Synthetic oligonucleotide
  Antisense strand to SEQ ID NO: 223568
uuuaauacacacaguagaa

SEQ ID NO: 223570 - RNA, 19 nt, Artificial Sequence
  Description of Artificial Sequence: Synthetic oligonucleotide
  Sense strand starting at position 3734 of SEQ ID NO: 2878
uuaguuuggaaucgaaaga

SEQ ID NO: 223571 - RNA, 19 nt, Artificial Sequence
  Description of Artificial Sequence: Synthetic oligonucleotide
  Antisense strand to SEQ ID NO: 223570
ucuuucgauuccaaacuaa

SEQ ID NO: 223572 - RNA, 19 nt, Artificial Sequence
  Description of Artificial Sequence: Synthetic oligonucleotide
  Sense strand starting at position 3906 of SEQ ID NO: 2878
uaggcaugagguggugaua

SEQ ID NO: 223573 - RNA, 19 nt, Artificial Sequence
  Description of Artificial Sequence: Synthetic oligonucleotide
  Antisense strand to SEQ ID NO: 223572
uaucaccaccucaugccua

SEQ ID NO: 223574 - RNA, 19 nt, Artificial Sequence
  Description of Artificial Sequence: Synthetic oligonucleotide
  Sense strand starting at position 3915 of SEQ ID NO: 2878
gguggugauaaggauugua

SEQ ID NO: 223575 - RNA, 19 nt, Artificial Sequence
  Description of Artificial Sequence: Synthetic oligonucleotide
  Antisense strand to SEQ ID NO: 223574
uacaauccuuaucaccacc

SEQ ID NO: 223576 - RNA, 19 nt, Artificial Sequence
  Description of Artificial Sequence: Synthetic oligonucleotide
  Sense strand starting at position 3936 of SEQ ID NO: 2878
agauaaugcacaggaagua

SEQ ID NO: 223577 - RNA, 19 nt, Artificial Sequence
  Description of Artificial Sequence: Synthetic oligonucleotide
  Antisense strand to SEQ ID NO: 223576
uacuuccugugcauuaucu

SEQ ID NO: 223578 - RNA, 19 nt, Artificial Sequence
  Description of Artificial Sequence: Synthetic oligonucleotide
  Sense strand starting at position 461 of SEQ ID NO: 2879
ggacgagacuuccucucaa

SEQ ID NO: 223579 - RNA, 19 nt, Artificial Sequence
  Description of Artificial Sequence: Synthetic oligonucleotide
  Antisense strand to SEQ ID NO: 223578
uugagaggaagucucgucc

SEQ ID NO: 223580 - RNA, 19 nt, Artificial Sequence
  Description of Artificial Sequence: Synthetic oligonucleotide
  Sense strand starting at position 570 of SEQ ID NO: 2879
gaggucugaaccuguagga

SEQ ID NO: 223581 - RNA, 19 nt, Artificial Sequence
  Description of Artificial Sequence: Synthetic oligonucleotide
  Antisense strand to SEQ ID NO: 223580
uccuacagguucagaccuc

SEQ ID NO: 223582 - RNA, 19 nt, Artificial Sequence
  Description of Artificial Sequence: Synthetic oligonucleotide
  Sense strand starting at position 686 of SEQ ID NO: 2879
guagacaugaucugagcca

SEQ ID NO: 223583 - RNA, 19 nt, Artificial Sequence
  Description of Artificial Sequence: Synthetic oligonucleotide
  Antisense strand to SEQ ID NO: 223582
uggcucagaucaugucuac

SEQ ID NO: 223584 - RNA, 19 nt, Artificial Sequence
  Description of Artificial Sequence: Synthetic oligonucleotide
  Sense strand starting at position 709 of SEQ ID NO: 2879
agaagcagcaucugugaga

SEQ ID NO: 223585 - RNA, 19 nt, Artificial Sequence
  Description of Artificial Sequence: Synthetic oligonucleotide
  Antisense strand to SEQ ID NO: 223584
ucucacagaugcugcuucu

SEQ ID NO: 223586 - RNA, 19 nt, Artificial Sequence
  Description of Artificial Sequence: Synthetic oligonucleotide
  Sense strand starting at position 710 of SEQ ID NO: 2879
gaagcagcaucugugagaa

SEQ ID NO: 223587 - RNA, 19 nt, Artificial Sequence
  Description of Artificial Sequence: Synthetic oligonucleotide
  Antisense strand to SEQ ID NO: 223586
uucucacagaugcugcuuc

SEQ ID NO: 223588 - RNA, 19 nt, Artificial Sequence
  Description of Artificial Sequence: Synthetic oligonucleotide
  Sense strand starting at position 788 of SEQ ID NO: 2879
agggauuaggcagguaaac

SEQ ID NO: 223589 - RNA, 19 nt, Artificial Sequence
  Description of Artificial Sequence: Synthetic oligonucleotide
  Antisense strand to SEQ ID NO: 223588
guuuaccugccuaaucccu

SEQ ID NO: 223590 - RNA, 19 nt, Artificial Sequence
  Description of Artificial Sequence: Synthetic oligonucleotide
  Sense strand starting at position 797 of SEQ ID NO: 2879
gcagguaaacgaugacaga

SEQ ID NO: 223591 - RNA, 19 nt, Artificial Sequence
  Description of Artificial Sequence: Synthetic oligonucleotide
  Antisense strand to SEQ ID NO: 223590
ucugucaucguuuaccugc

SEQ ID NO: 223592 - RNA, 19 nt, Artificial Sequence
  Description of Artificial Sequence: Synthetic oligonucleotide
  Sense strand starting at position 848 of SEQ ID NO: 2879
uguggcuagcaggagaauu

SEQ ID NO: 223593 - RNA, 19 nt, Artificial Sequence
  Description of Artificial Sequence: Synthetic oligonucleotide
  Antisense strand to SEQ ID NO: 223592
aauucuccugcuagccaca

SEQ ID NO: 223594 - RNA, 19 nt, Artificial Sequence
  Description of Artificial Sequence: Synthetic oligonucleotide
  Sense strand starting at position 959 of SEQ ID NO: 2879
acauccuagagguguugua

SEQ ID NO: 223595 - RNA, 19 nt, Artificial Sequence
  Description of Artificial Sequence: Synthetic oligonucleotide
  Antisense strand to SEQ ID NO: 223594
uacaacaccucuaggaugu

SEQ ID NO: 223596 - RNA, 19 nt, Artificial Sequence
  Description of Artificial Sequence: Synthetic oligonucleotide
  Sense strand starting at position 1025 of SEQ ID NO: 2879
cuccuauuaccuggaguaa

SEQ ID NO: 223597 - RNA, 19 nt, Artificial Sequence
  Description of Artificial Sequence: Synthetic oligonucleotide
  Antisense strand to SEQ ID NO: 223596
uuacuccagguaauaggag

SEQ ID NO: 223598 - RNA, 19 nt, Artificial Sequence
  Description of Artificial Sequence: Synthetic oligonucleotide
  Sense strand starting at position 1485 of SEQ ID NO: 2879
ccgugugaggccuaacaga

SEQ ID NO: 223599 - RNA, 19 nt, Artificial Sequence
  Description of Artificial Sequence: Synthetic oligonucleotide
  Antisense strand to SEQ ID NO: 223598
ucuguuaggccucacacgg

SEQ ID NO: 223600 - RNA, 19 nt, Artificial Sequence
  Description of Artificial Sequence: Synthetic oligonucleotide
  Sense strand starting at position 2044 of SEQ ID NO: 2879
gggacuuauuucgcgcgca

SEQ ID NO: 223601 - RNA, 19 nt, Artificial Sequence
  Description of Artificial Sequence: Synthetic oligonucleotide
  Antisense strand to SEQ ID NO: 223600
ugcgcgcgaaauaaguccc

SEQ ID NO: 223602 - RNA, 19 nt, Artificial Sequence
  Description of Artificial Sequence: Synthetic oligonucleotide
  Sense strand starting at position 2264 of SEQ ID NO: 2879
cuucuuaagagguguguua

SEQ ID NO: 223603 - RNA, 19 nt, Artificial Sequence
  Description of Artificial Sequence: Synthetic oligonucleotide
  Antisense strand to SEQ ID NO: 223602
uaacacaccucuuaagaag

SEQ ID NO: 223604 - RNA, 19 nt, Artificial Sequence
  Description of Artificial Sequence: Synthetic oligonucleotide
  Sense strand starting at position 2421 of SEQ ID NO: 2879
ucccacuucgucugucaaa

SEQ ID NO: 223605 - RNA, 19 nt, Artificial Sequence
  Description of Artificial Sequence: Synthetic oligonucleotide
  Antisense strand to SEQ ID NO: 223604
uuugacagacgaaguggga

SEQ ID NO: 223606 - RNA, 19 nt, Artificial Sequence
  Description of Artificial Sequence: Synthetic oligonucleotide
  Sense strand starting at position 2452 of SEQ ID NO: 2879
guauaucguaaugaugagu

SEQ ID NO: 223607 - RNA, 19 nt, Artificial Sequence
  Description of Artificial Sequence: Synthetic oligonucleotide
  Antisense strand to SEQ ID NO: 223606
acucaucauuacgauauac

SEQ ID NO: 223608 - RNA, 19 nt, Artificial Sequence
  Description of Artificial Sequence: Synthetic oligonucleotide
  Sense strand starting at position 2457 of SEQ ID NO: 2879
ucguaaugaugaguuugca

SEQ ID NO: 223609 - RNA, 19 nt, Artificial Sequence
  Description of Artificial Sequence: Synthetic oligonucleotide
  Antisense strand to SEQ ID NO: 223608
ugcaaacucaucauuacga

SEQ ID NO: 223610 - RNA, 19 nt, Artificial Sequence
  Description of Artificial Sequence: Synthetic oligonucleotide
  Sense strand starting at position 2460 of SEQ ID NO: 2879
uaaugaugaguuugcacgu

SEQ ID NO: 223611 - RNA, 19 nt, Artificial Sequence
  Description of Artificial Sequence: Synthetic oligonucleotide
  Antisense strand to SEQ ID NO: 223610
acgugcaaacucaucauua

SEQ ID NO: 223612 - RNA, 19 nt, Artificial Sequence
  Description of Artificial Sequence: Synthetic oligonucleotide
  Sense strand starting at position 2555 of SEQ ID NO: 2879
ucaugagcaugucccauaa

SEQ ID NO: 223613 - RNA, 19 nt, Artificial Sequence
  Description of Artificial Sequence: Synthetic oligonucleotide
  Antisense strand to SEQ ID NO: 223612
uuaugggacaugcucauga

SEQ ID NO: 223614 - RNA, 19 nt, Artificial Sequence
  Description of Artificial Sequence: Synthetic oligonucleotide
  Sense strand starting at position 2559 of SEQ ID NO: 2879
gagcaugucccauaaugua

SEQ ID NO: 223615 - RNA, 19 nt, Artificial Sequence
  Description of Artificial Sequence: Synthetic oligonucleotide
  Antisense strand to SEQ ID NO: 223614
uacauuaugggacaugcuc

SEQ ID NO: 223616 - RNA, 19 nt, Artificial Sequence
  Description of Artificial Sequence: Synthetic oligonucleotide
  Sense strand starting at position 2695 of SEQ ID NO: 2879
aguggaauuauugggucga

SEQ ID NO: 223617 - RNA, 19 nt, Artificial Sequence
  Description of Artificial Sequence: Synthetic oligonucleotide
  Antisense strand to SEQ ID NO: 223616
ucgacccaauaauuccacu

SEQ ID NO: 223618 - RNA, 19 nt, Artificial Sequence
  Description of Artificial Sequence: Synthetic oligonucleotide
  Sense strand starting at position 2697 of SEQ ID NO: 2879
uggaauuauugggucgaaa

SEQ ID NO: 223619 - RNA, 19 nt, Artificial Sequence
  Description of Artificial Sequence: Synthetic oligonucleotide
  Antisense strand to SEQ ID NO: 223618
uuucgacccaauaauucca

SEQ ID NO: 223620 - RNA, 19 nt, Artificial Sequence
  Description of Artificial Sequence: Synthetic oligonucleotide
  Sense strand starting at position 2699 of SEQ ID NO: 2879
gaauuauugggucgaaaug

SEQ ID NO: 223621 - RNA, 19 nt, Artificial Sequence
  Description of Artificial Sequence: Synthetic oligonucleotide
  Antisense strand to SEQ ID NO: 223620
cauuucgacccaauaauuc

SEQ ID NO: 223622 - RNA, 19 nt, Artificial Sequence
  Description of Artificial Sequence: Synthetic oligonucleotide
  Sense strand starting at position 2754 of SEQ ID NO: 2879
gcucuugaucucuauugcu

SEQ ID NO: 223623 - RNA, 19 nt, Artificial Sequence
  Description of Artificial Sequence: Synthetic oligonucleotide
  Antisense strand to SEQ ID NO: 223622
agcaauagagaucaagagc

SEQ ID NO: 223624 - RNA, 19 nt, Artificial Sequence
  Description of Artificial Sequence: Synthetic oligonucleotide
  Sense strand starting at position 2860 of SEQ ID NO: 2879
ugaguuucuacaggaggua

SEQ ID NO: 223625 - RNA, 19 nt, Artificial Sequence
  Description of Artificial Sequence: Synthetic oligonucleotide
  Antisense strand to SEQ ID NO: 223624
uaccuccuguagaaacuca

SEQ ID NO: 223626 - RNA, 19 nt, Artificial Sequence
  Description of Artificial Sequence: Synthetic oligonucleotide
  Sense strand starting at position 2872 of SEQ ID NO: 2879
ggagguaguguuugcauca

SEQ ID NO: 223627 - RNA, 19 nt, Artificial Sequence
  Description of Artificial Sequence: Synthetic oligonucleotide
  Antisense strand to SEQ ID NO: 223626
ugaugcaaacacuaccucc

SEQ ID NO: 223628 - RNA, 19 nt, Artificial Sequence
  Description of Artificial Sequence: Synthetic oligonucleotide
  Sense strand starting at position 2873 of SEQ ID NO: 2879
gagguaguguuugcaucac

SEQ ID NO: 223629 - RNA, 19 nt, Artificial Sequence
  Description of Artificial Sequence: Synthetic oligonucleotide
  Antisense strand to SEQ ID NO: 223628
gugaugcaaacacuaccuc

SEQ ID NO: 223630 - RNA, 19 nt, Artificial Sequence
  Description of Artificial Sequence: Synthetic oligonucleotide
  Sense strand starting at position 2879 of SEQ ID NO: 2879
guguuugcaucacuuauaa

SEQ ID NO: 223631 - RNA, 19 nt, Artificial Sequence
  Description of Artificial Sequence: Synthetic oligonucleotide
  Antisense strand to SEQ ID NO: 223630
uuauaagugaugcaaacac

SEQ ID NO: 223632 - RNA, 19 nt, Artificial Sequence
  Description of Artificial Sequence: Synthetic oligonucleotide
  Sense strand starting at position 2945 of SEQ ID NO: 2879
uccuguaacauguaguaga

SEQ ID NO: 223633 - RNA, 19 nt, Artificial Sequence
  Description of Artificial Sequence: Synthetic oligonucleotide
  Antisense strand to SEQ ID NO: 223632
ucuacuacauguuacagga

SEQ ID NO: 223634 - RNA, 19 nt, Artificial Sequence
  Description of Artificial Sequence: Synthetic oligonucleotide
  Sense strand starting at position 2965 of SEQ ID NO: 2879
aaagcuuuguuacuuggaa

SEQ ID NO: 223635 - RNA, 19 nt, Artificial Sequence
  Description of Artificial Sequence: Synthetic oligonucleotide
  Antisense strand to SEQ ID NO: 223634
uuccaaguaacaaagcuuu

SEQ ID NO: 223636 - RNA, 19 nt, Artificial Sequence
  Description of Artificial Sequence: Synthetic oligonucleotide
  Sense strand starting at position 2966 of SEQ ID NO: 2879
aagcuuuguuacuuggaaa

SEQ ID NO: 223637 - RNA, 19 nt, Artificial Sequence
  Description of Artificial Sequence: Synthetic oligonucleotide
  Antisense strand to SEQ ID NO: 223636
uuuccaaguaacaaagcuu

SEQ ID NO: 223638 - RNA, 19 nt, Artificial Sequence
  Description of Artificial Sequence: Synthetic oligonucleotide
  Sense strand starting at position 3036 of SEQ ID NO: 2879
acaguuauuugugcacauu

SEQ ID NO: 223639 - RNA, 19 nt, Artificial Sequence
  Description of Artificial Sequence: Synthetic oligonucleotide
  Antisense strand to SEQ ID NO: 223638
aaugugcacaaauaacugu

SEQ ID NO: 223640 - RNA, 19 nt, Artificial Sequence
  Description of Artificial Sequence: Synthetic oligonucleotide
  Sense strand starting at position 3616 of SEQ ID NO: 2879
aggcauuagaggugcacuu

SEQ ID NO: 223641 - RNA, 19 nt, Artificial Sequence
  Description of Artificial Sequence: Synthetic oligonucleotide
  Antisense strand to SEQ ID NO: 223640
aagugcaccucuaaugccu

SEQ ID NO: 223642 - RNA, 19 nt, Artificial Sequence
  Description of Artificial Sequence: Synthetic oligonucleotide
  Sense strand starting at position 3632 of SEQ ID NO: 2879
cuuguaaaucaguauucca

SEQ ID NO: 223643 - RNA, 19 nt, Artificial Sequence
  Description of Artificial Sequence: Synthetic oligonucleotide
  Antisense strand to SEQ ID NO: 223642
uggaauacugauuuacaag

SEQ ID NO: 223644 - RNA, 19 nt, Artificial Sequence
  Description of Artificial Sequence: Synthetic oligonucleotide
  Sense strand starting at position 3681 of SEQ ID NO: 2879
ggaguccaucuguagcaga

SEQ ID NO: 223645 - RNA, 19 nt, Artificial Sequence
  Description of Artificial Sequence: Synthetic oligonucleotide
  Antisense strand to SEQ ID NO: 223644
ucugcuacagauggacucc

SEQ ID NO: 223646 - RNA, 19 nt, Artificial Sequence
  Description of Artificial Sequence: Synthetic oligonucleotide
  Sense strand starting at position 3697 of SEQ ID NO: 2879
agacgugaugacugcugaa

SEQ ID NO: 223647 - RNA, 19 nt, Artificial Sequence
  Description of Artificial Sequence: Synthetic oligonucleotide
  Antisense strand to SEQ ID NO: 223646
uucagcagucaucacgucu

SEQ ID NO: 223648 - RNA, 19 nt, Artificial Sequence
  Description of Artificial Sequence: Synthetic oligonucleotide
  Sense strand starting at position 3789 of SEQ ID NO: 2879
guccauagucucuggguca

SEQ ID NO: 223649 - RNA, 19 nt, Artificial Sequence
  Description of Artificial Sequence: Synthetic oligonucleotide
  Antisense strand to SEQ ID NO: 223648
ugacccagagacuauggac

SEQ ID NO: 223650 - RNA, 19 nt, Artificial Sequence
  Description of Artificial Sequence: Synthetic oligonucleotide
  Sense strand starting at position 3792 of SEQ ID NO: 2879
cauagucucugggucagau

SEQ ID NO: 223651 - RNA, 19 nt, Artificial Sequence
  Description of Artificial Sequence: Synthetic oligonucleotide
  Antisense strand to SEQ ID NO: 223650
aucugacccagagacuaug

SEQ ID NO: 223652 - RNA, 19 nt, Artificial Sequence
  Description of Artificial Sequence: Synthetic oligonucleotide
  Sense strand starting at position 3801 of SEQ ID NO: 2879
ugggucagaugaguuuaga

SEQ ID NO: 223653 - RNA, 19 nt, Artificial Sequence
  Description of Artificial Sequence: Synthetic oligonucleotide
  Antisense strand to SEQ ID NO: 223652
ucuaaacucaucugaccca

SEQ ID NO: 223654 - RNA, 19 nt, Artificial Sequence
  Description of Artificial Sequence: Synthetic oligonucleotide
  Sense strand starting at position 3804 of SEQ ID NO: 2879
gucagaugaguuuagaggu

SEQ ID NO: 223655 - RNA, 19 nt, Artificial Sequence
  Description of Artificial Sequence: Synthetic oligonucleotide
  Antisense strand to SEQ ID NO: 223654
accucuaaacucaucugac

SEQ ID NO: 223656 - RNA, 19 nt, Artificial Sequence
  Description of Artificial Sequence: Synthetic oligonucleotide
  Sense strand starting at position 3907 of SEQ ID NO: 2879
ugacuaucaugggaggaca

SEQ ID NO: 223657 - RNA, 19 nt, Artificial Sequence
  Description of Artificial Sequence: Synthetic oligonucleotide
  Antisense strand to SEQ ID NO: 223656
uguccucccaugauaguca

SEQ ID NO: 223658 - RNA, 19 nt, Artificial Sequence
  Description of Artificial Sequence: Synthetic oligonucleotide
  Sense strand starting at position 51 of SEQ ID NO: 2880
aaauuagcgugagugcauu

SEQ ID NO: 223659 - RNA, 19 nt, Artificial Sequence
  Description of Artificial Sequence: Synthetic oligonucleotide
  Antisense strand to SEQ ID NO: 223658
aaugcacucacgcuaauuu

SEQ ID NO: 223660 - RNA, 19 nt, Artificial Sequence
  Description of Artificial Sequence: Synthetic oligonucleotide
  Sense strand starting at position 118 of SEQ ID NO: 2880
uuguucuaaugguuagaau

SEQ ID NO: 223661 - RNA, 19 nt, Artificial Sequence
  Description of Artificial Sequence: Synthetic oligonucleotide
  Antisense strand to SEQ ID NO: 223660
auucuaaccauuagaacaa

SEQ ID NO: 223662 - RNA, 19 nt, Artificial Sequence
  Description of Artificial Sequence: Synthetic oligonucleotide
  Sense strand starting at position 119 of SEQ ID NO: 2880
uguucuaaugguuagaaug

SEQ ID NO: 223663 - RNA, 19 nt, Artificial Sequence
  Description of Artificial Sequence: Synthetic oligonucleotide
  Antisense strand to SEQ ID NO: 223662
cauucuaaccauuagaaca

SEQ ID NO: 223664 - RNA, 19 nt, Artificial Sequence
  Description of Artificial Sequence: Synthetic oligonucleotide
  Sense strand starting at position 238 of SEQ ID NO: 2880
guaacuaaagcuuauugua

SEQ ID NO: 223665 - RNA, 19 nt, Artificial Sequence
  Description of Artificial Sequence: Synthetic oligonucleotide
  Antisense strand to SEQ ID NO: 223664
uacaauaagcuuuaguuac

SEQ ID NO: 223666 - RNA, 19 nt, Artificial Sequence
  Description of Artificial Sequence: Synthetic oligonucleotide
  Sense strand starting at position 246 of SEQ ID NO: 2880
agcuuauuguaaccaguaa

SEQ ID NO: 223667 - RNA, 19 nt, Artificial Sequence
  Description of Artificial Sequence: Synthetic oligonucleotide
  Antisense strand to SEQ ID NO: 223666
uuacugguuacaauaagcu

SEQ ID NO: 223668 - RNA, 19 nt, Artificial Sequence
  Description of Artificial Sequence: Synthetic oligonucleotide
  Sense strand starting at position 272 of SEQ ID NO: 2880
ggaagagcacaguguugaa

SEQ ID NO: 223669 - RNA, 19 nt, Artificial Sequence
  Description of Artificial Sequence: Synthetic oligonucleotide
  Antisense strand to SEQ ID NO: 223668
uucaacacugugcucuucc

SEQ ID NO: 223670 - RNA, 19 nt, Artificial Sequence
  Description of Artificial Sequence: Synthetic oligonucleotide
  Sense strand starting at position 300 of SEQ ID NO: 2880
ucaguuugcuaauuugcua

SEQ ID NO: 223671 - RNA, 19 nt, Artificial Sequence
  Description of Artificial Sequence: Synthetic oligonucleotide
  Antisense strand to SEQ ID NO: 223670
uagcaaauuagcaaacuga

SEQ ID NO: 223672 - RNA, 19 nt, Artificial Sequence
  Description of Artificial Sequence: Synthetic oligonucleotide
  Sense strand starting at position 303 of SEQ ID NO: 2880
guuugcuaauuugcuauua

SEQ ID NO: 223673 - RNA, 19 nt, Artificial Sequence
  Description of Artificial Sequence: Synthetic oligonucleotide
  Antisense strand to SEQ ID NO: 223672
uaauagcaaauuagcaaac

SEQ ID NO: 223674 - RNA, 19 nt, Artificial Sequence
  Description of Artificial Sequence: Synthetic oligonucleotide
  Sense strand starting at position 361 of SEQ ID NO: 2880
ggcugucaaggucaaguuu

SEQ ID NO: 223675 - RNA, 19 nt, Artificial Sequence
  Description of Artificial Sequence: Synthetic oligonucleotide
  Antisense strand to SEQ ID NO: 223674
aaacuugaccuugacagcc

SEQ ID NO: 223676 - RNA, 19 nt, Artificial Sequence
  Description of Artificial Sequence: Synthetic oligonucleotide
  Sense strand starting at position 532 of SEQ ID NO: 2880
uaaggaagauaguaucuga

SEQ ID NO: 223677 - RNA, 19 nt, Artificial Sequence
  Description of Artificial Sequence: Synthetic oligonucleotide
  Antisense strand to SEQ ID NO: 223676
ucagauacuaucuuccuua

SEQ ID NO: 223678 - RNA, 19 nt, Artificial Sequence
  Description of Artificial Sequence: Synthetic oligonucleotide
  Sense strand starting at position 561 of SEQ ID NO: 2880
cguccauauucaugugguu

SEQ ID NO: 223679 - RNA, 19 nt, Artificial Sequence
  Description of Artificial Sequence: Synthetic oligonucleotide
  Antisense strand to SEQ ID NO: 223678
aaccacaugaauauggacg

SEQ ID NO: 223680 - RNA, 19 nt, Artificial Sequence
  Description of Artificial Sequence: Synthetic oligonucleotide
  Sense strand starting at position 672 of SEQ ID NO: 2880
gccuacuggaaauguugau

SEQ ID NO: 223681 - RNA, 19 nt, Artificial Sequence
  Description of Artificial Sequence: Synthetic oligonucleotide
  Antisense strand to SEQ ID NO: 223680
aucaacauuuccaguaggc

SEQ ID NO: 223682 - RNA, 19 nt, Artificial Sequence
  Description of Artificial Sequence: Synthetic oligonucleotide
  Sense strand starting at position 678 of SEQ ID NO: 2880
uggaaauguugauguuaau

SEQ ID NO: 223683 - RNA, 19 nt, Artificial Sequence
  Description of Artificial Sequence: Synthetic oligonucleotide
  Antisense strand to SEQ ID NO: 223682
auuaacaucaacauuucca

SEQ ID NO: 223684 - RNA, 19 nt, Artificial Sequence
  Description of Artificial Sequence: Synthetic oligonucleotide
  Sense strand starting at position 684 of SEQ ID NO: 2880
uguugauguuaauagguuu

SEQ ID NO: 223685 - RNA, 19 nt, Artificial Sequence
  Description of Artificial Sequence: Synthetic oligonucleotide
  Antisense strand to SEQ ID NO: 223684
aaaccuauuaacaucaaca

SEQ ID NO: 223686 - RNA, 19 nt, Artificial Sequence
  Description of Artificial Sequence: Synthetic oligonucleotide
  Sense strand starting at position 2182 of SEQ ID NO: 2880
acggguguguccagaagca

SEQ ID NO: 223687 - RNA, 19 nt, Artificial Sequence
  Description of Artificial Sequence: Synthetic oligonucleotide
  Antisense strand to SEQ ID NO: 223686
ugcuucuggacacacccgu

SEQ ID NO: 223688 - RNA, 19 nt, Artificial Sequence
  Description of Artificial Sequence: Synthetic oligonucleotide
  Sense strand starting at position 2245 of SEQ ID NO: 2880
uggagagguccacgaguga

SEQ ID NO: 223689 - RNA, 19 nt, Artificial Sequence
  Description of Artificial Sequence: Synthetic oligonucleotide
  Antisense strand to SEQ ID NO: 223688
ucacucguggaccucucca

SEQ ID NO: 223690 - RNA, 19 nt, Artificial Sequence
  Description of Artificial Sequence: Synthetic oligonucleotide
  Sense strand starting at position 2541 of SEQ ID NO: 2880
gccggguucgccuggaagu

SEQ ID NO: 223691 - RNA, 19 nt, Artificial Sequence
  Description of Artificial Sequence: Synthetic oligonucleotide
  Antisense strand to SEQ ID NO: 223690
acuuccaggcgaacccggc

SEQ ID NO: 223692 - RNA, 19 nt, Artificial Sequence
  Description of Artificial Sequence: Synthetic oligonucleotide
  Sense strand starting at position 2695 of SEQ ID NO: 2880
gggaagaggccuuggugua

SEQ ID NO: 223693 - RNA, 19 nt, Artificial Sequence
  Description of Artificial Sequence: Synthetic oligonucleotide
  Antisense strand to SEQ ID NO: 223692
uacaccaaggccucuuccc

SEQ ID NO: 223694 - RNA, 19 nt, Artificial Sequence
  Description of Artificial Sequence: Synthetic oligonucleotide
  Sense strand starting at position 2696 of SEQ ID NO: 2880
ggaagaggccuugguguaa

SEQ ID NO: 223695 - RNA, 19 nt, Artificial Sequence
  Description of Artificial Sequence: Synthetic oligonucleotide
  Antisense strand to SEQ ID NO: 223694
uuacaccaaggccucuucc

SEQ ID NO: 223696 - RNA, 19 nt, Artificial Sequence
  Description of Artificial Sequence: Synthetic oligonucleotide
  Sense strand starting at position 2770 of SEQ ID NO: 2880
auucgaauccaguggguca

SEQ ID NO: 223697 - RNA, 19 nt, Artificial Sequence
  Description of Artificial Sequence: Synthetic oligonucleotide
  Antisense strand to SEQ ID NO: 223696
ugacccacuggauucgaau

SEQ ID NO: 223698 - RNA, 19 nt, Artificial Sequence
  Description of Artificial Sequence: Synthetic oligonucleotide
  Sense strand starting at position 2891 of SEQ ID NO: 2880
gagcauucgcugugaccua

SEQ ID NO: 223699 - RNA, 19 nt, Artificial Sequence
  Description of Artificial Sequence: Synthetic oligonucleotide
  Antisense strand to SEQ ID NO: 223698
uaggucacagcgaaugcuc

SEQ ID NO: 223700 - RNA, 19 nt, Artificial Sequence
  Description of Artificial Sequence: Synthetic oligonucleotide
  Sense strand starting at position 2985 of SEQ ID NO: 2880
gcugcacuccgcugaauaa

SEQ ID NO: 223701 - RNA, 19 nt, Artificial Sequence
  Description of Artificial Sequence: Synthetic oligonucleotide
  Antisense strand to SEQ ID NO: 223700
uuauucagcggagugcagc

SEQ ID NO: 223702 - RNA, 19 nt, Artificial Sequence
  Description of Artificial Sequence: Synthetic oligonucleotide
  Sense strand starting at position 2986 of SEQ ID NO: 2880
cugcacuccgcugaauaaa

SEQ ID NO: 223703 - RNA, 19 nt, Artificial Sequence
  Description of Artificial Sequence: Synthetic oligonucleotide
  Antisense strand to SEQ ID NO: 223702
uuuauucagcggagugcag

SEQ ID NO: 223704 - RNA, 19 nt, Artificial Sequence
  Description of Artificial Sequence: Synthetic oligonucleotide
  Sense strand starting at position 3128 of SEQ ID NO: 2880
uugacagucugggccaauu

SEQ ID NO: 223705 - RNA, 19 nt, Artificial Sequence
  Description of Artificial Sequence: Synthetic oligonucleotide
  Antisense strand to SEQ ID NO: 223704
aauuggcccagacugucaa

SEQ ID NO: 223706 - RNA, 19 nt, Artificial Sequence
  Description of Artificial Sequence: Synthetic oligonucleotide
  Sense strand starting at position 3212 of SEQ ID NO: 2880
gugaacuucugcuguaggu

SEQ ID NO: 223707 - RNA, 19 nt, Artificial Sequence
  Description of Artificial Sequence: Synthetic oligonucleotide
  Antisense strand to SEQ ID NO: 223706
accuacagcagaaguucac

SEQ ID NO: 223708 - RNA, 19 nt, Artificial Sequence
  Description of Artificial Sequence: Synthetic oligonucleotide
  Sense strand starting at position 3237 of SEQ ID NO: 2880
gacgccagggauugcuaaa

SEQ ID NO: 223709 - RNA, 19 nt, Artificial Sequence
  Description of Artificial Sequence: Synthetic oligonucleotide
  Antisense strand to SEQ ID NO: 223708
uuuagcaaucccuggcguc

SEQ ID NO: 223710 - RNA, 19 nt, Artificial Sequence
  Description of Artificial Sequence: Synthetic oligonucleotide
  Sense strand starting at position 3364 of SEQ ID NO: 2880
uggccauugcaggaaauca

SEQ ID NO: 223711 - RNA, 19 nt, Artificial Sequence
  Description of Artificial Sequence: Synthetic oligonucleotide
  Antisense strand to SEQ ID NO: 223710
ugauuuccugcaauggcca

SEQ ID NO: 223712 - RNA, 19 nt, Artificial Sequence
  Description of Artificial Sequence: Synthetic oligonucleotide
  Sense strand starting at position 3396 of SEQ ID NO: 2880
agaucugcaagcggagaau

SEQ ID NO: 223713 - RNA, 19 nt, Artificial Sequence
  Description of Artificial Sequence: Synthetic oligonucleotide
  Antisense strand to SEQ ID NO: 223712
auucuccgcuugcagaucu

SEQ ID NO: 223714 - RNA, 19 nt, Artificial Sequence
  Description of Artificial Sequence: Synthetic oligonucleotide
  Sense strand starting at position 3428 of SEQ ID NO: 2880
uggauagaguuauuacauu

SEQ ID NO: 223715 - RNA, 19 nt, Artificial Sequence
  Description of Artificial Sequence: Synthetic oligonucleotide
  Antisense strand to SEQ ID NO: 223714
aauguaauaacucuaucca

SEQ ID NO: 223716 - RNA, 19 nt, Artificial Sequence
  Description of Artificial Sequence: Synthetic oligonucleotide
  Sense strand starting at position 3529 of SEQ ID NO: 2880
ugguacuagugucgucauu

SEQ ID NO: 223717 - RNA, 19 nt, Artificial Sequence
  Description of Artificial Sequence: Synthetic oligonucleotide
  Antisense strand to SEQ ID NO: 223716
aaugacgacacuaguacca

SEQ ID NO: 223718 - RNA, 19 nt, Artificial Sequence
  Description of Artificial Sequence: Synthetic oligonucleotide
  Sense strand starting at position 3531 of SEQ ID NO: 2880
guacuagugucgucauuca

SEQ ID NO: 223719 - RNA, 19 nt, Artificial Sequence
  Description of Artificial Sequence: Synthetic oligonucleotide
  Antisense strand to SEQ ID NO: 223718
ugaaugacgacacuaguac

SEQ ID NO: 223720 - RNA, 19 nt, Artificial Sequence
  Description of Artificial Sequence: Synthetic oligonucleotide
  Sense strand starting at position 3572 of SEQ ID NO: 2880
uugcguucuuuccugaaac

SEQ ID NO: 223721 - RNA, 19 nt, Artificial Sequence
  Description of Artificial Sequence: Synthetic oligonucleotide
  Antisense strand to SEQ ID NO: 223720
guuucaggaaagaacgcaa

SEQ ID NO: 223722 - RNA, 19 nt, Artificial Sequence
  Description of Artificial Sequence: Synthetic oligonucleotide
  Sense strand starting at position 3573 of SEQ ID NO: 2880
ugcguucuuuccugaaacu

SEQ ID NO: 223723 - RNA, 19 nt, Artificial Sequence
  Description of Artificial Sequence: Synthetic oligonucleotide
  Antisense strand to SEQ ID NO: 223722
aguuucaggaaagaacgca

SEQ ID NO: 223724 - RNA, 19 nt, Artificial Sequence
  Description of Artificial Sequence: Synthetic oligonucleotide
  Sense strand starting at position 3574 of SEQ ID NO: 2880
gcguucuuuccugaaacua

SEQ ID NO: 223725 - RNA, 19 nt, Artificial Sequence
  Description of Artificial Sequence: Synthetic oligonucleotide
  Antisense strand to SEQ ID NO: 223724
uaguuucaggaaagaacgc

SEQ ID NO: 223726 - RNA, 19 nt, Artificial Sequence
  Description of Artificial Sequence: Synthetic oligonucleotide
  Sense strand starting at position 3602 of SEQ ID NO: 2880
accuuaaauccuggacuag

SEQ ID NO: 223727 - RNA, 19 nt, Artificial Sequence
  Description of Artificial Sequence: Synthetic oligonucleotide
  Antisense strand to SEQ ID NO: 223726
cuaguccaggauuuaaggu

SEQ ID NO: 223728 - RNA, 19 nt, Artificial Sequence
  Description of Artificial Sequence: Synthetic oligonucleotide
  Sense strand starting at position 3603 of SEQ ID NO: 2880
ccuuaaauccuggacuagu

SEQ ID NO: 223729 - RNA, 19 nt, Artificial Sequence
  Description of Artificial Sequence: Synthetic oligonucleotide
  Antisense strand to SEQ ID NO: 223728
acuaguccaggauuuaagg

SEQ ID NO: 223730 - RNA, 19 nt, Artificial Sequence
  Description of Artificial Sequence: Synthetic oligonucleotide
  Sense strand starting at position 3850 of SEQ ID NO: 2880
aguauucucuuagucuuua

SEQ ID NO: 223731 - RNA, 19 nt, Artificial Sequence
  Description of Artificial Sequence: Synthetic oligonucleotide
  Antisense strand to SEQ ID NO: 223730
uaaagacuaagagaauacu

SEQ ID NO: 223732 - RNA, 19 nt, Artificial Sequence
  Description of Artificial Sequence: Synthetic oligonucleotide
  Sense strand starting at position 3851 of SEQ ID NO: 2880
guauucucuuagucuuuaa

SEQ ID NO: 223733 - RNA, 19 nt, Artificial Sequence
  Description of Artificial Sequence: Synthetic oligonucleotide
  Antisense strand to SEQ ID NO: 223732
uuaaagacuaagagaauac

SEQ ID NO: 223734 - RNA, 19 nt, Artificial Sequence
  Description of Artificial Sequence: Synthetic oligonucleotide
  Sense strand starting at position 21 of SEQ ID NO: 2882
gauguuaaguccuaguucu

SEQ ID NO: 223735 - RNA, 19 nt, Artificial Sequence
  Description of Artificial Sequence: Synthetic oligonucleotide
  Antisense strand to SEQ ID NO: 223734
agaacuaggacuuaacauc

SEQ ID NO: 223736 - RNA, 19 nt, Artificial Sequence
  Description of Artificial Sequence: Synthetic oligonucleotide
  Sense strand starting at position 31 of SEQ ID NO: 2882
ccuaguucuuccucugacu

SEQ ID NO: 223737 - RNA, 19 nt, Artificial Sequence
  Description of Artificial Sequence: Synthetic oligonucleotide
  Antisense strand to SEQ ID NO: 223736
agucagaggaagaacuagg

SEQ ID NO: 223738 - RNA, 19 nt, Artificial Sequence
  Description of Artificial Sequence: Synthetic oligonucleotide
  Sense strand starting at position 125 of SEQ ID NO: 2882
gcggaaugagcucacggau

SEQ ID NO: 223739 - RNA, 19 nt, Artificial Sequence
  Description of Artificial Sequence: Synthetic oligonucleotide
  Antisense strand to SEQ ID NO: 223738
auccgugagcucauuccgc

SEQ ID NO: 223740 - RNA, 19 nt, Artificial Sequence
  Description of Artificial Sequence: Synthetic oligonucleotide
  Sense strand starting at position 156 of SEQ ID NO: 2882
guggaagaauguggaguaa

SEQ ID NO: 223741 - RNA, 19 nt, Artificial Sequence
  Description of Artificial Sequence: Synthetic oligonucleotide
  Antisense strand to SEQ ID NO: 223740
uuacuccacauucuuccac

SEQ ID NO: 223742 - RNA, 19 nt, Artificial Sequence
  Description of Artificial Sequence: Synthetic oligonucleotide
  Sense strand starting at position 168 of SEQ ID NO: 2882
ggaguaauugcucaucgcu

SEQ ID NO: 223743 - RNA, 19 nt, Artificial Sequence
  Description of Artificial Sequence: Synthetic oligonucleotide
  Antisense strand to SEQ ID NO: 223742
agcgaugagcaauuacucc

SEQ ID NO: 223744 - RNA, 19 nt, Artificial Sequence
  Description of Artificial Sequence: Synthetic oligonucleotide
  Sense strand starting at position 422 of SEQ ID NO: 2882
gggugaugccucggaugau

SEQ ID NO: 223745 - RNA, 19 nt, Artificial Sequence
  Description of Artificial Sequence: Synthetic oligonucleotide
  Antisense strand to SEQ ID NO: 223744
aucauccgaggcaucaccc

SEQ ID NO: 223746 - RNA, 19 nt, Artificial Sequence
  Description of Artificial Sequence: Synthetic oligonucleotide
  Sense strand starting at position 423 of SEQ ID NO: 2882
ggugaugccucggaugauc

SEQ ID NO: 223747 - RNA, 19 nt, Artificial Sequence
  Description of Artificial Sequence: Synthetic oligonucleotide
  Antisense strand to SEQ ID NO: 223746
gaucauccgaggcaucacc

SEQ ID NO: 223748 - RNA, 19 nt, Artificial Sequence
  Description of Artificial Sequence: Synthetic oligonucleotide
  Sense strand starting at position 655 of SEQ ID NO: 2882
cagcgaguuccugaacauu

SEQ ID NO: 223749 - RNA, 19 nt, Artificial Sequence
  Description of Artificial Sequence: Synthetic oligonucleotide
  Antisense strand to SEQ ID NO: 223748
aauguucaggaacucgcug

SEQ ID NO: 223750 - RNA, 19 nt, Artificial Sequence
  Description of Artificial Sequence: Synthetic oligonucleotide
  Sense strand starting at position 658 of SEQ ID NO: 2882
cgaguuccugaacauucuu

SEQ ID NO: 223751 - RNA, 19 nt, Artificial Sequence
  Description of Artificial Sequence: Synthetic oligonucleotide
  Antisense strand to SEQ ID NO: 223750
aagaauguucaggaacucg

SEQ ID NO: 223752 - RNA, 19 nt, Artificial Sequence
  Description of Artificial Sequence: Synthetic oligonucleotide
  Sense strand starting at position 1931 of SEQ ID NO: 2882
cccugaagcucuggaagua

SEQ ID NO: 223753 - RNA, 19 nt, Artificial Sequence
  Description of Artificial Sequence: Synthetic oligonucleotide
  Antisense strand to SEQ ID NO: 223752
uacuuccagagcuucaggg

SEQ ID NO: 223754 - RNA, 19 nt, Artificial Sequence
  Description of Artificial Sequence: Synthetic oligonucleotide
  Sense strand starting at position 2412 of SEQ ID NO: 2882
ccgggagaaaguugugaaa

SEQ ID NO: 223755 - RNA, 19 nt, Artificial Sequence
  Description of Artificial Sequence: Synthetic oligonucleotide
  Antisense strand to SEQ ID NO: 223754
uuucacaacuuucucccgg

SEQ ID NO: 223756 - RNA, 19 nt, Artificial Sequence
  Description of Artificial Sequence: Synthetic oligonucleotide
  Sense strand starting at position 2432 of SEQ ID NO: 2882
gugaguuucucugaagcac

SEQ ID NO: 223757 - RNA, 19 nt, Artificial Sequence
  Description of Artificial Sequence: Synthetic oligonucleotide
  Antisense strand to SEQ ID NO: 223756
gugcuucagagaaacucac

SEQ ID NO: 223758 - RNA, 19 nt, Artificial Sequence
  Description of Artificial Sequence: Synthetic oligonucleotide
  Sense strand starting at position 2741 of SEQ ID NO: 2882
ggcgcuccuucagaaaguu

SEQ ID NO: 223759 - RNA, 19 nt, Artificial Sequence
  Description of Artificial Sequence: Synthetic oligonucleotide
  Antisense strand to SEQ ID NO: 223758
aacuuucugaaggagcgcc

SEQ ID NO: 223760 - RNA, 19 nt, Artificial Sequence
  Description of Artificial Sequence: Synthetic oligonucleotide
  Sense strand starting at position 2781 of SEQ ID NO: 2882
gcucaaacaucugcagauc

SEQ ID NO: 223761 - RNA, 19 nt, Artificial Sequence
  Description of Artificial Sequence: Synthetic oligonucleotide
  Antisense strand to SEQ ID NO: 223760
gaucugcagauguuugagc

SEQ ID NO: 223762 - RNA, 19 nt, Artificial Sequence
  Description of Artificial Sequence: Synthetic oligonucleotide
  Sense strand starting at position 2941 of SEQ ID NO: 2882
gcuguaggaucagauaaag

SEQ ID NO: 223763 - RNA, 19 nt, Artificial Sequence
  Description of Artificial Sequence: Synthetic oligonucleotide
  Antisense strand to SEQ ID NO: 223762
cuuuaucugauccuacagc

SEQ ID NO: 223764 - RNA, 19 nt, Artificial Sequence
  Description of Artificial Sequence: Synthetic oligonucleotide
  Sense strand starting at position 2990 of SEQ ID NO: 2882
gguugaagauuccacuaga

SEQ ID NO: 223765 - RNA, 19 nt, Artificial Sequence
  Description of Artificial Sequence: Synthetic oligonucleotide
  Antisense strand to SEQ ID NO: 223764
ucuaguggaaucuucaacc

SEQ ID NO: 223766 - RNA, 19 nt, Artificial Sequence
  Description of Artificial Sequence: Synthetic oligonucleotide
  Sense strand starting at position 3001 of SEQ ID NO: 2882
ccacuagacuuggagaaau

SEQ ID NO: 223767 - RNA, 19 nt, Artificial Sequence
  Description of Artificial Sequence: Synthetic oligonucleotide
  Antisense strand to SEQ ID NO: 223766
auuucuccaagucuagugg

SEQ ID NO: 223768 - RNA, 19 nt, Artificial Sequence
  Description of Artificial Sequence: Synthetic oligonucleotide
  Sense strand starting at position 3053 of SEQ ID NO: 2882
agguaacuaugccacaaau

SEQ ID NO: 223769 - RNA, 19 nt, Artificial Sequence
  Description of Artificial Sequence: Synthetic oligonucleotide
  Antisense strand to SEQ ID NO: 223768
auuuguggcauaguuaccu

SEQ ID NO: 223770 - RNA, 19 nt, Artificial Sequence
  Description of Artificial Sequence: Synthetic oligonucleotide
  Sense strand starting at position 3279 of SEQ ID NO: 2882
aggugcguccuuggguaua

SEQ ID NO: 223771 - RNA, 19 nt, Artificial Sequence
  Description of Artificial Sequence: Synthetic oligonucleotide
  Antisense strand to SEQ ID NO: 223770
uauacccaaggacgcaccu

SEQ ID NO: 223772 - RNA, 19 nt, Artificial Sequence
  Description of Artificial Sequence: Synthetic oligonucleotide
  Sense strand starting at position 3281 of SEQ ID NO: 2882
gugcguccuuggguauauu

SEQ ID NO: 223773 - RNA, 19 nt, Artificial Sequence
  Description of Artificial Sequence: Synthetic oligonucleotide
  Antisense strand to SEQ ID NO: 223772
aauauacccaaggacgcac

SEQ ID NO: 223774 - RNA, 19 nt, Artificial Sequence
  Description of Artificial Sequence: Synthetic oligonucleotide
  Sense strand starting at position 3289 of SEQ ID NO: 2882
uuggguauauucuguagca

SEQ ID NO: 223775 - RNA, 19 nt, Artificial Sequence
  Description of Artificial Sequence: Synthetic oligonucleotide
  Antisense strand to SEQ ID NO: 223774
ugcuacagaauauacccaa

SEQ ID NO: 223776 - RNA, 19 nt, Artificial Sequence
  Description of Artificial Sequence: Synthetic oligonucleotide
  Sense strand starting at position 3294 of SEQ ID NO: 2882
uauauucuguagcagggaa

SEQ ID NO: 223777 - RNA, 19 nt, Artificial Sequence
  Description of Artificial Sequence: Synthetic oligonucleotide
  Antisense strand to SEQ ID NO: 223776
uucccugcuacagaauaua

SEQ ID NO: 223778 - RNA, 19 nt, Artificial Sequence
  Description of Artificial Sequence: Synthetic oligonucleotide
  Sense strand starting at position 3310 of SEQ ID NO: 2882
gaagaauaaccgcagguuu

SEQ ID NO: 223779 - RNA, 19 nt, Artificial Sequence
  Description of Artificial Sequence: Synthetic oligonucleotide
  Antisense strand to SEQ ID NO: 223778
aaaccugcgguuauucuuc

SEQ ID NO: 223780 - RNA, 19 nt, Artificial Sequence
  Description of Artificial Sequence: Synthetic oligonucleotide
  Sense strand starting at position 3370 of SEQ ID NO: 2882
ugccguuggcaagaugaau

SEQ ID NO: 223781 - RNA, 19 nt, Artificial Sequence
  Description of Artificial Sequence: Synthetic oligonucleotide
  Antisense strand to SEQ ID NO: 223780
auucaucuugccaacggca

SEQ ID NO: 223782 - RNA, 19 nt, Artificial Sequence
  Description of Artificial Sequence: Synthetic oligonucleotide
  Sense strand starting at position 3379 of SEQ ID NO: 2882
caagaugaauuagaaggaa

SEQ ID NO: 223783 - RNA, 19 nt, Artificial Sequence
  Description of Artificial Sequence: Synthetic oligonucleotide
  Antisense strand to SEQ ID NO: 223782
uuccuucuaauucaucuug

SEQ ID NO: 223784 - RNA, 19 nt, Artificial Sequence
  Description of Artificial Sequence: Synthetic oligonucleotide
  Sense strand starting at position 3449 of SEQ ID NO: 2882
agcggcacuuguuagaaga

SEQ ID NO: 223785 - RNA, 19 nt, Artificial Sequence
  Description of Artificial Sequence: Synthetic oligonucleotide
  Antisense strand to SEQ ID NO: 223784
ucuucuaacaagugccgcu

SEQ ID NO: 223786 - RNA, 19 nt, Artificial Sequence
  Description of Artificial Sequence: Synthetic oligonucleotide
  Sense strand starting at position 3459 of SEQ ID NO: 2882
guuagaagaucuggacuug

SEQ ID NO: 223787 - RNA, 19 nt, Artificial Sequence
  Description of Artificial Sequence: Synthetic oligonucleotide
  Antisense strand to SEQ ID NO: 223786
caaguccagaucuucuaac

SEQ ID NO: 223788 - RNA, 19 nt, Artificial Sequence
  Description of Artificial Sequence: Synthetic oligonucleotide
  Sense strand starting at position 3834 of SEQ ID NO: 2882
agaaaucuguugucucauc

SEQ ID NO: 223789 - RNA, 19 nt, Artificial Sequence
  Description of Artificial Sequence: Synthetic oligonucleotide
  Antisense strand to SEQ ID NO: 223788
gaugagacaacagauuucu

SEQ ID NO: 223790 - RNA, 19 nt, Artificial Sequence
  Description of Artificial Sequence: Synthetic oligonucleotide
  Sense strand starting at position 3915 of SEQ ID NO: 2882
augagacaauucucuaggu

SEQ ID NO: 223791 - RNA, 19 nt, Artificial Sequence
  Description of Artificial Sequence: Synthetic oligonucleotide
  Antisense strand to SEQ ID NO: 223790
accuagagaauugucucau

SEQ ID NO: 223792 - RNA, 19 nt, Artificial Sequence
  Description of Artificial Sequence: Synthetic oligonucleotide
  Sense strand starting at position 3948 of SEQ ID NO: 2882
cacagucaccugggacaua

SEQ ID NO: 223793 - RNA, 19 nt, Artificial Sequence
  Description of Artificial Sequence: Synthetic oligonucleotide
  Antisense strand to SEQ ID NO: 223792
uaugucccaggugacugug

SEQ ID NO: 223794 - RNA, 19 nt, Artificial Sequence
  Description of Artificial Sequence: Synthetic oligonucleotide
  Sense strand starting at position 3963 of SEQ ID NO: 2882
cauacaggugcugguauaa

SEQ ID NO: 223795 - RNA, 19 nt, Artificial Sequence
  Description of Artificial Sequence: Synthetic oligonucleotide
  Antisense strand to SEQ ID NO: 223794
uuauaccagcaccuguaug

SEQ ID NO: 223796 - RNA, 19 nt, Artificial Sequence
  Description of Artificial Sequence: Synthetic oligonucleotide
  Sense strand starting at position 3979 of SEQ ID NO: 2882
uaaugaagucacgagaugu

SEQ ID NO: 223797 - RNA, 19 nt, Artificial Sequence
  Description of Artificial Sequence: Synthetic oligonucleotide
  Antisense strand to SEQ ID NO: 223796
acaucucgugacuucauua

SEQ ID NO: 223798 - RNA, 19 nt, Artificial Sequence
  Description of Artificial Sequence: Synthetic oligonucleotide
  Sense strand starting at position 2826 of SEQ ID NO: 2881
uccaaagccucucugagau

SEQ ID NO: 223799 - RNA, 19 nt, Artificial Sequence
  Description of Artificial Sequence: Synthetic oligonucleotide
  Antisense strand to SEQ ID NO: 223798
aucucagagaggcuuugga

SEQ ID NO: 223800 - RNA, 19 nt, Artificial Sequence
  Description of Artificial Sequence: Synthetic oligonucleotide
  Sense strand starting at position 2872 of SEQ ID NO: 2881
cguaccuugagguguccaa

SEQ ID NO: 223801 - RNA, 19 nt, Artificial Sequence
  Description of Artificial Sequence: Synthetic oligonucleotide
  Antisense strand to SEQ ID NO: 223800
uuggacaccucaagguacg

SEQ ID NO: 223802 - RNA, 19 nt, Artificial Sequence
  Description of Artificial Sequence: Synthetic oligonucleotide
  Sense strand starting at position 2972 of SEQ ID NO: 2881
gucucuuccagcuggaaga

SEQ ID NO: 223803 - RNA, 19 nt, Artificial Sequence
  Description of Artificial Sequence: Synthetic oligonucleotide
  Antisense strand to SEQ ID NO: 223802
ucuuccagcuggaagagac

SEQ ID NO: 223804 - RNA, 19 nt, Artificial Sequence
  Description of Artificial Sequence: Synthetic oligonucleotide
  Sense strand starting at position 2973 of SEQ ID NO: 2881
ucucuuccagcuggaagau

SEQ ID NO: 223805 - RNA, 19 nt, Artificial Sequence
  Description of Artificial Sequence: Synthetic oligonucleotide
  Antisense strand to SEQ ID NO: 223804
aucuuccagcuggaagaga

SEQ ID NO: 223806 - RNA, 19 nt, Artificial Sequence
  Description of Artificial Sequence: Synthetic oligonucleotide
  Sense strand starting at position 2974 of SEQ ID NO: 2881
cucuuccagcuggaagauu

SEQ ID NO: 223807 - RNA, 19 nt, Artificial Sequence
  Description of Artificial Sequence: Synthetic oligonucleotide
  Antisense strand to SEQ ID NO: 223806
aaucuuccagcuggaagag

SEQ ID NO: 223808 - RNA, 19 nt, Artificial Sequence
  Description of Artificial Sequence: Synthetic oligonucleotide
  Sense strand starting at position 2982 of SEQ ID NO: 2881
gcuggaagauucugugugu

SEQ ID NO: 223809 - RNA, 19 nt, Artificial Sequence
  Description of Artificial Sequence: Synthetic oligonucleotide
  Antisense strand to SEQ ID NO: 223808
acacacagaaucuuccagc

SEQ ID NO: 223810 - RNA, 19 nt, Artificial Sequence
  Description of Artificial Sequence: Synthetic oligonucleotide
  Sense strand starting at position 3118 of SEQ ID NO: 2881
ucacuaugugcucaucuca

SEQ ID NO: 223811 - RNA, 19 nt, Artificial Sequence
  Description of Artificial Sequence: Synthetic oligonucleotide
  Antisense strand to SEQ ID NO: 223810
ugagaugagcacauaguga

SEQ ID NO: 223812 - RNA, 19 nt, Artificial Sequence
  Description of Artificial Sequence: Synthetic oligonucleotide
  Sense strand starting at position 3242 of SEQ ID NO: 2881
cccgaauucuacucagcac

SEQ ID NO: 223813 - RNA, 19 nt, Artificial Sequence
  Description of Artificial Sequence: Synthetic oligonucleotide
  Antisense strand to SEQ ID NO: 223812
gugcugaguagaauucggg

SEQ ID NO: 223814 - RNA, 19 nt, Artificial Sequence
  Description of Artificial Sequence: Synthetic oligonucleotide
  Sense strand starting at position 3612 of SEQ ID NO: 2881
gccauaguucuggccguuu

SEQ ID NO: 223815 - RNA, 19 nt, Artificial Sequence
  Description of Artificial Sequence: Synthetic oligonucleotide
  Antisense strand to SEQ ID NO: 223814
aaacggccagaacuauggc

SEQ ID NO: 223816 - RNA, 19 nt, Artificial Sequence
  Description of Artificial Sequence: Synthetic oligonucleotide
  Sense strand starting at position 3783 of SEQ ID NO: 2881
cucaguaaaccuuggugga

SEQ ID NO: 223817 - RNA, 19 nt, Artificial Sequence
  Description of Artificial Sequence: Synthetic oligonucleotide
  Antisense strand to SEQ ID NO: 223816
uccaccaagguuuacugag

SEQ ID NO: 223818 - RNA, 19 nt, Artificial Sequence
  Description of Artificial Sequence: Synthetic oligonucleotide
  Sense strand starting at position 3784 of SEQ ID NO: 2881
ucaguaaaccuugguggaa

SEQ ID NO: 223819 - RNA, 19 nt, Artificial Sequence
  Description of Artificial Sequence: Synthetic oligonucleotide
  Antisense strand to SEQ ID NO: 223818
uuccaccaagguuuacuga

SEQ ID NO: 223820 - RNA, 19 nt, Artificial Sequence
  Description of Artificial Sequence: Synthetic oligonucleotide
  Sense strand starting at position 3785 of SEQ ID NO: 2881
caguaaaccuugguggaau

SEQ ID NO: 223821 - RNA, 19 nt, Artificial Sequence
  Description of Artificial Sequence: Synthetic oligonucleotide
  Antisense strand to SEQ ID NO: 223820
auuccaccaagguuuacug

SEQ ID NO: 223822 - RNA, 19 nt, Artificial Sequence
  Description of Artificial Sequence: Synthetic oligonucleotide
  Sense strand starting at position 3786 of SEQ ID NO: 2881
aguaaaccuugguggaauu

SEQ ID NO: 223823 - RNA, 19 nt, Artificial Sequence
  Description of Artificial Sequence: Synthetic oligonucleotide
  Antisense strand to SEQ ID NO: 223822
aauuccaccaagguuuacu

SEQ ID NO: 223824 - RNA, 19 nt, Artificial Sequence
  Description of Artificial Sequence: Synthetic oligonucleotide
  Sense strand starting at position 3787 of SEQ ID NO: 2881
guaaaccuugguggaauua

SEQ ID NO: 223825 - RNA, 19 nt, Artificial Sequence
  Description of Artificial Sequence: Synthetic oligonucleotide
  Antisense strand to SEQ ID NO: 223824
uaauuccaccaagguuuac

SEQ ID NO: 223826 - RNA, 19 nt, Artificial Sequence
  Description of Artificial Sequence: Synthetic oligonucleotide
  Sense strand starting at position 3822 of SEQ ID NO: 2881
ggcuguucgcuuucuacau

SEQ ID NO: 223827 - RNA, 19 nt, Artificial Sequence
  Description of Artificial Sequence: Synthetic oligonucleotide
  Antisense strand to SEQ ID NO: 223826
auguagaaagcgaacagcc

SEQ ID NO: 223828 - RNA, 19 nt, Artificial Sequence
  Description of Artificial Sequence: Synthetic oligonucleotide
  Sense strand starting at position 3887 of SEQ ID NO: 2881
aaaggagaagaccguuuau

SEQ ID NO: 223829 - RNA, 19 nt, Artificial Sequence
  Description of Artificial Sequence: Synthetic oligonucleotide
  Antisense strand to SEQ ID NO: 223828
auaaacggucuucuccuuu

SEQ ID NO: 223830 - RNA, 19 nt, Artificial Sequence
  Description of Artificial Sequence: Synthetic oligonucleotide
  Sense strand starting at position 3916 of SEQ ID NO: 2881
cugagauaccucugccuuc

SEQ ID NO: 223831 - RNA, 19 nt, Artificial Sequence
  Description of Artificial Sequence: Synthetic oligonucleotide
  Antisense strand to SEQ ID NO: 223830
gaaggcagagguaucucag

SEQ ID NO: 223832 - RNA, 19 nt, Artificial Sequence
  Description of Artificial Sequence: Synthetic oligonucleotide
  Sense strand starting at position 3933 of SEQ ID NO: 2881
ucaucaagggcuuacauau

SEQ ID NO: 223833 - RNA, 19 nt, Artificial Sequence
  Description of Artificial Sequence: Synthetic oligonucleotide
  Antisense strand to SEQ ID NO: 223832
auauguaagcccuugauga

SEQ ID NO: 223834 - RNA, 19 nt, Artificial Sequence
  Description of Artificial Sequence: Synthetic oligonucleotide
  Sense strand starting at position 3971 of SEQ ID NO: 2881
gcgacuguuuacugagugu

SEQ ID NO: 223835 - RNA, 19 nt, Artificial Sequence
  Description of Artificial Sequence: Synthetic oligonucleotide
  Antisense strand to SEQ ID NO: 223834
acacucaguaaacagucgc

SEQ ID NO: 223836 - RNA, 19 nt, Artificial Sequence
  Description of Artificial Sequence: Synthetic oligonucleotide
  Sense strand starting at position 3974 of SEQ ID NO: 2881
acuguuuacugagugucua

SEQ ID NO: 223837 - RNA, 19 nt, Artificial Sequence
  Description of Artificial Sequence: Synthetic oligonucleotide
  Antisense strand to SEQ ID NO: 223836
uagacacucaguaaacagu

SEQ ID NO: 223838 - RNA, 19 nt, Artificial Sequence
  Description of Artificial Sequence: Synthetic oligonucleotide
  Sense strand starting at position 2151 of SEQ ID NO: 2883
uccaaagccucucugagau

SEQ ID NO: 223839 - RNA, 19 nt, Artificial Sequence
  Description of Artificial Sequence: Synthetic oligonucleotide
  Antisense strand to SEQ ID NO: 223838
aucucagagaggcuuugga

SEQ ID NO: 223840 - RNA, 19 nt, Artificial Sequence
  Description of Artificial Sequence: Synthetic oligonucleotide
  Sense strand starting at position 2197 of SEQ ID NO: 2883
cguaccuugagguguccaa

SEQ ID NO: 223841 - RNA, 19 nt, Artificial Sequence
  Description of Artificial Sequence: Synthetic oligonucleotide
  Antisense strand to SEQ ID NO: 223840
uuggacaccucaagguacg

SEQ ID NO: 223842 - RNA, 19 nt, Artificial Sequence
  Description of Artificial Sequence: Synthetic oligonucleotide
  Sense strand starting at position 2297 of SEQ ID NO: 2883
gucucuuccagcuggaaga

SEQ ID NO: 223843 - RNA, 19 nt, Artificial Sequence
  Description of Artificial Sequence: Synthetic oligonucleotide
  Antisense strand to SEQ ID NO: 223842
ucuuccagcuggaagagac

SEQ ID NO: 223844 - RNA, 19 nt, Artificial Sequence
  Description of Artificial Sequence: Synthetic oligonucleotide
  Sense strand starting at position 2298 of SEQ ID NO: 2883
ucucuuccagcuggaagau

SEQ ID NO: 223845 - RNA, 19 nt, Artificial Sequence
  Description of Artificial Sequence: Synthetic oligonucleotide
  Antisense strand to SEQ ID NO: 223844
aucuuccagcuggaagaga

SEQ ID NO: 223846 - RNA, 19 nt, Artificial Sequence
  Description of Artificial Sequence: Synthetic oligonucleotide
  Sense strand starting at position 2299 of SEQ ID NO: 2883
cucuuccagcuggaagauu

SEQ ID NO: 223847 - RNA, 19 nt, Artificial Sequence
  Description of Artificial Sequence: Synthetic oligonucleotide
  Antisense strand to SEQ ID NO: 223846
aaucuuccagcuggaagag

SEQ ID NO: 223848 - RNA, 19 nt, Artificial Sequence
  Description of Artificial Sequence: Synthetic oligonucleotide
  Sense strand starting at position 2307 of SEQ ID NO: 2883
gcuggaagauucugugugu

SEQ ID NO: 223849 - RNA, 19 nt, Artificial Sequence
  Description of Artificial Sequence: Synthetic oligonucleotide
  Antisense strand to SEQ ID NO: 223848
acacacagaaucuuccagc

SEQ ID NO: 223850 - RNA, 19 nt, Artificial Sequence
  Description of Artificial Sequence: Synthetic oligonucleotide
  Sense strand starting at position 2443 of SEQ ID NO: 2883
ucacuaugugcucaucuca

SEQ ID NO: 223851 - RNA, 19 nt, Artificial Sequence
  Description of Artificial Sequence: Synthetic oligonucleotide
  Antisense strand to SEQ ID NO: 223850
ugagaugagcacauaguga

SEQ ID NO: 223852 - RNA, 19 nt, Artificial Sequence
  Description of Artificial Sequence: Synthetic oligonucleotide
  Sense strand starting at position 2567 of SEQ ID NO: 2883
cccgaauucuacucagcac

SEQ ID NO: 223853 - RNA, 19 nt, Artificial Sequence
  Description of Artificial Sequence: Synthetic oligonucleotide
  Antisense strand to SEQ ID NO: 223852
gugcugaguagaauucggg

SEQ ID NO: 223854 - RNA, 19 nt, Artificial Sequence
  Description of Artificial Sequence: Synthetic oligonucleotide
  Sense strand starting at position 2937 of SEQ ID NO: 2883
gccauaguucuggccguuu

SEQ ID NO: 223855 - RNA, 19 nt, Artificial Sequence
  Description of Artificial Sequence: Synthetic oligonucleotide
  Antisense strand to SEQ ID NO: 223854
aaacggccagaacuauggc

SEQ ID NO: 223856 - RNA, 19 nt, Artificial Sequence
  Description of Artificial Sequence: Synthetic oligonucleotide
  Sense strand starting at position 3108 of SEQ ID NO: 2883
cucaguaaaccuuggugga

SEQ ID NO: 223857 - RNA, 19 nt, Artificial Sequence
  Description of Artificial Sequence: Synthetic oligonucleotide
  Antisense strand to SEQ ID NO: 223856
uccaccaagguuuacugag

SEQ ID NO: 223858 - RNA, 19 nt, Artificial Sequence
  Description of Artificial Sequence: Synthetic oligonucleotide
  Sense strand starting at position 3109 of SEQ ID NO: 2883
ucaguaaaccuugguggaa

SEQ ID NO: 223859 - RNA, 19 nt, Artificial Sequence
  Description of Artificial Sequence: Synthetic oligonucleotide
  Antisense strand to SEQ ID NO: 223858
uuccaccaagguuuacuga

SEQ ID NO: 223860 - RNA, 19 nt, Artificial Sequence
  Description of Artificial Sequence: Synthetic oligonucleotide
  Sense strand starting at position 3110 of SEQ ID NO: 2883
caguaaaccuugguggaau

SEQ ID NO: 223861 - RNA, 19 nt, Artificial Sequence
  Description of Artificial Sequence: Synthetic oligonucleotide
  Antisense strand to SEQ ID NO: 223860
auuccaccaagguuuacug

SEQ ID NO: 223862 - RNA, 19 nt, Artificial Sequence
  Description of Artificial Sequence: Synthetic oligonucleotide
  Sense strand starting at position 3111 of SEQ ID NO: 2883
aguaaaccuugguggaauu

SEQ ID NO: 223863 - RNA, 19 nt, Artificial Sequence
  Description of Artificial Sequence: Synthetic oligonucleotide
  Antisense strand to SEQ ID NO: 223862
aauuccaccaagguuuacu

SEQ ID NO: 223864 - RNA, 19 nt, Artificial Sequence
  Description of Artificial Sequence: Synthetic oligonucleotide
  Sense strand starting at position 3112 of SEQ ID NO: 2883
guaaaccuugguggaauua

SEQ ID NO: 223865 - RNA, 19 nt, Artificial Sequence
  Description of Artificial Sequence: Synthetic oligonucleotide
  Antisense strand to SEQ ID NO: 223864
uaauuccaccaagguuuac

SEQ ID NO: 223866 - RNA, 19 nt, Artificial Sequence
  Description of Artificial Sequence: Synthetic oligonucleotide
  Sense strand starting at position 3147 of SEQ ID NO: 2883
ggcuguucgcuuucuacau

SEQ ID NO: 223867 - RNA, 19 nt, Artificial Sequence
  Description of Artificial Sequence: Synthetic oligonucleotide
  Antisense strand to SEQ ID NO: 223866
auguagaaagcgaacagcc

SEQ ID NO: 223868 - RNA, 19 nt, Artificial Sequence
  Description of Artificial Sequence: Synthetic oligonucleotide
  Sense strand starting at position 3212 of SEQ ID NO: 2883
aaaggagaagaccguuuau

SEQ ID NO: 223869 - RNA, 19 nt, Artificial Sequence
  Description of Artificial Sequence: Synthetic oligonucleotide
  Antisense strand to SEQ ID NO: 223868
auaaacggucuucuccuuu

SEQ ID NO: 223870 - RNA, 19 nt, Artificial Sequence
  Description of Artificial Sequence: Synthetic oligonucleotide
  Sense strand starting at position 3241 of SEQ ID NO: 2883
cugagauaccucugccuuc

SEQ ID NO: 223871 - RNA, 19 nt, Artificial Sequence
  Description of Artificial Sequence: Synthetic oligonucleotide
  Antisense strand to SEQ ID NO: 223870
gaaggcagagguaucucag

SEQ ID NO: 223872 - RNA, 19 nt, Artificial Sequence
  Description of Artificial Sequence: Synthetic oligonucleotide
  Sense strand starting at position 3258 of SEQ ID NO: 2883
ucaucaagggcuuacauau

SEQ ID NO: 223873 - RNA, 19 nt, Artificial Sequence
  Description of Artificial Sequence: Synthetic oligonucleotide
  Antisense strand to SEQ ID NO: 223872
auauguaagcccuugauga

SEQ ID NO: 223874 - RNA, 19 nt, Artificial Sequence
  Description of Artificial Sequence: Synthetic oligonucleotide
  Sense strand starting at position 3296 of SEQ ID NO: 2883
gcgacuguuuacugagugu

SEQ ID NO: 223875 - RNA, 19 nt, Artificial Sequence
  Description of Artificial Sequence: Synthetic oligonucleotide
  Antisense strand to SEQ ID NO: 223874
acacucaguaaacagucgc

SEQ ID NO: 223876 - RNA, 19 nt, Artificial Sequence
  Description of Artificial Sequence: Synthetic oligonucleotide
  Sense strand starting at position 3299 of SEQ ID NO: 2883
acuguuuacugagugucua

SEQ ID NO: 223877 - RNA, 19 nt, Artificial Sequence
  Description of Artificial Sequence: Synthetic oligonucleotide
  Antisense strand to SEQ ID NO: 223876
uagacacucaguaaacagu

SEQ ID NO: 223878 - RNA, 19 nt, Artificial Sequence
  Description of Artificial Sequence: Synthetic oligonucleotide
  Sense strand starting at position 3357 of SEQ ID NO: 2883
ucacuagcccugugauaug

SEQ ID NO: 223879 - RNA, 19 nt, Artificial Sequence
  Description of Artificial Sequence: Synthetic oligonucleotide
  Antisense strand to SEQ ID NO: 223878
cauaucacagggcuaguga

SEQ ID NO: 223880 - RNA, 19 nt, Artificial Sequence
  Description of Artificial Sequence: Synthetic oligonucleotide
  Sense strand starting at position 3367 of SEQ ID NO: 2883
ugugauauggcuuguacuc

SEQ ID NO: 223881 - RNA, 19 nt, Artificial Sequence
  Description of Artificial Sequence: Synthetic oligonucleotide
  Antisense strand to SEQ ID NO: 223880
gaguacaagccauaucaca

SEQ ID NO: 223882 - RNA, 19 nt, Artificial Sequence
  Description of Artificial Sequence: Synthetic oligonucleotide
  Sense strand starting at position 3411 of SEQ ID NO: 2883
gaggcucagucuuagucaa

SEQ ID NO: 223883 - RNA, 19 nt, Artificial Sequence
  Description of Artificial Sequence: Synthetic oligonucleotide
  Antisense strand to SEQ ID NO: 223882
uugacuaagacugagccuc

SEQ ID NO: 223884 - RNA, 19 nt, Artificial Sequence
  Description of Artificial Sequence: Synthetic oligonucleotide
  Sense strand starting at position 3413 of SEQ ID NO: 2883
ggcucagucuuagucaaag

SEQ ID NO: 223885 - RNA, 19 nt, Artificial Sequence
  Description of Artificial Sequence: Synthetic oligonucleotide
  Antisense strand to SEQ ID NO: 223884
cuuugacuaagacugagcc

SEQ ID NO: 223886 - RNA, 19 nt, Artificial Sequence
  Description of Artificial Sequence: Synthetic oligonucleotide
  Sense strand starting at position 3747 of SEQ ID NO: 2883
aggugaugcuccuaucuca

SEQ ID NO: 223887 - RNA, 19 nt, Artificial Sequence
  Description of Artificial Sequence: Synthetic oligonucleotide
  Antisense strand to SEQ ID NO: 223886
ugagauaggagcaucaccu

SEQ ID NO: 223888 - RNA, 19 nt, Artificial Sequence
  Description of Artificial Sequence: Synthetic oligonucleotide
  Sense strand starting at position 3831 of SEQ ID NO: 2883
cauaguugcucuuaagaag

SEQ ID NO: 223889 - RNA, 19 nt, Artificial Sequence
  Description of Artificial Sequence: Synthetic oligonucleotide
  Antisense strand to SEQ ID NO: 223888
cuucuuaagagcaacuaug

SEQ ID NO: 223890 - RNA, 19 nt, Artificial Sequence
  Description of Artificial Sequence: Synthetic oligonucleotide
  Sense strand starting at position 38 of SEQ ID NO: 2884
cuguguugggcccaaaguu

SEQ ID NO: 223891 - RNA, 19 nt, Artificial Sequence
  Description of Artificial Sequence: Synthetic oligonucleotide
  Antisense strand to SEQ ID NO: 223890
aacuuugggcccaacacag

SEQ ID NO: 223892 - RNA, 19 nt, Artificial Sequence
  Description of Artificial Sequence: Synthetic oligonucleotide
  Sense strand starting at position 50 of SEQ ID NO: 2884
caaaguucucguugauauu

SEQ ID NO: 223893 - RNA, 19 nt, Artificial Sequence
  Description of Artificial Sequence: Synthetic oligonucleotide
  Antisense strand to SEQ ID NO: 223892
aauaucaacgagaacuuug

SEQ ID NO: 223894 - RNA, 19 nt, Artificial Sequence
  Description of Artificial Sequence: Synthetic oligonucleotide
  Sense strand starting at position 60 of SEQ ID NO: 2884
guugauauuucgcugcaga

SEQ ID NO: 223895 - RNA, 19 nt, Artificial Sequence
  Description of Artificial Sequence: Synthetic oligonucleotide
  Antisense strand to SEQ ID NO: 223894
ucugcagcgaaauaucaac

SEQ ID NO: 223896 - RNA, 19 nt, Artificial Sequence
  Description of Artificial Sequence: Synthetic oligonucleotide
  Sense strand starting at position 61 of SEQ ID NO: 2884
uugauauuucgcugcagau

SEQ ID NO: 223897 - RNA, 19 nt, Artificial Sequence
  Description of Artificial Sequence: Synthetic oligonucleotide
  Antisense strand to SEQ ID NO: 223896
aucugcagcgaaauaucaa

SEQ ID NO: 223898 - RNA, 19 nt, Artificial Sequence
  Description of Artificial Sequence: Synthetic oligonucleotide
  Sense strand starting at position 336 of SEQ ID NO: 2884
cgguucccaccuugacaau

SEQ ID NO: 223899 - RNA, 19 nt, Artificial Sequence
  Description of Artificial Sequence: Synthetic oligonucleotide
  Antisense strand to SEQ ID NO: 223898
auugucaaggugggaaccg

SEQ ID NO: 223900 - RNA, 19 nt, Artificial Sequence
  Description of Artificial Sequence: Synthetic oligonucleotide
  Sense strand starting at position 369 of SEQ ID NO: 2884
gagucaggucacggucaaa

SEQ ID NO: 223901 - RNA, 19 nt, Artificial Sequence
  Description of Artificial Sequence: Synthetic oligonucleotide
  Antisense strand to SEQ ID NO: 223900
uuugaccgugaccugacuc

SEQ ID NO: 223902 - RNA, 19 nt, Artificial Sequence
  Description of Artificial Sequence: Synthetic oligonucleotide
  Sense strand starting at position 500 of SEQ ID NO: 2884
aggcuucaugacgauaugu

SEQ ID NO: 223903 - RNA, 19 nt, Artificial Sequence
  Description of Artificial Sequence: Synthetic oligonucleotide
  Antisense strand to SEQ ID NO: 223902
acauaucgucaugaagccu

SEQ ID NO: 223904 - RNA, 19 nt, Artificial Sequence
  Description of Artificial Sequence: Synthetic oligonucleotide
  Sense strand starting at position 523 of SEQ ID NO: 2884
augagacuuuggcuacuca

SEQ ID NO: 223905 - RNA, 19 nt, Artificial Sequence
  Description of Artificial Sequence: Synthetic oligonucleotide
  Antisense strand to SEQ ID NO: 223904
ugaguagccaaagucucau

SEQ ID NO: 223906 - RNA, 19 nt, Artificial Sequence
  Description of Artificial Sequence: Synthetic oligonucleotide
  Sense strand starting at position 524 of SEQ ID NO: 2884
ugagacuuuggcuacucau

SEQ ID NO: 223907 - RNA, 19 nt, Artificial Sequence
  Description of Artificial Sequence: Synthetic oligonucleotide
  Antisense strand to SEQ ID NO: 223906
augaguagccaaagucuca

SEQ ID NO: 223908 - RNA, 19 nt, Artificial Sequence
  Description of Artificial Sequence: Synthetic oligonucleotide
  Sense strand starting at position 545 of SEQ ID NO: 2884
guaacagacagcgaauauu

SEQ ID NO: 223909 - RNA, 19 nt, Artificial Sequence
  Description of Artificial Sequence: Synthetic oligonucleotide
  Antisense strand to SEQ ID NO: 223908
aauauucgcugucuguuac

SEQ ID NO: 223910 - RNA, 19 nt, Artificial Sequence
  Description of Artificial Sequence: Synthetic oligonucleotide
  Sense strand starting at position 561 of SEQ ID NO: 2884
auuagugucacaugaaagg

SEQ ID NO: 223911 - RNA, 19 nt, Artificial Sequence
  Description of Artificial Sequence: Synthetic oligonucleotide
  Antisense strand to SEQ ID NO: 223910
ccuuucaugugacacuaau

SEQ ID NO: 223912 - RNA, 19 nt, Artificial Sequence
  Description of Artificial Sequence: Synthetic oligonucleotide
  Sense strand starting at position 805 of SEQ ID NO: 2884
cuaugaugguggaggaguu

SEQ ID NO: 223913 - RNA, 19 nt, Artificial Sequence
  Description of Artificial Sequence: Synthetic oligonucleotide
  Antisense strand to SEQ ID NO: 223912
aacuccuccaccaucauag

SEQ ID NO: 223914 - RNA, 19 nt, Artificial Sequence
  Description of Artificial Sequence: Synthetic oligonucleotide
  Sense strand starting at position 815 of SEQ ID NO: 2884
ggaggaguuccuggucaug

SEQ ID NO: 223915 - RNA, 19 nt, Artificial Sequence
  Description of Artificial Sequence: Synthetic oligonucleotide
  Antisense strand to SEQ ID NO: 223914
caugaccaggaacuccucc

SEQ ID NO: 223916 - RNA, 19 nt, Artificial Sequence
  Description of Artificial Sequence: Synthetic oligonucleotide
  Sense strand starting at position 817 of SEQ ID NO: 2884
aggaguuccuggucaugaa

SEQ ID NO: 223917 - RNA, 19 nt, Artificial Sequence
  Description of Artificial Sequence: Synthetic oligonucleotide
  Antisense strand to SEQ ID NO: 223916
uucaugaccaggaacuccu

SEQ ID NO: 223918 - RNA, 19 nt, Artificial Sequence
  Description of Artificial Sequence: Synthetic oligonucleotide
  Sense strand starting at position 818 of SEQ ID NO: 2884
ggaguuccuggucaugaag

SEQ ID NO: 223919 - RNA, 19 nt, Artificial Sequence
  Description of Artificial Sequence: Synthetic oligonucleotide
  Antisense strand to SEQ ID NO: 223918
cuucaugaccaggaacucc

SEQ ID NO: 223920 - RNA, 19 nt, Artificial Sequence
  Description of Artificial Sequence: Synthetic oligonucleotide
  Sense strand starting at position 960 of SEQ ID NO: 2884
cgggcuuaauauuccauuu

SEQ ID NO: 223921 - RNA, 19 nt, Artificial Sequence
  Description of Artificial Sequence: Synthetic oligonucleotide
  Antisense strand to SEQ ID NO: 223920
aaauggaauauuaagcccg

SEQ ID NO: 223922 - RNA, 19 nt, Artificial Sequence
  Description of Artificial Sequence: Synthetic oligonucleotide
  Sense strand starting at position 1122 of SEQ ID NO: 2884
ccgcuuaccauggaaagga

SEQ ID NO: 223923 - RNA, 19 nt, Artificial Sequence
  Description of Artificial Sequence: Synthetic oligonucleotide
  Antisense strand to SEQ ID NO: 223922
uccuuuccaugguaagcgg

SEQ ID NO: 223924 - RNA, 19 nt, Artificial Sequence
  Description of Artificial Sequence: Synthetic oligonucleotide
  Sense strand starting at position 1378 of SEQ ID NO: 2884
ggcugaaacuccguugaaa

SEQ ID NO: 223925 - RNA, 19 nt, Artificial Sequence
  Description of Artificial Sequence: Synthetic oligonucleotide
  Antisense strand to SEQ ID NO: 223924
uuucaacggaguuucagcc

SEQ ID NO: 223926 - RNA, 19 nt, Artificial Sequence
  Description of Artificial Sequence: Synthetic oligonucleotide
  Sense strand starting at position 1658 of SEQ ID NO: 2884
cuuccagucccgggaaagu

SEQ ID NO: 223927 - RNA, 19 nt, Artificial Sequence
  Description of Artificial Sequence: Synthetic oligonucleotide
  Antisense strand to SEQ ID NO: 223926
acuuucccgggacuggaag

SEQ ID NO: 223928 - RNA, 19 nt, Artificial Sequence
  Description of Artificial Sequence: Synthetic oligonucleotide
  Sense strand starting at position 1668 of SEQ ID NO: 2884
cgggaaagucgucagguca

SEQ ID NO: 223929 - RNA, 19 nt, Artificial Sequence
  Description of Artificial Sequence: Synthetic oligonucleotide
  Antisense strand to SEQ ID NO: 223928
ugaccugacgacuuucccg

SEQ ID NO: 223930 - RNA, 19 nt, Artificial Sequence
  Description of Artificial Sequence: Synthetic oligonucleotide
  Sense strand starting at position 1773 of SEQ ID NO: 2884
ccggucugggaucgaaauu

SEQ ID NO: 223931 - RNA, 19 nt, Artificial Sequence
  Description of Artificial Sequence: Synthetic oligonucleotide
  Antisense strand to SEQ ID NO: 223930
aauuucgaucccagaccgg

SEQ ID NO: 223932 - RNA, 19 nt, Artificial Sequence
  Description of Artificial Sequence: Synthetic oligonucleotide
  Sense strand starting at position 2859 of SEQ ID NO: 2884
gagcuuuagcuuuaugaua

SEQ ID NO: 223933 - RNA, 19 nt, Artificial Sequence
  Description of Artificial Sequence: Synthetic oligonucleotide
  Antisense strand to SEQ ID NO: 223932
uaucauaaagcuaaagcuc

SEQ ID NO: 223934 - RNA, 19 nt, Artificial Sequence
  Description of Artificial Sequence: Synthetic oligonucleotide
  Sense strand starting at position 2876 of SEQ ID NO: 2884
uaaagauuggccuguuacc

SEQ ID NO: 223935 - RNA, 19 nt, Artificial Sequence
  Description of Artificial Sequence: Synthetic oligonucleotide
  Antisense strand to SEQ ID NO: 223934
gguaacaggccaaucuuua

SEQ ID NO: 223936 - RNA, 19 nt, Artificial Sequence
  Description of Artificial Sequence: Synthetic oligonucleotide
  Sense strand starting at position 2883 of SEQ ID NO: 2884
uggccuguuaccucguuua

SEQ ID NO: 223937 - RNA, 19 nt, Artificial Sequence
  Description of Artificial Sequence: Synthetic oligonucleotide
  Antisense strand to SEQ ID NO: 223936
uaaacgagguaacaggcca

SEQ ID NO: 223938 - RNA, 19 nt, Artificial Sequence
  Description of Artificial Sequence: Synthetic oligonucleotide
  Sense strand starting at position 2888 of SEQ ID NO: 2884
uguuaccucguuuaaucuu

SEQ ID NO: 223939 - RNA, 19 nt, Artificial Sequence
  Description of Artificial Sequence: Synthetic oligonucleotide
  Antisense strand to SEQ ID NO: 223938
aagauuaaacgagguaaca

SEQ ID NO: 223940 - RNA, 19 nt, Artificial Sequence
  Description of Artificial Sequence: Synthetic oligonucleotide
  Sense strand starting at position 2943 of SEQ ID NO: 2884
ccaguuuaugcaugaacag

SEQ ID NO: 223941 - RNA, 19 nt, Artificial Sequence
  Description of Artificial Sequence: Synthetic oligonucleotide
  Antisense strand to SEQ ID NO: 223940
cuguucaugcauaaacugg

SEQ ID NO: 223942 - RNA, 19 nt, Artificial Sequence
  Description of Artificial Sequence: Synthetic oligonucleotide
  Sense strand starting at position 2944 of SEQ ID NO: 2884
caguuuaugcaugaacaga

SEQ ID NO: 223943 - RNA, 19 nt, Artificial Sequence
  Description of Artificial Sequence: Synthetic oligonucleotide
  Antisense strand to SEQ ID NO: 223942
ucuguucaugcauaaacug

SEQ ID NO: 223944 - RNA, 19 nt, Artificial Sequence
  Description of Artificial Sequence: Synthetic oligonucleotide
  Sense strand starting at position 2983 of SEQ ID NO: 2884
uagugauccgucgagguaa

SEQ ID NO: 223945 - RNA, 19 nt, Artificial Sequence
  Description of Artificial Sequence: Synthetic oligonucleotide
  Antisense strand to SEQ ID NO: 223944
uuaccucgacggaucacua

SEQ ID NO: 223946 - RNA, 19 nt, Artificial Sequence
  Description of Artificial Sequence: Synthetic oligonucleotide
  Sense strand starting at position 3017 of SEQ ID NO: 2884
ggguuugaacuccaucagu

SEQ ID NO: 223947 - RNA, 19 nt, Artificial Sequence
  Description of Artificial Sequence: Synthetic oligonucleotide
  Antisense strand to SEQ ID NO: 223946
acugauggaguucaaaccc

SEQ ID NO: 223948 - RNA, 19 nt, Artificial Sequence
  Description of Artificial Sequence: Synthetic oligonucleotide
  Sense strand starting at position 3022 of SEQ ID NO: 2884
ugaacuccaucaguuugau

SEQ ID NO: 223949 - RNA, 19 nt, Artificial Sequence
  Description of Artificial Sequence: Synthetic oligonucleotide
  Antisense strand to SEQ ID NO: 223948
aucaaacugauggaguuca

SEQ ID NO: 223950 - RNA, 19 nt, Artificial Sequence
  Description of Artificial Sequence: Synthetic oligonucleotide
  Sense strand starting at position 3028 of SEQ ID NO: 2884
ccaucaguuugauugcaga

SEQ ID NO: 223951 - RNA, 19 nt, Artificial Sequence
  Description of Artificial Sequence: Synthetic oligonucleotide
  Antisense strand to SEQ ID NO: 223950
ucugcaaucaaacugaugg

SEQ ID NO: 223952 - RNA, 19 nt, Artificial Sequence
  Description of Artificial Sequence: Synthetic oligonucleotide
  Sense strand starting at position 3094 of SEQ ID NO: 2884
uuucuaugcgcuuugguaa

SEQ ID NO: 223953 - RNA, 19 nt, Artificial Sequence
  Description of Artificial Sequence: Synthetic oligonucleotide
  Antisense strand to SEQ ID NO: 223952
uuaccaaagcgcauagaaa

SEQ ID NO: 223954 - RNA, 19 nt, Artificial Sequence
  Description of Artificial Sequence: Synthetic oligonucleotide
  Sense strand starting at position 3148 of SEQ ID NO: 2884
gaaguugacuugcccaaga

SEQ ID NO: 223955 - RNA, 19 nt, Artificial Sequence
  Description of Artificial Sequence: Synthetic oligonucleotide
  Antisense strand to SEQ ID NO: 223954
ucuugggcaagucaacuuc

SEQ ID NO: 223956 - RNA, 19 nt, Artificial Sequence
  Description of Artificial Sequence: Synthetic oligonucleotide
  Sense strand starting at position 3192 of SEQ ID NO: 2884
ggauuugacucugauaucu

SEQ ID NO: 223957 - RNA, 19 nt, Artificial Sequence
  Description of Artificial Sequence: Synthetic oligonucleotide
  Antisense strand to SEQ ID NO: 223956
agauaucagagucaaaucc

SEQ ID NO: 223958 - RNA, 19 nt, Artificial Sequence
  Description of Artificial Sequence: Synthetic oligonucleotide
  Sense strand starting at position 3194 of SEQ ID NO: 2884
auuugacucugauaucugu

SEQ ID NO: 223959 - RNA, 19 nt, Artificial Sequence
  Description of Artificial Sequence: Synthetic oligonucleotide
  Antisense strand to SEQ ID NO: 223958
acagauaucagagucaaau

SEQ ID NO: 223960 - RNA, 19 nt, Artificial Sequence
  Description of Artificial Sequence: Synthetic oligonucleotide
  Sense strand starting at position 3268 of SEQ ID NO: 2884
ccaguauucccaugucagg

SEQ ID NO: 223961 - RNA, 19 nt, Artificial Sequence
  Description of Artificial Sequence: Synthetic oligonucleotide
  Antisense strand to SEQ ID NO: 223960
ccugacaugggaauacugg

SEQ ID NO: 223962 - RNA, 19 nt, Artificial Sequence
  Description of Artificial Sequence: Synthetic oligonucleotide
  Sense strand starting at position 3274 of SEQ ID NO: 2884
uucccaugucaggaguagu

SEQ ID NO: 223963 - RNA, 19 nt, Artificial Sequence
  Description of Artificial Sequence: Synthetic oligonucleotide
  Antisense strand to SEQ ID NO: 223962
acuacuccugacaugggaa

SEQ ID NO: 223964 - RNA, 19 nt, Artificial Sequence
  Description of Artificial Sequence: Synthetic oligonucleotide
  Sense strand starting at position 3579 of SEQ ID NO: 2884
cccuaaccguuuguugaaa

SEQ ID NO: 223965 - RNA, 19 nt, Artificial Sequence
  Description of Artificial Sequence: Synthetic oligonucleotide
  Antisense strand to SEQ ID NO: 223964
uuucaacaaacgguuaggg

SEQ ID NO: 223966 - RNA, 19 nt, Artificial Sequence
  Description of Artificial Sequence: Synthetic oligonucleotide
  Sense strand starting at position 3580 of SEQ ID NO: 2884
ccuaaccguuuguugaaau

SEQ ID NO: 223967 - RNA, 19 nt, Artificial Sequence
  Description of Artificial Sequence: Synthetic oligonucleotide
  Antisense strand to SEQ ID NO: 223966
auuucaacaaacgguuagg

SEQ ID NO: 223968 - RNA, 19 nt, Artificial Sequence
  Description of Artificial Sequence: Synthetic oligonucleotide
  Sense strand starting at position 3948 of SEQ ID NO: 2884
agagcauucuuguccucua

SEQ ID NO: 223969 - RNA, 19 nt, Artificial Sequence
  Description of Artificial Sequence: Synthetic oligonucleotide
  Antisense strand to SEQ ID NO: 223968
uagaggacaagaaugcucu

SEQ ID NO: 223970 - RNA, 19 nt, Artificial Sequence
  Description of Artificial Sequence: Synthetic oligonucleotide
  Sense strand starting at position 64 of SEQ ID NO: 2885
aauaacucucagggugaca

SEQ ID NO: 223971 - RNA, 19 nt, Artificial Sequence
  Description of Artificial Sequence: Synthetic oligonucleotide
  Antisense strand to SEQ ID NO: 223970
ugucacccugagaguuauu

SEQ ID NO: 223972 - RNA, 19 nt, Artificial Sequence
  Description of Artificial Sequence: Synthetic oligonucleotide
  Sense strand starting at position 66 of SEQ ID NO: 2885
uaacucucagggugacaua

SEQ ID NO: 223973 - RNA, 19 nt, Artificial Sequence
  Description of Artificial Sequence: Synthetic oligonucleotide
  Antisense strand to SEQ ID NO: 223972
uaugucacccugagaguua

SEQ ID NO: 223974 - RNA, 19 nt, Artificial Sequence
  Description of Artificial Sequence: Synthetic oligonucleotide
  Sense strand starting at position 508 of SEQ ID NO: 2885
ucaaguuaccgucaacuaa

SEQ ID NO: 223975 - RNA, 19 nt, Artificial Sequence
  Description of Artificial Sequence: Synthetic oligonucleotide
  Antisense strand to SEQ ID NO: 223974
uuaguugacgguaacuuga

SEQ ID NO: 223976 - RNA, 19 nt, Artificial Sequence
  Description of Artificial Sequence: Synthetic oligonucleotide
  Sense strand starting at position 712 of SEQ ID NO: 2885
ucauaugggugaucaguga

SEQ ID NO: 223977 - RNA, 19 nt, Artificial Sequence
  Description of Artificial Sequence: Synthetic oligonucleotide
  Antisense strand to SEQ ID NO: 223976
ucacugaucacccauauga

SEQ ID NO: 223978 - RNA, 19 nt, Artificial Sequence
  Description of Artificial Sequence: Synthetic oligonucleotide
  Sense strand starting at position 764 of SEQ ID NO: 2885
gauguucuuggucaucaca

SEQ ID NO: 223979 - RNA, 19 nt, Artificial Sequence
  Description of Artificial Sequence: Synthetic oligonucleotide
  Antisense strand to SEQ ID NO: 223978
ugugaugaccaagaacauc

SEQ ID NO: 223980 - RNA, 19 nt, Artificial Sequence
  Description of Artificial Sequence: Synthetic oligonucleotide
  Sense strand starting at position 767 of SEQ ID NO: 2885
guucuuggucaucacaacu

SEQ ID NO: 223981 - RNA, 19 nt, Artificial Sequence
  Description of Artificial Sequence: Synthetic oligonucleotide
  Antisense strand to SEQ ID NO: 223980
aguugugaugaccaagaac

SEQ ID NO: 223982 - RNA, 19 nt, Artificial Sequence
  Description of Artificial Sequence: Synthetic oligonucleotide
  Sense strand starting at position 801 of SEQ ID NO: 2885
cuggcauuaaauggauaga

SEQ ID NO: 223983 - RNA, 19 nt, Artificial Sequence
  Description of Artificial Sequence: Synthetic oligonucleotide
  Antisense strand to SEQ ID NO: 223982
ucuauccauuuaaugccag

SEQ ID NO: 223984 - RNA, 19 nt, Artificial Sequence
  Description of Artificial Sequence: Synthetic oligonucleotide
  Sense strand starting at position 911 of SEQ ID NO: 2885
gagaaacccugcuccgaaa

SEQ ID NO: 223985 - RNA, 19 nt, Artificial Sequence
  Description of Artificial Sequence: Synthetic oligonucleotide
  Antisense strand to SEQ ID NO: 223984
uuucggagcaggguuucuc

SEQ ID NO: 223986 - RNA, 19 nt, Artificial Sequence
  Description of Artificial Sequence: Synthetic oligonucleotide
  Sense strand starting at position 943 of SEQ ID NO: 2885
ccagauccaccaugugaaa

SEQ ID NO: 223987 - RNA, 19 nt, Artificial Sequence
  Description of Artificial Sequence: Synthetic oligonucleotide
  Antisense strand to SEQ ID NO: 223986
uuucacaugguggaucugg

SEQ ID NO: 223988 - RNA, 19 nt, Artificial Sequence
  Description of Artificial Sequence: Synthetic oligonucleotide
  Sense strand starting at position 978 of SEQ ID NO: 2885
auaagcuacccaggaauau

SEQ ID NO: 223989 - RNA, 19 nt, Artificial Sequence
  Description of Artificial Sequence: Synthetic oligonucleotide
  Antisense strand to SEQ ID NO: 223988
auauuccuggguagcuuau

SEQ ID NO: 223990 - RNA, 19 nt, Artificial Sequence
  Description of Artificial Sequence: Synthetic oligonucleotide
  Sense strand starting at position 1037 of SEQ ID NO: 2885
acaugaaagucacugaagu

SEQ ID NO: 223991 - RNA, 19 nt, Artificial Sequence
  Description of Artificial Sequence: Synthetic oligonucleotide
  Antisense strand to SEQ ID NO: 223990
acuucagugacuuucaugu

SEQ ID NO: 223992 - RNA, 19 nt, Artificial Sequence
  Description of Artificial Sequence: Synthetic oligonucleotide
  Sense strand starting at position 1048 of SEQ ID NO: 2885
acugaagugcucuaacaau

SEQ ID NO: 223993 - RNA, 19 nt, Artificial Sequence
  Description of Artificial Sequence: Synthetic oligonucleotide
  Antisense strand to SEQ ID NO: 223992
auuguuagagcacuucagu

SEQ ID NO: 223994 - RNA, 19 nt, Artificial Sequence
  Description of Artificial Sequence: Synthetic oligonucleotide
  Sense strand starting at position 1083 of SEQ ID NO: 2885
cugucaguaguuuauagaa

SEQ ID NO: 223995 - RNA, 19 nt, Artificial Sequence
  Description of Artificial Sequence: Synthetic oligonucleotide
  Antisense strand to SEQ ID NO: 223994
uucuauaaacuacugacag

SEQ ID NO: 223996 - RNA, 19 nt, Artificial Sequence
  Description of Artificial Sequence: Synthetic oligonucleotide
  Sense strand starting at position 1103 of SEQ ID NO: 2885
uguaaaguucuauacauuc

SEQ ID NO: 223997 - RNA, 19 nt, Artificial Sequence
  Description of Artificial Sequence: Synthetic oligonucleotide
  Antisense strand to SEQ ID NO: 223996
gaauguauagaacuuuaca

SEQ ID NO: 223998 - RNA, 19 nt, Artificial Sequence
  Description of Artificial Sequence: Synthetic oligonucleotide
  Sense strand starting at position 1137 of SEQ ID NO: 2885
uguaaaguucuguaauaag

SEQ ID NO: 223999 - RNA, 19 nt, Artificial Sequence
  Description of Artificial Sequence: Synthetic oligonucleotide
  Antisense strand to SEQ ID NO: 223998
cuuauuacagaacuuuaca

SEQ ID NO: 224000 - RNA, 19 nt, Artificial Sequence
  Description of Artificial Sequence: Synthetic oligonucleotide
  Sense strand starting at position 1280 of SEQ ID NO: 2885
uggcucuauuaaucaaaug

SEQ ID NO: 224001 - RNA, 19 nt, Artificial Sequence
  Description of Artificial Sequence: Synthetic oligonucleotide
  Antisense strand to SEQ ID NO: 224000
cauuugauuaauagagcca

SEQ ID NO: 224002 - RNA, 19 nt, Artificial Sequence
  Description of Artificial Sequence: Synthetic oligonucleotide
  Sense strand starting at position 1356 of SEQ ID NO: 2885
uaauuaguggcauaugaua

SEQ ID NO: 224003 - RNA, 19 nt, Artificial Sequence
  Description of Artificial Sequence: Synthetic oligonucleotide
  Antisense strand to SEQ ID NO: 224002
uaucauaugccacuaauua

SEQ ID NO: 224004 - RNA, 19 nt, Artificial Sequence
  Description of Artificial Sequence: Synthetic oligonucleotide
  Sense strand starting at position 1695 of SEQ ID NO: 2885
cuagaauaccacuguagag

SEQ ID NO: 224005 - RNA, 19 nt, Artificial Sequence
  Description of Artificial Sequence: Synthetic oligonucleotide
  Antisense strand to SEQ ID NO: 224004
cucuacagugguauucuag

SEQ ID NO: 224006 - RNA, 19 nt, Artificial Sequence
  Description of Artificial Sequence: Synthetic oligonucleotide
  Sense strand starting at position 1782 of SEQ ID NO: 2885
agaacuaaaucuguggauu

SEQ ID NO: 224007 - RNA, 19 nt, Artificial Sequence
  Description of Artificial Sequence: Synthetic oligonucleotide
  Antisense strand to SEQ ID NO: 224006
aauccacagauuuaguucu

SEQ ID NO: 224008 - RNA, 19 nt, Artificial Sequence
  Description of Artificial Sequence: Synthetic oligonucleotide
  Sense strand starting at position 1992 of SEQ ID NO: 2885
aagggaaaugcucaugcua

SEQ ID NO: 224009 - RNA, 19 nt, Artificial Sequence
  Description of Artificial Sequence: Synthetic oligonucleotide
  Antisense strand to SEQ ID NO: 224008
uagcaugagcauuucccuu

SEQ ID NO: 224010 - RNA, 19 nt, Artificial Sequence
  Description of Artificial Sequence: Synthetic oligonucleotide
  Sense strand starting at position 1999 of SEQ ID NO: 2885
augcucaugcuacaugaau

SEQ ID NO: 224011 - RNA, 19 nt, Artificial Sequence
  Description of Artificial Sequence: Synthetic oligonucleotide
  Antisense strand to SEQ ID NO: 224010
auucauguagcaugagcau

SEQ ID NO: 224012 - RNA, 19 nt, Artificial Sequence
  Description of Artificial Sequence: Synthetic oligonucleotide
  Sense strand starting at position 2057 of SEQ ID NO: 2885
acuuccugugaguaacuaa

SEQ ID NO: 224013 - RNA, 19 nt, Artificial Sequence
  Description of Artificial Sequence: Synthetic oligonucleotide
  Antisense strand to SEQ ID NO: 224012
uuaguuacucacaggaagu

SEQ ID NO: 224014 - RNA, 19 nt, Artificial Sequence
  Description of Artificial Sequence: Synthetic oligonucleotide
  Sense strand starting at position 2144 of SEQ ID NO: 2885
aaugacuuuggacguuuaa

SEQ ID NO: 224015 - RNA, 19 nt, Artificial Sequence
  Description of Artificial Sequence: Synthetic oligonucleotide
  Antisense strand to SEQ ID NO: 224014
uuaaacguccaaagucauu

SEQ ID NO: 224016 - RNA, 19 nt, Artificial Sequence
  Description of Artificial Sequence: Synthetic oligonucleotide
  Sense strand starting at position 2153 of SEQ ID NO: 2885
ggacguuuaagagaauugu

SEQ ID NO: 224017 - RNA, 19 nt, Artificial Sequence
  Description of Artificial Sequence: Synthetic oligonucleotide
  Antisense strand to SEQ ID NO: 224016
acaauucucuuaaacgucc

SEQ ID NO: 224018 - RNA, 19 nt, Artificial Sequence
  Description of Artificial Sequence: Synthetic oligonucleotide
  Sense strand starting at position 2285 of SEQ ID NO: 2885
uuauaauucugguuagacu

SEQ ID NO: 224019 - RNA, 19 nt, Artificial Sequence
  Description of Artificial Sequence: Synthetic oligonucleotide
  Antisense strand to SEQ ID NO: 224018
agucuaaccagaauuauaa

SEQ ID NO: 224020 - RNA, 19 nt, Artificial Sequence
  Description of Artificial Sequence: Synthetic oligonucleotide
  Sense strand starting at position 2318 of SEQ ID NO: 2885
uaauaauauggcugagguc

SEQ ID NO: 224021 - RNA, 19 nt, Artificial Sequence
  Description of Artificial Sequence: Synthetic oligonucleotide
  Antisense strand to SEQ ID NO: 224020
gaccucagccauauuauua

SEQ ID NO: 224022 - RNA, 19 nt, Artificial Sequence
  Description of Artificial Sequence: Synthetic oligonucleotide
  Sense strand starting at position 2325 of SEQ ID NO: 2885
auggcugaggucugagaau

SEQ ID NO: 224023 - RNA, 19 nt, Artificial Sequence
  Description of Artificial Sequence: Synthetic oligonucleotide
  Antisense strand to SEQ ID NO: 224022
auucucagaccucagccau

SEQ ID NO: 224024 - RNA, 19 nt, Artificial Sequence
  Description of Artificial Sequence: Synthetic oligonucleotide
  Sense strand starting at position 2338 of SEQ ID NO: 2885
gagaauuguguuuaaagca

SEQ ID NO: 224025 - RNA, 19 nt, Artificial Sequence
  Description of Artificial Sequence: Synthetic oligonucleotide
  Antisense strand to SEQ ID NO: 224024
ugcuuuaaacacaauucuc

SEQ ID NO: 224026 - RNA, 19 nt, Artificial Sequence
  Description of Artificial Sequence: Synthetic oligonucleotide
  Sense strand starting at position 2364 of SEQ ID NO: 2885
uuguuaaguguagacuaaa

SEQ ID NO: 224027 - RNA, 19 nt, Artificial Sequence
  Description of Artificial Sequence: Synthetic oligonucleotide
  Antisense strand to SEQ ID NO: 224026
uuuagucuacacuuaacaa

SEQ ID NO: 224028 - RNA, 19 nt, Artificial Sequence
  Description of Artificial Sequence: Synthetic oligonucleotide
  Sense strand starting at position 2408 of SEQ ID NO: 2885
caaagugauuguuuagaga

SEQ ID NO: 224029 - RNA, 19 nt, Artificial Sequence
  Description of Artificial Sequence: Synthetic oligonucleotide
  Antisense strand to SEQ ID NO: 224028
ucucuaaacaaucacuuug

SEQ ID NO: 224030 - RNA, 19 nt, Artificial Sequence
  Description of Artificial Sequence: Synthetic oligonucleotide
  Sense strand starting at position 2451 of SEQ ID NO: 2885
uuguauauuggcuaucuaa

SEQ ID NO: 224031 - RNA, 19 nt, Artificial Sequence
  Description of Artificial Sequence: Synthetic oligonucleotide
  Antisense strand to SEQ ID NO: 224030
uuagauagccaauauacaa

SEQ ID NO: 224032 - RNA, 19 nt, Artificial Sequence
  Description of Artificial Sequence: Synthetic oligonucleotide
  Sense strand starting at position 2789 of SEQ ID NO: 2885
uggguccucagugauuaga

SEQ ID NO: 224033 - RNA, 19 nt, Artificial Sequence
  Description of Artificial Sequence: Synthetic oligonucleotide
  Antisense strand to SEQ ID NO: 224032
ucuaaucacugaggaccca

SEQ ID NO: 224034 - RNA, 19 nt, Artificial Sequence
  Description of Artificial Sequence: Synthetic oligonucleotide
  Sense strand starting at position 2791 of SEQ ID NO: 2885
gguccucagugauuagaac

SEQ ID NO: 224035 - RNA, 19 nt, Artificial Sequence
  Description of Artificial Sequence: Synthetic oligonucleotide
  Antisense strand to SEQ ID NO: 224034
guucuaaucacugaggacc

SEQ ID NO: 224036 - RNA, 19 nt, Artificial Sequence
  Description of Artificial Sequence: Synthetic oligonucleotide
  Sense strand starting at position 2792 of SEQ ID NO: 2885
guccucagugauuagaaca

SEQ ID NO: 224037 - RNA, 19 nt, Artificial Sequence
  Description of Artificial Sequence: Synthetic oligonucleotide
  Antisense strand to SEQ ID NO: 224036
uguucuaaucacugaggac

SEQ ID NO: 224038 - RNA, 19 nt, Artificial Sequence
  Description of Artificial Sequence: Synthetic oligonucleotide
  Sense strand starting at position 3293 of SEQ ID NO: 2885
ggcuuaguuaggcaaacua

SEQ ID NO: 224039 - RNA, 19 nt, Artificial Sequence
  Description of Artificial Sequence: Synthetic oligonucleotide
  Antisense strand to SEQ ID NO: 224038
uaguuugccuaacuaagcc

SEQ ID NO: 224040 - RNA, 19 nt, Artificial Sequence
  Description of Artificial Sequence: Synthetic oligonucleotide
  Sense strand starting at position 3310 of SEQ ID NO: 2885
uaaggauuccacugagcag

SEQ ID NO: 224041 - RNA, 19 nt, Artificial Sequence
  Description of Artificial Sequence: Synthetic oligonucleotide
  Antisense strand to SEQ ID NO: 224040
cugcucaguggaauccuua

SEQ ID NO: 224042 - RNA, 19 nt, Artificial Sequence
  Description of Artificial Sequence: Synthetic oligonucleotide
  Sense strand starting at position 3322 of SEQ ID NO: 2885
ugagcagaaguccauugau

SEQ ID NO: 224043 - RNA, 19 nt, Artificial Sequence
  Description of Artificial Sequence: Synthetic oligonucleotide
  Antisense strand to SEQ ID NO: 224042
aucaauggacuucugcuca

SEQ ID NO: 224044 - RNA, 19 nt, Artificial Sequence
  Description of Artificial Sequence: Synthetic oligonucleotide
  Sense strand starting at position 3425 of SEQ ID NO: 2885
gacagaugaacagguaugu

SEQ ID NO: 224045 - RNA, 19 nt, Artificial Sequence
  Description of Artificial Sequence: Synthetic oligonucleotide
  Antisense strand to SEQ ID NO: 224044
acauaccuguucaucuguc

SEQ ID NO: 224046 - RNA, 19 nt, Artificial Sequence
  Description of Artificial Sequence: Synthetic oligonucleotide
  Sense strand starting at position 3429 of SEQ ID NO: 2885
gaugaacagguauguuaua

SEQ ID NO: 224047 - RNA, 19 nt, Artificial Sequence
  Description of Artificial Sequence: Synthetic oligonucleotide
  Antisense strand to SEQ ID NO: 224046
uauaacauaccuguucauc

SEQ ID NO: 224048 - RNA, 19 nt, Artificial Sequence
  Description of Artificial Sequence: Synthetic oligonucleotide
  Sense strand starting at position 3907 of SEQ ID NO: 2885
gcaauaugagaaugacuca

SEQ ID NO: 224049 - RNA, 19 nt, Artificial Sequence
  Description of Artificial Sequence: Synthetic oligonucleotide
  Antisense strand to SEQ ID NO: 224048
ugagucauucucauauugc

SEQ ID NO: 224050 - RNA, 19 nt, Artificial Sequence
  Description of Artificial Sequence: Synthetic oligonucleotide
  Sense strand starting at position 48 of SEQ ID NO: 2886
gaacgcuguguguuuccau

SEQ ID NO: 224051 - RNA, 19 nt, Artificial Sequence
  Description of Artificial Sequence: Synthetic oligonucleotide
  Antisense strand to SEQ ID NO: 224050
auggaaacacacagcguuc

SEQ ID NO: 224052 - RNA, 19 nt, Artificial Sequence
  Description of Artificial Sequence: Synthetic oligonucleotide
  Sense strand starting at position 62 of SEQ ID NO: 2886
uccaucagauccucaguga

SEQ ID NO: 224053 - RNA, 19 nt, Artificial Sequence
  Description of Artificial Sequence: Synthetic oligonucleotide
  Antisense strand to SEQ ID NO: 224052
ucacugaggaucugaugga

SEQ ID NO: 224054 - RNA, 19 nt, Artificial Sequence
  Description of Artificial Sequence: Synthetic oligonucleotide
  Sense strand starting at position 65 of SEQ ID NO: 2886
aucagauccucagugagau

SEQ ID NO: 224055 - RNA, 19 nt, Artificial Sequence
  Description of Artificial Sequence: Synthetic oligonucleotide
  Antisense strand to SEQ ID NO: 224054
aucucacugaggaucugau

SEQ ID NO: 224056 - RNA, 19 nt, Artificial Sequence
  Description of Artificial Sequence: Synthetic oligonucleotide
  Sense strand starting at position 66 of SEQ ID NO: 2886
ucagauccucagugagauu

SEQ ID NO: 224057 - RNA, 19 nt, Artificial Sequence
  Description of Artificial Sequence: Synthetic oligonucleotide
  Antisense strand to SEQ ID NO: 224056
aaucucacugaggaucuga

SEQ ID NO: 224058 - RNA, 19 nt, Artificial Sequence
  Description of Artificial Sequence: Synthetic oligonucleotide
  Sense strand starting at position 186 of SEQ ID NO: 2886
ucuacuacuguguggagau

SEQ ID NO: 224059 - RNA, 19 nt, Artificial Sequence
  Description of Artificial Sequence: Synthetic oligonucleotide
  Antisense strand to SEQ ID NO: 224058
aucuccacacaguaguaga

SEQ ID NO: 224060 - RNA, 19 nt, Artificial Sequence
  Description of Artificial Sequence: Synthetic oligonucleotide
  Sense strand starting at position 515 of SEQ ID NO: 2886
ucuggcuuuagagaauagu

SEQ ID NO: 224061 - RNA, 19 nt, Artificial Sequence
  Description of Artificial Sequence: Synthetic oligonucleotide
  Antisense strand to SEQ ID NO: 224060
acuauucucuaaagccaga

SEQ ID NO: 224062 - RNA, 19 nt, Artificial Sequence
  Description of Artificial Sequence: Synthetic oligonucleotide
  Sense strand starting at position 761 of SEQ ID NO: 2886
ccguuuccacuagaguuga

SEQ ID NO: 224063 - RNA, 19 nt, Artificial Sequence
  Description of Artificial Sequence: Synthetic oligonucleotide
  Antisense strand to SEQ ID NO: 224062
ucaacucuaguggaaacgg

SEQ ID NO: 224064 - RNA, 19 nt, Artificial Sequence
  Description of Artificial Sequence: Synthetic oligonucleotide
  Sense strand starting at position 775 of SEQ ID NO: 2886
guugauuugucucuugcca

SEQ ID NO: 224065 - RNA, 19 nt, Artificial Sequence
  Description of Artificial Sequence: Synthetic oligonucleotide
  Antisense strand to SEQ ID NO: 224064
uggcaagagacaaaucaac

SEQ ID NO: 224066 - RNA, 19 nt, Artificial Sequence
  Description of Artificial Sequence: Synthetic oligonucleotide
  Sense strand starting at position 827 of SEQ ID NO: 2886
aggaacaucuggguuggua

SEQ ID NO: 224067 - RNA, 19 nt, Artificial Sequence
  Description of Artificial Sequence: Synthetic oligonucleotide
  Antisense strand to SEQ ID NO: 224066
uaccaacccagauguuccu

SEQ ID NO: 224068 - RNA, 19 nt, Artificial Sequence
  Description of Artificial Sequence: Synthetic oligonucleotide
  Sense strand starting at position 886 of SEQ ID NO: 2886
ggacuucccgcggaaauca

SEQ ID NO: 224069 - RNA, 19 nt, Artificial Sequence
  Description of Artificial Sequence: Synthetic oligonucleotide
  Antisense strand to SEQ ID NO: 224068
ugauuuccgcgggaagucc

SEQ ID NO: 224070 - RNA, 19 nt, Artificial Sequence
  Description of Artificial Sequence: Synthetic oligonucleotide
  Sense strand starting at position 895 of SEQ ID NO: 2886
gcggaaaucacccagcacu

SEQ ID NO: 224071 - RNA, 19 nt, Artificial Sequence
  Description of Artificial Sequence: Synthetic oligonucleotide
  Antisense strand to SEQ ID NO: 224070
agugcugggugauuuccgc

SEQ ID NO: 224072 - RNA, 19 nt, Artificial Sequence
  Description of Artificial Sequence: Synthetic oligonucleotide
  Sense strand starting at position 1043 of SEQ ID NO: 2886
cagcccuuucuggaggagu

SEQ ID NO: 224073 - RNA, 19 nt, Artificial Sequence
  Description of Artificial Sequence: Synthetic oligonucleotide
  Antisense strand to SEQ ID NO: 224072
acuccuccagaaagggcug

SEQ ID NO: 224074 - RNA, 19 nt, Artificial Sequence
  Description of Artificial Sequence: Synthetic oligonucleotide
  Sense strand starting at position 1046 of SEQ ID NO: 2886
cccuuucuggaggaguauu

SEQ ID NO: 224075 - RNA, 19 nt, Artificial Sequence
  Description of Artificial Sequence: Synthetic oligonucleotide
  Antisense strand to SEQ ID NO: 224074
aauacuccuccagaaaggg

SEQ ID NO: 224076 - RNA, 19 nt, Artificial Sequence
  Description of Artificial Sequence: Synthetic oligonucleotide
  Sense strand starting at position 1110 of SEQ ID NO: 2886
guacaucuauuucugcgau

SEQ ID NO: 224077 - RNA, 19 nt, Artificial Sequence
  Description of Artificial Sequence: Synthetic oligonucleotide
  Antisense strand to SEQ ID NO: 224076
aucgcagaaauagauguac

SEQ ID NO: 224078 - RNA, 19 nt, Artificial Sequence
  Description of Artificial Sequence: Synthetic oligonucleotide
  Sense strand starting at position 1113 of SEQ ID NO: 2886
caucuauuucugcgauagu

SEQ ID NO: 224079 - RNA, 19 nt, Artificial Sequence
  Description of Artificial Sequence: Synthetic oligonucleotide
  Antisense strand to SEQ ID NO: 224078
acuaucgcagaaauagaug

SEQ ID NO: 224080 - RNA, 19 nt, Artificial Sequence
  Description of Artificial Sequence: Synthetic oligonucleotide
  Sense strand starting at position 1961 of SEQ ID NO: 2886
cucgaagacuuuccaaacu

SEQ ID NO: 224081 - RNA, 19 nt, Artificial Sequence
  Description of Artificial Sequence: Synthetic oligonucleotide
  Antisense strand to SEQ ID NO: 224080
aguuuggaaagucuucgag

SEQ ID NO: 224082 - RNA, 19 nt, Artificial Sequence
  Description of Artificial Sequence: Synthetic oligonucleotide
  Sense strand starting at position 2268 of SEQ ID NO: 2886
gcauuugccguuuagacuu

SEQ ID NO: 224083 - RNA, 19 nt, Artificial Sequence
  Description of Artificial Sequence: Synthetic oligonucleotide
  Antisense strand to SEQ ID NO: 224082
aagucuaaacggcaaaugc

SEQ ID NO: 224084 - RNA, 19 nt, Artificial Sequence
  Description of Artificial Sequence: Synthetic oligonucleotide
  Sense strand starting at position 2353 of SEQ ID NO: 2886
gucagaggcuuauuaaaga

SEQ ID NO: 224085 - RNA, 19 nt, Artificial Sequence
  Description of Artificial Sequence: Synthetic oligonucleotide
  Antisense strand to SEQ ID NO: 224084
ucuuuaauaagccucugac

SEQ ID NO: 224086 - RNA, 19 nt, Artificial Sequence
  Description of Artificial Sequence: Synthetic oligonucleotide
  Sense strand starting at position 2440 of SEQ ID NO: 2886
uguucagggccuuggaaua

SEQ ID NO: 224087 - RNA, 19 nt, Artificial Sequence
  Description of Artificial Sequence: Synthetic oligonucleotide
  Antisense strand to SEQ ID NO: 224086
uauuccaaggcccugaaca

SEQ ID NO: 224088 - RNA, 19 nt, Artificial Sequence
  Description of Artificial Sequence: Synthetic oligonucleotide
  Sense strand starting at position 2516 of SEQ ID NO: 2886
agcucacacuguucuggaa

SEQ ID NO: 224089 - RNA, 19 nt, Artificial Sequence
  Description of Artificial Sequence: Synthetic oligonucleotide
  Antisense strand to SEQ ID NO: 224088
uuccagaacagugugagcu

SEQ ID NO: 224090 - RNA, 19 nt, Artificial Sequence
  Description of Artificial Sequence: Synthetic oligonucleotide
  Sense strand starting at position 2664 of SEQ ID NO: 2886
gagacaguuuaagcuacua

SEQ ID NO: 224091 - RNA, 19 nt, Artificial Sequence
  Description of Artificial Sequence: Synthetic oligonucleotide
  Antisense strand to SEQ ID NO: 224090
uaguagcuuaaacugucuc

SEQ ID NO: 224092 - RNA, 19 nt, Artificial Sequence
  Description of Artificial Sequence: Synthetic oligonucleotide
  Sense strand starting at position 2721 of SEQ ID NO: 2886
aagagacuuuggguggcau

SEQ ID NO: 224093 - RNA, 19 nt, Artificial Sequence
  Description of Artificial Sequence: Synthetic oligonucleotide
  Antisense strand to SEQ ID NO: 224092
augccacccaaagucucuu

SEQ ID NO: 224094 - RNA, 19 nt, Artificial Sequence
  Description of Artificial Sequence: Synthetic oligonucleotide
  Sense strand starting at position 2722 of SEQ ID NO: 2886
agagacuuuggguggcauu

SEQ ID NO: 224095 - RNA, 19 nt, Artificial Sequence
  Description of Artificial Sequence: Synthetic oligonucleotide
  Antisense strand to SEQ ID NO: 224094
aaugccacccaaagucucu

SEQ ID NO: 224096 - RNA, 19 nt, Artificial Sequence
  Description of Artificial Sequence: Synthetic oligonucleotide
  Sense strand starting at position 2723 of SEQ ID NO: 2886
gagacuuuggguggcauua

SEQ ID NO: 224097 - RNA, 19 nt, Artificial Sequence
  Description of Artificial Sequence: Synthetic oligonucleotide
  Antisense strand to SEQ ID NO: 224096
uaaugccacccaaagucuc

SEQ ID NO: 224098 - RNA, 19 nt, Artificial Sequence
  Description of Artificial Sequence: Synthetic oligonucleotide
  Sense strand starting at position 2733 of SEQ ID NO: 2886
guggcauuaggaugaguag

SEQ ID NO: 224099 - RNA, 19 nt, Artificial Sequence
  Description of Artificial Sequence: Synthetic oligonucleotide
  Antisense strand to SEQ ID NO: 224098
cuacucauccuaaugccac

SEQ ID NO: 224100 - RNA, 19 nt, Artificial Sequence
  Description of Artificial Sequence: Synthetic oligonucleotide
  Sense strand starting at position 2855 of SEQ ID NO: 2886
gcacuuugccucuagauag

SEQ ID NO: 224101 - RNA, 19 nt, Artificial Sequence
  Description of Artificial Sequence: Synthetic oligonucleotide
  Antisense strand to SEQ ID NO: 224100
cuaucuagaggcaaagugc

SEQ ID NO: 224102 - RNA, 19 nt, Artificial Sequence
  Description of Artificial Sequence: Synthetic oligonucleotide
  Sense strand starting at position 2866 of SEQ ID NO: 2886
cuagauagguaucugauga

SEQ ID NO: 224103 - RNA, 19 nt, Artificial Sequence
  Description of Artificial Sequence: Synthetic oligonucleotide
  Antisense strand to SEQ ID NO: 224102
ucaucagauaccuaucuag

SEQ ID NO: 224104 - RNA, 19 nt, Artificial Sequence
  Description of Artificial Sequence: Synthetic oligonucleotide
  Sense strand starting at position 3067 of SEQ ID NO: 2886
uucuaaagccaaugauaga

SEQ ID NO: 224105 - RNA, 19 nt, Artificial Sequence
  Description of Artificial Sequence: Synthetic oligonucleotide
  Antisense strand to SEQ ID NO: 224104
ucuaucauuggcuuuagaa

SEQ ID NO: 224106 - RNA, 19 nt, Artificial Sequence
  Description of Artificial Sequence: Synthetic oligonucleotide
  Sense strand starting at position 3414 of SEQ ID NO: 2886
caugaagaucucuguagga

SEQ ID NO: 224107 - RNA, 19 nt, Artificial Sequence
  Description of Artificial Sequence: Synthetic oligonucleotide
  Antisense strand to SEQ ID NO: 224106
uccuacagagaucuucaug

SEQ ID NO: 224108 - RNA, 19 nt, Artificial Sequence
  Description of Artificial Sequence: Synthetic oligonucleotide
  Sense strand starting at position 3470 of SEQ ID NO: 2886
cagacuugaugucucugaa

SEQ ID NO: 224109 - RNA, 19 nt, Artificial Sequence
  Description of Artificial Sequence: Synthetic oligonucleotide
  Antisense strand to SEQ ID NO: 224108
uucagagacaucaagucug

SEQ ID NO: 224110 - RNA, 19 nt, Artificial Sequence
  Description of Artificial Sequence: Synthetic oligonucleotide
  Sense strand starting at position 3548 of SEQ ID NO: 2886
agagguaccuaaucuuugu

SEQ ID NO: 224111 - RNA, 19 nt, Artificial Sequence
  Description of Artificial Sequence: Synthetic oligonucleotide
  Antisense strand to SEQ ID NO: 224110
acaaagauuagguaccucu

SEQ ID NO: 224112 - RNA, 19 nt, Artificial Sequence
  Description of Artificial Sequence: Synthetic oligonucleotide
  Sense strand starting at position 3614 of SEQ ID NO: 2886
ucagcuuauggaugacuuu

SEQ ID NO: 224113 - RNA, 19 nt, Artificial Sequence
  Description of Artificial Sequence: Synthetic oligonucleotide
  Antisense strand to SEQ ID NO: 224112
aaagucauccauaagcuga

SEQ ID NO: 224114 - RNA, 19 nt, Artificial Sequence
  Description of Artificial Sequence: Synthetic oligonucleotide
  Sense strand starting at position 3615 of SEQ ID NO: 2886
cagcuuauggaugacuuua

SEQ ID NO: 224115 - RNA, 19 nt, Artificial Sequence
  Description of Artificial Sequence: Synthetic oligonucleotide
  Antisense strand to SEQ ID NO: 224114
uaaagucauccauaagcug

SEQ ID NO: 224116 - RNA, 19 nt, Artificial Sequence
  Description of Artificial Sequence: Synthetic oligonucleotide
  Sense strand starting at position 3617 of SEQ ID NO: 2886
gcuuauggaugacuuuaca

SEQ ID NO: 224117 - RNA, 19 nt, Artificial Sequence
  Description of Artificial Sequence: Synthetic oligonucleotide
  Antisense strand to SEQ ID NO: 224116
uguaaagucauccauaagc

SEQ ID NO: 224118 - RNA, 19 nt, Artificial Sequence
  Description of Artificial Sequence: Synthetic oligonucleotide
  Sense strand starting at position 3704 of SEQ ID NO: 2886
aagagaaaggugugcugaa

SEQ ID NO: 224119 - RNA, 19 nt, Artificial Sequence
  Description of Artificial Sequence: Synthetic oligonucleotide
  Antisense strand to SEQ ID NO: 224118
uucagcacaccuuucucuu

SEQ ID NO: 224120 - RNA, 19 nt, Artificial Sequence
  Description of Artificial Sequence: Synthetic oligonucleotide
  Sense strand starting at position 3705 of SEQ ID NO: 2886
agagaaaggugugcugaaa

SEQ ID NO: 224121 - RNA, 19 nt, Artificial Sequence
  Description of Artificial Sequence: Synthetic oligonucleotide
  Antisense strand to SEQ ID NO: 224120
uuucagcacaccuuucucu

SEQ ID NO: 224122 - RNA, 19 nt, Artificial Sequence
  Description of Artificial Sequence: Synthetic oligonucleotide
  Sense strand starting at position 3728 of SEQ ID NO: 2886
aggcuauaguaaucgauaa

SEQ ID NO: 224123 - RNA, 19 nt, Artificial Sequence
  Description of Artificial Sequence: Synthetic oligonucleotide
  Antisense strand to SEQ ID NO: 224122
uuaucgauuacuauagccu

SEQ ID NO: 224124 - RNA, 19 nt, Artificial Sequence
  Description of Artificial Sequence: Synthetic oligonucleotide
  Sense strand starting at position 3770 of SEQ ID NO: 2886
aggcaacucgcugauccaa

SEQ ID NO: 224125 - RNA, 19 nt, Artificial Sequence
  Description of Artificial Sequence: Synthetic oligonucleotide
  Antisense strand to SEQ ID NO: 224124
uuggaucagcgaguugccu

SEQ ID NO: 224126 - RNA, 19 nt, Artificial Sequence
  Description of Artificial Sequence: Synthetic oligonucleotide
  Sense strand starting at position 3917 of SEQ ID NO: 2886
acuggugugagaggguuua

SEQ ID NO: 224127 - RNA, 19 nt, Artificial Sequence
  Description of Artificial Sequence: Synthetic oligonucleotide
  Antisense strand to SEQ ID NO: 224126
uaaacccucucacaccagu

SEQ ID NO: 224128 - RNA, 19 nt, Artificial Sequence
  Description of Artificial Sequence: Synthetic oligonucleotide
  Sense strand starting at position 3959 of SEQ ID NO: 2886
auccauacccuguaugaug

SEQ ID NO: 224129 - RNA, 19 nt, Artificial Sequence
  Description of Artificial Sequence: Synthetic oligonucleotide
  Antisense strand to SEQ ID NO: 224128
caucauacaggguauggau

SEQ ID NO: 224130 - RNA, 19 nt, Artificial Sequence
  Description of Artificial Sequence: Synthetic oligonucleotide
  Sense strand starting at position 355 of SEQ ID NO: 2887
cacaguagguaccugauua

SEQ ID NO: 224131 - RNA, 19 nt, Artificial Sequence
  Description of Artificial Sequence: Synthetic oligonucleotide
  Antisense strand to SEQ ID NO: 224130
uaaucagguaccuacugug

SEQ ID NO: 224132 - RNA, 19 nt, Artificial Sequence
  Description of Artificial Sequence: Synthetic oligonucleotide
  Sense strand starting at position 359 of SEQ ID NO: 2887
guagguaccugauuaauug

SEQ ID NO: 224133 - RNA, 19 nt, Artificial Sequence
  Description of Artificial Sequence: Synthetic oligonucleotide
  Antisense strand to SEQ ID NO: 224132
caauuaaucagguaccuac

SEQ ID NO: 224134 - RNA, 19 nt, Artificial Sequence
  Description of Artificial Sequence: Synthetic oligonucleotide
  Sense strand starting at position 820 of SEQ ID NO: 2887
acuccaaugucauugaggu

SEQ ID NO: 224135 - RNA, 19 nt, Artificial Sequence
  Description of Artificial Sequence: Synthetic oligonucleotide
  Antisense strand to SEQ ID NO: 224134
accucaaugacauuggagu

SEQ ID NO: 224136 - RNA, 19 nt, Artificial Sequence
  Description of Artificial Sequence: Synthetic oligonucleotide
  Sense strand starting at position 821 of SEQ ID NO: 2887
cuccaaugucauugagguc

SEQ ID NO: 224137 - RNA, 19 nt, Artificial Sequence
  Description of Artificial Sequence: Synthetic oligonucleotide
  Antisense strand to SEQ ID NO: 224136
gaccucaaugacauuggag

SEQ ID NO: 224138 - RNA, 19 nt, Artificial Sequence
  Description of Artificial Sequence: Synthetic oligonucleotide
  Sense strand starting at position 872 of SEQ ID NO: 2887
caggauagccgagaguacu

SEQ ID NO: 224139 - RNA, 19 nt, Artificial Sequence
  Description of Artificial Sequence: Synthetic oligonucleotide
  Antisense strand to SEQ ID NO: 224138
aguacucucggcuauccug

SEQ ID NO: 224140 - RNA, 19 nt, Artificial Sequence
  Description of Artificial Sequence: Synthetic oligonucleotide
  Sense strand starting at position 894 of SEQ ID NO: 2887
gggugguuagcggagacau

SEQ ID NO: 224141 - RNA, 19 nt, Artificial Sequence
  Description of Artificial Sequence: Synthetic oligonucleotide
  Antisense strand to SEQ ID NO: 224140
augucuccgcuaaccaccc

SEQ ID NO: 224142 - RNA, 19 nt, Artificial Sequence
  Description of Artificial Sequence: Synthetic oligonucleotide
  Sense strand starting at position 896 of SEQ ID NO: 2887
gugguuagcggagacauua

SEQ ID NO: 224143 - RNA, 19 nt, Artificial Sequence
  Description of Artificial Sequence: Synthetic oligonucleotide
  Antisense strand to SEQ ID NO: 224142
uaaugucuccgcuaaccac

SEQ ID NO: 224144 - RNA, 19 nt, Artificial Sequence
  Description of Artificial Sequence: Synthetic oligonucleotide
  Sense strand starting at position 906 of SEQ ID NO: 2887
gagacauuagaagguaguu

SEQ ID NO: 224145 - RNA, 19 nt, Artificial Sequence
  Description of Artificial Sequence: Synthetic oligonucleotide
  Antisense strand to SEQ ID NO: 224144
aacuaccuucuaaugucuc

SEQ ID NO: 224146 - RNA, 19 nt, Artificial Sequence
  Description of Artificial Sequence: Synthetic oligonucleotide
  Sense strand starting at position 940 of SEQ ID NO: 2887
uuuggauuggugggagacu

SEQ ID NO: 224147 - RNA, 19 nt, Artificial Sequence
  Description of Artificial Sequence: Synthetic oligonucleotide
  Antisense strand to SEQ ID NO: 224146
agucucccaccaauccaaa

SEQ ID NO: 224148 - RNA, 19 nt, Artificial Sequence
  Description of Artificial Sequence: Synthetic oligonucleotide
  Sense strand starting at position 1119 of SEQ ID NO: 2887
ugagacaucuuccuucuga

SEQ ID NO: 224149 - RNA, 19 nt, Artificial Sequence
  Description of Artificial Sequence: Synthetic oligonucleotide
  Antisense strand to SEQ ID NO: 224148
ucagaaggaagaugucuca

SEQ ID NO: 224150 - RNA, 19 nt, Artificial Sequence
  Description of Artificial Sequence: Synthetic oligonucleotide
  Sense strand starting at position 1704 of SEQ ID NO: 2887
gaugaauagccuugggaga

SEQ ID NO: 224151 - RNA, 19 nt, Artificial Sequence
  Description of Artificial Sequence: Synthetic oligonucleotide
  Antisense strand to SEQ ID NO: 224150
ucucccaaggcuauucauc

SEQ ID NO: 224152 - RNA, 19 nt, Artificial Sequence
  Description of Artificial Sequence: Synthetic oligonucleotide
  Sense strand starting at position 1788 of SEQ ID NO: 2887
guugcaaagcuggagaguu

SEQ ID NO: 224153 - RNA, 19 nt, Artificial Sequence
  Description of Artificial Sequence: Synthetic oligonucleotide
  Antisense strand to SEQ ID NO: 224152
aacucuccagcuuugcaac

SEQ ID NO: 224154 - RNA, 19 nt, Artificial Sequence
  Description of Artificial Sequence: Synthetic oligonucleotide
  Sense strand starting at position 1998 of SEQ ID NO: 2887
uuccgaguucaguaaggac

SEQ ID NO: 224155 - RNA, 19 nt, Artificial Sequence
  Description of Artificial Sequence: Synthetic oligonucleotide
  Antisense strand to SEQ ID NO: 224154
guccuuacugaacucggaa

SEQ ID NO: 224156 - RNA, 19 nt, Artificial Sequence
  Description of Artificial Sequence: Synthetic oligonucleotide
  Sense strand starting at position 2197 of SEQ ID NO: 2887
ccuggaaguccuggaaguu

SEQ ID NO: 224157 - RNA, 19 nt, Artificial Sequence
  Description of Artificial Sequence: Synthetic oligonucleotide
  Antisense strand to SEQ ID NO: 224156
aacuuccaggacuuccagg

SEQ ID NO: 224158 - RNA, 19 nt, Artificial Sequence
  Description of Artificial Sequence: Synthetic oligonucleotide
  Sense strand starting at position 2206 of SEQ ID NO: 2887
ccuggaaguuucccaggau

SEQ ID NO: 224159 - RNA, 19 nt, Artificial Sequence
  Description of Artificial Sequence: Synthetic oligonucleotide
  Antisense strand to SEQ ID NO: 224158
auccugggaaacuuccagg

SEQ ID NO: 224160 - RNA, 19 nt, Artificial Sequence
  Description of Artificial Sequence: Synthetic oligonucleotide
  Sense strand starting at position 2382 of SEQ ID NO: 2887
aggcauuuauuuggaaauc

SEQ ID NO: 224161 - RNA, 19 nt, Artificial Sequence
  Description of Artificial Sequence: Synthetic oligonucleotide
  Antisense strand to SEQ ID NO: 224160
gauuuccaaauaaaugccu

SEQ ID NO: 224162 - RNA, 19 nt, Artificial Sequence
  Description of Artificial Sequence: Synthetic oligonucleotide
  Sense strand starting at position 2455 of SEQ ID NO: 2887
agugguucccuagaucagu

SEQ ID NO: 224163 - RNA, 19 nt, Artificial Sequence
  Description of Artificial Sequence: Synthetic oligonucleotide
  Antisense strand to SEQ ID NO: 224162
acugaucuagggaaccacu

SEQ ID NO: 224164 - RNA, 19 nt, Artificial Sequence
  Description of Artificial Sequence: Synthetic oligonucleotide
  Sense strand starting at position 2458 of SEQ ID NO: 2887
gguucccuagaucaguauu

SEQ ID NO: 224165 - RNA, 19 nt, Artificial Sequence
  Description of Artificial Sequence: Synthetic oligonucleotide
  Antisense strand to SEQ ID NO: 224164
aauacugaucuagggaacc

SEQ ID NO: 224166 - RNA, 19 nt, Artificial Sequence
  Description of Artificial Sequence: Synthetic oligonucleotide
  Sense strand starting at position 2461 of SEQ ID NO: 2887
ucccuagaucaguauugcu

SEQ ID NO: 224167 - RNA, 19 nt, Artificial Sequence
  Description of Artificial Sequence: Synthetic oligonucleotide
  Antisense strand to SEQ ID NO: 224166
agcaauacugaucuaggga

SEQ ID NO: 224168 - RNA, 19 nt, Artificial Sequence
  Description of Artificial Sequence: Synthetic oligonucleotide
  Sense strand starting at position 2466 of SEQ ID NO: 2887
agaucaguauugcugaaag

SEQ ID NO: 224169 - RNA, 19 nt, Artificial Sequence
  Description of Artificial Sequence: Synthetic oligonucleotide
  Antisense strand to SEQ ID NO: 224168
cuuucagcaauacugaucu

SEQ ID NO: 224170 - RNA, 19 nt, Artificial Sequence
  Description of Artificial Sequence: Synthetic oligonucleotide
  Sense strand starting at position 2488 of SEQ ID NO: 2887
ucuugauguccggauaggu

SEQ ID NO: 224171 - RNA, 19 nt, Artificial Sequence
  Description of Artificial Sequence: Synthetic oligonucleotide
  Antisense strand to SEQ ID NO: 224170
accuauccggacaucaaga

SEQ ID NO: 224172 - RNA, 19 nt, Artificial Sequence
  Description of Artificial Sequence: Synthetic oligonucleotide
  Sense strand starting at position 2587 of SEQ ID NO: 2887
ggauuacacugucuuccua

SEQ ID NO: 224173 - RNA, 19 nt, Artificial Sequence
  Description of Artificial Sequence: Synthetic oligonucleotide
  Antisense strand to SEQ ID NO: 224172
uaggaagacaguguaaucc

SEQ ID NO: 224174 - RNA, 19 nt, Artificial Sequence
  Description of Artificial Sequence: Synthetic oligonucleotide
  Sense strand starting at position 2710 of SEQ ID NO: 2887
auaggugacguuuaccuau

SEQ ID NO: 224175 - RNA, 19 nt, Artificial Sequence
  Description of Artificial Sequence: Synthetic oligonucleotide
  Antisense strand to SEQ ID NO: 224174
auagguaaacgucaccuau

SEQ ID NO: 224176 - RNA, 19 nt, Artificial Sequence
  Description of Artificial Sequence: Synthetic oligonucleotide
  Sense strand starting at position 2780 of SEQ ID NO: 2887
ccaugagauuaucuugagu

SEQ ID NO: 224177 - RNA, 19 nt, Artificial Sequence
  Description of Artificial Sequence: Synthetic oligonucleotide
  Antisense strand to SEQ ID NO: 224176
acucaagauaaucucaugg

SEQ ID NO: 224178 - RNA, 19 nt, Artificial Sequence
  Description of Artificial Sequence: Synthetic oligonucleotide
  Sense strand starting at position 2783 of SEQ ID NO: 2887
ugagauuaucuugaguccu

SEQ ID NO: 224179 - RNA, 19 nt, Artificial Sequence
  Description of Artificial Sequence: Synthetic oligonucleotide
  Antisense strand to SEQ ID NO: 224178
aggacucaagauaaucuca

SEQ ID NO: 224180 - RNA, 19 nt, Artificial Sequence
  Description of Artificial Sequence: Synthetic oligonucleotide
  Sense strand starting at position 2785 of SEQ ID NO: 2887
agauuaucuugaguccuga

SEQ ID NO: 224181 - RNA, 19 nt, Artificial Sequence
  Description of Artificial Sequence: Synthetic oligonucleotide
  Antisense strand to SEQ ID NO: 224180
ucaggacucaagauaaucu

SEQ ID NO: 224182 - RNA, 19 nt, Artificial Sequence
  Description of Artificial Sequence: Synthetic oligonucleotide
  Sense strand starting at position 2890 of SEQ ID NO: 2887
aaaguuguuguggaaaugu

SEQ ID NO: 224183 - RNA, 19 nt, Artificial Sequence
  Description of Artificial Sequence: Synthetic oligonucleotide
  Antisense strand to SEQ ID NO: 224182
acauuuccacaacaacuuu

SEQ ID NO: 224184 - RNA, 19 nt, Artificial Sequence
  Description of Artificial Sequence: Synthetic oligonucleotide
  Sense strand starting at position 3083 of SEQ ID NO: 2887
augggagauucuguuaguu

SEQ ID NO: 224185 - RNA, 19 nt, Artificial Sequence
  Description of Artificial Sequence: Synthetic oligonucleotide
  Antisense strand to SEQ ID NO: 224184
aacuaacagaaucucccau

SEQ ID NO: 224186 - RNA, 19 nt, Artificial Sequence
  Description of Artificial Sequence: Synthetic oligonucleotide
  Sense strand starting at position 3176 of SEQ ID NO: 2887
aaaucauaguaguuugagu

SEQ ID NO: 224187 - RNA, 19 nt, Artificial Sequence
  Description of Artificial Sequence: Synthetic oligonucleotide
  Antisense strand to SEQ ID NO: 224186
acucaaacuacuaugauuu

SEQ ID NO: 224188 - RNA, 19 nt, Artificial Sequence
  Description of Artificial Sequence: Synthetic oligonucleotide
  Sense strand starting at position 3280 of SEQ ID NO: 2887
cuagaauauuacuuaugug

SEQ ID NO: 224189 - RNA, 19 nt, Artificial Sequence
  Description of Artificial Sequence: Synthetic oligonucleotide
  Antisense strand to SEQ ID NO: 224188
cacauaaguaauauucuag

SEQ ID NO: 224190 - RNA, 19 nt, Artificial Sequence
  Description of Artificial Sequence: Synthetic oligonucleotide
  Sense strand starting at position 3287 of SEQ ID NO: 2887
auuacuuauguguagauug

SEQ ID NO: 224191 - RNA, 19 nt, Artificial Sequence
  Description of Artificial Sequence: Synthetic oligonucleotide
  Antisense strand to SEQ ID NO: 224190
caaucuacacauaaguaau

SEQ ID NO: 224192 - RNA, 19 nt, Artificial Sequence
  Description of Artificial Sequence: Synthetic oligonucleotide
  Sense strand starting at position 3292 of SEQ ID NO: 2887
uuauguguagauugaggaa

SEQ ID NO: 224193 - RNA, 19 nt, Artificial Sequence
  Description of Artificial Sequence: Synthetic oligonucleotide
  Antisense strand to SEQ ID NO: 224192
uuccucaaucuacacauaa

SEQ ID NO: 224194 - RNA, 19 nt, Artificial Sequence
  Description of Artificial Sequence: Synthetic oligonucleotide
  Sense strand starting at position 3353 of SEQ ID NO: 2887
ucaggauauuauccagucu

SEQ ID NO: 224195 - RNA, 19 nt, Artificial Sequence
  Description of Artificial Sequence: Synthetic oligonucleotide
  Antisense strand to SEQ ID NO: 224194
agacuggauaauauccuga

SEQ ID NO: 224196 - RNA, 19 nt, Artificial Sequence
  Description of Artificial Sequence: Synthetic oligonucleotide
  Sense strand starting at position 3444 of SEQ ID NO: 2887
ugaggacuuucgguacuuu

SEQ ID NO: 224197 - RNA, 19 nt, Artificial Sequence
  Description of Artificial Sequence: Synthetic oligonucleotide
  Antisense strand to SEQ ID NO: 224196
aaaguaccgaaaguccuca

SEQ ID NO: 224198 - RNA, 19 nt, Artificial Sequence
  Description of Artificial Sequence: Synthetic oligonucleotide
  Sense strand starting at position 3445 of SEQ ID NO: 2887
gaggacuuucgguacuuua

SEQ ID NO: 224199 - RNA, 19 nt, Artificial Sequence
  Description of Artificial Sequence: Synthetic oligonucleotide
  Antisense strand to SEQ ID NO: 224198
uaaaguaccgaaaguccuc

SEQ ID NO: 224200 - RNA, 19 nt, Artificial Sequence
  Description of Artificial Sequence: Synthetic oligonucleotide
  Sense strand starting at position 3582 of SEQ ID NO: 2887
uucugaaagaugcguagaa

SEQ ID NO: 224201 - RNA, 19 nt, Artificial Sequence
  Description of Artificial Sequence: Synthetic oligonucleotide
  Antisense strand to SEQ ID NO: 224200
uucuacgcaucuuucagaa

SEQ ID NO: 224202 - RNA, 19 nt, Artificial Sequence
  Description of Artificial Sequence: Synthetic oligonucleotide
  Sense strand starting at position 3583 of SEQ ID NO: 2887
ucugaaagaugcguagaau

SEQ ID NO: 224203 - RNA, 19 nt, Artificial Sequence
  Description of Artificial Sequence: Synthetic oligonucleotide
  Antisense strand to SEQ ID NO: 224202
auucuacgcaucuuucaga

SEQ ID NO: 224204 - RNA, 19 nt, Artificial Sequence
  Description of Artificial Sequence: Synthetic oligonucleotide
  Sense strand starting at position 3584 of SEQ ID NO: 2887
cugaaagaugcguagaauu

SEQ ID NO: 224205 - RNA, 19 nt, Artificial Sequence
  Description of Artificial Sequence: Synthetic oligonucleotide
  Antisense strand to SEQ ID NO: 224204
aauucuacgcaucuuucag

SEQ ID NO: 224206 - RNA, 19 nt, Artificial Sequence
  Description of Artificial Sequence: Synthetic oligonucleotide
  Sense strand starting at position 3601 of SEQ ID NO: 2887
uuuagacauuuccagugaa

SEQ ID NO: 224207 - RNA, 19 nt, Artificial Sequence
  Description of Artificial Sequence: Synthetic oligonucleotide
  Antisense strand to SEQ ID NO: 224206
uucacuggaaaugucuaaa

SEQ ID NO: 224208 - RNA, 19 nt, Artificial Sequence
  Description of Artificial Sequence: Synthetic oligonucleotide
  Sense strand starting at position 3692 of SEQ ID NO: 2887
gguacuguuguagacacua

SEQ ID NO: 224209 - RNA, 19 nt, Artificial Sequence
  Description of Artificial Sequence: Synthetic oligonucleotide
  Antisense strand to SEQ ID NO: 224208
uagugucuacaacaguacc

SEQ ID NO: 224210 - RNA, 19 nt, Artificial Sequence
  Description of Artificial Sequence: Synthetic oligonucleotide
  Sense strand starting at position 146 of SEQ ID NO: 2888
uaguuaggguaucuacaaa

SEQ ID NO: 224211 - RNA, 19 nt, Artificial Sequence
  Description of Artificial Sequence: Synthetic oligonucleotide
  Antisense strand to SEQ ID NO: 224210
uuuguagauacccuaacua

SEQ ID NO: 224212 - RNA, 19 nt, Artificial Sequence
  Description of Artificial Sequence: Synthetic oligonucleotide
  Sense strand starting at position 304 of SEQ ID NO: 2888
gcaccuugucccggccaua

SEQ ID NO: 224213 - RNA, 19 nt, Artificial Sequence
  Description of Artificial Sequence: Synthetic oligonucleotide
  Antisense strand to SEQ ID NO: 224212
uauggccgggacaaggugc

SEQ ID NO: 224214 - RNA, 19 nt, Artificial Sequence
  Description of Artificial Sequence: Synthetic oligonucleotide
  Sense strand starting at position 803 of SEQ ID NO: 2888
gcugccuuucuguaguaga

SEQ ID NO: 224215 - RNA, 19 nt, Artificial Sequence
  Description of Artificial Sequence: Synthetic oligonucleotide
  Antisense strand to SEQ ID NO: 224214
ucuacuacagaaaggcagc

SEQ ID NO: 224216 - RNA, 19 nt, Artificial Sequence
  Description of Artificial Sequence: Synthetic oligonucleotide
  Sense strand starting at position 806 of SEQ ID NO: 2888
gccuuucuguaguagagag

SEQ ID NO: 224217 - RNA, 19 nt, Artificial Sequence
  Description of Artificial Sequence: Synthetic oligonucleotide
  Antisense strand to SEQ ID NO: 224216
cucucuacuacagaaaggc

SEQ ID NO: 224218 - RNA, 19 nt, Artificial Sequence
  Description of Artificial Sequence: Synthetic oligonucleotide
  Sense strand starting at position 816 of SEQ ID NO: 2888
aguagagagcaucgagaaa

SEQ ID NO: 224219 - RNA, 19 nt, Artificial Sequence
  Description of Artificial Sequence: Synthetic oligonucleotide
  Antisense strand to SEQ ID NO: 224218
uuucucgaugcucucuacu

SEQ ID NO: 224220 - RNA, 19 nt, Artificial Sequence
  Description of Artificial Sequence: Synthetic oligonucleotide
  Sense strand starting at position 880 of SEQ ID NO: 2888
ccauuucucugccucugua

SEQ ID NO: 224221 - RNA, 19 nt, Artificial Sequence
  Description of Artificial Sequence: Synthetic oligonucleotide
  Antisense strand to SEQ ID NO: 224220
uacagaggcagagaaaugg

SEQ ID NO: 224222 - RNA, 19 nt, Artificial Sequence
  Description of Artificial Sequence: Synthetic oligonucleotide
  Sense strand starting at position 1352 of SEQ ID NO: 2888
gggcgaaguuucccaagga

SEQ ID NO: 224223 - RNA, 19 nt, Artificial Sequence
  Description of Artificial Sequence: Synthetic oligonucleotide
  Antisense strand to SEQ ID NO: 224222
uccuugggaaacuucgccc

SEQ ID NO: 224224 - RNA, 19 nt, Artificial Sequence
  Description of Artificial Sequence: Synthetic oligonucleotide
  Sense strand starting at position 1353 of SEQ ID NO: 2888
ggcgaaguuucccaaggac

SEQ ID NO: 224225 - RNA, 19 nt, Artificial Sequence
  Description of Artificial Sequence: Synthetic oligonucleotide
  Antisense strand to SEQ ID NO: 224224
guccuugggaaacuucgcc

SEQ ID NO: 224226 - RNA, 19 nt, Artificial Sequence
  Description of Artificial Sequence: Synthetic oligonucleotide
  Sense strand starting at position 1356 of SEQ ID NO: 2888
gaaguuucccaaggacgau

SEQ ID NO: 224227 - RNA, 19 nt, Artificial Sequence
  Description of Artificial Sequence: Synthetic oligonucleotide
  Antisense strand to SEQ ID NO: 224226
aucguccuugggaaacuuc

SEQ ID NO: 224228 - RNA, 19 nt, Artificial Sequence
  Description of Artificial Sequence: Synthetic oligonucleotide
  Sense strand starting at position 1527 of SEQ ID NO: 2888
ccacuacuagcccggauaa

SEQ ID NO: 224229 - RNA, 19 nt, Artificial Sequence
  Description of Artificial Sequence: Synthetic oligonucleotide
  Antisense strand to SEQ ID NO: 224228
uuauccgggcuaguagugg

SEQ ID NO: 224230 - RNA, 19 nt, Artificial Sequence
  Description of Artificial Sequence: Synthetic oligonucleotide
  Sense strand starting at position 1540 of SEQ ID NO: 2888
ggauaagguucggcaucca

SEQ ID NO: 224231 - RNA, 19 nt, Artificial Sequence
  Description of Artificial Sequence: Synthetic oligonucleotide
  Antisense strand to SEQ ID NO: 224230
uggaugccgaaccuuaucc

SEQ ID NO: 224232 - RNA, 19 nt, Artificial Sequence
  Description of Artificial Sequence: Synthetic oligonucleotide
  Sense strand starting at position 1565 of SEQ ID NO: 2888
agacuaccuuggucccaaa

SEQ ID NO: 224233 - RNA, 19 nt, Artificial Sequence
  Description of Artificial Sequence: Synthetic oligonucleotide
  Antisense strand to SEQ ID NO: 224232
uuugggaccaagguagucu

SEQ ID NO: 224234 - RNA, 19 nt, Artificial Sequence
  Description of Artificial Sequence: Synthetic oligonucleotide
  Sense strand starting at position 2618 of SEQ ID NO: 2888
aacugagaguuugauucuu

SEQ ID NO: 224235 - RNA, 19 nt, Artificial Sequence
  Description of Artificial Sequence: Synthetic oligonucleotide
  Antisense strand to SEQ ID NO: 224234
aagaaucaaacucucaguu

SEQ ID NO: 224236 - RNA, 19 nt, Artificial Sequence
  Description of Artificial Sequence: Synthetic oligonucleotide
  Sense strand starting at position 2620 of SEQ ID NO: 2888
cugagaguuugauucuugu

SEQ ID NO: 224237 - RNA, 19 nt, Artificial Sequence
  Description of Artificial Sequence: Synthetic oligonucleotide
  Antisense strand to SEQ ID NO: 224236
acaagaaucaaacucucag

SEQ ID NO: 224238 - RNA, 19 nt, Artificial Sequence
  Description of Artificial Sequence: Synthetic oligonucleotide
  Sense strand starting at position 2623 of SEQ ID NO: 2888
agaguuugauucuugucaa

SEQ ID NO: 224239 - RNA, 19 nt, Artificial Sequence
  Description of Artificial Sequence: Synthetic oligonucleotide
  Antisense strand to SEQ ID NO: 224238
uugacaagaaucaaacucu

SEQ ID NO: 224240 - RNA, 19 nt, Artificial Sequence
  Description of Artificial Sequence: Synthetic oligonucleotide
  Sense strand starting at position 2624 of SEQ ID NO: 2888
gaguuugauucuugucaaa

SEQ ID NO: 224241 - RNA, 19 nt, Artificial Sequence
  Description of Artificial Sequence: Synthetic oligonucleotide
  Antisense strand to SEQ ID NO: 224240
uuugacaagaaucaaacuc

SEQ ID NO: 224242 - RNA, 19 nt, Artificial Sequence
  Description of Artificial Sequence: Synthetic oligonucleotide
  Sense strand starting at position 2626 of SEQ ID NO: 2888
guuugauucuugucaaagg

SEQ ID NO: 224243 - RNA, 19 nt, Artificial Sequence
  Description of Artificial Sequence: Synthetic oligonucleotide
  Antisense strand to SEQ ID NO: 224242
ccuuugacaagaaucaaac

SEQ ID NO: 224244 - RNA, 19 nt, Artificial Sequence
  Description of Artificial Sequence: Synthetic oligonucleotide
  Sense strand starting at position 2780 of SEQ ID NO: 2888
aaagcugccuuguuggauu

SEQ ID NO: 224245 - RNA, 19 nt, Artificial Sequence
  Description of Artificial Sequence: Synthetic oligonucleotide
  Antisense strand to SEQ ID NO: 224244
aauccaacaaggcagcuuu

SEQ ID NO: 224246 - RNA, 19 nt, Artificial Sequence
  Description of Artificial Sequence: Synthetic oligonucleotide
  Sense strand starting at position 2783 of SEQ ID NO: 2888
gcugccuuguuggauugau

SEQ ID NO: 224247 - RNA, 19 nt, Artificial Sequence
  Description of Artificial Sequence: Synthetic oligonucleotide
  Antisense strand to SEQ ID NO: 224246
aucaauccaacaaggcagc

SEQ ID NO: 224248 - RNA, 19 nt, Artificial Sequence
  Description of Artificial Sequence: Synthetic oligonucleotide
  Sense strand starting at position 2787 of SEQ ID NO: 2888
ccuuguuggauugauuguu

SEQ ID NO: 224249 - RNA, 19 nt, Artificial Sequence
  Description of Artificial Sequence: Synthetic oligonucleotide
  Antisense strand to SEQ ID NO: 224248
aacaaucaauccaacaagg

SEQ ID NO: 224250 - RNA, 19 nt, Artificial Sequence
  Description of Artificial Sequence: Synthetic oligonucleotide
  Sense strand starting at position 2793 of SEQ ID NO: 2888
uggauugauuguuuggguu

SEQ ID NO: 224251 - RNA, 19 nt, Artificial Sequence
  Description of Artificial Sequence: Synthetic oligonucleotide
  Antisense strand to SEQ ID NO: 224250
aacccaaacaaucaaucca

SEQ ID NO: 224252 - RNA, 19 nt, Artificial Sequence
  Description of Artificial Sequence: Synthetic oligonucleotide
  Sense strand starting at position 2866 of SEQ ID NO: 2888
cagagaaggccuuggcuga

SEQ ID NO: 224253 - RNA, 19 nt, Artificial Sequence
  Description of Artificial Sequence: Synthetic oligonucleotide
  Antisense strand to SEQ ID NO: 224252
ucagccaaggccuucucug

SEQ ID NO: 224254 - RNA, 19 nt, Artificial Sequence
  Description of Artificial Sequence: Synthetic oligonucleotide
  Sense strand starting at position 3091 of SEQ ID NO: 2888
cugggaaucugcuggguua

SEQ ID NO: 224255 - RNA, 19 nt, Artificial Sequence
  Description of Artificial Sequence: Synthetic oligonucleotide
  Antisense strand to SEQ ID NO: 224254
uaacccagcagauucccag

SEQ ID NO: 224256 - RNA, 19 nt, Artificial Sequence
  Description of Artificial Sequence: Synthetic oligonucleotide
  Sense strand starting at position 3094 of SEQ ID NO: 2888
ggaaucugcuggguuagga

SEQ ID NO: 224257 - RNA, 19 nt, Artificial Sequence
  Description of Artificial Sequence: Synthetic oligonucleotide
  Antisense strand to SEQ ID NO: 224256
uccuaacccagcagauucc

SEQ ID NO: 224258 - RNA, 19 nt, Artificial Sequence
  Description of Artificial Sequence: Synthetic oligonucleotide
  Sense strand starting at position 3197 of SEQ ID NO: 2888
cuguccucccucugaguaa

SEQ ID NO: 224259 - RNA, 19 nt, Artificial Sequence
  Description of Artificial Sequence: Synthetic oligonucleotide
  Antisense strand to SEQ ID NO: 224258
uuacucagagggaggacag

SEQ ID NO: 224260 - RNA, 19 nt, Artificial Sequence
  Description of Artificial Sequence: Synthetic oligonucleotide
  Sense strand starting at position 3198 of SEQ ID NO: 2888
uguccucccucugaguaaa

SEQ ID NO: 224261 - RNA, 19 nt, Artificial Sequence
  Description of Artificial Sequence: Synthetic oligonucleotide
  Antisense strand to SEQ ID NO: 224260
uuuacucagagggaggaca

SEQ ID NO: 224262 - RNA, 19 nt, Artificial Sequence
  Description of Artificial Sequence: Synthetic oligonucleotide
  Sense strand starting at position 3309 of SEQ ID NO: 2888
gugcuuaguucuuugccua

SEQ ID NO: 224263 - RNA, 19 nt, Artificial Sequence
  Description of Artificial Sequence: Synthetic oligonucleotide
  Antisense strand to SEQ ID NO: 224262
uaggcaaagaacuaagcac

SEQ ID NO: 224264 - RNA, 19 nt, Artificial Sequence
  Description of Artificial Sequence: Synthetic oligonucleotide
  Sense strand starting at position 3310 of SEQ ID NO: 2888
ugcuuaguucuuugccuau

SEQ ID NO: 224265 - RNA, 19 nt, Artificial Sequence
  Description of Artificial Sequence: Synthetic oligonucleotide
  Antisense strand to SEQ ID NO: 224264
auaggcaaagaacuaagca

SEQ ID NO: 224266 - RNA, 19 nt, Artificial Sequence
  Description of Artificial Sequence: Synthetic oligonucleotide
  Sense strand starting at position 3312 of SEQ ID NO: 2888
cuuaguucuuugccuauca

SEQ ID NO: 224267 - RNA, 19 nt, Artificial Sequence
  Description of Artificial Sequence: Synthetic oligonucleotide
  Antisense strand to SEQ ID NO: 224266
ugauaggcaaagaacuaag

SEQ ID NO: 224268 - RNA, 19 nt, Artificial Sequence
  Description of Artificial Sequence: Synthetic oligonucleotide
  Sense strand starting at position 3489 of SEQ ID NO: 2888
cucgaucucucauaguugu

SEQ ID NO: 224269 - RNA, 19 nt, Artificial Sequence
  Description of Artificial Sequence: Synthetic oligonucleotide
  Antisense strand to SEQ ID NO: 224268
acaacuaugagagaucgag

SEQ ID NO: 224270 - RNA, 19 nt, Artificial Sequence
  Description of Artificial Sequence: Synthetic oligonucleotide
  Sense strand starting at position 3495 of SEQ ID NO: 2888
cucucauaguugucucuua

SEQ ID NO: 224271 - RNA, 19 nt, Artificial Sequence
  Description of Artificial Sequence: Synthetic oligonucleotide
  Antisense strand to SEQ ID NO: 224270
uaagagacaacuaugagag

SEQ ID NO: 224272 - RNA, 19 nt, Artificial Sequence
  Description of Artificial Sequence: Synthetic oligonucleotide
  Sense strand starting at position 3496 of SEQ ID NO: 2888
ucucauaguugucucuuau

SEQ ID NO: 224273 - RNA, 19 nt, Artificial Sequence
  Description of Artificial Sequence: Synthetic oligonucleotide
  Antisense strand to SEQ ID NO: 224272
auaagagacaacuaugaga

SEQ ID NO: 224274 - RNA, 19 nt, Artificial Sequence
  Description of Artificial Sequence: Synthetic oligonucleotide
  Sense strand starting at position 3500 of SEQ ID NO: 2888
auaguugucucuuaucucu

SEQ ID NO: 224275 - RNA, 19 nt, Artificial Sequence
  Description of Artificial Sequence: Synthetic oligonucleotide
  Antisense strand to SEQ ID NO: 224274
agagauaagagacaacuau

SEQ ID NO: 224276 - RNA, 19 nt, Artificial Sequence
  Description of Artificial Sequence: Synthetic oligonucleotide
  Sense strand starting at position 3556 of SEQ ID NO: 2888
gcccuuauuuaauguguuu

SEQ ID NO: 224277 - RNA, 19 nt, Artificial Sequence
  Description of Artificial Sequence: Synthetic oligonucleotide
  Antisense strand to SEQ ID NO: 224276
aaacacauuaaauaagggc

SEQ ID NO: 224278 - RNA, 19 nt, Artificial Sequence
  Description of Artificial Sequence: Synthetic oligonucleotide
  Sense strand starting at position 3620 of SEQ ID NO: 2888
ucucgcugucucugucuua

SEQ ID NO: 224279 - RNA, 19 nt, Artificial Sequence
  Description of Artificial Sequence: Synthetic oligonucleotide
  Antisense strand to SEQ ID NO: 224278
uaagacagagacagcgaga

SEQ ID NO: 224280 - RNA, 19 nt, Artificial Sequence
  Description of Artificial Sequence: Synthetic oligonucleotide
  Sense strand starting at position 3659 of SEQ ID NO: 2888
cgugacuucucccucucuu

SEQ ID NO: 224281 - RNA, 19 nt, Artificial Sequence
  Description of Artificial Sequence: Synthetic oligonucleotide
  Antisense strand to SEQ ID NO: 224280
aagagagggagaagucacg

SEQ ID NO: 224282 - RNA, 19 nt, Artificial Sequence
  Description of Artificial Sequence: Synthetic oligonucleotide
  Sense strand starting at position 49 of SEQ ID NO: 2893
cagugauaugcuuagauaa

SEQ ID NO: 224283 - RNA, 19 nt, Artificial Sequence
  Description of Artificial Sequence: Synthetic oligonucleotide
  Antisense strand to SEQ ID NO: 224282
uuaucuaagcauaucacug

SEQ ID NO: 224284 - RNA, 19 nt, Artificial Sequence
  Description of Artificial Sequence: Synthetic oligonucleotide
  Sense strand starting at position 64 of SEQ ID NO: 2893
auaauugauguauguggga

SEQ ID NO: 224285 - RNA, 19 nt, Artificial Sequence
  Description of Artificial Sequence: Synthetic oligonucleotide
  Antisense strand to SEQ ID NO: 224284
ucccacauacaucaauuau

SEQ ID NO: 224286 - RNA, 19 nt, Artificial Sequence
  Description of Artificial Sequence: Synthetic oligonucleotide
  Sense strand starting at position 194 of SEQ ID NO: 2893
ggugguguaaauuaucuga

SEQ ID NO: 224287 - RNA, 19 nt, Artificial Sequence
  Description of Artificial Sequence: Synthetic oligonucleotide
  Antisense strand to SEQ ID NO: 224286
ucagauaauuuacaccacc

SEQ ID NO: 224288 - RNA, 19 nt, Artificial Sequence
  Description of Artificial Sequence: Synthetic oligonucleotide
  Sense strand starting at position 197 of SEQ ID NO: 2893
gguguaaauuaucugaaua

SEQ ID NO: 224289 - RNA, 19 nt, Artificial Sequence
  Description of Artificial Sequence: Synthetic oligonucleotide
  Antisense strand to SEQ ID NO: 224288
uauucagauaauuuacacc

SEQ ID NO: 224290 - RNA, 19 nt, Artificial Sequence
  Description of Artificial Sequence: Synthetic oligonucleotide
  Sense strand starting at position 213 of SEQ ID NO: 2893
auaugaguucugcaugauu

SEQ ID NO: 224291 - RNA, 19 nt, Artificial Sequence
  Description of Artificial Sequence: Synthetic oligonucleotide
  Antisense strand to SEQ ID NO: 224290
aaucaugcagaacucauau

SEQ ID NO: 224292 - RNA, 19 nt, Artificial Sequence
  Description of Artificial Sequence: Synthetic oligonucleotide
  Sense strand starting at position 250 of SEQ ID NO: 2893
uuauguaugaugggaaucu

SEQ ID NO: 224293 - RNA, 19 nt, Artificial Sequence
  Description of Artificial Sequence: Synthetic oligonucleotide
  Antisense strand to SEQ ID NO: 224292
agauucccaucauacauaa

SEQ ID NO: 224294 - RNA, 19 nt, Artificial Sequence
  Description of Artificial Sequence: Synthetic oligonucleotide
  Sense strand starting at position 259 of SEQ ID NO: 2893
augggaaucuaauuaugca

SEQ ID NO: 224295 - RNA, 19 nt, Artificial Sequence
  Description of Artificial Sequence: Synthetic oligonucleotide
  Antisense strand to SEQ ID NO: 224294
ugcauaauuagauucccau

SEQ ID NO: 224296 - RNA, 19 nt, Artificial Sequence
  Description of Artificial Sequence: Synthetic oligonucleotide
  Sense strand starting at position 332 of SEQ ID NO: 2893
agaggaacauguuuaguuu

SEQ ID NO: 224297 - RNA, 19 nt, Artificial Sequence
  Description of Artificial Sequence: Synthetic oligonucleotide
  Antisense strand to SEQ ID NO: 224296
aaacuaaacauguuccucu

SEQ ID NO: 224298 - RNA, 19 nt, Artificial Sequence
  Description of Artificial Sequence: Synthetic oligonucleotide
  Sense strand starting at position 365 of SEQ ID NO: 2893
acugaaacacucuggcaaa

SEQ ID NO: 224299 - RNA, 19 nt, Artificial Sequence
  Description of Artificial Sequence: Synthetic oligonucleotide
  Antisense strand to SEQ ID NO: 224298
uuugccagaguguuucagu

SEQ ID NO: 224300 - RNA, 19 nt, Artificial Sequence
  Description of Artificial Sequence: Synthetic oligonucleotide
  Sense strand starting at position 456 of SEQ ID NO: 2893
uuauuaaaggccugagaca

SEQ ID NO: 224301 - RNA, 19 nt, Artificial Sequence
  Description of Artificial Sequence: Synthetic oligonucleotide
  Antisense strand to SEQ ID NO: 224300
ugucucaggccuuuaauaa

SEQ ID NO: 224302 - RNA, 19 nt, Artificial Sequence
  Description of Artificial Sequence: Synthetic oligonucleotide
  Sense strand starting at position 503 of SEQ ID NO: 2893
aagucaggcuuaucaggaa

SEQ ID NO: 224303 - RNA, 19 nt, Artificial Sequence
  Description of Artificial Sequence: Synthetic oligonucleotide
  Antisense strand to SEQ ID NO: 224302
uuccugauaagccugacuu

SEQ ID NO: 224304 - RNA, 19 nt, Artificial Sequence
  Description of Artificial Sequence: Synthetic oligonucleotide
  Sense strand starting at position 507 of SEQ ID NO: 2893
caggcuuaucaggaauagu

SEQ ID NO: 224305 - RNA, 19 nt, Artificial Sequence
  Description of Artificial Sequence: Synthetic oligonucleotide
  Antisense strand to SEQ ID NO: 224304
acuauuccugauaagccug

SEQ ID NO: 224306 - RNA, 19 nt, Artificial Sequence
  Description of Artificial Sequence: Synthetic oligonucleotide
  Sense strand starting at position 793 of SEQ ID NO: 2893
ugguauaagcaugacuuga

SEQ ID NO: 224307 - RNA, 19 nt, Artificial Sequence
  Description of Artificial Sequence: Synthetic oligonucleotide
  Antisense strand to SEQ ID NO: 224306
ucaagucaugcuuauacca

SEQ ID NO: 224308 - RNA, 19 nt, Artificial Sequence
  Description of Artificial Sequence: Synthetic oligonucleotide
  Sense strand starting at position 795 of SEQ ID NO: 2893
guauaagcaugacuugaaa

SEQ ID NO: 224309 - RNA, 19 nt, Artificial Sequence
  Description of Artificial Sequence: Synthetic oligonucleotide
  Antisense strand to SEQ ID NO: 224308
uuucaagucaugcuuauac

SEQ ID NO: 224310 - RNA, 19 nt, Artificial Sequence
  Description of Artificial Sequence: Synthetic oligonucleotide
  Sense strand starting at position 1107 of SEQ ID NO: 2893
uguuaucagauuuguaguc

SEQ ID NO: 224311 - RNA, 19 nt, Artificial Sequence
  Description of Artificial Sequence: Synthetic oligonucleotide
  Antisense strand to SEQ ID NO: 224310
gacuacaaaucugauaaca

SEQ ID NO: 224312 - RNA, 19 nt, Artificial Sequence
  Description of Artificial Sequence: Synthetic oligonucleotide
  Sense strand starting at position 1243 of SEQ ID NO: 2893
ucugauagauucucaguaa

SEQ ID NO: 224313 - RNA, 19 nt, Artificial Sequence
  Description of Artificial Sequence: Synthetic oligonucleotide
  Antisense strand to SEQ ID NO: 224312
uuacugagaaucuaucaga

SEQ ID NO: 224314 - RNA, 19 nt, Artificial Sequence
  Description of Artificial Sequence: Synthetic oligonucleotide
  Sense strand starting at position 1422 of SEQ ID NO: 2893
ccauguguuagguagauga

SEQ ID NO: 224315 - RNA, 19 nt, Artificial Sequence
  Description of Artificial Sequence: Synthetic oligonucleotide
  Antisense strand to SEQ ID NO: 224314
ucaucuaccuaacacaugg

SEQ ID NO: 224316 - RNA, 19 nt, Artificial Sequence
  Description of Artificial Sequence: Synthetic oligonucleotide
  Sense strand starting at position 1424 of SEQ ID NO: 2893
auguguuagguagaugaau

SEQ ID NO: 224317 - RNA, 19 nt, Artificial Sequence
  Description of Artificial Sequence: Synthetic oligonucleotide
  Antisense strand to SEQ ID NO: 224316
auucaucuaccuaacacau

SEQ ID NO: 224318 - RNA, 19 nt, Artificial Sequence
  Description of Artificial Sequence: Synthetic oligonucleotide
  Sense strand starting at position 1984 of SEQ ID NO: 2893
ucugucucuccagauuaua

SEQ ID NO: 224319 - RNA, 19 nt, Artificial Sequence
  Description of Artificial Sequence: Synthetic oligonucleotide
  Antisense strand to SEQ ID NO: 224318
uauaaucuggagagacaga

SEQ ID NO: 224320 - RNA, 19 nt, Artificial Sequence
  Description of Artificial Sequence: Synthetic oligonucleotide
  Sense strand starting at position 2218 of SEQ ID NO: 2893
gacugauauucccuaugga

SEQ ID NO: 224321 - RNA, 19 nt, Artificial Sequence
  Description of Artificial Sequence: Synthetic oligonucleotide
  Antisense strand to SEQ ID NO: 224320
uccauagggaauaucaguc

SEQ ID NO: 224322 - RNA, 19 nt, Artificial Sequence
  Description of Artificial Sequence: Synthetic oligonucleotide
  Sense strand starting at position 2221 of SEQ ID NO: 2893
ugauauucccuauggauau

SEQ ID NO: 224323 - RNA, 19 nt, Artificial Sequence
  Description of Artificial Sequence: Synthetic oligonucleotide
  Antisense strand to SEQ ID NO: 224322
auauccauagggaauauca

SEQ ID NO: 224324 - RNA, 19 nt, Artificial Sequence
  Description of Artificial Sequence: Synthetic oligonucleotide
  Sense strand starting at position 2429 of SEQ ID NO: 2893
uuugaaugccugggacaaa

SEQ ID NO: 224325 - RNA, 19 nt, Artificial Sequence
  Description of Artificial Sequence: Synthetic oligonucleotide
  Antisense strand to SEQ ID NO: 224324
uuugucccaggcauucaaa

SEQ ID NO: 224326 - RNA, 19 nt, Artificial Sequence
  Description of Artificial Sequence: Synthetic oligonucleotide
  Sense strand starting at position 2593 of SEQ ID NO: 2893
uaaauauauccugguugga

SEQ ID NO: 224327 - RNA, 19 nt, Artificial Sequence
  Description of Artificial Sequence: Synthetic oligonucleotide
  Antisense strand to SEQ ID NO: 224326
uccaaccaggauauauuua

SEQ ID NO: 224328 - RNA, 19 nt, Artificial Sequence
  Description of Artificial Sequence: Synthetic oligonucleotide
  Sense strand starting at position 2595 of SEQ ID NO: 2893
aauauauccugguuggaaa

SEQ ID NO: 224329 - RNA, 19 nt, Artificial Sequence
  Description of Artificial Sequence: Synthetic oligonucleotide
  Antisense strand to SEQ ID NO: 224328
uuuccaaccaggauauauu

SEQ ID NO: 224330 - RNA, 19 nt, Artificial Sequence
  Description of Artificial Sequence: Synthetic oligonucleotide
  Sense strand starting at position 2596 of SEQ ID NO: 2893
auauauccugguuggaaau

SEQ ID NO: 224331 - RNA, 19 nt, Artificial Sequence
  Description of Artificial Sequence: Synthetic oligonucleotide
  Antisense strand to SEQ ID NO: 224330
auuuccaaccaggauauau

SEQ ID NO: 224332 - RNA, 19 nt, Artificial Sequence
  Description of Artificial Sequence: Synthetic oligonucleotide
  Sense strand starting at position 2597 of SEQ ID NO: 2893
uauauccugguuggaaaua

SEQ ID NO: 224333 - RNA, 19 nt, Artificial Sequence
  Description of Artificial Sequence: Synthetic oligonucleotide
  Antisense strand to SEQ ID NO: 224332
uauuuccaaccaggauaua

SEQ ID NO: 224334 - RNA, 19 nt, Artificial Sequence
  Description of Artificial Sequence: Synthetic oligonucleotide
  Sense strand starting at position 2735 of SEQ ID NO: 2893
gguuuauaagauugaacua

SEQ ID NO: 224335 - RNA, 19 nt, Artificial Sequence
  Description of Artificial Sequence: Synthetic oligonucleotide
  Antisense strand to SEQ ID NO: 224334
uaguucaaucuuauaaacc

SEQ ID NO: 224336 - RNA, 19 nt, Artificial Sequence
  Description of Artificial Sequence: Synthetic oligonucleotide
  Sense strand starting at position 2957 of SEQ ID NO: 2893
uauaguucugaguagcaaa

SEQ ID NO: 224337 - RNA, 19 nt, Artificial Sequence
  Description of Artificial Sequence: Synthetic oligonucleotide
  Antisense strand to SEQ ID NO: 224336
uuugcuacucagaacuaua

SEQ ID NO: 224338 - RNA, 19 nt, Artificial Sequence
  Description of Artificial Sequence: Synthetic oligonucleotide
  Sense strand starting at position 3027 of SEQ ID NO: 2893
aguuaauggcaagaguauu

SEQ ID NO: 224339 - RNA, 19 nt, Artificial Sequence
  Description of Artificial Sequence: Synthetic oligonucleotide
  Antisense strand to SEQ ID NO: 224338
aauacucuugccauuaacu

SEQ ID NO: 224340 - RNA, 19 nt, Artificial Sequence
  Description of Artificial Sequence: Synthetic oligonucleotide
  Sense strand starting at position 3112 of SEQ ID NO: 2893
aagaaucugguguagcaau

SEQ ID NO: 224341 - RNA, 19 nt, Artificial Sequence
  Description of Artificial Sequence: Synthetic oligonucleotide
  Antisense strand to SEQ ID NO: 224340
auugcuacaccagauucuu

SEQ ID NO: 224342 - RNA, 19 nt, Artificial Sequence
  Description of Artificial Sequence: Synthetic oligonucleotide
  Sense strand starting at position 3210 of SEQ ID NO: 2893
ucacaaaugugacuggaau

SEQ ID NO: 224343 - RNA, 19 nt, Artificial Sequence
  Description of Artificial Sequence: Synthetic oligonucleotide
  Antisense strand to SEQ ID NO: 224342
auuccagucacauuuguga

SEQ ID NO: 224344 - RNA, 19 nt, Artificial Sequence
  Description of Artificial Sequence: Synthetic oligonucleotide
  Sense strand starting at position 3211 of SEQ ID NO: 2893
cacaaaugugacuggaauu

SEQ ID NO: 224345 - RNA, 19 nt, Artificial Sequence
  Description of Artificial Sequence: Synthetic oligonucleotide
  Antisense strand to SEQ ID NO: 224344
aauuccagucacauuugug

SEQ ID NO: 224346 - RNA, 19 nt, Artificial Sequence
  Description of Artificial Sequence: Synthetic oligonucleotide
  Sense strand starting at position 3227 of SEQ ID NO: 2893
auuuguggcuuaucuugua

SEQ ID NO: 224347 - RNA, 19 nt, Artificial Sequence
  Description of Artificial Sequence: Synthetic oligonucleotide
  Antisense strand to SEQ ID NO: 224346
uacaagauaagccacaaau

SEQ ID NO: 224348 - RNA, 19 nt, Artificial Sequence
  Description of Artificial Sequence: Synthetic oligonucleotide
  Sense strand starting at position 3606 of SEQ ID NO: 2893
acaguuugauaaucucuga

SEQ ID NO: 224349 - RNA, 19 nt, Artificial Sequence
  Description of Artificial Sequence: Synthetic oligonucleotide
  Antisense strand to SEQ ID NO: 224348
ucagagauuaucaaacugu

SEQ ID NO: 224350 - RNA, 19 nt, Artificial Sequence
  Description of Artificial Sequence: Synthetic oligonucleotide
  Sense strand starting at position 3609 of SEQ ID NO: 2893
guuugauaaucucugaaua

SEQ ID NO: 224351 - RNA, 19 nt, Artificial Sequence
  Description of Artificial Sequence: Synthetic oligonucleotide
  Antisense strand to SEQ ID NO: 224350
uauucagagauuaucaaac

SEQ ID NO: 224352 - RNA, 19 nt, Artificial Sequence
  Description of Artificial Sequence: Synthetic oligonucleotide
  Sense strand starting at position 3629 of SEQ ID NO: 2893
augaauguucuauaccagu

SEQ ID NO: 224353 - RNA, 19 nt, Artificial Sequence
  Description of Artificial Sequence: Synthetic oligonucleotide
  Antisense strand to SEQ ID NO: 224352
acugguauagaacauucau

SEQ ID NO: 224354 - RNA, 19 nt, Artificial Sequence
  Description of Artificial Sequence: Synthetic oligonucleotide
  Sense strand starting at position 3635 of SEQ ID NO: 2893
guucuauaccaguagaauu

SEQ ID NO: 224355 - RNA, 19 nt, Artificial Sequence
  Description of Artificial Sequence: Synthetic oligonucleotide
  Antisense strand to SEQ ID NO: 224354
aauucuacugguauagaac

SEQ ID NO: 224356 - RNA, 19 nt, Artificial Sequence
  Description of Artificial Sequence: Synthetic oligonucleotide
  Sense strand starting at position 3682 of SEQ ID NO: 2893
uguacuagguaucuaagaa

SEQ ID NO: 224357 - RNA, 19 nt, Artificial Sequence
  Description of Artificial Sequence: Synthetic oligonucleotide
  Antisense strand to SEQ ID NO: 224356
uucuuagauaccuaguaca

SEQ ID NO: 224358 - RNA, 19 nt, Artificial Sequence
  Description of Artificial Sequence: Synthetic oligonucleotide
  Sense strand starting at position 3735 of SEQ ID NO: 2893
gggagagcaguccaagagu

SEQ ID NO: 224359 - RNA, 19 nt, Artificial Sequence
  Description of Artificial Sequence: Synthetic oligonucleotide
  Antisense strand to SEQ ID NO: 224358
acucuuggacugcucuccc

SEQ ID NO: 224360 - RNA, 19 nt, Artificial Sequence
  Description of Artificial Sequence: Synthetic oligonucleotide
  Sense strand starting at position 3872 of SEQ ID NO: 2893
guaugaguugcuggauuuc

SEQ ID NO: 224361 - RNA, 19 nt, Artificial Sequence
  Description of Artificial Sequence: Synthetic oligonucleotide
  Antisense strand to SEQ ID NO: 224360
gaaauccagcaacucauac

SEQ ID NO: 224362 - RNA, 19 nt, Artificial Sequence
  Description of Artificial Sequence: Synthetic oligonucleotide
  Sense strand starting at position 12 of SEQ ID NO: 2891
guaugcuaaguauauaaca

SEQ ID NO: 224363 - RNA, 19 nt, Artificial Sequence
  Description of Artificial Sequence: Synthetic oligonucleotide
  Antisense strand to SEQ ID NO: 224362
uguuauauacuuagcauac

SEQ ID NO: 224364 - RNA, 19 nt, Artificial Sequence
  Description of Artificial Sequence: Synthetic oligonucleotide
  Sense strand starting at position 200 of SEQ ID NO: 2891
guauguauaccuggaugga

SEQ ID NO: 224365 - RNA, 19 nt, Artificial Sequence
  Description of Artificial Sequence: Synthetic oligonucleotide
  Antisense strand to SEQ ID NO: 224364
uccauccagguauacauac

SEQ ID NO: 224366 - RNA, 19 nt, Artificial Sequence
  Description of Artificial Sequence: Synthetic oligonucleotide
  Sense strand starting at position 349 of SEQ ID NO: 2891
gugaacucaugcuuaaaua

SEQ ID NO: 224367 - RNA, 19 nt, Artificial Sequence
  Description of Artificial Sequence: Synthetic oligonucleotide
  Antisense strand to SEQ ID NO: 224366
uauuuaagcaugaguucac

SEQ ID NO: 224368 - RNA, 19 nt, Artificial Sequence
  Description of Artificial Sequence: Synthetic oligonucleotide
  Sense strand starting at position 416 of SEQ ID NO: 2891
auacauacauggguuagua

SEQ ID NO: 224369 - RNA, 19 nt, Artificial Sequence
  Description of Artificial Sequence: Synthetic oligonucleotide
  Antisense strand to SEQ ID NO: 224368
uacuaacccauguauguau

SEQ ID NO: 224370 - RNA, 19 nt, Artificial Sequence
  Description of Artificial Sequence: Synthetic oligonucleotide
  Sense strand starting at position 425 of SEQ ID NO: 2891
uggguuaguaugcacauau

SEQ ID NO: 224371 - RNA, 19 nt, Artificial Sequence
  Description of Artificial Sequence: Synthetic oligonucleotide
  Antisense strand to SEQ ID NO: 224370
auaugugcauacuaaccca

SEQ ID NO: 224372 - RNA, 19 nt, Artificial Sequence
  Description of Artificial Sequence: Synthetic oligonucleotide
  Sense strand starting at position 470 of SEQ ID NO: 2891
gggccuagaagcgaugaau

SEQ ID NO: 224373 - RNA, 19 nt, Artificial Sequence
  Description of Artificial Sequence: Synthetic oligonucleotide
  Antisense strand to SEQ ID NO: 224372
auucaucgcuucuaggccc

SEQ ID NO: 224374 - RNA, 19 nt, Artificial Sequence
  Description of Artificial Sequence: Synthetic oligonucleotide
  Sense strand starting at position 619 of SEQ ID NO: 2891
ggagcuuaugaugguauca

SEQ ID NO: 224375 - RNA, 19 nt, Artificial Sequence
  Description of Artificial Sequence: Synthetic oligonucleotide
  Antisense strand to SEQ ID NO: 224374
ugauaccaucauaagcucc

SEQ ID NO: 224376 - RNA, 19 nt, Artificial Sequence
  Description of Artificial Sequence: Synthetic oligonucleotide
  Sense strand starting at position 665 of SEQ ID NO: 2891
aaaugauagguguaggcua

SEQ ID NO: 224377 - RNA, 19 nt, Artificial Sequence
  Description of Artificial Sequence: Synthetic oligonucleotide
  Antisense strand to SEQ ID NO: 224376
uagccuacaccuaucauuu

SEQ ID NO: 224378 - RNA, 19 nt, Artificial Sequence
  Description of Artificial Sequence: Synthetic oligonucleotide
  Sense strand starting at position 667 of SEQ ID NO: 2891
augauagguguaggcuaaa

SEQ ID NO: 224379 - RNA, 19 nt, Artificial Sequence
  Description of Artificial Sequence: Synthetic oligonucleotide
  Antisense strand to SEQ ID NO: 224378
uuuagccuacaccuaucau

SEQ ID NO: 224380 - RNA, 19 nt, Artificial Sequence
  Description of Artificial Sequence: Synthetic oligonucleotide
  Sense strand starting at position 694 of SEQ ID NO: 2891
ggagcuaagugauugaaua

SEQ ID NO: 224381 - RNA, 19 nt, Artificial Sequence
  Description of Artificial Sequence: Synthetic oligonucleotide
  Antisense strand to SEQ ID NO: 224380
uauucaaucacuuagcucc

SEQ ID NO: 224382 - RNA, 19 nt, Artificial Sequence
  Description of Artificial Sequence: Synthetic oligonucleotide
  Sense strand starting at position 695 of SEQ ID NO: 2891
gagcuaagugauugaauaa

SEQ ID NO: 224383 - RNA, 19 nt, Artificial Sequence
  Description of Artificial Sequence: Synthetic oligonucleotide
  Antisense strand to SEQ ID NO: 224382
uuauucaaucacuuagcuc

SEQ ID NO: 224384 - RNA, 19 nt, Artificial Sequence
  Description of Artificial Sequence: Synthetic oligonucleotide
  Sense strand starting at position 941 of SEQ ID NO: 2891
agccaagugagcuagguua

SEQ ID NO: 224385 - RNA, 19 nt, Artificial Sequence
  Description of Artificial Sequence: Synthetic oligonucleotide
  Antisense strand to SEQ ID NO: 224384
uaaccuagcucacuuggcu

SEQ ID NO: 224386 - RNA, 19 nt, Artificial Sequence
  Description of Artificial Sequence: Synthetic oligonucleotide
  Sense strand starting at position 955 of SEQ ID NO: 2891
gguuaacagcaucagugau

SEQ ID NO: 224387 - RNA, 19 nt, Artificial Sequence
  Description of Artificial Sequence: Synthetic oligonucleotide
  Antisense strand to SEQ ID NO: 224386
aucacugaugcuguuaacc

SEQ ID NO: 224388 - RNA, 19 nt, Artificial Sequence
  Description of Artificial Sequence: Synthetic oligonucleotide
  Sense strand starting at position 957 of SEQ ID NO: 2891
uuaacagcaucagugauaa

SEQ ID NO: 224389 - RNA, 19 nt, Artificial Sequence
  Description of Artificial Sequence: Synthetic oligonucleotide
  Antisense strand to SEQ ID NO: 224388
uuaucacugaugcuguuaa

SEQ ID NO: 224390 - RNA, 19 nt, Artificial Sequence
  Description of Artificial Sequence: Synthetic oligonucleotide
  Sense strand starting at position 989 of SEQ ID NO: 2891
cauagacccuuguuaggau

SEQ ID NO: 224391 - RNA, 19 nt, Artificial Sequence
  Description of Artificial Sequence: Synthetic oligonucleotide
  Antisense strand to SEQ ID NO: 224390
auccuaacaagggucuaug

SEQ ID NO: 224392 - RNA, 19 nt, Artificial Sequence
  Description of Artificial Sequence: Synthetic oligonucleotide
  Sense strand starting at position 1281 of SEQ ID NO: 2891
uauggaguuuaguuaauag

SEQ ID NO: 224393 - RNA, 19 nt, Artificial Sequence
  Description of Artificial Sequence: Synthetic oligonucleotide
  Antisense strand to SEQ ID NO: 224392
cuauuaacuaaacuccaua

SEQ ID NO: 224394 - RNA, 19 nt, Artificial Sequence
  Description of Artificial Sequence: Synthetic oligonucleotide
  Sense strand starting at position 1331 of SEQ ID NO: 2891
acaaauguacuauaguagu

SEQ ID NO: 224395 - RNA, 19 nt, Artificial Sequence
  Description of Artificial Sequence: Synthetic oligonucleotide
  Antisense strand to SEQ ID NO: 224394
acuacuauaguacauuugu

SEQ ID NO: 224396 - RNA, 19 nt, Artificial Sequence
  Description of Artificial Sequence: Synthetic oligonucleotide
  Sense strand starting at position 1358 of SEQ ID NO: 2891
uuagcaauagggugguaua

SEQ ID NO: 224397 - RNA, 19 nt, Artificial Sequence
  Description of Artificial Sequence: Synthetic oligonucleotide
  Antisense strand to SEQ ID NO: 224396
uauaccacccuauugcuaa

SEQ ID NO: 224398 - RNA, 19 nt, Artificial Sequence
  Description of Artificial Sequence: Synthetic oligonucleotide
  Sense strand starting at position 1359 of SEQ ID NO: 2891
uagcaauagggugguauau

SEQ ID NO: 224399 - RNA, 19 nt, Artificial Sequence
  Description of Artificial Sequence: Synthetic oligonucleotide
  Antisense strand to SEQ ID NO: 224398
auauaccacccuauugcua

SEQ ID NO: 224400 - RNA, 19 nt, Artificial Sequence
  Description of Artificial Sequence: Synthetic oligonucleotide
  Sense strand starting at position 2005 of SEQ ID NO: 2891
ucaucaaguguuuaaugca

SEQ ID NO: 224401 - RNA, 19 nt, Artificial Sequence
  Description of Artificial Sequence: Synthetic oligonucleotide
  Antisense strand to SEQ ID NO: 224400
ugcauuaaacacuugauga

SEQ ID NO: 224402 - RNA, 19 nt, Artificial Sequence
  Description of Artificial Sequence: Synthetic oligonucleotide
  Sense strand starting at position 2033 of SEQ ID NO: 2891
agaggaggcuggucuuaga

SEQ ID NO: 224403 - RNA, 19 nt, Artificial Sequence
  Description of Artificial Sequence: Synthetic oligonucleotide
  Antisense strand to SEQ ID NO: 224402
ucuaagaccagccuccucu

SEQ ID NO: 224404 - RNA, 19 nt, Artificial Sequence
  Description of Artificial Sequence: Synthetic oligonucleotide
  Sense strand starting at position 2063 of SEQ ID NO: 2891
aucauuauuggaggcaaga

SEQ ID NO: 224405 - RNA, 19 nt, Artificial Sequence
  Description of Artificial Sequence: Synthetic oligonucleotide
  Antisense strand to SEQ ID NO: 224404
ucuugccuccaauaaugau

SEQ ID NO: 224406 - RNA, 19 nt, Artificial Sequence
  Description of Artificial Sequence: Synthetic oligonucleotide
  Sense strand starting at position 2095 of SEQ ID NO: 2891
aggcuaauugguugaggga

SEQ ID NO: 224407 - RNA, 19 nt, Artificial Sequence
  Description of Artificial Sequence: Synthetic oligonucleotide
  Antisense strand to SEQ ID NO: 224406
ucccucaaccaauuagccu

SEQ ID NO: 224408 - RNA, 19 nt, Artificial Sequence
  Description of Artificial Sequence: Synthetic oligonucleotide
  Sense strand starting at position 2303 of SEQ ID NO: 2891
gaggcaagcucauuaagaa

SEQ ID NO: 224409 - RNA, 19 nt, Artificial Sequence
  Description of Artificial Sequence: Synthetic oligonucleotide
  Antisense strand to SEQ ID NO: 224408
uucuuaaugagcuugccuc

SEQ ID NO: 224410 - RNA, 19 nt, Artificial Sequence
  Description of Artificial Sequence: Synthetic oligonucleotide
  Sense strand starting at position 2524 of SEQ ID NO: 2891
cuguauuuguugccaagca

SEQ ID NO: 224411 - RNA, 19 nt, Artificial Sequence
  Description of Artificial Sequence: Synthetic oligonucleotide
  Antisense strand to SEQ ID NO: 224410
ugcuuggcaacaaauacag

SEQ ID NO: 224412 - RNA, 19 nt, Artificial Sequence
  Description of Artificial Sequence: Synthetic oligonucleotide
  Sense strand starting at position 2828 of SEQ ID NO: 2891
ggcauucugaauuagugaa

SEQ ID NO: 224413 - RNA, 19 nt, Artificial Sequence
  Description of Artificial Sequence: Synthetic oligonucleotide
  Antisense strand to SEQ ID NO: 224412
uucacuaauucagaaugcc

SEQ ID NO: 224414 - RNA, 19 nt, Artificial Sequence
  Description of Artificial Sequence: Synthetic oligonucleotide
  Sense strand starting at position 2830 of SEQ ID NO: 2891
cauucugaauuagugaaag

SEQ ID NO: 224415 - RNA, 19 nt, Artificial Sequence
  Description of Artificial Sequence: Synthetic oligonucleotide
  Antisense strand to SEQ ID NO: 224414
cuuucacuaauucagaaug

SEQ ID NO: 224416 - RNA, 19 nt, Artificial Sequence
  Description of Artificial Sequence: Synthetic oligonucleotide
  Sense strand starting at position 2840 of SEQ ID NO: 2891
uagugaaaggcucaugucu

SEQ ID NO: 224417 - RNA, 19 nt, Artificial Sequence
  Description of Artificial Sequence: Synthetic oligonucleotide
  Antisense strand to SEQ ID NO: 224416
agacaugagccuuucacua

SEQ ID NO: 224418 - RNA, 19 nt, Artificial Sequence
  Description of Artificial Sequence: Synthetic oligonucleotide
  Sense strand starting at position 2846 of SEQ ID NO: 2891
aaggcucaugucuauugaa

SEQ ID NO: 224419 - RNA, 19 nt, Artificial Sequence
  Description of Artificial Sequence: Synthetic oligonucleotide
  Antisense strand to SEQ ID NO: 224418
uucaauagacaugagccuu

SEQ ID NO: 224420 - RNA, 19 nt, Artificial Sequence
  Description of Artificial Sequence: Synthetic oligonucleotide
  Sense strand starting at position 2916 of SEQ ID NO: 2891
caaagcuuacaguagguaa

SEQ ID NO: 224421 - RNA, 19 nt, Artificial Sequence
  Description of Artificial Sequence: Synthetic oligonucleotide
  Antisense strand to SEQ ID NO: 224420
uuaccuacuguaagcuuug

SEQ ID NO: 224422 - RNA, 19 nt, Artificial Sequence
  Description of Artificial Sequence: Synthetic oligonucleotide
  Sense strand starting at position 2920 of SEQ ID NO: 2891
gcuuacaguagguaaagaa

SEQ ID NO: 224423 - RNA, 19 nt, Artificial Sequence
  Description of Artificial Sequence: Synthetic oligonucleotide
  Antisense strand to SEQ ID NO: 224422
uucuuuaccuacuguaagc

SEQ ID NO: 224424 - RNA, 19 nt, Artificial Sequence
  Description of Artificial Sequence: Synthetic oligonucleotide
  Sense strand starting at position 3059 of SEQ ID NO: 2891
ugucauccuguuuaaauug

SEQ ID NO: 224425 - RNA, 19 nt, Artificial Sequence
  Description of Artificial Sequence: Synthetic oligonucleotide
  Antisense strand to SEQ ID NO: 224424
caauuuaaacaggaugaca

SEQ ID NO: 224426 - RNA, 19 nt, Artificial Sequence
  Description of Artificial Sequence: Synthetic oligonucleotide
  Sense strand starting at position 3282 of SEQ ID NO: 2891
aggauugagcauuacuagu

SEQ ID NO: 224427 - RNA, 19 nt, Artificial Sequence
  Description of Artificial Sequence: Synthetic oligonucleotide
  Antisense strand to SEQ ID NO: 224426
acuaguaaugcucaauccu

SEQ ID NO: 224428 - RNA, 19 nt, Artificial Sequence
  Description of Artificial Sequence: Synthetic oligonucleotide
  Sense strand starting at position 3450 of SEQ ID NO: 2891
ucgguugcuauggaaugau

SEQ ID NO: 224429 - RNA, 19 nt, Artificial Sequence
  Description of Artificial Sequence: Synthetic oligonucleotide
  Antisense strand to SEQ ID NO: 224428
aucauuccauagcaaccga

SEQ ID NO: 224430 - RNA, 19 nt, Artificial Sequence
  Description of Artificial Sequence: Synthetic oligonucleotide
  Sense strand starting at position 3533 of SEQ ID NO: 2891
ugguuauaaucuguagaag

SEQ ID NO: 224431 - RNA, 19 nt, Artificial Sequence
  Description of Artificial Sequence: Synthetic oligonucleotide
  Antisense strand to SEQ ID NO: 224430
cuucuacagauuauaacca

SEQ ID NO: 224432 - RNA, 19 nt, Artificial Sequence
  Description of Artificial Sequence: Synthetic oligonucleotide
  Sense strand starting at position 3573 of SEQ ID NO: 2891
ggucuaacauaccuuggua

SEQ ID NO: 224433 - RNA, 19 nt, Artificial Sequence
  Description of Artificial Sequence: Synthetic oligonucleotide
  Antisense strand to SEQ ID NO: 224432
uaccaagguauguuagacc

SEQ ID NO: 224434 - RNA, 19 nt, Artificial Sequence
  Description of Artificial Sequence: Synthetic oligonucleotide
  Sense strand starting at position 3575 of SEQ ID NO: 2891
ucuaacauaccuugguaga

SEQ ID NO: 224435 - RNA, 19 nt, Artificial Sequence
  Description of Artificial Sequence: Synthetic oligonucleotide
  Antisense strand to SEQ ID NO: 224434
ucuaccaagguauguuaga

SEQ ID NO: 224436 - RNA, 19 nt, Artificial Sequence
  Description of Artificial Sequence: Synthetic oligonucleotide
  Sense strand starting at position 3576 of SEQ ID NO: 2891
cuaacauaccuugguagau

SEQ ID NO: 224437 - RNA, 19 nt, Artificial Sequence
  Description of Artificial Sequence: Synthetic oligonucleotide
  Antisense strand to SEQ ID NO: 224436
aucuaccaagguauguuag

SEQ ID NO: 224438 - RNA, 19 nt, Artificial Sequence
  Description of Artificial Sequence: Synthetic oligonucleotide
  Sense strand starting at position 3588 of SEQ ID NO: 2891
gguagaugguuuguaagaa

SEQ ID NO: 224439 - RNA, 19 nt, Artificial Sequence
  Description of Artificial Sequence: Synthetic oligonucleotide
  Antisense strand to SEQ ID NO: 224438
uucuuacaaaccaucuacc

SEQ ID NO: 224440 - RNA, 19 nt, Artificial Sequence
  Description of Artificial Sequence: Synthetic oligonucleotide
  Sense strand starting at position 3896 of SEQ ID NO: 2891
guggcaauaccuuacaaua

SEQ ID NO: 224441 - RNA, 19 nt, Artificial Sequence
  Description of Artificial Sequence: Synthetic oligonucleotide
  Antisense strand to SEQ ID NO: 224440
uauuguaagguauugccac

SEQ ID NO: 224442 - RNA, 19 nt, Artificial Sequence
  Description of Artificial Sequence: Synthetic oligonucleotide
  Sense strand starting at position 1 of SEQ ID NO: 2892
ccaguaauuaucuguggag

SEQ ID NO: 224443 - RNA, 19 nt, Artificial Sequence
  Description of Artificial Sequence: Synthetic oligonucleotide
  Antisense strand to SEQ ID NO: 224442
cuccacagauaauuacugg

SEQ ID NO: 224444 - RNA, 19 nt, Artificial Sequence
  Description of Artificial Sequence: Synthetic oligonucleotide
  Sense strand starting at position 3 of SEQ ID NO: 2892
aguaauuaucuguggagga

SEQ ID NO: 224445 - RNA, 19 nt, Artificial Sequence
  Description of Artificial Sequence: Synthetic oligonucleotide
  Antisense strand to SEQ ID NO: 224444
uccuccacagauaauuacu

SEQ ID NO: 224446 - RNA, 19 nt, Artificial Sequence
  Description of Artificial Sequence: Synthetic oligonucleotide
  Sense strand starting at position 197 of SEQ ID NO: 2892
ccauuagauccuggaggca

SEQ ID NO: 224447 - RNA, 19 nt, Artificial Sequence
  Description of Artificial Sequence: Synthetic oligonucleotide
  Antisense strand to SEQ ID NO: 224446
ugccuccaggaucuaaugg

SEQ ID NO: 224448 - RNA, 19 nt, Artificial Sequence
  Description of Artificial Sequence: Synthetic oligonucleotide
  Sense strand starting at position 290 of SEQ ID NO: 2892
uugcauaaucuugauguau

SEQ ID NO: 224449 - RNA, 19 nt, Artificial Sequence
  Description of Artificial Sequence: Synthetic oligonucleotide
  Antisense strand to SEQ ID NO: 224448
auacaucaagauuaugcaa

SEQ ID NO: 224450 - RNA, 19 nt, Artificial Sequence
  Description of Artificial Sequence: Synthetic oligonucleotide
  Sense strand starting at position 336 of SEQ ID NO: 2892
gcauaaagugccuacacau

SEQ ID NO: 224451 - RNA, 19 nt, Artificial Sequence
  Description of Artificial Sequence: Synthetic oligonucleotide
  Antisense strand to SEQ ID NO: 224450
auguguaggcacuuuaugc

SEQ ID NO: 224452 - RNA, 19 nt, Artificial Sequence
  Description of Artificial Sequence: Synthetic oligonucleotide
  Sense strand starting at position 565 of SEQ ID NO: 2892
uguuuaucuuaggcaauaa

SEQ ID NO: 224453 - RNA, 19 nt, Artificial Sequence
  Description of Artificial Sequence: Synthetic oligonucleotide
  Antisense strand to SEQ ID NO: 224452
uuauugccuaagauaaaca

SEQ ID NO: 224454 - RNA, 19 nt, Artificial Sequence
  Description of Artificial Sequence: Synthetic oligonucleotide
  Sense strand starting at position 631 of SEQ ID NO: 2892
uaguuugcuguugauuaau

SEQ ID NO: 224455 - RNA, 19 nt, Artificial Sequence
  Description of Artificial Sequence: Synthetic oligonucleotide
  Antisense strand to SEQ ID NO: 224454
auuaaucaacagcaaacua

SEQ ID NO: 224456 - RNA, 19 nt, Artificial Sequence
  Description of Artificial Sequence: Synthetic oligonucleotide
  Sense strand starting at position 664 of SEQ ID NO: 2892
aaggauugcucugauuuag

SEQ ID NO: 224457 - RNA, 19 nt, Artificial Sequence
  Description of Artificial Sequence: Synthetic oligonucleotide
  Antisense strand to SEQ ID NO: 224456
cuaaaucagagcaauccuu

SEQ ID NO: 224458 - RNA, 19 nt, Artificial Sequence
  Description of Artificial Sequence: Synthetic oligonucleotide
  Sense strand starting at position 717 of SEQ ID NO: 2892
ucugcaaaugcugagauua

SEQ ID NO: 224459 - RNA, 19 nt, Artificial Sequence
  Description of Artificial Sequence: Synthetic oligonucleotide
  Antisense strand to SEQ ID NO: 224458
uaaucucagcauuugcaga

SEQ ID NO: 224460 - RNA, 19 nt, Artificial Sequence
  Description of Artificial Sequence: Synthetic oligonucleotide
  Sense strand starting at position 785 of SEQ ID NO: 2892
ucaauuauucuugggugga

SEQ ID NO: 224461 - RNA, 19 nt, Artificial Sequence
  Description of Artificial Sequence: Synthetic oligonucleotide
  Antisense strand to SEQ ID NO: 224460
uccacccaagaauaauuga

SEQ ID NO: 224462 - RNA, 19 nt, Artificial Sequence
  Description of Artificial Sequence: Synthetic oligonucleotide
  Sense strand starting at position 787 of SEQ ID NO: 2892
aauuauucuuggguggauu

SEQ ID NO: 224463 - RNA, 19 nt, Artificial Sequence
  Description of Artificial Sequence: Synthetic oligonucleotide
  Antisense strand to SEQ ID NO: 224462
aauccacccaagaauaauu

SEQ ID NO: 224464 - RNA, 19 nt, Artificial Sequence
  Description of Artificial Sequence: Synthetic oligonucleotide
  Sense strand starting at position 814 of SEQ ID NO: 2892
uuuggcaugcguguuucaa

SEQ ID NO: 224465 - RNA, 19 nt, Artificial Sequence
  Description of Artificial Sequence: Synthetic oligonucleotide
  Antisense strand to SEQ ID NO: 224464
uugaaacacgcaugccaaa

SEQ ID NO: 224466 - RNA, 19 nt, Artificial Sequence
  Description of Artificial Sequence: Synthetic oligonucleotide
  Sense strand starting at position 815 of SEQ ID NO: 2892
uuggcaugcguguuucaau

SEQ ID NO: 224467 - RNA, 19 nt, Artificial Sequence
  Description of Artificial Sequence: Synthetic oligonucleotide
  Antisense strand to SEQ ID NO: 224466
auugaaacacgcaugccaa

SEQ ID NO: 224468 - RNA, 19 nt, Artificial Sequence
  Description of Artificial Sequence: Synthetic oligonucleotide
  Sense strand starting at position 863 of SEQ ID NO: 2892
uaauuagugcacuggagau

SEQ ID NO: 224469 - RNA, 19 nt, Artificial Sequence
  Description of Artificial Sequence: Synthetic oligonucleotide
  Antisense strand to SEQ ID NO: 224468
aucuccagugcacuaauua

SEQ ID NO: 224470 - RNA, 19 nt, Artificial Sequence
  Description of Artificial Sequence: Synthetic oligonucleotide
  Sense strand starting at position 879 of SEQ ID NO: 2892
gauuguaucaaagggugua

SEQ ID NO: 224471 - RNA, 19 nt, Artificial Sequence
  Description of Artificial Sequence: Synthetic oligonucleotide
  Antisense strand to SEQ ID NO: 224470
uacacccuuugauacaauc

SEQ ID NO: 224472 - RNA, 19 nt, Artificial Sequence
  Description of Artificial Sequence: Synthetic oligonucleotide
  Sense strand starting at position 882 of SEQ ID NO: 2892
uguaucaaaggguguagau

SEQ ID NO: 224473 - RNA, 19 nt, Artificial Sequence
  Description of Artificial Sequence: Synthetic oligonucleotide
  Antisense strand to SEQ ID NO: 224472
aucuacacccuuugauaca

SEQ ID NO: 224474 - RNA, 19 nt, Artificial Sequence
  Description of Artificial Sequence: Synthetic oligonucleotide
  Sense strand starting at position 889 of SEQ ID NO: 2892
aaggguguagauugacuau

SEQ ID NO: 224475 - RNA, 19 nt, Artificial Sequence
  Description of Artificial Sequence: Synthetic oligonucleotide
  Antisense strand to SEQ ID NO: 224474
auagucaaucuacacccuu

SEQ ID NO: 224476 - RNA, 19 nt, Artificial Sequence
  Description of Artificial Sequence: Synthetic oligonucleotide
  Sense strand starting at position 892 of SEQ ID NO: 2892
gguguagauugacuauaca

SEQ ID NO: 224477 - RNA, 19 nt, Artificial Sequence
  Description of Artificial Sequence: Synthetic oligonucleotide
  Antisense strand to SEQ ID NO: 224476
uguauagucaaucuacacc

SEQ ID NO: 224478 - RNA, 19 nt, Artificial Sequence
  Description of Artificial Sequence: Synthetic oligonucleotide
  Sense strand starting at position 1283 of SEQ ID NO: 2892
guuguccaucuggaugauu

SEQ ID NO: 224479 - RNA, 19 nt, Artificial Sequence
  Description of Artificial Sequence: Synthetic oligonucleotide
  Antisense strand to SEQ ID NO: 224478
aaucauccagauggacaac

SEQ ID NO: 224480 - RNA, 19 nt, Artificial Sequence
  Description of Artificial Sequence: Synthetic oligonucleotide
  Sense strand starting at position 1285 of SEQ ID NO: 2892
uguccaucuggaugauuac

SEQ ID NO: 224481 - RNA, 19 nt, Artificial Sequence
  Description of Artificial Sequence: Synthetic oligonucleotide
  Antisense strand to SEQ ID NO: 224480
guaaucauccagauggaca

SEQ ID NO: 224482 - RNA, 19 nt, Artificial Sequence
  Description of Artificial Sequence: Synthetic oligonucleotide
  Sense strand starting at position 1417 of SEQ ID NO: 2892
aacucuaugaguggguuga

SEQ ID NO: 224483 - RNA, 19 nt, Artificial Sequence
  Description of Artificial Sequence: Synthetic oligonucleotide
  Antisense strand to SEQ ID NO: 224482
ucaacccacucauagaguu

SEQ ID NO: 224484 - RNA, 19 nt, Artificial Sequence
  Description of Artificial Sequence: Synthetic oligonucleotide
  Sense strand starting at position 1418 of SEQ ID NO: 2892
acucuaugaguggguugaa

SEQ ID NO: 224485 - RNA, 19 nt, Artificial Sequence
  Description of Artificial Sequence: Synthetic oligonucleotide
  Antisense strand to SEQ ID NO: 224484
uucaacccacucauagagu

SEQ ID NO: 224486 - RNA, 19 nt, Artificial Sequence
  Description of Artificial Sequence: Synthetic oligonucleotide
  Sense strand starting at position 1419 of SEQ ID NO: 2892
cucuaugaguggguugaau

SEQ ID NO: 224487 - RNA, 19 nt, Artificial Sequence
  Description of Artificial Sequence: Synthetic oligonucleotide
  Antisense strand to SEQ ID NO: 224486
auucaacccacucauagag

SEQ ID NO: 224488 - RNA, 19 nt, Artificial Sequence
  Description of Artificial Sequence: Synthetic oligonucleotide
  Sense strand starting at position 1421 of SEQ ID NO: 2892
cuaugaguggguugaauug

SEQ ID NO: 224489 - RNA, 19 nt, Artificial Sequence
  Description of Artificial Sequence: Synthetic oligonucleotide
  Antisense strand to SEQ ID NO: 224488
caauucaacccacucauag

SEQ ID NO: 224490 - RNA, 19 nt, Artificial Sequence
  Description of Artificial Sequence: Synthetic oligonucleotide
  Sense strand starting at position 1445 of SEQ ID NO: 2892
uggauagacuuauaaagga

SEQ ID NO: 224491 - RNA, 19 nt, Artificial Sequence
  Description of Artificial Sequence: Synthetic oligonucleotide
  Antisense strand to SEQ ID NO: 224490
uccuuuauaagucuaucca

SEQ ID NO: 224492 - RNA, 19 nt, Artificial Sequence
  Description of Artificial Sequence: Synthetic oligonucleotide
  Sense strand starting at position 1461 of SEQ ID NO: 2892
ggaaacuagugagcucaaa

SEQ ID NO: 224493 - RNA, 19 nt, Artificial Sequence
  Description of Artificial Sequence: Synthetic oligonucleotide
  Antisense strand to SEQ ID NO: 224492
uuugagcucacuaguuucc

SEQ ID NO: 224494 - RNA, 19 nt, Artificial Sequence
  Description of Artificial Sequence: Synthetic oligonucleotide
  Sense strand starting at position 1511 of SEQ ID NO: 2892
auguuacagaguuaugugu

SEQ ID NO: 224495 - RNA, 19 nt, Artificial Sequence
  Description of Artificial Sequence: Synthetic oligonucleotide
  Antisense strand to SEQ ID NO: 224494
acacauaacucuguaacau

SEQ ID NO: 224496 - RNA, 19 nt, Artificial Sequence
  Description of Artificial Sequence: Synthetic oligonucleotide
  Sense strand starting at position 1517 of SEQ ID NO: 2892
cagaguuauguguaaugau

SEQ ID NO: 224497 - RNA, 19 nt, Artificial Sequence
  Description of Artificial Sequence: Synthetic oligonucleotide
  Antisense strand to SEQ ID NO: 224496
aucauuacacauaacucug

SEQ ID NO: 224498 - RNA, 19 nt, Artificial Sequence
  Description of Artificial Sequence: Synthetic oligonucleotide
  Sense strand starting at position 1527 of SEQ ID NO: 2892
uguaaugauccaggaauau

SEQ ID NO: 224499 - RNA, 19 nt, Artificial Sequence
  Description of Artificial Sequence: Synthetic oligonucleotide
  Antisense strand to SEQ ID NO: 224498
auauuccuggaucauuaca

SEQ ID NO: 224500 - RNA, 19 nt, Artificial Sequence
  Description of Artificial Sequence: Synthetic oligonucleotide
  Sense strand starting at position 1705 of SEQ ID NO: 2892
uaaauauaugugggcaacu

SEQ ID NO: 224501 - RNA, 19 nt, Artificial Sequence
  Description of Artificial Sequence: Synthetic oligonucleotide
  Antisense strand to SEQ ID NO: 224500
aguugcccacauauauuua

SEQ ID NO: 224502 - RNA, 19 nt, Artificial Sequence
  Description of Artificial Sequence: Synthetic oligonucleotide
  Sense strand starting at position 1706 of SEQ ID NO: 2892
aaauauaugugggcaacua

SEQ ID NO: 224503 - RNA, 19 nt, Artificial Sequence
  Description of Artificial Sequence: Synthetic oligonucleotide
  Antisense strand to SEQ ID NO: 224502
uaguugcccacauauauuu

SEQ ID NO: 224504 - RNA, 19 nt, Artificial Sequence
  Description of Artificial Sequence: Synthetic oligonucleotide
  Sense strand starting at position 1707 of SEQ ID NO: 2892
aauauaugugggcaacuau

SEQ ID NO: 224505 - RNA, 19 nt, Artificial Sequence
  Description of Artificial Sequence: Synthetic oligonucleotide
  Antisense strand to SEQ ID NO: 224504
auaguugcccacauauauu

SEQ ID NO: 224506 - RNA, 19 nt, Artificial Sequence
  Description of Artificial Sequence: Synthetic oligonucleotide
  Sense strand starting at position 1722 of SEQ ID NO: 2892
cuauuaggccuaugaugaa

SEQ ID NO: 224507 - RNA, 19 nt, Artificial Sequence
  Description of Artificial Sequence: Synthetic oligonucleotide
  Antisense strand to SEQ ID NO: 224506
uucaucauaggccuaauag

SEQ ID NO: 224508 - RNA, 19 nt, Artificial Sequence
  Description of Artificial Sequence: Synthetic oligonucleotide
  Sense strand starting at position 2052 of SEQ ID NO: 2892
caaagaaucuacgucagug

SEQ ID NO: 224509 - RNA, 19 nt, Artificial Sequence
  Description of Artificial Sequence: Synthetic oligonucleotide
  Antisense strand to SEQ ID NO: 224508
cacugacguagauucuuug

SEQ ID NO: 224510 - RNA, 19 nt, Artificial Sequence
  Description of Artificial Sequence: Synthetic oligonucleotide
  Sense strand starting at position 2209 of SEQ ID NO: 2892
gguucugagccacagucau

SEQ ID NO: 224511 - RNA, 19 nt, Artificial Sequence
  Description of Artificial Sequence: Synthetic oligonucleotide
  Antisense strand to SEQ ID NO: 224510
augacuguggcucagaacc

SEQ ID NO: 224512 - RNA, 19 nt, Artificial Sequence
  Description of Artificial Sequence: Synthetic oligonucleotide
  Sense strand starting at position 2255 of SEQ ID NO: 2892
ggucaaacaucugcuuuac

SEQ ID NO: 224513 - RNA, 19 nt, Artificial Sequence
  Description of Artificial Sequence: Synthetic oligonucleotide
  Antisense strand to SEQ ID NO: 224512
guaaagcagauguuugacc

SEQ ID NO: 224514 - RNA, 19 nt, Artificial Sequence
  Description of Artificial Sequence: Synthetic oligonucleotide
  Sense strand starting at position 2347 of SEQ ID NO: 2892
acuacuucucccugggauc

SEQ ID NO: 224515 - RNA, 19 nt, Artificial Sequence
  Description of Artificial Sequence: Synthetic oligonucleotide
  Antisense strand to SEQ ID NO: 224514
gaucccagggagaaguagu

SEQ ID NO: 224516 - RNA, 19 nt, Artificial Sequence
  Description of Artificial Sequence: Synthetic oligonucleotide
  Sense strand starting at position 2348 of SEQ ID NO: 2892
cuacuucucccugggauca

SEQ ID NO: 224517 - RNA, 19 nt, Artificial Sequence
  Description of Artificial Sequence: Synthetic oligonucleotide
  Antisense strand to SEQ ID NO: 224516
ugaucccagggagaaguag

SEQ ID NO: 224518 - RNA, 19 nt, Artificial Sequence
  Description of Artificial Sequence: Synthetic oligonucleotide
  Sense strand starting at position 2688 of SEQ ID NO: 2892
ugugaaacccauuguaaua

SEQ ID NO: 224519 - RNA, 19 nt, Artificial Sequence
  Description of Artificial Sequence: Synthetic oligonucleotide
  Antisense strand to SEQ ID NO: 224518
uauuacaauggguuucaca

SEQ ID NO: 224520 - RNA, 19 nt, Artificial Sequence
  Description of Artificial Sequence: Synthetic oligonucleotide
  Sense strand starting at position 3313 of SEQ ID NO: 2892
cuaucaucagucugaacag

SEQ ID NO: 224521 - RNA, 19 nt, Artificial Sequence
  Description of Artificial Sequence: Synthetic oligonucleotide
  Antisense strand to SEQ ID NO: 224520
cuguucagacugaugauag

SEQ ID NO: 224522 - RNA, 19 nt, Artificial Sequence
  Description of Artificial Sequence: Synthetic oligonucleotide
  Sense strand starting at position 164 of SEQ ID NO: 2890
acagguuagugagcaaaga

SEQ ID NO: 224523 - RNA, 19 nt, Artificial Sequence
  Description of Artificial Sequence: Synthetic oligonucleotide
  Antisense strand to SEQ ID NO: 224522
ucuuugcucacuaaccugu

SEQ ID NO: 224524 - RNA, 19 nt, Artificial Sequence
  Description of Artificial Sequence: Synthetic oligonucleotide
  Sense strand starting at position 165 of SEQ ID NO: 2890
cagguuagugagcaaagau

SEQ ID NO: 224525 - RNA, 19 nt, Artificial Sequence
  Description of Artificial Sequence: Synthetic oligonucleotide
  Antisense strand to SEQ ID NO: 224524
aucuuugcucacuaaccug

SEQ ID NO: 224526 - RNA, 19 nt, Artificial Sequence
  Description of Artificial Sequence: Synthetic oligonucleotide
  Sense strand starting at position 192 of SEQ ID NO: 2890
gggacucucaccuggcuaa

SEQ ID NO: 224527 - RNA, 19 nt, Artificial Sequence
  Description of Artificial Sequence: Synthetic oligonucleotide
  Antisense strand to SEQ ID NO: 224526
uuagccaggugagaguccc

SEQ ID NO: 224528 - RNA, 19 nt, Artificial Sequence
  Description of Artificial Sequence: Synthetic oligonucleotide
  Sense strand starting at position 193 of SEQ ID NO: 2890
ggacucucaccuggcuaau

SEQ ID NO: 224529 - RNA, 19 nt, Artificial Sequence
  Description of Artificial Sequence: Synthetic oligonucleotide
  Antisense strand to SEQ ID NO: 224528
auuagccaggugagagucc

SEQ ID NO: 224530 - RNA, 19 nt, Artificial Sequence
  Description of Artificial Sequence: Synthetic oligonucleotide
  Sense strand starting at position 226 of SEQ ID NO: 2890
gcaucauucccagagcagu

SEQ ID NO: 224531 - RNA, 19 nt, Artificial Sequence
  Description of Artificial Sequence: Synthetic oligonucleotide
  Antisense strand to SEQ ID NO: 224530
acugcucugggaaugaugc

SEQ ID NO: 224532 - RNA, 19 nt, Artificial Sequence
  Description of Artificial Sequence: Synthetic oligonucleotide
  Sense strand starting at position 279 of SEQ ID NO: 2890
ggcugucagccugaaagag

SEQ ID NO: 224533 - RNA, 19 nt, Artificial Sequence
  Description of Artificial Sequence: Synthetic oligonucleotide
  Antisense strand to SEQ ID NO: 224532
cucuuucaggcugacagcc

SEQ ID NO: 224534 - RNA, 19 nt, Artificial Sequence
  Description of Artificial Sequence: Synthetic oligonucleotide
  Sense strand starting at position 452 of SEQ ID NO: 2890
caaacaggaucguuuaaga

SEQ ID NO: 224535 - RNA, 19 nt, Artificial Sequence
  Description of Artificial Sequence: Synthetic oligonucleotide
  Antisense strand to SEQ ID NO: 224534
ucuuaaacgauccuguuug

SEQ ID NO: 224536 - RNA, 19 nt, Artificial Sequence
  Description of Artificial Sequence: Synthetic oligonucleotide
  Sense strand starting at position 523 of SEQ ID NO: 2890
cgagaagggagcuguaagu

SEQ ID NO: 224537 - RNA, 19 nt, Artificial Sequence
  Description of Artificial Sequence: Synthetic oligonucleotide
  Antisense strand to SEQ ID NO: 224536
acuuacagcucccuucucg

SEQ ID NO: 224538 - RNA, 19 nt, Artificial Sequence
  Description of Artificial Sequence: Synthetic oligonucleotide
  Sense strand starting at position 532 of SEQ ID NO: 2890
agcuguaagucauugagua

SEQ ID NO: 224539 - RNA, 19 nt, Artificial Sequence
  Description of Artificial Sequence: Synthetic oligonucleotide
  Antisense strand to SEQ ID NO: 224538
uacucaaugacuuacagcu

SEQ ID NO: 224540 - RNA, 19 nt, Artificial Sequence
  Description of Artificial Sequence: Synthetic oligonucleotide
  Sense strand starting at position 564 of SEQ ID NO: 2890
gugugaaacacaugugaga

SEQ ID NO: 224541 - RNA, 19 nt, Artificial Sequence
  Description of Artificial Sequence: Synthetic oligonucleotide
  Antisense strand to SEQ ID NO: 224540
ucucacauguguuucacac

SEQ ID NO: 224542 - RNA, 19 nt, Artificial Sequence
  Description of Artificial Sequence: Synthetic oligonucleotide
  Sense strand starting at position 632 of SEQ ID NO: 2890
gaugaccaagucugcaaua

SEQ ID NO: 224543 - RNA, 19 nt, Artificial Sequence
  Description of Artificial Sequence: Synthetic oligonucleotide
  Antisense strand to SEQ ID NO: 224542
uauugcagacuuggucauc

SEQ ID NO: 224544 - RNA, 19 nt, Artificial Sequence
  Description of Artificial Sequence: Synthetic oligonucleotide
  Sense strand starting at position 633 of SEQ ID NO: 2890
augaccaagucugcaauau

SEQ ID NO: 224545 - RNA, 19 nt, Artificial Sequence
  Description of Artificial Sequence: Synthetic oligonucleotide
  Antisense strand to SEQ ID NO: 224544
auauugcagacuuggucau

SEQ ID NO: 224546 - RNA, 19 nt, Artificial Sequence
  Description of Artificial Sequence: Synthetic oligonucleotide
  Sense strand starting at position 634 of SEQ ID NO: 2890
ugaccaagucugcaauauu

SEQ ID NO: 224547 - RNA, 19 nt, Artificial Sequence
  Description of Artificial Sequence: Synthetic oligonucleotide
  Antisense strand to SEQ ID NO: 224546
aauauugcagacuugguca

SEQ ID NO: 224548 - RNA, 19 nt, Artificial Sequence
  Description of Artificial Sequence: Synthetic oligonucleotide
  Sense strand starting at position 848 of SEQ ID NO: 2890
gcgcacuccgaacaaagau

SEQ ID NO: 224549 - RNA, 19 nt, Artificial Sequence
  Description of Artificial Sequence: Synthetic oligonucleotide
  Antisense strand to SEQ ID NO: 224548
aucuuuguucggagugcgc

SEQ ID NO: 224550 - RNA, 19 nt, Artificial Sequence
  Description of Artificial Sequence: Synthetic oligonucleotide
  Sense strand starting at position 910 of SEQ ID NO: 2890
guuaaucccugaccuaagu

SEQ ID NO: 224551 - RNA, 19 nt, Artificial Sequence
  Description of Artificial Sequence: Synthetic oligonucleotide
  Antisense strand to SEQ ID NO: 224550
acuuaggucagggauuaac

SEQ ID NO: 224552 - RNA, 19 nt, Artificial Sequence
  Description of Artificial Sequence: Synthetic oligonucleotide
  Sense strand starting at position 945 of SEQ ID NO: 2890
ggaguuccuaauugaugca

SEQ ID NO: 224553 - RNA, 19 nt, Artificial Sequence
  Description of Artificial Sequence: Synthetic oligonucleotide
  Antisense strand to SEQ ID NO: 224552
ugcaucaauuaggaacucc

SEQ ID NO: 224554 - RNA, 19 nt, Artificial Sequence
  Description of Artificial Sequence: Synthetic oligonucleotide
  Sense strand starting at position 1140 of SEQ ID NO: 2890
gcuacagauuucuaaagac

SEQ ID NO: 224555 - RNA, 19 nt, Artificial Sequence
  Description of Artificial Sequence: Synthetic oligonucleotide
  Antisense strand to SEQ ID NO: 224554
gucuuuagaaaucuguagc

SEQ ID NO: 224556 - RNA, 19 nt, Artificial Sequence
  Description of Artificial Sequence: Synthetic oligonucleotide
  Sense strand starting at position 1351 of SEQ ID NO: 2890
uacggaugucugggacacu

SEQ ID NO: 224557 - RNA, 19 nt, Artificial Sequence
  Description of Artificial Sequence: Synthetic oligonucleotide
  Antisense strand to SEQ ID NO: 224556
agugucccagacauccgua

SEQ ID NO: 224558 - RNA, 19 nt, Artificial Sequence
  Description of Artificial Sequence: Synthetic oligonucleotide
  Sense strand starting at position 1550 of SEQ ID NO: 2890
uuucuucagcgugcguuaa

SEQ ID NO: 224559 - RNA, 19 nt, Artificial Sequence
  Description of Artificial Sequence: Synthetic oligonucleotide
  Antisense strand to SEQ ID NO: 224558
uuaacgcacgcugaagaaa

SEQ ID NO: 224560 - RNA, 19 nt, Artificial Sequence
  Description of Artificial Sequence: Synthetic oligonucleotide
  Sense strand starting at position 2761 of SEQ ID NO: 2890
guagcugcgccuuccgaau

SEQ ID NO: 224561 - RNA, 19 nt, Artificial Sequence
  Description of Artificial Sequence: Synthetic oligonucleotide
  Antisense strand to SEQ ID NO: 224560
auucggaaggcgcagcuac

SEQ ID NO: 224562 - RNA, 19 nt, Artificial Sequence
  Description of Artificial Sequence: Synthetic oligonucleotide
  Sense strand starting at position 2824 of SEQ ID NO: 2890
acuccuaaaggucgguuaa

SEQ ID NO: 224563 - RNA, 19 nt, Artificial Sequence
  Description of Artificial Sequence: Synthetic oligonucleotide
  Antisense strand to SEQ ID NO: 224562
uuaaccgaccuuuaggagu

SEQ ID NO: 224564 - RNA, 19 nt, Artificial Sequence
  Description of Artificial Sequence: Synthetic oligonucleotide
  Sense strand starting at position 2825 of SEQ ID NO: 2890
cuccuaaaggucgguuaaa

SEQ ID NO: 224565 - RNA, 19 nt, Artificial Sequence
  Description of Artificial Sequence: Synthetic oligonucleotide
  Antisense strand to SEQ ID NO: 224564
uuuaaccgaccuuuaggag

SEQ ID NO: 224566 - RNA, 19 nt, Artificial Sequence
  Description of Artificial Sequence: Synthetic oligonucleotide
  Sense strand starting at position 2907 of SEQ ID NO: 2890
ccuggacacguguaggaaa

SEQ ID NO: 224567 - RNA, 19 nt, Artificial Sequence
  Description of Artificial Sequence: Synthetic oligonucleotide
  Antisense strand to SEQ ID NO: 224566
uuuccuacacguguccagg

SEQ ID NO: 224568 - RNA, 19 nt, Artificial Sequence
  Description of Artificial Sequence: Synthetic oligonucleotide
  Sense strand starting at position 3176 of SEQ ID NO: 2890
uugaauuaccgcggauaga

SEQ ID NO: 224569 - RNA, 19 nt, Artificial Sequence
  Description of Artificial Sequence: Synthetic oligonucleotide
  Antisense strand to SEQ ID NO: 224568
ucuauccgcgguaauucaa

SEQ ID NO: 224570 - RNA, 19 nt, Artificial Sequence
  Description of Artificial Sequence: Synthetic oligonucleotide
  Sense strand starting at position 3177 of SEQ ID NO: 2890
ugaauuaccgcggauagac

SEQ ID NO: 224571 - RNA, 19 nt, Artificial Sequence
  Description of Artificial Sequence: Synthetic oligonucleotide
  Antisense strand to SEQ ID NO: 224570
gucuauccgcgguaauuca

SEQ ID NO: 224572 - RNA, 19 nt, Artificial Sequence
  Description of Artificial Sequence: Synthetic oligonucleotide
  Sense strand starting at position 3299 of SEQ ID NO: 2890
gaagauugcuuaccggaga

SEQ ID NO: 224573 - RNA, 19 nt, Artificial Sequence
  Description of Artificial Sequence: Synthetic oligonucleotide
  Antisense strand to SEQ ID NO: 224572
ucuccgguaagcaaucuuc

SEQ ID NO: 224574 - RNA, 19 nt, Artificial Sequence
  Description of Artificial Sequence: Synthetic oligonucleotide
  Sense strand starting at position 3302 of SEQ ID NO: 2890
gauugcuuaccggagaaau

SEQ ID NO: 224575 - RNA, 19 nt, Artificial Sequence
  Description of Artificial Sequence: Synthetic oligonucleotide
  Antisense strand to SEQ ID NO: 224574
auuucuccgguaagcaauc

SEQ ID NO: 224576 - RNA, 19 nt, Artificial Sequence
  Description of Artificial Sequence: Synthetic oligonucleotide
  Sense strand starting at position 3322 of SEQ ID NO: 2890
gcaggagugaguugaauau

SEQ ID NO: 224577 - RNA, 19 nt, Artificial Sequence
  Description of Artificial Sequence: Synthetic oligonucleotide
  Antisense strand to SEQ ID NO: 224576
auauucaacucacuccugc

SEQ ID NO: 224578 - RNA, 19 nt, Artificial Sequence
  Description of Artificial Sequence: Synthetic oligonucleotide
  Sense strand starting at position 3420 of SEQ ID NO: 2890
gggcuuuauuggcuaagga

SEQ ID NO: 224579 - RNA, 19 nt, Artificial Sequence
  Description of Artificial Sequence: Synthetic oligonucleotide
  Antisense strand to SEQ ID NO: 224578
uccuuagccaauaaagccc

SEQ ID NO: 224580 - RNA, 19 nt, Artificial Sequence
  Description of Artificial Sequence: Synthetic oligonucleotide
  Sense strand starting at position 3421 of SEQ ID NO: 2890
ggcuuuauuggcuaaggac

SEQ ID NO: 224581 - RNA, 19 nt, Artificial Sequence
  Description of Artificial Sequence: Synthetic oligonucleotide
  Antisense strand to SEQ ID NO: 224580
guccuuagccaauaaagcc

SEQ ID NO: 224582 - RNA, 19 nt, Artificial Sequence
  Description of Artificial Sequence: Synthetic oligonucleotide
  Sense strand starting at position 3476 of SEQ ID NO: 2890
gucacuucuuaacugaaag

SEQ ID NO: 224583 - RNA, 19 nt, Artificial Sequence
  Description of Artificial Sequence: Synthetic oligonucleotide
  Antisense strand to SEQ ID NO: 224582
cuuucaguuaagaagugac

SEQ ID NO: 224584 - RNA, 19 nt, Artificial Sequence
  Description of Artificial Sequence: Synthetic oligonucleotide
  Sense strand starting at position 3581 of SEQ ID NO: 2890
cgauacuuccuauaaagua

SEQ ID NO: 224585 - RNA, 19 nt, Artificial Sequence
  Description of Artificial Sequence: Synthetic oligonucleotide
  Antisense strand to SEQ ID NO: 224584
uacuuuauaggaaguaucg

SEQ ID NO: 224586 - RNA, 19 nt, Artificial Sequence
  Description of Artificial Sequence: Synthetic oligonucleotide
  Sense strand starting at position 3619 of SEQ ID NO: 2890
aucaguaaucaccagcaga

SEQ ID NO: 224587 - RNA, 19 nt, Artificial Sequence
  Description of Artificial Sequence: Synthetic oligonucleotide
  Antisense strand to SEQ ID NO: 224586
ucugcuggugauuacugau

SEQ ID NO: 224588 - RNA, 19 nt, Artificial Sequence
  Description of Artificial Sequence: Synthetic oligonucleotide
  Sense strand starting at position 3640 of SEQ ID NO: 2890
gauagaauuagaggugagu

SEQ ID NO: 224589 - RNA, 19 nt, Artificial Sequence
  Description of Artificial Sequence: Synthetic oligonucleotide
  Antisense strand to SEQ ID NO: 224588
acucaccucuaauucuauc

SEQ ID NO: 224590 - RNA, 19 nt, Artificial Sequence
  Description of Artificial Sequence: Synthetic oligonucleotide
  Sense strand starting at position 3649 of SEQ ID NO: 2890
agaggugaguggagaucuu

SEQ ID NO: 224591 - RNA, 19 nt, Artificial Sequence
  Description of Artificial Sequence: Synthetic oligonucleotide
  Antisense strand to SEQ ID NO: 224590
aagaucuccacucaccucu

SEQ ID NO: 224592 - RNA, 19 nt, Artificial Sequence
  Description of Artificial Sequence: Synthetic oligonucleotide
  Sense strand starting at position 3745 of SEQ ID NO: 2890
aggaauaacuuugcaaguu

SEQ ID NO: 224593 - RNA, 19 nt, Artificial Sequence
  Description of Artificial Sequence: Synthetic oligonucleotide
  Antisense strand to SEQ ID NO: 224592
aacuugcaaaguuauuccu

SEQ ID NO: 224594 - RNA, 19 nt, Artificial Sequence
  Description of Artificial Sequence: Synthetic oligonucleotide
  Sense strand starting at position 3796 of SEQ ID NO: 2890
gaaacauuaguguaauagc

SEQ ID NO: 224595 - RNA, 19 nt, Artificial Sequence
  Description of Artificial Sequence: Synthetic oligonucleotide
  Antisense strand to SEQ ID NO: 224594
gcuauuacacuaauguuuc

SEQ ID NO: 224596 - RNA, 19 nt, Artificial Sequence
  Description of Artificial Sequence: Synthetic oligonucleotide
  Sense strand starting at position 3925 of SEQ ID NO: 2890
ugcucuucuguugauuauu

SEQ ID NO: 224597 - RNA, 19 nt, Artificial Sequence
  Description of Artificial Sequence: Synthetic oligonucleotide
  Antisense strand to SEQ ID NO: 224596
aauaaucaacagaagagca

SEQ ID NO: 224598 - RNA, 19 nt, Artificial Sequence
  Description of Artificial Sequence: Synthetic oligonucleotide
  Sense strand starting at position 3979 of SEQ ID NO: 2890
ggacaaucugcuugaguug

SEQ ID NO: 224599 - RNA, 19 nt, Artificial Sequence
  Description of Artificial Sequence: Synthetic oligonucleotide
  Antisense strand to SEQ ID NO: 224598
caacucaagcagauugucc

SEQ ID NO: 224600 - RNA, 19 nt, Artificial Sequence
  Description of Artificial Sequence: Synthetic oligonucleotide
  Sense strand starting at position 3980 of SEQ ID NO: 2890
gacaaucugcuugaguuga

SEQ ID NO: 224601 - RNA, 19 nt, Artificial Sequence
  Description of Artificial Sequence: Synthetic oligonucleotide
  Antisense strand to SEQ ID NO: 224600
ucaacucaagcagauuguc

SEQ ID NO: 224602 - RNA, 19 nt, Artificial Sequence
  Description of Artificial Sequence: Synthetic oligonucleotide
  Sense strand starting at position 58 of SEQ ID NO: 2889
acaagaguucugcaaagua

SEQ ID NO: 224603 - RNA, 19 nt, Artificial Sequence
  Description of Artificial Sequence: Synthetic oligonucleotide
  Antisense strand to SEQ ID NO: 224602
uacuuugcagaacucuugu

SEQ ID NO: 224604 - RNA, 19 nt, Artificial Sequence
  Description of Artificial Sequence: Synthetic oligonucleotide
  Sense strand starting at position 73 of SEQ ID NO: 2889
aguagccacucccugaaua

SEQ ID NO: 224605 - RNA, 19 nt, Artificial Sequence
  Description of Artificial Sequence: Synthetic oligonucleotide
  Antisense strand to SEQ ID NO: 224604
uauucagggaguggcuacu

SEQ ID NO: 224606 - RNA, 19 nt, Artificial Sequence
  Description of Artificial Sequence: Synthetic oligonucleotide
  Sense strand starting at position 74 of SEQ ID NO: 2889
guagccacucccugaauau

SEQ ID NO: 224607 - RNA, 19 nt, Artificial Sequence
  Description of Artificial Sequence: Synthetic oligonucleotide
  Antisense strand to SEQ ID NO: 224606
auauucagggaguggcuac

SEQ ID NO: 224608 - RNA, 19 nt, Artificial Sequence
  Description of Artificial Sequence: Synthetic oligonucleotide
  Sense strand starting at position 335 of SEQ ID NO: 2889
acagguuagugagcaaaga

SEQ ID NO: 224609 - RNA, 19 nt, Artificial Sequence
  Description of Artificial Sequence: Synthetic oligonucleotide
  Antisense strand to SEQ ID NO: 224608
ucuuugcucacuaaccugu

SEQ ID NO: 224610 - RNA, 19 nt, Artificial Sequence
  Description of Artificial Sequence: Synthetic oligonucleotide
  Sense strand starting at position 336 of SEQ ID NO: 2889
cagguuagugagcaaagau

SEQ ID NO: 224611 - RNA, 19 nt, Artificial Sequence
  Description of Artificial Sequence: Synthetic oligonucleotide
  Antisense strand to SEQ ID NO: 224610
aucuuugcucacuaaccug

SEQ ID NO: 224612 - RNA, 19 nt, Artificial Sequence
  Description of Artificial Sequence: Synthetic oligonucleotide
  Sense strand starting at position 363 of SEQ ID NO: 2889
gggacucucaccuggcuaa

SEQ ID NO: 224613 - RNA, 19 nt, Artificial Sequence
  Description of Artificial Sequence: Synthetic oligonucleotide
  Antisense strand to SEQ ID NO: 224612
uuagccaggugagaguccc

SEQ ID NO: 224614 - RNA, 19 nt, Artificial Sequence
  Description of Artificial Sequence: Synthetic oligonucleotide
  Sense strand starting at position 364 of SEQ ID NO: 2889
ggacucucaccuggcuaau

SEQ ID NO: 224615 - RNA, 19 nt, Artificial Sequence
  Description of Artificial Sequence: Synthetic oligonucleotide
  Antisense strand to SEQ ID NO: 224614
auuagccaggugagagucc

SEQ ID NO: 224616 - RNA, 19 nt, Artificial Sequence
  Description of Artificial Sequence: Synthetic oligonucleotide
  Sense strand starting at position 397 of SEQ ID NO: 2889
gcaucauucccagagcagu

SEQ ID NO: 224617 - RNA, 19 nt, Artificial Sequence
  Description of Artificial Sequence: Synthetic oligonucleotide
  Antisense strand to SEQ ID NO: 224616
acugcucugggaaugaugc

SEQ ID NO: 224618 - RNA, 19 nt, Artificial Sequence
  Description of Artificial Sequence: Synthetic oligonucleotide
  Sense strand starting at position 450 of SEQ ID NO: 2889
ggcugucagccugaaagag

SEQ ID NO: 224619 - RNA, 19 nt, Artificial Sequence
  Description of Artificial Sequence: Synthetic oligonucleotide
  Antisense strand to SEQ ID NO: 224618
cucuuucaggcugacagcc

SEQ ID NO: 224620 - RNA, 19 nt, Artificial Sequence
  Description of Artificial Sequence: Synthetic oligonucleotide
  Sense strand starting at position 623 of SEQ ID NO: 2889
caaacaggaucguuuaaga

SEQ ID NO: 224621 - RNA, 19 nt, Artificial Sequence
  Description of Artificial Sequence: Synthetic oligonucleotide
  Antisense strand to SEQ ID NO: 224620
ucuuaaacgauccuguuug

SEQ ID NO: 224622 - RNA, 19 nt, Artificial Sequence
  Description of Artificial Sequence: Synthetic oligonucleotide
  Sense strand starting at position 694 of SEQ ID NO: 2889
cgagaagggagcuguaagu

SEQ ID NO: 224623 - RNA, 19 nt, Artificial Sequence
  Description of Artificial Sequence: Synthetic oligonucleotide
  Antisense strand to SEQ ID NO: 224622
acuuacagcucccuucucg

SEQ ID NO: 224624 - RNA, 19 nt, Artificial Sequence
  Description of Artificial Sequence: Synthetic oligonucleotide
  Sense strand starting at position 703 of SEQ ID NO: 2889
agcuguaagucauugagua

SEQ ID NO: 224625 - RNA, 19 nt, Artificial Sequence
  Description of Artificial Sequence: Synthetic oligonucleotide
  Antisense strand to SEQ ID NO: 224624
uacucaaugacuuacagcu

SEQ ID NO: 224626 - RNA, 19 nt, Artificial Sequence
  Description of Artificial Sequence: Synthetic oligonucleotide
  Sense strand starting at position 735 of SEQ ID NO: 2889
gugugaaacacaugugaga

SEQ ID NO: 224627 - RNA, 19 nt, Artificial Sequence
  Description of Artificial Sequence: Synthetic oligonucleotide
  Antisense strand to SEQ ID NO: 224626
ucucacauguguuucacac

SEQ ID NO: 224628 - RNA, 19 nt, Artificial Sequence
  Description of Artificial Sequence: Synthetic oligonucleotide
  Sense strand starting at position 803 of SEQ ID NO: 2889
gaugaccaagucugcaaua

SEQ ID NO: 224629 - RNA, 19 nt, Artificial Sequence
  Description of Artificial Sequence: Synthetic oligonucleotide
  Antisense strand to SEQ ID NO: 224628
uauugcagacuuggucauc

SEQ ID NO: 224630 - RNA, 19 nt, Artificial Sequence
  Description of Artificial Sequence: Synthetic oligonucleotide
  Sense strand starting at position 804 of SEQ ID NO: 2889
augaccaagucugcaauau

SEQ ID NO: 224631 - RNA, 19 nt, Artificial Sequence
  Description of Artificial Sequence: Synthetic oligonucleotide
  Antisense strand to SEQ ID NO: 224630
auauugcagacuuggucau

SEQ ID NO: 224632 - RNA, 19 nt, Artificial Sequence
  Description of Artificial Sequence: Synthetic oligonucleotide
  Sense strand starting at position 805 of SEQ ID NO: 2889
ugaccaagucugcaauauu

SEQ ID NO: 224633 - RNA, 19 nt, Artificial Sequence
  Description of Artificial Sequence: Synthetic oligonucleotide
  Antisense strand to SEQ ID NO: 224632
aauauugcagacuugguca

SEQ ID NO: 224634 - RNA, 19 nt, Artificial Sequence
  Description of Artificial Sequence: Synthetic oligonucleotide
  Sense strand starting at position 1019 of SEQ ID NO: 2889
gcgcacuccgaacaaagau

SEQ ID NO: 224635 - RNA, 19 nt, Artificial Sequence
  Description of Artificial Sequence: Synthetic oligonucleotide
  Antisense strand to SEQ ID NO: 224634
aucuuuguucggagugcgc

SEQ ID NO: 224636 - RNA, 19 nt, Artificial Sequence
  Description of Artificial Sequence: Synthetic oligonucleotide
  Sense strand starting at position 1081 of SEQ ID NO: 2889
guuaaucccugaccuaagu

SEQ ID NO: 224637 - RNA, 19 nt, Artificial Sequence
  Description of Artificial Sequence: Synthetic oligonucleotide
  Antisense strand to SEQ ID NO: 224636
acuuaggucagggauuaac

SEQ ID NO: 224638 - RNA, 19 nt, Artificial Sequence
  Description of Artificial Sequence: Synthetic oligonucleotide
  Sense strand starting at position 1116 of SEQ ID NO: 2889
ggaguuccuaauugaugca

SEQ ID NO: 224639 - RNA, 19 nt, Artificial Sequence
  Description of Artificial Sequence: Synthetic oligonucleotide
  Antisense strand to SEQ ID NO: 224638
ugcaucaauuaggaacucc

SEQ ID NO: 224640 - RNA, 19 nt, Artificial Sequence
  Description of Artificial Sequence: Synthetic oligonucleotide
  Sense strand starting at position 1311 of SEQ ID NO: 2889
gcuacagauuucuaaagac

SEQ ID NO: 224641 - RNA, 19 nt, Artificial Sequence
  Description of Artificial Sequence: Synthetic oligonucleotide
  Antisense strand to SEQ ID NO: 224640
gucuuuagaaaucuguagc

SEQ ID NO: 224642 - RNA, 19 nt, Artificial Sequence
  Description of Artificial Sequence: Synthetic oligonucleotide
  Sense strand starting at position 1522 of SEQ ID NO: 2889
uacggaugucugggacacu

SEQ ID NO: 224643 - RNA, 19 nt, Artificial Sequence
  Description of Artificial Sequence: Synthetic oligonucleotide
  Antisense strand to SEQ ID NO: 224642
agugucccagacauccgua

SEQ ID NO: 224644 - RNA, 19 nt, Artificial Sequence
  Description of Artificial Sequence: Synthetic oligonucleotide
  Sense strand starting at position 1721 of SEQ ID NO: 2889
uuucuucagcgugcguuaa

SEQ ID NO: 224645 - RNA, 19 nt, Artificial Sequence
  Description of Artificial Sequence: Synthetic oligonucleotide
  Antisense strand to SEQ ID NO: 224644
uuaacgcacgcugaagaaa

SEQ ID NO: 224646 - RNA, 19 nt, Artificial Sequence
  Description of Artificial Sequence: Synthetic oligonucleotide
  Sense strand starting at position 2932 of SEQ ID NO: 2889
guagcugcgccuuccgaau

SEQ ID NO: 224647 - RNA, 19 nt, Artificial Sequence
  Description of Artificial Sequence: Synthetic oligonucleotide
  Antisense strand to SEQ ID NO: 224646
auucggaaggcgcagcuac

SEQ ID NO: 224648 - RNA, 19 nt, Artificial Sequence
  Description of Artificial Sequence: Synthetic oligonucleotide
  Sense strand starting at position 2995 of SEQ ID NO: 2889
acuccuaaaggucgguuaa

SEQ ID NO: 224649 - RNA, 19 nt, Artificial Sequence
  Description of Artificial Sequence: Synthetic oligonucleotide
  Antisense strand to SEQ ID NO: 224648
uuaaccgaccuuuaggagu

SEQ ID NO: 224650 - RNA, 19 nt, Artificial Sequence
  Description of Artificial Sequence: Synthetic oligonucleotide
  Sense strand starting at position 2996 of SEQ ID NO: 2889
cuccuaaaggucgguuaaa

SEQ ID NO: 224651 - RNA, 19 nt, Artificial Sequence
  Description of Artificial Sequence: Synthetic oligonucleotide
  Antisense strand to SEQ ID NO: 224650
uuuaaccgaccuuuaggag

SEQ ID NO: 224652 - RNA, 19 nt, Artificial Sequence
  Description of Artificial Sequence: Synthetic oligonucleotide
  Sense strand starting at position 3078 of SEQ ID NO: 2889
ccuggacacguguaggaaa

SEQ ID NO: 224653 - RNA, 19 nt, Artificial Sequence
  Description of Artificial Sequence: Synthetic oligonucleotide
  Antisense strand to SEQ ID NO: 224652
uuuccuacacguguccagg

SEQ ID NO: 224654 - RNA, 19 nt, Artificial Sequence
  Description of Artificial Sequence: Synthetic oligonucleotide
  Sense strand starting at position 3347 of SEQ ID NO: 2889
uugaauuaccgcggauaga

SEQ ID NO: 224655 - RNA, 19 nt, Artificial Sequence
  Description of Artificial Sequence: Synthetic oligonucleotide
  Antisense strand to SEQ ID NO: 224654
ucuauccgcgguaauucaa

SEQ ID NO: 224656 - RNA, 19 nt, Artificial Sequence
  Description of Artificial Sequence: Synthetic oligonucleotide
  Sense strand starting at position 3348 of SEQ ID NO: 2889
ugaauuaccgcggauagac

SEQ ID NO: 224657 - RNA, 19 nt, Artificial Sequence
  Description of Artificial Sequence: Synthetic oligonucleotide
  Antisense strand to SEQ ID NO: 224656
gucuauccgcgguaauuca

SEQ ID NO: 224658 - RNA, 19 nt, Artificial Sequence
  Description of Artificial Sequence: Synthetic oligonucleotide
  Sense strand starting at position 3470 of SEQ ID NO: 2889
gaagauugcuuaccggaga

SEQ ID NO: 224659 - RNA, 19 nt, Artificial Sequence
  Description of Artificial Sequence: Synthetic oligonucleotide
  Antisense strand to SEQ ID NO: 224658
ucuccgguaagcaaucuuc

SEQ ID NO: 224660 - RNA, 19 nt, Artificial Sequence
  Description of Artificial Sequence: Synthetic oligonucleotide
  Sense strand starting at position 3473 of SEQ ID NO: 2889
gauugcuuaccggagaaau

SEQ ID NO: 224661 - RNA, 19 nt, Artificial Sequence
  Description of Artificial Sequence: Synthetic oligonucleotide
  Antisense strand to SEQ ID NO: 224660
auuucuccgguaagcaauc

SEQ ID NO: 224662 - RNA, 19 nt, Artificial Sequence
  Description of Artificial Sequence: Synthetic oligonucleotide
  Sense strand starting at position 3493 of SEQ ID NO: 2889
gcaggagugaguugaauau

SEQ ID NO: 224663 - RNA, 19 nt, Artificial Sequence
  Description of Artificial Sequence: Synthetic oligonucleotide
  Antisense strand to SEQ ID NO: 224662
auauucaacucacuccugc

SEQ ID NO: 224664 - RNA, 19 nt, Artificial Sequence
  Description of Artificial Sequence: Synthetic oligonucleotide
  Sense strand starting at position 3591 of SEQ ID NO: 2889
gggcuuuauuggcuaagga

SEQ ID NO: 224665 - RNA, 19 nt, Artificial Sequence
  Description of Artificial Sequence: Synthetic oligonucleotide
  Antisense strand to SEQ ID NO: 224664
uccuuagccaauaaagccc

SEQ ID NO: 224666 - RNA, 19 nt, Artificial Sequence
  Description of Artificial Sequence: Synthetic oligonucleotide
  Sense strand starting at position 3592 of SEQ ID NO: 2889
ggcuuuauuggcuaaggac

SEQ ID NO: 224667 - RNA, 19 nt, Artificial Sequence
  Description of Artificial Sequence: Synthetic oligonucleotide
  Antisense strand to SEQ ID NO: 224666
guccuuagccaauaaagcc

SEQ ID NO: 224668 - RNA, 19 nt, Artificial Sequence
  Description of Artificial Sequence: Synthetic oligonucleotide
  Sense strand starting at position 3647 of SEQ ID NO: 2889
gucacuucuuaacugaaag

SEQ ID NO: 224669 - RNA, 19 nt, Artificial Sequence
  Description of Artificial Sequence: Synthetic oligonucleotide
  Antisense strand to SEQ ID NO: 224668
cuuucaguuaagaagugac

SEQ ID NO: 224670 - RNA, 19 nt, Artificial Sequence
  Description of Artificial Sequence: Synthetic oligonucleotide
  Sense strand starting at position 3752 of SEQ ID NO: 2889
cgauacuuccuauaaagua

SEQ ID NO: 224671 - RNA, 19 nt, Artificial Sequence
  Description of Artificial Sequence: Synthetic oligonucleotide
  Antisense strand to SEQ ID NO: 224670
uacuuuauaggaaguaucg

SEQ ID NO: 224672 - RNA, 19 nt, Artificial Sequence
  Description of Artificial Sequence: Synthetic oligonucleotide
  Sense strand starting at position 3790 of SEQ ID NO: 2889
aucaguaaucaccagcaga

SEQ ID NO: 224673 - RNA, 19 nt, Artificial Sequence
  Description of Artificial Sequence: Synthetic oligonucleotide
  Antisense strand to SEQ ID NO: 224672
ucugcuggugauuacugau

SEQ ID NO: 224674 - RNA, 19 nt, Artificial Sequence
  Description of Artificial Sequence: Synthetic oligonucleotide
  Sense strand starting at position 3811 of SEQ ID NO: 2889
gauagaauuagaggugagu

SEQ ID NO: 224675 - RNA, 19 nt, Artificial Sequence
  Description of Artificial Sequence: Synthetic oligonucleotide
  Antisense strand to SEQ ID NO: 224674
acucaccucuaauucuauc

SEQ ID NO: 224676 - RNA, 19 nt, Artificial Sequence
  Description of Artificial Sequence: Synthetic oligonucleotide
  Sense strand starting at position 3820 of SEQ ID NO: 2889
agaggugaguggagaucuu

SEQ ID NO: 224677 - RNA, 19 nt, Artificial Sequence
  Description of Artificial Sequence: Synthetic oligonucleotide
  Antisense strand to SEQ ID NO: 224676
aagaucuccacucaccucu

SEQ ID NO: 224678 - RNA, 19 nt, Artificial Sequence
  Description of Artificial Sequence: Synthetic oligonucleotide
  Sense strand starting at position 3916 of SEQ ID NO: 2889
aggaauaacuuugcaaguu

SEQ ID NO: 224679 - RNA, 19 nt, Artificial Sequence
  Description of Artificial Sequence: Synthetic oligonucleotide
  Antisense strand to SEQ ID NO: 224678
aacuugcaaaguuauuccu

SEQ ID NO: 224680 - RNA, 19 nt, Artificial Sequence
  Description of Artificial Sequence: Synthetic oligonucleotide
  Sense strand starting at position 3967 of SEQ ID NO: 2889
gaaacauuaguguaauagc

SEQ ID NO: 224681 - RNA, 19 nt, Artificial Sequence
  Description of Artificial Sequence: Synthetic oligonucleotide
  Antisense strand to SEQ ID NO: 224680
gcuauuacacuaauguuuc

SEQ ID NO: 224682 - RNA, 19 nt, Artificial Sequence
  Description of Artificial Sequence: Synthetic oligonucleotide
  Sense strand starting at position 31 of SEQ ID NO: 2894
gcuuuaacuggcugacuaa

SEQ ID NO: 224683 - RNA, 19 nt, Artificial Sequence
  Description of Artificial Sequence: Synthetic oligonucleotide
  Antisense strand to SEQ ID NO: 224682
uuagucagccaguuaaagc

SEQ ID NO: 224684 - RNA, 19 nt, Artificial Sequence
  Description of Artificial Sequence: Synthetic oligonucleotide
  Sense strand starting at position 32 of SEQ ID NO: 2894
cuuuaacuggcugacuaau

SEQ ID NO: 224685 - RNA, 19 nt, Artificial Sequence
  Description of Artificial Sequence: Synthetic oligonucleotide
  Antisense strand to SEQ ID NO: 224684
auuagucagccaguuaaag

SEQ ID NO: 224686 - RNA, 19 nt, Artificial Sequence
  Description of Artificial Sequence: Synthetic oligonucleotide
  Sense strand starting at position 56 of SEQ ID NO: 2894
guguguaaugcugaaauga

SEQ ID NO: 224687 - RNA, 19 nt, Artificial Sequence
  Description of Artificial Sequence: Synthetic oligonucleotide
  Antisense strand to SEQ ID NO: 224686
ucauuucagcauuacacac

SEQ ID NO: 224688 - RNA, 19 nt, Artificial Sequence
  Description of Artificial Sequence: Synthetic oligonucleotide
  Sense strand starting at position 149 of SEQ ID NO: 2894
ugaguauuccauuauguga

SEQ ID NO: 224689 - RNA, 19 nt, Artificial Sequence
  Description of Artificial Sequence: Synthetic oligonucleotide
  Antisense strand to SEQ ID NO: 224688
ucacauaauggaauacuca

SEQ ID NO: 224690 - RNA, 19 nt, Artificial Sequence
  Description of Artificial Sequence: Synthetic oligonucleotide
  Sense strand starting at position 269 of SEQ ID NO: 2894
guauaccagcuuuauuauu

SEQ ID NO: 224691 - RNA, 19 nt, Artificial Sequence
  Description of Artificial Sequence: Synthetic oligonucleotide
  Antisense strand to SEQ ID NO: 224690
aauaauaaagcugguauac

SEQ ID NO: 224692 - RNA, 19 nt, Artificial Sequence
  Description of Artificial Sequence: Synthetic oligonucleotide
  Sense strand starting at position 300 of SEQ ID NO: 2894
acugcuaaauuggucaauu

SEQ ID NO: 224693 - RNA, 19 nt, Artificial Sequence
  Description of Artificial Sequence: Synthetic oligonucleotide
  Antisense strand to SEQ ID NO: 224692
aauugaccaauuuagcagu

SEQ ID NO: 224694 - RNA, 19 nt, Artificial Sequence
  Description of Artificial Sequence: Synthetic oligonucleotide
  Sense strand starting at position 301 of SEQ ID NO: 2894
cugcuaaauuggucaauua

SEQ ID NO: 224695 - RNA, 19 nt, Artificial Sequence
  Description of Artificial Sequence: Synthetic oligonucleotide
  Antisense strand to SEQ ID NO: 224694
uaauugaccaauuuagcag

SEQ ID NO: 224696 - RNA, 19 nt, Artificial Sequence
  Description of Artificial Sequence: Synthetic oligonucleotide
  Sense strand starting at position 302 of SEQ ID NO: 2894
ugcuaaauuggucaauuac

SEQ ID NO: 224697 - RNA, 19 nt, Artificial Sequence
  Description of Artificial Sequence: Synthetic oligonucleotide
  Antisense strand to SEQ ID NO: 224696
guaauugaccaauuuagca

SEQ ID NO: 224698 - RNA, 19 nt, Artificial Sequence
  Description of Artificial Sequence: Synthetic oligonucleotide
  Sense strand starting at position 376 of SEQ ID NO: 2894
cuggguucccuguggaaca

SEQ ID NO: 224699 - RNA, 19 nt, Artificial Sequence
  Description of Artificial Sequence: Synthetic oligonucleotide
  Antisense strand to SEQ ID NO: 224698
uguuccacagggaacccag

SEQ ID NO: 224700 - RNA, 19 nt, Artificial Sequence
  Description of Artificial Sequence: Synthetic oligonucleotide
  Sense strand starting at position 638 of SEQ ID NO: 2894
cgugaaagccgcaagaguu

SEQ ID NO: 224701 - RNA, 19 nt, Artificial Sequence
  Description of Artificial Sequence: Synthetic oligonucleotide
  Antisense strand to SEQ ID NO: 224700
aacucuugcggcuuucacg

SEQ ID NO: 224702 - RNA, 19 nt, Artificial Sequence
  Description of Artificial Sequence: Synthetic oligonucleotide
  Sense strand starting at position 1042 of SEQ ID NO: 2894
gugggagugcguuagaaga

SEQ ID NO: 224703 - RNA, 19 nt, Artificial Sequence
  Description of Artificial Sequence: Synthetic oligonucleotide
  Antisense strand to SEQ ID NO: 224702
ucuucuaacgcacucccac

SEQ ID NO: 224704 - RNA, 19 nt, Artificial Sequence
  Description of Artificial Sequence: Synthetic oligonucleotide
  Sense strand starting at position 1571 of SEQ ID NO: 2894
cgaguuaaacauuagugag

SEQ ID NO: 224705 - RNA, 19 nt, Artificial Sequence
  Description of Artificial Sequence: Synthetic oligonucleotide
  Antisense strand to SEQ ID NO: 224704
cucacuaauguuuaacucg

SEQ ID NO: 224706 - RNA, 19 nt, Artificial Sequence
  Description of Artificial Sequence: Synthetic oligonucleotide
  Sense strand starting at position 1990 of SEQ ID NO: 2894
gccagugaaaguuauguua

SEQ ID NO: 224707 - RNA, 19 nt, Artificial Sequence
  Description of Artificial Sequence: Synthetic oligonucleotide
  Antisense strand to SEQ ID NO: 224706
uaacauaacuuucacuggc

SEQ ID NO: 224708 - RNA, 19 nt, Artificial Sequence
  Description of Artificial Sequence: Synthetic oligonucleotide
  Sense strand starting at position 1993 of SEQ ID NO: 2894
agugaaaguuauguuagga

SEQ ID NO: 224709 - RNA, 19 nt, Artificial Sequence
  Description of Artificial Sequence: Synthetic oligonucleotide
  Antisense strand to SEQ ID NO: 224708
uccuaacauaacuuucacu

SEQ ID NO: 224710 - RNA, 19 nt, Artificial Sequence
  Description of Artificial Sequence: Synthetic oligonucleotide
  Sense strand starting at position 2022 of SEQ ID NO: 2894
ggucuaaagcaguaugaaa

SEQ ID NO: 224711 - RNA, 19 nt, Artificial Sequence
  Description of Artificial Sequence: Synthetic oligonucleotide
  Antisense strand to SEQ ID NO: 224710
uuucauacugcuuuagacc

SEQ ID NO: 224712 - RNA, 19 nt, Artificial Sequence
  Description of Artificial Sequence: Synthetic oligonucleotide
  Sense strand starting at position 2083 of SEQ ID NO: 2894
gaagcugaguaucuggauu

SEQ ID NO: 224713 - RNA, 19 nt, Artificial Sequence
  Description of Artificial Sequence: Synthetic oligonucleotide
  Antisense strand to SEQ ID NO: 224712
aauccagauacucagcuuc

SEQ ID NO: 224714 - RNA, 19 nt, Artificial Sequence
  Description of Artificial Sequence: Synthetic oligonucleotide
  Sense strand starting at position 2216 of SEQ ID NO: 2894
aagcauuuacuguguuugu

SEQ ID NO: 224715 - RNA, 19 nt, Artificial Sequence
  Description of Artificial Sequence: Synthetic oligonucleotide
  Antisense strand to SEQ ID NO: 224714
acaaacacaguaaaugcuu

SEQ ID NO: 224716 - RNA, 19 nt, Artificial Sequence
  Description of Artificial Sequence: Synthetic oligonucleotide
  Sense strand starting at position 2217 of SEQ ID NO: 2894
agcauuuacuguguuuguu

SEQ ID NO: 224717 - RNA, 19 nt, Artificial Sequence
  Description of Artificial Sequence: Synthetic oligonucleotide
  Antisense strand to SEQ ID NO: 224716
aacaaacacaguaaaugcu

SEQ ID NO: 224718 - RNA, 19 nt, Artificial Sequence
  Description of Artificial Sequence: Synthetic oligonucleotide
  Sense strand starting at position 2324 of SEQ ID NO: 2894
ggucuuaauggcuacucua

SEQ ID NO: 224719 - RNA, 19 nt, Artificial Sequence
  Description of Artificial Sequence: Synthetic oligonucleotide
  Antisense strand to SEQ ID NO: 224718
uagaguagccauuaagacc

SEQ ID NO: 224720 - RNA, 19 nt, Artificial Sequence
  Description of Artificial Sequence: Synthetic oligonucleotide
  Sense strand starting at position 2419 of SEQ ID NO: 2894
ucuauuguucccuaaagga

SEQ ID NO: 224721 - RNA, 19 nt, Artificial Sequence
  Description of Artificial Sequence: Synthetic oligonucleotide
  Antisense strand to SEQ ID NO: 224720
uccuuuagggaacaauaga

SEQ ID NO: 224722 - RNA, 19 nt, Artificial Sequence
  Description of Artificial Sequence: Synthetic oligonucleotide
  Sense strand starting at position 2478 of SEQ ID NO: 2894
uccagucauccacagaugu

SEQ ID NO: 224723 - RNA, 19 nt, Artificial Sequence
  Description of Artificial Sequence: Synthetic oligonucleotide
  Antisense strand to SEQ ID NO: 224722
acaucuguggaugacugga

SEQ ID NO: 224724 - RNA, 19 nt, Artificial Sequence
  Description of Artificial Sequence: Synthetic oligonucleotide
  Sense strand starting at position 2489 of SEQ ID NO: 2894
acagauguuugagugguua

SEQ ID NO: 224725 - RNA, 19 nt, Artificial Sequence
  Description of Artificial Sequence: Synthetic oligonucleotide
  Antisense strand to SEQ ID NO: 224724
uaaccacucaaacaucugu

SEQ ID NO: 224726 - RNA, 19 nt, Artificial Sequence
  Description of Artificial Sequence: Synthetic oligonucleotide
  Sense strand starting at position 2491 of SEQ ID NO: 2894
agauguuugagugguuaca

SEQ ID NO: 224727 - RNA, 19 nt, Artificial Sequence
  Description of Artificial Sequence: Synthetic oligonucleotide
  Antisense strand to SEQ ID NO: 224726
uguaaccacucaaacaucu

SEQ ID NO: 224728 - RNA, 19 nt, Artificial Sequence
  Description of Artificial Sequence: Synthetic oligonucleotide
  Sense strand starting at position 2493 of SEQ ID NO: 2894
auguuugagugguuacaau

SEQ ID NO: 224729 - RNA, 19 nt, Artificial Sequence
  Description of Artificial Sequence: Synthetic oligonucleotide
  Antisense strand to SEQ ID NO: 224728
auuguaaccacucaaacau

SEQ ID NO: 224730 - RNA, 19 nt, Artificial Sequence
  Description of Artificial Sequence: Synthetic oligonucleotide
  Sense strand starting at position 2636 of SEQ ID NO: 2894
uccacucuugcagauaaga

SEQ ID NO: 224731 - RNA, 19 nt, Artificial Sequence
  Description of Artificial Sequence: Synthetic oligonucleotide
  Antisense strand to SEQ ID NO: 224730
ucuuaucugcaagagugga

SEQ ID NO: 224732 - RNA, 19 nt, Artificial Sequence
  Description of Artificial Sequence: Synthetic oligonucleotide
  Sense strand starting at position 2747 of SEQ ID NO: 2894
gcauuaccacaugauuaug

SEQ ID NO: 224733 - RNA, 19 nt, Artificial Sequence
  Description of Artificial Sequence: Synthetic oligonucleotide
  Antisense strand to SEQ ID NO: 224732
cauaaucaugugguaaugc

SEQ ID NO: 224734 - RNA, 19 nt, Artificial Sequence
  Description of Artificial Sequence: Synthetic oligonucleotide
  Sense strand starting at position 2852 of SEQ ID NO: 2894
ugugauacaucaguauccu

SEQ ID NO: 224735 - RNA, 19 nt, Artificial Sequence
  Description of Artificial Sequence: Synthetic oligonucleotide
  Antisense strand to SEQ ID NO: 224734
aggauacugauguaucaca

SEQ ID NO: 224736 - RNA, 19 nt, Artificial Sequence
  Description of Artificial Sequence: Synthetic oligonucleotide
  Sense strand starting at position 2853 of SEQ ID NO: 2894
gugauacaucaguauccuc

SEQ ID NO: 224737 - RNA, 19 nt, Artificial Sequence
  Description of Artificial Sequence: Synthetic oligonucleotide
  Antisense strand to SEQ ID NO: 224736
gaggauacugauguaucac

SEQ ID NO: 224738 - RNA, 19 nt, Artificial Sequence
  Description of Artificial Sequence: Synthetic oligonucleotide
  Sense strand starting at position 2934 of SEQ ID NO: 2894
agaugagucaaugguguua

SEQ ID NO: 224739 - RNA, 19 nt, Artificial Sequence
  Description of Artificial Sequence: Synthetic oligonucleotide
  Antisense strand to SEQ ID NO: 224738
uaacaccauugacucaucu

SEQ ID NO: 224740 - RNA, 19 nt, Artificial Sequence
  Description of Artificial Sequence: Synthetic oligonucleotide
  Sense strand starting at position 3190 of SEQ ID NO: 2894
ggcugacaucuacgggaca

SEQ ID NO: 224741 - RNA, 19 nt, Artificial Sequence
  Description of Artificial Sequence: Synthetic oligonucleotide
  Antisense strand to SEQ ID NO: 224740
ugucccguagaugucagcc

SEQ ID NO: 224742 - RNA, 19 nt, Artificial Sequence
  Description of Artificial Sequence: Synthetic oligonucleotide
  Sense strand starting at position 3382 of SEQ ID NO: 2894
acugaugagucaguguaga

SEQ ID NO: 224743 - RNA, 19 nt, Artificial Sequence
  Description of Artificial Sequence: Synthetic oligonucleotide
  Antisense strand to SEQ ID NO: 224742
ucuacacugacucaucagu

SEQ ID NO: 224744 - RNA, 19 nt, Artificial Sequence
  Description of Artificial Sequence: Synthetic oligonucleotide
  Sense strand starting at position 3387 of SEQ ID NO: 2894
ugagucaguguagaucuua

SEQ ID NO: 224745 - RNA, 19 nt, Artificial Sequence
  Description of Artificial Sequence: Synthetic oligonucleotide
  Antisense strand to SEQ ID NO: 224744
uaagaucuacacugacuca

SEQ ID NO: 224746 - RNA, 19 nt, Artificial Sequence
  Description of Artificial Sequence: Synthetic oligonucleotide
  Sense strand starting at position 3444 of SEQ ID NO: 2894
agauguucugcucaaaguu

SEQ ID NO: 224747 - RNA, 19 nt, Artificial Sequence
  Description of Artificial Sequence: Synthetic oligonucleotide
  Antisense strand to SEQ ID NO: 224746
aacuuugagcagaacaucu

SEQ ID NO: 224748 - RNA, 19 nt, Artificial Sequence
  Description of Artificial Sequence: Synthetic oligonucleotide
  Sense strand starting at position 3462 of SEQ ID NO: 2894
ucuguuugucaguaagauu

SEQ ID NO: 224749 - RNA, 19 nt, Artificial Sequence
  Description of Artificial Sequence: Synthetic oligonucleotide
  Antisense strand to SEQ ID NO: 224748
aaucuuacugacaaacaga

SEQ ID NO: 224750 - RNA, 19 nt, Artificial Sequence
  Description of Artificial Sequence: Synthetic oligonucleotide
  Sense strand starting at position 3604 of SEQ ID NO: 2894
guaggaaacuccuugugaa

SEQ ID NO: 224751 - RNA, 19 nt, Artificial Sequence
  Description of Artificial Sequence: Synthetic oligonucleotide
  Antisense strand to SEQ ID NO: 224750
uucacaaggaguuuccuac

SEQ ID NO: 224752 - RNA, 19 nt, Artificial Sequence
  Description of Artificial Sequence: Synthetic oligonucleotide
  Sense strand starting at position 3605 of SEQ ID NO: 2894
uaggaaacuccuugugaag

SEQ ID NO: 224753 - RNA, 19 nt, Artificial Sequence
  Description of Artificial Sequence: Synthetic oligonucleotide
  Antisense strand to SEQ ID NO: 224752
cuucacaaggaguuuccua

SEQ ID NO: 224754 - RNA, 19 nt, Artificial Sequence
  Description of Artificial Sequence: Synthetic oligonucleotide
  Sense strand starting at position 3665 of SEQ ID NO: 2894
gcaggcaucauagagucua

SEQ ID NO: 224755 - RNA, 19 nt, Artificial Sequence
  Description of Artificial Sequence: Synthetic oligonucleotide
  Antisense strand to SEQ ID NO: 224754
uagacucuaugaugccugc

SEQ ID NO: 224756 - RNA, 19 nt, Artificial Sequence
  Description of Artificial Sequence: Synthetic oligonucleotide
  Sense strand starting at position 3727 of SEQ ID NO: 2894
gggcuuaucuccuuuauca

SEQ ID NO: 224757 - RNA, 19 nt, Artificial Sequence
  Description of Artificial Sequence: Synthetic oligonucleotide
  Antisense strand to SEQ ID NO: 224756
ugauaaaggagauaagccc

SEQ ID NO: 224758 - RNA, 19 nt, Artificial Sequence
  Description of Artificial Sequence: Synthetic oligonucleotide
  Sense strand starting at position 3914 of SEQ ID NO: 2894
aggacuucagagugugaca

SEQ ID NO: 224759 - RNA, 19 nt, Artificial Sequence
  Description of Artificial Sequence: Synthetic oligonucleotide
  Antisense strand to SEQ ID NO: 224758
ugucacacucugaaguccu

SEQ ID NO: 224760 - RNA, 19 nt, Artificial Sequence
  Description of Artificial Sequence: Synthetic oligonucleotide
  Sense strand starting at position 3940 of SEQ ID NO: 2894
aauauagggucuuuacaga

SEQ ID NO: 224761 - RNA, 19 nt, Artificial Sequence
  Description of Artificial Sequence: Synthetic oligonucleotide
  Antisense strand to SEQ ID NO: 224760
ucuguaaagacccuauauu

SEQ ID NO: 224762 - RNA, 19 nt, Artificial Sequence
  Description of Artificial Sequence: Synthetic oligonucleotide
  Sense strand starting at position 75 of SEQ ID NO: 2895
gccuguaugcuuuauuaaa

SEQ ID NO: 224763 - RNA, 19 nt, Artificial Sequence
  Description of Artificial Sequence: Synthetic oligonucleotide
  Antisense strand to SEQ ID NO: 224762
uuuaauaaagcauacaggc

SEQ ID NO: 224764 - RNA, 19 nt, Artificial Sequence
  Description of Artificial Sequence: Synthetic oligonucleotide
  Sense strand starting at position 105 of SEQ ID NO: 2895
augugugauucaguuugga

SEQ ID NO: 224765 - RNA, 19 nt, Artificial Sequence
  Description of Artificial Sequence: Synthetic oligonucleotide
  Antisense strand to SEQ ID NO: 224764
uccaaacugaaucacacau

SEQ ID NO: 224766 - RNA, 19 nt, Artificial Sequence
  Description of Artificial Sequence: Synthetic oligonucleotide
  Sense strand starting at position 282 of SEQ ID NO: 2895
uauguugggagcuguauuu

SEQ ID NO: 224767 - RNA, 19 nt, Artificial Sequence
  Description of Artificial Sequence: Synthetic oligonucleotide
  Antisense strand to SEQ ID NO: 224766
aaauacagcucccaacaua

SEQ ID NO: 224768 - RNA, 19 nt, Artificial Sequence
  Description of Artificial Sequence: Synthetic oligonucleotide
  Sense strand starting at position 391 of SEQ ID NO: 2895
cgcuuuaucacccaggaug

SEQ ID NO: 224769 - RNA, 19 nt, Artificial Sequence
  Description of Artificial Sequence: Synthetic oligonucleotide
  Antisense strand to SEQ ID NO: 224768
cauccugggugauaaagcg

SEQ ID NO: 224770 - RNA, 19 nt, Artificial Sequence
  Description of Artificial Sequence: Synthetic oligonucleotide
  Sense strand starting at position 455 of SEQ ID NO: 2895
gguucaagcgauucgcgau

SEQ ID NO: 224771 - RNA, 19 nt, Artificial Sequence
  Description of Artificial Sequence: Synthetic oligonucleotide
  Antisense strand to SEQ ID NO: 224770
aucgcgaaucgcuugaacc

SEQ ID NO: 224772 - RNA, 19 nt, Artificial Sequence
  Description of Artificial Sequence: Synthetic oligonucleotide
  Sense strand starting at position 1313 of SEQ ID NO: 2895
cguaauuuguacgucugua

SEQ ID NO: 224773 - RNA, 19 nt, Artificial Sequence
  Description of Artificial Sequence: Synthetic oligonucleotide
  Antisense strand to SEQ ID NO: 224772
uacagacguacaaauuacg

SEQ ID NO: 224774 - RNA, 19 nt, Artificial Sequence
  Description of Artificial Sequence: Synthetic oligonucleotide
  Sense strand starting at position 1523 of SEQ ID NO: 2895
ccguacucagagugaggau

SEQ ID NO: 224775 - RNA, 19 nt, Artificial Sequence
  Description of Artificial Sequence: Synthetic oligonucleotide
  Antisense strand to SEQ ID NO: 224774
auccucacucugaguacgg

SEQ ID NO: 224776 - RNA, 19 nt, Artificial Sequence
  Description of Artificial Sequence: Synthetic oligonucleotide
  Sense strand starting at position 1524 of SEQ ID NO: 2895
cguacucagagugaggauu

SEQ ID NO: 224777 - RNA, 19 nt, Artificial Sequence
  Description of Artificial Sequence: Synthetic oligonucleotide
  Antisense strand to SEQ ID NO: 224776
aauccucacucugaguacg

SEQ ID NO: 224778 - RNA, 19 nt, Artificial Sequence
  Description of Artificial Sequence: Synthetic oligonucleotide
  Sense strand starting at position 1568 of SEQ ID NO: 2895
cggucacagagauauaagu

SEQ ID NO: 224779 - RNA, 19 nt, Artificial Sequence
  Description of Artificial Sequence: Synthetic oligonucleotide
  Antisense strand to SEQ ID NO: 224778
acuuauaucucugugaccg

SEQ ID NO: 224780 - RNA, 19 nt, Artificial Sequence
  Description of Artificial Sequence: Synthetic oligonucleotide
  Sense strand starting at position 1648 of SEQ ID NO: 2895
gcguuugucccuccagcau

SEQ ID NO: 224781 - RNA, 19 nt, Artificial Sequence
  Description of Artificial Sequence: Synthetic oligonucleotide
  Antisense strand to SEQ ID NO: 224780
augcuggagggacaaacgc

SEQ ID NO: 224782 - RNA, 19 nt, Artificial Sequence
  Description of Artificial Sequence: Synthetic oligonucleotide
  Sense strand starting at position 1738 of SEQ ID NO: 2895
gcgaguuaccugggagauu

SEQ ID NO: 224783 - RNA, 19 nt, Artificial Sequence
  Description of Artificial Sequence: Synthetic oligonucleotide
  Antisense strand to SEQ ID NO: 224782
aaucucccagguaacucgc

SEQ ID NO: 224784 - RNA, 19 nt, Artificial Sequence
  Description of Artificial Sequence: Synthetic oligonucleotide
  Sense strand starting at position 1739 of SEQ ID NO: 2895
cgaguuaccugggagauuu

SEQ ID NO: 224785 - RNA, 19 nt, Artificial Sequence
  Description of Artificial Sequence: Synthetic oligonucleotide
  Antisense strand to SEQ ID NO: 224784
aaaucucccagguaacucg

SEQ ID NO: 224786 - RNA, 19 nt, Artificial Sequence
  Description of Artificial Sequence: Synthetic oligonucleotide
  Sense strand starting at position 1890 of SEQ ID NO: 2895
cuggaaacucuacgacagu

SEQ ID NO: 224787 - RNA, 19 nt, Artificial Sequence
  Description of Artificial Sequence: Synthetic oligonucleotide
  Antisense strand to SEQ ID NO: 224786
acugucguagaguuuccag

SEQ ID NO: 224788 - RNA, 19 nt, Artificial Sequence
  Description of Artificial Sequence: Synthetic oligonucleotide
  Sense strand starting at position 2366 of SEQ ID NO: 2895
gucugacagucucugaaag

SEQ ID NO: 224789 - RNA, 19 nt, Artificial Sequence
  Description of Artificial Sequence: Synthetic oligonucleotide
  Antisense strand to SEQ ID NO: 224788
cuuucagagacugucagac

SEQ ID NO: 224790 - RNA, 19 nt, Artificial Sequence
  Description of Artificial Sequence: Synthetic oligonucleotide
  Sense strand starting at position 2367 of SEQ ID NO: 2895
ucugacagucucugaaaga

SEQ ID NO: 224791 - RNA, 19 nt, Artificial Sequence
  Description of Artificial Sequence: Synthetic oligonucleotide
  Antisense strand to SEQ ID NO: 224790
ucuuucagagacugucaga

SEQ ID NO: 224792 - RNA, 19 nt, Artificial Sequence
  Description of Artificial Sequence: Synthetic oligonucleotide
  Sense strand starting at position 2436 of SEQ ID NO: 2895
ggguuuccugaucagcuuu

SEQ ID NO: 224793 - RNA, 19 nt, Artificial Sequence
  Description of Artificial Sequence: Synthetic oligonucleotide
  Antisense strand to SEQ ID NO: 224792
aaagcugaucaggaaaccc

SEQ ID NO: 224794 - RNA, 19 nt, Artificial Sequence
  Description of Artificial Sequence: Synthetic oligonucleotide
  Sense strand starting at position 2462 of SEQ ID NO: 2895
gcccuuaaaucugugaaua

SEQ ID NO: 224795 - RNA, 19 nt, Artificial Sequence
  Description of Artificial Sequence: Synthetic oligonucleotide
  Antisense strand to SEQ ID NO: 224794
uauucacagauuuaagggc

SEQ ID NO: 224796 - RNA, 19 nt, Artificial Sequence
  Description of Artificial Sequence: Synthetic oligonucleotide
  Sense strand starting at position 2496 of SEQ ID NO: 2895
accuuacauuuguauuaga

SEQ ID NO: 224797 - RNA, 19 nt, Artificial Sequence
  Description of Artificial Sequence: Synthetic oligonucleotide
  Antisense strand to SEQ ID NO: 224796
ucuaauacaaauguaaggu

SEQ ID NO: 224798 - RNA, 19 nt, Artificial Sequence
  Description of Artificial Sequence: Synthetic oligonucleotide
  Sense strand starting at position 2504 of SEQ ID NO: 2895
uuuguauuagauuagcagu

SEQ ID NO: 224799 - RNA, 19 nt, Artificial Sequence
  Description of Artificial Sequence: Synthetic oligonucleotide
  Antisense strand to SEQ ID NO: 224798
acugcuaaucuaauacaaa

SEQ ID NO: 224800 - RNA, 19 nt, Artificial Sequence
  Description of Artificial Sequence: Synthetic oligonucleotide
  Sense strand starting at position 2506 of SEQ ID NO: 2895
uguauuagauuagcaguau

SEQ ID NO: 224801 - RNA, 19 nt, Artificial Sequence
  Description of Artificial Sequence: Synthetic oligonucleotide
  Antisense strand to SEQ ID NO: 224800
auacugcuaaucuaauaca

SEQ ID NO: 224802 - RNA, 19 nt, Artificial Sequence
  Description of Artificial Sequence: Synthetic oligonucleotide
  Sense strand starting at position 2510 of SEQ ID NO: 2895
uuagauuagcaguaugcaa

SEQ ID NO: 224803 - RNA, 19 nt, Artificial Sequence
  Description of Artificial Sequence: Synthetic oligonucleotide
  Antisense strand to SEQ ID NO: 224802
uugcauacugcuaaucuaa

SEQ ID NO: 224804 - RNA, 19 nt, Artificial Sequence
  Description of Artificial Sequence: Synthetic oligonucleotide
  Sense strand starting at position 2543 of SEQ ID NO: 2895
cgugguccuacugauagua

SEQ ID NO: 224805 - RNA, 19 nt, Artificial Sequence
  Description of Artificial Sequence: Synthetic oligonucleotide
  Antisense strand to SEQ ID NO: 224804
uacuaucaguaggaccacg

SEQ ID NO: 224806 - RNA, 19 nt, Artificial Sequence
  Description of Artificial Sequence: Synthetic oligonucleotide
  Sense strand starting at position 2596 of SEQ ID NO: 2895
uccuacacaguguguaaau

SEQ ID NO: 224807 - RNA, 19 nt, Artificial Sequence
  Description of Artificial Sequence: Synthetic oligonucleotide
  Antisense strand to SEQ ID NO: 224806
auuuacacacuguguagga

SEQ ID NO: 224808 - RNA, 19 nt, Artificial Sequence
  Description of Artificial Sequence: Synthetic oligonucleotide
  Sense strand starting at position 2597 of SEQ ID NO: 2895
ccuacacaguguguaaaua

SEQ ID NO: 224809 - RNA, 19 nt, Artificial Sequence
  Description of Artificial Sequence: Synthetic oligonucleotide
  Antisense strand to SEQ ID NO: 224808
uauuuacacacuguguagg

SEQ ID NO: 224810 - RNA, 19 nt, Artificial Sequence
  Description of Artificial Sequence: Synthetic oligonucleotide
  Sense strand starting at position 2791 of SEQ ID NO: 2895
gguggaauauaagcgauua

SEQ ID NO: 224811 - RNA, 19 nt, Artificial Sequence
  Description of Artificial Sequence: Synthetic oligonucleotide
  Antisense strand to SEQ ID NO: 224810
uaaucgcuuauauuccacc

SEQ ID NO: 224812 - RNA, 19 nt, Artificial Sequence
  Description of Artificial Sequence: Synthetic oligonucleotide
  Sense strand starting at position 2792 of SEQ ID NO: 2895
guggaauauaagcgauuaa

SEQ ID NO: 224813 - RNA, 19 nt, Artificial Sequence
  Description of Artificial Sequence: Synthetic oligonucleotide
  Antisense strand to SEQ ID NO: 224812
uuaaucgcuuauauuccac

SEQ ID NO: 224814 - RNA, 19 nt, Artificial Sequence
  Description of Artificial Sequence: Synthetic oligonucleotide
  Sense strand starting at position 2872 of SEQ ID NO: 2895
ggcguuagacuacaacuua

SEQ ID NO: 224815 - RNA, 19 nt, Artificial Sequence
  Description of Artificial Sequence: Synthetic oligonucleotide
  Antisense strand to SEQ ID NO: 224814
uaaguuguagucuaacgcc

SEQ ID NO: 224816 - RNA, 19 nt, Artificial Sequence
  Description of Artificial Sequence: Synthetic oligonucleotide
  Sense strand starting at position 2940 of SEQ ID NO: 2895
uugguuaagagcuagacau

SEQ ID NO: 224817 - RNA, 19 nt, Artificial Sequence
  Description of Artificial Sequence: Synthetic oligonucleotide
  Antisense strand to SEQ ID NO: 224816
augucuagcucuuaaccaa

SEQ ID NO: 224818 - RNA, 19 nt, Artificial Sequence
  Description of Artificial Sequence: Synthetic oligonucleotide
  Sense strand starting at position 2951 of SEQ ID NO: 2895
cuagacauauaaguaaguu

SEQ ID NO: 224819 - RNA, 19 nt, Artificial Sequence
  Description of Artificial Sequence: Synthetic oligonucleotide
  Antisense strand to SEQ ID NO: 224818
aacuuacuuauaugucuag

SEQ ID NO: 224820 - RNA, 19 nt, Artificial Sequence
  Description of Artificial Sequence: Synthetic oligonucleotide
  Sense strand starting at position 2996 of SEQ ID NO: 2895
auaguauugugauugguga

SEQ ID NO: 224821 - RNA, 19 nt, Artificial Sequence
  Description of Artificial Sequence: Synthetic oligonucleotide
  Antisense strand to SEQ ID NO: 224820
ucaccaaucacaauacuau

SEQ ID NO: 224822 - RNA, 19 nt, Artificial Sequence
  Description of Artificial Sequence: Synthetic oligonucleotide
  Sense strand starting at position 2998 of SEQ ID NO: 2895
aguauugugauuggugaca

SEQ ID NO: 224823 - RNA, 19 nt, Artificial Sequence
  Description of Artificial Sequence: Synthetic oligonucleotide
  Antisense strand to SEQ ID NO: 224822
ugucaccaaucacaauacu

SEQ ID NO: 224824 - RNA, 19 nt, Artificial Sequence
  Description of Artificial Sequence: Synthetic oligonucleotide
  Sense strand starting at position 3014 of SEQ ID NO: 2895
acagcugucauguggaacu

SEQ ID NO: 224825 - RNA, 19 nt, Artificial Sequence
  Description of Artificial Sequence: Synthetic oligonucleotide
  Antisense strand to SEQ ID NO: 224824
aguuccacaugacagcugu

SEQ ID NO: 224826 - RNA, 19 nt, Artificial Sequence
  Description of Artificial Sequence: Synthetic oligonucleotide
  Sense strand starting at position 3016 of SEQ ID NO: 2895
agcugucauguggaacuuu

SEQ ID NO: 224827 - RNA, 19 nt, Artificial Sequence
  Description of Artificial Sequence: Synthetic oligonucleotide
  Antisense strand to SEQ ID NO: 224826
aaaguuccacaugacagcu

SEQ ID NO: 224828 - RNA, 19 nt, Artificial Sequence
  Description of Artificial Sequence: Synthetic oligonucleotide
  Sense strand starting at position 3073 of SEQ ID NO: 2895
cuaugugcaggauguauaa

SEQ ID NO: 224829 - RNA, 19 nt, Artificial Sequence
  Description of Artificial Sequence: Synthetic oligonucleotide
  Antisense strand to SEQ ID NO: 224828
uuauacauccugcacauag

SEQ ID NO: 224830 - RNA, 19 nt, Artificial Sequence
  Description of Artificial Sequence: Synthetic oligonucleotide
  Sense strand starting at position 3075 of SEQ ID NO: 2895
augugcaggauguauaaau

SEQ ID NO: 224831 - RNA, 19 nt, Artificial Sequence
  Description of Artificial Sequence: Synthetic oligonucleotide
  Antisense strand to SEQ ID NO: 224830
auuuauacauccugcacau

SEQ ID NO: 224832 - RNA, 19 nt, Artificial Sequence
  Description of Artificial Sequence: Synthetic oligonucleotide
  Sense strand starting at position 3085 of SEQ ID NO: 2895
uguauaaauugccuaguag

SEQ ID NO: 224833 - RNA, 19 nt, Artificial Sequence
  Description of Artificial Sequence: Synthetic oligonucleotide
  Antisense strand to SEQ ID NO: 224832
cuacuaggcaauuuauaca

SEQ ID NO: 224834 - RNA, 19 nt, Artificial Sequence
  Description of Artificial Sequence: Synthetic oligonucleotide
  Sense strand starting at position 3086 of SEQ ID NO: 2895
guauaaauugccuaguaga

SEQ ID NO: 224835 - RNA, 19 nt, Artificial Sequence
  Description of Artificial Sequence: Synthetic oligonucleotide
  Antisense strand to SEQ ID NO: 224834
ucuacuaggcaauuuauac

SEQ ID NO: 224836 - RNA, 19 nt, Artificial Sequence
  Description of Artificial Sequence: Synthetic oligonucleotide
  Sense strand starting at position 3811 of SEQ ID NO: 2895
gcgcccagcccuuaauuua

SEQ ID NO: 224837 - RNA, 19 nt, Artificial Sequence
  Description of Artificial Sequence: Synthetic oligonucleotide
  Antisense strand to SEQ ID NO: 224836
uaaauuaagggcugggcgc

SEQ ID NO: 224838 - RNA, 19 nt, Artificial Sequence
  Description of Artificial Sequence: Synthetic oligonucleotide
  Sense strand starting at position 3933 of SEQ ID NO: 2895
auacauuguaggugcagaa

SEQ ID NO: 224839 - RNA, 19 nt, Artificial Sequence
  Description of Artificial Sequence: Synthetic oligonucleotide
  Antisense strand to SEQ ID NO: 224838
uucugcaccuacaauguau

SEQ ID NO: 224840 - RNA, 19 nt, Artificial Sequence
  Description of Artificial Sequence: Synthetic oligonucleotide
  Sense strand starting at position 3940 of SEQ ID NO: 2895
guaggugcagaauacauau

SEQ ID NO: 224841 - RNA, 19 nt, Artificial Sequence
  Description of Artificial Sequence: Synthetic oligonucleotide
  Antisense strand to SEQ ID NO: 224840
auauguauucugcaccuac

SEQ ID NO: 224842 - RNA, 19 nt, Artificial Sequence
  Description of Artificial Sequence: Synthetic oligonucleotide
  Sense strand starting at position 335 of SEQ ID NO: 2898
ggagguuccgcagggagua

SEQ ID NO: 224843 - RNA, 19 nt, Artificial Sequence
  Description of Artificial Sequence: Synthetic oligonucleotide
  Antisense strand to SEQ ID NO: 224842
uacucccugcggaaccucc

SEQ ID NO: 224844 - RNA, 19 nt, Artificial Sequence
  Description of Artificial Sequence: Synthetic oligonucleotide
  Sense strand starting at position 395 of SEQ ID NO: 2898
ccugguuugucgucggaug

SEQ ID NO: 224845 - RNA, 19 nt, Artificial Sequence
  Description of Artificial Sequence: Synthetic oligonucleotide
  Antisense strand to SEQ ID NO: 224844
cauccgacgacaaaccagg

SEQ ID NO: 224846 - RNA, 19 nt, Artificial Sequence
  Description of Artificial Sequence: Synthetic oligonucleotide
  Sense strand starting at position 397 of SEQ ID NO: 2898
ugguuugucgucggaugga

SEQ ID NO: 224847 - RNA, 19 nt, Artificial Sequence
  Description of Artificial Sequence: Synthetic oligonucleotide
  Antisense strand to SEQ ID NO: 224846
uccauccgacgacaaacca

SEQ ID NO: 224848 - RNA, 19 nt, Artificial Sequence
  Description of Artificial Sequence: Synthetic oligonucleotide
  Sense strand starting at position 572 of SEQ ID NO: 2898
gguuucaagccuggagaca

SEQ ID NO: 224849 - RNA, 19 nt, Artificial Sequence
  Description of Artificial Sequence: Synthetic oligonucleotide
  Antisense strand to SEQ ID NO: 224848
ugucuccaggcuugaaacc

SEQ ID NO: 224850 - RNA, 19 nt, Artificial Sequence
  Description of Artificial Sequence: Synthetic oligonucleotide
  Sense strand starting at position 1149 of SEQ ID NO: 2898
cgcugagaucgaugcugca

SEQ ID NO: 224851 - RNA, 19 nt, Artificial Sequence
  Description of Artificial Sequence: Synthetic oligonucleotide
  Antisense strand to SEQ ID NO: 224850
ugcagcaucgaucucagcg

SEQ ID NO: 224852 - RNA, 19 nt, Artificial Sequence
  Description of Artificial Sequence: Synthetic oligonucleotide
  Sense strand starting at position 1590 of SEQ ID NO: 2898
gcauuaaacgcuuacuaug

SEQ ID NO: 224853 - RNA, 19 nt, Artificial Sequence
  Description of Artificial Sequence: Synthetic oligonucleotide
  Antisense strand to SEQ ID NO: 224852
cauaguaagcguuuaaugc

SEQ ID NO: 224854 - RNA, 19 nt, Artificial Sequence
  Description of Artificial Sequence: Synthetic oligonucleotide
  Sense strand starting at position 2502 of SEQ ID NO: 2898
gcgggauugcgggaugcaa

SEQ ID NO: 224855 - RNA, 19 nt, Artificial Sequence
  Description of Artificial Sequence: Synthetic oligonucleotide
  Antisense strand to SEQ ID NO: 224854
uugcaucccgcaaucccgc

SEQ ID NO: 224856 - RNA, 19 nt, Artificial Sequence
  Description of Artificial Sequence: Synthetic oligonucleotide
  Sense strand starting at position 2527 of SEQ ID NO: 2898
gggugggcguuauaggaaa

SEQ ID NO: 224857 - RNA, 19 nt, Artificial Sequence
  Description of Artificial Sequence: Synthetic oligonucleotide
  Antisense strand to SEQ ID NO: 224856
uuuccuauaacgcccaccc

SEQ ID NO: 224858 - RNA, 19 nt, Artificial Sequence
  Description of Artificial Sequence: Synthetic oligonucleotide
  Sense strand starting at position 2632 of SEQ ID NO: 2898
ucucuccacugagaagauu

SEQ ID NO: 224859 - RNA, 19 nt, Artificial Sequence
  Description of Artificial Sequence: Synthetic oligonucleotide
  Antisense strand to SEQ ID NO: 224858
aaucuucucaguggagaga

SEQ ID NO: 224860 - RNA, 19 nt, Artificial Sequence
  Description of Artificial Sequence: Synthetic oligonucleotide
  Sense strand starting at position 2693 of SEQ ID NO: 2898
ggcccagugccugucuuau

SEQ ID NO: 224861 - RNA, 19 nt, Artificial Sequence
  Description of Artificial Sequence: Synthetic oligonucleotide
  Antisense strand to SEQ ID NO: 224860
auaagacaggcacugggcc

SEQ ID NO: 224862 - RNA, 19 nt, Artificial Sequence
  Description of Artificial Sequence: Synthetic oligonucleotide
  Sense strand starting at position 2695 of SEQ ID NO: 2898
cccagugccugucuuauuu

SEQ ID NO: 224863 - RNA, 19 nt, Artificial Sequence
  Description of Artificial Sequence: Synthetic oligonucleotide
  Antisense strand to SEQ ID NO: 224862
aaauaagacaggcacuggg

SEQ ID NO: 224864 - RNA, 19 nt, Artificial Sequence
  Description of Artificial Sequence: Synthetic oligonucleotide
  Sense strand starting at position 2732 of SEQ ID NO: 2898
cagcgaagccuuuggaaau

SEQ ID NO: 224865 - RNA, 19 nt, Artificial Sequence
  Description of Artificial Sequence: Synthetic oligonucleotide
  Antisense strand to SEQ ID NO: 224864
auuuccaaaggcuucgcug

SEQ ID NO: 224866 - RNA, 19 nt, Artificial Sequence
  Description of Artificial Sequence: Synthetic oligonucleotide
  Sense strand starting at position 2898 of SEQ ID NO: 2898
ugccauugaucuguguuau

SEQ ID NO: 224867 - RNA, 19 nt, Artificial Sequence
  Description of Artificial Sequence: Synthetic oligonucleotide
  Antisense strand to SEQ ID NO: 224866
auaacacagaucaauggca

SEQ ID NO: 224868 - RNA, 19 nt, Artificial Sequence
  Description of Artificial Sequence: Synthetic oligonucleotide
  Sense strand starting at position 2899 of SEQ ID NO: 2898
gccauugaucuguguuauu

SEQ ID NO: 224869 - RNA, 19 nt, Artificial Sequence
  Description of Artificial Sequence: Synthetic oligonucleotide
  Antisense strand to SEQ ID NO: 224868
aauaacacagaucaauggc

SEQ ID NO: 224870 - RNA, 19 nt, Artificial Sequence
  Description of Artificial Sequence: Synthetic oligonucleotide
  Sense strand starting at position 2933 of SEQ ID NO: 2898
aauaguuuggauuagucau

SEQ ID NO: 224871 - RNA, 19 nt, Artificial Sequence
  Description of Artificial Sequence: Synthetic oligonucleotide
  Antisense strand to SEQ ID NO: 224870
augacuaauccaaacuauu

SEQ ID NO: 224872 - RNA, 19 nt, Artificial Sequence
  Description of Artificial Sequence: Synthetic oligonucleotide
  Sense strand starting at position 2939 of SEQ ID NO: 2898
uuggauuagucauuugccu

SEQ ID NO: 224873 - RNA, 19 nt, Artificial Sequence
  Description of Artificial Sequence: Synthetic oligonucleotide
  Antisense strand to SEQ ID NO: 224872
aggcaaaugacuaauccaa

SEQ ID NO: 224874 - RNA, 19 nt, Artificial Sequence
  Description of Artificial Sequence: Synthetic oligonucleotide
  Sense strand starting at position 3109 of SEQ ID NO: 2898
ggugguucucuuugcagga

SEQ ID NO: 224875 - RNA, 19 nt, Artificial Sequence
  Description of Artificial Sequence: Synthetic oligonucleotide
  Antisense strand to SEQ ID NO: 224874
uccugcaaagagaaccacc

SEQ ID NO: 224876 - RNA, 19 nt, Artificial Sequence
  Description of Artificial Sequence: Synthetic oligonucleotide
  Sense strand starting at position 3110 of SEQ ID NO: 2898
gugguucucuuugcaggau

SEQ ID NO: 224877 - RNA, 19 nt, Artificial Sequence
  Description of Artificial Sequence: Synthetic oligonucleotide
  Antisense strand to SEQ ID NO: 224876
auccugcaaagagaaccac

SEQ ID NO: 224878 - RNA, 19 nt, Artificial Sequence
  Description of Artificial Sequence: Synthetic oligonucleotide
  Sense strand starting at position 3111 of SEQ ID NO: 2898
ugguucucuuugcaggaua

SEQ ID NO: 224879 - RNA, 19 nt, Artificial Sequence
  Description of Artificial Sequence: Synthetic oligonucleotide
  Antisense strand to SEQ ID NO: 224878
uauccugcaaagagaacca

SEQ ID NO: 224880 - RNA, 19 nt, Artificial Sequence
  Description of Artificial Sequence: Synthetic oligonucleotide
  Sense strand starting at position 3113 of SEQ ID NO: 2898
guucucuuugcaggauacu

SEQ ID NO: 224881 - RNA, 19 nt, Artificial Sequence
  Description of Artificial Sequence: Synthetic oligonucleotide
  Antisense strand to SEQ ID NO: 224880
aguauccugcaaagagaac

SEQ ID NO: 224882 - RNA, 19 nt, Artificial Sequence
  Description of Artificial Sequence: Synthetic oligonucleotide
  Sense strand starting at position 3114 of SEQ ID NO: 2898
uucucuuugcaggauacuu

SEQ ID NO: 224883 - RNA, 19 nt, Artificial Sequence
  Description of Artificial Sequence: Synthetic oligonucleotide
  Antisense strand to SEQ ID NO: 224882
aaguauccugcaaagagaa

SEQ ID NO: 224884 - RNA, 19 nt, Artificial Sequence
  Description of Artificial Sequence: Synthetic oligonucleotide
  Sense strand starting at position 3289 of SEQ ID NO: 2898
uggccuuugagggaugcau

SEQ ID NO: 224885 - RNA, 19 nt, Artificial Sequence
  Description of Artificial Sequence: Synthetic oligonucleotide
  Antisense strand to SEQ ID NO: 224884
augcaucccucaaaggcca

SEQ ID NO: 224886 - RNA, 19 nt, Artificial Sequence
  Description of Artificial Sequence: Synthetic oligonucleotide
  Sense strand starting at position 3291 of SEQ ID NO: 2898
gccuuugagggaugcauuu

SEQ ID NO: 224887 - RNA, 19 nt, Artificial Sequence
  Description of Artificial Sequence: Synthetic oligonucleotide
  Antisense strand to SEQ ID NO: 224886
aaaugcaucccucaaaggc

SEQ ID NO: 224888 - RNA, 19 nt, Artificial Sequence
  Description of Artificial Sequence: Synthetic oligonucleotide
  Sense strand starting at position 3300 of SEQ ID NO: 2898
ggaugcauuucuggauuac

SEQ ID NO: 224889 - RNA, 19 nt, Artificial Sequence
  Description of Artificial Sequence: Synthetic oligonucleotide
  Antisense strand to SEQ ID NO: 224888
guaauccagaaaugcaucc

SEQ ID NO: 224890 - RNA, 19 nt, Artificial Sequence
  Description of Artificial Sequence: Synthetic oligonucleotide
  Sense strand starting at position 3429 of SEQ ID NO: 2898
ccgggauguggcugugaaa

SEQ ID NO: 224891 - RNA, 19 nt, Artificial Sequence
  Description of Artificial Sequence: Synthetic oligonucleotide
  Antisense strand to SEQ ID NO: 224890
uuucacagccacaucccgg

SEQ ID NO: 224892 - RNA, 19 nt, Artificial Sequence
  Description of Artificial Sequence: Synthetic oligonucleotide
  Sense strand starting at position 3626 of SEQ ID NO: 2898
gcccucuagugacuguaaa

SEQ ID NO: 224893 - RNA, 19 nt, Artificial Sequence
  Description of Artificial Sequence: Synthetic oligonucleotide
  Antisense strand to SEQ ID NO: 224892
uuuacagucacuagagggc

SEQ ID NO: 224894 - RNA, 19 nt, Artificial Sequence
  Description of Artificial Sequence: Synthetic oligonucleotide
  Sense strand starting at position 3627 of SEQ ID NO: 2898
cccucuagugacuguaaau

SEQ ID NO: 224895 - RNA, 19 nt, Artificial Sequence
  Description of Artificial Sequence: Synthetic oligonucleotide
  Antisense strand to SEQ ID NO: 224894
auuuacagucacuagaggg

SEQ ID NO: 224896 - RNA, 19 nt, Artificial Sequence
  Description of Artificial Sequence: Synthetic oligonucleotide
  Sense strand starting at position 3654 of SEQ ID NO: 2898
cagcgucucguagaccuua

SEQ ID NO: 224897 - RNA, 19 nt, Artificial Sequence
  Description of Artificial Sequence: Synthetic oligonucleotide
  Antisense strand to SEQ ID NO: 224896
uaaggucuacgagacgcug

SEQ ID NO: 224898 - RNA, 19 nt, Artificial Sequence
  Description of Artificial Sequence: Synthetic oligonucleotide
  Sense strand starting at position 3675 of SEQ ID NO: 2898
uuuggauucuagcaucuua

SEQ ID NO: 224899 - RNA, 19 nt, Artificial Sequence
  Description of Artificial Sequence: Synthetic oligonucleotide
  Antisense strand to SEQ ID NO: 224898
uaagaugcuagaauccaaa

SEQ ID NO: 224900 - RNA, 19 nt, Artificial Sequence
  Description of Artificial Sequence: Synthetic oligonucleotide
  Sense strand starting at position 3732 of SEQ ID NO: 2898
gccucuacgucaucuguca

SEQ ID NO: 224901 - RNA, 19 nt, Artificial Sequence
  Description of Artificial Sequence: Synthetic oligonucleotide
  Antisense strand to SEQ ID NO: 224900
ugacagaugacguagaggc

SEQ ID NO: 224902 - RNA, 19 nt, Artificial Sequence
  Description of Artificial Sequence: Synthetic oligonucleotide
  Sense strand starting at position 3744 of SEQ ID NO: 2898
ucugucaguuuaggauauu

SEQ ID NO: 224903 - RNA, 19 nt, Artificial Sequence
  Description of Artificial Sequence: Synthetic oligonucleotide
  Antisense strand to SEQ ID NO: 224902
aauauccuaaacugacaga

SEQ ID NO: 224904 - RNA, 19 nt, Artificial Sequence
  Description of Artificial Sequence: Synthetic oligonucleotide
  Sense strand starting at position 3747 of SEQ ID NO: 2898
gucaguuuaggauauugau

SEQ ID NO: 224905 - RNA, 19 nt, Artificial Sequence
  Description of Artificial Sequence: Synthetic oligonucleotide
  Antisense strand to SEQ ID NO: 224904
aucaauauccuaaacugac

SEQ ID NO: 224906 - RNA, 19 nt, Artificial Sequence
  Description of Artificial Sequence: Synthetic oligonucleotide
  Sense strand starting at position 3753 of SEQ ID NO: 2898
uuaggauauugauaaaggu

SEQ ID NO: 224907 - RNA, 19 nt, Artificial Sequence
  Description of Artificial Sequence: Synthetic oligonucleotide
  Antisense strand to SEQ ID NO: 224906
accuuuaucaauauccuaa

SEQ ID NO: 224908 - RNA, 19 nt, Artificial Sequence
  Description of Artificial Sequence: Synthetic oligonucleotide
  Sense strand starting at position 3813 of SEQ ID NO: 2898
uucgguuuguuguugcuaa

SEQ ID NO: 224909 - RNA, 19 nt, Artificial Sequence
  Description of Artificial Sequence: Synthetic oligonucleotide
  Antisense strand to SEQ ID NO: 224908
uuagcaacaacaaaccgaa

SEQ ID NO: 224910 - RNA, 19 nt, Artificial Sequence
  Description of Artificial Sequence: Synthetic oligonucleotide
  Sense strand starting at position 3838 of SEQ ID NO: 2898
cuccguuuccugggaagua

SEQ ID NO: 224911 - RNA, 19 nt, Artificial Sequence
  Description of Artificial Sequence: Synthetic oligonucleotide
  Antisense strand to SEQ ID NO: 224910
uacuucccaggaaacggag

SEQ ID NO: 224912 - RNA, 19 nt, Artificial Sequence
  Description of Artificial Sequence: Synthetic oligonucleotide
  Sense strand starting at position 3839 of SEQ ID NO: 2898
uccguuuccugggaaguag

SEQ ID NO: 224913 - RNA, 19 nt, Artificial Sequence
  Description of Artificial Sequence: Synthetic oligonucleotide
  Antisense strand to SEQ ID NO: 224912
cuacuucccaggaaacgga

SEQ ID NO: 224914 - RNA, 19 nt, Artificial Sequence
  Description of Artificial Sequence: Synthetic oligonucleotide
  Sense strand starting at position 3880 of SEQ ID NO: 2898
ccgcauugcuggguuggaa

SEQ ID NO: 224915 - RNA, 19 nt, Artificial Sequence
  Description of Artificial Sequence: Synthetic oligonucleotide
  Antisense strand to SEQ ID NO: 224914
uuccaacccagcaaugcgg

SEQ ID NO: 224916 - RNA, 19 nt, Artificial Sequence
  Description of Artificial Sequence: Synthetic oligonucleotide
  Sense strand starting at position 3910 of SEQ ID NO: 2898
ucaguuucugccgacuuga

SEQ ID NO: 224917 - RNA, 19 nt, Artificial Sequence
  Description of Artificial Sequence: Synthetic oligonucleotide
  Antisense strand to SEQ ID NO: 224916
ucaagucggcagaaacuga

SEQ ID NO: 224918 - RNA, 19 nt, Artificial Sequence
  Description of Artificial Sequence: Synthetic oligonucleotide
  Sense strand starting at position 3920 of SEQ ID NO: 2898
ccgacuugaccuugagaaa

SEQ ID NO: 224919 - RNA, 19 nt, Artificial Sequence
  Description of Artificial Sequence: Synthetic oligonucleotide
  Antisense strand to SEQ ID NO: 224918
uuucucaaggucaagucgg

SEQ ID NO: 224920 - RNA, 19 nt, Artificial Sequence
  Description of Artificial Sequence: Synthetic oligonucleotide
  Sense strand starting at position 3938 of SEQ ID NO: 2898
agugacuuacuccaucuga

SEQ ID NO: 224921 - RNA, 19 nt, Artificial Sequence
  Description of Artificial Sequence: Synthetic oligonucleotide
  Antisense strand to SEQ ID NO: 224920
ucagauggaguaagucacu

SEQ ID NO: 224922 - RNA, 19 nt, Artificial Sequence
  Description of Artificial Sequence: Synthetic oligonucleotide
  Sense strand starting at position 14 of SEQ ID NO: 2896
ccagucuuaggucagcaga

SEQ ID NO: 224923 - RNA, 19 nt, Artificial Sequence
  Description of Artificial Sequence: Synthetic oligonucleotide
  Antisense strand to SEQ ID NO: 224922
ucugcugaccuaagacugg

SEQ ID NO: 224924 - RNA, 19 nt, Artificial Sequence
  Description of Artificial Sequence: Synthetic oligonucleotide
  Sense strand starting at position 16 of SEQ ID NO: 2896
agucuuaggucagcagaca

SEQ ID NO: 224925 - RNA, 19 nt, Artificial Sequence
  Description of Artificial Sequence: Synthetic oligonucleotide
  Antisense strand to SEQ ID NO: 224924
ugucugcugaccuaagacu

SEQ ID NO: 224926 - RNA, 19 nt, Artificial Sequence
  Description of Artificial Sequence: Synthetic oligonucleotide
  Sense strand starting at position 17 of SEQ ID NO: 2896
gucuuaggucagcagacaa

SEQ ID NO: 224927 - RNA, 19 nt, Artificial Sequence
  Description of Artificial Sequence: Synthetic oligonucleotide
  Antisense strand to SEQ ID NO: 224926
uugucugcugaccuaagac

SEQ ID NO: 224928 - RNA, 19 nt, Artificial Sequence
  Description of Artificial Sequence: Synthetic oligonucleotide
  Sense strand starting at position 39 of SEQ ID NO: 2896
gggcgaagucugcaagaga

SEQ ID NO: 224929 - RNA, 19 nt, Artificial Sequence
  Description of Artificial Sequence: Synthetic oligonucleotide
  Antisense strand to SEQ ID NO: 224928
ucucuugcagacuucgccc

SEQ ID NO: 224930 - RNA, 19 nt, Artificial Sequence
  Description of Artificial Sequence: Synthetic oligonucleotide
  Sense strand starting at position 69 of SEQ ID NO: 2896
ggguguggucacuggcaaa

SEQ ID NO: 224931 - RNA, 19 nt, Artificial Sequence
  Description of Artificial Sequence: Synthetic oligonucleotide
  Antisense strand to SEQ ID NO: 224930
uuugccagugaccacaccc

SEQ ID NO: 224932 - RNA, 19 nt, Artificial Sequence
  Description of Artificial Sequence: Synthetic oligonucleotide
  Sense strand starting at position 131 of SEQ ID NO: 2896
ucacccuugcgggaucauu

SEQ ID NO: 224933 - RNA, 19 nt, Artificial Sequence
  Description of Artificial Sequence: Synthetic oligonucleotide
  Antisense strand to SEQ ID NO: 224932
aaugaucccgcaaggguga

SEQ ID NO: 224934 - RNA, 19 nt, Artificial Sequence
  Description of Artificial Sequence: Synthetic oligonucleotide
  Sense strand starting at position 523 of SEQ ID NO: 2896
ggagguuccgcagggagua

SEQ ID NO: 224935 - RNA, 19 nt, Artificial Sequence
  Description of Artificial Sequence: Synthetic oligonucleotide
  Antisense strand to SEQ ID NO: 224934
uacucccugcggaaccucc

SEQ ID NO: 224936 - RNA, 19 nt, Artificial Sequence
  Description of Artificial Sequence: Synthetic oligonucleotide
  Sense strand starting at position 583 of SEQ ID NO: 2896
ccugguuugucgucggaug

SEQ ID NO: 224937 - RNA, 19 nt, Artificial Sequence
  Description of Artificial Sequence: Synthetic oligonucleotide
  Antisense strand to SEQ ID NO: 224936
cauccgacgacaaaccagg

SEQ ID NO: 224938 - RNA, 19 nt, Artificial Sequence
  Description of Artificial Sequence: Synthetic oligonucleotide
  Sense strand starting at position 585 of SEQ ID NO: 2896
ugguuugucgucggaugga

SEQ ID NO: 224939 - RNA, 19 nt, Artificial Sequence
  Description of Artificial Sequence: Synthetic oligonucleotide
  Antisense strand to SEQ ID NO: 224938
uccauccgacgacaaacca

SEQ ID NO: 224940 - RNA, 19 nt, Artificial Sequence
  Description of Artificial Sequence: Synthetic oligonucleotide
  Sense strand starting at position 760 of SEQ ID NO: 2896
gguuucaagccuggagaca

SEQ ID NO: 224941 - RNA, 19 nt, Artificial Sequence
  Description of Artificial Sequence: Synthetic oligonucleotide
  Antisense strand to SEQ ID NO: 224940
ugucuccaggcuugaaacc

SEQ ID NO: 224942 - RNA, 19 nt, Artificial Sequence
  Description of Artificial Sequence: Synthetic oligonucleotide
  Sense strand starting at position 1337 of SEQ ID NO: 2896
cgcugagaucgaugcugca

SEQ ID NO: 224943 - RNA, 19 nt, Artificial Sequence
  Description of Artificial Sequence: Synthetic oligonucleotide
  Antisense strand to SEQ ID NO: 224942
ugcagcaucgaucucagcg

SEQ ID NO: 224944 - RNA, 19 nt, Artificial Sequence
  Description of Artificial Sequence: Synthetic oligonucleotide
  Sense strand starting at position 1778 of SEQ ID NO: 2896
gcauuaaacgcuuacuaug

SEQ ID NO: 224945 - RNA, 19 nt, Artificial Sequence
  Description of Artificial Sequence: Synthetic oligonucleotide
  Antisense strand to SEQ ID NO: 224944
cauaguaagcguuuaaugc

SEQ ID NO: 224946 - RNA, 19 nt, Artificial Sequence
  Description of Artificial Sequence: Synthetic oligonucleotide
  Sense strand starting at position 2690 of SEQ ID NO: 2896
gcgggauugcgggaugcaa

SEQ ID NO: 224947 - RNA, 19 nt, Artificial Sequence
  Description of Artificial Sequence: Synthetic oligonucleotide
  Antisense strand to SEQ ID NO: 224946
uugcaucccgcaaucccgc

SEQ ID NO: 224948 - RNA, 19 nt, Artificial Sequence
  Description of Artificial Sequence: Synthetic oligonucleotide
  Sense strand starting at position 2715 of SEQ ID NO: 2896
gggugggcguuauaggaaa

SEQ ID NO: 224949 - RNA, 19 nt, Artificial Sequence
  Description of Artificial Sequence: Synthetic oligonucleotide
  Antisense strand to SEQ ID NO: 224948
uuuccuauaacgcccaccc

SEQ ID NO: 224950 - RNA, 19 nt, Artificial Sequence
  Description of Artificial Sequence: Synthetic oligonucleotide
  Sense strand starting at position 2820 of SEQ ID NO: 2896
ucucuccacugagaagauu

SEQ ID NO: 224951 - RNA, 19 nt, Artificial Sequence
  Description of Artificial Sequence: Synthetic oligonucleotide
  Antisense strand to SEQ ID NO: 224950
aaucuucucaguggagaga

SEQ ID NO: 224952 - RNA, 19 nt, Artificial Sequence
  Description of Artificial Sequence: Synthetic oligonucleotide
  Sense strand starting at position 2881 of SEQ ID NO: 2896
ggcccagugccugucuuau

SEQ ID NO: 224953 - RNA, 19 nt, Artificial Sequence
  Description of Artificial Sequence: Synthetic oligonucleotide
  Antisense strand to SEQ ID NO: 224952
auaagacaggcacugggcc

SEQ ID NO: 224954 - RNA, 19 nt, Artificial Sequence
  Description of Artificial Sequence: Synthetic oligonucleotide
  Sense strand starting at position 2883 of SEQ ID NO: 2896
cccagugccugucuuauuu

SEQ ID NO: 224955 - RNA, 19 nt, Artificial Sequence
  Description of Artificial Sequence: Synthetic oligonucleotide
  Antisense strand to SEQ ID NO: 224954
aaauaagacaggcacuggg

SEQ ID NO: 224956 - RNA, 19 nt, Artificial Sequence
  Description of Artificial Sequence: Synthetic oligonucleotide
  Sense strand starting at position 2920 of SEQ ID NO: 2896
cagcgaagccuuuggaaau

SEQ ID NO: 224957 - RNA, 19 nt, Artificial Sequence
  Description of Artificial Sequence: Synthetic oligonucleotide
  Antisense strand to SEQ ID NO: 224956
auuuccaaaggcuucgcug

SEQ ID NO: 224958 - RNA, 19 nt, Artificial Sequence
  Description of Artificial Sequence: Synthetic oligonucleotide
  Sense strand starting at position 2921 of SEQ ID NO: 2896
agcgaagccuuuggaaauu

SEQ ID NO: 224959 - RNA, 19 nt, Artificial Sequence
  Description of Artificial Sequence: Synthetic oligonucleotide
  Antisense strand to SEQ ID NO: 224958
aauuuccaaaggcuucgcu

SEQ ID NO: 224960 - RNA, 19 nt, Artificial Sequence
  Description of Artificial Sequence: Synthetic oligonucleotide
  Sense strand starting at position 3086 of SEQ ID NO: 2896
ugccauugaucuguguuau

SEQ ID NO: 224961 - RNA, 19 nt, Artificial Sequence
  Description of Artificial Sequence: Synthetic oligonucleotide
  Antisense strand to SEQ ID NO: 224960
auaacacagaucaauggca

SEQ ID NO: 224962 - RNA, 19 nt, Artificial Sequence
  Description of Artificial Sequence: Synthetic oligonucleotide
  Sense strand starting at position 3087 of SEQ ID NO: 2896
gccauugaucuguguuauu

SEQ ID NO: 224963 - RNA, 19 nt, Artificial Sequence
  Description of Artificial Sequence: Synthetic oligonucleotide
  Antisense strand to SEQ ID NO: 224962
aauaacacagaucaauggc

SEQ ID NO: 224964 - RNA, 19 nt, Artificial Sequence
  Description of Artificial Sequence: Synthetic oligonucleotide
  Sense strand starting at position 3121 of SEQ ID NO: 2896
aauaguuuggauuagucau

SEQ ID NO: 224965 - RNA, 19 nt, Artificial Sequence
  Description of Artificial Sequence: Synthetic oligonucleotide
  Antisense strand to SEQ ID NO: 224964
augacuaauccaaacuauu

SEQ ID NO: 224966 - RNA, 19 nt, Artificial Sequence
  Description of Artificial Sequence: Synthetic oligonucleotide
  Sense strand starting at position 3127 of SEQ ID NO: 2896
uuggauuagucauuugccu

SEQ ID NO: 224967 - RNA, 19 nt, Artificial Sequence
  Description of Artificial Sequence: Synthetic oligonucleotide
  Antisense strand to SEQ ID NO: 224966
aggcaaaugacuaauccaa

SEQ ID NO: 224968 - RNA, 19 nt, Artificial Sequence
  Description of Artificial Sequence: Synthetic oligonucleotide
  Sense strand starting at position 3297 of SEQ ID NO: 2896
ggugguucucuuugcagga

SEQ ID NO: 224969 - RNA, 19 nt, Artificial Sequence
  Description of Artificial Sequence: Synthetic oligonucleotide
  Antisense strand to SEQ ID NO: 224968
uccugcaaagagaaccacc

SEQ ID NO: 224970 - RNA, 19 nt, Artificial Sequence
  Description of Artificial Sequence: Synthetic oligonucleotide
  Sense strand starting at position 3298 of SEQ ID NO: 2896
gugguucucuuugcaggau

SEQ ID NO: 224971 - RNA, 19 nt, Artificial Sequence
  Description of Artificial Sequence: Synthetic oligonucleotide
  Antisense strand to SEQ ID NO: 224970
auccugcaaagagaaccac

SEQ ID NO: 224972 - RNA, 19 nt, Artificial Sequence
  Description of Artificial Sequence: Synthetic oligonucleotide
  Sense strand starting at position 3299 of SEQ ID NO: 2896
ugguucucuuugcaggaua

SEQ ID NO: 224973 - RNA, 19 nt, Artificial Sequence
  Description of Artificial Sequence: Synthetic oligonucleotide
  Antisense strand to SEQ ID NO: 224972
uauccugcaaagagaacca

SEQ ID NO: 224974 - RNA, 19 nt, Artificial Sequence
  Description of Artificial Sequence: Synthetic oligonucleotide
  Sense strand starting at position 3301 of SEQ ID NO: 2896
guucucuuugcaggauacu

SEQ ID NO: 224975 - RNA, 19 nt, Artificial Sequence
  Description of Artificial Sequence: Synthetic oligonucleotide
  Antisense strand to SEQ ID NO: 224974
aguauccugcaaagagaac

SEQ ID NO: 224976 - RNA, 19 nt, Artificial Sequence
  Description of Artificial Sequence: Synthetic oligonucleotide
  Sense strand starting at position 3302 of SEQ ID NO: 2896
uucucuuugcaggauacuu

SEQ ID NO: 224977 - RNA, 19 nt, Artificial Sequence
  Description of Artificial Sequence: Synthetic oligonucleotide
  Antisense strand to SEQ ID NO: 224976
aaguauccugcaaagagaa

SEQ ID NO: 224978 - RNA, 19 nt, Artificial Sequence
  Description of Artificial Sequence: Synthetic oligonucleotide
  Sense strand starting at position 3477 of SEQ ID NO: 2896
uggccuuugagggaugcau

SEQ ID NO: 224979 - RNA, 19 nt, Artificial Sequence
  Description of Artificial Sequence: Synthetic oligonucleotide
  Antisense strand to SEQ ID NO: 224978
augcaucccucaaaggcca

SEQ ID NO: 224980 - RNA, 19 nt, Artificial Sequence
  Description of Artificial Sequence: Synthetic oligonucleotide
  Sense strand starting at position 3479 of SEQ ID NO: 2896
gccuuugagggaugcauuu

SEQ ID NO: 224981 - RNA, 19 nt, Artificial Sequence
  Description of Artificial Sequence: Synthetic oligonucleotide
  Antisense strand to SEQ ID NO: 224980
aaaugcaucccucaaaggc

SEQ ID NO: 224982 - RNA, 19 nt, Artificial Sequence
  Description of Artificial Sequence: Synthetic oligonucleotide
  Sense strand starting at position 3488 of SEQ ID NO: 2896
ggaugcauuucuggauuac

SEQ ID NO: 224983 - RNA, 19 nt, Artificial Sequence
  Description of Artificial Sequence: Synthetic oligonucleotide
  Antisense strand to SEQ ID NO: 224982
guaauccagaaaugcaucc

SEQ ID NO: 224984 - RNA, 19 nt, Artificial Sequence
  Description of Artificial Sequence: Synthetic oligonucleotide
  Sense strand starting at position 3617 of SEQ ID NO: 2896
ccgggauguggcugugaaa

SEQ ID NO: 224985 - RNA, 19 nt, Artificial Sequence
  Description of Artificial Sequence: Synthetic oligonucleotide
  Antisense strand to SEQ ID NO: 224984
uuucacagccacaucccgg

SEQ ID NO: 224986 - RNA, 19 nt, Artificial Sequence
  Description of Artificial Sequence: Synthetic oligonucleotide
  Sense strand starting at position 3814 of SEQ ID NO: 2896
gcccucuagugacuguaaa

SEQ ID NO: 224987 - RNA, 19 nt, Artificial Sequence
  Description of Artificial Sequence: Synthetic oligonucleotide
  Antisense strand to SEQ ID NO: 224986
uuuacagucacuagagggc

SEQ ID NO: 224988 - RNA, 19 nt, Artificial Sequence
  Description of Artificial Sequence: Synthetic oligonucleotide
  Sense strand starting at position 3815 of SEQ ID NO: 2896
cccucuagugacuguaaau

SEQ ID NO: 224989 - RNA, 19 nt, Artificial Sequence
  Description of Artificial Sequence: Synthetic oligonucleotide
  Antisense strand to SEQ ID NO: 224988
auuuacagucacuagaggg

SEQ ID NO: 224990 - RNA, 19 nt, Artificial Sequence
  Description of Artificial Sequence: Synthetic oligonucleotide
  Sense strand starting at position 3842 of SEQ ID NO: 2896
cagcgucucguagaccuua

SEQ ID NO: 224991 - RNA, 19 nt, Artificial Sequence
  Description of Artificial Sequence: Synthetic oligonucleotide
  Antisense strand to SEQ ID NO: 224990
uaaggucuacgagacgcug

SEQ ID NO: 224992 - RNA, 19 nt, Artificial Sequence
  Description of Artificial Sequence: Synthetic oligonucleotide
  Sense strand starting at position 3863 of SEQ ID NO: 2896
uuuggauucuagcaucuua

SEQ ID NO: 224993 - RNA, 19 nt, Artificial Sequence
  Description of Artificial Sequence: Synthetic oligonucleotide
  Antisense strand to SEQ ID NO: 224992
uaagaugcuagaauccaaa

SEQ ID NO: 224994 - RNA, 19 nt, Artificial Sequence
  Description of Artificial Sequence: Synthetic oligonucleotide
  Sense strand starting at position 3920 of SEQ ID NO: 2896
gccucuacgucaucuguca

SEQ ID NO: 224995 - RNA, 19 nt, Artificial Sequence
  Description of Artificial Sequence: Synthetic oligonucleotide
  Antisense strand to SEQ ID NO: 224994
ugacagaugacguagaggc

SEQ ID NO: 224996 - RNA, 19 nt, Artificial Sequence
  Description of Artificial Sequence: Synthetic oligonucleotide
  Sense strand starting at position 3932 of SEQ ID NO: 2896
ucugucaguuuaggauauu

SEQ ID NO: 224997 - RNA, 19 nt, Artificial Sequence
  Description of Artificial Sequence: Synthetic oligonucleotide
  Antisense strand to SEQ ID NO: 224996
aauauccuaaacugacaga

SEQ ID NO: 224998 - RNA, 19 nt, Artificial Sequence
  Description of Artificial Sequence: Synthetic oligonucleotide
  Sense strand starting at position 3935 of SEQ ID NO: 2896
gucaguuuaggauauugau

SEQ ID NO: 224999 - RNA, 19 nt, Artificial Sequence
  Description of Artificial Sequence: Synthetic oligonucleotide
  Antisense strand to SEQ ID NO: 224998
aucaauauccuaaacugac

SEQ ID NO: 225000 - RNA, 19 nt, Artificial Sequence
  Description of Artificial Sequence: Synthetic oligonucleotide
  Sense strand starting at position 3941 of SEQ ID NO: 2896
uuaggauauugauaaaggu

SEQ ID NO: 225001 - RNA, 19 nt, Artificial Sequence
  Description of Artificial Sequence: Synthetic oligonucleotide
  Antisense strand to SEQ ID NO: 225000
accuuuaucaauauccuaa

SEQ ID NO: 225002 - RNA, 19 nt, Artificial Sequence
  Description of Artificial Sequence: Synthetic oligonucleotide
  Sense strand starting at position 16 of SEQ ID NO: 2897
cggugacuugcaagguguu

SEQ ID NO: 225003 - RNA, 19 nt, Artificial Sequence
  Description of Artificial Sequence: Synthetic oligonucleotide
  Antisense strand to SEQ ID NO: 225002
aacaccuugcaagucaccg

SEQ ID NO: 225004 - RNA, 19 nt, Artificial Sequence
  Description of Artificial Sequence: Synthetic oligonucleotide
  Sense strand starting at position 60 of SEQ ID NO: 2897
cguggaaagcccugcugaa

SEQ ID NO: 225005 - RNA, 19 nt, Artificial Sequence
  Description of Artificial Sequence: Synthetic oligonucleotide
  Antisense strand to SEQ ID NO: 225004
uucagcagggcuuuccacg

SEQ ID NO: 225006 - RNA, 19 nt, Artificial Sequence
  Description of Artificial Sequence: Synthetic oligonucleotide
  Sense strand starting at position 149 of SEQ ID NO: 2897
ccagucuuaggucagcaga

SEQ ID NO: 225007 - RNA, 19 nt, Artificial Sequence
  Description of Artificial Sequence: Synthetic oligonucleotide
  Antisense strand to SEQ ID NO: 225006
ucugcugaccuaagacugg

SEQ ID NO: 225008 - RNA, 19 nt, Artificial Sequence
  Description of Artificial Sequence: Synthetic oligonucleotide
  Sense strand starting at position 151 of SEQ ID NO: 2897
agucuuaggucagcagaca

SEQ ID NO: 225009 - RNA, 19 nt, Artificial Sequence
  Description of Artificial Sequence: Synthetic oligonucleotide
  Antisense strand to SEQ ID NO: 225008
ugucugcugaccuaagacu

SEQ ID NO: 225010 - RNA, 19 nt, Artificial Sequence
  Description of Artificial Sequence: Synthetic oligonucleotide
  Sense strand starting at position 152 of SEQ ID NO: 2897
gucuuaggucagcagacaa

SEQ ID NO: 225011 - RNA, 19 nt, Artificial Sequence
  Description of Artificial Sequence: Synthetic oligonucleotide
  Antisense strand to SEQ ID NO: 225010
uugucugcugaccuaagac

SEQ ID NO: 225012 - RNA, 19 nt, Artificial Sequence
  Description of Artificial Sequence: Synthetic oligonucleotide
  Sense strand starting at position 174 of SEQ ID NO: 2897
gggcgaagucugcaagaga

SEQ ID NO: 225013 - RNA, 19 nt, Artificial Sequence
  Description of Artificial Sequence: Synthetic oligonucleotide
  Antisense strand to SEQ ID NO: 225012
ucucuugcagacuucgccc

SEQ ID NO: 225014 - RNA, 19 nt, Artificial Sequence
  Description of Artificial Sequence: Synthetic oligonucleotide
  Sense strand starting at position 204 of SEQ ID NO: 2897
ggguguggucacuggcaaa

SEQ ID NO: 225015 - RNA, 19 nt, Artificial Sequence
  Description of Artificial Sequence: Synthetic oligonucleotide
  Antisense strand to SEQ ID NO: 225014
uuugccagugaccacaccc

SEQ ID NO: 225016 - RNA, 19 nt, Artificial Sequence
  Description of Artificial Sequence: Synthetic oligonucleotide
  Sense strand starting at position 266 of SEQ ID NO: 2897
ucacccuugcgggaucauu

SEQ ID NO: 225017 - RNA, 19 nt, Artificial Sequence
  Description of Artificial Sequence: Synthetic oligonucleotide
  Antisense strand to SEQ ID NO: 225016
aaugaucccgcaaggguga

SEQ ID NO: 225018 - RNA, 19 nt, Artificial Sequence
  Description of Artificial Sequence: Synthetic oligonucleotide
  Sense strand starting at position 658 of SEQ ID NO: 2897
ggagguuccgcagggagua

SEQ ID NO: 225019 - RNA, 19 nt, Artificial Sequence
  Description of Artificial Sequence: Synthetic oligonucleotide
  Antisense strand to SEQ ID NO: 225018
uacucccugcggaaccucc

SEQ ID NO: 225020 - RNA, 19 nt, Artificial Sequence
  Description of Artificial Sequence: Synthetic oligonucleotide
  Sense strand starting at position 718 of SEQ ID NO: 2897
ccugguuugucgucggaug

SEQ ID NO: 225021 - RNA, 19 nt, Artificial Sequence
  Description of Artificial Sequence: Synthetic oligonucleotide
  Antisense strand to SEQ ID NO: 225020
cauccgacgacaaaccagg

SEQ ID NO: 225022 - RNA, 19 nt, Artificial Sequence
  Description of Artificial Sequence: Synthetic oligonucleotide
  Sense strand starting at position 720 of SEQ ID NO: 2897
ugguuugucgucggaugga

SEQ ID NO: 225023 - RNA, 19 nt, Artificial Sequence
  Description of Artificial Sequence: Synthetic oligonucleotide
  Antisense strand to SEQ ID NO: 225022
uccauccgacgacaaacca

SEQ ID NO: 225024 - RNA, 19 nt, Artificial Sequence
  Description of Artificial Sequence: Synthetic oligonucleotide
  Sense strand starting at position 895 of SEQ ID NO: 2897
gguuucaagccuggagaca

SEQ ID NO: 225025 - RNA, 19 nt, Artificial Sequence
  Description of Artificial Sequence: Synthetic oligonucleotide
  Antisense strand to SEQ ID NO: 225024
ugucuccaggcuugaaacc

SEQ ID NO: 225026 - RNA, 19 nt, Artificial Sequence
  Description of Artificial Sequence: Synthetic oligonucleotide
  Sense strand starting at position 1472 of SEQ ID NO: 2897
cgcugagaucgaugcugca

SEQ ID NO: 225027 - RNA, 19 nt, Artificial Sequence
  Description of Artificial Sequence: Synthetic oligonucleotide
  Antisense strand to SEQ ID NO: 225026
ugcagcaucgaucucagcg

SEQ ID NO: 225028 - RNA, 19 nt, Artificial Sequence
  Description of Artificial Sequence: Synthetic oligonucleotide
  Sense strand starting at position 1913 of SEQ ID NO: 2897
gcauuaaacgcuuacuaug

SEQ ID NO: 225029 - RNA, 19 nt, Artificial Sequence
  Description of Artificial Sequence: Synthetic oligonucleotide
  Antisense strand to SEQ ID NO: 225028
cauaguaagcguuuaaugc

SEQ ID NO: 225030 - RNA, 19 nt, Artificial Sequence
  Description of Artificial Sequence: Synthetic oligonucleotide
  Sense strand starting at position 2825 of SEQ ID NO: 2897
gcgggauugcgggaugcaa

SEQ ID NO: 225031 - RNA, 19 nt, Artificial Sequence
  Description of Artificial Sequence: Synthetic oligonucleotide
  Antisense strand to SEQ ID NO: 225030
uugcaucccgcaaucccgc

SEQ ID NO: 225032 - RNA, 19 nt, Artificial Sequence
  Description of Artificial Sequence: Synthetic oligonucleotide
  Sense strand starting at position 2850 of SEQ ID NO: 2897
gggugggcguuauaggaaa

SEQ ID NO: 225033 - RNA, 19 nt, Artificial Sequence
  Description of Artificial Sequence: Synthetic oligonucleotide
  Antisense strand to SEQ ID NO: 225032
uuuccuauaacgcccaccc

SEQ ID NO: 225034 - RNA, 19 nt, Artificial Sequence
  Description of Artificial Sequence: Synthetic oligonucleotide
  Sense strand starting at position 2955 of SEQ ID NO: 2897
ucucuccacugagaagauu

SEQ ID NO: 225035 - RNA, 19 nt, Artificial Sequence
  Description of Artificial Sequence: Synthetic oligonucleotide
  Antisense strand to SEQ ID NO: 225034
aaucuucucaguggagaga

SEQ ID NO: 225036 - RNA, 19 nt, Artificial Sequence
  Description of Artificial Sequence: Synthetic oligonucleotide
  Sense strand starting at position 3016 of SEQ ID NO: 2897
ggcccagugccugucuuau

SEQ ID NO: 225037 - RNA, 19 nt, Artificial Sequence
  Description of Artificial Sequence: Synthetic oligonucleotide
  Antisense strand to SEQ ID NO: 225036
auaagacaggcacugggcc

SEQ ID NO: 225038 - RNA, 19 nt, Artificial Sequence
  Description of Artificial Sequence: Synthetic oligonucleotide
  Sense strand starting at position 3018 of SEQ ID NO: 2897
cccagugccugucuuauuu

SEQ ID NO: 225039 - RNA, 19 nt, Artificial Sequence
  Description of Artificial Sequence: Synthetic oligonucleotide
  Antisense strand to SEQ ID NO: 225038
aaauaagacaggcacuggg

SEQ ID NO: 225040 - RNA, 19 nt, Artificial Sequence
  Description of Artificial Sequence: Synthetic oligonucleotide
  Sense strand starting at position 3055 of SEQ ID NO: 2897
cagcgaagccuuuggaaau

SEQ ID NO: 225041 - RNA, 19 nt, Artificial Sequence
  Description of Artificial Sequence: Synthetic oligonucleotide
  Antisense strand to SEQ ID NO: 225040
auuuccaaaggcuucgcug

SEQ ID NO: 225042 - RNA, 19 nt, Artificial Sequence
  Description of Artificial Sequence: Synthetic oligonucleotide
  Sense strand starting at position 3056 of SEQ ID NO: 2897
agcgaagccuuuggaaauu

SEQ ID NO: 225043 - RNA, 19 nt, Artificial Sequence
  Description of Artificial Sequence: Synthetic oligonucleotide
  Antisense strand to SEQ ID NO: 225042
aauuuccaaaggcuucgcu

SEQ ID NO: 225044 - RNA, 19 nt, Artificial Sequence
  Description of Artificial Sequence: Synthetic oligonucleotide
  Sense strand starting at position 3221 of SEQ ID NO: 2897
ugccauugaucuguguuau

SEQ ID NO: 225045 - RNA, 19 nt, Artificial Sequence
  Description of Artificial Sequence: Synthetic oligonucleotide
  Antisense strand to SEQ ID NO: 225044
auaacacagaucaauggca

SEQ ID NO: 225046 - RNA, 19 nt, Artificial Sequence
  Description of Artificial Sequence: Synthetic oligonucleotide
  Sense strand starting at position 3222 of SEQ ID NO: 2897
gccauugaucuguguuauu

SEQ ID NO: 225047 - RNA, 19 nt, Artificial Sequence
  Description of Artificial Sequence: Synthetic oligonucleotide
  Antisense strand to SEQ ID NO: 225046
aauaacacagaucaauggc

SEQ ID NO: 225048 - RNA, 19 nt, Artificial Sequence
  Description of Artificial Sequence: Synthetic oligonucleotide
  Sense strand starting at position 3256 of SEQ ID NO: 2897
aauaguuuggauuagucau

SEQ ID NO: 225049 - RNA, 19 nt, Artificial Sequence
  Description of Artificial Sequence: Synthetic oligonucleotide
  Antisense strand to SEQ ID NO: 225048
augacuaauccaaacuauu

SEQ ID NO: 225050 - RNA, 19 nt, Artificial Sequence
  Description of Artificial Sequence: Synthetic oligonucleotide
  Sense strand starting at position 3262 of SEQ ID NO: 2897
uuggauuagucauuugccu

SEQ ID NO: 225051 - RNA, 19 nt, Artificial Sequence
  Description of Artificial Sequence: Synthetic oligonucleotide
  Antisense strand to SEQ ID NO: 225050
aggcaaaugacuaauccaa

SEQ ID NO: 225052 - RNA, 19 nt, Artificial Sequence
  Description of Artificial Sequence: Synthetic oligonucleotide
  Sense strand starting at position 3307 of SEQ ID NO: 2897
cguugcgaugcgcguuaaa

SEQ ID NO: 225053 - RNA, 19 nt, Artificial Sequence
  Description of Artificial Sequence: Synthetic oligonucleotide
  Antisense strand to SEQ ID NO: 225052
uuuaacgcgcaucgcaacg

SEQ ID NO: 225054 - RNA, 19 nt, Artificial Sequence
  Description of Artificial Sequence: Synthetic oligonucleotide
  Sense strand starting at position 3432 of SEQ ID NO: 2897
ggugguucucuuugcagga

SEQ ID NO: 225055 - RNA, 19 nt, Artificial Sequence
  Description of Artificial Sequence: Synthetic oligonucleotide
  Antisense strand to SEQ ID NO: 225054
uccugcaaagagaaccacc

SEQ ID NO: 225056 - RNA, 19 nt, Artificial Sequence
  Description of Artificial Sequence: Synthetic oligonucleotide
  Sense strand starting at position 3433 of SEQ ID NO: 2897
gugguucucuuugcaggau

SEQ ID NO: 225057 - RNA, 19 nt, Artificial Sequence
  Description of Artificial Sequence: Synthetic oligonucleotide
  Antisense strand to SEQ ID NO: 225056
auccugcaaagagaaccac

SEQ ID NO: 225058 - RNA, 19 nt, Artificial Sequence
  Description of Artificial Sequence: Synthetic oligonucleotide
  Sense strand starting at position 3434 of SEQ ID NO: 2897
ugguucucuuugcaggaua

SEQ ID NO: 225059 - RNA, 19 nt, Artificial Sequence
  Description of Artificial Sequence: Synthetic oligonucleotide
  Antisense strand to SEQ ID NO: 225058
uauccugcaaagagaacca

SEQ ID NO: 225060 - RNA, 19 nt, Artificial Sequence
  Description of Artificial Sequence: Synthetic oligonucleotide
  Sense strand starting at position 3436 of SEQ ID NO: 2897
guucucuuugcaggauacu

SEQ ID NO: 225061 - RNA, 19 nt, Artificial Sequence
  Description of Artificial Sequence: Synthetic oligonucleotide
  Antisense strand to SEQ ID NO: 225060
aguauccugcaaagagaac

SEQ ID NO: 225062 - RNA, 19 nt, Artificial Sequence
  Description of Artificial Sequence: Synthetic oligonucleotide
  Sense strand starting at position 3437 of SEQ ID NO: 2897
uucucuuugcaggauacuu

SEQ ID NO: 225063 - RNA, 19 nt, Artificial Sequence
  Description of Artificial Sequence: Synthetic oligonucleotide
  Antisense strand to SEQ ID NO: 225062
aaguauccugcaaagagaa

SEQ ID NO: 225064 - RNA, 19 nt, Artificial Sequence
  Description of Artificial Sequence: Synthetic oligonucleotide
  Sense strand starting at position 3612 of SEQ ID NO: 2897
uggccuuugagggaugcau

SEQ ID NO: 225065 - RNA, 19 nt, Artificial Sequence
  Description of Artificial Sequence: Synthetic oligonucleotide
  Antisense strand to SEQ ID NO: 225064
augcaucccucaaaggcca

SEQ ID NO: 225066 - RNA, 19 nt, Artificial Sequence
  Description of Artificial Sequence: Synthetic oligonucleotide
  Sense strand starting at position 3614 of SEQ ID NO: 2897
gccuuugagggaugcauuu

SEQ ID NO: 225067 - RNA, 19 nt, Artificial Sequence
  Description of Artificial Sequence: Synthetic oligonucleotide
  Antisense strand to SEQ ID NO: 225066
aaaugcaucccucaaaggc

SEQ ID NO: 225068 - RNA, 19 nt, Artificial Sequence
  Description of Artificial Sequence: Synthetic oligonucleotide
  Sense strand starting at position 3623 of SEQ ID NO: 2897
ggaugcauuucuggauuac

SEQ ID NO: 225069 - RNA, 19 nt, Artificial Sequence
  Description of Artificial Sequence: Synthetic oligonucleotide
  Antisense strand to SEQ ID NO: 225068
guaauccagaaaugcaucc

SEQ ID NO: 225070 - RNA, 19 nt, Artificial Sequence
  Description of Artificial Sequence: Synthetic oligonucleotide
  Sense strand starting at position 3752 of SEQ ID NO: 2897
ccgggauguggcugugaaa

SEQ ID NO: 225071 - RNA, 19 nt, Artificial Sequence
  Description of Artificial Sequence: Synthetic oligonucleotide
  Antisense strand to SEQ ID NO: 225070
uuucacagccacaucccgg

SEQ ID NO: 225072 - RNA, 19 nt, Artificial Sequence
  Description of Artificial Sequence: Synthetic oligonucleotide
  Sense strand starting at position 3949 of SEQ ID NO: 2897
gcccucuagugacuguaaa

SEQ ID NO: 225073 - RNA, 19 nt, Artificial Sequence
  Description of Artificial Sequence: Synthetic oligonucleotide
  Antisense strand to SEQ ID NO: 225072
uuuacagucacuagagggc

SEQ ID NO: 225074 - RNA, 19 nt, Artificial Sequence
  Description of Artificial Sequence: Synthetic oligonucleotide
  Sense strand starting at position 3950 of SEQ ID NO: 2897
cccucuagugacuguaaau

SEQ ID NO: 225075 - RNA, 19 nt, Artificial Sequence
  Description of Artificial Sequence: Synthetic oligonucleotide
  Antisense strand to SEQ ID NO: 225074
auuuacagucacuagaggg

SEQ ID NO: 225076 - RNA, 19 nt, Artificial Sequence
  Description of Artificial Sequence: Synthetic oligonucleotide
  Sense strand starting at position 3977 of SEQ ID NO: 2897
cagcgucucguagaccuua

SEQ ID NO: 225077 - RNA, 19 nt, Artificial Sequence
  Description of Artificial Sequence: Synthetic oligonucleotide
  Antisense strand to SEQ ID NO: 225076
uaaggucuacgagacgcug

SEQ ID NO: 225078 - RNA, 19 nt, Artificial Sequence
  Description of Artificial Sequence: Synthetic oligonucleotide
  Sense strand starting at position 116 of SEQ ID NO: 2899
uuugauauugaaggucaga

SEQ ID NO: 225079 - RNA, 19 nt, Artificial Sequence
  Description of Artificial Sequence: Synthetic oligonucleotide
  Antisense strand to SEQ ID NO: 225078
ucugaccuucaauaucaaa

SEQ ID NO: 225080 - RNA, 19 nt, Artificial Sequence
  Description of Artificial Sequence: Synthetic oligonucleotide
  Sense strand starting at position 143 of SEQ ID NO: 2899
cugugacuuccugagccua

SEQ ID NO: 225081 - RNA, 19 nt, Artificial Sequence
  Description of Artificial Sequence: Synthetic oligonucleotide
  Antisense strand to SEQ ID NO: 225080
uaggcucaggaagucacag

SEQ ID NO: 225082 - RNA, 19 nt, Artificial Sequence
  Description of Artificial Sequence: Synthetic oligonucleotide
  Sense strand starting at position 221 of SEQ ID NO: 2899
ccagcugggaagugaaauu

SEQ ID NO: 225083 - RNA, 19 nt, Artificial Sequence
  Description of Artificial Sequence: Synthetic oligonucleotide
  Antisense strand to SEQ ID NO: 225082
aauuucacuucccagcugg

SEQ ID NO: 225084 - RNA, 19 nt, Artificial Sequence
  Description of Artificial Sequence: Synthetic oligonucleotide
  Sense strand starting at position 363 of SEQ ID NO: 2899
guccuuacacuuugggaga

SEQ ID NO: 225085 - RNA, 19 nt, Artificial Sequence
  Description of Artificial Sequence: Synthetic oligonucleotide
  Antisense strand to SEQ ID NO: 225084
ucucccaaaguguaaggac

SEQ ID NO: 225086 - RNA, 19 nt, Artificial Sequence
  Description of Artificial Sequence: Synthetic oligonucleotide
  Sense strand starting at position 465 of SEQ ID NO: 2899
ggaggugcgcgccuguauu

SEQ ID NO: 225087 - RNA, 19 nt, Artificial Sequence
  Description of Artificial Sequence: Synthetic oligonucleotide
  Antisense strand to SEQ ID NO: 225086
aauacaggcgcgcaccucc

SEQ ID NO: 225088 - RNA, 19 nt, Artificial Sequence
  Description of Artificial Sequence: Synthetic oligonucleotide
  Sense strand starting at position 624 of SEQ ID NO: 2899
agugaguugggcuaaggga

SEQ ID NO: 225089 - RNA, 19 nt, Artificial Sequence
  Description of Artificial Sequence: Synthetic oligonucleotide
  Antisense strand to SEQ ID NO: 225088
ucccuuagcccaacucacu

SEQ ID NO: 225090 - RNA, 19 nt, Artificial Sequence
  Description of Artificial Sequence: Synthetic oligonucleotide
  Sense strand starting at position 661 of SEQ ID NO: 2899
gaggaauggguuuguuucu

SEQ ID NO: 225091 - RNA, 19 nt, Artificial Sequence
  Description of Artificial Sequence: Synthetic oligonucleotide
  Antisense strand to SEQ ID NO: 225090
agaaacaaacccauuccuc

SEQ ID NO: 225092 - RNA, 19 nt, Artificial Sequence
  Description of Artificial Sequence: Synthetic oligonucleotide
  Sense strand starting at position 662 of SEQ ID NO: 2899
aggaauggguuuguuucua

SEQ ID NO: 225093 - RNA, 19 nt, Artificial Sequence
  Description of Artificial Sequence: Synthetic oligonucleotide
  Antisense strand to SEQ ID NO: 225092
uagaaacaaacccauuccu

SEQ ID NO: 225094 - RNA, 19 nt, Artificial Sequence
  Description of Artificial Sequence: Synthetic oligonucleotide
  Sense strand starting at position 666 of SEQ ID NO: 2899
auggguuuguuucuacuga

SEQ ID NO: 225095 - RNA, 19 nt, Artificial Sequence
  Description of Artificial Sequence: Synthetic oligonucleotide
  Antisense strand to SEQ ID NO: 225094
ucaguagaaacaaacccau

SEQ ID NO: 225096 - RNA, 19 nt, Artificial Sequence
  Description of Artificial Sequence: Synthetic oligonucleotide
  Sense strand starting at position 690 of SEQ ID NO: 2899
gggaauuauauucggguaa

SEQ ID NO: 225097 - RNA, 19 nt, Artificial Sequence
  Description of Artificial Sequence: Synthetic oligonucleotide
  Antisense strand to SEQ ID NO: 225096
uuacccgaauauaauuccc

SEQ ID NO: 225098 - RNA, 19 nt, Artificial Sequence
  Description of Artificial Sequence: Synthetic oligonucleotide
  Sense strand starting at position 797 of SEQ ID NO: 2899
agguccaucucaucagcaa

SEQ ID NO: 225099 - RNA, 19 nt, Artificial Sequence
  Description of Artificial Sequence: Synthetic oligonucleotide
  Antisense strand to SEQ ID NO: 225098
uugcugaugagauggaccu

SEQ ID NO: 225100 - RNA, 19 nt, Artificial Sequence
  Description of Artificial Sequence: Synthetic oligonucleotide
  Sense strand starting at position 975 of SEQ ID NO: 2899
agaagugcucagggaacua

SEQ ID NO: 225101 - RNA, 19 nt, Artificial Sequence
  Description of Artificial Sequence: Synthetic oligonucleotide
  Antisense strand to SEQ ID NO: 225100
uaguucccugagcacuucu

SEQ ID NO: 225102 - RNA, 19 nt, Artificial Sequence
  Description of Artificial Sequence: Synthetic oligonucleotide
  Sense strand starting at position 1402 of SEQ ID NO: 2899
ggacuugggccauacucuu

SEQ ID NO: 225103 - RNA, 19 nt, Artificial Sequence
  Description of Artificial Sequence: Synthetic oligonucleotide
  Antisense strand to SEQ ID NO: 225102
aagaguauggcccaagucc

SEQ ID NO: 225104 - RNA, 19 nt, Artificial Sequence
  Description of Artificial Sequence: Synthetic oligonucleotide
  Sense strand starting at position 1629 of SEQ ID NO: 2899
gcuacugagaguuagucga

SEQ ID NO: 225105 - RNA, 19 nt, Artificial Sequence
  Description of Artificial Sequence: Synthetic oligonucleotide
  Antisense strand to SEQ ID NO: 225104
ucgacuaacucucaguagc

SEQ ID NO: 225106 - RNA, 19 nt, Artificial Sequence
  Description of Artificial Sequence: Synthetic oligonucleotide
  Sense strand starting at position 1631 of SEQ ID NO: 2899
uacugagaguuagucgaca

SEQ ID NO: 225107 - RNA, 19 nt, Artificial Sequence
  Description of Artificial Sequence: Synthetic oligonucleotide
  Antisense strand to SEQ ID NO: 225106
ugucgacuaacucucagua

SEQ ID NO: 225108 - RNA, 19 nt, Artificial Sequence
  Description of Artificial Sequence: Synthetic oligonucleotide
  Sense strand starting at position 1653 of SEQ ID NO: 2899
ccuauagucagguaguaga

SEQ ID NO: 225109 - RNA, 19 nt, Artificial Sequence
  Description of Artificial Sequence: Synthetic oligonucleotide
  Antisense strand to SEQ ID NO: 225108
ucuacuaccugacuauagg

SEQ ID NO: 225110 - RNA, 19 nt, Artificial Sequence
  Description of Artificial Sequence: Synthetic oligonucleotide
  Sense strand starting at position 1667 of SEQ ID NO: 2899
guagaaaucuaccugagac

SEQ ID NO: 225111 - RNA, 19 nt, Artificial Sequence
  Description of Artificial Sequence: Synthetic oligonucleotide
  Antisense strand to SEQ ID NO: 225110
gucucagguagauuucuac

SEQ ID NO: 225112 - RNA, 19 nt, Artificial Sequence
  Description of Artificial Sequence: Synthetic oligonucleotide
  Sense strand starting at position 1738 of SEQ ID NO: 2899
ggcaguagaaauuauguga

SEQ ID NO: 225113 - RNA, 19 nt, Artificial Sequence
  Description of Artificial Sequence: Synthetic oligonucleotide
  Antisense strand to SEQ ID NO: 225112
ucacauaauuucuacugcc

SEQ ID NO: 225114 - RNA, 19 nt, Artificial Sequence
  Description of Artificial Sequence: Synthetic oligonucleotide
  Sense strand starting at position 1742 of SEQ ID NO: 2899
guagaaauuaugugagacc

SEQ ID NO: 225115 - RNA, 19 nt, Artificial Sequence
  Description of Artificial Sequence: Synthetic oligonucleotide
  Antisense strand to SEQ ID NO: 225114
ggucucacauaauuucuac

SEQ ID NO: 225116 - RNA, 19 nt, Artificial Sequence
  Description of Artificial Sequence: Synthetic oligonucleotide
  Sense strand starting at position 1759 of SEQ ID NO: 2899
ccuaguaaccugugggaaa

SEQ ID NO: 225117 - RNA, 19 nt, Artificial Sequence
  Description of Artificial Sequence: Synthetic oligonucleotide
  Antisense strand to SEQ ID NO: 225116
uuucccacagguuacuagg

SEQ ID NO: 225118 - RNA, 19 nt, Artificial Sequence
  Description of Artificial Sequence: Synthetic oligonucleotide
  Sense strand starting at position 1761 of SEQ ID NO: 2899
uaguaaccugugggaaagu

SEQ ID NO: 225119 - RNA, 19 nt, Artificial Sequence
  Description of Artificial Sequence: Synthetic oligonucleotide
  Antisense strand to SEQ ID NO: 225118
acuuucccacagguuacua

SEQ ID NO: 225120 - RNA, 19 nt, Artificial Sequence
  Description of Artificial Sequence: Synthetic oligonucleotide
  Sense strand starting at position 2079 of SEQ ID NO: 2899
augugugaacucuauagau

SEQ ID NO: 225121 - RNA, 19 nt, Artificial Sequence
  Description of Artificial Sequence: Synthetic oligonucleotide
  Antisense strand to SEQ ID NO: 225120
aucuauagaguucacacau

SEQ ID NO: 225122 - RNA, 19 nt, Artificial Sequence
  Description of Artificial Sequence: Synthetic oligonucleotide
  Sense strand starting at position 2382 of SEQ ID NO: 2899
ccaugaauuuaaugugaca

SEQ ID NO: 225123 - RNA, 19 nt, Artificial Sequence
  Description of Artificial Sequence: Synthetic oligonucleotide
  Antisense strand to SEQ ID NO: 225122
ugucacauuaaauucaugg

SEQ ID NO: 225124 - RNA, 19 nt, Artificial Sequence
  Description of Artificial Sequence: Synthetic oligonucleotide
  Sense strand starting at position 2547 of SEQ ID NO: 2899
gugaaucuccugugggaca

SEQ ID NO: 225125 - RNA, 19 nt, Artificial Sequence
  Description of Artificial Sequence: Synthetic oligonucleotide
  Antisense strand to SEQ ID NO: 225124
ugucccacaggagauucac

SEQ ID NO: 225126 - RNA, 19 nt, Artificial Sequence
  Description of Artificial Sequence: Synthetic oligonucleotide
  Sense strand starting at position 2549 of SEQ ID NO: 2899
gaaucuccugugggacaua

SEQ ID NO: 225127 - RNA, 19 nt, Artificial Sequence
  Description of Artificial Sequence: Synthetic oligonucleotide
  Antisense strand to SEQ ID NO: 225126
uaugucccacaggagauuc

SEQ ID NO: 225128 - RNA, 19 nt, Artificial Sequence
  Description of Artificial Sequence: Synthetic oligonucleotide
  Sense strand starting at position 2590 of SEQ ID NO: 2899
ugccguaguagcuccauaa

SEQ ID NO: 225129 - RNA, 19 nt, Artificial Sequence
  Description of Artificial Sequence: Synthetic oligonucleotide
  Antisense strand to SEQ ID NO: 225128
uuauggagcuacuacggca

SEQ ID NO: 225130 - RNA, 19 nt, Artificial Sequence
  Description of Artificial Sequence: Synthetic oligonucleotide
  Sense strand starting at position 2591 of SEQ ID NO: 2899
gccguaguagcuccauaau

SEQ ID NO: 225131 - RNA, 19 nt, Artificial Sequence
  Description of Artificial Sequence: Synthetic oligonucleotide
  Antisense strand to SEQ ID NO: 225130
auuauggagcuacuacggc

SEQ ID NO: 225132 - RNA, 19 nt, Artificial Sequence
  Description of Artificial Sequence: Synthetic oligonucleotide
  Sense strand starting at position 2716 of SEQ ID NO: 2899
ccaggaagacuuggcaaau

SEQ ID NO: 225133 - RNA, 19 nt, Artificial Sequence
  Description of Artificial Sequence: Synthetic oligonucleotide
  Antisense strand to SEQ ID NO: 225132
auuugccaagucuuccugg

SEQ ID NO: 225134 - RNA, 19 nt, Artificial Sequence
  Description of Artificial Sequence: Synthetic oligonucleotide
  Sense strand starting at position 2782 of SEQ ID NO: 2899
aggugaucacaaugucaga

SEQ ID NO: 225135 - RNA, 19 nt, Artificial Sequence
  Description of Artificial Sequence: Synthetic oligonucleotide
  Antisense strand to SEQ ID NO: 225134
ucugacauugugaucaccu

SEQ ID NO: 225136 - RNA, 19 nt, Artificial Sequence
  Description of Artificial Sequence: Synthetic oligonucleotide
  Sense strand starting at position 2808 of SEQ ID NO: 2899
cggagucaucaucauuaaa

SEQ ID NO: 225137 - RNA, 19 nt, Artificial Sequence
  Description of Artificial Sequence: Synthetic oligonucleotide
  Antisense strand to SEQ ID NO: 225136
uuuaaugaugaugacuccg

SEQ ID NO: 225138 - RNA, 19 nt, Artificial Sequence
  Description of Artificial Sequence: Synthetic oligonucleotide
  Sense strand starting at position 2994 of SEQ ID NO: 2899
cugaguucccuuggugaug

SEQ ID NO: 225139 - RNA, 19 nt, Artificial Sequence
  Description of Artificial Sequence: Synthetic oligonucleotide
  Antisense strand to SEQ ID NO: 225138
caucaccaagggaacucag

SEQ ID NO: 225140 - RNA, 19 nt, Artificial Sequence
  Description of Artificial Sequence: Synthetic oligonucleotide
  Sense strand starting at position 3005 of SEQ ID NO: 2899
uggugaugucuucaggcau

SEQ ID NO: 225141 - RNA, 19 nt, Artificial Sequence
  Description of Artificial Sequence: Synthetic oligonucleotide
  Antisense strand to SEQ ID NO: 225140
augccugaagacaucacca

SEQ ID NO: 225142 - RNA, 19 nt, Artificial Sequence
  Description of Artificial Sequence: Synthetic oligonucleotide
  Sense strand starting at position 3038 of SEQ ID NO: 2899
ccucaagcagauuagugau

SEQ ID NO: 225143 - RNA, 19 nt, Artificial Sequence
  Description of Artificial Sequence: Synthetic oligonucleotide
  Antisense strand to SEQ ID NO: 225142
aucacuaaucugcuugagg

SEQ ID NO: 225144 - RNA, 19 nt, Artificial Sequence
  Description of Artificial Sequence: Synthetic oligonucleotide
  Sense strand starting at position 3048 of SEQ ID NO: 2899
auuagugauagucaagucu

SEQ ID NO: 225145 - RNA, 19 nt, Artificial Sequence
  Description of Artificial Sequence: Synthetic oligonucleotide
  Antisense strand to SEQ ID NO: 225144
agacuugacuaucacuaau

SEQ ID NO: 225146 - RNA, 19 nt, Artificial Sequence
  Description of Artificial Sequence: Synthetic oligonucleotide
  Sense strand starting at position 3101 of SEQ ID NO: 2899
ggaguccacucccuacuua

SEQ ID NO: 225147 - RNA, 19 nt, Artificial Sequence
  Description of Artificial Sequence: Synthetic oligonucleotide
  Antisense strand to SEQ ID NO: 225146
uaaguagggaguggacucc

SEQ ID NO: 225148 - RNA, 19 nt, Artificial Sequence
  Description of Artificial Sequence: Synthetic oligonucleotide
  Sense strand starting at position 3338 of SEQ ID NO: 2899
aaauucugguaaguagaga

SEQ ID NO: 225149 - RNA, 19 nt, Artificial Sequence
  Description of Artificial Sequence: Synthetic oligonucleotide
  Antisense strand to SEQ ID NO: 225148
ucucuacuuaccagaauuu

SEQ ID NO: 225150 - RNA, 19 nt, Artificial Sequence
  Description of Artificial Sequence: Synthetic oligonucleotide
  Sense strand starting at position 3369 of SEQ ID NO: 2899
ggcuaacuagcacagaaau

SEQ ID NO: 225151 - RNA, 19 nt, Artificial Sequence
  Description of Artificial Sequence: Synthetic oligonucleotide
  Antisense strand to SEQ ID NO: 225150
auuucugugcuaguuagcc

SEQ ID NO: 225152 - RNA, 19 nt, Artificial Sequence
  Description of Artificial Sequence: Synthetic oligonucleotide
  Sense strand starting at position 3476 of SEQ ID NO: 2899
ggugucuuugucgcuucau

SEQ ID NO: 225153 - RNA, 19 nt, Artificial Sequence
  Description of Artificial Sequence: Synthetic oligonucleotide
  Antisense strand to SEQ ID NO: 225152
augaagcgacaaagacacc

SEQ ID NO: 225154 - RNA, 19 nt, Artificial Sequence
  Description of Artificial Sequence: Synthetic oligonucleotide
  Sense strand starting at position 3732 of SEQ ID NO: 2899
agaaacaauccagggcuau

SEQ ID NO: 225155 - RNA, 19 nt, Artificial Sequence
  Description of Artificial Sequence: Synthetic oligonucleotide
  Antisense strand to SEQ ID NO: 225154
auagcccuggauuguuucu

SEQ ID NO: 225156 - RNA, 19 nt, Artificial Sequence
  Description of Artificial Sequence: Synthetic oligonucleotide
  Sense strand starting at position 3856 of SEQ ID NO: 2899
gugguagaaccuugauaua

SEQ ID NO: 225157 - RNA, 19 nt, Artificial Sequence
  Description of Artificial Sequence: Synthetic oligonucleotide
  Antisense strand to SEQ ID NO: 225156
uauaucaagguucuaccac

SEQ ID NO: 225158 - RNA, 19 nt, Artificial Sequence
  Description of Artificial Sequence: Synthetic oligonucleotide
  Sense strand starting at position 531 of SEQ ID NO: 2900
gguauaauacuauacuggu

SEQ ID NO: 225159 - RNA, 19 nt, Artificial Sequence
  Description of Artificial Sequence: Synthetic oligonucleotide
  Antisense strand to SEQ ID NO: 225158
accaguauaguauuauacc

SEQ ID NO: 225160 - RNA, 19 nt, Artificial Sequence
  Description of Artificial Sequence: Synthetic oligonucleotide
  Sense strand starting at position 550 of SEQ ID NO: 2900
gggcucgugucaccauaaa

SEQ ID NO: 225161 - RNA, 19 nt, Artificial Sequence
  Description of Artificial Sequence: Synthetic oligonucleotide
  Antisense strand to SEQ ID NO: 225160
uuuauggugacacgagccc

SEQ ID NO: 225162 - RNA, 19 nt, Artificial Sequence
  Description of Artificial Sequence: Synthetic oligonucleotide
  Sense strand starting at position 724 of SEQ ID NO: 2900
aguauaugcgaaugcuaua

SEQ ID NO: 225163 - RNA, 19 nt, Artificial Sequence
  Description of Artificial Sequence: Synthetic oligonucleotide
  Antisense strand to SEQ ID NO: 225162
uauagcauucgcauauacu

SEQ ID NO: 225164 - RNA, 19 nt, Artificial Sequence
  Description of Artificial Sequence: Synthetic oligonucleotide
  Sense strand starting at position 965 of SEQ ID NO: 2900
gaggccauaugauccgaaa

SEQ ID NO: 225165 - RNA, 19 nt, Artificial Sequence
  Description of Artificial Sequence: Synthetic oligonucleotide
  Antisense strand to SEQ ID NO: 225164
uuucggaucauauggccuc

SEQ ID NO: 225166 - RNA, 19 nt, Artificial Sequence
  Description of Artificial Sequence: Synthetic oligonucleotide
  Sense strand starting at position 1069 of SEQ ID NO: 2900
gggugagcgagugauggaa

SEQ ID NO: 225167 - RNA, 19 nt, Artificial Sequence
  Description of Artificial Sequence: Synthetic oligonucleotide
  Antisense strand to SEQ ID NO: 225166
uuccaucacucgcucaccc

SEQ ID NO: 225168 - RNA, 19 nt, Artificial Sequence
  Description of Artificial Sequence: Synthetic oligonucleotide
  Sense strand starting at position 1108 of SEQ ID NO: 2900
agacaugugugcuccagac

SEQ ID NO: 225169 - RNA, 19 nt, Artificial Sequence
  Description of Artificial Sequence: Synthetic oligonucleotide
  Antisense strand to SEQ ID NO: 225168
gucuggagcacacaugucu

SEQ ID NO: 225170 - RNA, 19 nt, Artificial Sequence
  Description of Artificial Sequence: Synthetic oligonucleotide
  Sense strand starting at position 1153 of SEQ ID NO: 2900
cagggacugccaugucauu

SEQ ID NO: 225171 - RNA, 19 nt, Artificial Sequence
  Description of Artificial Sequence: Synthetic oligonucleotide
  Antisense strand to SEQ ID NO: 225170
aaugacauggcagucccug

SEQ ID NO: 225172 - RNA, 19 nt, Artificial Sequence
  Description of Artificial Sequence: Synthetic oligonucleotide
  Sense strand starting at position 1245 of SEQ ID NO: 2900
uugcauccucuacagagaa

SEQ ID NO: 225173 - RNA, 19 nt, Artificial Sequence
  Description of Artificial Sequence: Synthetic oligonucleotide
  Antisense strand to SEQ ID NO: 225172
uucucuguagaggaugcaa

SEQ ID NO: 225174 - RNA, 19 nt, Artificial Sequence
  Description of Artificial Sequence: Synthetic oligonucleotide
  Sense strand starting at position 1314 of SEQ ID NO: 2900
cgcacuuaggaauauuauu

SEQ ID NO: 225175 - RNA, 19 nt, Artificial Sequence
  Description of Artificial Sequence: Synthetic oligonucleotide
  Antisense strand to SEQ ID NO: 225174
aauaauauuccuaagugcg

SEQ ID NO: 225176 - RNA, 19 nt, Artificial Sequence
  Description of Artificial Sequence: Synthetic oligonucleotide
  Sense strand starting at position 1359 of SEQ ID NO: 2900
uugaguggugccuggaaca

SEQ ID NO: 225177 - RNA, 19 nt, Artificial Sequence
  Description of Artificial Sequence: Synthetic oligonucleotide
  Antisense strand to SEQ ID NO: 225176
uguuccaggcaccacucaa

SEQ ID NO: 225178 - RNA, 19 nt, Artificial Sequence
  Description of Artificial Sequence: Synthetic oligonucleotide
  Sense strand starting at position 1448 of SEQ ID NO: 2900
uggagguguccguagugga

SEQ ID NO: 225179 - RNA, 19 nt, Artificial Sequence
  Description of Artificial Sequence: Synthetic oligonucleotide
  Antisense strand to SEQ ID NO: 225178
uccacuacggacaccucca

SEQ ID NO: 225180 - RNA, 19 nt, Artificial Sequence
  Description of Artificial Sequence: Synthetic oligonucleotide
  Sense strand starting at position 1506 of SEQ ID NO: 2900
cccgauuaauuguuugaug

SEQ ID NO: 225181 - RNA, 19 nt, Artificial Sequence
  Description of Artificial Sequence: Synthetic oligonucleotide
  Antisense strand to SEQ ID NO: 225180
caucaaacaauuaaucggg

SEQ ID NO: 225182 - RNA, 19 nt, Artificial Sequence
  Description of Artificial Sequence: Synthetic oligonucleotide
  Sense strand starting at position 1507 of SEQ ID NO: 2900
ccgauuaauuguuugaugu

SEQ ID NO: 225183 - RNA, 19 nt, Artificial Sequence
  Description of Artificial Sequence: Synthetic oligonucleotide
  Antisense strand to SEQ ID NO: 225182
acaucaaacaauuaaucgg

SEQ ID NO: 225184 - RNA, 19 nt, Artificial Sequence
  Description of Artificial Sequence: Synthetic oligonucleotide
  Sense strand starting at position 1508 of SEQ ID NO: 2900
cgauuaauuguuugauguu

SEQ ID NO: 225185 - RNA, 19 nt, Artificial Sequence
  Description of Artificial Sequence: Synthetic oligonucleotide
  Antisense strand to SEQ ID NO: 225184
aacaucaaacaauuaaucg

SEQ ID NO: 225186 - RNA, 19 nt, Artificial Sequence
  Description of Artificial Sequence: Synthetic oligonucleotide
  Sense strand starting at position 1674 of SEQ ID NO: 2900
gccugaaccuucccgaaga

SEQ ID NO: 225187 - RNA, 19 nt, Artificial Sequence
  Description of Artificial Sequence: Synthetic oligonucleotide
  Antisense strand to SEQ ID NO: 225186
ucuucgggaagguucaggc

SEQ ID NO: 225188 - RNA, 19 nt, Artificial Sequence
  Description of Artificial Sequence: Synthetic oligonucleotide
  Sense strand starting at position 2135 of SEQ ID NO: 2900
gaugucaggucuguuguca

SEQ ID NO: 225189 - RNA, 19 nt, Artificial Sequence
  Description of Artificial Sequence: Synthetic oligonucleotide
  Antisense strand to SEQ ID NO: 225188
ugacaacagaccugacauc

SEQ ID NO: 225190 - RNA, 19 nt, Artificial Sequence
  Description of Artificial Sequence: Synthetic oligonucleotide
  Sense strand starting at position 2189 of SEQ ID NO: 2900
ggagucucaccaggagacu

SEQ ID NO: 225191 - RNA, 19 nt, Artificial Sequence
  Description of Artificial Sequence: Synthetic oligonucleotide
  Antisense strand to SEQ ID NO: 225190
agucuccuggugagacucc

SEQ ID NO: 225192 - RNA, 19 nt, Artificial Sequence
  Description of Artificial Sequence: Synthetic oligonucleotide
  Sense strand starting at position 2244 of SEQ ID NO: 2900
acuugcugacccugaugau

SEQ ID NO: 225193 - RNA, 19 nt, Artificial Sequence
  Description of Artificial Sequence: Synthetic oligonucleotide
  Antisense strand to SEQ ID NO: 225192
aucaucagggucagcaagu

SEQ ID NO: 225194 - RNA, 19 nt, Artificial Sequence
  Description of Artificial Sequence: Synthetic oligonucleotide
  Sense strand starting at position 2245 of SEQ ID NO: 2900
cuugcugacccugaugauu

SEQ ID NO: 225195 - RNA, 19 nt, Artificial Sequence
  Description of Artificial Sequence: Synthetic oligonucleotide
  Antisense strand to SEQ ID NO: 225194
aaucaucagggucagcaag

SEQ ID NO: 225196 - RNA, 19 nt, Artificial Sequence
  Description of Artificial Sequence: Synthetic oligonucleotide
  Sense strand starting at position 2248 of SEQ ID NO: 2900
gcugacccugaugauuaau

SEQ ID NO: 225197 - RNA, 19 nt, Artificial Sequence
  Description of Artificial Sequence: Synthetic oligonucleotide
  Antisense strand to SEQ ID NO: 225196
auuaaucaucagggucagc

SEQ ID NO: 225198 - RNA, 19 nt, Artificial Sequence
  Description of Artificial Sequence: Synthetic oligonucleotide
  Sense strand starting at position 2502 of SEQ ID NO: 2900
cugggcgucucauugucaa

SEQ ID NO: 225199 - RNA, 19 nt, Artificial Sequence
  Description of Artificial Sequence: Synthetic oligonucleotide
  Antisense strand to SEQ ID NO: 225198
uugacaaugagacgcccag

SEQ ID NO: 225200 - RNA, 19 nt, Artificial Sequence
  Description of Artificial Sequence: Synthetic oligonucleotide
  Sense strand starting at position 2505 of SEQ ID NO: 2900
ggcgucucauugucaacaa

SEQ ID NO: 225201 - RNA, 19 nt, Artificial Sequence
  Description of Artificial Sequence: Synthetic oligonucleotide
  Antisense strand to SEQ ID NO: 225200
uuguugacaaugagacgcc

SEQ ID NO: 225202 - RNA, 19 nt, Artificial Sequence
  Description of Artificial Sequence: Synthetic oligonucleotide
  Sense strand starting at position 2527 of SEQ ID NO: 2900
uaguguucucauugagaau

SEQ ID NO: 225203 - RNA, 19 nt, Artificial Sequence
  Description of Artificial Sequence: Synthetic oligonucleotide
  Antisense strand to SEQ ID NO: 225202
auucucaaugagaacacua

SEQ ID NO: 225204 - RNA, 19 nt, Artificial Sequence
  Description of Artificial Sequence: Synthetic oligonucleotide
  Sense strand starting at position 2530 of SEQ ID NO: 2900
uguucucauugagaauuaa

SEQ ID NO: 225205 - RNA, 19 nt, Artificial Sequence
  Description of Artificial Sequence: Synthetic oligonucleotide
  Antisense strand to SEQ ID NO: 225204
uuaauucucaaugagaaca

SEQ ID NO: 225206 - RNA, 19 nt, Artificial Sequence
  Description of Artificial Sequence: Synthetic oligonucleotide
  Sense strand starting at position 2917 of SEQ ID NO: 2900
cuggaugagcagugagaaa

SEQ ID NO: 225207 - RNA, 19 nt, Artificial Sequence
  Description of Artificial Sequence: Synthetic oligonucleotide
  Antisense strand to SEQ ID NO: 225206
uuucucacugcucauccag

SEQ ID NO: 225208 - RNA, 19 nt, Artificial Sequence
  Description of Artificial Sequence: Synthetic oligonucleotide
  Sense strand starting at position 2977 of SEQ ID NO: 2900
agucacaacuucuugagga

SEQ ID NO: 225209 - RNA, 19 nt, Artificial Sequence
  Description of Artificial Sequence: Synthetic oligonucleotide
  Antisense strand to SEQ ID NO: 225208
uccucaagaaguugugacu

SEQ ID NO: 225210 - RNA, 19 nt, Artificial Sequence
  Description of Artificial Sequence: Synthetic oligonucleotide
  Sense strand starting at position 3054 of SEQ ID NO: 2900
cguccuuugugaguaagaa

SEQ ID NO: 225211 - RNA, 19 nt, Artificial Sequence
  Description of Artificial Sequence: Synthetic oligonucleotide
  Antisense strand to SEQ ID NO: 225210
uucuuacucacaaaggacg

SEQ ID NO: 225212 - RNA, 19 nt, Artificial Sequence
  Description of Artificial Sequence: Synthetic oligonucleotide
  Sense strand starting at position 3055 of SEQ ID NO: 2900
guccuuugugaguaagaac

SEQ ID NO: 225213 - RNA, 19 nt, Artificial Sequence
  Description of Artificial Sequence: Synthetic oligonucleotide
  Antisense strand to SEQ ID NO: 225212
guucuuacucacaaaggac

SEQ ID NO: 225214 - RNA, 19 nt, Artificial Sequence
  Description of Artificial Sequence: Synthetic oligonucleotide
  Sense strand starting at position 3116 of SEQ ID NO: 2900
cacguuugcaagcaguaga

SEQ ID NO: 225215 - RNA, 19 nt, Artificial Sequence
  Description of Artificial Sequence: Synthetic oligonucleotide
  Antisense strand to SEQ ID NO: 225214
ucuacugcuugcaaacgug

SEQ ID NO: 225216 - RNA, 19 nt, Artificial Sequence
  Description of Artificial Sequence: Synthetic oligonucleotide
  Sense strand starting at position 3135 of SEQ ID NO: 2900
gagguuuaggaaugccaaa

SEQ ID NO: 225217 - RNA, 19 nt, Artificial Sequence
  Description of Artificial Sequence: Synthetic oligonucleotide
  Antisense strand to SEQ ID NO: 225216
uuuggcauuccuaaaccuc

SEQ ID NO: 225218 - RNA, 19 nt, Artificial Sequence
  Description of Artificial Sequence: Synthetic oligonucleotide
  Sense strand starting at position 3188 of SEQ ID NO: 2900
ccuggauccuugucucaca

SEQ ID NO: 225219 - RNA, 19 nt, Artificial Sequence
  Description of Artificial Sequence: Synthetic oligonucleotide
  Antisense strand to SEQ ID NO: 225218
ugugagacaaggauccagg

SEQ ID NO: 225220 - RNA, 19 nt, Artificial Sequence
  Description of Artificial Sequence: Synthetic oligonucleotide
  Sense strand starting at position 3273 of SEQ ID NO: 2900
cucugucuccuuugguuga

SEQ ID NO: 225221 - RNA, 19 nt, Artificial Sequence
  Description of Artificial Sequence: Synthetic oligonucleotide
  Antisense strand to SEQ ID NO: 225220
ucaaccaaaggagacagag

SEQ ID NO: 225222 - RNA, 19 nt, Artificial Sequence
  Description of Artificial Sequence: Synthetic oligonucleotide
  Sense strand starting at position 3275 of SEQ ID NO: 2900
cugucuccuuugguugaaa

SEQ ID NO: 225223 - RNA, 19 nt, Artificial Sequence
  Description of Artificial Sequence: Synthetic oligonucleotide
  Antisense strand to SEQ ID NO: 225222
uuucaaccaaaggagacag

SEQ ID NO: 225224 - RNA, 19 nt, Artificial Sequence
  Description of Artificial Sequence: Synthetic oligonucleotide
  Sense strand starting at position 3300 of SEQ ID NO: 2900
guauuaaacucuccuagga

SEQ ID NO: 225225 - RNA, 19 nt, Artificial Sequence
  Description of Artificial Sequence: Synthetic oligonucleotide
  Antisense strand to SEQ ID NO: 225224
uccuaggagaguuuaauac

SEQ ID NO: 225226 - RNA, 19 nt, Artificial Sequence
  Description of Artificial Sequence: Synthetic oligonucleotide
  Sense strand starting at position 3322 of SEQ ID NO: 2900
augauacagcucugaccaa

SEQ ID NO: 225227 - RNA, 19 nt, Artificial Sequence
  Description of Artificial Sequence: Synthetic oligonucleotide
  Antisense strand to SEQ ID NO: 225226
uuggucagagcuguaucau

SEQ ID NO: 225228 - RNA, 19 nt, Artificial Sequence
  Description of Artificial Sequence: Synthetic oligonucleotide
  Sense strand starting at position 3323 of SEQ ID NO: 2900
ugauacagcucugaccaaa

SEQ ID NO: 225229 - RNA, 19 nt, Artificial Sequence
  Description of Artificial Sequence: Synthetic oligonucleotide
  Antisense strand to SEQ ID NO: 225228
uuuggucagagcuguauca

SEQ ID NO: 225230 - RNA, 19 nt, Artificial Sequence
  Description of Artificial Sequence: Synthetic oligonucleotide
  Sense strand starting at position 3361 of SEQ ID NO: 2900
ucauguuuccacuauccgu

SEQ ID NO: 225231 - RNA, 19 nt, Artificial Sequence
  Description of Artificial Sequence: Synthetic oligonucleotide
  Antisense strand to SEQ ID NO: 225230
acggauaguggaaacauga

SEQ ID NO: 225232 - RNA, 19 nt, Artificial Sequence
  Description of Artificial Sequence: Synthetic oligonucleotide
  Sense strand starting at position 3409 of SEQ ID NO: 2900
caugucuaugccugggagu

SEQ ID NO: 225233 - RNA, 19 nt, Artificial Sequence
  Description of Artificial Sequence: Synthetic oligonucleotide
  Antisense strand to SEQ ID NO: 225232
acucccaggcauagacaug

SEQ ID NO: 225234 - RNA, 19 nt, Artificial Sequence
  Description of Artificial Sequence: Synthetic oligonucleotide
  Sense strand starting at position 3469 of SEQ ID NO: 2900
agagguaagugagagcaaa

SEQ ID NO: 225235 - RNA, 19 nt, Artificial Sequence
  Description of Artificial Sequence: Synthetic oligonucleotide
  Antisense strand to SEQ ID NO: 225234
uuugcucucacuuaccucu

SEQ ID NO: 225236 - RNA, 19 nt, Artificial Sequence
  Description of Artificial Sequence: Synthetic oligonucleotide
  Sense strand starting at position 3481 of SEQ ID NO: 2900
gagcaaagguaccauacaa

SEQ ID NO: 225237 - RNA, 19 nt, Artificial Sequence
  Description of Artificial Sequence: Synthetic oligonucleotide
  Antisense strand to SEQ ID NO: 225236
uuguaugguaccuuugcuc

SEQ ID NO: 225238 - RNA, 19 nt, Artificial Sequence
  Description of Artificial Sequence: Synthetic oligonucleotide
  Sense strand starting at position 76 of SEQ ID NO: 2903
augugauacuuauucucau

SEQ ID NO: 225239 - RNA, 19 nt, Artificial Sequence
  Description of Artificial Sequence: Synthetic oligonucleotide
  Antisense strand to SEQ ID NO: 225238
augagaauaaguaucacau

SEQ ID NO: 225240 - RNA, 19 nt, Artificial Sequence
  Description of Artificial Sequence: Synthetic oligonucleotide
  Sense strand starting at position 77 of SEQ ID NO: 2903
ugugauacuuauucucaua

SEQ ID NO: 225241 - RNA, 19 nt, Artificial Sequence
  Description of Artificial Sequence: Synthetic oligonucleotide
  Antisense strand to SEQ ID NO: 225240
uaugagaauaaguaucaca

SEQ ID NO: 225242 - RNA, 19 nt, Artificial Sequence
  Description of Artificial Sequence: Synthetic oligonucleotide
  Sense strand starting at position 88 of SEQ ID NO: 2903
uucucauaaugcuuagagu

SEQ ID NO: 225243 - RNA, 19 nt, Artificial Sequence
  Description of Artificial Sequence: Synthetic oligonucleotide
  Antisense strand to SEQ ID NO: 225242
acucuaagcauuaugagaa

SEQ ID NO: 225244 - RNA, 19 nt, Artificial Sequence
  Description of Artificial Sequence: Synthetic oligonucleotide
  Sense strand starting at position 89 of SEQ ID NO: 2903
ucucauaaugcuuagaguc

SEQ ID NO: 225245 - RNA, 19 nt, Artificial Sequence
  Description of Artificial Sequence: Synthetic oligonucleotide
  Antisense strand to SEQ ID NO: 225244
gacucuaagcauuaugaga

SEQ ID NO: 225246 - RNA, 19 nt, Artificial Sequence
  Description of Artificial Sequence: Synthetic oligonucleotide
  Sense strand starting at position 96 of SEQ ID NO: 2903
augcuuagagucuacaaga

SEQ ID NO: 225247 - RNA, 19 nt, Artificial Sequence
  Description of Artificial Sequence: Synthetic oligonucleotide
  Antisense strand to SEQ ID NO: 225246
ucuuguagacucuaagcau

SEQ ID NO: 225248 - RNA, 19 nt, Artificial Sequence
  Description of Artificial Sequence: Synthetic oligonucleotide
  Sense strand starting at position 473 of SEQ ID NO: 2903
cuuucuggcucuuuaagaa

SEQ ID NO: 225249 - RNA, 19 nt, Artificial Sequence
  Description of Artificial Sequence: Synthetic oligonucleotide
  Antisense strand to SEQ ID NO: 225248
uucuuaaagagccagaaag

SEQ ID NO: 225250 - RNA, 19 nt, Artificial Sequence
  Description of Artificial Sequence: Synthetic oligonucleotide
  Sense strand starting at position 607 of SEQ ID NO: 2903
ugauaaugauuccuggcaa

SEQ ID NO: 225251 - RNA, 19 nt, Artificial Sequence
  Description of Artificial Sequence: Synthetic oligonucleotide
  Antisense strand to SEQ ID NO: 225250
uugccaggaaucauuauca

SEQ ID NO: 225252 - RNA, 19 nt, Artificial Sequence
  Description of Artificial Sequence: Synthetic oligonucleotide
  Sense strand starting at position 656 of SEQ ID NO: 2903
cugguuaaccuguaccaau

SEQ ID NO: 225253 - RNA, 19 nt, Artificial Sequence
  Description of Artificial Sequence: Synthetic oligonucleotide
  Antisense strand to SEQ ID NO: 225252
auugguacagguuaaccag

SEQ ID NO: 225254 - RNA, 19 nt, Artificial Sequence
  Description of Artificial Sequence: Synthetic oligonucleotide
  Sense strand starting at position 1514 of SEQ ID NO: 2903
uuguauaguuaccuaccua

SEQ ID NO: 225255 - RNA, 19 nt, Artificial Sequence
  Description of Artificial Sequence: Synthetic oligonucleotide
  Antisense strand to SEQ ID NO: 225254
uagguagguaacuauacaa

SEQ ID NO: 225256 - RNA, 19 nt, Artificial Sequence
  Description of Artificial Sequence: Synthetic oligonucleotide
  Sense strand starting at position 1518 of SEQ ID NO: 2903
auaguuaccuaccuaagua

SEQ ID NO: 225257 - RNA, 19 nt, Artificial Sequence
  Description of Artificial Sequence: Synthetic oligonucleotide
  Antisense strand to SEQ ID NO: 225256
uacuuagguagguaacuau

SEQ ID NO: 225258 - RNA, 19 nt, Artificial Sequence
  Description of Artificial Sequence: Synthetic oligonucleotide
  Sense strand starting at position 1662 of SEQ ID NO: 2903
cauagaaaguaguuaugcu

SEQ ID NO: 225259 - RNA, 19 nt, Artificial Sequence
  Description of Artificial Sequence: Synthetic oligonucleotide
  Antisense strand to SEQ ID NO: 225258
agcauaacuacuuucuaug

SEQ ID NO: 225260 - RNA, 19 nt, Artificial Sequence
  Description of Artificial Sequence: Synthetic oligonucleotide
  Sense strand starting at position 1749 of SEQ ID NO: 2903
augcaauucuuccugugaa

SEQ ID NO: 225261 - RNA, 19 nt, Artificial Sequence
  Description of Artificial Sequence: Synthetic oligonucleotide
  Antisense strand to SEQ ID NO: 225260
uucacaggaagaauugcau

SEQ ID NO: 225262 - RNA, 19 nt, Artificial Sequence
  Description of Artificial Sequence: Synthetic oligonucleotide
  Sense strand starting at position 1807 of SEQ ID NO: 2903
cucccagacugacuguuau

SEQ ID NO: 225263 - RNA, 19 nt, Artificial Sequence
  Description of Artificial Sequence: Synthetic oligonucleotide
  Antisense strand to SEQ ID NO: 225262
auaacagucagucugggag

SEQ ID NO: 225264 - RNA, 19 nt, Artificial Sequence
  Description of Artificial Sequence: Synthetic oligonucleotide
  Sense strand starting at position 1826 of SEQ ID NO: 2903
ccuuaagucagaggaugau

SEQ ID NO: 225265 - RNA, 19 nt, Artificial Sequence
  Description of Artificial Sequence: Synthetic oligonucleotide
  Antisense strand to SEQ ID NO: 225264
aucauccucugacuuaagg

SEQ ID NO: 225266 - RNA, 19 nt, Artificial Sequence
  Description of Artificial Sequence: Synthetic oligonucleotide
  Sense strand starting at position 1853 of SEQ ID NO: 2903
ugagguuucuguguaagag

SEQ ID NO: 225267 - RNA, 19 nt, Artificial Sequence
  Description of Artificial Sequence: Synthetic oligonucleotide
  Antisense strand to SEQ ID NO: 225266
cucuuacacagaaaccuca

SEQ ID NO: 225268 - RNA, 19 nt, Artificial Sequence
  Description of Artificial Sequence: Synthetic oligonucleotide
  Sense strand starting at position 1854 of SEQ ID NO: 2903
gagguuucuguguaagagu

SEQ ID NO: 225269 - RNA, 19 nt, Artificial Sequence
  Description of Artificial Sequence: Synthetic oligonucleotide
  Antisense strand to SEQ ID NO: 225268
acucuuacacagaaaccuc

SEQ ID NO: 225270 - RNA, 19 nt, Artificial Sequence
  Description of Artificial Sequence: Synthetic oligonucleotide
  Sense strand starting at position 1999 of SEQ ID NO: 2903
uuguguauuugguuuccua

SEQ ID NO: 225271 - RNA, 19 nt, Artificial Sequence
  Description of Artificial Sequence: Synthetic oligonucleotide
  Antisense strand to SEQ ID NO: 225270
uaggaaaccaaauacacaa

SEQ ID NO: 225272 - RNA, 19 nt, Artificial Sequence
  Description of Artificial Sequence: Synthetic oligonucleotide
  Sense strand starting at position 2104 of SEQ ID NO: 2903
cagaauagugccuggagca

SEQ ID NO: 225273 - RNA, 19 nt, Artificial Sequence
  Description of Artificial Sequence: Synthetic oligonucleotide
  Antisense strand to SEQ ID NO: 225272
ugcuccaggcacuauucug

SEQ ID NO: 225274 - RNA, 19 nt, Artificial Sequence
  Description of Artificial Sequence: Synthetic oligonucleotide
  Sense strand starting at position 2105 of SEQ ID NO: 2903
agaauagugccuggagcau

SEQ ID NO: 225275 - RNA, 19 nt, Artificial Sequence
  Description of Artificial Sequence: Synthetic oligonucleotide
  Antisense strand to SEQ ID NO: 225274
augcuccaggcacuauucu

SEQ ID NO: 225276 - RNA, 19 nt, Artificial Sequence
  Description of Artificial Sequence: Synthetic oligonucleotide
  Sense strand starting at position 2256 of SEQ ID NO: 2903
accacaugaucugcaggaa

SEQ ID NO: 225277 - RNA, 19 nt, Artificial Sequence
  Description of Artificial Sequence: Synthetic oligonucleotide
  Antisense strand to SEQ ID NO: 225276
uuccugcagaucauguggu

SEQ ID NO: 225278 - RNA, 19 nt, Artificial Sequence
  Description of Artificial Sequence: Synthetic oligonucleotide
  Sense strand starting at position 2391 of SEQ ID NO: 2903
ggucuuucccauuaaagug

SEQ ID NO: 225279 - RNA, 19 nt, Artificial Sequence
  Description of Artificial Sequence: Synthetic oligonucleotide
  Antisense strand to SEQ ID NO: 225278
cacuuuaaugggaaagacc

SEQ ID NO: 225280 - RNA, 19 nt, Artificial Sequence
  Description of Artificial Sequence: Synthetic oligonucleotide
  Sense strand starting at position 2789 of SEQ ID NO: 2903
ucugguagcugaucauaga

SEQ ID NO: 225281 - RNA, 19 nt, Artificial Sequence
  Description of Artificial Sequence: Synthetic oligonucleotide
  Antisense strand to SEQ ID NO: 225280
ucuaugaucagcuaccaga

SEQ ID NO: 225282 - RNA, 19 nt, Artificial Sequence
  Description of Artificial Sequence: Synthetic oligonucleotide
  Sense strand starting at position 2846 of SEQ ID NO: 2903
aggaaauuauugcuuuggu

SEQ ID NO: 225283 - RNA, 19 nt, Artificial Sequence
  Description of Artificial Sequence: Synthetic oligonucleotide
  Antisense strand to SEQ ID NO: 225282
accaaagcaauaauuuccu

SEQ ID NO: 225284 - RNA, 19 nt, Artificial Sequence
  Description of Artificial Sequence: Synthetic oligonucleotide
  Sense strand starting at position 2847 of SEQ ID NO: 2903
ggaaauuauugcuuugguu

SEQ ID NO: 225285 - RNA, 19 nt, Artificial Sequence
  Description of Artificial Sequence: Synthetic oligonucleotide
  Antisense strand to SEQ ID NO: 225284
aaccaaagcaauaauuucc

SEQ ID NO: 225286 - RNA, 19 nt, Artificial Sequence
  Description of Artificial Sequence: Synthetic oligonucleotide
  Sense strand starting at position 2913 of SEQ ID NO: 2903
ccauauuaaguauguacua

SEQ ID NO: 225287 - RNA, 19 nt, Artificial Sequence
  Description of Artificial Sequence: Synthetic oligonucleotide
  Antisense strand to SEQ ID NO: 225286
uaguacauacuuaauaugg

SEQ ID NO: 225288 - RNA, 19 nt, Artificial Sequence
  Description of Artificial Sequence: Synthetic oligonucleotide
  Sense strand starting at position 2939 of SEQ ID NO: 2903
cauacuuaaguaugugagu

SEQ ID NO: 225289 - RNA, 19 nt, Artificial Sequence
  Description of Artificial Sequence: Synthetic oligonucleotide
  Antisense strand to SEQ ID NO: 225288
acucacauacuuaaguaug

SEQ ID NO: 225290 - RNA, 19 nt, Artificial Sequence
  Description of Artificial Sequence: Synthetic oligonucleotide
  Sense strand starting at position 3030 of SEQ ID NO: 2903
ccauuccugcuuuauggau

SEQ ID NO: 225291 - RNA, 19 nt, Artificial Sequence
  Description of Artificial Sequence: Synthetic oligonucleotide
  Antisense strand to SEQ ID NO: 225290
auccauaaagcaggaaugg

SEQ ID NO: 225292 - RNA, 19 nt, Artificial Sequence
  Description of Artificial Sequence: Synthetic oligonucleotide
  Sense strand starting at position 3075 of SEQ ID NO: 2903
aguuaacuugccuaagguu

SEQ ID NO: 225293 - RNA, 19 nt, Artificial Sequence
  Description of Artificial Sequence: Synthetic oligonucleotide
  Antisense strand to SEQ ID NO: 225292
aaccuuaggcaaguuaacu

SEQ ID NO: 225294 - RNA, 19 nt, Artificial Sequence
  Description of Artificial Sequence: Synthetic oligonucleotide
  Sense strand starting at position 3383 of SEQ ID NO: 2903
aguuauccagccuaugacu

SEQ ID NO: 225295 - RNA, 19 nt, Artificial Sequence
  Description of Artificial Sequence: Synthetic oligonucleotide
  Antisense strand to SEQ ID NO: 225294
agucauaggcuggauaacu

SEQ ID NO: 225296 - RNA, 19 nt, Artificial Sequence
  Description of Artificial Sequence: Synthetic oligonucleotide
  Sense strand starting at position 3462 of SEQ ID NO: 2903
ggugucaaauaugucgaga

SEQ ID NO: 225297 - RNA, 19 nt, Artificial Sequence
  Description of Artificial Sequence: Synthetic oligonucleotide
  Antisense strand to SEQ ID NO: 225296
ucucgacauauuugacacc

SEQ ID NO: 225298 - RNA, 19 nt, Artificial Sequence
  Description of Artificial Sequence: Synthetic oligonucleotide
  Sense strand starting at position 3465 of SEQ ID NO: 2903
gucaaauaugucgagaguu

SEQ ID NO: 225299 - RNA, 19 nt, Artificial Sequence
  Description of Artificial Sequence: Synthetic oligonucleotide
  Antisense strand to SEQ ID NO: 225298
aacucucgacauauuugac

SEQ ID NO: 225300 - RNA, 19 nt, Artificial Sequence
  Description of Artificial Sequence: Synthetic oligonucleotide
  Sense strand starting at position 3478 of SEQ ID NO: 2903
agaguugggucuucugaga

SEQ ID NO: 225301 - RNA, 19 nt, Artificial Sequence
  Description of Artificial Sequence: Synthetic oligonucleotide
  Antisense strand to SEQ ID NO: 225300
ucucagaagacccaacucu

SEQ ID NO: 225302 - RNA, 19 nt, Artificial Sequence
  Description of Artificial Sequence: Synthetic oligonucleotide
  Sense strand starting at position 3519 of SEQ ID NO: 2903
uugcgauaugcagaauucu

SEQ ID NO: 225303 - RNA, 19 nt, Artificial Sequence
  Description of Artificial Sequence: Synthetic oligonucleotide
  Antisense strand to SEQ ID NO: 225302
agaauucugcauaucgcaa

SEQ ID NO: 225304 - RNA, 19 nt, Artificial Sequence
  Description of Artificial Sequence: Synthetic oligonucleotide
  Sense strand starting at position 3527 of SEQ ID NO: 2903
ugcagaauucuagaauucu

SEQ ID NO: 225305 - RNA, 19 nt, Artificial Sequence
  Description of Artificial Sequence: Synthetic oligonucleotide
  Antisense strand to SEQ ID NO: 225304
agaauucuagaauucugca

SEQ ID NO: 225306 - RNA, 19 nt, Artificial Sequence
  Description of Artificial Sequence: Synthetic oligonucleotide
  Sense strand starting at position 3676 of SEQ ID NO: 2903
uuugaaagguuuccuaauc

SEQ ID NO: 225307 - RNA, 19 nt, Artificial Sequence
  Description of Artificial Sequence: Synthetic oligonucleotide
  Antisense strand to SEQ ID NO: 225306
gauuaggaaaccuuucaaa

SEQ ID NO: 225308 - RNA, 19 nt, Artificial Sequence
  Description of Artificial Sequence: Synthetic oligonucleotide
  Sense strand starting at position 3677 of SEQ ID NO: 2903
uugaaagguuuccuaaucu

SEQ ID NO: 225309 - RNA, 19 nt, Artificial Sequence
  Description of Artificial Sequence: Synthetic oligonucleotide
  Antisense strand to SEQ ID NO: 225308
agauuaggaaaccuuucaa

SEQ ID NO: 225310 - RNA, 19 nt, Artificial Sequence
  Description of Artificial Sequence: Synthetic oligonucleotide
  Sense strand starting at position 3692 of SEQ ID NO: 2903
aucucugguccagaccaau

SEQ ID NO: 225311 - RNA, 19 nt, Artificial Sequence
  Description of Artificial Sequence: Synthetic oligonucleotide
  Antisense strand to SEQ ID NO: 225310
auuggucuggaccagagau

SEQ ID NO: 225312 - RNA, 19 nt, Artificial Sequence
  Description of Artificial Sequence: Synthetic oligonucleotide
  Sense strand starting at position 3759 of SEQ ID NO: 2903
ugaguuggucaaggucaca

SEQ ID NO: 225313 - RNA, 19 nt, Artificial Sequence
  Description of Artificial Sequence: Synthetic oligonucleotide
  Antisense strand to SEQ ID NO: 225312
ugugaccuugaccaacuca

SEQ ID NO: 225314 - RNA, 19 nt, Artificial Sequence
  Description of Artificial Sequence: Synthetic oligonucleotide
  Sense strand starting at position 3869 of SEQ ID NO: 2903
cuguuugaacuguauacaa

SEQ ID NO: 225315 - RNA, 19 nt, Artificial Sequence
  Description of Artificial Sequence: Synthetic oligonucleotide
  Antisense strand to SEQ ID NO: 225314
uuguauacaguucaaacag

SEQ ID NO: 225316 - RNA, 19 nt, Artificial Sequence
  Description of Artificial Sequence: Synthetic oligonucleotide
  Sense strand starting at position 3871 of SEQ ID NO: 2903
guuugaacuguauacaaca

SEQ ID NO: 225317 - RNA, 19 nt, Artificial Sequence
  Description of Artificial Sequence: Synthetic oligonucleotide
  Antisense strand to SEQ ID NO: 225316
uguuguauacaguucaaac

SEQ ID NO: 225318 - RNA, 19 nt, Artificial Sequence
  Description of Artificial Sequence: Synthetic oligonucleotide
  Sense strand starting at position 351 of SEQ ID NO: 2902
ucugguagcugaucauaga

SEQ ID NO: 225319 - RNA, 19 nt, Artificial Sequence
  Description of Artificial Sequence: Synthetic oligonucleotide
  Antisense strand to SEQ ID NO: 225318
ucuaugaucagcuaccaga

SEQ ID NO: 225320 - RNA, 19 nt, Artificial Sequence
  Description of Artificial Sequence: Synthetic oligonucleotide
  Sense strand starting at position 408 of SEQ ID NO: 2902
aggaaauuauugcuuuggu

SEQ ID NO: 225321 - RNA, 19 nt, Artificial Sequence
  Description of Artificial Sequence: Synthetic oligonucleotide
  Antisense strand to SEQ ID NO: 225320
accaaagcaauaauuuccu

SEQ ID NO: 225322 - RNA, 19 nt, Artificial Sequence
  Description of Artificial Sequence: Synthetic oligonucleotide
  Sense strand starting at position 475 of SEQ ID NO: 2902
ccauauuaaguauguacua

SEQ ID NO: 225323 - RNA, 19 nt, Artificial Sequence
  Description of Artificial Sequence: Synthetic oligonucleotide
  Antisense strand to SEQ ID NO: 225322
uaguacauacuuaauaugg

SEQ ID NO: 225324 - RNA, 19 nt, Artificial Sequence
  Description of Artificial Sequence: Synthetic oligonucleotide
  Sense strand starting at position 592 of SEQ ID NO: 2902
ccauuccugcuuuauggau

SEQ ID NO: 225325 - RNA, 19 nt, Artificial Sequence
  Description of Artificial Sequence: Synthetic oligonucleotide
  Antisense strand to SEQ ID NO: 225324
auccauaaagcaggaaugg

SEQ ID NO: 225326 - RNA, 19 nt, Artificial Sequence
  Description of Artificial Sequence: Synthetic oligonucleotide
  Sense strand starting at position 637 of SEQ ID NO: 2902
aguuaacuugccuaagguu

SEQ ID NO: 225327 - RNA, 19 nt, Artificial Sequence
  Description of Artificial Sequence: Synthetic oligonucleotide
  Antisense strand to SEQ ID NO: 225326
aaccuuaggcaaguuaacu

SEQ ID NO: 225328 - RNA, 19 nt, Artificial Sequence
  Description of Artificial Sequence: Synthetic oligonucleotide
  Sense strand starting at position 945 of SEQ ID NO: 2902
aguuauccagccuaugacu

SEQ ID NO: 225329 - RNA, 19 nt, Artificial Sequence
  Description of Artificial Sequence: Synthetic oligonucleotide
  Antisense strand to SEQ ID NO: 225328
agucauaggcuggauaacu

SEQ ID NO: 225330 - RNA, 19 nt, Artificial Sequence
  Description of Artificial Sequence: Synthetic oligonucleotide
  Sense strand starting at position 1027 of SEQ ID NO: 2902
gucaaauaugucgagaguu

SEQ ID NO: 225331 - RNA, 19 nt, Artificial Sequence
  Description of Artificial Sequence: Synthetic oligonucleotide
  Antisense strand to SEQ ID NO: 225330
aacucucgacauauuugac

SEQ ID NO: 225332 - RNA, 19 nt, Artificial Sequence
  Description of Artificial Sequence: Synthetic oligonucleotide
  Sense strand starting at position 1040 of SEQ ID NO: 2902
agaguugggucuucugaga

SEQ ID NO: 225333 - RNA, 19 nt, Artificial Sequence
  Description of Artificial Sequence: Synthetic oligonucleotide
  Antisense strand to SEQ ID NO: 225332
ucucagaagacccaacucu

SEQ ID NO: 225334 - RNA, 19 nt, Artificial Sequence
  Description of Artificial Sequence: Synthetic oligonucleotide
  Sense strand starting at position 1089 of SEQ ID NO: 2902
ugcagaauucuagaauucu

SEQ ID NO: 225335 - RNA, 19 nt, Artificial Sequence
  Description of Artificial Sequence: Synthetic oligonucleotide
  Antisense strand to SEQ ID NO: 225334
agaauucuagaauucugca

SEQ ID NO: 225336 - RNA, 19 nt, Artificial Sequence
  Description of Artificial Sequence: Synthetic oligonucleotide
  Sense strand starting at position 1238 of SEQ ID NO: 2902
uuugaaagguuuccuaauc

SEQ ID NO: 225337 - RNA, 19 nt, Artificial Sequence
  Description of Artificial Sequence: Synthetic oligonucleotide
  Antisense strand to SEQ ID NO: 225336
gauuaggaaaccuuucaaa

SEQ ID NO: 225338 - RNA, 19 nt, Artificial Sequence
  Description of Artificial Sequence: Synthetic oligonucleotide
  Sense strand starting at position 1239 of SEQ ID NO: 2902
uugaaagguuuccuaaucu

SEQ ID NO: 225339 - RNA, 19 nt, Artificial Sequence
  Description of Artificial Sequence: Synthetic oligonucleotide
  Antisense strand to SEQ ID NO: 225338
agauuaggaaaccuuucaa

SEQ ID NO: 225340 - RNA, 19 nt, Artificial Sequence
  Description of Artificial Sequence: Synthetic oligonucleotide
  Sense strand starting at position 1254 of SEQ ID NO: 2902
aucucugguccagaccaau

SEQ ID NO: 225341 - RNA, 19 nt, Artificial Sequence
  Description of Artificial Sequence: Synthetic oligonucleotide
  Antisense strand to SEQ ID NO: 225340
auuggucuggaccagagau

SEQ ID NO: 225342 - RNA, 19 nt, Artificial Sequence
  Description of Artificial Sequence: Synthetic oligonucleotide
  Sense strand starting at position 1431 of SEQ ID NO: 2902
cuguuugaacuguauacaa

SEQ ID NO: 225343 - RNA, 19 nt, Artificial Sequence
  Description of Artificial Sequence: Synthetic oligonucleotide
  Antisense strand to SEQ ID NO: 225342
uuguauacaguucaaacag

SEQ ID NO: 225344 - RNA, 19 nt, Artificial Sequence
  Description of Artificial Sequence: Synthetic oligonucleotide
  Sense strand starting at position 1433 of SEQ ID NO: 2902
guuugaacuguauacaaca

SEQ ID NO: 225345 - RNA, 19 nt, Artificial Sequence
  Description of Artificial Sequence: Synthetic oligonucleotide
  Antisense strand to SEQ ID NO: 225344
uguuguauacaguucaaac

SEQ ID NO: 225346 - RNA, 19 nt, Artificial Sequence
  Description of Artificial Sequence: Synthetic oligonucleotide
  Sense strand starting at position 1563 of SEQ ID NO: 2902
ucagaacugucaucuagug

SEQ ID NO: 225347 - RNA, 19 nt, Artificial Sequence
  Description of Artificial Sequence: Synthetic oligonucleotide
  Antisense strand to SEQ ID NO: 225346
cacuagaugacaguucuga

SEQ ID NO: 225348 - RNA, 19 nt, Artificial Sequence
  Description of Artificial Sequence: Synthetic oligonucleotide
  Sense strand starting at position 1570 of SEQ ID NO: 2902
ugucaucuaguggaaggua

SEQ ID NO: 225349 - RNA, 19 nt, Artificial Sequence
  Description of Artificial Sequence: Synthetic oligonucleotide
  Antisense strand to SEQ ID NO: 225348
uaccuuccacuagaugaca

SEQ ID NO: 225350 - RNA, 19 nt, Artificial Sequence
  Description of Artificial Sequence: Synthetic oligonucleotide
  Sense strand starting at position 1573 of SEQ ID NO: 2902
caucuaguggaagguaauu

SEQ ID NO: 225351 - RNA, 19 nt, Artificial Sequence
  Description of Artificial Sequence: Synthetic oligonucleotide
  Antisense strand to SEQ ID NO: 225350
aauuaccuuccacuagaug

SEQ ID NO: 225352 - RNA, 19 nt, Artificial Sequence
  Description of Artificial Sequence: Synthetic oligonucleotide
  Sense strand starting at position 1599 of SEQ ID NO: 2902
uguauuaaucauuagucac

SEQ ID NO: 225353 - RNA, 19 nt, Artificial Sequence
  Description of Artificial Sequence: Synthetic oligonucleotide
  Antisense strand to SEQ ID NO: 225352
gugacuaaugauuaauaca

SEQ ID NO: 225354 - RNA, 19 nt, Artificial Sequence
  Description of Artificial Sequence: Synthetic oligonucleotide
  Sense strand starting at position 1700 of SEQ ID NO: 2902
gguaacauuucugccuauu

SEQ ID NO: 225355 - RNA, 19 nt, Artificial Sequence
  Description of Artificial Sequence: Synthetic oligonucleotide
  Antisense strand to SEQ ID NO: 225354
aauaggcagaaauguuacc

SEQ ID NO: 225356 - RNA, 19 nt, Artificial Sequence
  Description of Artificial Sequence: Synthetic oligonucleotide
  Sense strand starting at position 1723 of SEQ ID NO: 2902
uauggccuugucuaagaaa

SEQ ID NO: 225357 - RNA, 19 nt, Artificial Sequence
  Description of Artificial Sequence: Synthetic oligonucleotide
  Antisense strand to SEQ ID NO: 225356
uuucuuagacaaggccaua

SEQ ID NO: 225358 - RNA, 19 nt, Artificial Sequence
  Description of Artificial Sequence: Synthetic oligonucleotide
  Sense strand starting at position 1841 of SEQ ID NO: 2902
aguuguaacugauuaaagc

SEQ ID NO: 225359 - RNA, 19 nt, Artificial Sequence
  Description of Artificial Sequence: Synthetic oligonucleotide
  Antisense strand to SEQ ID NO: 225358
gcuuuaaucaguuacaacu

SEQ ID NO: 225360 - RNA, 19 nt, Artificial Sequence
  Description of Artificial Sequence: Synthetic oligonucleotide
  Sense strand starting at position 1842 of SEQ ID NO: 2902
guuguaacugauuaaagcu

SEQ ID NO: 225361 - RNA, 19 nt, Artificial Sequence
  Description of Artificial Sequence: Synthetic oligonucleotide
  Antisense strand to SEQ ID NO: 225360
agcuuuaaucaguuacaac

SEQ ID NO: 225362 - RNA, 19 nt, Artificial Sequence
  Description of Artificial Sequence: Synthetic oligonucleotide
  Sense strand starting at position 1850 of SEQ ID NO: 2902
ugauuaaagcuaugacuug

SEQ ID NO: 225363 - RNA, 19 nt, Artificial Sequence
  Description of Artificial Sequence: Synthetic oligonucleotide
  Antisense strand to SEQ ID NO: 225362
caagucauagcuuuaauca

SEQ ID NO: 225364 - RNA, 19 nt, Artificial Sequence
  Description of Artificial Sequence: Synthetic oligonucleotide
  Sense strand starting at position 2208 of SEQ ID NO: 2902
auacuuguaugagcucaua

SEQ ID NO: 225365 - RNA, 19 nt, Artificial Sequence
  Description of Artificial Sequence: Synthetic oligonucleotide
  Antisense strand to SEQ ID NO: 225364
uaugagcucauacaaguau

SEQ ID NO: 225366 - RNA, 19 nt, Artificial Sequence
  Description of Artificial Sequence: Synthetic oligonucleotide
  Sense strand starting at position 2211 of SEQ ID NO: 2902
cuuguaugagcucauacac

SEQ ID NO: 225367 - RNA, 19 nt, Artificial Sequence
  Description of Artificial Sequence: Synthetic oligonucleotide
  Antisense strand to SEQ ID NO: 225366
guguaugagcucauacaag

SEQ ID NO: 225368 - RNA, 19 nt, Artificial Sequence
  Description of Artificial Sequence: Synthetic oligonucleotide
  Sense strand starting at position 2287 of SEQ ID NO: 2902
ugcagaguccuggauuagu

SEQ ID NO: 225369 - RNA, 19 nt, Artificial Sequence
  Description of Artificial Sequence: Synthetic oligonucleotide
  Antisense strand to SEQ ID NO: 225368
acuaauccaggacucugca

SEQ ID NO: 225370 - RNA, 19 nt, Artificial Sequence
  Description of Artificial Sequence: Synthetic oligonucleotide
  Sense strand starting at position 2295 of SEQ ID NO: 2902
ccuggauuaguugagguaa

SEQ ID NO: 225371 - RNA, 19 nt, Artificial Sequence
  Description of Artificial Sequence: Synthetic oligonucleotide
  Antisense strand to SEQ ID NO: 225370
uuaccucaacuaauccagg

SEQ ID NO: 225372 - RNA, 19 nt, Artificial Sequence
  Description of Artificial Sequence: Synthetic oligonucleotide
  Sense strand starting at position 2306 of SEQ ID NO: 2902
ugagguaacuucccauauc

SEQ ID NO: 225373 - RNA, 19 nt, Artificial Sequence
  Description of Artificial Sequence: Synthetic oligonucleotide
  Antisense strand to SEQ ID NO: 225372
gauaugggaaguuaccuca

SEQ ID NO: 225374 - RNA, 19 nt, Artificial Sequence
  Description of Artificial Sequence: Synthetic oligonucleotide
  Sense strand starting at position 2387 of SEQ ID NO: 2902
ggcuguaauaaaggacaua

SEQ ID NO: 225375 - RNA, 19 nt, Artificial Sequence
  Description of Artificial Sequence: Synthetic oligonucleotide
  Antisense strand to SEQ ID NO: 225374
uauguccuuuauuacagcc

SEQ ID NO: 225376 - RNA, 19 nt, Artificial Sequence
  Description of Artificial Sequence: Synthetic oligonucleotide
  Sense strand starting at position 2465 of SEQ ID NO: 2902
agguauuaaucccugauac

SEQ ID NO: 225377 - RNA, 19 nt, Artificial Sequence
  Description of Artificial Sequence: Synthetic oligonucleotide
  Antisense strand to SEQ ID NO: 225376
guaucagggauuaauaccu

SEQ ID NO: 225378 - RNA, 19 nt, Artificial Sequence
  Description of Artificial Sequence: Synthetic oligonucleotide
  Sense strand starting at position 2466 of SEQ ID NO: 2902
gguauuaaucccugauacg

SEQ ID NO: 225379 - RNA, 19 nt, Artificial Sequence
  Description of Artificial Sequence: Synthetic oligonucleotide
  Antisense strand to SEQ ID NO: 225378
cguaucagggauuaauacc

SEQ ID NO: 225380 - RNA, 19 nt, Artificial Sequence
  Description of Artificial Sequence: Synthetic oligonucleotide
  Sense strand starting at position 2467 of SEQ ID NO: 2902
guauuaaucccugauacgg

SEQ ID NO: 225381 - RNA, 19 nt, Artificial Sequence
  Description of Artificial Sequence: Synthetic oligonucleotide
  Antisense strand to SEQ ID NO: 225380
ccguaucagggauuaauac

SEQ ID NO: 225382 - RNA, 19 nt, Artificial Sequence
  Description of Artificial Sequence: Synthetic oligonucleotide
  Sense strand starting at position 2520 of SEQ ID NO: 2902
uuguaucucccagaauguc

SEQ ID NO: 225383 - RNA, 19 nt, Artificial Sequence
  Description of Artificial Sequence: Synthetic oligonucleotide
  Antisense strand to SEQ ID NO: 225382
gacauucugggagauacaa

SEQ ID NO: 225384 - RNA, 19 nt, Artificial Sequence
  Description of Artificial Sequence: Synthetic oligonucleotide
  Sense strand starting at position 2595 of SEQ ID NO: 2902
ucucgugacaguuaauaag

SEQ ID NO: 225385 - RNA, 19 nt, Artificial Sequence
  Description of Artificial Sequence: Synthetic oligonucleotide
  Antisense strand to SEQ ID NO: 225384
cuuauuaacugucacgaga

SEQ ID NO: 225386 - RNA, 19 nt, Artificial Sequence
  Description of Artificial Sequence: Synthetic oligonucleotide
  Sense strand starting at position 2618 of SEQ ID NO: 2902
gugaaaucugauggguuua

SEQ ID NO: 225387 - RNA, 19 nt, Artificial Sequence
  Description of Artificial Sequence: Synthetic oligonucleotide
  Antisense strand to SEQ ID NO: 225386
uaaacccaucagauuucac

SEQ ID NO: 225388 - RNA, 19 nt, Artificial Sequence
  Description of Artificial Sequence: Synthetic oligonucleotide
  Sense strand starting at position 3377 of SEQ ID NO: 2902
aacccuacccgguagauau

SEQ ID NO: 225389 - RNA, 19 nt, Artificial Sequence
  Description of Artificial Sequence: Synthetic oligonucleotide
  Antisense strand to SEQ ID NO: 225388
auaucuaccggguaggguu

SEQ ID NO: 225390 - RNA, 19 nt, Artificial Sequence
  Description of Artificial Sequence: Synthetic oligonucleotide
  Sense strand starting at position 3496 of SEQ ID NO: 2902
gcucguguucuuuccacca

SEQ ID NO: 225391 - RNA, 19 nt, Artificial Sequence
  Description of Artificial Sequence: Synthetic oligonucleotide
  Antisense strand to SEQ ID NO: 225390
ugguggaaagaacacgagc

SEQ ID NO: 225392 - RNA, 19 nt, Artificial Sequence
  Description of Artificial Sequence: Synthetic oligonucleotide
  Sense strand starting at position 3572 of SEQ ID NO: 2902
gaauuacucuaggugagcu

SEQ ID NO: 225393 - RNA, 19 nt, Artificial Sequence
  Description of Artificial Sequence: Synthetic oligonucleotide
  Antisense strand to SEQ ID NO: 225392
agcucaccuagaguaauuc

SEQ ID NO: 225394 - RNA, 19 nt, Artificial Sequence
  Description of Artificial Sequence: Synthetic oligonucleotide
  Sense strand starting at position 3626 of SEQ ID NO: 2902
guucucaaccagggacaau

SEQ ID NO: 225395 - RNA, 19 nt, Artificial Sequence
  Description of Artificial Sequence: Synthetic oligonucleotide
  Antisense strand to SEQ ID NO: 225394
auugucccugguugagaac

SEQ ID NO: 225396 - RNA, 19 nt, Artificial Sequence
  Description of Artificial Sequence: Synthetic oligonucleotide
  Sense strand starting at position 3931 of SEQ ID NO: 2902
aguugacauccugaauucu

SEQ ID NO: 225397 - RNA, 19 nt, Artificial Sequence
  Description of Artificial Sequence: Synthetic oligonucleotide
  Antisense strand to SEQ ID NO: 225396
agaauucaggaugucaacu

SEQ ID NO: 225398 - RNA, 19 nt, Artificial Sequence
  Description of Artificial Sequence: Synthetic oligonucleotide
  Sense strand starting at position 397 of SEQ ID NO: 2901
augggaugaucucaagcaa

SEQ ID NO: 225399 - RNA, 19 nt, Artificial Sequence
  Description of Artificial Sequence: Synthetic oligonucleotide
  Antisense strand to SEQ ID NO: 225398
uugcuugagaucaucccau

SEQ ID NO: 225400 - RNA, 19 nt, Artificial Sequence
  Description of Artificial Sequence: Synthetic oligonucleotide
  Sense strand starting at position 541 of SEQ ID NO: 2901
gguugccucgcauagcaaa

SEQ ID NO: 225401 - RNA, 19 nt, Artificial Sequence
  Description of Artificial Sequence: Synthetic oligonucleotide
  Antisense strand to SEQ ID NO: 225400
uuugcuaugcgaggcaacc

SEQ ID NO: 225402 - RNA, 19 nt, Artificial Sequence
  Description of Artificial Sequence: Synthetic oligonucleotide
  Sense strand starting at position 730 of SEQ ID NO: 2901
cugugagccaggcaacauu

SEQ ID NO: 225403 - RNA, 19 nt, Artificial Sequence
  Description of Artificial Sequence: Synthetic oligonucleotide
  Antisense strand to SEQ ID NO: 225402
aauguugccuggcucacag

SEQ ID NO: 225404 - RNA, 19 nt, Artificial Sequence
  Description of Artificial Sequence: Synthetic oligonucleotide
  Sense strand starting at position 739 of SEQ ID NO: 2901
aggcaacauucugaagauu

SEQ ID NO: 225405 - RNA, 19 nt, Artificial Sequence
  Description of Artificial Sequence: Synthetic oligonucleotide
  Antisense strand to SEQ ID NO: 225404
aaucuucagaauguugccu

SEQ ID NO: 225406 - RNA, 19 nt, Artificial Sequence
  Description of Artificial Sequence: Synthetic oligonucleotide
  Sense strand starting at position 763 of SEQ ID NO: 2901
gucaauagucauggagcuu

SEQ ID NO: 225407 - RNA, 19 nt, Artificial Sequence
  Description of Artificial Sequence: Synthetic oligonucleotide
  Antisense strand to SEQ ID NO: 225406
aagcuccaugacuauugac

SEQ ID NO: 225408 - RNA, 19 nt, Artificial Sequence
  Description of Artificial Sequence: Synthetic oligonucleotide
  Sense strand starting at position 852 of SEQ ID NO: 2901
uuaaauguuacccguagga

SEQ ID NO: 225409 - RNA, 19 nt, Artificial Sequence
  Description of Artificial Sequence: Synthetic oligonucleotide
  Antisense strand to SEQ ID NO: 225408
uccuacggguaacauuuaa

SEQ ID NO: 225410 - RNA, 19 nt, Artificial Sequence
  Description of Artificial Sequence: Synthetic oligonucleotide
  Sense strand starting at position 939 of SEQ ID NO: 2901
cgcaauuuauggcuccaau

SEQ ID NO: 225411 - RNA, 19 nt, Artificial Sequence
  Description of Artificial Sequence: Synthetic oligonucleotide
  Antisense strand to SEQ ID NO: 225410
auuggagccauaaauugcg

SEQ ID NO: 225412 - RNA, 19 nt, Artificial Sequence
  Description of Artificial Sequence: Synthetic oligonucleotide
  Sense strand starting at position 1082 of SEQ ID NO: 2901
gacgguguuccauacuauu

SEQ ID NO: 225413 - RNA, 19 nt, Artificial Sequence
  Description of Artificial Sequence: Synthetic oligonucleotide
  Antisense strand to SEQ ID NO: 225412
aauaguauggaacaccguc

SEQ ID NO: 225414 - RNA, 19 nt, Artificial Sequence
  Description of Artificial Sequence: Synthetic oligonucleotide
  Sense strand starting at position 1141 of SEQ ID NO: 2901
gcuggaaggucuuccuaau

SEQ ID NO: 225415 - RNA, 19 nt, Artificial Sequence
  Description of Artificial Sequence: Synthetic oligonucleotide
  Antisense strand to SEQ ID NO: 225414
auuaggaagaccuuccagc

SEQ ID NO: 225416 - RNA, 19 nt, Artificial Sequence
  Description of Artificial Sequence: Synthetic oligonucleotide
  Sense strand starting at position 1247 of SEQ ID NO: 2901
ccuggacagguucgcuauu

SEQ ID NO: 225417 - RNA, 19 nt, Artificial Sequence
  Description of Artificial Sequence: Synthetic oligonucleotide
  Antisense strand to SEQ ID NO: 225416
aauagcgaaccuguccagg

SEQ ID NO: 225418 - RNA, 19 nt, Artificial Sequence
  Description of Artificial Sequence: Synthetic oligonucleotide
  Sense strand starting at position 1248 of SEQ ID NO: 2901
cuggacagguucgcuauua

SEQ ID NO: 225419 - RNA, 19 nt, Artificial Sequence
  Description of Artificial Sequence: Synthetic oligonucleotide
  Antisense strand to SEQ ID NO: 225418
uaauagcgaaccuguccag

SEQ ID NO: 225420 - RNA, 19 nt, Artificial Sequence
  Description of Artificial Sequence: Synthetic oligonucleotide
  Sense strand starting at position 2297 of SEQ ID NO: 2901
ccgugaacuccgcaagcua

SEQ ID NO: 225421 - RNA, 19 nt, Artificial Sequence
  Description of Artificial Sequence: Synthetic oligonucleotide
  Antisense strand to SEQ ID NO: 225420
uagcuugcggaguucacgg

SEQ ID NO: 225422 - RNA, 19 nt, Artificial Sequence
  Description of Artificial Sequence: Synthetic oligonucleotide
  Sense strand starting at position 2528 of SEQ ID NO: 2901
cggcauuuauggucaaccu

SEQ ID NO: 225423 - RNA, 19 nt, Artificial Sequence
  Description of Artificial Sequence: Synthetic oligonucleotide
  Antisense strand to SEQ ID NO: 225422
agguugaccauaaaugccg

SEQ ID NO: 225424 - RNA, 19 nt, Artificial Sequence
  Description of Artificial Sequence: Synthetic oligonucleotide
  Sense strand starting at position 2713 of SEQ ID NO: 2901
aggagauggugccaaauua

SEQ ID NO: 225425 - RNA, 19 nt, Artificial Sequence
  Description of Artificial Sequence: Synthetic oligonucleotide
  Antisense strand to SEQ ID NO: 225424
uaauuuggcaccaucuccu

SEQ ID NO: 225426 - RNA, 19 nt, Artificial Sequence
  Description of Artificial Sequence: Synthetic oligonucleotide
  Sense strand starting at position 2731 of SEQ ID NO: 2901
agaauauagcaaggacuuu

SEQ ID NO: 225427 - RNA, 19 nt, Artificial Sequence
  Description of Artificial Sequence: Synthetic oligonucleotide
  Antisense strand to SEQ ID NO: 225426
aaaguccuugcuauauucu

SEQ ID NO: 225428 - RNA, 19 nt, Artificial Sequence
  Description of Artificial Sequence: Synthetic oligonucleotide
  Sense strand starting at position 2765 of SEQ ID NO: 2901
ggucauucucaacguuacu

SEQ ID NO: 225429 - RNA, 19 nt, Artificial Sequence
  Description of Artificial Sequence: Synthetic oligonucleotide
  Antisense strand to SEQ ID NO: 225428
aguaacguugagaaugacc

SEQ ID NO: 225430 - RNA, 19 nt, Artificial Sequence
  Description of Artificial Sequence: Synthetic oligonucleotide
  Sense strand starting at position 2770 of SEQ ID NO: 2901
uucucaacguuacuuaaga

SEQ ID NO: 225431 - RNA, 19 nt, Artificial Sequence
  Description of Artificial Sequence: Synthetic oligonucleotide
  Antisense strand to SEQ ID NO: 225430
ucuuaaguaacguugagaa

SEQ ID NO: 225432 - RNA, 19 nt, Artificial Sequence
  Description of Artificial Sequence: Synthetic oligonucleotide
  Sense strand starting at position 2814 of SEQ ID NO: 2901
gcuauuggucaaugaugaa

SEQ ID NO: 225433 - RNA, 19 nt, Artificial Sequence
  Description of Artificial Sequence: Synthetic oligonucleotide
  Antisense strand to SEQ ID NO: 225432
uucaucauugaccaauagc

SEQ ID NO: 225434 - RNA, 19 nt, Artificial Sequence
  Description of Artificial Sequence: Synthetic oligonucleotide
  Sense strand starting at position 2835 of SEQ ID NO: 2901
cuguaagcuccagagcuaa

SEQ ID NO: 225435 - RNA, 19 nt, Artificial Sequence
  Description of Artificial Sequence: Synthetic oligonucleotide
  Antisense strand to SEQ ID NO: 225434
uuagcucuggagcuuacag

SEQ ID NO: 225436 - RNA, 19 nt, Artificial Sequence
  Description of Artificial Sequence: Synthetic oligonucleotide
  Sense strand starting at position 3003 of SEQ ID NO: 2901
uuuaaacuccuauggugaa

SEQ ID NO: 225437 - RNA, 19 nt, Artificial Sequence
  Description of Artificial Sequence: Synthetic oligonucleotide
  Antisense strand to SEQ ID NO: 225436
uucaccauaggaguuuaaa

SEQ ID NO: 225438 - RNA, 19 nt, Artificial Sequence
  Description of Artificial Sequence: Synthetic oligonucleotide
  Sense strand starting at position 3021 of SEQ ID NO: 2901
aggaaaugcugauaaccaa

SEQ ID NO: 225439 - RNA, 19 nt, Artificial Sequence
  Description of Artificial Sequence: Synthetic oligonucleotide
  Antisense strand to SEQ ID NO: 225438
uugguuaucagcauuuccu

SEQ ID NO: 225440 - RNA, 19 nt, Artificial Sequence
  Description of Artificial Sequence: Synthetic oligonucleotide
  Sense strand starting at position 3041 of SEQ ID NO: 2901
uuuguuaaaugggaacaaa

SEQ ID NO: 225441 - RNA, 19 nt, Artificial Sequence
  Description of Artificial Sequence: Synthetic oligonucleotide
  Antisense strand to SEQ ID NO: 225440
uuuguucccauuuaacaaa

SEQ ID NO: 225442 - RNA, 19 nt, Artificial Sequence
  Description of Artificial Sequence: Synthetic oligonucleotide
  Sense strand starting at position 3410 of SEQ ID NO: 2901
acauauaugaaguguguga

SEQ ID NO: 225443 - RNA, 19 nt, Artificial Sequence
  Description of Artificial Sequence: Synthetic oligonucleotide
  Antisense strand to SEQ ID NO: 225442
ucacacacuucauauaugu

SEQ ID NO: 225444 - RNA, 19 nt, Artificial Sequence
  Description of Artificial Sequence: Synthetic oligonucleotide
  Sense strand starting at position 3412 of SEQ ID NO: 2901
auauaugaagugugugaau

SEQ ID NO: 225445 - RNA, 19 nt, Artificial Sequence
  Description of Artificial Sequence: Synthetic oligonucleotide
  Antisense strand to SEQ ID NO: 225444
auucacacacuucauauau

SEQ ID NO: 225446 - RNA, 19 nt, Artificial Sequence
  Description of Artificial Sequence: Synthetic oligonucleotide
  Sense strand starting at position 3414 of SEQ ID NO: 2901
auaugaagugugugaauau

SEQ ID NO: 225447 - RNA, 19 nt, Artificial Sequence
  Description of Artificial Sequence: Synthetic oligonucleotide
  Antisense strand to SEQ ID NO: 225446
auauucacacacuucauau

SEQ ID NO: 225448 - RNA, 19 nt, Artificial Sequence
  Description of Artificial Sequence: Synthetic oligonucleotide
  Sense strand starting at position 3442 of SEQ ID NO: 2901
ugaggagacuuaucucuug

SEQ ID NO: 225449 - RNA, 19 nt, Artificial Sequence
  Description of Artificial Sequence: Synthetic oligonucleotide
  Antisense strand to SEQ ID NO: 225448
caagagauaagucuccuca

SEQ ID NO: 225450 - RNA, 19 nt, Artificial Sequence
  Description of Artificial Sequence: Synthetic oligonucleotide
  Sense strand starting at position 3445 of SEQ ID NO: 2901
ggagacuuaucucuuguag

SEQ ID NO: 225451 - RNA, 19 nt, Artificial Sequence
  Description of Artificial Sequence: Synthetic oligonucleotide
  Antisense strand to SEQ ID NO: 225450
cuacaagagauaagucucc

SEQ ID NO: 225452 - RNA, 19 nt, Artificial Sequence
  Description of Artificial Sequence: Synthetic oligonucleotide
  Sense strand starting at position 3512 of SEQ ID NO: 2901
guaagagaccucuagcuuc

SEQ ID NO: 225453 - RNA, 19 nt, Artificial Sequence
  Description of Artificial Sequence: Synthetic oligonucleotide
  Antisense strand to SEQ ID NO: 225452
gaagcuagaggucucuuac

SEQ ID NO: 225454 - RNA, 19 nt, Artificial Sequence
  Description of Artificial Sequence: Synthetic oligonucleotide
  Sense strand starting at position 3588 of SEQ ID NO: 2901
ugauucuguucuuuggaga

SEQ ID NO: 225455 - RNA, 19 nt, Artificial Sequence
  Description of Artificial Sequence: Synthetic oligonucleotide
  Antisense strand to SEQ ID NO: 225454
ucuccaaagaacagaauca

SEQ ID NO: 225456 - RNA, 19 nt, Artificial Sequence
  Description of Artificial Sequence: Synthetic oligonucleotide
  Sense strand starting at position 3589 of SEQ ID NO: 2901
gauucuguucuuuggagaa

SEQ ID NO: 225457 - RNA, 19 nt, Artificial Sequence
  Description of Artificial Sequence: Synthetic oligonucleotide
  Antisense strand to SEQ ID NO: 225456
uucuccaaagaacagaauc

SEQ ID NO: 225458 - RNA, 19 nt, Artificial Sequence
  Description of Artificial Sequence: Synthetic oligonucleotide
  Sense strand starting at position 3635 of SEQ ID NO: 2901
guguaaauaucgcuugaua

SEQ ID NO: 225459 - RNA, 19 nt, Artificial Sequence
  Description of Artificial Sequence: Synthetic oligonucleotide
  Antisense strand to SEQ ID NO: 225458
uaucaagcgauauuuacac

SEQ ID NO: 225460 - RNA, 19 nt, Artificial Sequence
  Description of Artificial Sequence: Synthetic oligonucleotide
  Sense strand starting at position 3637 of SEQ ID NO: 2901
guaaauaucgcuugauaug

SEQ ID NO: 225461 - RNA, 19 nt, Artificial Sequence
  Description of Artificial Sequence: Synthetic oligonucleotide
  Antisense strand to SEQ ID NO: 225460
cauaucaagcgauauuuac

SEQ ID NO: 225462 - RNA, 19 nt, Artificial Sequence
  Description of Artificial Sequence: Synthetic oligonucleotide
  Sense strand starting at position 3638 of SEQ ID NO: 2901
uaaauaucgcuugauaugu

SEQ ID NO: 225463 - RNA, 19 nt, Artificial Sequence
  Description of Artificial Sequence: Synthetic oligonucleotide
  Antisense strand to SEQ ID NO: 225462
acauaucaagcgauauuua

SEQ ID NO: 225464 - RNA, 19 nt, Artificial Sequence
  Description of Artificial Sequence: Synthetic oligonucleotide
  Sense strand starting at position 3644 of SEQ ID NO: 2901
ucgcuugauauguucgguu

SEQ ID NO: 225465 - RNA, 19 nt, Artificial Sequence
  Description of Artificial Sequence: Synthetic oligonucleotide
  Antisense strand to SEQ ID NO: 225464
aaccgaacauaucaagcga

SEQ ID NO: 225466 - RNA, 19 nt, Artificial Sequence
  Description of Artificial Sequence: Synthetic oligonucleotide
  Sense strand starting at position 3646 of SEQ ID NO: 2901
gcuugauauguucgguuua

SEQ ID NO: 225467 - RNA, 19 nt, Artificial Sequence
  Description of Artificial Sequence: Synthetic oligonucleotide
  Antisense strand to SEQ ID NO: 225466
uaaaccgaacauaucaagc

SEQ ID NO: 225468 - RNA, 19 nt, Artificial Sequence
  Description of Artificial Sequence: Synthetic oligonucleotide
  Sense strand starting at position 3648 of SEQ ID NO: 2901
uugauauguucgguuuauu

SEQ ID NO: 225469 - RNA, 19 nt, Artificial Sequence
  Description of Artificial Sequence: Synthetic oligonucleotide
  Antisense strand to SEQ ID NO: 225468
aauaaaccgaacauaucaa

SEQ ID NO: 225470 - RNA, 19 nt, Artificial Sequence
  Description of Artificial Sequence: Synthetic oligonucleotide
  Sense strand starting at position 3651 of SEQ ID NO: 2901
auauguucgguuuauugau

SEQ ID NO: 225471 - RNA, 19 nt, Artificial Sequence
  Description of Artificial Sequence: Synthetic oligonucleotide
  Antisense strand to SEQ ID NO: 225470
aucaauaaaccgaacauau

SEQ ID NO: 225472 - RNA, 19 nt, Artificial Sequence
  Description of Artificial Sequence: Synthetic oligonucleotide
  Sense strand starting at position 3657 of SEQ ID NO: 2901
ucgguuuauugauugaaac

SEQ ID NO: 225473 - RNA, 19 nt, Artificial Sequence
  Description of Artificial Sequence: Synthetic oligonucleotide
  Antisense strand to SEQ ID NO: 225472
guuucaaucaauaaaccga

SEQ ID NO: 225474 - RNA, 19 nt, Artificial Sequence
  Description of Artificial Sequence: Synthetic oligonucleotide
  Sense strand starting at position 3658 of SEQ ID NO: 2901
cgguuuauugauugaaacc

SEQ ID NO: 225475 - RNA, 19 nt, Artificial Sequence
  Description of Artificial Sequence: Synthetic oligonucleotide
  Antisense strand to SEQ ID NO: 225474
gguuucaaucaauaaaccg

SEQ ID NO: 225476 - RNA, 19 nt, Artificial Sequence
  Description of Artificial Sequence: Synthetic oligonucleotide
  Sense strand starting at position 3963 of SEQ ID NO: 2901
acuagucccucucugaguu

SEQ ID NO: 225477 - RNA, 19 nt, Artificial Sequence
  Description of Artificial Sequence: Synthetic oligonucleotide
  Antisense strand to SEQ ID NO: 225476
aacucagagagggacuagu

SEQ ID NO: 225478 - RNA, 19 nt, Artificial Sequence
  Description of Artificial Sequence: Synthetic oligonucleotide
  Sense strand starting at position 33 of SEQ ID NO: 2904
gcgugauauggugagaccu

SEQ ID NO: 225479 - RNA, 19 nt, Artificial Sequence
  Description of Artificial Sequence: Synthetic oligonucleotide
  Antisense strand to SEQ ID NO: 225478
aggucucaccauaucacgc

SEQ ID NO: 225480 - RNA, 19 nt, Artificial Sequence
  Description of Artificial Sequence: Synthetic oligonucleotide
  Sense strand starting at position 110 of SEQ ID NO: 2904
gcccuaagcuacucaggau

SEQ ID NO: 225481 - RNA, 19 nt, Artificial Sequence
  Description of Artificial Sequence: Synthetic oligonucleotide
  Antisense strand to SEQ ID NO: 225480
auccugaguagcuuagggc

SEQ ID NO: 225482 - RNA, 19 nt, Artificial Sequence
  Description of Artificial Sequence: Synthetic oligonucleotide
  Sense strand starting at position 215 of SEQ ID NO: 2904
agagcaauaccuugucuua

SEQ ID NO: 225483 - RNA, 19 nt, Artificial Sequence
  Description of Artificial Sequence: Synthetic oligonucleotide
  Antisense strand to SEQ ID NO: 225482
uaagacaagguauugcucu

SEQ ID NO: 225484 - RNA, 19 nt, Artificial Sequence
  Description of Artificial Sequence: Synthetic oligonucleotide
  Sense strand starting at position 273 of SEQ ID NO: 2904
ugcguaaucccagaacuuu

SEQ ID NO: 225485 - RNA, 19 nt, Artificial Sequence
  Description of Artificial Sequence: Synthetic oligonucleotide
  Antisense strand to SEQ ID NO: 225484
aaaguucugggauuacgca

SEQ ID NO: 225486 - RNA, 19 nt, Artificial Sequence
  Description of Artificial Sequence: Synthetic oligonucleotide
  Sense strand starting at position 699 of SEQ ID NO: 2904
gcacuacugucacugucau

SEQ ID NO: 225487 - RNA, 19 nt, Artificial Sequence
  Description of Artificial Sequence: Synthetic oligonucleotide
  Antisense strand to SEQ ID NO: 225486
augacagugacaguagugc

SEQ ID NO: 225488 - RNA, 19 nt, Artificial Sequence
  Description of Artificial Sequence: Synthetic oligonucleotide
  Sense strand starting at position 801 of SEQ ID NO: 2904
acuuguucccagcgauuug

SEQ ID NO: 225489 - RNA, 19 nt, Artificial Sequence
  Description of Artificial Sequence: Synthetic oligonucleotide
  Antisense strand to SEQ ID NO: 225488
caaaucgcugggaacaagu

SEQ ID NO: 225490 - RNA, 19 nt, Artificial Sequence
  Description of Artificial Sequence: Synthetic oligonucleotide
  Sense strand starting at position 806 of SEQ ID NO: 2904
uucccagcgauuugcagaa

SEQ ID NO: 225491 - RNA, 19 nt, Artificial Sequence
  Description of Artificial Sequence: Synthetic oligonucleotide
  Antisense strand to SEQ ID NO: 225490
uucugcaaaucgcugggaa

SEQ ID NO: 225492 - RNA, 19 nt, Artificial Sequence
  Description of Artificial Sequence: Synthetic oligonucleotide
  Sense strand starting at position 879 of SEQ ID NO: 2904
cucagaaguuugccgauuu

SEQ ID NO: 225493 - RNA, 19 nt, Artificial Sequence
  Description of Artificial Sequence: Synthetic oligonucleotide
  Antisense strand to SEQ ID NO: 225492
aaaucggcaaacuucugag

SEQ ID NO: 225494 - RNA, 19 nt, Artificial Sequence
  Description of Artificial Sequence: Synthetic oligonucleotide
  Sense strand starting at position 1000 of SEQ ID NO: 2904
caagucucacguugaauuu

SEQ ID NO: 225495 - RNA, 19 nt, Artificial Sequence
  Description of Artificial Sequence: Synthetic oligonucleotide
  Antisense strand to SEQ ID NO: 225494
aaauucaacgugagacuug

SEQ ID NO: 225496 - RNA, 19 nt, Artificial Sequence
  Description of Artificial Sequence: Synthetic oligonucleotide
  Sense strand starting at position 1046 of SEQ ID NO: 2904
ggaucuucugcggaagcca

SEQ ID NO: 225497 - RNA, 19 nt, Artificial Sequence
  Description of Artificial Sequence: Synthetic oligonucleotide
  Antisense strand to SEQ ID NO: 225496
uggcuuccgcagaagaucc

SEQ ID NO: 225498 - RNA, 19 nt, Artificial Sequence
  Description of Artificial Sequence: Synthetic oligonucleotide
  Sense strand starting at position 1097 of SEQ ID NO: 2904
caaacaagcugggaugaaa

SEQ ID NO: 225499 - RNA, 19 nt, Artificial Sequence
  Description of Artificial Sequence: Synthetic oligonucleotide
  Antisense strand to SEQ ID NO: 225498
uuucaucccagcuuguuug

SEQ ID NO: 225500 - RNA, 19 nt, Artificial Sequence
  Description of Artificial Sequence: Synthetic oligonucleotide
  Sense strand starting at position 1367 of SEQ ID NO: 2904
ggguuuacacgucagucau

SEQ ID NO: 225501 - RNA, 19 nt, Artificial Sequence
  Description of Artificial Sequence: Synthetic oligonucleotide
  Antisense strand to SEQ ID NO: 225500
augacugacguguaaaccc

SEQ ID NO: 225502 - RNA, 19 nt, Artificial Sequence
  Description of Artificial Sequence: Synthetic oligonucleotide
  Sense strand starting at position 1369 of SEQ ID NO: 2904
guuuacacgucagucauca

SEQ ID NO: 225503 - RNA, 19 nt, Artificial Sequence
  Description of Artificial Sequence: Synthetic oligonucleotide
  Antisense strand to SEQ ID NO: 225502
ugaugacugacguguaaac

SEQ ID NO: 225504 - RNA, 19 nt, Artificial Sequence
  Description of Artificial Sequence: Synthetic oligonucleotide
  Sense strand starting at position 1373 of SEQ ID NO: 2904
acacgucagucaucaccau

SEQ ID NO: 225505 - RNA, 19 nt, Artificial Sequence
  Description of Artificial Sequence: Synthetic oligonucleotide
  Antisense strand to SEQ ID NO: 225504
auggugaugacugacgugu

SEQ ID NO: 225506 - RNA, 19 nt, Artificial Sequence
  Description of Artificial Sequence: Synthetic oligonucleotide
  Sense strand starting at position 1920 of SEQ ID NO: 2904
gccaaauucgaagggauug

SEQ ID NO: 225507 - RNA, 19 nt, Artificial Sequence
  Description of Artificial Sequence: Synthetic oligonucleotide
  Antisense strand to SEQ ID NO: 225506
caaucccuucgaauuuggc

SEQ ID NO: 225508 - RNA, 19 nt, Artificial Sequence
  Description of Artificial Sequence: Synthetic oligonucleotide
  Sense strand starting at position 2405 of SEQ ID NO: 2904
cuggaaacgcuguguuuga

SEQ ID NO: 225509 - RNA, 19 nt, Artificial Sequence
  Description of Artificial Sequence: Synthetic oligonucleotide
  Antisense strand to SEQ ID NO: 225508
ucaaacacagcguuuccag

SEQ ID NO: 225510 - RNA, 19 nt, Artificial Sequence
  Description of Artificial Sequence: Synthetic oligonucleotide
  Sense strand starting at position 2476 of SEQ ID NO: 2904
ggagaaccaugggaucgau

SEQ ID NO: 225511 - RNA, 19 nt, Artificial Sequence
  Description of Artificial Sequence: Synthetic oligonucleotide
  Antisense strand to SEQ ID NO: 225510
aucgaucccaugguucucc

SEQ ID NO: 225512 - RNA, 19 nt, Artificial Sequence
  Description of Artificial Sequence: Synthetic oligonucleotide
  Sense strand starting at position 2958 of SEQ ID NO: 2904
ucaugaugauaauaggaaa

SEQ ID NO: 225513 - RNA, 19 nt, Artificial Sequence
  Description of Artificial Sequence: Synthetic oligonucleotide
  Antisense strand to SEQ ID NO: 225512
uuuccuauuaucaucauga

SEQ ID NO: 225514 - RNA, 19 nt, Artificial Sequence
  Description of Artificial Sequence: Synthetic oligonucleotide
  Sense strand starting at position 3030 of SEQ ID NO: 2904
cuagaaagcgcucaguagu

SEQ ID NO: 225515 - RNA, 19 nt, Artificial Sequence
  Description of Artificial Sequence: Synthetic oligonucleotide
  Antisense strand to SEQ ID NO: 225514
acuacugagcgcuuucuag

SEQ ID NO: 225516 - RNA, 19 nt, Artificial Sequence
  Description of Artificial Sequence: Synthetic oligonucleotide
  Sense strand starting at position 3045 of SEQ ID NO: 2904
uaguguuugcuguuaucuu

SEQ ID NO: 225517 - RNA, 19 nt, Artificial Sequence
  Description of Artificial Sequence: Synthetic oligonucleotide
  Antisense strand to SEQ ID NO: 225516
aagauaacagcaaacacua

SEQ ID NO: 225518 - RNA, 19 nt, Artificial Sequence
  Description of Artificial Sequence: Synthetic oligonucleotide
  Sense strand starting at position 3080 of SEQ ID NO: 2904
cuggacauuucucagguga

SEQ ID NO: 225519 - RNA, 19 nt, Artificial Sequence
  Description of Artificial Sequence: Synthetic oligonucleotide
  Antisense strand to SEQ ID NO: 225518
ucaccugagaaauguccag

SEQ ID NO: 225520 - RNA, 19 nt, Artificial Sequence
  Description of Artificial Sequence: Synthetic oligonucleotide
  Sense strand starting at position 3082 of SEQ ID NO: 2904
ggacauuucucaggugaga

SEQ ID NO: 225521 - RNA, 19 nt, Artificial Sequence
  Description of Artificial Sequence: Synthetic oligonucleotide
  Antisense strand to SEQ ID NO: 225520
ucucaccugagaaaugucc

SEQ ID NO: 225522 - RNA, 19 nt, Artificial Sequence
  Description of Artificial Sequence: Synthetic oligonucleotide
  Sense strand starting at position 3132 of SEQ ID NO: 2904
cuaucuauaugugccauau

SEQ ID NO: 225523 - RNA, 19 nt, Artificial Sequence
  Description of Artificial Sequence: Synthetic oligonucleotide
  Antisense strand to SEQ ID NO: 225522
auauggcacauauagauag

SEQ ID NO: 225524 - RNA, 19 nt, Artificial Sequence
  Description of Artificial Sequence: Synthetic oligonucleotide
  Sense strand starting at position 3155 of SEQ ID NO: 2904
aguugucagcuagacauca

SEQ ID NO: 225525 - RNA, 19 nt, Artificial Sequence
  Description of Artificial Sequence: Synthetic oligonucleotide
  Antisense strand to SEQ ID NO: 225524
ugaugucuagcugacaacu

SEQ ID NO: 225526 - RNA, 19 nt, Artificial Sequence
  Description of Artificial Sequence: Synthetic oligonucleotide
  Sense strand starting at position 3173 of SEQ ID NO: 2904
acuuucucugcuuagcaga

SEQ ID NO: 225527 - RNA, 19 nt, Artificial Sequence
  Description of Artificial Sequence: Synthetic oligonucleotide
  Antisense strand to SEQ ID NO: 225526
ucugcuaagcagagaaagu

SEQ ID NO: 225528 - RNA, 19 nt, Artificial Sequence
  Description of Artificial Sequence: Synthetic oligonucleotide
  Sense strand starting at position 3178 of SEQ ID NO: 2904
cucugcuuagcagaagaaa

SEQ ID NO: 225529 - RNA, 19 nt, Artificial Sequence
  Description of Artificial Sequence: Synthetic oligonucleotide
  Antisense strand to SEQ ID NO: 225528
uuucuucugcuaagcagag

SEQ ID NO: 225530 - RNA, 19 nt, Artificial Sequence
  Description of Artificial Sequence: Synthetic oligonucleotide
  Sense strand starting at position 3226 of SEQ ID NO: 2904
uguguagcccuggauuaca

SEQ ID NO: 225531 - RNA, 19 nt, Artificial Sequence
  Description of Artificial Sequence: Synthetic oligonucleotide
  Antisense strand to SEQ ID NO: 225530
uguaauccagggcuacaca

SEQ ID NO: 225532 - RNA, 19 nt, Artificial Sequence
  Description of Artificial Sequence: Synthetic oligonucleotide
  Sense strand starting at position 3267 of SEQ ID NO: 2904
accuuucgaggcgauuauu

SEQ ID NO: 225533 - RNA, 19 nt, Artificial Sequence
  Description of Artificial Sequence: Synthetic oligonucleotide
  Antisense strand to SEQ ID NO: 225532
aauaaucgccucgaaaggu

SEQ ID NO: 225534 - RNA, 19 nt, Artificial Sequence
  Description of Artificial Sequence: Synthetic oligonucleotide
  Sense strand starting at position 3270 of SEQ ID NO: 2904
uuucgaggcgauuauucuu

SEQ ID NO: 225535 - RNA, 19 nt, Artificial Sequence
  Description of Artificial Sequence: Synthetic oligonucleotide
  Antisense strand to SEQ ID NO: 225534
aagaauaaucgccucgaaa

SEQ ID NO: 225536 - RNA, 19 nt, Artificial Sequence
  Description of Artificial Sequence: Synthetic oligonucleotide
  Sense strand starting at position 3275 of SEQ ID NO: 2904
aggcgauuauucuugggag

SEQ ID NO: 225537 - RNA, 19 nt, Artificial Sequence
  Description of Artificial Sequence: Synthetic oligonucleotide
  Antisense strand to SEQ ID NO: 225536
cucccaagaauaaucgccu

SEQ ID NO: 225538 - RNA, 19 nt, Artificial Sequence
  Description of Artificial Sequence: Synthetic oligonucleotide
  Sense strand starting at position 3367 of SEQ ID NO: 2904
caagaaauugcugguagcu

SEQ ID NO: 225539 - RNA, 19 nt, Artificial Sequence
  Description of Artificial Sequence: Synthetic oligonucleotide
  Antisense strand to SEQ ID NO: 225538
agcuaccagcaauuucuug

SEQ ID NO: 225540 - RNA, 19 nt, Artificial Sequence
  Description of Artificial Sequence: Synthetic oligonucleotide
  Sense strand starting at position 3380 of SEQ ID NO: 2904
guagcuuucuaaguguuga

SEQ ID NO: 225541 - RNA, 19 nt, Artificial Sequence
  Description of Artificial Sequence: Synthetic oligonucleotide
  Antisense strand to SEQ ID NO: 225540
ucaacacuuagaaagcuac

SEQ ID NO: 225542 - RNA, 19 nt, Artificial Sequence
  Description of Artificial Sequence: Synthetic oligonucleotide
  Sense strand starting at position 3418 of SEQ ID NO: 2904
ccaugagcucuugagacca

SEQ ID NO: 225543 - RNA, 19 nt, Artificial Sequence
  Description of Artificial Sequence: Synthetic oligonucleotide
  Antisense strand to SEQ ID NO: 225542
uggucucaagagcucaugg

SEQ ID NO: 225544 - RNA, 19 nt, Artificial Sequence
  Description of Artificial Sequence: Synthetic oligonucleotide
  Sense strand starting at position 3495 of SEQ ID NO: 2904
ccagcauuuguguaagcuc

SEQ ID NO: 225545 - RNA, 19 nt, Artificial Sequence
  Description of Artificial Sequence: Synthetic oligonucleotide
  Antisense strand to SEQ ID NO: 225544
gagcuuacacaaaugcugg

SEQ ID NO: 225546 - RNA, 19 nt, Artificial Sequence
  Description of Artificial Sequence: Synthetic oligonucleotide
  Sense strand starting at position 3502 of SEQ ID NO: 2904
uuguguaagcucgcgauua

SEQ ID NO: 225547 - RNA, 19 nt, Artificial Sequence
  Description of Artificial Sequence: Synthetic oligonucleotide
  Antisense strand to SEQ ID NO: 225546
uaaucgcgagcuuacacaa

SEQ ID NO: 225548 - RNA, 19 nt, Artificial Sequence
  Description of Artificial Sequence: Synthetic oligonucleotide
  Sense strand starting at position 3506 of SEQ ID NO: 2904
guaagcucgcgauuauauu

SEQ ID NO: 225549 - RNA, 19 nt, Artificial Sequence
  Description of Artificial Sequence: Synthetic oligonucleotide
  Antisense strand to SEQ ID NO: 225548
aauauaaucgcgagcuuac

SEQ ID NO: 225550 - RNA, 19 nt, Artificial Sequence
  Description of Artificial Sequence: Synthetic oligonucleotide
  Sense strand starting at position 3507 of SEQ ID NO: 2904
uaagcucgcgauuauauua

SEQ ID NO: 225551 - RNA, 19 nt, Artificial Sequence
  Description of Artificial Sequence: Synthetic oligonucleotide
  Antisense strand to SEQ ID NO: 225550
uaauauaaucgcgagcuua

SEQ ID NO: 225552 - RNA, 19 nt, Artificial Sequence
  Description of Artificial Sequence: Synthetic oligonucleotide
  Sense strand starting at position 3590 of SEQ ID NO: 2904
ucuggaaggauauggguua

SEQ ID NO: 225553 - RNA, 19 nt, Artificial Sequence
  Description of Artificial Sequence: Synthetic oligonucleotide
  Antisense strand to SEQ ID NO: 225552
uaacccauauccuuccaga

SEQ ID NO: 225554 - RNA, 19 nt, Artificial Sequence
  Description of Artificial Sequence: Synthetic oligonucleotide
  Sense strand starting at position 3602 of SEQ ID NO: 2904
uggguuauauuguuauuac

SEQ ID NO: 225555 - RNA, 19 nt, Artificial Sequence
  Description of Artificial Sequence: Synthetic oligonucleotide
  Antisense strand to SEQ ID NO: 225554
guaauaacaauauaaccca

SEQ ID NO: 225556 - RNA, 19 nt, Artificial Sequence
  Description of Artificial Sequence: Synthetic oligonucleotide
  Sense strand starting at position 3605 of SEQ ID NO: 2904
guuauauuguuauuaccag

SEQ ID NO: 225557 - RNA, 19 nt, Artificial Sequence
  Description of Artificial Sequence: Synthetic oligonucleotide
  Antisense strand to SEQ ID NO: 225556
cugguaauaacaauauaac

SEQ ID NO: 225558 - RNA, 19 nt, Artificial Sequence
  Description of Artificial Sequence: Synthetic oligonucleotide
  Sense strand starting at position 85 of SEQ ID NO: 2905
caguguucugcauggugaa

SEQ ID NO: 225559 - RNA, 19 nt, Artificial Sequence
  Description of Artificial Sequence: Synthetic oligonucleotide
  Antisense strand to SEQ ID NO: 225558
uucaccaugcagaacacug

SEQ ID NO: 225560 - RNA, 19 nt, Artificial Sequence
  Description of Artificial Sequence: Synthetic oligonucleotide
  Sense strand starting at position 86 of SEQ ID NO: 2905
aguguucugcauggugaac

SEQ ID NO: 225561 - RNA, 19 nt, Artificial Sequence
  Description of Artificial Sequence: Synthetic oligonucleotide
  Antisense strand to SEQ ID NO: 225560
guucaccaugcagaacacu

SEQ ID NO: 225562 - RNA, 19 nt, Artificial Sequence
  Description of Artificial Sequence: Synthetic oligonucleotide
  Sense strand starting at position 113 of SEQ ID NO: 2905
cugaaagaauacugaauua

SEQ ID NO: 225563 - RNA, 19 nt, Artificial Sequence
  Description of Artificial Sequence: Synthetic oligonucleotide
  Antisense strand to SEQ ID NO: 225562
uaauucaguauucuuucag

SEQ ID NO: 225564 - RNA, 19 nt, Artificial Sequence
  Description of Artificial Sequence: Synthetic oligonucleotide
  Sense strand starting at position 191 of SEQ ID NO: 2905
gcuguccaacugggagaua

SEQ ID NO: 225565 - RNA, 19 nt, Artificial Sequence
  Description of Artificial Sequence: Synthetic oligonucleotide
  Antisense strand to SEQ ID NO: 225564
uaucucccaguuggacagc

SEQ ID NO: 225566 - RNA, 19 nt, Artificial Sequence
  Description of Artificial Sequence: Synthetic oligonucleotide
  Sense strand starting at position 202 of SEQ ID NO: 2905
gggagauagucuuuccacc

SEQ ID NO: 225567 - RNA, 19 nt, Artificial Sequence
  Description of Artificial Sequence: Synthetic oligonucleotide
  Antisense strand to SEQ ID NO: 225566
gguggaaagacuaucuccc

SEQ ID NO: 225568 - RNA, 19 nt, Artificial Sequence
  Description of Artificial Sequence: Synthetic oligonucleotide
  Sense strand starting at position 248 of SEQ ID NO: 2905
uuguauguuagccuuguuu

SEQ ID NO: 225569 - RNA, 19 nt, Artificial Sequence
  Description of Artificial Sequence: Synthetic oligonucleotide
  Antisense strand to SEQ ID NO: 225568
aaacaaggcuaacauacaa

SEQ ID NO: 225570 - RNA, 19 nt, Artificial Sequence
  Description of Artificial Sequence: Synthetic oligonucleotide
  Sense strand starting at position 297 of SEQ ID NO: 2905
ggaaucauagcccgcacaa

SEQ ID NO: 225571 - RNA, 19 nt, Artificial Sequence
  Description of Artificial Sequence: Synthetic oligonucleotide
  Antisense strand to SEQ ID NO: 225570
uugugcgggcuaugauucc

SEQ ID NO: 225572 - RNA, 19 nt, Artificial Sequence
  Description of Artificial Sequence: Synthetic oligonucleotide
  Sense strand starting at position 497 of SEQ ID NO: 2905
uguuaaacuuggcccagua

SEQ ID NO: 225573 - RNA, 19 nt, Artificial Sequence
  Description of Artificial Sequence: Synthetic oligonucleotide
  Antisense strand to SEQ ID NO: 225572
uacugggccaaguuuaaca

SEQ ID NO: 225574 - RNA, 19 nt, Artificial Sequence
  Description of Artificial Sequence: Synthetic oligonucleotide
  Sense strand starting at position 507 of SEQ ID NO: 2905
ggcccaguaccagauacua

SEQ ID NO: 225575 - RNA, 19 nt, Artificial Sequence
  Description of Artificial Sequence: Synthetic oligonucleotide
  Antisense strand to SEQ ID NO: 225574
uaguaucugguacugggcc

SEQ ID NO: 225576 - RNA, 19 nt, Artificial Sequence
  Description of Artificial Sequence: Synthetic oligonucleotide
  Sense strand starting at position 688 of SEQ ID NO: 2905
acuuaauaaugcuaggaac

SEQ ID NO: 225577 - RNA, 19 nt, Artificial Sequence
  Description of Artificial Sequence: Synthetic oligonucleotide
  Antisense strand to SEQ ID NO: 225576
guuccuagcauuauuaagu

SEQ ID NO: 225578 - RNA, 19 nt, Artificial Sequence
  Description of Artificial Sequence: Synthetic oligonucleotide
  Sense strand starting at position 729 of SEQ ID NO: 2905
ucuguuaaucccggcaauu

SEQ ID NO: 225579 - RNA, 19 nt, Artificial Sequence
  Description of Artificial Sequence: Synthetic oligonucleotide
  Antisense strand to SEQ ID NO: 225578
aauugccgggauuaacaga

SEQ ID NO: 225580 - RNA, 19 nt, Artificial Sequence
  Description of Artificial Sequence: Synthetic oligonucleotide
  Sense strand starting at position 1135 of SEQ ID NO: 2905
aggauuuauugagguauga

SEQ ID NO: 225581 - RNA, 19 nt, Artificial Sequence
  Description of Artificial Sequence: Synthetic oligonucleotide
  Antisense strand to SEQ ID NO: 225580
ucauaccucaauaaauccu

SEQ ID NO: 225582 - RNA, 19 nt, Artificial Sequence
  Description of Artificial Sequence: Synthetic oligonucleotide
  Sense strand starting at position 1139 of SEQ ID NO: 2905
uuuauugagguaugagaug

SEQ ID NO: 225583 - RNA, 19 nt, Artificial Sequence
  Description of Artificial Sequence: Synthetic oligonucleotide
  Antisense strand to SEQ ID NO: 225582
caucucauaccucaauaaa

SEQ ID NO: 225584 - RNA, 19 nt, Artificial Sequence
  Description of Artificial Sequence: Synthetic oligonucleotide
  Sense strand starting at position 1144 of SEQ ID NO: 2905
ugagguaugagauggugga

SEQ ID NO: 225585 - RNA, 19 nt, Artificial Sequence
  Description of Artificial Sequence: Synthetic oligonucleotide
  Antisense strand to SEQ ID NO: 225584
uccaccaucucauaccuca

SEQ ID NO: 225586 - RNA, 19 nt, Artificial Sequence
  Description of Artificial Sequence: Synthetic oligonucleotide
  Sense strand starting at position 1148 of SEQ ID NO: 2905
guaugagaugguggaggau

SEQ ID NO: 225587 - RNA, 19 nt, Artificial Sequence
  Description of Artificial Sequence: Synthetic oligonucleotide
  Antisense strand to SEQ ID NO: 225586
auccuccaccaucucauac

SEQ ID NO: 225588 - RNA, 19 nt, Artificial Sequence
  Description of Artificial Sequence: Synthetic oligonucleotide
  Sense strand starting at position 1160 of SEQ ID NO: 2905
ggaggauggucucaaggag

SEQ ID NO: 225589 - RNA, 19 nt, Artificial Sequence
  Description of Artificial Sequence: Synthetic oligonucleotide
  Antisense strand to SEQ ID NO: 225588
cuccuugagaccauccucc

SEQ ID NO: 225590 - RNA, 19 nt, Artificial Sequence
  Description of Artificial Sequence: Synthetic oligonucleotide
  Sense strand starting at position 1228 of SEQ ID NO: 2905
guacguauaaaggaguuau

SEQ ID NO: 225591 - RNA, 19 nt, Artificial Sequence
  Description of Artificial Sequence: Synthetic oligonucleotide
  Antisense strand to SEQ ID NO: 225590
auaacuccuuuauacguac

SEQ ID NO: 225592 - RNA, 19 nt, Artificial Sequence
  Description of Artificial Sequence: Synthetic oligonucleotide
  Sense strand starting at position 1276 of SEQ ID NO: 2905
aaaguaugcucuuugugau

SEQ ID NO: 225593 - RNA, 19 nt, Artificial Sequence
  Description of Artificial Sequence: Synthetic oligonucleotide
  Antisense strand to SEQ ID NO: 225592
aucacaaagagcauacuuu

SEQ ID NO: 225594 - RNA, 19 nt, Artificial Sequence
  Description of Artificial Sequence: Synthetic oligonucleotide
  Sense strand starting at position 1277 of SEQ ID NO: 2905
aaguaugcucuuugugauu

SEQ ID NO: 225595 - RNA, 19 nt, Artificial Sequence
  Description of Artificial Sequence: Synthetic oligonucleotide
  Antisense strand to SEQ ID NO: 225594
aaucacaaagagcauacuu

SEQ ID NO: 225596 - RNA, 19 nt, Artificial Sequence
  Description of Artificial Sequence: Synthetic oligonucleotide
  Sense strand starting at position 1286 of SEQ ID NO: 2905
cuuugugauuucuggaaac

SEQ ID NO: 225597 - RNA, 19 nt, Artificial Sequence
  Description of Artificial Sequence: Synthetic oligonucleotide
  Antisense strand to SEQ ID NO: 225596
guuuccagaaaucacaaag

SEQ ID NO: 225598 - RNA, 19 nt, Artificial Sequence
  Description of Artificial Sequence: Synthetic oligonucleotide
  Sense strand starting at position 1312 of SEQ ID NO: 2905
accaacuuuccaugugaga

SEQ ID NO: 225599 - RNA, 19 nt, Artificial Sequence
  Description of Artificial Sequence: Synthetic oligonucleotide
  Antisense strand to SEQ ID NO: 225598
ucucacauggaaaguuggu

SEQ ID NO: 225600 - RNA, 19 nt, Artificial Sequence
  Description of Artificial Sequence: Synthetic oligonucleotide
  Sense strand starting at position 1325 of SEQ ID NO: 2905
gugagaucucagggcgcua

SEQ ID NO: 225601 - RNA, 19 nt, Artificial Sequence
  Description of Artificial Sequence: Synthetic oligonucleotide
  Antisense strand to SEQ ID NO: 225600
uagcgcccugagaucucac

SEQ ID NO: 225602 - RNA, 19 nt, Artificial Sequence
  Description of Artificial Sequence: Synthetic oligonucleotide
  Sense strand starting at position 1509 of SEQ ID NO: 2905
uuacaagaauauggagaaa

SEQ ID NO: 225603 - RNA, 19 nt, Artificial Sequence
  Description of Artificial Sequence: Synthetic oligonucleotide
  Antisense strand to SEQ ID NO: 225602
uuucuccauauucuuguaa

SEQ ID NO: 225604 - RNA, 19 nt, Artificial Sequence
  Description of Artificial Sequence: Synthetic oligonucleotide
  Sense strand starting at position 1798 of SEQ ID NO: 2905
ggaugaugccacuggcuca

SEQ ID NO: 225605 - RNA, 19 nt, Artificial Sequence
  Description of Artificial Sequence: Synthetic oligonucleotide
  Antisense strand to SEQ ID NO: 225604
ugagccaguggcaucaucc

SEQ ID NO: 225606 - RNA, 19 nt, Artificial Sequence
  Description of Artificial Sequence: Synthetic oligonucleotide
  Sense strand starting at position 2000 of SEQ ID NO: 2905
ugagacuccugaucuguaa

SEQ ID NO: 225607 - RNA, 19 nt, Artificial Sequence
  Description of Artificial Sequence: Synthetic oligonucleotide
  Antisense strand to SEQ ID NO: 225606
uuacagaucaggagucuca

SEQ ID NO: 225608 - RNA, 19 nt, Artificial Sequence
  Description of Artificial Sequence: Synthetic oligonucleotide
  Sense strand starting at position 2058 of SEQ ID NO: 2905
gccaguagcacaggucaau

SEQ ID NO: 225609 - RNA, 19 nt, Artificial Sequence
  Description of Artificial Sequence: Synthetic oligonucleotide
  Antisense strand to SEQ ID NO: 225608
auugaccugugcuacuggc

SEQ ID NO: 225610 - RNA, 19 nt, Artificial Sequence
  Description of Artificial Sequence: Synthetic oligonucleotide
  Sense strand starting at position 2070 of SEQ ID NO: 2905
ggucaauaagggcguguau

SEQ ID NO: 225611 - RNA, 19 nt, Artificial Sequence
  Description of Artificial Sequence: Synthetic oligonucleotide
  Antisense strand to SEQ ID NO: 225610
auacacgcccuuauugacc

SEQ ID NO: 225612 - RNA, 19 nt, Artificial Sequence
  Description of Artificial Sequence: Synthetic oligonucleotide
  Sense strand starting at position 2158 of SEQ ID NO: 2905
ccuuguguguucuucuaga

SEQ ID NO: 225613 - RNA, 19 nt, Artificial Sequence
  Description of Artificial Sequence: Synthetic oligonucleotide
  Antisense strand to SEQ ID NO: 225612
ucuagaagaacacacaagg

SEQ ID NO: 225614 - RNA, 19 nt, Artificial Sequence
  Description of Artificial Sequence: Synthetic oligonucleotide
  Sense strand starting at position 2175 of SEQ ID NO: 2905
gauauuuaccagcgcuuac

SEQ ID NO: 225615 - RNA, 19 nt, Artificial Sequence
  Description of Artificial Sequence: Synthetic oligonucleotide
  Antisense strand to SEQ ID NO: 225614
guaagcgcugguaaauauc

SEQ ID NO: 225616 - RNA, 19 nt, Artificial Sequence
  Description of Artificial Sequence: Synthetic oligonucleotide
  Sense strand starting at position 2265 of SEQ ID NO: 2905
ggaguaacuguacauauuc

SEQ ID NO: 225617 - RNA, 19 nt, Artificial Sequence
  Description of Artificial Sequence: Synthetic oligonucleotide
  Antisense strand to SEQ ID NO: 225616
gaauauguacaguuacucc

SEQ ID NO: 225618 - RNA, 19 nt, Artificial Sequence
  Description of Artificial Sequence: Synthetic oligonucleotide
  Sense strand starting at position 2274 of SEQ ID NO: 2905
guacauauucuacaguaua

SEQ ID NO: 225619 - RNA, 19 nt, Artificial Sequence
  Description of Artificial Sequence: Synthetic oligonucleotide
  Antisense strand to SEQ ID NO: 225618
uauacuguagaauauguac

SEQ ID NO: 225620 - RNA, 19 nt, Artificial Sequence
  Description of Artificial Sequence: Synthetic oligonucleotide
  Sense strand starting at position 2363 of SEQ ID NO: 2905
acuugcuuaugaguaacau

SEQ ID NO: 225621 - RNA, 19 nt, Artificial Sequence
  Description of Artificial Sequence: Synthetic oligonucleotide
  Antisense strand to SEQ ID NO: 225620
auguuacucauaagcaagu

SEQ ID NO: 225622 - RNA, 19 nt, Artificial Sequence
  Description of Artificial Sequence: Synthetic oligonucleotide
  Sense strand starting at position 2364 of SEQ ID NO: 2905
cuugcuuaugaguaacaua

SEQ ID NO: 225623 - RNA, 19 nt, Artificial Sequence
  Description of Artificial Sequence: Synthetic oligonucleotide
  Antisense strand to SEQ ID NO: 225622
uauguuacucauaagcaag

SEQ ID NO: 225624 - RNA, 19 nt, Artificial Sequence
  Description of Artificial Sequence: Synthetic oligonucleotide
  Sense strand starting at position 2523 of SEQ ID NO: 2905
gaaguagaaugucuggaau

SEQ ID NO: 225625 - RNA, 19 nt, Artificial Sequence
  Description of Artificial Sequence: Synthetic oligonucleotide
  Antisense strand to SEQ ID NO: 225624
auuccagacauucuacuuc

SEQ ID NO: 225626 - RNA, 19 nt, Artificial Sequence
  Description of Artificial Sequence: Synthetic oligonucleotide
  Sense strand starting at position 2564 of SEQ ID NO: 2905
uuggaaagauacuaccuaa

SEQ ID NO: 225627 - RNA, 19 nt, Artificial Sequence
  Description of Artificial Sequence: Synthetic oligonucleotide
  Antisense strand to SEQ ID NO: 225626
uuagguaguaucuuuccaa

SEQ ID NO: 225628 - RNA, 19 nt, Artificial Sequence
  Description of Artificial Sequence: Synthetic oligonucleotide
  Sense strand starting at position 2847 of SEQ ID NO: 2905
agaauagaguacuaaauuc

SEQ ID NO: 225629 - RNA, 19 nt, Artificial Sequence
  Description of Artificial Sequence: Synthetic oligonucleotide
  Antisense strand to SEQ ID NO: 225628
gaauuuaguacucuauucu

SEQ ID NO: 225630 - RNA, 19 nt, Artificial Sequence
  Description of Artificial Sequence: Synthetic oligonucleotide
  Sense strand starting at position 2879 of SEQ ID NO: 2905
aaguaauuaugauugcaga

SEQ ID NO: 225631 - RNA, 19 nt, Artificial Sequence
  Description of Artificial Sequence: Synthetic oligonucleotide
  Antisense strand to SEQ ID NO: 225630
ucugcaaucauaauuacuu

SEQ ID NO: 225632 - RNA, 19 nt, Artificial Sequence
  Description of Artificial Sequence: Synthetic oligonucleotide
  Sense strand starting at position 2880 of SEQ ID NO: 2905
aguaauuaugauugcagac

SEQ ID NO: 225633 - RNA, 19 nt, Artificial Sequence
  Description of Artificial Sequence: Synthetic oligonucleotide
  Antisense strand to SEQ ID NO: 225632
gucugcaaucauaauuacu

SEQ ID NO: 225634 - RNA, 19 nt, Artificial Sequence
  Description of Artificial Sequence: Synthetic oligonucleotide
  Sense strand starting at position 3308 of SEQ ID NO: 2905
uaagaaaggucagagcuau

SEQ ID NO: 225635 - RNA, 19 nt, Artificial Sequence
  Description of Artificial Sequence: Synthetic oligonucleotide
  Antisense strand to SEQ ID NO: 225634
auagcucugaccuuucuua

SEQ ID NO: 225636 - RNA, 19 nt, Artificial Sequence
  Description of Artificial Sequence: Synthetic oligonucleotide
  Sense strand starting at position 3350 of SEQ ID NO: 2905
cuagacugcuagcuuuauu

SEQ ID NO: 225637 - RNA, 19 nt, Artificial Sequence
  Description of Artificial Sequence: Synthetic oligonucleotide
  Antisense strand to SEQ ID NO: 225636
aauaaagcuagcagucuag

SEQ ID NO: 225638 - RNA, 19 nt, Artificial Sequence
  Description of Artificial Sequence: Synthetic oligonucleotide
  Sense strand starting at position 101 of SEQ ID NO: 2906
gugacaagaauaugguaca

SEQ ID NO: 225639 - RNA, 19 nt, Artificial Sequence
  Description of Artificial Sequence: Synthetic oligonucleotide
  Antisense strand to SEQ ID NO: 225638
uguaccauauucuugucac

SEQ ID NO: 225640 - RNA, 19 nt, Artificial Sequence
  Description of Artificial Sequence: Synthetic oligonucleotide
  Sense strand starting at position 134 of SEQ ID NO: 2906
uguagaaacuaguuagaga

SEQ ID NO: 225641 - RNA, 19 nt, Artificial Sequence
  Description of Artificial Sequence: Synthetic oligonucleotide
  Antisense strand to SEQ ID NO: 225640
ucucuaacuaguuucuaca

SEQ ID NO: 225642 - RNA, 19 nt, Artificial Sequence
  Description of Artificial Sequence: Synthetic oligonucleotide
  Sense strand starting at position 213 of SEQ ID NO: 2906
auauguacacugcaauuga

SEQ ID NO: 225643 - RNA, 19 nt, Artificial Sequence
  Description of Artificial Sequence: Synthetic oligonucleotide
  Antisense strand to SEQ ID NO: 225642
ucaauugcaguguacauau

SEQ ID NO: 225644 - RNA, 19 nt, Artificial Sequence
  Description of Artificial Sequence: Synthetic oligonucleotide
  Sense strand starting at position 332 of SEQ ID NO: 2906
ggauaaauggcuugcacca

SEQ ID NO: 225645 - RNA, 19 nt, Artificial Sequence
  Description of Artificial Sequence: Synthetic oligonucleotide
  Antisense strand to SEQ ID NO: 225644
uggugcaagccauuuaucc

SEQ ID NO: 225646 - RNA, 19 nt, Artificial Sequence
  Description of Artificial Sequence: Synthetic oligonucleotide
  Sense strand starting at position 427 of SEQ ID NO: 2906
gcaggaguccaucagacuu

SEQ ID NO: 225647 - RNA, 19 nt, Artificial Sequence
  Description of Artificial Sequence: Synthetic oligonucleotide
  Antisense strand to SEQ ID NO: 225646
aagucugauggacuccugc

SEQ ID NO: 225648 - RNA, 19 nt, Artificial Sequence
  Description of Artificial Sequence: Synthetic oligonucleotide
  Sense strand starting at position 440 of SEQ ID NO: 2906
agacuugggcuugaugcau

SEQ ID NO: 225649 - RNA, 19 nt, Artificial Sequence
  Description of Artificial Sequence: Synthetic oligonucleotide
  Antisense strand to SEQ ID NO: 225648
augcaucaagcccaagucu

SEQ ID NO: 225650 - RNA, 19 nt, Artificial Sequence
  Description of Artificial Sequence: Synthetic oligonucleotide
  Sense strand starting at position 453 of SEQ ID NO: 2906
augcauacgucuguuauuu

SEQ ID NO: 225651 - RNA, 19 nt, Artificial Sequence
  Description of Artificial Sequence: Synthetic oligonucleotide
  Antisense strand to SEQ ID NO: 225650
aaauaacagacguaugcau

SEQ ID NO: 225652 - RNA, 19 nt, Artificial Sequence
  Description of Artificial Sequence: Synthetic oligonucleotide
  Sense strand starting at position 457 of SEQ ID NO: 2906
auacgucuguuauuuacca

SEQ ID NO: 225653 - RNA, 19 nt, Artificial Sequence
  Description of Artificial Sequence: Synthetic oligonucleotide
  Antisense strand to SEQ ID NO: 225652
ugguaaauaacagacguau

SEQ ID NO: 225654 - RNA, 19 nt, Artificial Sequence
  Description of Artificial Sequence: Synthetic oligonucleotide
  Sense strand starting at position 464 of SEQ ID NO: 2906
uguuauuuaccaggugugu

SEQ ID NO: 225655 - RNA, 19 nt, Artificial Sequence
  Description of Artificial Sequence: Synthetic oligonucleotide
  Antisense strand to SEQ ID NO: 225654
acacaccugguaaauaaca

SEQ ID NO: 225656 - RNA, 19 nt, Artificial Sequence
  Description of Artificial Sequence: Synthetic oligonucleotide
  Sense strand starting at position 466 of SEQ ID NO: 2906
uuauuuaccagguguguua

SEQ ID NO: 225657 - RNA, 19 nt, Artificial Sequence
  Description of Artificial Sequence: Synthetic oligonucleotide
  Antisense strand to SEQ ID NO: 225656
uaacacaccugguaaauaa

SEQ ID NO: 225658 - RNA, 19 nt, Artificial Sequence
  Description of Artificial Sequence: Synthetic oligonucleotide
  Sense strand starting at position 602 of SEQ ID NO: 2906
ggcuauuucucagucuucu

SEQ ID NO: 225659 - RNA, 19 nt, Artificial Sequence
  Description of Artificial Sequence: Synthetic oligonucleotide
  Antisense strand to SEQ ID NO: 225658
agaagacugagaaauagcc

SEQ ID NO: 225660 - RNA, 19 nt, Artificial Sequence
  Description of Artificial Sequence: Synthetic oligonucleotide
  Sense strand starting at position 803 of SEQ ID NO: 2906
auuugcuauuugugaacua

SEQ ID NO: 225661 - RNA, 19 nt, Artificial Sequence
  Description of Artificial Sequence: Synthetic oligonucleotide
  Antisense strand to SEQ ID NO: 225660
uaguucacaaauagcaaau

SEQ ID NO: 225662 - RNA, 19 nt, Artificial Sequence
  Description of Artificial Sequence: Synthetic oligonucleotide
  Sense strand starting at position 840 of SEQ ID NO: 2906
guauuuccauaauacgaaa

SEQ ID NO: 225663 - RNA, 19 nt, Artificial Sequence
  Description of Artificial Sequence: Synthetic oligonucleotide
  Antisense strand to SEQ ID NO: 225662
uuucguauuauggaaauac

SEQ ID NO: 225664 - RNA, 19 nt, Artificial Sequence
  Description of Artificial Sequence: Synthetic oligonucleotide
  Sense strand starting at position 1032 of SEQ ID NO: 2906
guaguucugccugauacaa

SEQ ID NO: 225665 - RNA, 19 nt, Artificial Sequence
  Description of Artificial Sequence: Synthetic oligonucleotide
  Antisense strand to SEQ ID NO: 225664
uuguaucaggcagaacuac

SEQ ID NO: 225666 - RNA, 19 nt, Artificial Sequence
  Description of Artificial Sequence: Synthetic oligonucleotide
  Sense strand starting at position 1105 of SEQ ID NO: 2906
acacaacaucaauguguua

SEQ ID NO: 225667 - RNA, 19 nt, Artificial Sequence
  Description of Artificial Sequence: Synthetic oligonucleotide
  Antisense strand to SEQ ID NO: 225666
uaacacauugauguugugu

SEQ ID NO: 225668 - RNA, 19 nt, Artificial Sequence
  Description of Artificial Sequence: Synthetic oligonucleotide
  Sense strand starting at position 1116 of SEQ ID NO: 2906
auguguuauucuccagaga

SEQ ID NO: 225669 - RNA, 19 nt, Artificial Sequence
  Description of Artificial Sequence: Synthetic oligonucleotide
  Antisense strand to SEQ ID NO: 225668
ucucuggagaauaacacau

SEQ ID NO: 225670 - RNA, 19 nt, Artificial Sequence
  Description of Artificial Sequence: Synthetic oligonucleotide
  Sense strand starting at position 1117 of SEQ ID NO: 2906
uguguuauucuccagagaa

SEQ ID NO: 225671 - RNA, 19 nt, Artificial Sequence
  Description of Artificial Sequence: Synthetic oligonucleotide
  Antisense strand to SEQ ID NO: 225670
uucucuggagaauaacaca

SEQ ID NO: 225672 - RNA, 19 nt, Artificial Sequence
  Description of Artificial Sequence: Synthetic oligonucleotide
  Sense strand starting at position 1119 of SEQ ID NO: 2906
uguuauucuccagagaagu

SEQ ID NO: 225673 - RNA, 19 nt, Artificial Sequence
  Description of Artificial Sequence: Synthetic oligonucleotide
  Antisense strand to SEQ ID NO: 225672
acuucucuggagaauaaca

SEQ ID NO: 225674 - RNA, 19 nt, Artificial Sequence
  Description of Artificial Sequence: Synthetic oligonucleotide
  Sense strand starting at position 1315 of SEQ ID NO: 2906
acagacuauuacgcauaaa

SEQ ID NO: 225675 - RNA, 19 nt, Artificial Sequence
  Description of Artificial Sequence: Synthetic oligonucleotide
  Antisense strand to SEQ ID NO: 225674
uuuaugcguaauagucugu

SEQ ID NO: 225676 - RNA, 19 nt, Artificial Sequence
  Description of Artificial Sequence: Synthetic oligonucleotide
  Sense strand starting at position 1388 of SEQ ID NO: 2906
ucgauauacucaccuagga

SEQ ID NO: 225677 - RNA, 19 nt, Artificial Sequence
  Description of Artificial Sequence: Synthetic oligonucleotide
  Antisense strand to SEQ ID NO: 225676
uccuaggugaguauaucga

SEQ ID NO: 225678 - RNA, 19 nt, Artificial Sequence
  Description of Artificial Sequence: Synthetic oligonucleotide
  Sense strand starting at position 1984 of SEQ ID NO: 2906
auaagacuucguuggagag

SEQ ID NO: 225679 - RNA, 19 nt, Artificial Sequence
  Description of Artificial Sequence: Synthetic oligonucleotide
  Antisense strand to SEQ ID NO: 225678
cucuccaacgaagucuuau

SEQ ID NO: 225680 - RNA, 19 nt, Artificial Sequence
  Description of Artificial Sequence: Synthetic oligonucleotide
  Sense strand starting at position 1985 of SEQ ID NO: 2906
uaagacuucguuggagaga

SEQ ID NO: 225681 - RNA, 19 nt, Artificial Sequence
  Description of Artificial Sequence: Synthetic oligonucleotide
  Antisense strand to SEQ ID NO: 225680
ucucuccaacgaagucuua

SEQ ID NO: 225682 - RNA, 19 nt, Artificial Sequence
  Description of Artificial Sequence: Synthetic oligonucleotide
  Sense strand starting at position 2020 of SEQ ID NO: 2906
guucuuuaaaggcagugau

SEQ ID NO: 225683 - RNA, 19 nt, Artificial Sequence
  Description of Artificial Sequence: Synthetic oligonucleotide
  Antisense strand to SEQ ID NO: 225682
aucacugccuuuaaagaac

SEQ ID NO: 225684 - RNA, 19 nt, Artificial Sequence
  Description of Artificial Sequence: Synthetic oligonucleotide
  Sense strand starting at position 2042 of SEQ ID NO: 2906
cugauauauucuguuagug

SEQ ID NO: 225685 - RNA, 19 nt, Artificial Sequence
  Description of Artificial Sequence: Synthetic oligonucleotide
  Antisense strand to SEQ ID NO: 225684
cacuaacagaauauaucag

SEQ ID NO: 225686 - RNA, 19 nt, Artificial Sequence
  Description of Artificial Sequence: Synthetic oligonucleotide
  Sense strand starting at position 2275 of SEQ ID NO: 2906
gaggaacguuuacuagaua

SEQ ID NO: 225687 - RNA, 19 nt, Artificial Sequence
  Description of Artificial Sequence: Synthetic oligonucleotide
  Antisense strand to SEQ ID NO: 225686
uaucuaguaaacguuccuc

SEQ ID NO: 225688 - RNA, 19 nt, Artificial Sequence
  Description of Artificial Sequence: Synthetic oligonucleotide
  Sense strand starting at position 2364 of SEQ ID NO: 2906
augcucauauauguagauu

SEQ ID NO: 225689 - RNA, 19 nt, Artificial Sequence
  Description of Artificial Sequence: Synthetic oligonucleotide
  Antisense strand to SEQ ID NO: 225688
aaucuacauauaugagcau

SEQ ID NO: 225690 - RNA, 19 nt, Artificial Sequence
  Description of Artificial Sequence: Synthetic oligonucleotide
  Sense strand starting at position 2543 of SEQ ID NO: 2906
auuauagaacgaugauucu

SEQ ID NO: 225691 - RNA, 19 nt, Artificial Sequence
  Description of Artificial Sequence: Synthetic oligonucleotide
  Antisense strand to SEQ ID NO: 225690
agaaucaucguucuauaau

SEQ ID NO: 225692 - RNA, 19 nt, Artificial Sequence
  Description of Artificial Sequence: Synthetic oligonucleotide
  Sense strand starting at position 2546 of SEQ ID NO: 2906
auagaacgaugauucugau

SEQ ID NO: 225693 - RNA, 19 nt, Artificial Sequence
  Description of Artificial Sequence: Synthetic oligonucleotide
  Antisense strand to SEQ ID NO: 225692
aucagaaucaucguucuau

SEQ ID NO: 225694 - RNA, 19 nt, Artificial Sequence
  Description of Artificial Sequence: Synthetic oligonucleotide
  Sense strand starting at position 2552 of SEQ ID NO: 2906
cgaugauucugauuaccaa

SEQ ID NO: 225695 - RNA, 19 nt, Artificial Sequence
  Description of Artificial Sequence: Synthetic oligonucleotide
  Antisense strand to SEQ ID NO: 225694
uugguaaucagaaucaucg

SEQ ID NO: 225696 - RNA, 19 nt, Artificial Sequence
  Description of Artificial Sequence: Synthetic oligonucleotide
  Sense strand starting at position 2736 of SEQ ID NO: 2906
aaauuuguguuguuguuga

SEQ ID NO: 225697 - RNA, 19 nt, Artificial Sequence
  Description of Artificial Sequence: Synthetic oligonucleotide
  Antisense strand to SEQ ID NO: 225696
ucaacaacaacacaaauuu

SEQ ID NO: 225698 - RNA, 19 nt, Artificial Sequence
  Description of Artificial Sequence: Synthetic oligonucleotide
  Sense strand starting at position 2749 of SEQ ID NO: 2906
uguugaaacuuucugacau

SEQ ID NO: 225699 - RNA, 19 nt, Artificial Sequence
  Description of Artificial Sequence: Synthetic oligonucleotide
  Antisense strand to SEQ ID NO: 225698
augucagaaaguuucaaca

SEQ ID NO: 225700 - RNA, 19 nt, Artificial Sequence
  Description of Artificial Sequence: Synthetic oligonucleotide
  Sense strand starting at position 2779 of SEQ ID NO: 2906
acuguuauggauugacuau

SEQ ID NO: 225701 - RNA, 19 nt, Artificial Sequence
  Description of Artificial Sequence: Synthetic oligonucleotide
  Antisense strand to SEQ ID NO: 225700
auagucaauccauaacagu

SEQ ID NO: 225702 - RNA, 19 nt, Artificial Sequence
  Description of Artificial Sequence: Synthetic oligonucleotide
  Sense strand starting at position 2868 of SEQ ID NO: 2906
ggauguaauuuaggauuag

SEQ ID NO: 225703 - RNA, 19 nt, Artificial Sequence
  Description of Artificial Sequence: Synthetic oligonucleotide
  Antisense strand to SEQ ID NO: 225702
cuaauccuaaauuacaucc

SEQ ID NO: 225704 - RNA, 19 nt, Artificial Sequence
  Description of Artificial Sequence: Synthetic oligonucleotide
  Sense strand starting at position 2869 of SEQ ID NO: 2906
gauguaauuuaggauuaga

SEQ ID NO: 225705 - RNA, 19 nt, Artificial Sequence
  Description of Artificial Sequence: Synthetic oligonucleotide
  Antisense strand to SEQ ID NO: 225704
ucuaauccuaaauuacauc

SEQ ID NO: 225706 - RNA, 19 nt, Artificial Sequence
  Description of Artificial Sequence: Synthetic oligonucleotide
  Sense strand starting at position 2905 of SEQ ID NO: 2906
gguccucaugauggguuua

SEQ ID NO: 225707 - RNA, 19 nt, Artificial Sequence
  Description of Artificial Sequence: Synthetic oligonucleotide
  Antisense strand to SEQ ID NO: 225706
uaaacccaucaugaggacc

SEQ ID NO: 225708 - RNA, 19 nt, Artificial Sequence
  Description of Artificial Sequence: Synthetic oligonucleotide
  Sense strand starting at position 2924 of SEQ ID NO: 2906
guggcuucaggagaacuga

SEQ ID NO: 225709 - RNA, 19 nt, Artificial Sequence
  Description of Artificial Sequence: Synthetic oligonucleotide
  Antisense strand to SEQ ID NO: 225708
ucaguucuccugaagccac

SEQ ID NO: 225710 - RNA, 19 nt, Artificial Sequence
  Description of Artificial Sequence: Synthetic oligonucleotide
  Sense strand starting at position 3111 of SEQ ID NO: 2906
uuguuuaagcaacaaaguu

SEQ ID NO: 225711 - RNA, 19 nt, Artificial Sequence
  Description of Artificial Sequence: Synthetic oligonucleotide
  Antisense strand to SEQ ID NO: 225710
aacuuuguugcuuaaacaa

SEQ ID NO: 225712 - RNA, 19 nt, Artificial Sequence
  Description of Artificial Sequence: Synthetic oligonucleotide
  Sense strand starting at position 3150 of SEQ ID NO: 2906
gccugagcaaacugagaua

SEQ ID NO: 225713 - RNA, 19 nt, Artificial Sequence
  Description of Artificial Sequence: Synthetic oligonucleotide
  Antisense strand to SEQ ID NO: 225712
uaucucaguuugcucaggc

SEQ ID NO: 225714 - RNA, 19 nt, Artificial Sequence
  Description of Artificial Sequence: Synthetic oligonucleotide
  Sense strand starting at position 3962 of SEQ ID NO: 2906
cuguuauagucauuggaaa

SEQ ID NO: 225715 - RNA, 19 nt, Artificial Sequence
  Description of Artificial Sequence: Synthetic oligonucleotide
  Antisense strand to SEQ ID NO: 225714
uuuccaaugacuauaacag

SEQ ID NO: 225716 - RNA, 19 nt, Artificial Sequence
  Description of Artificial Sequence: Synthetic oligonucleotide
  Sense strand starting at position 3963 of SEQ ID NO: 2906
uguuauagucauuggaaau

SEQ ID NO: 225717 - RNA, 19 nt, Artificial Sequence
  Description of Artificial Sequence: Synthetic oligonucleotide
  Antisense strand to SEQ ID NO: 225716
auuuccaaugacuauaaca

SEQ ID NO: 225718 - RNA, 19 nt, Artificial Sequence
  Description of Artificial Sequence: Synthetic oligonucleotide
  Sense strand starting at position 81 of SEQ ID NO: 2907
gggagaguccacgguauag

SEQ ID NO: 225719 - RNA, 19 nt, Artificial Sequence
  Description of Artificial Sequence: Synthetic oligonucleotide
  Antisense strand to SEQ ID NO: 225718
cuauaccguggacucuccc

SEQ ID NO: 225720 - RNA, 19 nt, Artificial Sequence
  Description of Artificial Sequence: Synthetic oligonucleotide
  Sense strand starting at position 103 of SEQ ID NO: 2907
cuagcugauuucugccaga

SEQ ID NO: 225721 - RNA, 19 nt, Artificial Sequence
  Description of Artificial Sequence: Synthetic oligonucleotide
  Antisense strand to SEQ ID NO: 225720
ucuggcagaaaucagcuag

SEQ ID NO: 225722 - RNA, 19 nt, Artificial Sequence
  Description of Artificial Sequence: Synthetic oligonucleotide
  Sense strand starting at position 106 of SEQ ID NO: 2907
gcugauuucugccagagga

SEQ ID NO: 225723 - RNA, 19 nt, Artificial Sequence
  Description of Artificial Sequence: Synthetic oligonucleotide
  Antisense strand to SEQ ID NO: 225722
uccucuggcagaaaucagc

SEQ ID NO: 225724 - RNA, 19 nt, Artificial Sequence
  Description of Artificial Sequence: Synthetic oligonucleotide
  Sense strand starting at position 257 of SEQ ID NO: 2907
cugaaacucugaggaggua

SEQ ID NO: 225725 - RNA, 19 nt, Artificial Sequence
  Description of Artificial Sequence: Synthetic oligonucleotide
  Antisense strand to SEQ ID NO: 225724
uaccuccucagaguuucag

SEQ ID NO: 225726 - RNA, 19 nt, Artificial Sequence
  Description of Artificial Sequence: Synthetic oligonucleotide
  Sense strand starting at position 499 of SEQ ID NO: 2907
ggcgacucugcaugaggua

SEQ ID NO: 225727 - RNA, 19 nt, Artificial Sequence
  Description of Artificial Sequence: Synthetic oligonucleotide
  Antisense strand to SEQ ID NO: 225726
uaccucaugcagagucgcc

SEQ ID NO: 225728 - RNA, 19 nt, Artificial Sequence
  Description of Artificial Sequence: Synthetic oligonucleotide
  Sense strand starting at position 500 of SEQ ID NO: 2907
gcgacucugcaugagguau

SEQ ID NO: 225729 - RNA, 19 nt, Artificial Sequence
  Description of Artificial Sequence: Synthetic oligonucleotide
  Antisense strand to SEQ ID NO: 225728
auaccucaugcagagucgc

SEQ ID NO: 225730 - RNA, 19 nt, Artificial Sequence
  Description of Artificial Sequence: Synthetic oligonucleotide
  Sense strand starting at position 614 of SEQ ID NO: 2907
ggaguggugucagacggaa

SEQ ID NO: 225731 - RNA, 19 nt, Artificial Sequence
  Description of Artificial Sequence: Synthetic oligonucleotide
  Antisense strand to SEQ ID NO: 225730
uuccgucugacaccacucc

SEQ ID NO: 225732 - RNA, 19 nt, Artificial Sequence
  Description of Artificial Sequence: Synthetic oligonucleotide
  Sense strand starting at position 616 of SEQ ID NO: 2907
aguggugucagacggaaug

SEQ ID NO: 225733 - RNA, 19 nt, Artificial Sequence
  Description of Artificial Sequence: Synthetic oligonucleotide
  Antisense strand to SEQ ID NO: 225732
cauuccgucugacaccacu

SEQ ID NO: 225734 - RNA, 19 nt, Artificial Sequence
  Description of Artificial Sequence: Synthetic oligonucleotide
  Sense strand starting at position 776 of SEQ ID NO: 2907
gggauacucuuguagcgga

SEQ ID NO: 225735 - RNA, 19 nt, Artificial Sequence
  Description of Artificial Sequence: Synthetic oligonucleotide
  Antisense strand to SEQ ID NO: 225734
uccgcuacaagaguauccc

SEQ ID NO: 225736 - RNA, 19 nt, Artificial Sequence
  Description of Artificial Sequence: Synthetic oligonucleotide
  Sense strand starting at position 1042 of SEQ ID NO: 2907
caguccuccugaccugaga

SEQ ID NO: 225737 - RNA, 19 nt, Artificial Sequence
  Description of Artificial Sequence: Synthetic oligonucleotide
  Antisense strand to SEQ ID NO: 225736
ucucaggucaggaggacug

SEQ ID NO: 225738 - RNA, 19 nt, Artificial Sequence
  Description of Artificial Sequence: Synthetic oligonucleotide
  Sense strand starting at position 1056 of SEQ ID NO: 2907
ugagacaggucucaggaau

SEQ ID NO: 225739 - RNA, 19 nt, Artificial Sequence
  Description of Artificial Sequence: Synthetic oligonucleotide
  Antisense strand to SEQ ID NO: 225738
auuccugagaccugucuca

SEQ ID NO: 225740 - RNA, 19 nt, Artificial Sequence
  Description of Artificial Sequence: Synthetic oligonucleotide
  Sense strand starting at position 1209 of SEQ ID NO: 2907
guguguauaugggcaaacu

SEQ ID NO: 225741 - RNA, 19 nt, Artificial Sequence
  Description of Artificial Sequence: Synthetic oligonucleotide
  Antisense strand to SEQ ID NO: 225740
aguuugcccauauacacac

SEQ ID NO: 225742 - RNA, 19 nt, Artificial Sequence
  Description of Artificial Sequence: Synthetic oligonucleotide
  Sense strand starting at position 2227 of SEQ ID NO: 2907
ggaagguguuacccggagu

SEQ ID NO: 225743 - RNA, 19 nt, Artificial Sequence
  Description of Artificial Sequence: Synthetic oligonucleotide
  Antisense strand to SEQ ID NO: 225742
acuccggguaacaccuucc

SEQ ID NO: 225744 - RNA, 19 nt, Artificial Sequence
  Description of Artificial Sequence: Synthetic oligonucleotide
  Sense strand starting at position 2231 of SEQ ID NO: 2907
gguguuacccggagucgga

SEQ ID NO: 225745 - RNA, 19 nt, Artificial Sequence
  Description of Artificial Sequence: Synthetic oligonucleotide
  Antisense strand to SEQ ID NO: 225744
uccgacuccggguaacacc

SEQ ID NO: 225746 - RNA, 19 nt, Artificial Sequence
  Description of Artificial Sequence: Synthetic oligonucleotide
  Sense strand starting at position 2352 of SEQ ID NO: 2907
aacgaugacccuuggagua

SEQ ID NO: 225747 - RNA, 19 nt, Artificial Sequence
  Description of Artificial Sequence: Synthetic oligonucleotide
  Antisense strand to SEQ ID NO: 225746
uacuccaagggucaucguu

SEQ ID NO: 225748 - RNA, 19 nt, Artificial Sequence
  Description of Artificial Sequence: Synthetic oligonucleotide
  Sense strand starting at position 2740 of SEQ ID NO: 2907
ugugacugguuuccaguua

SEQ ID NO: 225749 - RNA, 19 nt, Artificial Sequence
  Description of Artificial Sequence: Synthetic oligonucleotide
  Antisense strand to SEQ ID NO: 225748
uaacuggaaaccagucaca

SEQ ID NO: 225750 - RNA, 19 nt, Artificial Sequence
  Description of Artificial Sequence: Synthetic oligonucleotide
  Sense strand starting at position 2741 of SEQ ID NO: 2907
gugacugguuuccaguuau

SEQ ID NO: 225751 - RNA, 19 nt, Artificial Sequence
  Description of Artificial Sequence: Synthetic oligonucleotide
  Antisense strand to SEQ ID NO: 225750
auaacuggaaaccagucac

SEQ ID NO: 225752 - RNA, 19 nt, Artificial Sequence
  Description of Artificial Sequence: Synthetic oligonucleotide
  Sense strand starting at position 2745 of SEQ ID NO: 2907
cugguuuccaguuaugugu

SEQ ID NO: 225753 - RNA, 19 nt, Artificial Sequence
  Description of Artificial Sequence: Synthetic oligonucleotide
  Antisense strand to SEQ ID NO: 225752
acacauaacuggaaaccag

SEQ ID NO: 225754 - RNA, 19 nt, Artificial Sequence
  Description of Artificial Sequence: Synthetic oligonucleotide
  Sense strand starting at position 2751 of SEQ ID NO: 2907
uccaguuauguguagggca

SEQ ID NO: 225755 - RNA, 19 nt, Artificial Sequence
  Description of Artificial Sequence: Synthetic oligonucleotide
  Antisense strand to SEQ ID NO: 225754
ugcccuacacauaacugga

SEQ ID NO: 225756 - RNA, 19 nt, Artificial Sequence
  Description of Artificial Sequence: Synthetic oligonucleotide
  Sense strand starting at position 2753 of SEQ ID NO: 2907
caguuauguguagggcaaa

SEQ ID NO: 225757 - RNA, 19 nt, Artificial Sequence
  Description of Artificial Sequence: Synthetic oligonucleotide
  Antisense strand to SEQ ID NO: 225756
uuugcccuacacauaacug

SEQ ID NO: 225758 - RNA, 19 nt, Artificial Sequence
  Description of Artificial Sequence: Synthetic oligonucleotide
  Sense strand starting at position 3092 of SEQ ID NO: 2907
gggugucugagccacaaga

SEQ ID NO: 225759 - RNA, 19 nt, Artificial Sequence
  Description of Artificial Sequence: Synthetic oligonucleotide
  Antisense strand to SEQ ID NO: 225758
ucuuguggcucagacaccc

SEQ ID NO: 225760 - RNA, 19 nt, Artificial Sequence
  Description of Artificial Sequence: Synthetic oligonucleotide
  Sense strand starting at position 3094 of SEQ ID NO: 2907
gugucugagccacaagaau

SEQ ID NO: 225761 - RNA, 19 nt, Artificial Sequence
  Description of Artificial Sequence: Synthetic oligonucleotide
  Antisense strand to SEQ ID NO: 225760
auucuuguggcucagacac

SEQ ID NO: 225762 - RNA, 19 nt, Artificial Sequence
  Description of Artificial Sequence: Synthetic oligonucleotide
  Sense strand starting at position 3106 of SEQ ID NO: 2907
caagaauuguuggcaguga

SEQ ID NO: 225763 - RNA, 19 nt, Artificial Sequence
  Description of Artificial Sequence: Synthetic oligonucleotide
  Antisense strand to SEQ ID NO: 225762
ucacugccaacaauucuug

SEQ ID NO: 225764 - RNA, 19 nt, Artificial Sequence
  Description of Artificial Sequence: Synthetic oligonucleotide
  Sense strand starting at position 3107 of SEQ ID NO: 2907
aagaauuguuggcagugaa

SEQ ID NO: 225765 - RNA, 19 nt, Artificial Sequence
  Description of Artificial Sequence: Synthetic oligonucleotide
  Antisense strand to SEQ ID NO: 225764
uucacugccaacaauucuu

SEQ ID NO: 225766 - RNA, 19 nt, Artificial Sequence
  Description of Artificial Sequence: Synthetic oligonucleotide
  Sense strand starting at position 3110 of SEQ ID NO: 2907
aauuguuggcagugaacuc

SEQ ID NO: 225767 - RNA, 19 nt, Artificial Sequence
  Description of Artificial Sequence: Synthetic oligonucleotide
  Antisense strand to SEQ ID NO: 225766
gaguucacugccaacaauu

SEQ ID NO: 225768 - RNA, 19 nt, Artificial Sequence
  Description of Artificial Sequence: Synthetic oligonucleotide
  Sense strand starting at position 3257 of SEQ ID NO: 2907
cuccgugcccucugaaaga

SEQ ID NO: 225769 - RNA, 19 nt, Artificial Sequence
  Description of Artificial Sequence: Synthetic oligonucleotide
  Antisense strand to SEQ ID NO: 225768
ucuuucagagggcacggag

SEQ ID NO: 225770 - RNA, 19 nt, Artificial Sequence
  Description of Artificial Sequence: Synthetic oligonucleotide
  Sense strand starting at position 3361 of SEQ ID NO: 2907
ggacuugucugcccugagu

SEQ ID NO: 225771 - RNA, 19 nt, Artificial Sequence
  Description of Artificial Sequence: Synthetic oligonucleotide
  Antisense strand to SEQ ID NO: 225770
acucagggcagacaagucc

SEQ ID NO: 225772 - RNA, 19 nt, Artificial Sequence
  Description of Artificial Sequence: Synthetic oligonucleotide
  Sense strand starting at position 3363 of SEQ ID NO: 2907
acuugucugcccugaguuc

SEQ ID NO: 225773 - RNA, 19 nt, Artificial Sequence
  Description of Artificial Sequence: Synthetic oligonucleotide
  Antisense strand to SEQ ID NO: 225772
gaacucagggcagacaagu

SEQ ID NO: 225774 - RNA, 19 nt, Artificial Sequence
  Description of Artificial Sequence: Synthetic oligonucleotide
  Sense strand starting at position 3372 of SEQ ID NO: 2907
cccugaguuccucacagca

SEQ ID NO: 225775 - RNA, 19 nt, Artificial Sequence
  Description of Artificial Sequence: Synthetic oligonucleotide
  Antisense strand to SEQ ID NO: 225774
ugcugugaggaacucaggg

SEQ ID NO: 225776 - RNA, 19 nt, Artificial Sequence
  Description of Artificial Sequence: Synthetic oligonucleotide
  Sense strand starting at position 3374 of SEQ ID NO: 2907
cugaguuccucacagcagu

SEQ ID NO: 225777 - RNA, 19 nt, Artificial Sequence
  Description of Artificial Sequence: Synthetic oligonucleotide
  Antisense strand to SEQ ID NO: 225776
acugcugugaggaacucag

SEQ ID NO: 225778 - RNA, 19 nt, Artificial Sequence
  Description of Artificial Sequence: Synthetic oligonucleotide
  Sense strand starting at position 3435 of SEQ ID NO: 2907
gcaguuccacuauguguga

SEQ ID NO: 225779 - RNA, 19 nt, Artificial Sequence
  Description of Artificial Sequence: Synthetic oligonucleotide
  Antisense strand to SEQ ID NO: 225778
ucacacauaguggaacugc

SEQ ID NO: 225780 - RNA, 19 nt, Artificial Sequence
  Description of Artificial Sequence: Synthetic oligonucleotide
  Sense strand starting at position 3437 of SEQ ID NO: 2907
aguuccacuaugugugaga

SEQ ID NO: 225781 - RNA, 19 nt, Artificial Sequence
  Description of Artificial Sequence: Synthetic oligonucleotide
  Antisense strand to SEQ ID NO: 225780
ucucacacauaguggaacu

SEQ ID NO: 225782 - RNA, 19 nt, Artificial Sequence
  Description of Artificial Sequence: Synthetic oligonucleotide
  Sense strand starting at position 3438 of SEQ ID NO: 2907
guuccacuaugugugagaa

SEQ ID NO: 225783 - RNA, 19 nt, Artificial Sequence
  Description of Artificial Sequence: Synthetic oligonucleotide
  Antisense strand to SEQ ID NO: 225782
uucucacacauaguggaac

SEQ ID NO: 225784 - RNA, 19 nt, Artificial Sequence
  Description of Artificial Sequence: Synthetic oligonucleotide
  Sense strand starting at position 3712 of SEQ ID NO: 2907
gggagucugggccacagau

SEQ ID NO: 225785 - RNA, 19 nt, Artificial Sequence
  Description of Artificial Sequence: Synthetic oligonucleotide
  Antisense strand to SEQ ID NO: 225784
aucuguggcccagacuccc

SEQ ID NO: 225786 - RNA, 19 nt, Artificial Sequence
  Description of Artificial Sequence: Synthetic oligonucleotide
  Sense strand starting at position 3 of SEQ ID NO: 2908
uccgaacuccuaugggaca

SEQ ID NO: 225787 - RNA, 19 nt, Artificial Sequence
  Description of Artificial Sequence: Synthetic oligonucleotide
  Antisense strand to SEQ ID NO: 225786
ugucccauaggaguucgga

SEQ ID NO: 225788 - RNA, 19 nt, Artificial Sequence
  Description of Artificial Sequence: Synthetic oligonucleotide
  Sense strand starting at position 174 of SEQ ID NO: 2908
gaagaacuaguccguucuu

SEQ ID NO: 225789 - RNA, 19 nt, Artificial Sequence
  Description of Artificial Sequence: Synthetic oligonucleotide
  Antisense strand to SEQ ID NO: 225788
aagaacggacuaguucuuc

SEQ ID NO: 225790 - RNA, 19 nt, Artificial Sequence
  Description of Artificial Sequence: Synthetic oligonucleotide
  Sense strand starting at position 175 of SEQ ID NO: 2908
aagaacuaguccguucuua

SEQ ID NO: 225791 - RNA, 19 nt, Artificial Sequence
  Description of Artificial Sequence: Synthetic oligonucleotide
  Antisense strand to SEQ ID NO: 225790
uaagaacggacuaguucuu

SEQ ID NO: 225792 - RNA, 19 nt, Artificial Sequence
  Description of Artificial Sequence: Synthetic oligonucleotide
  Sense strand starting at position 249 of SEQ ID NO: 2908
cucagauucugauuacugu

SEQ ID NO: 225793 - RNA, 19 nt, Artificial Sequence
  Description of Artificial Sequence: Synthetic oligonucleotide
  Antisense strand to SEQ ID NO: 225792
acaguaaucagaaucugag

SEQ ID NO: 225794 - RNA, 19 nt, Artificial Sequence
  Description of Artificial Sequence: Synthetic oligonucleotide
  Sense strand starting at position 258 of SEQ ID NO: 2908
ugauuacuguagucuguac

SEQ ID NO: 225795 - RNA, 19 nt, Artificial Sequence
  Description of Artificial Sequence: Synthetic oligonucleotide
  Antisense strand to SEQ ID NO: 225794
guacagacuacaguaauca

SEQ ID NO: 225796 - RNA, 19 nt, Artificial Sequence
  Description of Artificial Sequence: Synthetic oligonucleotide
  Sense strand starting at position 262 of SEQ ID NO: 2908
uacuguagucuguacucau

SEQ ID NO: 225797 - RNA, 19 nt, Artificial Sequence
  Description of Artificial Sequence: Synthetic oligonucleotide
  Antisense strand to SEQ ID NO: 225796
augaguacagacuacagua

SEQ ID NO: 225798 - RNA, 19 nt, Artificial Sequence
  Description of Artificial Sequence: Synthetic oligonucleotide
  Sense strand starting at position 285 of SEQ ID NO: 2908
uucccugagacugguagaa

SEQ ID NO: 225799 - RNA, 19 nt, Artificial Sequence
  Description of Artificial Sequence: Synthetic oligonucleotide
  Antisense strand to SEQ ID NO: 225798
uucuaccagucucagggaa

SEQ ID NO: 225800 - RNA, 19 nt, Artificial Sequence
  Description of Artificial Sequence: Synthetic oligonucleotide
  Sense strand starting at position 327 of SEQ ID NO: 2908
aagauucuggaguguaaau

SEQ ID NO: 225801 - RNA, 19 nt, Artificial Sequence
  Description of Artificial Sequence: Synthetic oligonucleotide
  Antisense strand to SEQ ID NO: 225800
auuuacacuccagaaucuu

SEQ ID NO: 225802 - RNA, 19 nt, Artificial Sequence
  Description of Artificial Sequence: Synthetic oligonucleotide
  Sense strand starting at position 368 of SEQ ID NO: 2908
uuucuuaauuugucuucga

SEQ ID NO: 225803 - RNA, 19 nt, Artificial Sequence
  Description of Artificial Sequence: Synthetic oligonucleotide
  Antisense strand to SEQ ID NO: 225802
ucgaagacaaauuaagaaa

SEQ ID NO: 225804 - RNA, 19 nt, Artificial Sequence
  Description of Artificial Sequence: Synthetic oligonucleotide
  Sense strand starting at position 369 of SEQ ID NO: 2908
uucuuaauuugucuucgau

SEQ ID NO: 225805 - RNA, 19 nt, Artificial Sequence
  Description of Artificial Sequence: Synthetic oligonucleotide
  Antisense strand to SEQ ID NO: 225804
aucgaagacaaauuaagaa

SEQ ID NO: 225806 - RNA, 19 nt, Artificial Sequence
  Description of Artificial Sequence: Synthetic oligonucleotide
  Sense strand starting at position 371 of SEQ ID NO: 2908
cuuaauuugucuucgaugu

SEQ ID NO: 225807 - RNA, 19 nt, Artificial Sequence
  Description of Artificial Sequence: Synthetic oligonucleotide
  Antisense strand to SEQ ID NO: 225806
acaucgaagacaaauuaag

SEQ ID NO: 225808 - RNA, 19 nt, Artificial Sequence
  Description of Artificial Sequence: Synthetic oligonucleotide
  Sense strand starting at position 372 of SEQ ID NO: 2908
uuaauuugucuucgauguu

SEQ ID NO: 225809 - RNA, 19 nt, Artificial Sequence
  Description of Artificial Sequence: Synthetic oligonucleotide
  Antisense strand to SEQ ID NO: 225808
aacaucgaagacaaauuaa

SEQ ID NO: 225810 - RNA, 19 nt, Artificial Sequence
  Description of Artificial Sequence: Synthetic oligonucleotide
  Sense strand starting at position 435 of SEQ ID NO: 2908
ucaccucagccggaaauau

SEQ ID NO: 225811 - RNA, 19 nt, Artificial Sequence
  Description of Artificial Sequence: Synthetic oligonucleotide
  Antisense strand to SEQ ID NO: 225810
auauuuccggcugagguga

SEQ ID NO: 225812 - RNA, 19 nt, Artificial Sequence
  Description of Artificial Sequence: Synthetic oligonucleotide
  Sense strand starting at position 500 of SEQ ID NO: 2908
ucgauaugacagugaggaa

SEQ ID NO: 225813 - RNA, 19 nt, Artificial Sequence
  Description of Artificial Sequence: Synthetic oligonucleotide
  Antisense strand to SEQ ID NO: 225812
uuccucacugucauaucga

SEQ ID NO: 225814 - RNA, 19 nt, Artificial Sequence
  Description of Artificial Sequence: Synthetic oligonucleotide
  Sense strand starting at position 2014 of SEQ ID NO: 2908
ugcuguuucuaaguaauuu

SEQ ID NO: 225815 - RNA, 19 nt, Artificial Sequence
  Description of Artificial Sequence: Synthetic oligonucleotide
  Antisense strand to SEQ ID NO: 225814
aaauuacuuagaaacagca

SEQ ID NO: 225816 - RNA, 19 nt, Artificial Sequence
  Description of Artificial Sequence: Synthetic oligonucleotide
  Sense strand starting at position 2175 of SEQ ID NO: 2908
acagacauuuagcaauuga

SEQ ID NO: 225817 - RNA, 19 nt, Artificial Sequence
  Description of Artificial Sequence: Synthetic oligonucleotide
  Antisense strand to SEQ ID NO: 225816
ucaauugcuaaaugucugu

SEQ ID NO: 225818 - RNA, 19 nt, Artificial Sequence
  Description of Artificial Sequence: Synthetic oligonucleotide
  Sense strand starting at position 2255 of SEQ ID NO: 2908
agcauugguaacugucaga

SEQ ID NO: 225819 - RNA, 19 nt, Artificial Sequence
  Description of Artificial Sequence: Synthetic oligonucleotide
  Antisense strand to SEQ ID NO: 225818
ucugacaguuaccaaugcu

SEQ ID NO: 225820 - RNA, 19 nt, Artificial Sequence
  Description of Artificial Sequence: Synthetic oligonucleotide
  Sense strand starting at position 2266 of SEQ ID NO: 2908
cugucagaucuuuauugca

SEQ ID NO: 225821 - RNA, 19 nt, Artificial Sequence
  Description of Artificial Sequence: Synthetic oligonucleotide
  Antisense strand to SEQ ID NO: 225820
ugcaauaaagaucugacag

SEQ ID NO: 225822 - RNA, 19 nt, Artificial Sequence
  Description of Artificial Sequence: Synthetic oligonucleotide
  Sense strand starting at position 2313 of SEQ ID NO: 2908
ucaaauaugucugcagcca

SEQ ID NO: 225823 - RNA, 19 nt, Artificial Sequence
  Description of Artificial Sequence: Synthetic oligonucleotide
  Antisense strand to SEQ ID NO: 225822
uggcugcagacauauuuga

SEQ ID NO: 225824 - RNA, 19 nt, Artificial Sequence
  Description of Artificial Sequence: Synthetic oligonucleotide
  Sense strand starting at position 2371 of SEQ ID NO: 2908
aggucuuaucagcaucugu

SEQ ID NO: 225825 - RNA, 19 nt, Artificial Sequence
  Description of Artificial Sequence: Synthetic oligonucleotide
  Antisense strand to SEQ ID NO: 225824
acagaugcugauaagaccu

SEQ ID NO: 225826 - RNA, 19 nt, Artificial Sequence
  Description of Artificial Sequence: Synthetic oligonucleotide
  Sense strand starting at position 2473 of SEQ ID NO: 2908
gggagccauugauuagguu

SEQ ID NO: 225827 - RNA, 19 nt, Artificial Sequence
  Description of Artificial Sequence: Synthetic oligonucleotide
  Antisense strand to SEQ ID NO: 225826
aaccuaaucaauggcuccc

SEQ ID NO: 225828 - RNA, 19 nt, Artificial Sequence
  Description of Artificial Sequence: Synthetic oligonucleotide
  Sense strand starting at position 2477 of SEQ ID NO: 2908
gccauugauuagguuggga

SEQ ID NO: 225829 - RNA, 19 nt, Artificial Sequence
  Description of Artificial Sequence: Synthetic oligonucleotide
  Antisense strand to SEQ ID NO: 225828
ucccaaccuaaucaauggc

SEQ ID NO: 225830 - RNA, 19 nt, Artificial Sequence
  Description of Artificial Sequence: Synthetic oligonucleotide
  Sense strand starting at position 2479 of SEQ ID NO: 2908
cauugauuagguugggaca

SEQ ID NO: 225831 - RNA, 19 nt, Artificial Sequence
  Description of Artificial Sequence: Synthetic oligonucleotide
  Antisense strand to SEQ ID NO: 225830
ugucccaaccuaaucaaug

SEQ ID NO: 225832 - RNA, 19 nt, Artificial Sequence
  Description of Artificial Sequence: Synthetic oligonucleotide
  Sense strand starting at position 2561 of SEQ ID NO: 2908
gugacugcucugggaauga

SEQ ID NO: 225833 - RNA, 19 nt, Artificial Sequence
  Description of Artificial Sequence: Synthetic oligonucleotide
  Antisense strand to SEQ ID NO: 225832
ucauucccagagcagucac

SEQ ID NO: 225834 - RNA, 19 nt, Artificial Sequence
  Description of Artificial Sequence: Synthetic oligonucleotide
  Sense strand starting at position 2577 of SEQ ID NO: 2908
ugagcuuggugucuaauaa

SEQ ID NO: 225835 - RNA, 19 nt, Artificial Sequence
  Description of Artificial Sequence: Synthetic oligonucleotide
  Antisense strand to SEQ ID NO: 225834
uuauuagacaccaagcuca

SEQ ID NO: 225836 - RNA, 19 nt, Artificial Sequence
  Description of Artificial Sequence: Synthetic oligonucleotide
  Sense strand starting at position 2578 of SEQ ID NO: 2908
gagcuuggugucuaauaac

SEQ ID NO: 225837 - RNA, 19 nt, Artificial Sequence
  Description of Artificial Sequence: Synthetic oligonucleotide
  Antisense strand to SEQ ID NO: 225836
guuauuagacaccaagcuc

SEQ ID NO: 225838 - RNA, 19 nt, Artificial Sequence
  Description of Artificial Sequence: Synthetic oligonucleotide
  Sense strand starting at position 2851 of SEQ ID NO: 2908
cucccacuccauugaggua

SEQ ID NO: 225839 - RNA, 19 nt, Artificial Sequence
  Description of Artificial Sequence: Synthetic oligonucleotide
  Antisense strand to SEQ ID NO: 225838
uaccucaauggagugggag

SEQ ID NO: 225840 - RNA, 19 nt, Artificial Sequence
  Description of Artificial Sequence: Synthetic oligonucleotide
  Sense strand starting at position 2964 of SEQ ID NO: 2908
cccacaguguaaccagaau

SEQ ID NO: 225841 - RNA, 19 nt, Artificial Sequence
  Description of Artificial Sequence: Synthetic oligonucleotide
  Antisense strand to SEQ ID NO: 225840
auucugguuacacuguggg

SEQ ID NO: 225842 - RNA, 19 nt, Artificial Sequence
  Description of Artificial Sequence: Synthetic oligonucleotide
  Sense strand starting at position 2975 of SEQ ID NO: 2908
accagaaugugcuugcuaa

SEQ ID NO: 225843 - RNA, 19 nt, Artificial Sequence
  Description of Artificial Sequence: Synthetic oligonucleotide
  Antisense strand to SEQ ID NO: 225842
uuagcaagcacauucuggu

SEQ ID NO: 225844 - RNA, 19 nt, Artificial Sequence
  Description of Artificial Sequence: Synthetic oligonucleotide
  Sense strand starting at position 2976 of SEQ ID NO: 2908
ccagaaugugcuugcuaag

SEQ ID NO: 225845 - RNA, 19 nt, Artificial Sequence
  Description of Artificial Sequence: Synthetic oligonucleotide
  Antisense strand to SEQ ID NO: 225844
cuuagcaagcacauucugg

SEQ ID NO: 225846 - RNA, 19 nt, Artificial Sequence
  Description of Artificial Sequence: Synthetic oligonucleotide
  Sense strand starting at position 3016 of SEQ ID NO: 2908
gguucugacuccuuagcaa

SEQ ID NO: 225847 - RNA, 19 nt, Artificial Sequence
  Description of Artificial Sequence: Synthetic oligonucleotide
  Antisense strand to SEQ ID NO: 225846
uugcuaaggagucagaacc

SEQ ID NO: 225848 - RNA, 19 nt, Artificial Sequence
  Description of Artificial Sequence: Synthetic oligonucleotide
  Sense strand starting at position 3046 of SEQ ID NO: 2908
caacuaauguggguuguga

SEQ ID NO: 225849 - RNA, 19 nt, Artificial Sequence
  Description of Artificial Sequence: Synthetic oligonucleotide
  Antisense strand to SEQ ID NO: 225848
ucacaacccacauuaguug

SEQ ID NO: 225850 - RNA, 19 nt, Artificial Sequence
  Description of Artificial Sequence: Synthetic oligonucleotide
  Sense strand starting at position 3048 of SEQ ID NO: 2908
acuaauguggguugugaaa

SEQ ID NO: 225851 - RNA, 19 nt, Artificial Sequence
  Description of Artificial Sequence: Synthetic oligonucleotide
  Antisense strand to SEQ ID NO: 225850
uuucacaacccacauuagu

SEQ ID NO: 225852 - RNA, 19 nt, Artificial Sequence
  Description of Artificial Sequence: Synthetic oligonucleotide
  Sense strand starting at position 3064 of SEQ ID NO: 2908
aaaucaauucuguggguca

SEQ ID NO: 225853 - RNA, 19 nt, Artificial Sequence
  Description of Artificial Sequence: Synthetic oligonucleotide
  Antisense strand to SEQ ID NO: 225852
ugacccacagaauugauuu

SEQ ID NO: 225854 - RNA, 19 nt, Artificial Sequence
  Description of Artificial Sequence: Synthetic oligonucleotide
  Sense strand starting at position 3067 of SEQ ID NO: 2908
ucaauucugugggucauga

SEQ ID NO: 225855 - RNA, 19 nt, Artificial Sequence
  Description of Artificial Sequence: Synthetic oligonucleotide
  Antisense strand to SEQ ID NO: 225854
ucaugacccacagaauuga

SEQ ID NO: 225856 - RNA, 19 nt, Artificial Sequence
  Description of Artificial Sequence: Synthetic oligonucleotide
  Sense strand starting at position 3373 of SEQ ID NO: 2908
gaggcagucuggguugaga

SEQ ID NO: 225857 - RNA, 19 nt, Artificial Sequence
  Description of Artificial Sequence: Synthetic oligonucleotide
  Antisense strand to SEQ ID NO: 225856
ucucaacccagacugccuc

SEQ ID NO: 225858 - RNA, 19 nt, Artificial Sequence
  Description of Artificial Sequence: Synthetic oligonucleotide
  Sense strand starting at position 3375 of SEQ ID NO: 2908
ggcagucuggguugagaaa

SEQ ID NO: 225859 - RNA, 19 nt, Artificial Sequence
  Description of Artificial Sequence: Synthetic oligonucleotide
  Antisense strand to SEQ ID NO: 225858
uuucucaacccagacugcc

SEQ ID NO: 225860 - RNA, 19 nt, Artificial Sequence
  Description of Artificial Sequence: Synthetic oligonucleotide
  Sense strand starting at position 3476 of SEQ ID NO: 2908
ccaguccaguuccugaaau

SEQ ID NO: 225861 - RNA, 19 nt, Artificial Sequence
  Description of Artificial Sequence: Synthetic oligonucleotide
  Antisense strand to SEQ ID NO: 225860
auuucaggaacuggacugg

SEQ ID NO: 225862 - RNA, 19 nt, Artificial Sequence
  Description of Artificial Sequence: Synthetic oligonucleotide
  Sense strand starting at position 3748 of SEQ ID NO: 2908
cuaggugaucagggcaagu

SEQ ID NO: 225863 - RNA, 19 nt, Artificial Sequence
  Description of Artificial Sequence: Synthetic oligonucleotide
  Antisense strand to SEQ ID NO: 225862
acuugcccugaucaccuag

SEQ ID NO: 225864 - RNA, 19 nt, Artificial Sequence
  Description of Artificial Sequence: Synthetic oligonucleotide
  Sense strand starting at position 3750 of SEQ ID NO: 2908
aggugaucagggcaaguua

SEQ ID NO: 225865 - RNA, 19 nt, Artificial Sequence
  Description of Artificial Sequence: Synthetic oligonucleotide
  Antisense strand to SEQ ID NO: 225864
uaacuugcccugaucaccu

SEQ ID NO: 225866 - RNA, 19 nt, Artificial Sequence
  Description of Artificial Sequence: Synthetic oligonucleotide
  Sense strand starting at position 13 of SEQ ID NO: 2910
ugaacuuuccuguaaguuc

SEQ ID NO: 225867 - RNA, 19 nt, Artificial Sequence
  Description of Artificial Sequence: Synthetic oligonucleotide
  Antisense strand to SEQ ID NO: 225866
gaacuuacaggaaaguuca

SEQ ID NO: 225868 - RNA, 19 nt, Artificial Sequence
  Description of Artificial Sequence: Synthetic oligonucleotide
  Sense strand starting at position 16 of SEQ ID NO: 2910
acuuuccuguaaguucuaa

SEQ ID NO: 225869 - RNA, 19 nt, Artificial Sequence
  Description of Artificial Sequence: Synthetic oligonucleotide
  Antisense strand to SEQ ID NO: 225868
uuagaacuuacaggaaagu

SEQ ID NO: 225870 - RNA, 19 nt, Artificial Sequence
  Description of Artificial Sequence: Synthetic oligonucleotide
  Sense strand starting at position 65 of SEQ ID NO: 2910
aggaguuaccaucauuagc

SEQ ID NO: 225871 - RNA, 19 nt, Artificial Sequence
  Description of Artificial Sequence: Synthetic oligonucleotide
  Antisense strand to SEQ ID NO: 225870
gcuaaugaugguaacuccu

SEQ ID NO: 225872 - RNA, 19 nt, Artificial Sequence
  Description of Artificial Sequence: Synthetic oligonucleotide
  Sense strand starting at position 151 of SEQ ID NO: 2910
acaauuauuuguggacaua

SEQ ID NO: 225873 - RNA, 19 nt, Artificial Sequence
  Description of Artificial Sequence: Synthetic oligonucleotide
  Antisense strand to SEQ ID NO: 225872
uauguccacaaauaauugu

SEQ ID NO: 225874 - RNA, 19 nt, Artificial Sequence
  Description of Artificial Sequence: Synthetic oligonucleotide
  Sense strand starting at position 160 of SEQ ID NO: 2910
uguggacauaccugaaaug

SEQ ID NO: 225875 - RNA, 19 nt, Artificial Sequence
  Description of Artificial Sequence: Synthetic oligonucleotide
  Antisense strand to SEQ ID NO: 225874
cauuucagguauguccaca

SEQ ID NO: 225876 - RNA, 19 nt, Artificial Sequence
  Description of Artificial Sequence: Synthetic oligonucleotide
  Sense strand starting at position 171 of SEQ ID NO: 2910
cugaaauguucccuauuag

SEQ ID NO: 225877 - RNA, 19 nt, Artificial Sequence
  Description of Artificial Sequence: Synthetic oligonucleotide
  Antisense strand to SEQ ID NO: 225876
cuaauagggaacauuucag

SEQ ID NO: 225878 - RNA, 19 nt, Artificial Sequence
  Description of Artificial Sequence: Synthetic oligonucleotide
  Sense strand starting at position 180 of SEQ ID NO: 2910
ucccuauuagauuguaaug

SEQ ID NO: 225879 - RNA, 19 nt, Artificial Sequence
  Description of Artificial Sequence: Synthetic oligonucleotide
  Antisense strand to SEQ ID NO: 225878
cauuacaaucuaauaggga

SEQ ID NO: 225880 - RNA, 19 nt, Artificial Sequence
  Description of Artificial Sequence: Synthetic oligonucleotide
  Sense strand starting at position 192 of SEQ ID NO: 2910
uguaauguacuugaaauca

SEQ ID NO: 225881 - RNA, 19 nt, Artificial Sequence
  Description of Artificial Sequence: Synthetic oligonucleotide
  Antisense strand to SEQ ID NO: 225880
ugauuucaaguacauuaca

SEQ ID NO: 225882 - RNA, 19 nt, Artificial Sequence
  Description of Artificial Sequence: Synthetic oligonucleotide
  Sense strand starting at position 200 of SEQ ID NO: 2910
acuugaaaucagggacugu

SEQ ID NO: 225883 - RNA, 19 nt, Artificial Sequence
  Description of Artificial Sequence: Synthetic oligonucleotide
  Antisense strand to SEQ ID NO: 225882
acagucccugauuucaagu

SEQ ID NO: 225884 - RNA, 19 nt, Artificial Sequence
  Description of Artificial Sequence: Synthetic oligonucleotide
  Sense strand starting at position 460 of SEQ ID NO: 2910
augauugacuuauugccua

SEQ ID NO: 225885 - RNA, 19 nt, Artificial Sequence
  Description of Artificial Sequence: Synthetic oligonucleotide
  Antisense strand to SEQ ID NO: 225884
uaggcaauaagucaaucau

SEQ ID NO: 225886 - RNA, 19 nt, Artificial Sequence
  Description of Artificial Sequence: Synthetic oligonucleotide
  Sense strand starting at position 464 of SEQ ID NO: 2910
uugacuuauugccuaauga

SEQ ID NO: 225887 - RNA, 19 nt, Artificial Sequence
  Description of Artificial Sequence: Synthetic oligonucleotide
  Antisense strand to SEQ ID NO: 225886
ucauuaggcaauaagucaa

SEQ ID NO: 225888 - RNA, 19 nt, Artificial Sequence
  Description of Artificial Sequence: Synthetic oligonucleotide
  Sense strand starting at position 465 of SEQ ID NO: 2910
ugacuuauugccuaaugau

SEQ ID NO: 225889 - RNA, 19 nt, Artificial Sequence
  Description of Artificial Sequence: Synthetic oligonucleotide
  Antisense strand to SEQ ID NO: 225888
aucauuaggcaauaaguca

SEQ ID NO: 225890 - RNA, 19 nt, Artificial Sequence
  Description of Artificial Sequence: Synthetic oligonucleotide
  Sense strand starting at position 702 of SEQ ID NO: 2910
uggcaagcgaauugauaau

SEQ ID NO: 225891 - RNA, 19 nt, Artificial Sequence
  Description of Artificial Sequence: Synthetic oligonucleotide
  Antisense strand to SEQ ID NO: 225890
auuaucaauucgcuugcca

SEQ ID NO: 225892 - RNA, 19 nt, Artificial Sequence
  Description of Artificial Sequence: Synthetic oligonucleotide
  Sense strand starting at position 905 of SEQ ID NO: 2910
cuacgcuaggcacauuaua

SEQ ID NO: 225893 - RNA, 19 nt, Artificial Sequence
  Description of Artificial Sequence: Synthetic oligonucleotide
  Antisense strand to SEQ ID NO: 225892
uauaaugugccuagcguag

SEQ ID NO: 225894 - RNA, 19 nt, Artificial Sequence
  Description of Artificial Sequence: Synthetic oligonucleotide
  Sense strand starting at position 1003 of SEQ ID NO: 2910
caaagucuugaccagcuga

SEQ ID NO: 225895 - RNA, 19 nt, Artificial Sequence
  Description of Artificial Sequence: Synthetic oligonucleotide
  Antisense strand to SEQ ID NO: 225894
ucagcuggucaagacuuug

SEQ ID NO: 225896 - RNA, 19 nt, Artificial Sequence
  Description of Artificial Sequence: Synthetic oligonucleotide
  Sense strand starting at position 1105 of SEQ ID NO: 2910
agaagagagucucuagagu

SEQ ID NO: 225897 - RNA, 19 nt, Artificial Sequence
  Description of Artificial Sequence: Synthetic oligonucleotide
  Antisense strand to SEQ ID NO: 225896
acucuagagacucucuucu

SEQ ID NO: 225898 - RNA, 19 nt, Artificial Sequence
  Description of Artificial Sequence: Synthetic oligonucleotide
  Sense strand starting at position 1127 of SEQ ID NO: 2910
gugcuagaaccuccguguu

SEQ ID NO: 225899 - RNA, 19 nt, Artificial Sequence
  Description of Artificial Sequence: Synthetic oligonucleotide
  Antisense strand to SEQ ID NO: 225898
aacacggagguucuagcac

SEQ ID NO: 225900 - RNA, 19 nt, Artificial Sequence
  Description of Artificial Sequence: Synthetic oligonucleotide
  Sense strand starting at position 1191 of SEQ ID NO: 2910
gcaaguagagauggccuua

SEQ ID NO: 225901 - RNA, 19 nt, Artificial Sequence
  Description of Artificial Sequence: Synthetic oligonucleotide
  Antisense strand to SEQ ID NO: 225900
uaaggccaucucuacuugc

SEQ ID NO: 225902 - RNA, 19 nt, Artificial Sequence
  Description of Artificial Sequence: Synthetic oligonucleotide
  Sense strand starting at position 1986 of SEQ ID NO: 2910
gugcguucugggaauugug

SEQ ID NO: 225903 - RNA, 19 nt, Artificial Sequence
  Description of Artificial Sequence: Synthetic oligonucleotide
  Antisense strand to SEQ ID NO: 225902
cacaauucccagaacgcac

SEQ ID NO: 225904 - RNA, 19 nt, Artificial Sequence
  Description of Artificial Sequence: Synthetic oligonucleotide
  Sense strand starting at position 2085 of SEQ ID NO: 2910
cgagaagcuucuguauaaa

SEQ ID NO: 225905 - RNA, 19 nt, Artificial Sequence
  Description of Artificial Sequence: Synthetic oligonucleotide
  Antisense strand to SEQ ID NO: 225904
uuuauacagaagcuucucg

SEQ ID NO: 225906 - RNA, 19 nt, Artificial Sequence
  Description of Artificial Sequence: Synthetic oligonucleotide
  Sense strand starting at position 2088 of SEQ ID NO: 2910
gaagcuucuguauaaagua

SEQ ID NO: 225907 - RNA, 19 nt, Artificial Sequence
  Description of Artificial Sequence: Synthetic oligonucleotide
  Antisense strand to SEQ ID NO: 225906
uacuuuauacagaagcuuc

SEQ ID NO: 225908 - RNA, 19 nt, Artificial Sequence
  Description of Artificial Sequence: Synthetic oligonucleotide
  Sense strand starting at position 2141 of SEQ ID NO: 2910
uguguuauaguguaagauc

SEQ ID NO: 225909 - RNA, 19 nt, Artificial Sequence
  Description of Artificial Sequence: Synthetic oligonucleotide
  Antisense strand to SEQ ID NO: 225908
gaucuuacacuauaacaca

SEQ ID NO: 225910 - RNA, 19 nt, Artificial Sequence
  Description of Artificial Sequence: Synthetic oligonucleotide
  Sense strand starting at position 2150 of SEQ ID NO: 2910
guguaagaucuuugaccca

SEQ ID NO: 225911 - RNA, 19 nt, Artificial Sequence
  Description of Artificial Sequence: Synthetic oligonucleotide
  Antisense strand to SEQ ID NO: 225910
ugggucaaagaucuuacac

SEQ ID NO: 225912 - RNA, 19 nt, Artificial Sequence
  Description of Artificial Sequence: Synthetic oligonucleotide
  Sense strand starting at position 2163 of SEQ ID NO: 2910
gacccaauauuggcggaau

SEQ ID NO: 225913 - RNA, 19 nt, Artificial Sequence
  Description of Artificial Sequence: Synthetic oligonucleotide
  Antisense strand to SEQ ID NO: 225912
auuccgccaauauuggguc

SEQ ID NO: 225914 - RNA, 19 nt, Artificial Sequence
  Description of Artificial Sequence: Synthetic oligonucleotide
  Sense strand starting at position 2245 of SEQ ID NO: 2910
gaaguagacuguuuaggau

SEQ ID NO: 225915 - RNA, 19 nt, Artificial Sequence
  Description of Artificial Sequence: Synthetic oligonucleotide
  Antisense strand to SEQ ID NO: 225914
auccuaaacagucuacuuc

SEQ ID NO: 225916 - RNA, 19 nt, Artificial Sequence
  Description of Artificial Sequence: Synthetic oligonucleotide
  Sense strand starting at position 2625 of SEQ ID NO: 2910
agcuaacaccaagguaaua

SEQ ID NO: 225917 - RNA, 19 nt, Artificial Sequence
  Description of Artificial Sequence: Synthetic oligonucleotide
  Antisense strand to SEQ ID NO: 225916
uauuaccuugguguuagcu

SEQ ID NO: 225918 - RNA, 19 nt, Artificial Sequence
  Description of Artificial Sequence: Synthetic oligonucleotide
  Sense strand starting at position 2665 of SEQ ID NO: 2910
cugauuguucuagaaguuc

SEQ ID NO: 225919 - RNA, 19 nt, Artificial Sequence
  Description of Artificial Sequence: Synthetic oligonucleotide
  Antisense strand to SEQ ID NO: 225918
gaacuucuagaacaaucag

SEQ ID NO: 225920 - RNA, 19 nt, Artificial Sequence
  Description of Artificial Sequence: Synthetic oligonucleotide
  Sense strand starting at position 2682 of SEQ ID NO: 2910
ucuagauauugcccaaguc

SEQ ID NO: 225921 - RNA, 19 nt, Artificial Sequence
  Description of Artificial Sequence: Synthetic oligonucleotide
  Antisense strand to SEQ ID NO: 225920
gacuugggcaauaucuaga

SEQ ID NO: 225922 - RNA, 19 nt, Artificial Sequence
  Description of Artificial Sequence: Synthetic oligonucleotide
  Sense strand starting at position 2683 of SEQ ID NO: 2910
cuagauauugcccaagucu

SEQ ID NO: 225923 - RNA, 19 nt, Artificial Sequence
  Description of Artificial Sequence: Synthetic oligonucleotide
  Antisense strand to SEQ ID NO: 225922
agacuugggcaauaucuag

SEQ ID NO: 225924 - RNA, 19 nt, Artificial Sequence
  Description of Artificial Sequence: Synthetic oligonucleotide
  Sense strand starting at position 2691 of SEQ ID NO: 2910
ugcccaagucuagaaugaa

SEQ ID NO: 225925 - RNA, 19 nt, Artificial Sequence
  Description of Artificial Sequence: Synthetic oligonucleotide
  Antisense strand to SEQ ID NO: 225924
uucauucuagacuugggca

SEQ ID NO: 225926 - RNA, 19 nt, Artificial Sequence
  Description of Artificial Sequence: Synthetic oligonucleotide
  Sense strand starting at position 3348 of SEQ ID NO: 2910
ccuucuucucaagggagaa

SEQ ID NO: 225927 - RNA, 19 nt, Artificial Sequence
  Description of Artificial Sequence: Synthetic oligonucleotide
  Antisense strand to SEQ ID NO: 225926
uucucccuugagaagaagg

SEQ ID NO: 225928 - RNA, 19 nt, Artificial Sequence
  Description of Artificial Sequence: Synthetic oligonucleotide
  Sense strand starting at position 3367 of SEQ ID NO: 2910
aggacacucgcucaacuaa

SEQ ID NO: 225929 - RNA, 19 nt, Artificial Sequence
  Description of Artificial Sequence: Synthetic oligonucleotide
  Antisense strand to SEQ ID NO: 225928
uuaguugagcgaguguccu

SEQ ID NO: 225930 - RNA, 19 nt, Artificial Sequence
  Description of Artificial Sequence: Synthetic oligonucleotide
  Sense strand starting at position 3398 of SEQ ID NO: 2910
ccugacugaugguuuaacu

SEQ ID NO: 225931 - RNA, 19 nt, Artificial Sequence
  Description of Artificial Sequence: Synthetic oligonucleotide
  Antisense strand to SEQ ID NO: 225930
aguuaaaccaucagucagg

SEQ ID NO: 225932 - RNA, 19 nt, Artificial Sequence
  Description of Artificial Sequence: Synthetic oligonucleotide
  Sense strand starting at position 3513 of SEQ ID NO: 2910
ggagcaucuguauaaugau

SEQ ID NO: 225933 - RNA, 19 nt, Artificial Sequence
  Description of Artificial Sequence: Synthetic oligonucleotide
  Antisense strand to SEQ ID NO: 225932
aucauuauacagaugcucc

SEQ ID NO: 225934 - RNA, 19 nt, Artificial Sequence
  Description of Artificial Sequence: Synthetic oligonucleotide
  Sense strand starting at position 3520 of SEQ ID NO: 2910
cuguauaaugauggaauua

SEQ ID NO: 225935 - RNA, 19 nt, Artificial Sequence
  Description of Artificial Sequence: Synthetic oligonucleotide
  Antisense strand to SEQ ID NO: 225934
uaauuccaucauuauacag

SEQ ID NO: 225936 - RNA, 19 nt, Artificial Sequence
  Description of Artificial Sequence: Synthetic oligonucleotide
  Sense strand starting at position 3603 of SEQ ID NO: 2910
agagcuaagucuuugauuc

SEQ ID NO: 225937 - RNA, 19 nt, Artificial Sequence
  Description of Artificial Sequence: Synthetic oligonucleotide
  Antisense strand to SEQ ID NO: 225936
gaaucaaagacuuagcucu

SEQ ID NO: 225938 - RNA, 19 nt, Artificial Sequence
  Description of Artificial Sequence: Synthetic oligonucleotide
  Sense strand starting at position 3842 of SEQ ID NO: 2910
augugaauccacugguaga

SEQ ID NO: 225939 - RNA, 19 nt, Artificial Sequence
  Description of Artificial Sequence: Synthetic oligonucleotide
  Antisense strand to SEQ ID NO: 225938
ucuaccaguggauucacau

SEQ ID NO: 225940 - RNA, 19 nt, Artificial Sequence
  Description of Artificial Sequence: Synthetic oligonucleotide
  Sense strand starting at position 3843 of SEQ ID NO: 2910
ugugaauccacugguagau

SEQ ID NO: 225941 - RNA, 19 nt, Artificial Sequence
  Description of Artificial Sequence: Synthetic oligonucleotide
  Antisense strand to SEQ ID NO: 225940
aucuaccaguggauucaca

SEQ ID NO: 225942 - RNA, 19 nt, Artificial Sequence
  Description of Artificial Sequence: Synthetic oligonucleotide
  Sense strand starting at position 3845 of SEQ ID NO: 2910
ugaauccacugguagauuu

SEQ ID NO: 225943 - RNA, 19 nt, Artificial Sequence
  Description of Artificial Sequence: Synthetic oligonucleotide
  Antisense strand to SEQ ID NO: 225942
aaaucuaccaguggauuca

SEQ ID NO: 225944 - RNA, 19 nt, Artificial Sequence
  Description of Artificial Sequence: Synthetic oligonucleotide
  Sense strand starting at position 3912 of SEQ ID NO: 2910
uucaaaguaguccggagaa

SEQ ID NO: 225945 - RNA, 19 nt, Artificial Sequence
  Description of Artificial Sequence: Synthetic oligonucleotide
  Antisense strand to SEQ ID NO: 225944
uucuccggacuacuuugaa

SEQ ID NO: 225946 - RNA, 19 nt, Artificial Sequence
  Description of Artificial Sequence: Synthetic oligonucleotide
  Sense strand starting at position 31 of SEQ ID NO: 2909
ccuagagcugagcauagua

SEQ ID NO: 225947 - RNA, 19 nt, Artificial Sequence
  Description of Artificial Sequence: Synthetic oligonucleotide
  Antisense strand to SEQ ID NO: 225946
uacuaugcucagcucuagg

SEQ ID NO: 225948 - RNA, 19 nt, Artificial Sequence
  Description of Artificial Sequence: Synthetic oligonucleotide
  Sense strand starting at position 168 of SEQ ID NO: 2909
gaggacaugguuuggcauu

SEQ ID NO: 225949 - RNA, 19 nt, Artificial Sequence
  Description of Artificial Sequence: Synthetic oligonucleotide
  Antisense strand to SEQ ID NO: 225948
aaugccaaaccauguccuc

SEQ ID NO: 225950 - RNA, 19 nt, Artificial Sequence
  Description of Artificial Sequence: Synthetic oligonucleotide
  Sense strand starting at position 188 of SEQ ID NO: 2909
agaagcucuuaagcuauau

SEQ ID NO: 225951 - RNA, 19 nt, Artificial Sequence
  Description of Artificial Sequence: Synthetic oligonucleotide
  Antisense strand to SEQ ID NO: 225950
auauagcuuaagagcuucu

SEQ ID NO: 225952 - RNA, 19 nt, Artificial Sequence
  Description of Artificial Sequence: Synthetic oligonucleotide
  Sense strand starting at position 192 of SEQ ID NO: 2909
gcucuuaagcuauaugaca

SEQ ID NO: 225953 - RNA, 19 nt, Artificial Sequence
  Description of Artificial Sequence: Synthetic oligonucleotide
  Antisense strand to SEQ ID NO: 225952
ugucauauagcuuaagagc

SEQ ID NO: 225954 - RNA, 19 nt, Artificial Sequence
  Description of Artificial Sequence: Synthetic oligonucleotide
  Sense strand starting at position 276 of SEQ ID NO: 2909
ugaacuuuccuguaaguuc

SEQ ID NO: 225955 - RNA, 19 nt, Artificial Sequence
  Description of Artificial Sequence: Synthetic oligonucleotide
  Antisense strand to SEQ ID NO: 225954
gaacuuacaggaaaguuca

SEQ ID NO: 225956 - RNA, 19 nt, Artificial Sequence
  Description of Artificial Sequence: Synthetic oligonucleotide
  Sense strand starting at position 279 of SEQ ID NO: 2909
acuuuccuguaaguucuaa

SEQ ID NO: 225957 - RNA, 19 nt, Artificial Sequence
  Description of Artificial Sequence: Synthetic oligonucleotide
  Antisense strand to SEQ ID NO: 225956
uuagaacuuacaggaaagu

SEQ ID NO: 225958 - RNA, 19 nt, Artificial Sequence
  Description of Artificial Sequence: Synthetic oligonucleotide
  Sense strand starting at position 328 of SEQ ID NO: 2909
aggaguuaccaucauuagc

SEQ ID NO: 225959 - RNA, 19 nt, Artificial Sequence
  Description of Artificial Sequence: Synthetic oligonucleotide
  Antisense strand to SEQ ID NO: 225958
gcuaaugaugguaacuccu

SEQ ID NO: 225960 - RNA, 19 nt, Artificial Sequence
  Description of Artificial Sequence: Synthetic oligonucleotide
  Sense strand starting at position 414 of SEQ ID NO: 2909
acaauuauuuguggacaua

SEQ ID NO: 225961 - RNA, 19 nt, Artificial Sequence
  Description of Artificial Sequence: Synthetic oligonucleotide
  Antisense strand to SEQ ID NO: 225960
uauguccacaaauaauugu

SEQ ID NO: 225962 - RNA, 19 nt, Artificial Sequence
  Description of Artificial Sequence: Synthetic oligonucleotide
  Sense strand starting at position 423 of SEQ ID NO: 2909
uguggacauaccugaaaug

SEQ ID NO: 225963 - RNA, 19 nt, Artificial Sequence
  Description of Artificial Sequence: Synthetic oligonucleotide
  Antisense strand to SEQ ID NO: 225962
cauuucagguauguccaca

SEQ ID NO: 225964 - RNA, 19 nt, Artificial Sequence
  Description of Artificial Sequence: Synthetic oligonucleotide
  Sense strand starting at position 434 of SEQ ID NO: 2909
cugaaauguucccuauuag

SEQ ID NO: 225965 - RNA, 19 nt, Artificial Sequence
  Description of Artificial Sequence: Synthetic oligonucleotide
  Antisense strand to SEQ ID NO: 225964
cuaauagggaacauuucag

SEQ ID NO: 225966 - RNA, 19 nt, Artificial Sequence
  Description of Artificial Sequence: Synthetic oligonucleotide
  Sense strand starting at position 443 of SEQ ID NO: 2909
ucccuauuagauuguaaug

SEQ ID NO: 225967 - RNA, 19 nt, Artificial Sequence
  Description of Artificial Sequence: Synthetic oligonucleotide
  Antisense strand to SEQ ID NO: 225966
cauuacaaucuaauaggga

SEQ ID NO: 225968 - RNA, 19 nt, Artificial Sequence
  Description of Artificial Sequence: Synthetic oligonucleotide
  Sense strand starting at position 455 of SEQ ID NO: 2909
uguaauguacuugaaauca

SEQ ID NO: 225969 - RNA, 19 nt, Artificial Sequence
  Description of Artificial Sequence: Synthetic oligonucleotide
  Antisense strand to SEQ ID NO: 225968
ugauuucaaguacauuaca

SEQ ID NO: 225970 - RNA, 19 nt, Artificial Sequence
  Description of Artificial Sequence: Synthetic oligonucleotide
  Sense strand starting at position 463 of SEQ ID NO: 2909
acuugaaaucagggacugu

SEQ ID NO: 225971 - RNA, 19 nt, Artificial Sequence
  Description of Artificial Sequence: Synthetic oligonucleotide
  Antisense strand to SEQ ID NO: 225970
acagucccugauuucaagu

SEQ ID NO: 225972 - RNA, 19 nt, Artificial Sequence
  Description of Artificial Sequence: Synthetic oligonucleotide
  Sense strand starting at position 723 of SEQ ID NO: 2909
augauugacuuauugccua

SEQ ID NO: 225973 - RNA, 19 nt, Artificial Sequence
  Description of Artificial Sequence: Synthetic oligonucleotide
  Antisense strand to SEQ ID NO: 225972
uaggcaauaagucaaucau

SEQ ID NO: 225974 - RNA, 19 nt, Artificial Sequence
  Description of Artificial Sequence: Synthetic oligonucleotide
  Sense strand starting at position 727 of SEQ ID NO: 2909
uugacuuauugccuaauga

SEQ ID NO: 225975 - RNA, 19 nt, Artificial Sequence
  Description of Artificial Sequence: Synthetic oligonucleotide
  Antisense strand to SEQ ID NO: 225974
ucauuaggcaauaagucaa

SEQ ID NO: 225976 - RNA, 19 nt, Artificial Sequence
  Description of Artificial Sequence: Synthetic oligonucleotide
  Sense strand starting at position 728 of SEQ ID NO: 2909
ugacuuauugccuaaugau

SEQ ID NO: 225977 - RNA, 19 nt, Artificial Sequence
  Description of Artificial Sequence: Synthetic oligonucleotide
  Antisense strand to SEQ ID NO: 225976
aucauuaggcaauaaguca

SEQ ID NO: 225978 - RNA, 19 nt, Artificial Sequence
  Description of Artificial Sequence: Synthetic oligonucleotide
  Sense strand starting at position 965 of SEQ ID NO: 2909
uggcaagcgaauugauaau

SEQ ID NO: 225979 - RNA, 19 nt, Artificial Sequence
  Description of Artificial Sequence: Synthetic oligonucleotide
  Antisense strand to SEQ ID NO: 225978
auuaucaauucgcuugcca

SEQ ID NO: 225980 - RNA, 19 nt, Artificial Sequence
  Description of Artificial Sequence: Synthetic oligonucleotide
  Sense strand starting at position 1168 of SEQ ID NO: 2909
cuacgcuaggcacauuaua

SEQ ID NO: 225981 - RNA, 19 nt, Artificial Sequence
  Description of Artificial Sequence: Synthetic oligonucleotide
  Antisense strand to SEQ ID NO: 225980
uauaaugugccuagcguag

SEQ ID NO: 225982 - RNA, 19 nt, Artificial Sequence
  Description of Artificial Sequence: Synthetic oligonucleotide
  Sense strand starting at position 1266 of SEQ ID NO: 2909
caaagucuugaccagcuga

SEQ ID NO: 225983 - RNA, 19 nt, Artificial Sequence
  Description of Artificial Sequence: Synthetic oligonucleotide
  Antisense strand to SEQ ID NO: 225982
ucagcuggucaagacuuug

SEQ ID NO: 225984 - RNA, 19 nt, Artificial Sequence
  Description of Artificial Sequence: Synthetic oligonucleotide
  Sense strand starting at position 1368 of SEQ ID NO: 2909
agaagagagucucuagagu

SEQ ID NO: 225985 - RNA, 19 nt, Artificial Sequence
  Description of Artificial Sequence: Synthetic oligonucleotide
  Antisense strand to SEQ ID NO: 225984
acucuagagacucucuucu

SEQ ID NO: 225986 - RNA, 19 nt, Artificial Sequence
  Description of Artificial Sequence: Synthetic oligonucleotide
  Sense strand starting at position 1390 of SEQ ID NO: 2909
gugcuagaaccuccguguu

SEQ ID NO: 225987 - RNA, 19 nt, Artificial Sequence
  Description of Artificial Sequence: Synthetic oligonucleotide
  Antisense strand to SEQ ID NO: 225986
aacacggagguucuagcac

SEQ ID NO: 225988 - RNA, 19 nt, Artificial Sequence
  Description of Artificial Sequence: Synthetic oligonucleotide
  Sense strand starting at position 1454 of SEQ ID NO: 2909
gcaaguagagauggccuua

SEQ ID NO: 225989 - RNA, 19 nt, Artificial Sequence
  Description of Artificial Sequence: Synthetic oligonucleotide
  Antisense strand to SEQ ID NO: 225988
uaaggccaucucuacuugc

SEQ ID NO: 225990 - RNA, 19 nt, Artificial Sequence
  Description of Artificial Sequence: Synthetic oligonucleotide
  Sense strand starting at position 2249 of SEQ ID NO: 2909
gugcguucugggaauugug

SEQ ID NO: 225991 - RNA, 19 nt, Artificial Sequence
  Description of Artificial Sequence: Synthetic oligonucleotide
  Antisense strand to SEQ ID NO: 225990
cacaauucccagaacgcac

SEQ ID NO: 225992 - RNA, 19 nt, Artificial Sequence
  Description of Artificial Sequence: Synthetic oligonucleotide
  Sense strand starting at position 2348 of SEQ ID NO: 2909
cgagaagcuucuguauaaa

SEQ ID NO: 225993 - RNA, 19 nt, Artificial Sequence
  Description of Artificial Sequence: Synthetic oligonucleotide
  Antisense strand to SEQ ID NO: 225992
uuuauacagaagcuucucg

SEQ ID NO: 225994 - RNA, 19 nt, Artificial Sequence
  Description of Artificial Sequence: Synthetic oligonucleotide
  Sense strand starting at position 2351 of SEQ ID NO: 2909
gaagcuucuguauaaagua

SEQ ID NO: 225995 - RNA, 19 nt, Artificial Sequence
  Description of Artificial Sequence: Synthetic oligonucleotide
  Antisense strand to SEQ ID NO: 225994
uacuuuauacagaagcuuc

SEQ ID NO: 225996 - RNA, 19 nt, Artificial Sequence
  Description of Artificial Sequence: Synthetic oligonucleotide
  Sense strand starting at position 2404 of SEQ ID NO: 2909
uguguuauaguguaagauc

SEQ ID NO: 225997 - RNA, 19 nt, Artificial Sequence
  Description of Artificial Sequence: Synthetic oligonucleotide
  Antisense strand to SEQ ID NO: 225996
gaucuuacacuauaacaca

SEQ ID NO: 225998 - RNA, 19 nt, Artificial Sequence
  Description of Artificial Sequence: Synthetic oligonucleotide
  Sense strand starting at position 2413 of SEQ ID NO: 2909
guguaagaucuuugaccca

SEQ ID NO: 225999 - RNA, 19 nt, Artificial Sequence
  Description of Artificial Sequence: Synthetic oligonucleotide
  Antisense strand to SEQ ID NO: 225998
ugggucaaagaucuuacac

SEQ ID NO: 226000 - RNA, 19 nt, Artificial Sequence
  Description of Artificial Sequence: Synthetic oligonucleotide
  Sense strand starting at position 2426 of SEQ ID NO: 2909
gacccaauauuggcggaau

SEQ ID NO: 226001 - RNA, 19 nt, Artificial Sequence
  Description of Artificial Sequence: Synthetic oligonucleotide
  Antisense strand to SEQ ID NO: 226000
auuccgccaauauuggguc

SEQ ID NO: 226002 - RNA, 19 nt, Artificial Sequence
  Description of Artificial Sequence: Synthetic oligonucleotide
  Sense strand starting at position 2508 of SEQ ID NO: 2909
gaaguagacuguuuaggau

SEQ ID NO: 226003 - RNA, 19 nt, Artificial Sequence
  Description of Artificial Sequence: Synthetic oligonucleotide
  Antisense strand to SEQ ID NO: 226002
auccuaaacagucuacuuc

SEQ ID NO: 226004 - RNA, 19 nt, Artificial Sequence
  Description of Artificial Sequence: Synthetic oligonucleotide
  Sense strand starting at position 2888 of SEQ ID NO: 2909
agcuaacaccaagguaaua

SEQ ID NO: 226005 - RNA, 19 nt, Artificial Sequence
  Description of Artificial Sequence: Synthetic oligonucleotide
  Antisense strand to SEQ ID NO: 226004
uauuaccuugguguuagcu

SEQ ID NO: 226006 - RNA, 19 nt, Artificial Sequence
  Description of Artificial Sequence: Synthetic oligonucleotide
  Sense strand starting at position 2928 of SEQ ID NO: 2909
cugauuguucuagaaguuc

SEQ ID NO: 226007 - RNA, 19 nt, Artificial Sequence
  Description of Artificial Sequence: Synthetic oligonucleotide
  Antisense strand to SEQ ID NO: 226006
gaacuucuagaacaaucag

SEQ ID NO: 226008 - RNA, 19 nt, Artificial Sequence
  Description of Artificial Sequence: Synthetic oligonucleotide
  Sense strand starting at position 2945 of SEQ ID NO: 2909
ucuagauauugcccaaguc

SEQ ID NO: 226009 - RNA, 19 nt, Artificial Sequence
  Description of Artificial Sequence: Synthetic oligonucleotide
  Antisense strand to SEQ ID NO: 226008
gacuugggcaauaucuaga

SEQ ID NO: 226010 - RNA, 19 nt, Artificial Sequence
  Description of Artificial Sequence: Synthetic oligonucleotide
  Sense strand starting at position 2946 of SEQ ID NO: 2909
cuagauauugcccaagucu

SEQ ID NO: 226011 - RNA, 19 nt, Artificial Sequence
  Description of Artificial Sequence: Synthetic oligonucleotide
  Antisense strand to SEQ ID NO: 226010
agacuugggcaauaucuag

SEQ ID NO: 226012 - RNA, 19 nt, Artificial Sequence
  Description of Artificial Sequence: Synthetic oligonucleotide
  Sense strand starting at position 2954 of SEQ ID NO: 2909
ugcccaagucuagaaugaa

SEQ ID NO: 226013 - RNA, 19 nt, Artificial Sequence
  Description of Artificial Sequence: Synthetic oligonucleotide
  Antisense strand to SEQ ID NO: 226012
uucauucuagacuugggca

SEQ ID NO: 226014 - RNA, 19 nt, Artificial Sequence
  Description of Artificial Sequence: Synthetic oligonucleotide
  Sense strand starting at position 3611 of SEQ ID NO: 2909
ccuucuucucaagggagaa

SEQ ID NO: 226015 - RNA, 19 nt, Artificial Sequence
  Description of Artificial Sequence: Synthetic oligonucleotide
  Antisense strand to SEQ ID NO: 226014
uucucccuugagaagaagg

SEQ ID NO: 226016 - RNA, 19 nt, Artificial Sequence
  Description of Artificial Sequence: Synthetic oligonucleotide
  Sense strand starting at position 3630 of SEQ ID NO: 2909
aggacacucgcucaacuaa

SEQ ID NO: 226017 - RNA, 19 nt, Artificial Sequence
  Description of Artificial Sequence: Synthetic oligonucleotide
  Antisense strand to SEQ ID NO: 226016
uuaguugagcgaguguccu

SEQ ID NO: 226018 - RNA, 19 nt, Artificial Sequence
  Description of Artificial Sequence: Synthetic oligonucleotide
  Sense strand starting at position 3661 of SEQ ID NO: 2909
ccugacugaugguuuaacu

SEQ ID NO: 226019 - RNA, 19 nt, Artificial Sequence
  Description of Artificial Sequence: Synthetic oligonucleotide
  Antisense strand to SEQ ID NO: 226018
aguuaaaccaucagucagg

SEQ ID NO: 226020 - RNA, 19 nt, Artificial Sequence
  Description of Artificial Sequence: Synthetic oligonucleotide
  Sense strand starting at position 3776 of SEQ ID NO: 2909
ggagcaucuguauaaugau

SEQ ID NO: 226021 - RNA, 19 nt, Artificial Sequence
  Description of Artificial Sequence: Synthetic oligonucleotide
  Antisense strand to SEQ ID NO: 226020
aucauuauacagaugcucc

SEQ ID NO: 226022 - RNA, 19 nt, Artificial Sequence
  Description of Artificial Sequence: Synthetic oligonucleotide
  Sense strand starting at position 3783 of SEQ ID NO: 2909
cuguauaaugauggaauua

SEQ ID NO: 226023 - RNA, 19 nt, Artificial Sequence
  Description of Artificial Sequence: Synthetic oligonucleotide
  Antisense strand to SEQ ID NO: 226022
uaauuccaucauuauacag

SEQ ID NO: 226024 - RNA, 19 nt, Artificial Sequence
  Description of Artificial Sequence: Synthetic oligonucleotide
  Sense strand starting at position 3866 of SEQ ID NO: 2909
agagcuaagucuuugauuc

SEQ ID NO: 226025 - RNA, 19 nt, Artificial Sequence
  Description of Artificial Sequence: Synthetic oligonucleotide
  Antisense strand to SEQ ID NO: 226024
gaaucaaagacuuagcucu

SEQ ID NO: 226026 - RNA, 19 nt, Artificial Sequence
  Description of Artificial Sequence: Synthetic oligonucleotide
  Sense strand starting at position 654 of SEQ ID NO: 2911
uuaauuaaagccuaaguga

SEQ ID NO: 226027 - RNA, 19 nt, Artificial Sequence
  Description of Artificial Sequence: Synthetic oligonucleotide
  Antisense strand to SEQ ID NO: 226026
ucacuuaggcuuuaauuaa

SEQ ID NO: 226028 - RNA, 19 nt, Artificial Sequence
  Description of Artificial Sequence: Synthetic oligonucleotide
  Sense strand starting at position 898 of SEQ ID NO: 2911
gaguaucagcuuuauagga

SEQ ID NO: 226029 - RNA, 19 nt, Artificial Sequence
  Description of Artificial Sequence: Synthetic oligonucleotide
  Antisense strand to SEQ ID NO: 226028
uccuauaaagcugauacuc

SEQ ID NO: 226030 - RNA, 19 nt, Artificial Sequence
  Description of Artificial Sequence: Synthetic oligonucleotide
  Sense strand starting at position 950 of SEQ ID NO: 2911
gggcauggccuauacaauu

SEQ ID NO: 226031 - RNA, 19 nt, Artificial Sequence
  Description of Artificial Sequence: Synthetic oligonucleotide
  Antisense strand to SEQ ID NO: 226030
aauuguauaggccaugccc

SEQ ID NO: 226032 - RNA, 19 nt, Artificial Sequence
  Description of Artificial Sequence: Synthetic oligonucleotide
  Sense strand starting at position 1148 of SEQ ID NO: 2911
aggaucugcuuuccaaaua

SEQ ID NO: 226033 - RNA, 19 nt, Artificial Sequence
  Description of Artificial Sequence: Synthetic oligonucleotide
  Antisense strand to SEQ ID NO: 226032
uauuuggaaagcagauccu

SEQ ID NO: 226034 - RNA, 19 nt, Artificial Sequence
  Description of Artificial Sequence: Synthetic oligonucleotide
  Sense strand starting at position 1213 of SEQ ID NO: 2911
ugcggaaaucgggaaguau

SEQ ID NO: 226035 - RNA, 19 nt, Artificial Sequence
  Description of Artificial Sequence: Synthetic oligonucleotide
  Antisense strand to SEQ ID NO: 226034
auacuucccgauuuccgca

SEQ ID NO: 226036 - RNA, 19 nt, Artificial Sequence
  Description of Artificial Sequence: Synthetic oligonucleotide
  Sense strand starting at position 1252 of SEQ ID NO: 2911
ccaauuaucccuugaugga

SEQ ID NO: 226037 - RNA, 19 nt, Artificial Sequence
  Description of Artificial Sequence: Synthetic oligonucleotide
  Antisense strand to SEQ ID NO: 226036
uccaucaagggauaauugg

SEQ ID NO: 226038 - RNA, 19 nt, Artificial Sequence
  Description of Artificial Sequence: Synthetic oligonucleotide
  Sense strand starting at position 1310 of SEQ ID NO: 2911
gauuuauccugcucuguga

SEQ ID NO: 226039 - RNA, 19 nt, Artificial Sequence
  Description of Artificial Sequence: Synthetic oligonucleotide
  Antisense strand to SEQ ID NO: 226038
ucacagagcaggauaaauc

SEQ ID NO: 226040 - RNA, 19 nt, Artificial Sequence
  Description of Artificial Sequence: Synthetic oligonucleotide
  Sense strand starting at position 1437 of SEQ ID NO: 2911
gcuagaauauaguuuacaa

SEQ ID NO: 226041 - RNA, 19 nt, Artificial Sequence
  Description of Artificial Sequence: Synthetic oligonucleotide
  Antisense strand to SEQ ID NO: 226040
uuguaaacuauauucuagc

SEQ ID NO: 226042 - RNA, 19 nt, Artificial Sequence
  Description of Artificial Sequence: Synthetic oligonucleotide
  Sense strand starting at position 1832 of SEQ ID NO: 2911
gcuuccucucuccaggaau

SEQ ID NO: 226043 - RNA, 19 nt, Artificial Sequence
  Description of Artificial Sequence: Synthetic oligonucleotide
  Antisense strand to SEQ ID NO: 226042
auuccuggagagaggaagc

SEQ ID NO: 226044 - RNA, 19 nt, Artificial Sequence
  Description of Artificial Sequence: Synthetic oligonucleotide
  Sense strand starting at position 2174 of SEQ ID NO: 2911
guuacaaaccugggaucua

SEQ ID NO: 226045 - RNA, 19 nt, Artificial Sequence
  Description of Artificial Sequence: Synthetic oligonucleotide
  Antisense strand to SEQ ID NO: 226044
uagaucccagguuuguaac

SEQ ID NO: 226046 - RNA, 19 nt, Artificial Sequence
  Description of Artificial Sequence: Synthetic oligonucleotide
  Sense strand starting at position 2305 of SEQ ID NO: 2911
uuaggaauagaggguguaa

SEQ ID NO: 226047 - RNA, 19 nt, Artificial Sequence
  Description of Artificial Sequence: Synthetic oligonucleotide
  Antisense strand to SEQ ID NO: 226046
uuacacccucuauuccuaa

SEQ ID NO: 226048 - RNA, 19 nt, Artificial Sequence
  Description of Artificial Sequence: Synthetic oligonucleotide
  Sense strand starting at position 2561 of SEQ ID NO: 2911
uuuauagaucugcaggagu

SEQ ID NO: 226049 - RNA, 19 nt, Artificial Sequence
  Description of Artificial Sequence: Synthetic oligonucleotide
  Antisense strand to SEQ ID NO: 226048
acuccugcagaucuauaaa

SEQ ID NO: 226050 - RNA, 19 nt, Artificial Sequence
  Description of Artificial Sequence: Synthetic oligonucleotide
  Sense strand starting at position 2631 of SEQ ID NO: 2911
ggcccuaugcuacacagaa

SEQ ID NO: 226051 - RNA, 19 nt, Artificial Sequence
  Description of Artificial Sequence: Synthetic oligonucleotide
  Antisense strand to SEQ ID NO: 226050
uucuguguagcauagggcc

SEQ ID NO: 226052 - RNA, 19 nt, Artificial Sequence
  Description of Artificial Sequence: Synthetic oligonucleotide
  Sense strand starting at position 2724 of SEQ ID NO: 2911
uaaggaagugagugaucua

SEQ ID NO: 226053 - RNA, 19 nt, Artificial Sequence
  Description of Artificial Sequence: Synthetic oligonucleotide
  Antisense strand to SEQ ID NO: 226052
uagaucacucacuuccuua

SEQ ID NO: 226054 - RNA, 19 nt, Artificial Sequence
  Description of Artificial Sequence: Synthetic oligonucleotide
  Sense strand starting at position 2727 of SEQ ID NO: 2911
ggaagugagugaucuaaac

SEQ ID NO: 226055 - RNA, 19 nt, Artificial Sequence
  Description of Artificial Sequence: Synthetic oligonucleotide
  Antisense strand to SEQ ID NO: 226054
guuuagaucacucacuucc

SEQ ID NO: 226056 - RNA, 19 nt, Artificial Sequence
  Description of Artificial Sequence: Synthetic oligonucleotide
  Sense strand starting at position 2773 of SEQ ID NO: 2911
gagggcaagugaccaauua

SEQ ID NO: 226057 - RNA, 19 nt, Artificial Sequence
  Description of Artificial Sequence: Synthetic oligonucleotide
  Antisense strand to SEQ ID NO: 226056
uaauuggucacuugcccuc

SEQ ID NO: 226058 - RNA, 19 nt, Artificial Sequence
  Description of Artificial Sequence: Synthetic oligonucleotide
  Sense strand starting at position 2784 of SEQ ID NO: 2911
accaauuaugccugaagga

SEQ ID NO: 226059 - RNA, 19 nt, Artificial Sequence
  Description of Artificial Sequence: Synthetic oligonucleotide
  Antisense strand to SEQ ID NO: 226058
uccuucaggcauaauuggu

SEQ ID NO: 226060 - RNA, 19 nt, Artificial Sequence
  Description of Artificial Sequence: Synthetic oligonucleotide
  Sense strand starting at position 2810 of SEQ ID NO: 2911
aaaccauggcacugauagu

SEQ ID NO: 226061 - RNA, 19 nt, Artificial Sequence
  Description of Artificial Sequence: Synthetic oligonucleotide
  Antisense strand to SEQ ID NO: 226060
acuaucagugccaugguuu

SEQ ID NO: 226062 - RNA, 19 nt, Artificial Sequence
  Description of Artificial Sequence: Synthetic oligonucleotide
  Sense strand starting at position 2825 of SEQ ID NO: 2911
uaguauuuggucuguauug

SEQ ID NO: 226063 - RNA, 19 nt, Artificial Sequence
  Description of Artificial Sequence: Synthetic oligonucleotide
  Antisense strand to SEQ ID NO: 226062
caauacagaccaaauacua

SEQ ID NO: 226064 - RNA, 19 nt, Artificial Sequence
  Description of Artificial Sequence: Synthetic oligonucleotide
  Sense strand starting at position 2840 of SEQ ID NO: 2911
auugaaugcugaguagacu

SEQ ID NO: 226065 - RNA, 19 nt, Artificial Sequence
  Description of Artificial Sequence: Synthetic oligonucleotide
  Antisense strand to SEQ ID NO: 226064
agucuacucagcauucaau

SEQ ID NO: 226066 - RNA, 19 nt, Artificial Sequence
  Description of Artificial Sequence: Synthetic oligonucleotide
  Sense strand starting at position 2872 of SEQ ID NO: 2911
cuaagaugcccugaauauu

SEQ ID NO: 226067 - RNA, 19 nt, Artificial Sequence
  Description of Artificial Sequence: Synthetic oligonucleotide
  Antisense strand to SEQ ID NO: 226066
aauauucagggcaucuuag

SEQ ID NO: 226068 - RNA, 19 nt, Artificial Sequence
  Description of Artificial Sequence: Synthetic oligonucleotide
  Sense strand starting at position 2919 of SEQ ID NO: 2911
uacuauucggcuugauuuc

SEQ ID NO: 226069 - RNA, 19 nt, Artificial Sequence
  Description of Artificial Sequence: Synthetic oligonucleotide
  Antisense strand to SEQ ID NO: 226068
gaaaucaagccgaauagua

SEQ ID NO: 226070 - RNA, 19 nt, Artificial Sequence
  Description of Artificial Sequence: Synthetic oligonucleotide
  Sense strand starting at position 2962 of SEQ ID NO: 2911
ggcuuuggcgugagaugga

SEQ ID NO: 226071 - RNA, 19 nt, Artificial Sequence
  Description of Artificial Sequence: Synthetic oligonucleotide
  Antisense strand to SEQ ID NO: 226070
uccaucucacgccaaagcc

SEQ ID NO: 226072 - RNA, 19 nt, Artificial Sequence
  Description of Artificial Sequence: Synthetic oligonucleotide
  Sense strand starting at position 3034 of SEQ ID NO: 2911
ucggguaaaucacugaauu

SEQ ID NO: 226073 - RNA, 19 nt, Artificial Sequence
  Description of Artificial Sequence: Synthetic oligonucleotide
  Antisense strand to SEQ ID NO: 226072
aauucagugauuuacccga

SEQ ID NO: 226074 - RNA, 19 nt, Artificial Sequence
  Description of Artificial Sequence: Synthetic oligonucleotide
  Sense strand starting at position 3059 of SEQ ID NO: 2911
ccuguaaagcgggaaagau

SEQ ID NO: 226075 - RNA, 19 nt, Artificial Sequence
  Description of Artificial Sequence: Synthetic oligonucleotide
  Antisense strand to SEQ ID NO: 226074
aucuuucccgcuuuacagg

SEQ ID NO: 226076 - RNA, 19 nt, Artificial Sequence
  Description of Artificial Sequence: Synthetic oligonucleotide
  Sense strand starting at position 3123 of SEQ ID NO: 2911
gggugucugacacauuaua

SEQ ID NO: 226077 - RNA, 19 nt, Artificial Sequence
  Description of Artificial Sequence: Synthetic oligonucleotide
  Antisense strand to SEQ ID NO: 226076
uauaaugugucagacaccc

SEQ ID NO: 226078 - RNA, 19 nt, Artificial Sequence
  Description of Artificial Sequence: Synthetic oligonucleotide
  Sense strand starting at position 3227 of SEQ ID NO: 2911
caaggcugaugguugauaa

SEQ ID NO: 226079 - RNA, 19 nt, Artificial Sequence
  Description of Artificial Sequence: Synthetic oligonucleotide
  Antisense strand to SEQ ID NO: 226078
uuaucaaccaucagccuug

SEQ ID NO: 226080 - RNA, 19 nt, Artificial Sequence
  Description of Artificial Sequence: Synthetic oligonucleotide
  Sense strand starting at position 3228 of SEQ ID NO: 2911
aaggcugaugguugauaaa

SEQ ID NO: 226081 - RNA, 19 nt, Artificial Sequence
  Description of Artificial Sequence: Synthetic oligonucleotide
  Antisense strand to SEQ ID NO: 226080
uuuaucaaccaucagccuu

SEQ ID NO: 226082 - RNA, 19 nt, Artificial Sequence
  Description of Artificial Sequence: Synthetic oligonucleotide
  Sense strand starting at position 3353 of SEQ ID NO: 2911
gggaguagagcucaccgaa

SEQ ID NO: 226083 - RNA, 19 nt, Artificial Sequence
  Description of Artificial Sequence: Synthetic oligonucleotide
  Antisense strand to SEQ ID NO: 226082
uucggugagcucuacuccc

SEQ ID NO: 226084 - RNA, 19 nt, Artificial Sequence
  Description of Artificial Sequence: Synthetic oligonucleotide
  Sense strand starting at position 3594 of SEQ ID NO: 2911
cuauguacugggcacaaua

SEQ ID NO: 226085 - RNA, 19 nt, Artificial Sequence
  Description of Artificial Sequence: Synthetic oligonucleotide
  Antisense strand to SEQ ID NO: 226084
uauugugcccaguacauag

SEQ ID NO: 226086 - RNA, 19 nt, Artificial Sequence
  Description of Artificial Sequence: Synthetic oligonucleotide
  Sense strand starting at position 3606 of SEQ ID NO: 2911
cacaauacucaguacgagu

SEQ ID NO: 226087 - RNA, 19 nt, Artificial Sequence
  Description of Artificial Sequence: Synthetic oligonucleotide
  Antisense strand to SEQ ID NO: 226086
acucguacugaguauugug

SEQ ID NO: 226088 - RNA, 19 nt, Artificial Sequence
  Description of Artificial Sequence: Synthetic oligonucleotide
  Sense strand starting at position 3633 of SEQ ID NO: 2911
aguacacuuguuugaauaa

SEQ ID NO: 226089 - RNA, 19 nt, Artificial Sequence
  Description of Artificial Sequence: Synthetic oligonucleotide
  Antisense strand to SEQ ID NO: 226088
uuauucaaacaaguguacu

SEQ ID NO: 226090 - RNA, 19 nt, Artificial Sequence
  Description of Artificial Sequence: Synthetic oligonucleotide
  Sense strand starting at position 3654 of SEQ ID NO: 2911
gggagagguguuugaagga

SEQ ID NO: 226091 - RNA, 19 nt, Artificial Sequence
  Description of Artificial Sequence: Synthetic oligonucleotide
  Antisense strand to SEQ ID NO: 226090
uccuucaaacaccucuccc

SEQ ID NO: 226092 - RNA, 19 nt, Artificial Sequence
  Description of Artificial Sequence: Synthetic oligonucleotide
  Sense strand starting at position 3715 of SEQ ID NO: 2911
ccugaucagcagcauugau

SEQ ID NO: 226093 - RNA, 19 nt, Artificial Sequence
  Description of Artificial Sequence: Synthetic oligonucleotide
  Antisense strand to SEQ ID NO: 226092
aucaaugcugcugaucagg

SEQ ID NO: 226094 - RNA, 19 nt, Artificial Sequence
  Description of Artificial Sequence: Synthetic oligonucleotide
  Sense strand starting at position 3812 of SEQ ID NO: 2911
gggcaaagaaagugacuuu

SEQ ID NO: 226095 - RNA, 19 nt, Artificial Sequence
  Description of Artificial Sequence: Synthetic oligonucleotide
  Antisense strand to SEQ ID NO: 226094
aaagucacuuucuuugccc

SEQ ID NO: 226096 - RNA, 19 nt, Artificial Sequence
  Description of Artificial Sequence: Synthetic oligonucleotide
  Sense strand starting at position 3824 of SEQ ID NO: 2911
ugacuuuccuggguagaug

SEQ ID NO: 226097 - RNA, 19 nt, Artificial Sequence
  Description of Artificial Sequence: Synthetic oligonucleotide
  Antisense strand to SEQ ID NO: 226096
caucuacccaggaaaguca

SEQ ID NO: 226098 - RNA, 19 nt, Artificial Sequence
  Description of Artificial Sequence: Synthetic oligonucleotide
  Sense strand starting at position 3838 of SEQ ID NO: 2911
agaugaagauuguucuuaa

SEQ ID NO: 226099 - RNA, 19 nt, Artificial Sequence
  Description of Artificial Sequence: Synthetic oligonucleotide
  Antisense strand to SEQ ID NO: 226098
uuaagaacaaucuucaucu

SEQ ID NO: 226100 - RNA, 19 nt, Artificial Sequence
  Description of Artificial Sequence: Synthetic oligonucleotide
  Sense strand starting at position 3839 of SEQ ID NO: 2911
gaugaagauuguucuuaag

SEQ ID NO: 226101 - RNA, 19 nt, Artificial Sequence
  Description of Artificial Sequence: Synthetic oligonucleotide
  Antisense strand to SEQ ID NO: 226100
cuuaagaacaaucuucauc

SEQ ID NO: 226102 - RNA, 19 nt, Artificial Sequence
  Description of Artificial Sequence: Synthetic oligonucleotide
  Sense strand starting at position 3892 of SEQ ID NO: 2911
ugcuuucuggauggaauga

SEQ ID NO: 226103 - RNA, 19 nt, Artificial Sequence
  Description of Artificial Sequence: Synthetic oligonucleotide
  Antisense strand to SEQ ID NO: 226102
ucauuccauccagaaagca

SEQ ID NO: 226104 - RNA, 19 nt, Artificial Sequence
  Description of Artificial Sequence: Synthetic oligonucleotide
  Sense strand starting at position 3942 of SEQ ID NO: 2911
ggauguauuugggaaacug

SEQ ID NO: 226105 - RNA, 19 nt, Artificial Sequence
  Description of Artificial Sequence: Synthetic oligonucleotide
  Antisense strand to SEQ ID NO: 226104
caguuucccaaauacaucc

SEQ ID NO: 226106 - RNA, 19 nt, Artificial Sequence
  Description of Artificial Sequence: Synthetic oligonucleotide
  Sense strand starting at position 466 of SEQ ID NO: 2913
cugggaucauaugugcaga

SEQ ID NO: 226107 - RNA, 19 nt, Artificial Sequence
  Description of Artificial Sequence: Synthetic oligonucleotide
  Antisense strand to SEQ ID NO: 226106
ucugcacauaugaucccag

SEQ ID NO: 226108 - RNA, 19 nt, Artificial Sequence
  Description of Artificial Sequence: Synthetic oligonucleotide
  Sense strand starting at position 467 of SEQ ID NO: 2913
ugggaucauaugugcagau

SEQ ID NO: 226109 - RNA, 19 nt, Artificial Sequence
  Description of Artificial Sequence: Synthetic oligonucleotide
  Antisense strand to SEQ ID NO: 226108
aucugcacauaugauccca

SEQ ID NO: 226110 - RNA, 19 nt, Artificial Sequence
  Description of Artificial Sequence: Synthetic oligonucleotide
  Sense strand starting at position 504 of SEQ ID NO: 2913
uauccaggagcuugugaaa

SEQ ID NO: 226111 - RNA, 19 nt, Artificial Sequence
  Description of Artificial Sequence: Synthetic oligonucleotide
  Antisense strand to SEQ ID NO: 226110
uuucacaagcuccuggaua

SEQ ID NO: 226112 - RNA, 19 nt, Artificial Sequence
  Description of Artificial Sequence: Synthetic oligonucleotide
  Sense strand starting at position 515 of SEQ ID NO: 2913
uugugaaacugugcugaau

SEQ ID NO: 226113 - RNA, 19 nt, Artificial Sequence
  Description of Artificial Sequence: Synthetic oligonucleotide
  Antisense strand to SEQ ID NO: 226112
auucagcacaguuucacaa

SEQ ID NO: 226114 - RNA, 19 nt, Artificial Sequence
  Description of Artificial Sequence: Synthetic oligonucleotide
  Sense strand starting at position 524 of SEQ ID NO: 2913
ugugcugaauggccagaaa

SEQ ID NO: 226115 - RNA, 19 nt, Artificial Sequence
  Description of Artificial Sequence: Synthetic oligonucleotide
  Antisense strand to SEQ ID NO: 226114
uuucuggccauucagcaca

SEQ ID NO: 226116 - RNA, 19 nt, Artificial Sequence
  Description of Artificial Sequence: Synthetic oligonucleotide
  Sense strand starting at position 527 of SEQ ID NO: 2913
gcugaauggccagaaacca

SEQ ID NO: 226117 - RNA, 19 nt, Artificial Sequence
  Description of Artificial Sequence: Synthetic oligonucleotide
  Antisense strand to SEQ ID NO: 226116
ugguuucuggccauucagc

SEQ ID NO: 226118 - RNA, 19 nt, Artificial Sequence
  Description of Artificial Sequence: Synthetic oligonucleotide
  Sense strand starting at position 561 of SEQ ID NO: 2913
ucuggaagucugggaugua

SEQ ID NO: 226119 - RNA, 19 nt, Artificial Sequence
  Description of Artificial Sequence: Synthetic oligonucleotide
  Antisense strand to SEQ ID NO: 226118
uacaucccagacuuccaga

SEQ ID NO: 226120 - RNA, 19 nt, Artificial Sequence
  Description of Artificial Sequence: Synthetic oligonucleotide
  Sense strand starting at position 564 of SEQ ID NO: 2913
ggaagucugggauguaguu

SEQ ID NO: 226121 - RNA, 19 nt, Artificial Sequence
  Description of Artificial Sequence: Synthetic oligonucleotide
  Antisense strand to SEQ ID NO: 226120
aacuacaucccagacuucc

SEQ ID NO: 226122 - RNA, 19 nt, Artificial Sequence
  Description of Artificial Sequence: Synthetic oligonucleotide
  Sense strand starting at position 570 of SEQ ID NO: 2913
cugggauguaguuagaagu

SEQ ID NO: 226123 - RNA, 19 nt, Artificial Sequence
  Description of Artificial Sequence: Synthetic oligonucleotide
  Antisense strand to SEQ ID NO: 226122
acuucuaacuacaucccag

SEQ ID NO: 226124 - RNA, 19 nt, Artificial Sequence
  Description of Artificial Sequence: Synthetic oligonucleotide
  Sense strand starting at position 577 of SEQ ID NO: 2913
guaguuagaagucagaucu

SEQ ID NO: 226125 - RNA, 19 nt, Artificial Sequence
  Description of Artificial Sequence: Synthetic oligonucleotide
  Antisense strand to SEQ ID NO: 226124
agaucugacuucuaacuac

SEQ ID NO: 226126 - RNA, 19 nt, Artificial Sequence
  Description of Artificial Sequence: Synthetic oligonucleotide
  Sense strand starting at position 746 of SEQ ID NO: 2913
ccugaaggguuccuggaga

SEQ ID NO: 226127 - RNA, 19 nt, Artificial Sequence
  Description of Artificial Sequence: Synthetic oligonucleotide
  Antisense strand to SEQ ID NO: 226126
ucuccaggaacccuucagg

SEQ ID NO: 226128 - RNA, 19 nt, Artificial Sequence
  Description of Artificial Sequence: Synthetic oligonucleotide
  Sense strand starting at position 875 of SEQ ID NO: 2913
gaggccucacucugaugau

SEQ ID NO: 226129 - RNA, 19 nt, Artificial Sequence
  Description of Artificial Sequence: Synthetic oligonucleotide
  Antisense strand to SEQ ID NO: 226128
aucaucagagugaggccuc

SEQ ID NO: 226130 - RNA, 19 nt, Artificial Sequence
  Description of Artificial Sequence: Synthetic oligonucleotide
  Sense strand starting at position 1132 of SEQ ID NO: 2913
ggaagagagcuggguuaua

SEQ ID NO: 226131 - RNA, 19 nt, Artificial Sequence
  Description of Artificial Sequence: Synthetic oligonucleotide
  Antisense strand to SEQ ID NO: 226130
uauaacccagcucucuucc

SEQ ID NO: 226132 - RNA, 19 nt, Artificial Sequence
  Description of Artificial Sequence: Synthetic oligonucleotide
  Sense strand starting at position 2053 of SEQ ID NO: 2913
cgcucuuggacaggagaaa

SEQ ID NO: 226133 - RNA, 19 nt, Artificial Sequence
  Description of Artificial Sequence: Synthetic oligonucleotide
  Antisense strand to SEQ ID NO: 226132
uuucuccuguccaagagcg

SEQ ID NO: 226134 - RNA, 19 nt, Artificial Sequence
  Description of Artificial Sequence: Synthetic oligonucleotide
  Sense strand starting at position 2106 of SEQ ID NO: 2913
cugagugcugcgccaaauc

SEQ ID NO: 226135 - RNA, 19 nt, Artificial Sequence
  Description of Artificial Sequence: Synthetic oligonucleotide
  Antisense strand to SEQ ID NO: 226134
gauuuggcgcagcacucag

SEQ ID NO: 226136 - RNA, 19 nt, Artificial Sequence
  Description of Artificial Sequence: Synthetic oligonucleotide
  Sense strand starting at position 2151 of SEQ ID NO: 2913
ggagcagucucuccagaac

SEQ ID NO: 226137 - RNA, 19 nt, Artificial Sequence
  Description of Artificial Sequence: Synthetic oligonucleotide
  Antisense strand to SEQ ID NO: 226136
guucuggagagacugcucc

SEQ ID NO: 226138 - RNA, 19 nt, Artificial Sequence
  Description of Artificial Sequence: Synthetic oligonucleotide
  Sense strand starting at position 2154 of SEQ ID NO: 2913
gcagucucuccagaacuca

SEQ ID NO: 226139 - RNA, 19 nt, Artificial Sequence
  Description of Artificial Sequence: Synthetic oligonucleotide
  Antisense strand to SEQ ID NO: 226138
ugaguucuggagagacugc

SEQ ID NO: 226140 - RNA, 19 nt, Artificial Sequence
  Description of Artificial Sequence: Synthetic oligonucleotide
  Sense strand starting at position 2210 of SEQ ID NO: 2913
ggccucuuucccuaagaga

SEQ ID NO: 226141 - RNA, 19 nt, Artificial Sequence
  Description of Artificial Sequence: Synthetic oligonucleotide
  Antisense strand to SEQ ID NO: 226140
ucucuuagggaaagaggcc

SEQ ID NO: 226142 - RNA, 19 nt, Artificial Sequence
  Description of Artificial Sequence: Synthetic oligonucleotide
  Sense strand starting at position 2221 of SEQ ID NO: 2913
cuaagagaagccuggaguu

SEQ ID NO: 226143 - RNA, 19 nt, Artificial Sequence
  Description of Artificial Sequence: Synthetic oligonucleotide
  Antisense strand to SEQ ID NO: 226142
aacuccaggcuucucuuag

SEQ ID NO: 226144 - RNA, 19 nt, Artificial Sequence
  Description of Artificial Sequence: Synthetic oligonucleotide
  Sense strand starting at position 2227 of SEQ ID NO: 2913
gaagccuggaguugagaau

SEQ ID NO: 226145 - RNA, 19 nt, Artificial Sequence
  Description of Artificial Sequence: Synthetic oligonucleotide
  Antisense strand to SEQ ID NO: 226144
auucucaacuccaggcuuc

SEQ ID NO: 226146 - RNA, 19 nt, Artificial Sequence
  Description of Artificial Sequence: Synthetic oligonucleotide
  Sense strand starting at position 2342 of SEQ ID NO: 2913
agaaaucucugguucugaa

SEQ ID NO: 226147 - RNA, 19 nt, Artificial Sequence
  Description of Artificial Sequence: Synthetic oligonucleotide
  Antisense strand to SEQ ID NO: 226146
uucagaaccagagauuucu

SEQ ID NO: 226148 - RNA, 19 nt, Artificial Sequence
  Description of Artificial Sequence: Synthetic oligonucleotide
  Sense strand starting at position 2444 of SEQ ID NO: 2913
uuauauaucugaguguaga

SEQ ID NO: 226149 - RNA, 19 nt, Artificial Sequence
  Description of Artificial Sequence: Synthetic oligonucleotide
  Antisense strand to SEQ ID NO: 226148
ucuacacucagauauauaa

SEQ ID NO: 226150 - RNA, 19 nt, Artificial Sequence
  Description of Artificial Sequence: Synthetic oligonucleotide
  Sense strand starting at position 2445 of SEQ ID NO: 2913
uauauaucugaguguagaa

SEQ ID NO: 226151 - RNA, 19 nt, Artificial Sequence
  Description of Artificial Sequence: Synthetic oligonucleotide
  Antisense strand to SEQ ID NO: 226150
uucuacacucagauauaua

SEQ ID NO: 226152 - RNA, 19 nt, Artificial Sequence
  Description of Artificial Sequence: Synthetic oligonucleotide
  Sense strand starting at position 2539 of SEQ ID NO: 2913
cuauauaauugucugucau

SEQ ID NO: 226153 - RNA, 19 nt, Artificial Sequence
  Description of Artificial Sequence: Synthetic oligonucleotide
  Antisense strand to SEQ ID NO: 226152
augacagacaauuauauag

SEQ ID NO: 226154 - RNA, 19 nt, Artificial Sequence
  Description of Artificial Sequence: Synthetic oligonucleotide
  Sense strand starting at position 2547 of SEQ ID NO: 2913
uugucugucauaugaaugu

SEQ ID NO: 226155 - RNA, 19 nt, Artificial Sequence
  Description of Artificial Sequence: Synthetic oligonucleotide
  Antisense strand to SEQ ID NO: 226154
acauucauaugacagacaa

SEQ ID NO: 226156 - RNA, 19 nt, Artificial Sequence
  Description of Artificial Sequence: Synthetic oligonucleotide
  Sense strand starting at position 2551 of SEQ ID NO: 2913
cugucauaugaauguacua

SEQ ID NO: 226157 - RNA, 19 nt, Artificial Sequence
  Description of Artificial Sequence: Synthetic oligonucleotide
  Antisense strand to SEQ ID NO: 226156
uaguacauucauaugacag

SEQ ID NO: 226158 - RNA, 19 nt, Artificial Sequence
  Description of Artificial Sequence: Synthetic oligonucleotide
  Sense strand starting at position 2766 of SEQ ID NO: 2913
ugccuuccugcagauagau

SEQ ID NO: 226159 - RNA, 19 nt, Artificial Sequence
  Description of Artificial Sequence: Synthetic oligonucleotide
  Antisense strand to SEQ ID NO: 226158
aucuaucugcaggaaggca

SEQ ID NO: 226160 - RNA, 19 nt, Artificial Sequence
  Description of Artificial Sequence: Synthetic oligonucleotide
  Sense strand starting at position 3023 of SEQ ID NO: 2913
cacuuaggguccuucugua

SEQ ID NO: 226161 - RNA, 19 nt, Artificial Sequence
  Description of Artificial Sequence: Synthetic oligonucleotide
  Antisense strand to SEQ ID NO: 226160
uacagaaggacccuaagug

SEQ ID NO: 226162 - RNA, 19 nt, Artificial Sequence
  Description of Artificial Sequence: Synthetic oligonucleotide
  Sense strand starting at position 3226 of SEQ ID NO: 2913
guguuaugggcugaauuag

SEQ ID NO: 226163 - RNA, 19 nt, Artificial Sequence
  Description of Artificial Sequence: Synthetic oligonucleotide
  Antisense strand to SEQ ID NO: 226162
cuaauucagcccauaacac

SEQ ID NO: 226164 - RNA, 19 nt, Artificial Sequence
  Description of Artificial Sequence: Synthetic oligonucleotide
  Sense strand starting at position 3237 of SEQ ID NO: 2913
ugaauuagguccucucgaa

SEQ ID NO: 226165 - RNA, 19 nt, Artificial Sequence
  Description of Artificial Sequence: Synthetic oligonucleotide
  Antisense strand to SEQ ID NO: 226164
uucgagaggaccuaauuca

SEQ ID NO: 226166 - RNA, 19 nt, Artificial Sequence
  Description of Artificial Sequence: Synthetic oligonucleotide
  Sense strand starting at position 3249 of SEQ ID NO: 2913
ucucgaaauuucuauguga

SEQ ID NO: 226167 - RNA, 19 nt, Artificial Sequence
  Description of Artificial Sequence: Synthetic oligonucleotide
  Antisense strand to SEQ ID NO: 226166
ucacauagaaauuucgaga

SEQ ID NO: 226168 - RNA, 19 nt, Artificial Sequence
  Description of Artificial Sequence: Synthetic oligonucleotide
  Sense strand starting at position 3285 of SEQ ID NO: 2913
cuuggaaugugauucuacu

SEQ ID NO: 226169 - RNA, 19 nt, Artificial Sequence
  Description of Artificial Sequence: Synthetic oligonucleotide
  Antisense strand to SEQ ID NO: 226168
aguagaaucacauuccaag

SEQ ID NO: 226170 - RNA, 19 nt, Artificial Sequence
  Description of Artificial Sequence: Synthetic oligonucleotide
  Sense strand starting at position 3291 of SEQ ID NO: 2913
augugauucuacuuagaga

SEQ ID NO: 226171 - RNA, 19 nt, Artificial Sequence
  Description of Artificial Sequence: Synthetic oligonucleotide
  Antisense strand to SEQ ID NO: 226170
ucucuaaguagaaucacau

SEQ ID NO: 226172 - RNA, 19 nt, Artificial Sequence
  Description of Artificial Sequence: Synthetic oligonucleotide
  Sense strand starting at position 3344 of SEQ ID NO: 2913
ggucauuagggucauccaa

SEQ ID NO: 226173 - RNA, 19 nt, Artificial Sequence
  Description of Artificial Sequence: Synthetic oligonucleotide
  Antisense strand to SEQ ID NO: 226172
uuggaugacccuaaugacc

SEQ ID NO: 226174 - RNA, 19 nt, Artificial Sequence
  Description of Artificial Sequence: Synthetic oligonucleotide
  Sense strand starting at position 3346 of SEQ ID NO: 2913
ucauuagggucauccaauc

SEQ ID NO: 226175 - RNA, 19 nt, Artificial Sequence
  Description of Artificial Sequence: Synthetic oligonucleotide
  Antisense strand to SEQ ID NO: 226174
gauuggaugacccuaauga

SEQ ID NO: 226176 - RNA, 19 nt, Artificial Sequence
  Description of Artificial Sequence: Synthetic oligonucleotide
  Sense strand starting at position 3414 of SEQ ID NO: 2913
gaugcaugcacgcagagaa

SEQ ID NO: 226177 - RNA, 19 nt, Artificial Sequence
  Description of Artificial Sequence: Synthetic oligonucleotide
  Antisense strand to SEQ ID NO: 226176
uucucugcgugcaugcauc

SEQ ID NO: 226178 - RNA, 19 nt, Artificial Sequence
  Description of Artificial Sequence: Synthetic oligonucleotide
  Sense strand starting at position 3657 of SEQ ID NO: 2913
gagggaaacugacacuuau

SEQ ID NO: 226179 - RNA, 19 nt, Artificial Sequence
  Description of Artificial Sequence: Synthetic oligonucleotide
  Antisense strand to SEQ ID NO: 226178
auaagugucaguuucccuc

SEQ ID NO: 226180 - RNA, 19 nt, Artificial Sequence
  Description of Artificial Sequence: Synthetic oligonucleotide
  Sense strand starting at position 3677 of SEQ ID NO: 2913
gaauaaucacgucagucac

SEQ ID NO: 226181 - RNA, 19 nt, Artificial Sequence
  Description of Artificial Sequence: Synthetic oligonucleotide
  Antisense strand to SEQ ID NO: 226180
gugacugacgugauuauuc

SEQ ID NO: 226182 - RNA, 19 nt, Artificial Sequence
  Description of Artificial Sequence: Synthetic oligonucleotide
  Sense strand starting at position 3791 of SEQ ID NO: 2913
agagcuauuugagaugaga

SEQ ID NO: 226183 - RNA, 19 nt, Artificial Sequence
  Description of Artificial Sequence: Synthetic oligonucleotide
  Antisense strand to SEQ ID NO: 226182
ucucaucucaaauagcucu

SEQ ID NO: 226184 - RNA, 19 nt, Artificial Sequence
  Description of Artificial Sequence: Synthetic oligonucleotide
  Sense strand starting at position 3860 of SEQ ID NO: 2913
aagagaguauuccagagag

SEQ ID NO: 226185 - RNA, 19 nt, Artificial Sequence
  Description of Artificial Sequence: Synthetic oligonucleotide
  Antisense strand to SEQ ID NO: 226184
cucucuggaauacucucuu

SEQ ID NO: 226186 - RNA, 19 nt, Artificial Sequence
  Description of Artificial Sequence: Synthetic oligonucleotide
  Sense strand starting at position 16 of SEQ ID NO: 2912
ugcccugggcuuugaaaua

SEQ ID NO: 226187 - RNA, 19 nt, Artificial Sequence
  Description of Artificial Sequence: Synthetic oligonucleotide
  Antisense strand to SEQ ID NO: 226186
uauuucaaagcccagggca

SEQ ID NO: 226188 - RNA, 19 nt, Artificial Sequence
  Description of Artificial Sequence: Synthetic oligonucleotide
  Sense strand starting at position 42 of SEQ ID NO: 2912
acuugaaacgguuggagau

SEQ ID NO: 226189 - RNA, 19 nt, Artificial Sequence
  Description of Artificial Sequence: Synthetic oligonucleotide
  Antisense strand to SEQ ID NO: 226188
aucuccaaccguuucaagu

SEQ ID NO: 226190 - RNA, 19 nt, Artificial Sequence
  Description of Artificial Sequence: Synthetic oligonucleotide
  Sense strand starting at position 48 of SEQ ID NO: 2912
aacgguuggagauguuaca

SEQ ID NO: 226191 - RNA, 19 nt, Artificial Sequence
  Description of Artificial Sequence: Synthetic oligonucleotide
  Antisense strand to SEQ ID NO: 226190
uguaacaucuccaaccguu

SEQ ID NO: 226192 - RNA, 19 nt, Artificial Sequence
  Description of Artificial Sequence: Synthetic oligonucleotide
  Sense strand starting at position 95 of SEQ ID NO: 2912
aggagaucaucagugcaaa

SEQ ID NO: 226193 - RNA, 19 nt, Artificial Sequence
  Description of Artificial Sequence: Synthetic oligonucleotide
  Antisense strand to SEQ ID NO: 226192
uuugcacugaugaucuccu

SEQ ID NO: 226194 - RNA, 19 nt, Artificial Sequence
  Description of Artificial Sequence: Synthetic oligonucleotide
  Sense strand starting at position 96 of SEQ ID NO: 2912
ggagaucaucagugcaaau

SEQ ID NO: 226195 - RNA, 19 nt, Artificial Sequence
  Description of Artificial Sequence: Synthetic oligonucleotide
  Antisense strand to SEQ ID NO: 226194
auuugcacugaugaucucc

SEQ ID NO: 226196 - RNA, 19 nt, Artificial Sequence
  Description of Artificial Sequence: Synthetic oligonucleotide
  Sense strand starting at position 189 of SEQ ID NO: 2912
gggcgagggcaauaguaaa

SEQ ID NO: 226197 - RNA, 19 nt, Artificial Sequence
  Description of Artificial Sequence: Synthetic oligonucleotide
  Antisense strand to SEQ ID NO: 226196
uuuacuauugcccucgccc

SEQ ID NO: 226198 - RNA, 19 nt, Artificial Sequence
  Description of Artificial Sequence: Synthetic oligonucleotide
  Sense strand starting at position 227 of SEQ ID NO: 2912
ggucaucuucccgacucaa

SEQ ID NO: 226199 - RNA, 19 nt, Artificial Sequence
  Description of Artificial Sequence: Synthetic oligonucleotide
  Antisense strand to SEQ ID NO: 226198
uugagucgggaagaugacc

SEQ ID NO: 226200 - RNA, 19 nt, Artificial Sequence
  Description of Artificial Sequence: Synthetic oligonucleotide
  Sense strand starting at position 400 of SEQ ID NO: 2912
gacccaaacgaguguuaga

SEQ ID NO: 226201 - RNA, 19 nt, Artificial Sequence
  Description of Artificial Sequence: Synthetic oligonucleotide
  Antisense strand to SEQ ID NO: 226200
ucuaacacucguuuggguc

SEQ ID NO: 226202 - RNA, 19 nt, Artificial Sequence
  Description of Artificial Sequence: Synthetic oligonucleotide
  Sense strand starting at position 422 of SEQ ID NO: 2912
uccagagcccuaugcuaau

SEQ ID NO: 226203 - RNA, 19 nt, Artificial Sequence
  Description of Artificial Sequence: Synthetic oligonucleotide
  Antisense strand to SEQ ID NO: 226202
auuagcauagggcucugga

SEQ ID NO: 226204 - RNA, 19 nt, Artificial Sequence
  Description of Artificial Sequence: Synthetic oligonucleotide
  Sense strand starting at position 449 of SEQ ID NO: 2912
ugcccaguguccuuaggga

SEQ ID NO: 226205 - RNA, 19 nt, Artificial Sequence
  Description of Artificial Sequence: Synthetic oligonucleotide
  Antisense strand to SEQ ID NO: 226204
ucccuaaggacacugggca

SEQ ID NO: 226206 - RNA, 19 nt, Artificial Sequence
  Description of Artificial Sequence: Synthetic oligonucleotide
  Sense strand starting at position 493 of SEQ ID NO: 2912
ccgcaauuucugcauagca

SEQ ID NO: 226207 - RNA, 19 nt, Artificial Sequence
  Description of Artificial Sequence: Synthetic oligonucleotide
  Antisense strand to SEQ ID NO: 226206
ugcuaugcagaaauugcgg

SEQ ID NO: 226208 - RNA, 19 nt, Artificial Sequence
  Description of Artificial Sequence: Synthetic oligonucleotide
  Sense strand starting at position 545 of SEQ ID NO: 2912
aggaaagacuuugucuuga

SEQ ID NO: 226209 - RNA, 19 nt, Artificial Sequence
  Description of Artificial Sequence: Synthetic oligonucleotide
  Antisense strand to SEQ ID NO: 226208
ucaagacaaagucuuuccu

SEQ ID NO: 226210 - RNA, 19 nt, Artificial Sequence
  Description of Artificial Sequence: Synthetic oligonucleotide
  Sense strand starting at position 550 of SEQ ID NO: 2912
agacuuugucuugaaguug

SEQ ID NO: 226211 - RNA, 19 nt, Artificial Sequence
  Description of Artificial Sequence: Synthetic oligonucleotide
  Antisense strand to SEQ ID NO: 226210
caacuucaagacaaagucu

SEQ ID NO: 226212 - RNA, 19 nt, Artificial Sequence
  Description of Artificial Sequence: Synthetic oligonucleotide
  Sense strand starting at position 565 of SEQ ID NO: 2912
guugcucuugcauagugaa

SEQ ID NO: 226213 - RNA, 19 nt, Artificial Sequence
  Description of Artificial Sequence: Synthetic oligonucleotide
  Antisense strand to SEQ ID NO: 226212
uucacuaugcaagagcaac

SEQ ID NO: 226214 - RNA, 19 nt, Artificial Sequence
  Description of Artificial Sequence: Synthetic oligonucleotide
  Sense strand starting at position 750 of SEQ ID NO: 2912
ggugcuuggagauaugauu

SEQ ID NO: 226215 - RNA, 19 nt, Artificial Sequence
  Description of Artificial Sequence: Synthetic oligonucleotide
  Antisense strand to SEQ ID NO: 226214
aaucauaucuccaagcacc

SEQ ID NO: 226216 - RNA, 19 nt, Artificial Sequence
  Description of Artificial Sequence: Synthetic oligonucleotide
  Sense strand starting at position 771 of SEQ ID NO: 2912
gaucaugggucagacugaa

SEQ ID NO: 226217 - RNA, 19 nt, Artificial Sequence
  Description of Artificial Sequence: Synthetic oligonucleotide
  Antisense strand to SEQ ID NO: 226216
uucagucugacccaugauc

SEQ ID NO: 226218 - RNA, 19 nt, Artificial Sequence
  Description of Artificial Sequence: Synthetic oligonucleotide
  Sense strand starting at position 1196 of SEQ ID NO: 2912
ggacuuagcuucuugaauu

SEQ ID NO: 226219 - RNA, 19 nt, Artificial Sequence
  Description of Artificial Sequence: Synthetic oligonucleotide
  Antisense strand to SEQ ID NO: 226218
aauucaagaagcuaagucc

SEQ ID NO: 226220 - RNA, 19 nt, Artificial Sequence
  Description of Artificial Sequence: Synthetic oligonucleotide
  Sense strand starting at position 1316 of SEQ ID NO: 2912
acagccaauguuggauaaa

SEQ ID NO: 226221 - RNA, 19 nt, Artificial Sequence
  Description of Artificial Sequence: Synthetic oligonucleotide
  Antisense strand to SEQ ID NO: 226220
uuuauccaacauuggcugu

SEQ ID NO: 226222 - RNA, 19 nt, Artificial Sequence
  Description of Artificial Sequence: Synthetic oligonucleotide
  Sense strand starting at position 1325 of SEQ ID NO: 2912
guuggauaaagauggguga

SEQ ID NO: 226223 - RNA, 19 nt, Artificial Sequence
  Description of Artificial Sequence: Synthetic oligonucleotide
  Antisense strand to SEQ ID NO: 226222
ucacccaucuuuauccaac

SEQ ID NO: 226224 - RNA, 19 nt, Artificial Sequence
  Description of Artificial Sequence: Synthetic oligonucleotide
  Sense strand starting at position 1489 of SEQ ID NO: 2912
cuuuauuuccucugggugu

SEQ ID NO: 226225 - RNA, 19 nt, Artificial Sequence
  Description of Artificial Sequence: Synthetic oligonucleotide
  Antisense strand to SEQ ID NO: 226224
acacccagaggaaauaaag

SEQ ID NO: 226226 - RNA, 19 nt, Artificial Sequence
  Description of Artificial Sequence: Synthetic oligonucleotide
  Sense strand starting at position 1520 of SEQ ID NO: 2912
agugauaaccgcugaccua

SEQ ID NO: 226227 - RNA, 19 nt, Artificial Sequence
  Description of Artificial Sequence: Synthetic oligonucleotide
  Antisense strand to SEQ ID NO: 226226
uaggucagcgguuaucacu

SEQ ID NO: 226228 - RNA, 19 nt, Artificial Sequence
  Description of Artificial Sequence: Synthetic oligonucleotide
  Sense strand starting at position 1657 of SEQ ID NO: 2912
gaaacuguggccuggacua

SEQ ID NO: 226229 - RNA, 19 nt, Artificial Sequence
  Description of Artificial Sequence: Synthetic oligonucleotide
  Antisense strand to SEQ ID NO: 226228
uaguccaggccacaguuuc

SEQ ID NO: 226230 - RNA, 19 nt, Artificial Sequence
  Description of Artificial Sequence: Synthetic oligonucleotide
  Sense strand starting at position 1761 of SEQ ID NO: 2912
ggcucucaccucggaaagu

SEQ ID NO: 226231 - RNA, 19 nt, Artificial Sequence
  Description of Artificial Sequence: Synthetic oligonucleotide
  Antisense strand to SEQ ID NO: 226230
acuuuccgaggugagagcc

SEQ ID NO: 226232 - RNA, 19 nt, Artificial Sequence
  Description of Artificial Sequence: Synthetic oligonucleotide
  Sense strand starting at position 2003 of SEQ ID NO: 2912
gugaccaaugccugggaga

SEQ ID NO: 226233 - RNA, 19 nt, Artificial Sequence
  Description of Artificial Sequence: Synthetic oligonucleotide
  Antisense strand to SEQ ID NO: 226232
ucucccaggcauuggucac

SEQ ID NO: 226234 - RNA, 19 nt, Artificial Sequence
  Description of Artificial Sequence: Synthetic oligonucleotide
  Sense strand starting at position 2709 of SEQ ID NO: 2912
uacugcguucccuggagaa

SEQ ID NO: 226235 - RNA, 19 nt, Artificial Sequence
  Description of Artificial Sequence: Synthetic oligonucleotide
  Antisense strand to SEQ ID NO: 226234
uucuccagggaacgcagua

SEQ ID NO: 226236 - RNA, 19 nt, Artificial Sequence
  Description of Artificial Sequence: Synthetic oligonucleotide
  Sense strand starting at position 2711 of SEQ ID NO: 2912
cugcguucccuggagaacu

SEQ ID NO: 226237 - RNA, 19 nt, Artificial Sequence
  Description of Artificial Sequence: Synthetic oligonucleotide
  Antisense strand to SEQ ID NO: 226236
aguucuccagggaacgcag

SEQ ID NO: 226238 - RNA, 19 nt, Artificial Sequence
  Description of Artificial Sequence: Synthetic oligonucleotide
  Sense strand starting at position 2806 of SEQ ID NO: 2912
guggaaagcuguucaaggu

SEQ ID NO: 226239 - RNA, 19 nt, Artificial Sequence
  Description of Artificial Sequence: Synthetic oligonucleotide
  Antisense strand to SEQ ID NO: 226238
accuugaacagcuuuccac

SEQ ID NO: 226240 - RNA, 19 nt, Artificial Sequence
  Description of Artificial Sequence: Synthetic oligonucleotide
  Sense strand starting at position 2822 of SEQ ID NO: 2912
gguguaagccaugaacggu

SEQ ID NO: 226241 - RNA, 19 nt, Artificial Sequence
  Description of Artificial Sequence: Synthetic oligonucleotide
  Antisense strand to SEQ ID NO: 226240
accguucauggcuuacacc

SEQ ID NO: 226242 - RNA, 19 nt, Artificial Sequence
  Description of Artificial Sequence: Synthetic oligonucleotide
  Sense strand starting at position 2839 of SEQ ID NO: 2912
gugacagucguuucgcuua

SEQ ID NO: 226243 - RNA, 19 nt, Artificial Sequence
  Description of Artificial Sequence: Synthetic oligonucleotide
  Antisense strand to SEQ ID NO: 226242
uaagcgaaacgacugucac

SEQ ID NO: 226244 - RNA, 19 nt, Artificial Sequence
  Description of Artificial Sequence: Synthetic oligonucleotide
  Sense strand starting at position 2851 of SEQ ID NO: 2912
ucgcuuauuaugucugguu

SEQ ID NO: 226245 - RNA, 19 nt, Artificial Sequence
  Description of Artificial Sequence: Synthetic oligonucleotide
  Antisense strand to SEQ ID NO: 226244
aaccagacauaauaagcga

SEQ ID NO: 226246 - RNA, 19 nt, Artificial Sequence
  Description of Artificial Sequence: Synthetic oligonucleotide
  Sense strand starting at position 3088 of SEQ ID NO: 2912
aagccauaacccuggcgaa

SEQ ID NO: 226247 - RNA, 19 nt, Artificial Sequence
  Description of Artificial Sequence: Synthetic oligonucleotide
  Antisense strand to SEQ ID NO: 226246
uucgccaggguuauggcuu

SEQ ID NO: 226248 - RNA, 19 nt, Artificial Sequence
  Description of Artificial Sequence: Synthetic oligonucleotide
  Sense strand starting at position 3089 of SEQ ID NO: 2912
agccauaacccuggcgaau

SEQ ID NO: 226249 - RNA, 19 nt, Artificial Sequence
  Description of Artificial Sequence: Synthetic oligonucleotide
  Antisense strand to SEQ ID NO: 226248
auucgccaggguuauggcu

SEQ ID NO: 226250 - RNA, 19 nt, Artificial Sequence
  Description of Artificial Sequence: Synthetic oligonucleotide
  Sense strand starting at position 3146 of SEQ ID NO: 2912
uguguuggagaguaacaca

SEQ ID NO: 226251 - RNA, 19 nt, Artificial Sequence
  Description of Artificial Sequence: Synthetic oligonucleotide
  Antisense strand to SEQ ID NO: 226250
uguguuacucuccaacaca

SEQ ID NO: 226252 - RNA, 19 nt, Artificial Sequence
  Description of Artificial Sequence: Synthetic oligonucleotide
  Sense strand starting at position 3380 of SEQ ID NO: 2912
gcccaaauccugugaguuc

SEQ ID NO: 226253 - RNA, 19 nt, Artificial Sequence
  Description of Artificial Sequence: Synthetic oligonucleotide
  Antisense strand to SEQ ID NO: 226252
gaacucacaggauuugggc

SEQ ID NO: 226254 - RNA, 19 nt, Artificial Sequence
  Description of Artificial Sequence: Synthetic oligonucleotide
  Sense strand starting at position 3546 of SEQ ID NO: 2912
ggaucaucccaucggcaca

SEQ ID NO: 226255 - RNA, 19 nt, Artificial Sequence
  Description of Artificial Sequence: Synthetic oligonucleotide
  Antisense strand to SEQ ID NO: 226254
ugugccgaugggaugaucc

SEQ ID NO: 226256 - RNA, 19 nt, Artificial Sequence
  Description of Artificial Sequence: Synthetic oligonucleotide
  Sense strand starting at position 3560 of SEQ ID NO: 2912
gcacacaagcaugauguua

SEQ ID NO: 226257 - RNA, 19 nt, Artificial Sequence
  Description of Artificial Sequence: Synthetic oligonucleotide
  Antisense strand to SEQ ID NO: 226256
uaacaucaugcuugugugc

SEQ ID NO: 226258 - RNA, 19 nt, Artificial Sequence
  Description of Artificial Sequence: Synthetic oligonucleotide
  Sense strand starting at position 3571 of SEQ ID NO: 2912
ugauguuauugcucucaag

SEQ ID NO: 226259 - RNA, 19 nt, Artificial Sequence
  Description of Artificial Sequence: Synthetic oligonucleotide
  Antisense strand to SEQ ID NO: 226258
cuugagagcaauaacauca

SEQ ID NO: 226260 - RNA, 19 nt, Artificial Sequence
  Description of Artificial Sequence: Synthetic oligonucleotide
  Sense strand starting at position 3850 of SEQ ID NO: 2912
ucccuugccugagucauuu

SEQ ID NO: 226261 - RNA, 19 nt, Artificial Sequence
  Description of Artificial Sequence: Synthetic oligonucleotide
  Antisense strand to SEQ ID NO: 226260
aaaugacucaggcaaggga

SEQ ID NO: 226262 - RNA, 19 nt, Artificial Sequence
  Description of Artificial Sequence: Synthetic oligonucleotide
  Sense strand starting at position 3854 of SEQ ID NO: 2912
uugccugagucauuuaauc

SEQ ID NO: 226263 - RNA, 19 nt, Artificial Sequence
  Description of Artificial Sequence: Synthetic oligonucleotide
  Antisense strand to SEQ ID NO: 226262
gauuaaaugacucaggcaa

SEQ ID NO: 226264 - RNA, 19 nt, Artificial Sequence
  Description of Artificial Sequence: Synthetic oligonucleotide
  Sense strand starting at position 3938 of SEQ ID NO: 2912
uucucaugaccugguucua

SEQ ID NO: 226265 - RNA, 19 nt, Artificial Sequence
  Description of Artificial Sequence: Synthetic oligonucleotide
  Antisense strand to SEQ ID NO: 226264
uagaaccaggucaugagaa

SEQ ID NO: 226266 - RNA, 19 nt, Artificial Sequence
  Description of Artificial Sequence: Synthetic oligonucleotide
  Sense strand starting at position 33 of SEQ ID NO: 2914
guggacugugccuaaacau

SEQ ID NO: 226267 - RNA, 19 nt, Artificial Sequence
  Description of Artificial Sequence: Synthetic oligonucleotide
  Antisense strand to SEQ ID NO: 226266
auguuuaggcacaguccac

SEQ ID NO: 226268 - RNA, 19 nt, Artificial Sequence
  Description of Artificial Sequence: Synthetic oligonucleotide
  Sense strand starting at position 200 of SEQ ID NO: 2914
auaagaugccaauguuaga

SEQ ID NO: 226269 - RNA, 19 nt, Artificial Sequence
  Description of Artificial Sequence: Synthetic oligonucleotide
  Antisense strand to SEQ ID NO: 226268
ucuaacauuggcaucuuau

SEQ ID NO: 226270 - RNA, 19 nt, Artificial Sequence
  Description of Artificial Sequence: Synthetic oligonucleotide
  Sense strand starting at position 243 of SEQ ID NO: 2914
cuguccuauguuuggagaa

SEQ ID NO: 226271 - RNA, 19 nt, Artificial Sequence
  Description of Artificial Sequence: Synthetic oligonucleotide
  Antisense strand to SEQ ID NO: 226270
uucuccaaacauaggacag

SEQ ID NO: 226272 - RNA, 19 nt, Artificial Sequence
  Description of Artificial Sequence: Synthetic oligonucleotide
  Sense strand starting at position 268 of SEQ ID NO: 2914
aauugagaguaggcauaau

SEQ ID NO: 226273 - RNA, 19 nt, Artificial Sequence
  Description of Artificial Sequence: Synthetic oligonucleotide
  Antisense strand to SEQ ID NO: 226272
auuaugccuacucucaauu

SEQ ID NO: 226274 - RNA, 19 nt, Artificial Sequence
  Description of Artificial Sequence: Synthetic oligonucleotide
  Sense strand starting at position 279 of SEQ ID NO: 2914
ggcauaauaggguggaaau

SEQ ID NO: 226275 - RNA, 19 nt, Artificial Sequence
  Description of Artificial Sequence: Synthetic oligonucleotide
  Antisense strand to SEQ ID NO: 226274
auuuccacccuauuaugcc

SEQ ID NO: 226276 - RNA, 19 nt, Artificial Sequence
  Description of Artificial Sequence: Synthetic oligonucleotide
  Sense strand starting at position 280 of SEQ ID NO: 2914
gcauaauaggguggaaaua

SEQ ID NO: 226277 - RNA, 19 nt, Artificial Sequence
  Description of Artificial Sequence: Synthetic oligonucleotide
  Antisense strand to SEQ ID NO: 226276
uauuuccacccuauuaugc

SEQ ID NO: 226278 - RNA, 19 nt, Artificial Sequence
  Description of Artificial Sequence: Synthetic oligonucleotide
  Sense strand starting at position 325 of SEQ ID NO: 2914
uucuuuccucuggaaauug

SEQ ID NO: 226279 - RNA, 19 nt, Artificial Sequence
  Description of Artificial Sequence: Synthetic oligonucleotide
  Antisense strand to SEQ ID NO: 226278
caauuuccagaggaaagaa

SEQ ID NO: 226280 - RNA, 19 nt, Artificial Sequence
  Description of Artificial Sequence: Synthetic oligonucleotide
  Sense strand starting at position 334 of SEQ ID NO: 2914
cuggaaauuggccaauguu

SEQ ID NO: 226281 - RNA, 19 nt, Artificial Sequence
  Description of Artificial Sequence: Synthetic oligonucleotide
  Antisense strand to SEQ ID NO: 226280
aacauuggccaauuuccag

SEQ ID NO: 226282 - RNA, 19 nt, Artificial Sequence
  Description of Artificial Sequence: Synthetic oligonucleotide
  Sense strand starting at position 518 of SEQ ID NO: 2914
gaaguuaggcagcauaaca

SEQ ID NO: 226283 - RNA, 19 nt, Artificial Sequence
  Description of Artificial Sequence: Synthetic oligonucleotide
  Antisense strand to SEQ ID NO: 226282
uguuaugcugccuaacuuc

SEQ ID NO: 226284 - RNA, 19 nt, Artificial Sequence
  Description of Artificial Sequence: Synthetic oligonucleotide
  Sense strand starting at position 1009 of SEQ ID NO: 2914
guuagaaauguacauuccu

SEQ ID NO: 226285 - RNA, 19 nt, Artificial Sequence
  Description of Artificial Sequence: Synthetic oligonucleotide
  Antisense strand to SEQ ID NO: 226284
aggaauguacauuucuaac

SEQ ID NO: 226286 - RNA, 19 nt, Artificial Sequence
  Description of Artificial Sequence: Synthetic oligonucleotide
  Sense strand starting at position 1017 of SEQ ID NO: 2914
uguacauuccuggacucuu

SEQ ID NO: 226287 - RNA, 19 nt, Artificial Sequence
  Description of Artificial Sequence: Synthetic oligonucleotide
  Antisense strand to SEQ ID NO: 226286
aagaguccaggaauguaca

SEQ ID NO: 226288 - RNA, 19 nt, Artificial Sequence
  Description of Artificial Sequence: Synthetic oligonucleotide
  Sense strand starting at position 1293 of SEQ ID NO: 2914
guaagauaacaauguagau

SEQ ID NO: 226289 - RNA, 19 nt, Artificial Sequence
  Description of Artificial Sequence: Synthetic oligonucleotide
  Antisense strand to SEQ ID NO: 226288
aucuacauuguuaucuuac

SEQ ID NO: 226290 - RNA, 19 nt, Artificial Sequence
  Description of Artificial Sequence: Synthetic oligonucleotide
  Sense strand starting at position 1362 of SEQ ID NO: 2914
agaucaguucugggccuaa

SEQ ID NO: 226291 - RNA, 19 nt, Artificial Sequence
  Description of Artificial Sequence: Synthetic oligonucleotide
  Antisense strand to SEQ ID NO: 226290
uuaggcccagaacugaucu

SEQ ID NO: 226292 - RNA, 19 nt, Artificial Sequence
  Description of Artificial Sequence: Synthetic oligonucleotide
  Sense strand starting at position 1409 of SEQ ID NO: 2914
gggaacuaguuucuccaua

SEQ ID NO: 226293 - RNA, 19 nt, Artificial Sequence
  Description of Artificial Sequence: Synthetic oligonucleotide
  Antisense strand to SEQ ID NO: 226292
uauggagaaacuaguuccc

SEQ ID NO: 226294 - RNA, 19 nt, Artificial Sequence
  Description of Artificial Sequence: Synthetic oligonucleotide
  Sense strand starting at position 1410 of SEQ ID NO: 2914
ggaacuaguuucuccauau

SEQ ID NO: 226295 - RNA, 19 nt, Artificial Sequence
  Description of Artificial Sequence: Synthetic oligonucleotide
  Antisense strand to SEQ ID NO: 226294
auauggagaaacuaguucc

SEQ ID NO: 226296 - RNA, 19 nt, Artificial Sequence
  Description of Artificial Sequence: Synthetic oligonucleotide
  Sense strand starting at position 1460 of SEQ ID NO: 2914
gugagaccuuucucccaac

SEQ ID NO: 226297 - RNA, 19 nt, Artificial Sequence
  Description of Artificial Sequence: Synthetic oligonucleotide
  Antisense strand to SEQ ID NO: 226296
guugggagaaaggucucac

SEQ ID NO: 226298 - RNA, 19 nt, Artificial Sequence
  Description of Artificial Sequence: Synthetic oligonucleotide
  Sense strand starting at position 1579 of SEQ ID NO: 2914
guuucuguguauuugaaua

SEQ ID NO: 226299 - RNA, 19 nt, Artificial Sequence
  Description of Artificial Sequence: Synthetic oligonucleotide
  Antisense strand to SEQ ID NO: 226298
uauucaaauacacagaaac

SEQ ID NO: 226300 - RNA, 19 nt, Artificial Sequence
  Description of Artificial Sequence: Synthetic oligonucleotide
  Sense strand starting at position 1608 of SEQ ID NO: 2914
uguaauuauguugacauca

SEQ ID NO: 226301 - RNA, 19 nt, Artificial Sequence
  Description of Artificial Sequence: Synthetic oligonucleotide
  Antisense strand to SEQ ID NO: 226300
ugaugucaacauaauuaca

SEQ ID NO: 226302 - RNA, 19 nt, Artificial Sequence
  Description of Artificial Sequence: Synthetic oligonucleotide
  Sense strand starting at position 1613 of SEQ ID NO: 2914
uuauguugacaucaagucu

SEQ ID NO: 226303 - RNA, 19 nt, Artificial Sequence
  Description of Artificial Sequence: Synthetic oligonucleotide
  Antisense strand to SEQ ID NO: 226302
agacuugaugucaacauaa

SEQ ID NO: 226304 - RNA, 19 nt, Artificial Sequence
  Description of Artificial Sequence: Synthetic oligonucleotide
  Sense strand starting at position 1648 of SEQ ID NO: 2914
uggugcuuucgagacaaua

SEQ ID NO: 226305 - RNA, 19 nt, Artificial Sequence
  Description of Artificial Sequence: Synthetic oligonucleotide
  Antisense strand to SEQ ID NO: 226304
uauugucucgaaagcacca

SEQ ID NO: 226306 - RNA, 19 nt, Artificial Sequence
  Description of Artificial Sequence: Synthetic oligonucleotide
  Sense strand starting at position 1650 of SEQ ID NO: 2914
gugcuuucgagacaauaga

SEQ ID NO: 226307 - RNA, 19 nt, Artificial Sequence
  Description of Artificial Sequence: Synthetic oligonucleotide
  Antisense strand to SEQ ID NO: 226306
ucuauugucucgaaagcac

SEQ ID NO: 226308 - RNA, 19 nt, Artificial Sequence
  Description of Artificial Sequence: Synthetic oligonucleotide
  Sense strand starting at position 1693 of SEQ ID NO: 2914
gauuucuguuuagaagaga

SEQ ID NO: 226309 - RNA, 19 nt, Artificial Sequence
  Description of Artificial Sequence: Synthetic oligonucleotide
  Antisense strand to SEQ ID NO: 226308
ucucuucuaaacagaaauc

SEQ ID NO: 226310 - RNA, 19 nt, Artificial Sequence
  Description of Artificial Sequence: Synthetic oligonucleotide
  Sense strand starting at position 1865 of SEQ ID NO: 2914
cuuguuuaucuggauccau

SEQ ID NO: 226311 - RNA, 19 nt, Artificial Sequence
  Description of Artificial Sequence: Synthetic oligonucleotide
  Antisense strand to SEQ ID NO: 226310
auggauccagauaaacaag

SEQ ID NO: 226312 - RNA, 19 nt, Artificial Sequence
  Description of Artificial Sequence: Synthetic oligonucleotide
  Sense strand starting at position 1917 of SEQ ID NO: 2914
gggucccuguaacuagaaa

SEQ ID NO: 226313 - RNA, 19 nt, Artificial Sequence
  Description of Artificial Sequence: Synthetic oligonucleotide
  Antisense strand to SEQ ID NO: 226312
uuucuaguuacagggaccc

SEQ ID NO: 226314 - RNA, 19 nt, Artificial Sequence
  Description of Artificial Sequence: Synthetic oligonucleotide
  Sense strand starting at position 2111 of SEQ ID NO: 2914
ugaccacgcuucucagaaa

SEQ ID NO: 226315 - RNA, 19 nt, Artificial Sequence
  Description of Artificial Sequence: Synthetic oligonucleotide
  Antisense strand to SEQ ID NO: 226314
uuucugagaagcgugguca

SEQ ID NO: 226316 - RNA, 19 nt, Artificial Sequence
  Description of Artificial Sequence: Synthetic oligonucleotide
  Sense strand starting at position 2169 of SEQ ID NO: 2914
gaggcuuugaggcauugua

SEQ ID NO: 226317 - RNA, 19 nt, Artificial Sequence
  Description of Artificial Sequence: Synthetic oligonucleotide
  Antisense strand to SEQ ID NO: 226316
uacaaugccucaaagccuc

SEQ ID NO: 226318 - RNA, 19 nt, Artificial Sequence
  Description of Artificial Sequence: Synthetic oligonucleotide
  Sense strand starting at position 2191 of SEQ ID NO: 2914
uuaagaguggacuguauuc

SEQ ID NO: 226319 - RNA, 19 nt, Artificial Sequence
  Description of Artificial Sequence: Synthetic oligonucleotide
  Antisense strand to SEQ ID NO: 226318
gaauacaguccacucuuaa

SEQ ID NO: 226320 - RNA, 19 nt, Artificial Sequence
  Description of Artificial Sequence: Synthetic oligonucleotide
  Sense strand starting at position 2193 of SEQ ID NO: 2914
aagaguggacuguauucuu

SEQ ID NO: 226321 - RNA, 19 nt, Artificial Sequence
  Description of Artificial Sequence: Synthetic oligonucleotide
  Antisense strand to SEQ ID NO: 226320
aagaauacaguccacucuu

SEQ ID NO: 226322 - RNA, 19 nt, Artificial Sequence
  Description of Artificial Sequence: Synthetic oligonucleotide
  Sense strand starting at position 2198 of SEQ ID NO: 2914
uggacuguauucuuacuuu

SEQ ID NO: 226323 - RNA, 19 nt, Artificial Sequence
  Description of Artificial Sequence: Synthetic oligonucleotide
  Antisense strand to SEQ ID NO: 226322
aaaguaagaauacagucca

SEQ ID NO: 226324 - RNA, 19 nt, Artificial Sequence
  Description of Artificial Sequence: Synthetic oligonucleotide
  Sense strand starting at position 2475 of SEQ ID NO: 2914
acacaagagguuuguggaa

SEQ ID NO: 226325 - RNA, 19 nt, Artificial Sequence
  Description of Artificial Sequence: Synthetic oligonucleotide
  Antisense strand to SEQ ID NO: 226324
uuccacaaaccucuugugu

SEQ ID NO: 226326 - RNA, 19 nt, Artificial Sequence
  Description of Artificial Sequence: Synthetic oligonucleotide
  Sense strand starting at position 2553 of SEQ ID NO: 2914
cucacacuagauuguugaa

SEQ ID NO: 226327 - RNA, 19 nt, Artificial Sequence
  Description of Artificial Sequence: Synthetic oligonucleotide
  Antisense strand to SEQ ID NO: 226326
uucaacaaucuagugugag

SEQ ID NO: 226328 - RNA, 19 nt, Artificial Sequence
  Description of Artificial Sequence: Synthetic oligonucleotide
  Sense strand starting at position 3293 of SEQ ID NO: 2914
aagaaaugugaaugcugua

SEQ ID NO: 226329 - RNA, 19 nt, Artificial Sequence
  Description of Artificial Sequence: Synthetic oligonucleotide
  Antisense strand to SEQ ID NO: 226328
uacagcauucacauuucuu

SEQ ID NO: 226330 - RNA, 19 nt, Artificial Sequence
  Description of Artificial Sequence: Synthetic oligonucleotide
  Sense strand starting at position 3306 of SEQ ID NO: 2914
gcuguaauuuaagaggaca

SEQ ID NO: 226331 - RNA, 19 nt, Artificial Sequence
  Description of Artificial Sequence: Synthetic oligonucleotide
  Antisense strand to SEQ ID NO: 226330
uguccucuuaaauuacagc

SEQ ID NO: 226332 - RNA, 19 nt, Artificial Sequence
  Description of Artificial Sequence: Synthetic oligonucleotide
  Sense strand starting at position 3362 of SEQ ID NO: 2914
ucaacugauugagcuuaca

SEQ ID NO: 226333 - RNA, 19 nt, Artificial Sequence
  Description of Artificial Sequence: Synthetic oligonucleotide
  Antisense strand to SEQ ID NO: 226332
uguaagcucaaucaguuga

SEQ ID NO: 226334 - RNA, 19 nt, Artificial Sequence
  Description of Artificial Sequence: Synthetic oligonucleotide
  Sense strand starting at position 3411 of SEQ ID NO: 2914
agcuuucuaccagaagggu

SEQ ID NO: 226335 - RNA, 19 nt, Artificial Sequence
  Description of Artificial Sequence: Synthetic oligonucleotide
  Antisense strand to SEQ ID NO: 226334
acccuucugguagaaagcu

SEQ ID NO: 226336 - RNA, 19 nt, Artificial Sequence
  Description of Artificial Sequence: Synthetic oligonucleotide
  Sense strand starting at position 3542 of SEQ ID NO: 2914
gaaacaugacuuugccagu

SEQ ID NO: 226337 - RNA, 19 nt, Artificial Sequence
  Description of Artificial Sequence: Synthetic oligonucleotide
  Antisense strand to SEQ ID NO: 226336
acuggcaaagucauguuuc

SEQ ID NO: 226338 - RNA, 19 nt, Artificial Sequence
  Description of Artificial Sequence: Synthetic oligonucleotide
  Sense strand starting at position 3548 of SEQ ID NO: 2914
ugacuuugccaguauaauc

SEQ ID NO: 226339 - RNA, 19 nt, Artificial Sequence
  Description of Artificial Sequence: Synthetic oligonucleotide
  Antisense strand to SEQ ID NO: 226338
gauuauacuggcaaaguca

SEQ ID NO: 226340 - RNA, 19 nt, Artificial Sequence
  Description of Artificial Sequence: Synthetic oligonucleotide
  Sense strand starting at position 3553 of SEQ ID NO: 2914
uugccaguauaauccugaa

SEQ ID NO: 226341 - RNA, 19 nt, Artificial Sequence
  Description of Artificial Sequence: Synthetic oligonucleotide
  Antisense strand to SEQ ID NO: 226340
uucaggauuauacuggcaa

SEQ ID NO: 226342 - RNA, 19 nt, Artificial Sequence
  Description of Artificial Sequence: Synthetic oligonucleotide
  Sense strand starting at position 3720 of SEQ ID NO: 2914
ucugcuuaucaugagagca

SEQ ID NO: 226343 - RNA, 19 nt, Artificial Sequence
  Description of Artificial Sequence: Synthetic oligonucleotide
  Antisense strand to SEQ ID NO: 226342
ugcucucaugauaagcaga

SEQ ID NO: 226344 - RNA, 19 nt, Artificial Sequence
  Description of Artificial Sequence: Synthetic oligonucleotide
  Sense strand starting at position 3792 of SEQ ID NO: 2914
cagcgaguccuccaugaca

SEQ ID NO: 226345 - RNA, 19 nt, Artificial Sequence
  Description of Artificial Sequence: Synthetic oligonucleotide
  Antisense strand to SEQ ID NO: 226344
ugucauggaggacucgcug

SEQ ID NO: 226346 - RNA, 19 nt, Artificial Sequence
  Description of Artificial Sequence: Synthetic oligonucleotide
  Sense strand starting at position 39 of SEQ ID NO: 2915
aguggaaacagugagugua

SEQ ID NO: 226347 - RNA, 19 nt, Artificial Sequence
  Description of Artificial Sequence: Synthetic oligonucleotide
  Antisense strand to SEQ ID NO: 226346
uacacucacuguuuccacu

SEQ ID NO: 226348 - RNA, 19 nt, Artificial Sequence
  Description of Artificial Sequence: Synthetic oligonucleotide
  Sense strand starting at position 41 of SEQ ID NO: 2915
uggaaacagugaguguaaa

SEQ ID NO: 226349 - RNA, 19 nt, Artificial Sequence
  Description of Artificial Sequence: Synthetic oligonucleotide
  Antisense strand to SEQ ID NO: 226348
uuuacacucacuguuucca

SEQ ID NO: 226350 - RNA, 19 nt, Artificial Sequence
  Description of Artificial Sequence: Synthetic oligonucleotide
  Sense strand starting at position 68 of SEQ ID NO: 2915
ucaagaaguuuagcuguga

SEQ ID NO: 226351 - RNA, 19 nt, Artificial Sequence
  Description of Artificial Sequence: Synthetic oligonucleotide
  Antisense strand to SEQ ID NO: 226350
ucacagcuaaacuucuuga

SEQ ID NO: 226352 - RNA, 19 nt, Artificial Sequence
  Description of Artificial Sequence: Synthetic oligonucleotide
  Sense strand starting at position 69 of SEQ ID NO: 2915
caagaaguuuagcugugaa

SEQ ID NO: 226353 - RNA, 19 nt, Artificial Sequence
  Description of Artificial Sequence: Synthetic oligonucleotide
  Antisense strand to SEQ ID NO: 226352
uucacagcuaaacuucuug

SEQ ID NO: 226354 - RNA, 19 nt, Artificial Sequence
  Description of Artificial Sequence: Synthetic oligonucleotide
  Sense strand starting at position 325 of SEQ ID NO: 2915
gcaagacuucgucaccaaa

SEQ ID NO: 226355 - RNA, 19 nt, Artificial Sequence
  Description of Artificial Sequence: Synthetic oligonucleotide
  Antisense strand to SEQ ID NO: 226354
uuuggugacgaagucuugc

SEQ ID NO: 226356 - RNA, 19 nt, Artificial Sequence
  Description of Artificial Sequence: Synthetic oligonucleotide
  Sense strand starting at position 361 of SEQ ID NO: 2915
aaaguuuagcugugaagag

SEQ ID NO: 226357 - RNA, 19 nt, Artificial Sequence
  Description of Artificial Sequence: Synthetic oligonucleotide
  Antisense strand to SEQ ID NO: 226356
cucuucacagcuaaacuuu

SEQ ID NO: 226358 - RNA, 19 nt, Artificial Sequence
  Description of Artificial Sequence: Synthetic oligonucleotide
  Sense strand starting at position 621 of SEQ ID NO: 2915
ugcugugagaaaugagaaa

SEQ ID NO: 226359 - RNA, 19 nt, Artificial Sequence
  Description of Artificial Sequence: Synthetic oligonucleotide
  Antisense strand to SEQ ID NO: 226358
uuucucauuucucacagca

SEQ ID NO: 226360 - RNA, 19 nt, Artificial Sequence
  Description of Artificial Sequence: Synthetic oligonucleotide
  Sense strand starting at position 1055 of SEQ ID NO: 2915
uguugagggcccugauaac

SEQ ID NO: 226361 - RNA, 19 nt, Artificial Sequence
  Description of Artificial Sequence: Synthetic oligonucleotide
  Antisense strand to SEQ ID NO: 226360
guuaucagggcccucaaca

SEQ ID NO: 226362 - RNA, 19 nt, Artificial Sequence
  Description of Artificial Sequence: Synthetic oligonucleotide
  Sense strand starting at position 1087 of SEQ ID NO: 2915
gcaucugguccugaacaag

SEQ ID NO: 226363 - RNA, 19 nt, Artificial Sequence
  Description of Artificial Sequence: Synthetic oligonucleotide
  Antisense strand to SEQ ID NO: 226362
cuuguucaggaccagaugc

SEQ ID NO: 226364 - RNA, 19 nt, Artificial Sequence
  Description of Artificial Sequence: Synthetic oligonucleotide
  Sense strand starting at position 1110 of SEQ ID NO: 2915
gaaaucagccuuugcagga

SEQ ID NO: 226365 - RNA, 19 nt, Artificial Sequence
  Description of Artificial Sequence: Synthetic oligonucleotide
  Antisense strand to SEQ ID NO: 226364
uccugcaaaggcugauuuc

SEQ ID NO: 226366 - RNA, 19 nt, Artificial Sequence
  Description of Artificial Sequence: Synthetic oligonucleotide
  Sense strand starting at position 1174 of SEQ ID NO: 2915
gagauaauuugaugaaugg

SEQ ID NO: 226367 - RNA, 19 nt, Artificial Sequence
  Description of Artificial Sequence: Synthetic oligonucleotide
  Antisense strand to SEQ ID NO: 226366
ccauucaucaaauuaucuc

SEQ ID NO: 226368 - RNA, 19 nt, Artificial Sequence
  Description of Artificial Sequence: Synthetic oligonucleotide
  Sense strand starting at position 1208 of SEQ ID NO: 2915
aaauauaaagcguggacaa

SEQ ID NO: 226369 - RNA, 19 nt, Artificial Sequence
  Description of Artificial Sequence: Synthetic oligonucleotide
  Antisense strand to SEQ ID NO: 226368
uuguccacgcuuuauauuu

SEQ ID NO: 226370 - RNA, 19 nt, Artificial Sequence
  Description of Artificial Sequence: Synthetic oligonucleotide
  Sense strand starting at position 2183 of SEQ ID NO: 2915
ggaauucucgacggugaua

SEQ ID NO: 226371 - RNA, 19 nt, Artificial Sequence
  Description of Artificial Sequence: Synthetic oligonucleotide
  Antisense strand to SEQ ID NO: 226370
uaucaccgucgagaauucc

SEQ ID NO: 226372 - RNA, 19 nt, Artificial Sequence
  Description of Artificial Sequence: Synthetic oligonucleotide
  Sense strand starting at position 2185 of SEQ ID NO: 2915
aauucucgacggugauaac

SEQ ID NO: 226373 - RNA, 19 nt, Artificial Sequence
  Description of Artificial Sequence: Synthetic oligonucleotide
  Antisense strand to SEQ ID NO: 226372
guuaucaccgucgagaauu

SEQ ID NO: 226374 - RNA, 19 nt, Artificial Sequence
  Description of Artificial Sequence: Synthetic oligonucleotide
  Sense strand starting at position 2192 of SEQ ID NO: 2915
gacggugauaacugaaagu

SEQ ID NO: 226375 - RNA, 19 nt, Artificial Sequence
  Description of Artificial Sequence: Synthetic oligonucleotide
  Antisense strand to SEQ ID NO: 226374
acuuucaguuaucaccguc

SEQ ID NO: 226376 - RNA, 19 nt, Artificial Sequence
  Description of Artificial Sequence: Synthetic oligonucleotide
  Sense strand starting at position 2213 of SEQ ID NO: 2915
ugaggugauaacugaaagu

SEQ ID NO: 226377 - RNA, 19 nt, Artificial Sequence
  Description of Artificial Sequence: Synthetic oligonucleotide
  Antisense strand to SEQ ID NO: 226376
acuuucaguuaucaccuca

SEQ ID NO: 226378 - RNA, 19 nt, Artificial Sequence
  Description of Artificial Sequence: Synthetic oligonucleotide
  Sense strand starting at position 2554 of SEQ ID NO: 2915
ucauuuauucgugagcucu

SEQ ID NO: 226379 - RNA, 19 nt, Artificial Sequence
  Description of Artificial Sequence: Synthetic oligonucleotide
  Antisense strand to SEQ ID NO: 226378
agagcucacgaauaaauga

SEQ ID NO: 226380 - RNA, 19 nt, Artificial Sequence
  Description of Artificial Sequence: Synthetic oligonucleotide
  Sense strand starting at position 2556 of SEQ ID NO: 2915
auuuauucgugagcucugu

SEQ ID NO: 226381 - RNA, 19 nt, Artificial Sequence
  Description of Artificial Sequence: Synthetic oligonucleotide
  Antisense strand to SEQ ID NO: 226380
acagagcucacgaauaaau

SEQ ID NO: 226382 - RNA, 19 nt, Artificial Sequence
  Description of Artificial Sequence: Synthetic oligonucleotide
  Sense strand starting at position 2557 of SEQ ID NO: 2915
uuuauucgugagcucuguu

SEQ ID NO: 226383 - RNA, 19 nt, Artificial Sequence
  Description of Artificial Sequence: Synthetic oligonucleotide
  Antisense strand to SEQ ID NO: 226382
aacagagcucacgaauaaa

SEQ ID NO: 226384 - RNA, 19 nt, Artificial Sequence
  Description of Artificial Sequence: Synthetic oligonucleotide
  Sense strand starting at position 2597 of SEQ ID NO: 2915
aguguugaugcuuaguaaa

SEQ ID NO: 226385 - RNA, 19 nt, Artificial Sequence
  Description of Artificial Sequence: Synthetic oligonucleotide
  Antisense strand to SEQ ID NO: 226384
uuuacuaagcaucaacacu

SEQ ID NO: 226386 - RNA, 19 nt, Artificial Sequence
  Description of Artificial Sequence: Synthetic oligonucleotide
  Sense strand starting at position 2724 of SEQ ID NO: 2915
ugacgaaugaguuaucguu

SEQ ID NO: 226387 - RNA, 19 nt, Artificial Sequence
  Description of Artificial Sequence: Synthetic oligonucleotide
  Antisense strand to SEQ ID NO: 226386
aacgauaacucauucguca

SEQ ID NO: 226388 - RNA, 19 nt, Artificial Sequence
  Description of Artificial Sequence: Synthetic oligonucleotide
  Sense strand starting at position 2731 of SEQ ID NO: 2915
ugaguuaucguugaccuau

SEQ ID NO: 226389 - RNA, 19 nt, Artificial Sequence
  Description of Artificial Sequence: Synthetic oligonucleotide
  Antisense strand to SEQ ID NO: 226388
auaggucaacgauaacuca

SEQ ID NO: 226390 - RNA, 19 nt, Artificial Sequence
  Description of Artificial Sequence: Synthetic oligonucleotide
  Sense strand starting at position 2778 of SEQ ID NO: 2915
gauacuuauucguuugaau

SEQ ID NO: 226391 - RNA, 19 nt, Artificial Sequence
  Description of Artificial Sequence: Synthetic oligonucleotide
  Antisense strand to SEQ ID NO: 226390
auucaaacgaauaaguauc

SEQ ID NO: 226392 - RNA, 19 nt, Artificial Sequence
  Description of Artificial Sequence: Synthetic oligonucleotide
  Sense strand starting at position 2838 of SEQ ID NO: 2915
guaaacagagcauguuaau

SEQ ID NO: 226393 - RNA, 19 nt, Artificial Sequence
  Description of Artificial Sequence: Synthetic oligonucleotide
  Antisense strand to SEQ ID NO: 226392
auuaacaugcucuguuuac

SEQ ID NO: 226394 - RNA, 19 nt, Artificial Sequence
  Description of Artificial Sequence: Synthetic oligonucleotide
  Sense strand starting at position 2851 of SEQ ID NO: 2915
guuaauuuagcuggagcca

SEQ ID NO: 226395 - RNA, 19 nt, Artificial Sequence
  Description of Artificial Sequence: Synthetic oligonucleotide
  Antisense strand to SEQ ID NO: 226394
uggcuccagcuaaauuaac

SEQ ID NO: 226396 - RNA, 19 nt, Artificial Sequence
  Description of Artificial Sequence: Synthetic oligonucleotide
  Sense strand starting at position 2894 of SEQ ID NO: 2915
ugccucuacguauaaacua

SEQ ID NO: 226397 - RNA, 19 nt, Artificial Sequence
  Description of Artificial Sequence: Synthetic oligonucleotide
  Antisense strand to SEQ ID NO: 226396
uaguuuauacguagaggca

SEQ ID NO: 226398 - RNA, 19 nt, Artificial Sequence
  Description of Artificial Sequence: Synthetic oligonucleotide
  Sense strand starting at position 3037 of SEQ ID NO: 2915
gguugcugugauuagaaca

SEQ ID NO: 226399 - RNA, 19 nt, Artificial Sequence
  Description of Artificial Sequence: Synthetic oligonucleotide
  Antisense strand to SEQ ID NO: 226398
uguucuaaucacagcaacc

SEQ ID NO: 226400 - RNA, 19 nt, Artificial Sequence
  Description of Artificial Sequence: Synthetic oligonucleotide
  Sense strand starting at position 3060 of SEQ ID NO: 2915
ccagcacauguuugaaaua

SEQ ID NO: 226401 - RNA, 19 nt, Artificial Sequence
  Description of Artificial Sequence: Synthetic oligonucleotide
  Antisense strand to SEQ ID NO: 226400
uauuucaaacaugugcugg

SEQ ID NO: 226402 - RNA, 19 nt, Artificial Sequence
  Description of Artificial Sequence: Synthetic oligonucleotide
  Sense strand starting at position 3219 of SEQ ID NO: 2915
agaggccuucucuaaucuu

SEQ ID NO: 226403 - RNA, 19 nt, Artificial Sequence
  Description of Artificial Sequence: Synthetic oligonucleotide
  Antisense strand to SEQ ID NO: 226402
aagauuagagaaggccucu

SEQ ID NO: 226404 - RNA, 19 nt, Artificial Sequence
  Description of Artificial Sequence: Synthetic oligonucleotide
  Sense strand starting at position 3271 of SEQ ID NO: 2915
cagugucacggucauaauu

SEQ ID NO: 226405 - RNA, 19 nt, Artificial Sequence
  Description of Artificial Sequence: Synthetic oligonucleotide
  Antisense strand to SEQ ID NO: 226404
aauuaugaccgugacacug

SEQ ID NO: 226406 - RNA, 19 nt, Artificial Sequence
  Description of Artificial Sequence: Synthetic oligonucleotide
  Sense strand starting at position 3603 of SEQ ID NO: 2915
ucucgagaagacugcauau

SEQ ID NO: 226407 - RNA, 19 nt, Artificial Sequence
  Description of Artificial Sequence: Synthetic oligonucleotide
  Antisense strand to SEQ ID NO: 226406
auaugcagucuucucgaga

SEQ ID NO: 226408 - RNA, 19 nt, Artificial Sequence
  Description of Artificial Sequence: Synthetic oligonucleotide
  Sense strand starting at position 3617 of SEQ ID NO: 2915
cauauuguugcagaaugga

SEQ ID NO: 226409 - RNA, 19 nt, Artificial Sequence
  Description of Artificial Sequence: Synthetic oligonucleotide
  Antisense strand to SEQ ID NO: 226408
uccauucugcaacaauaug

SEQ ID NO: 226410 - RNA, 19 nt, Artificial Sequence
  Description of Artificial Sequence: Synthetic oligonucleotide
  Sense strand starting at position 3620 of SEQ ID NO: 2915
auuguugcagaauggagaa

SEQ ID NO: 226411 - RNA, 19 nt, Artificial Sequence
  Description of Artificial Sequence: Synthetic oligonucleotide
  Antisense strand to SEQ ID NO: 226410
uucuccauucugcaacaau

SEQ ID NO: 226412 - RNA, 19 nt, Artificial Sequence
  Description of Artificial Sequence: Synthetic oligonucleotide
  Sense strand starting at position 3697 of SEQ ID NO: 2915
uuuggcauuccacaugcau

SEQ ID NO: 226413 - RNA, 19 nt, Artificial Sequence
  Description of Artificial Sequence: Synthetic oligonucleotide
  Antisense strand to SEQ ID NO: 226412
augcauguggaaugccaaa

SEQ ID NO: 226414 - RNA, 19 nt, Artificial Sequence
  Description of Artificial Sequence: Synthetic oligonucleotide
  Sense strand starting at position 3708 of SEQ ID NO: 2915
acaugcauuugcuuaugua

SEQ ID NO: 226415 - RNA, 19 nt, Artificial Sequence
  Description of Artificial Sequence: Synthetic oligonucleotide
  Antisense strand to SEQ ID NO: 226414
uacauaagcaaaugcaugu

SEQ ID NO: 226416 - RNA, 19 nt, Artificial Sequence
  Description of Artificial Sequence: Synthetic oligonucleotide
  Sense strand starting at position 3712 of SEQ ID NO: 2915
gcauuugcuuauguaaauc

SEQ ID NO: 226417 - RNA, 19 nt, Artificial Sequence
  Description of Artificial Sequence: Synthetic oligonucleotide
  Antisense strand to SEQ ID NO: 226416
gauuuacauaagcaaaugc

SEQ ID NO: 226418 - RNA, 19 nt, Artificial Sequence
  Description of Artificial Sequence: Synthetic oligonucleotide
  Sense strand starting at position 3844 of SEQ ID NO: 2915
aggcuuugacuccacaacu

SEQ ID NO: 226419 - RNA, 19 nt, Artificial Sequence
  Description of Artificial Sequence: Synthetic oligonucleotide
  Antisense strand to SEQ ID NO: 226418
aguuguggagucaaagccu

SEQ ID NO: 226420 - RNA, 19 nt, Artificial Sequence
  Description of Artificial Sequence: Synthetic oligonucleotide
  Sense strand starting at position 3908 of SEQ ID NO: 2915
acgacuagauucucuacaa

SEQ ID NO: 226421 - RNA, 19 nt, Artificial Sequence
  Description of Artificial Sequence: Synthetic oligonucleotide
  Antisense strand to SEQ ID NO: 226420
uuguagagaaucuagucgu

SEQ ID NO: 226422 - RNA, 19 nt, Artificial Sequence
  Description of Artificial Sequence: Synthetic oligonucleotide
  Sense strand starting at position 3909 of SEQ ID NO: 2915
cgacuagauucucuacaac

SEQ ID NO: 226423 - RNA, 19 nt, Artificial Sequence
  Description of Artificial Sequence: Synthetic oligonucleotide
  Antisense strand to SEQ ID NO: 226422
guuguagagaaucuagucg

SEQ ID NO: 226424 - RNA, 19 nt, Artificial Sequence
  Description of Artificial Sequence: Synthetic oligonucleotide
  Sense strand starting at position 3981 of SEQ ID NO: 2915
agugguccaggcuaaagaa

SEQ ID NO: 226425 - RNA, 19 nt, Artificial Sequence
  Description of Artificial Sequence: Synthetic oligonucleotide
  Antisense strand to SEQ ID NO: 226424
uucuuuagccuggaccacu

SEQ ID NO: 226426 - RNA, 19 nt, Artificial Sequence
  Description of Artificial Sequence: Synthetic oligonucleotide
  Sense strand starting at position 543 of SEQ ID NO: 2916
guacuugagggccagcaua

SEQ ID NO: 226427 - RNA, 19 nt, Artificial Sequence
  Description of Artificial Sequence: Synthetic oligonucleotide
  Antisense strand to SEQ ID NO: 226426
uaugcuggcccucaaguac

SEQ ID NO: 226428 - RNA, 19 nt, Artificial Sequence
  Description of Artificial Sequence: Synthetic oligonucleotide
  Sense strand starting at position 1122 of SEQ ID NO: 2916
gggcucuuauuggaagcaa

SEQ ID NO: 226429 - RNA, 19 nt, Artificial Sequence
  Description of Artificial Sequence: Synthetic oligonucleotide
  Antisense strand to SEQ ID NO: 226428
uugcuuccaauaagagccc

SEQ ID NO: 226430 - RNA, 19 nt, Artificial Sequence
  Description of Artificial Sequence: Synthetic oligonucleotide
  Sense strand starting at position 1180 of SEQ ID NO: 2916
auugaaaggucgucccucu

SEQ ID NO: 226431 - RNA, 19 nt, Artificial Sequence
  Description of Artificial Sequence: Synthetic oligonucleotide
  Antisense strand to SEQ ID NO: 226430
agagggacgaccuuucaau

SEQ ID NO: 226432 - RNA, 19 nt, Artificial Sequence
  Description of Artificial Sequence: Synthetic oligonucleotide
  Sense strand starting at position 1364 of SEQ ID NO: 2916
caaacuuuguccucgcgga

SEQ ID NO: 226433 - RNA, 19 nt, Artificial Sequence
  Description of Artificial Sequence: Synthetic oligonucleotide
  Antisense strand to SEQ ID NO: 226432
uccgcgaggacaaaguuug

SEQ ID NO: 226434 - RNA, 19 nt, Artificial Sequence
  Description of Artificial Sequence: Synthetic oligonucleotide
  Sense strand starting at position 1365 of SEQ ID NO: 2916
aaacuuuguccucgcggaa

SEQ ID NO: 226435 - RNA, 19 nt, Artificial Sequence
  Description of Artificial Sequence: Synthetic oligonucleotide
  Antisense strand to SEQ ID NO: 226434
uuccgcgaggacaaaguuu

SEQ ID NO: 226436 - RNA, 19 nt, Artificial Sequence
  Description of Artificial Sequence: Synthetic oligonucleotide
  Sense strand starting at position 1616 of SEQ ID NO: 2916
ccaaacuugggcgaaguuu

SEQ ID NO: 226437 - RNA, 19 nt, Artificial Sequence
  Description of Artificial Sequence: Synthetic oligonucleotide
  Antisense strand to SEQ ID NO: 226436
aaacuucgcccaaguuugg

SEQ ID NO: 226438 - RNA, 19 nt, Artificial Sequence
  Description of Artificial Sequence: Synthetic oligonucleotide
  Sense strand starting at position 2220 of SEQ ID NO: 2916
cgaguacucccgugaaggg

SEQ ID NO: 226439 - RNA, 19 nt, Artificial Sequence
  Description of Artificial Sequence: Synthetic oligonucleotide
  Antisense strand to SEQ ID NO: 226438
cccuucacgggaguacucg

SEQ ID NO: 226440 - RNA, 19 nt, Artificial Sequence
  Description of Artificial Sequence: Synthetic oligonucleotide
  Sense strand starting at position 2221 of SEQ ID NO: 2916
gaguacucccgugaagggu

SEQ ID NO: 226441 - RNA, 19 nt, Artificial Sequence
  Description of Artificial Sequence: Synthetic oligonucleotide
  Antisense strand to SEQ ID NO: 226440
acccuucacgggaguacuc

SEQ ID NO: 226442 - RNA, 19 nt, Artificial Sequence
  Description of Artificial Sequence: Synthetic oligonucleotide
  Sense strand starting at position 2346 of SEQ ID NO: 2916
gucaguagugccugugucu

SEQ ID NO: 226443 - RNA, 19 nt, Artificial Sequence
  Description of Artificial Sequence: Synthetic oligonucleotide
  Antisense strand to SEQ ID NO: 226442
agacacaggcacuacugac

SEQ ID NO: 226444 - RNA, 19 nt, Artificial Sequence
  Description of Artificial Sequence: Synthetic oligonucleotide
  Sense strand starting at position 2785 of SEQ ID NO: 2916
ccugccuucuuccagguaa

SEQ ID NO: 226445 - RNA, 19 nt, Artificial Sequence
  Description of Artificial Sequence: Synthetic oligonucleotide
  Antisense strand to SEQ ID NO: 226444
uuaccuggaagaaggcagg

SEQ ID NO: 226446 - RNA, 19 nt, Artificial Sequence
  Description of Artificial Sequence: Synthetic oligonucleotide
  Sense strand starting at position 2787 of SEQ ID NO: 2916
ugccuucuuccagguaaac

SEQ ID NO: 226447 - RNA, 19 nt, Artificial Sequence
  Description of Artificial Sequence: Synthetic oligonucleotide
  Antisense strand to SEQ ID NO: 226446
guuuaccuggaagaaggca

SEQ ID NO: 226448 - RNA, 19 nt, Artificial Sequence
  Description of Artificial Sequence: Synthetic oligonucleotide
  Sense strand starting at position 2921 of SEQ ID NO: 2916
uuggaagacugauacuguu

SEQ ID NO: 226449 - RNA, 19 nt, Artificial Sequence
  Description of Artificial Sequence: Synthetic oligonucleotide
  Antisense strand to SEQ ID NO: 226448
aacaguaucagucuuccaa

SEQ ID NO: 226450 - RNA, 19 nt, Artificial Sequence
  Description of Artificial Sequence: Synthetic oligonucleotide
  Sense strand starting at position 2927 of SEQ ID NO: 2916
gacugauacuguuucugga

SEQ ID NO: 226451 - RNA, 19 nt, Artificial Sequence
  Description of Artificial Sequence: Synthetic oligonucleotide
  Antisense strand to SEQ ID NO: 226450
uccagaaacaguaucaguc

SEQ ID NO: 226452 - RNA, 19 nt, Artificial Sequence
  Description of Artificial Sequence: Synthetic oligonucleotide
  Sense strand starting at position 2929 of SEQ ID NO: 2916
cugauacuguuucuggagu

SEQ ID NO: 226453 - RNA, 19 nt, Artificial Sequence
  Description of Artificial Sequence: Synthetic oligonucleotide
  Antisense strand to SEQ ID NO: 226452
acuccagaaacaguaucag

SEQ ID NO: 226454 - RNA, 19 nt, Artificial Sequence
  Description of Artificial Sequence: Synthetic oligonucleotide
  Sense strand starting at position 2931 of SEQ ID NO: 2916
gauacuguuucuggagucu

SEQ ID NO: 226455 - RNA, 19 nt, Artificial Sequence
  Description of Artificial Sequence: Synthetic oligonucleotide
  Antisense strand to SEQ ID NO: 226454
agacuccagaaacaguauc

SEQ ID NO: 226456 - RNA, 19 nt, Artificial Sequence
  Description of Artificial Sequence: Synthetic oligonucleotide
  Sense strand starting at position 2976 of SEQ ID NO: 2916
uggugucucuagcaggaga

SEQ ID NO: 226457 - RNA, 19 nt, Artificial Sequence
  Description of Artificial Sequence: Synthetic oligonucleotide
  Antisense strand to SEQ ID NO: 226456
ucuccugcuagagacacca

SEQ ID NO: 226458 - RNA, 19 nt, Artificial Sequence
  Description of Artificial Sequence: Synthetic oligonucleotide
  Sense strand starting at position 3034 of SEQ ID NO: 2916
gcccguaggauuggcuuaa

SEQ ID NO: 226459 - RNA, 19 nt, Artificial Sequence
  Description of Artificial Sequence: Synthetic oligonucleotide
  Antisense strand to SEQ ID NO: 226458
uuaagccaauccuacgggc

SEQ ID NO: 226460 - RNA, 19 nt, Artificial Sequence
  Description of Artificial Sequence: Synthetic oligonucleotide
  Sense strand starting at position 3035 of SEQ ID NO: 2916
cccguaggauuggcuuaaa

SEQ ID NO: 226461 - RNA, 19 nt, Artificial Sequence
  Description of Artificial Sequence: Synthetic oligonucleotide
  Antisense strand to SEQ ID NO: 226460
uuuaagccaauccuacggg

SEQ ID NO: 226462 - RNA, 19 nt, Artificial Sequence
  Description of Artificial Sequence: Synthetic oligonucleotide
  Sense strand starting at position 3045 of SEQ ID NO: 2916
uggcuuaaacaauguguga

SEQ ID NO: 226463 - RNA, 19 nt, Artificial Sequence
  Description of Artificial Sequence: Synthetic oligonucleotide
  Antisense strand to SEQ ID NO: 226462
ucacacauuguuuaagcca

SEQ ID NO: 226464 - RNA, 19 nt, Artificial Sequence
  Description of Artificial Sequence: Synthetic oligonucleotide
  Sense strand starting at position 3047 of SEQ ID NO: 2916
gcuuaaacaaugugugaga

SEQ ID NO: 226465 - RNA, 19 nt, Artificial Sequence
  Description of Artificial Sequence: Synthetic oligonucleotide
  Antisense strand to SEQ ID NO: 226464
ucucacacauuguuuaagc

SEQ ID NO: 226466 - RNA, 19 nt, Artificial Sequence
  Description of Artificial Sequence: Synthetic oligonucleotide
  Sense strand starting at position 3308 of SEQ ID NO: 2916
cuucuuggguccuauuaau

SEQ ID NO: 226467 - RNA, 19 nt, Artificial Sequence
  Description of Artificial Sequence: Synthetic oligonucleotide
  Antisense strand to SEQ ID NO: 226466
auuaauaggacccaagaag

SEQ ID NO: 226468 - RNA, 19 nt, Artificial Sequence
  Description of Artificial Sequence: Synthetic oligonucleotide
  Sense strand starting at position 3314 of SEQ ID NO: 2916
ggguccuauuaauucuaaa

SEQ ID NO: 226469 - RNA, 19 nt, Artificial Sequence
  Description of Artificial Sequence: Synthetic oligonucleotide
  Antisense strand to SEQ ID NO: 226468
uuuagaauuaauaggaccc

SEQ ID NO: 226470 - RNA, 19 nt, Artificial Sequence
  Description of Artificial Sequence: Synthetic oligonucleotide
  Sense strand starting at position 3347 of SEQ ID NO: 2916
uuacuuauaauguggcgau

SEQ ID NO: 226471 - RNA, 19 nt, Artificial Sequence
  Description of Artificial Sequence: Synthetic oligonucleotide
  Antisense strand to SEQ ID NO: 226470
aucgccacauuauaaguaa

SEQ ID NO: 226472 - RNA, 19 nt, Artificial Sequence
  Description of Artificial Sequence: Synthetic oligonucleotide
  Sense strand starting at position 3348 of SEQ ID NO: 2916
uacuuauaauguggcgauu

SEQ ID NO: 226473 - RNA, 19 nt, Artificial Sequence
  Description of Artificial Sequence: Synthetic oligonucleotide
  Antisense strand to SEQ ID NO: 226472
aaucgccacauuauaagua

SEQ ID NO: 226474 - RNA, 19 nt, Artificial Sequence
  Description of Artificial Sequence: Synthetic oligonucleotide
  Sense strand starting at position 3351 of SEQ ID NO: 2916
uuauaauguggcgauucca

SEQ ID NO: 226475 - RNA, 19 nt, Artificial Sequence
  Description of Artificial Sequence: Synthetic oligonucleotide
  Antisense strand to SEQ ID NO: 226474
uggaaucgccacauuauaa

SEQ ID NO: 226476 - RNA, 19 nt, Artificial Sequence
  Description of Artificial Sequence: Synthetic oligonucleotide
  Sense strand starting at position 3445 of SEQ ID NO: 2916
ucccgucuccaggaggaua

SEQ ID NO: 226477 - RNA, 19 nt, Artificial Sequence
  Description of Artificial Sequence: Synthetic oligonucleotide
  Antisense strand to SEQ ID NO: 226476
uauccuccuggagacggga

SEQ ID NO: 226478 - RNA, 19 nt, Artificial Sequence
  Description of Artificial Sequence: Synthetic oligonucleotide
  Sense strand starting at position 3447 of SEQ ID NO: 2916
ccgucuccaggaggauaau

SEQ ID NO: 226479 - RNA, 19 nt, Artificial Sequence
  Description of Artificial Sequence: Synthetic oligonucleotide
  Antisense strand to SEQ ID NO: 226478
auuauccuccuggagacgg

SEQ ID NO: 226480 - RNA, 19 nt, Artificial Sequence
  Description of Artificial Sequence: Synthetic oligonucleotide
  Sense strand starting at position 3481 of SEQ ID NO: 2916
ggcccugauugguaucauu

SEQ ID NO: 226481 - RNA, 19 nt, Artificial Sequence
  Description of Artificial Sequence: Synthetic oligonucleotide
  Antisense strand to SEQ ID NO: 226480
aaugauaccaaucagggcc

SEQ ID NO: 226482 - RNA, 19 nt, Artificial Sequence
  Description of Artificial Sequence: Synthetic oligonucleotide
  Sense strand starting at position 3490 of SEQ ID NO: 2916
ugguaucauuucuccagca

SEQ ID NO: 226483 - RNA, 19 nt, Artificial Sequence
  Description of Artificial Sequence: Synthetic oligonucleotide
  Antisense strand to SEQ ID NO: 226482
ugcuggagaaaugauacca

SEQ ID NO: 226484 - RNA, 19 nt, Artificial Sequence
  Description of Artificial Sequence: Synthetic oligonucleotide
  Sense strand starting at position 3529 of SEQ ID NO: 2916
cgaaaugaaugccaugaaa

SEQ ID NO: 226485 - RNA, 19 nt, Artificial Sequence
  Description of Artificial Sequence: Synthetic oligonucleotide
  Antisense strand to SEQ ID NO: 226484
uuucauggcauucauuucg

SEQ ID NO: 226486 - RNA, 19 nt, Artificial Sequence
  Description of Artificial Sequence: Synthetic oligonucleotide
  Sense strand starting at position 3565 of SEQ ID NO: 2916
aauggauauugucucagag

SEQ ID NO: 226487 - RNA, 19 nt, Artificial Sequence
  Description of Artificial Sequence: Synthetic oligonucleotide
  Antisense strand to SEQ ID NO: 226486
cucugagacaauauccauu

SEQ ID NO: 226488 - RNA, 19 nt, Artificial Sequence
  Description of Artificial Sequence: Synthetic oligonucleotide
  Sense strand starting at position 3567 of SEQ ID NO: 2916
uggauauugucucagagag

SEQ ID NO: 226489 - RNA, 19 nt, Artificial Sequence
  Description of Artificial Sequence: Synthetic oligonucleotide
  Antisense strand to SEQ ID NO: 226488
cucucugagacaauaucca

SEQ ID NO: 226490 - RNA, 19 nt, Artificial Sequence
  Description of Artificial Sequence: Synthetic oligonucleotide
  Sense strand starting at position 3579 of SEQ ID NO: 2916
cagagagccucuuccgaca

SEQ ID NO: 226491 - RNA, 19 nt, Artificial Sequence
  Description of Artificial Sequence: Synthetic oligonucleotide
  Antisense strand to SEQ ID NO: 226490
ugucggaagaggcucucug

SEQ ID NO: 226492 - RNA, 19 nt, Artificial Sequence
  Description of Artificial Sequence: Synthetic oligonucleotide
  Sense strand starting at position 3581 of SEQ ID NO: 2916
gagagccucuuccgacaga

SEQ ID NO: 226493 - RNA, 19 nt, Artificial Sequence
  Description of Artificial Sequence: Synthetic oligonucleotide
  Antisense strand to SEQ ID NO: 226492
ucugucggaagaggcucuc

SEQ ID NO: 226494 - RNA, 19 nt, Artificial Sequence
  Description of Artificial Sequence: Synthetic oligonucleotide
  Sense strand starting at position 3582 of SEQ ID NO: 2916
agagccucuuccgacagaa

SEQ ID NO: 226495 - RNA, 19 nt, Artificial Sequence
  Description of Artificial Sequence: Synthetic oligonucleotide
  Antisense strand to SEQ ID NO: 226494
uucugucggaagaggcucu

SEQ ID NO: 226496 - RNA, 19 nt, Artificial Sequence
  Description of Artificial Sequence: Synthetic oligonucleotide
  Sense strand starting at position 3780 of SEQ ID NO: 2916
cugcuauuggucugcucau

SEQ ID NO: 226497 - RNA, 19 nt, Artificial Sequence
  Description of Artificial Sequence: Synthetic oligonucleotide
  Antisense strand to SEQ ID NO: 226496
augagcagaccaauagcag

SEQ ID NO: 226498 - RNA, 19 nt, Artificial Sequence
  Description of Artificial Sequence: Synthetic oligonucleotide
  Sense strand starting at position 3903 of SEQ ID NO: 2916
aggaguugacuuggaauug

SEQ ID NO: 226499 - RNA, 19 nt, Artificial Sequence
  Description of Artificial Sequence: Synthetic oligonucleotide
  Antisense strand to SEQ ID NO: 226498
caauuccaagucaacuccu

SEQ ID NO: 226500 - RNA, 19 nt, Artificial Sequence
  Description of Artificial Sequence: Synthetic oligonucleotide
  Sense strand starting at position 71 of SEQ ID NO: 2917
guaccaugaugccugagaa

SEQ ID NO: 226501 - RNA, 19 nt, Artificial Sequence
  Description of Artificial Sequence: Synthetic oligonucleotide
  Antisense strand to SEQ ID NO: 226500
uucucaggcaucaugguac

SEQ ID NO: 226502 - RNA, 19 nt, Artificial Sequence
  Description of Artificial Sequence: Synthetic oligonucleotide
  Sense strand starting at position 243 of SEQ ID NO: 2917
ugguccuuccaagauuauc

SEQ ID NO: 226503 - RNA, 19 nt, Artificial Sequence
  Description of Artificial Sequence: Synthetic oligonucleotide
  Antisense strand to SEQ ID NO: 226502
gauaaucuuggaaggacca

SEQ ID NO: 226504 - RNA, 19 nt, Artificial Sequence
  Description of Artificial Sequence: Synthetic oligonucleotide
  Sense strand starting at position 397 of SEQ ID NO: 2917
uggacugucaucggaacga

SEQ ID NO: 226505 - RNA, 19 nt, Artificial Sequence
  Description of Artificial Sequence: Synthetic oligonucleotide
  Antisense strand to SEQ ID NO: 226504
ucguuccgaugacagucca

SEQ ID NO: 226506 - RNA, 19 nt, Artificial Sequence
  Description of Artificial Sequence: Synthetic oligonucleotide
  Sense strand starting at position 515 of SEQ ID NO: 2917
agaguauuaagccaggcaa

SEQ ID NO: 226507 - RNA, 19 nt, Artificial Sequence
  Description of Artificial Sequence: Synthetic oligonucleotide
  Antisense strand to SEQ ID NO: 226506
uugccuggcuuaauacucu

SEQ ID NO: 226508 - RNA, 19 nt, Artificial Sequence
  Description of Artificial Sequence: Synthetic oligonucleotide
  Sense strand starting at position 517 of SEQ ID NO: 2917
aguauuaagccaggcaaga

SEQ ID NO: 226509 - RNA, 19 nt, Artificial Sequence
  Description of Artificial Sequence: Synthetic oligonucleotide
  Antisense strand to SEQ ID NO: 226508
ucuugccuggcuuaauacu

SEQ ID NO: 226510 - RNA, 19 nt, Artificial Sequence
  Description of Artificial Sequence: Synthetic oligonucleotide
  Sense strand starting at position 987 of SEQ ID NO: 2917
gucagaguguugagaggaa

SEQ ID NO: 226511 - RNA, 19 nt, Artificial Sequence
  Description of Artificial Sequence: Synthetic oligonucleotide
  Antisense strand to SEQ ID NO: 226510
uuccucucaacacucugac

SEQ ID NO: 226512 - RNA, 19 nt, Artificial Sequence
  Description of Artificial Sequence: Synthetic oligonucleotide
  Sense strand starting at position 1002 of SEQ ID NO: 2917
ggaaccucuuggcuggaaa

SEQ ID NO: 226513 - RNA, 19 nt, Artificial Sequence
  Description of Artificial Sequence: Synthetic oligonucleotide
  Antisense strand to SEQ ID NO: 226512
uuuccagccaagagguucc

SEQ ID NO: 226514 - RNA, 19 nt, Artificial Sequence
  Description of Artificial Sequence: Synthetic oligonucleotide
  Sense strand starting at position 1003 of SEQ ID NO: 2917
gaaccucuuggcuggaaau

SEQ ID NO: 226515 - RNA, 19 nt, Artificial Sequence
  Description of Artificial Sequence: Synthetic oligonucleotide
  Antisense strand to SEQ ID NO: 226514
auuuccagccaagagguuc

SEQ ID NO: 226516 - RNA, 19 nt, Artificial Sequence
  Description of Artificial Sequence: Synthetic oligonucleotide
  Sense strand starting at position 1141 of SEQ ID NO: 2917
cuuggaaggucucuuaggu

SEQ ID NO: 226517 - RNA, 19 nt, Artificial Sequence
  Description of Artificial Sequence: Synthetic oligonucleotide
  Antisense strand to SEQ ID NO: 226516
accuaagagaccuuccaag

SEQ ID NO: 226518 - RNA, 19 nt, Artificial Sequence
  Description of Artificial Sequence: Synthetic oligonucleotide
  Sense strand starting at position 1441 of SEQ ID NO: 2917
uacugcaaucgguaaagcu

SEQ ID NO: 226519 - RNA, 19 nt, Artificial Sequence
  Description of Artificial Sequence: Synthetic oligonucleotide
  Antisense strand to SEQ ID NO: 226518
agcuuuaccgauugcagua

SEQ ID NO: 226520 - RNA, 19 nt, Artificial Sequence
  Description of Artificial Sequence: Synthetic oligonucleotide
  Sense strand starting at position 1653 of SEQ ID NO: 2917
cauccaguucugggugaca

SEQ ID NO: 226521 - RNA, 19 nt, Artificial Sequence
  Description of Artificial Sequence: Synthetic oligonucleotide
  Antisense strand to SEQ ID NO: 226520
ugucacccagaacuggaug

SEQ ID NO: 226522 - RNA, 19 nt, Artificial Sequence
  Description of Artificial Sequence: Synthetic oligonucleotide
  Sense strand starting at position 2305 of SEQ ID NO: 2917
aguguauacccauguaacu

SEQ ID NO: 226523 - RNA, 19 nt, Artificial Sequence
  Description of Artificial Sequence: Synthetic oligonucleotide
  Antisense strand to SEQ ID NO: 226522
aguuacauggguauacacu

SEQ ID NO: 226524 - RNA, 19 nt, Artificial Sequence
  Description of Artificial Sequence: Synthetic oligonucleotide
  Sense strand starting at position 2344 of SEQ ID NO: 2917
cccguauaacuagguaauu

SEQ ID NO: 226525 - RNA, 19 nt, Artificial Sequence
  Description of Artificial Sequence: Synthetic oligonucleotide
  Antisense strand to SEQ ID NO: 226524
aauuaccuaguuauacggg

SEQ ID NO: 226526 - RNA, 19 nt, Artificial Sequence
  Description of Artificial Sequence: Synthetic oligonucleotide
  Sense strand starting at position 2345 of SEQ ID NO: 2917
ccguauaacuagguaauua

SEQ ID NO: 226527 - RNA, 19 nt, Artificial Sequence
  Description of Artificial Sequence: Synthetic oligonucleotide
  Antisense strand to SEQ ID NO: 226526
uaauuaccuaguuauacgg

SEQ ID NO: 226528 - RNA, 19 nt, Artificial Sequence
  Description of Artificial Sequence: Synthetic oligonucleotide
  Sense strand starting at position 2346 of SEQ ID NO: 2917
cguauaacuagguaauuag

SEQ ID NO: 226529 - RNA, 19 nt, Artificial Sequence
  Description of Artificial Sequence: Synthetic oligonucleotide
  Antisense strand to SEQ ID NO: 226528
cuaauuaccuaguuauacg

SEQ ID NO: 226530 - RNA, 19 nt, Artificial Sequence
  Description of Artificial Sequence: Synthetic oligonucleotide
  Sense strand starting at position 2541 of SEQ ID NO: 2917
caggcuagauuucuguguu

SEQ ID NO: 226531 - RNA, 19 nt, Artificial Sequence
  Description of Artificial Sequence: Synthetic oligonucleotide
  Antisense strand to SEQ ID NO: 226530
aacacagaaaucuagccug

SEQ ID NO: 226532 - RNA, 19 nt, Artificial Sequence
  Description of Artificial Sequence: Synthetic oligonucleotide
  Sense strand starting at position 2544 of SEQ ID NO: 2917
gcuagauuucuguguucuc

SEQ ID NO: 226533 - RNA, 19 nt, Artificial Sequence
  Description of Artificial Sequence: Synthetic oligonucleotide
  Antisense strand to SEQ ID NO: 226532
gagaacacagaaaucuagc

SEQ ID NO: 226534 - RNA, 19 nt, Artificial Sequence
  Description of Artificial Sequence: Synthetic oligonucleotide
  Sense strand starting at position 2547 of SEQ ID NO: 2917
agauuucuguguucuccuu

SEQ ID NO: 226535 - RNA, 19 nt, Artificial Sequence
  Description of Artificial Sequence: Synthetic oligonucleotide
  Antisense strand to SEQ ID NO: 226534
aaggagaacacagaaaucu

SEQ ID NO: 226536 - RNA, 19 nt, Artificial Sequence
  Description of Artificial Sequence: Synthetic oligonucleotide
  Sense strand starting at position 3332 of SEQ ID NO: 2917
cagaguuacuuagcugacu

SEQ ID NO: 226537 - RNA, 19 nt, Artificial Sequence
  Description of Artificial Sequence: Synthetic oligonucleotide
  Antisense strand to SEQ ID NO: 226536
agucagcuaaguaacucug

SEQ ID NO: 226538 - RNA, 19 nt, Artificial Sequence
  Description of Artificial Sequence: Synthetic oligonucleotide
  Sense strand starting at position 3333 of SEQ ID NO: 2917
agaguuacuuagcugacuu

SEQ ID NO: 226539 - RNA, 19 nt, Artificial Sequence
  Description of Artificial Sequence: Synthetic oligonucleotide
  Antisense strand to SEQ ID NO: 226538
aagucagcuaaguaacucu

SEQ ID NO: 226540 - RNA, 19 nt, Artificial Sequence
  Description of Artificial Sequence: Synthetic oligonucleotide
  Sense strand starting at position 3345 of SEQ ID NO: 2917
cugacuugauccuugugga

SEQ ID NO: 226541 - RNA, 19 nt, Artificial Sequence
  Description of Artificial Sequence: Synthetic oligonucleotide
  Antisense strand to SEQ ID NO: 226540
uccacaaggaucaagucag

SEQ ID NO: 226542 - RNA, 19 nt, Artificial Sequence
  Description of Artificial Sequence: Synthetic oligonucleotide
  Sense strand starting at position 3346 of SEQ ID NO: 2917
ugacuugauccuuguggau

SEQ ID NO: 226543 - RNA, 19 nt, Artificial Sequence
  Description of Artificial Sequence: Synthetic oligonucleotide
  Antisense strand to SEQ ID NO: 226542
auccacaaggaucaaguca

SEQ ID NO: 226544 - RNA, 19 nt, Artificial Sequence
  Description of Artificial Sequence: Synthetic oligonucleotide
  Sense strand starting at position 3350 of SEQ ID NO: 2917
uugauccuuguggaugauu

SEQ ID NO: 226545 - RNA, 19 nt, Artificial Sequence
  Description of Artificial Sequence: Synthetic oligonucleotide
  Antisense strand to SEQ ID NO: 226544
aaucauccacaaggaucaa

SEQ ID NO: 226546 - RNA, 19 nt, Artificial Sequence
  Description of Artificial Sequence: Synthetic oligonucleotide
  Sense strand starting at position 3352 of SEQ ID NO: 2917
gauccuuguggaugauuaa

SEQ ID NO: 226547 - RNA, 19 nt, Artificial Sequence
  Description of Artificial Sequence: Synthetic oligonucleotide
  Antisense strand to SEQ ID NO: 226546
uuaaucauccacaaggauc

SEQ ID NO: 226548 - RNA, 19 nt, Artificial Sequence
  Description of Artificial Sequence: Synthetic oligonucleotide
  Sense strand starting at position 3359 of SEQ ID NO: 2917
guggaugauuaaucuagau

SEQ ID NO: 226549 - RNA, 19 nt, Artificial Sequence
  Description of Artificial Sequence: Synthetic oligonucleotide
  Antisense strand to SEQ ID NO: 226548
aucuagauuaaucauccac

SEQ ID NO: 226550 - RNA, 19 nt, Artificial Sequence
  Description of Artificial Sequence: Synthetic oligonucleotide
  Sense strand starting at position 3452 of SEQ ID NO: 2917
gacugagggucugugauaa

SEQ ID NO: 226551 - RNA, 19 nt, Artificial Sequence
  Description of Artificial Sequence: Synthetic oligonucleotide
  Antisense strand to SEQ ID NO: 226550
uuaucacagacccucaguc

SEQ ID NO: 226552 - RNA, 19 nt, Artificial Sequence
  Description of Artificial Sequence: Synthetic oligonucleotide
  Sense strand starting at position 3518 of SEQ ID NO: 2917
ggagguauucugggcuaau

SEQ ID NO: 226553 - RNA, 19 nt, Artificial Sequence
  Description of Artificial Sequence: Synthetic oligonucleotide
  Antisense strand to SEQ ID NO: 226552
auuagcccagaauaccucc

SEQ ID NO: 226554 - RNA, 19 nt, Artificial Sequence
  Description of Artificial Sequence: Synthetic oligonucleotide
  Sense strand starting at position 3519 of SEQ ID NO: 2917
gagguauucugggcuaauc

SEQ ID NO: 226555 - RNA, 19 nt, Artificial Sequence
  Description of Artificial Sequence: Synthetic oligonucleotide
  Antisense strand to SEQ ID NO: 226554
gauuagcccagaauaccuc

SEQ ID NO: 226556 - RNA, 19 nt, Artificial Sequence
  Description of Artificial Sequence: Synthetic oligonucleotide
  Sense strand starting at position 3630 of SEQ ID NO: 2917
uuggaaauuaaguggugau

SEQ ID NO: 226557 - RNA, 19 nt, Artificial Sequence
  Description of Artificial Sequence: Synthetic oligonucleotide
  Antisense strand to SEQ ID NO: 226556
aucaccacuuaauuuccaa

SEQ ID NO: 226558 - RNA, 19 nt, Artificial Sequence
  Description of Artificial Sequence: Synthetic oligonucleotide
  Sense strand starting at position 3631 of SEQ ID NO: 2917
uggaaauuaaguggugauu

SEQ ID NO: 226559 - RNA, 19 nt, Artificial Sequence
  Description of Artificial Sequence: Synthetic oligonucleotide
  Antisense strand to SEQ ID NO: 226558
aaucaccacuuaauuucca

SEQ ID NO: 226560 - RNA, 19 nt, Artificial Sequence
  Description of Artificial Sequence: Synthetic oligonucleotide
  Sense strand starting at position 3673 of SEQ ID NO: 2917
acugauauuucccaaagag

SEQ ID NO: 226561 - RNA, 19 nt, Artificial Sequence
  Description of Artificial Sequence: Synthetic oligonucleotide
  Antisense strand to SEQ ID NO: 226560
cucuuugggaaauaucagu

SEQ ID NO: 226562 - RNA, 19 nt, Artificial Sequence
  Description of Artificial Sequence: Synthetic oligonucleotide
  Sense strand starting at position 3789 of SEQ ID NO: 2917
acaucauggcauuaagcaa

SEQ ID NO: 226563 - RNA, 19 nt, Artificial Sequence
  Description of Artificial Sequence: Synthetic oligonucleotide
  Antisense strand to SEQ ID NO: 226562
uugcuuaaugccaugaugu

SEQ ID NO: 226564 - RNA, 19 nt, Artificial Sequence
  Description of Artificial Sequence: Synthetic oligonucleotide
  Sense strand starting at position 3796 of SEQ ID NO: 2917
ggcauuaagcaagguuaug

SEQ ID NO: 226565 - RNA, 19 nt, Artificial Sequence
  Description of Artificial Sequence: Synthetic oligonucleotide
  Antisense strand to SEQ ID NO: 226564
cauaaccuugcuuaaugcc

SEQ ID NO: 226566 - RNA, 19 nt, Artificial Sequence
  Description of Artificial Sequence: Synthetic oligonucleotide
  Sense strand starting at position 3805 of SEQ ID NO: 2917
caagguuauggaugguuau

SEQ ID NO: 226567 - RNA, 19 nt, Artificial Sequence
  Description of Artificial Sequence: Synthetic oligonucleotide
  Antisense strand to SEQ ID NO: 226566
auaaccauccauaaccuug

SEQ ID NO: 226568 - RNA, 19 nt, Artificial Sequence
  Description of Artificial Sequence: Synthetic oligonucleotide
  Sense strand starting at position 3806 of SEQ ID NO: 2917
aagguuauggaugguuaua

SEQ ID NO: 226569 - RNA, 19 nt, Artificial Sequence
  Description of Artificial Sequence: Synthetic oligonucleotide
  Antisense strand to SEQ ID NO: 226568
uauaaccauccauaaccuu

SEQ ID NO: 226570 - RNA, 19 nt, Artificial Sequence
  Description of Artificial Sequence: Synthetic oligonucleotide
  Sense strand starting at position 3808 of SEQ ID NO: 2917
gguuauggaugguuauacu

SEQ ID NO: 226571 - RNA, 19 nt, Artificial Sequence
  Description of Artificial Sequence: Synthetic oligonucleotide
  Antisense strand to SEQ ID NO: 226570
aguauaaccauccauaacc

SEQ ID NO: 226572 - RNA, 19 nt, Artificial Sequence
  Description of Artificial Sequence: Synthetic oligonucleotide
  Sense strand starting at position 3816 of SEQ ID NO: 2917
augguuauacuugaagucu

SEQ ID NO: 226573 - RNA, 19 nt, Artificial Sequence
  Description of Artificial Sequence: Synthetic oligonucleotide
  Antisense strand to SEQ ID NO: 226572
agacuucaaguauaaccau

SEQ ID NO: 226574 - RNA, 19 nt, Artificial Sequence
  Description of Artificial Sequence: Synthetic oligonucleotide
  Sense strand starting at position 3929 of SEQ ID NO: 2917
uguaaagcuccagagcuuu

SEQ ID NO: 226575 - RNA, 19 nt, Artificial Sequence
  Description of Artificial Sequence: Synthetic oligonucleotide
  Antisense strand to SEQ ID NO: 226574
aaagcucuggagcuuuaca

SEQ ID NO: 226576 - RNA, 19 nt, Artificial Sequence
  Description of Artificial Sequence: Synthetic oligonucleotide
  Sense strand starting at position 3935 of SEQ ID NO: 2917
gcuccagagcuuugaagau

SEQ ID NO: 226577 - RNA, 19 nt, Artificial Sequence
  Description of Artificial Sequence: Synthetic oligonucleotide
  Antisense strand to SEQ ID NO: 226576
aucuucaaagcucuggagc

SEQ ID NO: 226578 - RNA, 19 nt, Artificial Sequence
  Description of Artificial Sequence: Synthetic oligonucleotide
  Sense strand starting at position 3939 of SEQ ID NO: 2917
cagagcuuugaagauaugu

SEQ ID NO: 226579 - RNA, 19 nt, Artificial Sequence
  Description of Artificial Sequence: Synthetic oligonucleotide
  Antisense strand to SEQ ID NO: 226578
acauaucuucaaagcucug

SEQ ID NO: 226580 - RNA, 19 nt, Artificial Sequence
  Description of Artificial Sequence: Synthetic oligonucleotide
  Sense strand starting at position 93 of SEQ ID NO: 2918
ccgauauguucuuuauaga

SEQ ID NO: 226581 - RNA, 19 nt, Artificial Sequence
  Description of Artificial Sequence: Synthetic oligonucleotide
  Antisense strand to SEQ ID NO: 226580
ucuauaaagaacauaucgg

SEQ ID NO: 226582 - RNA, 19 nt, Artificial Sequence
  Description of Artificial Sequence: Synthetic oligonucleotide
  Sense strand starting at position 94 of SEQ ID NO: 2918
cgauauguucuuuauagaa

SEQ ID NO: 226583 - RNA, 19 nt, Artificial Sequence
  Description of Artificial Sequence: Synthetic oligonucleotide
  Antisense strand to SEQ ID NO: 226582
uucuauaaagaacauaucg

SEQ ID NO: 226584 - RNA, 19 nt, Artificial Sequence
  Description of Artificial Sequence: Synthetic oligonucleotide
  Sense strand starting at position 384 of SEQ ID NO: 2918
ccagguaaacacugucaua

SEQ ID NO: 226585 - RNA, 19 nt, Artificial Sequence
  Description of Artificial Sequence: Synthetic oligonucleotide
  Antisense strand to SEQ ID NO: 226584
uaugacaguguuuaccugg

SEQ ID NO: 226586 - RNA, 19 nt, Artificial Sequence
  Description of Artificial Sequence: Synthetic oligonucleotide
  Sense strand starting at position 745 of SEQ ID NO: 2918
gccuucuaagguuacagaa

SEQ ID NO: 226587 - RNA, 19 nt, Artificial Sequence
  Description of Artificial Sequence: Synthetic oligonucleotide
  Antisense strand to SEQ ID NO: 226586
uucuguaaccuuagaaggc

SEQ ID NO: 226588 - RNA, 19 nt, Artificial Sequence
  Description of Artificial Sequence: Synthetic oligonucleotide
  Sense strand starting at position 832 of SEQ ID NO: 2918
gauaaacuucgagagcagu

SEQ ID NO: 226589 - RNA, 19 nt, Artificial Sequence
  Description of Artificial Sequence: Synthetic oligonucleotide
  Antisense strand to SEQ ID NO: 226588
acugcucucgaaguuuauc

SEQ ID NO: 226590 - RNA, 19 nt, Artificial Sequence
  Description of Artificial Sequence: Synthetic oligonucleotide
  Sense strand starting at position 1089 of SEQ ID NO: 2918
auuaauuagugggcacuaa

SEQ ID NO: 226591 - RNA, 19 nt, Artificial Sequence
  Description of Artificial Sequence: Synthetic oligonucleotide
  Antisense strand to SEQ ID NO: 226590
uuagugcccacuaauuaau

SEQ ID NO: 226592 - RNA, 19 nt, Artificial Sequence
  Description of Artificial Sequence: Synthetic oligonucleotide
  Sense strand starting at position 1160 of SEQ ID NO: 2918
aaaccauauguuuggguca

SEQ ID NO: 226593 - RNA, 19 nt, Artificial Sequence
  Description of Artificial Sequence: Synthetic oligonucleotide
  Antisense strand to SEQ ID NO: 226592
ugacccaaacauaugguuu

SEQ ID NO: 226594 - RNA, 19 nt, Artificial Sequence
  Description of Artificial Sequence: Synthetic oligonucleotide
  Sense strand starting at position 1190 of SEQ ID NO: 2918
ugagaaaugucugccacua

SEQ ID NO: 226595 - RNA, 19 nt, Artificial Sequence
  Description of Artificial Sequence: Synthetic oligonucleotide
  Antisense strand to SEQ ID NO: 226594
uaguggcagacauuucuca

SEQ ID NO: 226596 - RNA, 19 nt, Artificial Sequence
  Description of Artificial Sequence: Synthetic oligonucleotide
  Sense strand starting at position 1283 of SEQ ID NO: 2918
ggaaacaccuggcugaauu

SEQ ID NO: 226597 - RNA, 19 nt, Artificial Sequence
  Description of Artificial Sequence: Synthetic oligonucleotide
  Antisense strand to SEQ ID NO: 226596
aauucagccagguguuucc

SEQ ID NO: 226598 - RNA, 19 nt, Artificial Sequence
  Description of Artificial Sequence: Synthetic oligonucleotide
  Sense strand starting at position 1293 of SEQ ID NO: 2918
ggcugaauuaaguguaaau

SEQ ID NO: 226599 - RNA, 19 nt, Artificial Sequence
  Description of Artificial Sequence: Synthetic oligonucleotide
  Antisense strand to SEQ ID NO: 226598
auuuacacuuaauucagcc

SEQ ID NO: 226600 - RNA, 19 nt, Artificial Sequence
  Description of Artificial Sequence: Synthetic oligonucleotide
  Sense strand starting at position 2076 of SEQ ID NO: 2918
ggaaauugccgacaaacuu

SEQ ID NO: 226601 - RNA, 19 nt, Artificial Sequence
  Description of Artificial Sequence: Synthetic oligonucleotide
  Antisense strand to SEQ ID NO: 226600
aaguuugucggcaauuucc

SEQ ID NO: 226602 - RNA, 19 nt, Artificial Sequence
  Description of Artificial Sequence: Synthetic oligonucleotide
  Sense strand starting at position 2084 of SEQ ID NO: 2918
ccgacaaacuugucgaaug

SEQ ID NO: 226603 - RNA, 19 nt, Artificial Sequence
  Description of Artificial Sequence: Synthetic oligonucleotide
  Antisense strand to SEQ ID NO: 226602
cauucgacaaguuugucgg

SEQ ID NO: 226604 - RNA, 19 nt, Artificial Sequence
  Description of Artificial Sequence: Synthetic oligonucleotide
  Sense strand starting at position 2086 of SEQ ID NO: 2918
gacaaacuugucgaaugca

SEQ ID NO: 226605 - RNA, 19 nt, Artificial Sequence
  Description of Artificial Sequence: Synthetic oligonucleotide
  Antisense strand to SEQ ID NO: 226604
ugcauucgacaaguuuguc

SEQ ID NO: 226606 - RNA, 19 nt, Artificial Sequence
  Description of Artificial Sequence: Synthetic oligonucleotide
  Sense strand starting at position 2095 of SEQ ID NO: 2918
gucgaaugcaaggauucua

SEQ ID NO: 226607 - RNA, 19 nt, Artificial Sequence
  Description of Artificial Sequence: Synthetic oligonucleotide
  Antisense strand to SEQ ID NO: 226606
uagaauccuugcauucgac

SEQ ID NO: 226608 - RNA, 19 nt, Artificial Sequence
  Description of Artificial Sequence: Synthetic oligonucleotide
  Sense strand starting at position 2166 of SEQ ID NO: 2918
cgccauauugaauaagcga

SEQ ID NO: 226609 - RNA, 19 nt, Artificial Sequence
  Description of Artificial Sequence: Synthetic oligonucleotide
  Antisense strand to SEQ ID NO: 226608
ucgcuuauucaauauggcg

SEQ ID NO: 226610 - RNA, 19 nt, Artificial Sequence
  Description of Artificial Sequence: Synthetic oligonucleotide
  Sense strand starting at position 2542 of SEQ ID NO: 2918
acauuucccucucagagga

SEQ ID NO: 226611 - RNA, 19 nt, Artificial Sequence
  Description of Artificial Sequence: Synthetic oligonucleotide
  Antisense strand to SEQ ID NO: 226610
uccucugagagggaaaugu

SEQ ID NO: 226612 - RNA, 19 nt, Artificial Sequence
  Description of Artificial Sequence: Synthetic oligonucleotide
  Sense strand starting at position 2600 of SEQ ID NO: 2918
ugacuuaggccuuaagacu

SEQ ID NO: 226613 - RNA, 19 nt, Artificial Sequence
  Description of Artificial Sequence: Synthetic oligonucleotide
  Antisense strand to SEQ ID NO: 226612
agucuuaaggccuaaguca

SEQ ID NO: 226614 - RNA, 19 nt, Artificial Sequence
  Description of Artificial Sequence: Synthetic oligonucleotide
  Sense strand starting at position 2646 of SEQ ID NO: 2918
ccugauacagugcaugauu

SEQ ID NO: 226615 - RNA, 19 nt, Artificial Sequence
  Description of Artificial Sequence: Synthetic oligonucleotide
  Antisense strand to SEQ ID NO: 226614
aaucaugcacuguaucagg

SEQ ID NO: 226616 - RNA, 19 nt, Artificial Sequence
  Description of Artificial Sequence: Synthetic oligonucleotide
  Sense strand starting at position 2649 of SEQ ID NO: 2918
gauacagugcaugauuguu

SEQ ID NO: 226617 - RNA, 19 nt, Artificial Sequence
  Description of Artificial Sequence: Synthetic oligonucleotide
  Antisense strand to SEQ ID NO: 226616
aacaaucaugcacuguauc

SEQ ID NO: 226618 - RNA, 19 nt, Artificial Sequence
  Description of Artificial Sequence: Synthetic oligonucleotide
  Sense strand starting at position 2670 of SEQ ID NO: 2918
gucgcuguuguguuagcaa

SEQ ID NO: 226619 - RNA, 19 nt, Artificial Sequence
  Description of Artificial Sequence: Synthetic oligonucleotide
  Antisense strand to SEQ ID NO: 226618
uugcuaacacaacagcgac

SEQ ID NO: 226620 - RNA, 19 nt, Artificial Sequence
  Description of Artificial Sequence: Synthetic oligonucleotide
  Sense strand starting at position 2806 of SEQ ID NO: 2918
ccaggauugcauugcaaau

SEQ ID NO: 226621 - RNA, 19 nt, Artificial Sequence
  Description of Artificial Sequence: Synthetic oligonucleotide
  Antisense strand to SEQ ID NO: 226620
auuugcaaugcaauccugg

SEQ ID NO: 226622 - RNA, 19 nt, Artificial Sequence
  Description of Artificial Sequence: Synthetic oligonucleotide
  Sense strand starting at position 2850 of SEQ ID NO: 2918
gggauccagugcuugaacu

SEQ ID NO: 226623 - RNA, 19 nt, Artificial Sequence
  Description of Artificial Sequence: Synthetic oligonucleotide
  Antisense strand to SEQ ID NO: 226622
aguucaagcacuggauccc

SEQ ID NO: 226624 - RNA, 19 nt, Artificial Sequence
  Description of Artificial Sequence: Synthetic oligonucleotide
  Sense strand starting at position 2914 of SEQ ID NO: 2918
gguauagaaguguaacguu

SEQ ID NO: 226625 - RNA, 19 nt, Artificial Sequence
  Description of Artificial Sequence: Synthetic oligonucleotide
  Antisense strand to SEQ ID NO: 226624
aacguuacacuucuauacc

SEQ ID NO: 226626 - RNA, 19 nt, Artificial Sequence
  Description of Artificial Sequence: Synthetic oligonucleotide
  Sense strand starting at position 3077 of SEQ ID NO: 2918
ucacuuaaccguuauugaa

SEQ ID NO: 226627 - RNA, 19 nt, Artificial Sequence
  Description of Artificial Sequence: Synthetic oligonucleotide
  Antisense strand to SEQ ID NO: 226626
uucaauaacgguuaaguga

SEQ ID NO: 226628 - RNA, 19 nt, Artificial Sequence
  Description of Artificial Sequence: Synthetic oligonucleotide
  Sense strand starting at position 3079 of SEQ ID NO: 2918
acuuaaccguuauugaaca

SEQ ID NO: 226629 - RNA, 19 nt, Artificial Sequence
  Description of Artificial Sequence: Synthetic oligonucleotide
  Antisense strand to SEQ ID NO: 226628
uguucaauaacgguuaagu

SEQ ID NO: 226630 - RNA, 19 nt, Artificial Sequence
  Description of Artificial Sequence: Synthetic oligonucleotide
  Sense strand starting at position 3110 of SEQ ID NO: 2918
cagaaaugaguccguaaag

SEQ ID NO: 226631 - RNA, 19 nt, Artificial Sequence
  Description of Artificial Sequence: Synthetic oligonucleotide
  Antisense strand to SEQ ID NO: 226630
cuuuacggacucauuucug

SEQ ID NO: 226632 - RNA, 19 nt, Artificial Sequence
  Description of Artificial Sequence: Synthetic oligonucleotide
  Sense strand starting at position 3111 of SEQ ID NO: 2918
agaaaugaguccguaaaga

SEQ ID NO: 226633 - RNA, 19 nt, Artificial Sequence
  Description of Artificial Sequence: Synthetic oligonucleotide
  Antisense strand to SEQ ID NO: 226632
ucuuuacggacucauuucu

SEQ ID NO: 226634 - RNA, 19 nt, Artificial Sequence
  Description of Artificial Sequence: Synthetic oligonucleotide
  Sense strand starting at position 3154 of SEQ ID NO: 2918
gggaaucguaaauguuaga

SEQ ID NO: 226635 - RNA, 19 nt, Artificial Sequence
  Description of Artificial Sequence: Synthetic oligonucleotide
  Antisense strand to SEQ ID NO: 226634
ucuaacauuuacgauuccc

SEQ ID NO: 226636 - RNA, 19 nt, Artificial Sequence
  Description of Artificial Sequence: Synthetic oligonucleotide
  Sense strand starting at position 3169 of SEQ ID NO: 2918
uagauagccuggucaauga

SEQ ID NO: 226637 - RNA, 19 nt, Artificial Sequence
  Description of Artificial Sequence: Synthetic oligonucleotide
  Antisense strand to SEQ ID NO: 226636
ucauugaccaggcuaucua

SEQ ID NO: 226638 - RNA, 19 nt, Artificial Sequence
  Description of Artificial Sequence: Synthetic oligonucleotide
  Sense strand starting at position 3173 of SEQ ID NO: 2918
uagccuggucaaugaaacu

SEQ ID NO: 226639 - RNA, 19 nt, Artificial Sequence
  Description of Artificial Sequence: Synthetic oligonucleotide
  Antisense strand to SEQ ID NO: 226638
aguuucauugaccaggcua

SEQ ID NO: 226640 - RNA, 19 nt, Artificial Sequence
  Description of Artificial Sequence: Synthetic oligonucleotide
  Sense strand starting at position 3206 of SEQ ID NO: 2918
aagccaagauuugaaggau

SEQ ID NO: 226641 - RNA, 19 nt, Artificial Sequence
  Description of Artificial Sequence: Synthetic oligonucleotide
  Antisense strand to SEQ ID NO: 226640
auccuucaaaucuuggcuu

SEQ ID NO: 226642 - RNA, 19 nt, Artificial Sequence
  Description of Artificial Sequence: Synthetic oligonucleotide
  Sense strand starting at position 3293 of SEQ ID NO: 2918
gggaauaguguggaagcuu

SEQ ID NO: 226643 - RNA, 19 nt, Artificial Sequence
  Description of Artificial Sequence: Synthetic oligonucleotide
  Antisense strand to SEQ ID NO: 226642
aagcuuccacacuauuccc

SEQ ID NO: 226644 - RNA, 19 nt, Artificial Sequence
  Description of Artificial Sequence: Synthetic oligonucleotide
  Sense strand starting at position 3650 of SEQ ID NO: 2918
gcaaggagugaugguggau

SEQ ID NO: 226645 - RNA, 19 nt, Artificial Sequence
  Description of Artificial Sequence: Synthetic oligonucleotide
  Antisense strand to SEQ ID NO: 226644
auccaccaucacuccuugc

SEQ ID NO: 226646 - RNA, 19 nt, Artificial Sequence
  Description of Artificial Sequence: Synthetic oligonucleotide
  Sense strand starting at position 3657 of SEQ ID NO: 2918
gugaugguggauugggaua

SEQ ID NO: 226647 - RNA, 19 nt, Artificial Sequence
  Description of Artificial Sequence: Synthetic oligonucleotide
  Antisense strand to SEQ ID NO: 226646
uaucccaauccaccaucac

SEQ ID NO: 226648 - RNA, 19 nt, Artificial Sequence
  Description of Artificial Sequence: Synthetic oligonucleotide
  Sense strand starting at position 3730 of SEQ ID NO: 2918
ggaauagcauagucccuau

SEQ ID NO: 226649 - RNA, 19 nt, Artificial Sequence
  Description of Artificial Sequence: Synthetic oligonucleotide
  Antisense strand to SEQ ID NO: 226648
auagggacuaugcuauucc

SEQ ID NO: 226650 - RNA, 19 nt, Artificial Sequence
  Description of Artificial Sequence: Synthetic oligonucleotide
  Sense strand starting at position 3733 of SEQ ID NO: 2918
auagcauagucccuauaug

SEQ ID NO: 226651 - RNA, 19 nt, Artificial Sequence
  Description of Artificial Sequence: Synthetic oligonucleotide
  Antisense strand to SEQ ID NO: 226650
cauauagggacuaugcuau

SEQ ID NO: 226652 - RNA, 19 nt, Artificial Sequence
  Description of Artificial Sequence: Synthetic oligonucleotide
  Sense strand starting at position 3760 of SEQ ID NO: 2918
uccagucuaguuuaagaaa

SEQ ID NO: 226653 - RNA, 19 nt, Artificial Sequence
  Description of Artificial Sequence: Synthetic oligonucleotide
  Antisense strand to SEQ ID NO: 226652
uuucuuaaacuagacugga

SEQ ID NO: 226654 - RNA, 19 nt, Artificial Sequence
  Description of Artificial Sequence: Synthetic oligonucleotide
  Sense strand starting at position 3825 of SEQ ID NO: 2918
ugcuacuuggcauaucaau

SEQ ID NO: 226655 - RNA, 19 nt, Artificial Sequence
  Description of Artificial Sequence: Synthetic oligonucleotide
  Antisense strand to SEQ ID NO: 226654
auugauaugccaaguagca

SEQ ID NO: 226656 - RNA, 19 nt, Artificial Sequence
  Description of Artificial Sequence: Synthetic oligonucleotide
  Sense strand starting at position 3905 of SEQ ID NO: 2918
gcuggaugucaacagucua

SEQ ID NO: 226657 - RNA, 19 nt, Artificial Sequence
  Description of Artificial Sequence: Synthetic oligonucleotide
  Antisense strand to SEQ ID NO: 226656
uagacuguugacauccagc

SEQ ID NO: 226658 - RNA, 19 nt, Artificial Sequence
  Description of Artificial Sequence: Synthetic oligonucleotide
  Sense strand starting at position 3941 of SEQ ID NO: 2918
auccaaagugaguacuauu

SEQ ID NO: 226659 - RNA, 19 nt, Artificial Sequence
  Description of Artificial Sequence: Synthetic oligonucleotide
  Antisense strand to SEQ ID NO: 226658
aauaguacucacuuuggau

SEQ ID NO: 226660 - RNA, 19 nt, Artificial Sequence
  Description of Artificial Sequence: Synthetic oligonucleotide
  Sense strand starting at position 62 of SEQ ID NO: 2919
gcaugaaugaaguguuguu

SEQ ID NO: 226661 - RNA, 19 nt, Artificial Sequence
  Description of Artificial Sequence: Synthetic oligonucleotide
  Antisense strand to SEQ ID NO: 226660
aacaacacuucauucaugc

SEQ ID NO: 226662 - RNA, 19 nt, Artificial Sequence
  Description of Artificial Sequence: Synthetic oligonucleotide
  Sense strand starting at position 96 of SEQ ID NO: 2919
agcagaguauagcccaaau

SEQ ID NO: 226663 - RNA, 19 nt, Artificial Sequence
  Description of Artificial Sequence: Synthetic oligonucleotide
  Antisense strand to SEQ ID NO: 226662
auuugggcuauacucugcu

SEQ ID NO: 226664 - RNA, 19 nt, Artificial Sequence
  Description of Artificial Sequence: Synthetic oligonucleotide
  Sense strand starting at position 244 of SEQ ID NO: 2919
gagucagcauaguuaggaa

SEQ ID NO: 226665 - RNA, 19 nt, Artificial Sequence
  Description of Artificial Sequence: Synthetic oligonucleotide
  Antisense strand to SEQ ID NO: 226664
uuccuaacuaugcugacuc

SEQ ID NO: 226666 - RNA, 19 nt, Artificial Sequence
  Description of Artificial Sequence: Synthetic oligonucleotide
  Sense strand starting at position 443 of SEQ ID NO: 2919
gaaccuucucgguagccaa

SEQ ID NO: 226667 - RNA, 19 nt, Artificial Sequence
  Description of Artificial Sequence: Synthetic oligonucleotide
  Antisense strand to SEQ ID NO: 226666
uuggcuaccgagaagguuc

SEQ ID NO: 226668 - RNA, 19 nt, Artificial Sequence
  Description of Artificial Sequence: Synthetic oligonucleotide
  Sense strand starting at position 695 of SEQ ID NO: 2919
cucuguucucuagaacguu

SEQ ID NO: 226669 - RNA, 19 nt, Artificial Sequence
  Description of Artificial Sequence: Synthetic oligonucleotide
  Antisense strand to SEQ ID NO: 226668
aacguucuagagaacagag

SEQ ID NO: 226670 - RNA, 19 nt, Artificial Sequence
  Description of Artificial Sequence: Synthetic oligonucleotide
  Sense strand starting at position 715 of SEQ ID NO: 2919
aggcuuucccaguauacuc

SEQ ID NO: 226671 - RNA, 19 nt, Artificial Sequence
  Description of Artificial Sequence: Synthetic oligonucleotide
  Antisense strand to SEQ ID NO: 226670
gaguauacugggaaagccu

SEQ ID NO: 226672 - RNA, 19 nt, Artificial Sequence
  Description of Artificial Sequence: Synthetic oligonucleotide
  Sense strand starting at position 726 of SEQ ID NO: 2919
guauacucaccuugagcua

SEQ ID NO: 226673 - RNA, 19 nt, Artificial Sequence
  Description of Artificial Sequence: Synthetic oligonucleotide
  Antisense strand to SEQ ID NO: 226672
uagcucaaggugaguauac

SEQ ID NO: 226674 - RNA, 19 nt, Artificial Sequence
  Description of Artificial Sequence: Synthetic oligonucleotide
  Sense strand starting at position 744 of SEQ ID NO: 2919
agcagaguuccuugcacag

SEQ ID NO: 226675 - RNA, 19 nt, Artificial Sequence
  Description of Artificial Sequence: Synthetic oligonucleotide
  Antisense strand to SEQ ID NO: 226674
cugugcaaggaacucugcu

SEQ ID NO: 226676 - RNA, 19 nt, Artificial Sequence
  Description of Artificial Sequence: Synthetic oligonucleotide
  Sense strand starting at position 860 of SEQ ID NO: 2919
ccaguucuaguagaauacu

SEQ ID NO: 226677 - RNA, 19 nt, Artificial Sequence
  Description of Artificial Sequence: Synthetic oligonucleotide
  Antisense strand to SEQ ID NO: 226676
aguauucuacuagaacugg

SEQ ID NO: 226678 - RNA, 19 nt, Artificial Sequence
  Description of Artificial Sequence: Synthetic oligonucleotide
  Sense strand starting at position 999 of SEQ ID NO: 2919
gcccaaagcgacugauucu

SEQ ID NO: 226679 - RNA, 19 nt, Artificial Sequence
  Description of Artificial Sequence: Synthetic oligonucleotide
  Antisense strand to SEQ ID NO: 226678
agaaucagucgcuuugggc

SEQ ID NO: 226680 - RNA, 19 nt, Artificial Sequence
  Description of Artificial Sequence: Synthetic oligonucleotide
  Sense strand starting at position 1238 of SEQ ID NO: 2919
gcggcuuaaaucucgcaca

SEQ ID NO: 226681 - RNA, 19 nt, Artificial Sequence
  Description of Artificial Sequence: Synthetic oligonucleotide
  Antisense strand to SEQ ID NO: 226680
ugugcgagauuuaagccgc

SEQ ID NO: 226682 - RNA, 19 nt, Artificial Sequence
  Description of Artificial Sequence: Synthetic oligonucleotide
  Sense strand starting at position 1340 of SEQ ID NO: 2919
acagaugucacccgaguac

SEQ ID NO: 226683 - RNA, 19 nt, Artificial Sequence
  Description of Artificial Sequence: Synthetic oligonucleotide
  Antisense strand to SEQ ID NO: 226682
guacucgggugacaucugu

SEQ ID NO: 226684 - RNA, 19 nt, Artificial Sequence
  Description of Artificial Sequence: Synthetic oligonucleotide
  Sense strand starting at position 1358 of SEQ ID NO: 2919
cucgcacuugcugacagau

SEQ ID NO: 226685 - RNA, 19 nt, Artificial Sequence
  Description of Artificial Sequence: Synthetic oligonucleotide
  Antisense strand to SEQ ID NO: 226684
aucugucagcaagugcgag

SEQ ID NO: 226686 - RNA, 19 nt, Artificial Sequence
  Description of Artificial Sequence: Synthetic oligonucleotide
  Sense strand starting at position 1439 of SEQ ID NO: 2919
gcaguucucggguacucaa

SEQ ID NO: 226687 - RNA, 19 nt, Artificial Sequence
  Description of Artificial Sequence: Synthetic oligonucleotide
  Antisense strand to SEQ ID NO: 226686
uugaguacccgagaacugc

SEQ ID NO: 226688 - RNA, 19 nt, Artificial Sequence
  Description of Artificial Sequence: Synthetic oligonucleotide
  Sense strand starting at position 1612 of SEQ ID NO: 2919
gugggucugaucuggcgaa

SEQ ID NO: 226689 - RNA, 19 nt, Artificial Sequence
  Description of Artificial Sequence: Synthetic oligonucleotide
  Antisense strand to SEQ ID NO: 226688
uucgccagaucagacccac

SEQ ID NO: 226690 - RNA, 19 nt, Artificial Sequence
  Description of Artificial Sequence: Synthetic oligonucleotide
  Sense strand starting at position 2027 of SEQ ID NO: 2919
aagugaaugcuaggagagu

SEQ ID NO: 226691 - RNA, 19 nt, Artificial Sequence
  Description of Artificial Sequence: Synthetic oligonucleotide
  Antisense strand to SEQ ID NO: 226690
acucuccuagcauucacuu

SEQ ID NO: 226692 - RNA, 19 nt, Artificial Sequence
  Description of Artificial Sequence: Synthetic oligonucleotide
  Sense strand starting at position 2111 of SEQ ID NO: 2919
ggaggugucugcuuccaca

SEQ ID NO: 226693 - RNA, 19 nt, Artificial Sequence
  Description of Artificial Sequence: Synthetic oligonucleotide
  Antisense strand to SEQ ID NO: 226692
uguggaagcagacaccucc

SEQ ID NO: 226694 - RNA, 19 nt, Artificial Sequence
  Description of Artificial Sequence: Synthetic oligonucleotide
  Sense strand starting at position 2182 of SEQ ID NO: 2919
gugcuuaguguugggaaua

SEQ ID NO: 226695 - RNA, 19 nt, Artificial Sequence
  Description of Artificial Sequence: Synthetic oligonucleotide
  Antisense strand to SEQ ID NO: 226694
uauucccaacacuaagcac

SEQ ID NO: 226696 - RNA, 19 nt, Artificial Sequence
  Description of Artificial Sequence: Synthetic oligonucleotide
  Sense strand starting at position 2279 of SEQ ID NO: 2919
aaguguuggcaagaaugga

SEQ ID NO: 226697 - RNA, 19 nt, Artificial Sequence
  Description of Artificial Sequence: Synthetic oligonucleotide
  Antisense strand to SEQ ID NO: 226696
uccauucuugccaacacuu

SEQ ID NO: 226698 - RNA, 19 nt, Artificial Sequence
  Description of Artificial Sequence: Synthetic oligonucleotide
  Sense strand starting at position 2456 of SEQ ID NO: 2919
ugaagagacgucuguacuu

SEQ ID NO: 226699 - RNA, 19 nt, Artificial Sequence
  Description of Artificial Sequence: Synthetic oligonucleotide
  Antisense strand to SEQ ID NO: 226698
aaguacagacgucucuuca

SEQ ID NO: 226700 - RNA, 19 nt, Artificial Sequence
  Description of Artificial Sequence: Synthetic oligonucleotide
  Sense strand starting at position 2715 of SEQ ID NO: 2919
uguauaugagcccauucuu

SEQ ID NO: 226701 - RNA, 19 nt, Artificial Sequence
  Description of Artificial Sequence: Synthetic oligonucleotide
  Antisense strand to SEQ ID NO: 226700
aagaaugggcucauauaca

SEQ ID NO: 226702 - RNA, 19 nt, Artificial Sequence
  Description of Artificial Sequence: Synthetic oligonucleotide
  Sense strand starting at position 2721 of SEQ ID NO: 2919
ugagcccauucuucugaaa

SEQ ID NO: 226703 - RNA, 19 nt, Artificial Sequence
  Description of Artificial Sequence: Synthetic oligonucleotide
  Antisense strand to SEQ ID NO: 226702
uuucagaagaaugggcuca

SEQ ID NO: 226704 - RNA, 19 nt, Artificial Sequence
  Description of Artificial Sequence: Synthetic oligonucleotide
  Sense strand starting at position 2832 of SEQ ID NO: 2919
cuagacauuuaauguuagu

SEQ ID NO: 226705 - RNA, 19 nt, Artificial Sequence
  Description of Artificial Sequence: Synthetic oligonucleotide
  Antisense strand to SEQ ID NO: 226704
acuaacauuaaaugucuag

SEQ ID NO: 226706 - RNA, 19 nt, Artificial Sequence
  Description of Artificial Sequence: Synthetic oligonucleotide
  Sense strand starting at position 2835 of SEQ ID NO: 2919
gacauuuaauguuagugua

SEQ ID NO: 226707 - RNA, 19 nt, Artificial Sequence
  Description of Artificial Sequence: Synthetic oligonucleotide
  Antisense strand to SEQ ID NO: 226706
uacacuaacauuaaauguc

SEQ ID NO: 226708 - RNA, 19 nt, Artificial Sequence
  Description of Artificial Sequence: Synthetic oligonucleotide
  Sense strand starting at position 2913 of SEQ ID NO: 2919
guuagacacucucuuugau

SEQ ID NO: 226709 - RNA, 19 nt, Artificial Sequence
  Description of Artificial Sequence: Synthetic oligonucleotide
  Antisense strand to SEQ ID NO: 226708
aucaaagagagugucuaac

SEQ ID NO: 226710 - RNA, 19 nt, Artificial Sequence
  Description of Artificial Sequence: Synthetic oligonucleotide
  Sense strand starting at position 3035 of SEQ ID NO: 2919
guuauuaucuuguccuuua

SEQ ID NO: 226711 - RNA, 19 nt, Artificial Sequence
  Description of Artificial Sequence: Synthetic oligonucleotide
  Antisense strand to SEQ ID NO: 226710
uaaaggacaagauaauaac

SEQ ID NO: 226712 - RNA, 19 nt, Artificial Sequence
  Description of Artificial Sequence: Synthetic oligonucleotide
  Sense strand starting at position 3057 of SEQ ID NO: 2919
augaauuauuaggcauaca

SEQ ID NO: 226713 - RNA, 19 nt, Artificial Sequence
  Description of Artificial Sequence: Synthetic oligonucleotide
  Antisense strand to SEQ ID NO: 226712
uguaugccuaauaauucau

SEQ ID NO: 226714 - RNA, 19 nt, Artificial Sequence
  Description of Artificial Sequence: Synthetic oligonucleotide
  Sense strand starting at position 3114 of SEQ ID NO: 2919
uguguauguguggaauacu

SEQ ID NO: 226715 - RNA, 19 nt, Artificial Sequence
  Description of Artificial Sequence: Synthetic oligonucleotide
  Antisense strand to SEQ ID NO: 226714
aguauuccacacauacaca

SEQ ID NO: 226716 - RNA, 19 nt, Artificial Sequence
  Description of Artificial Sequence: Synthetic oligonucleotide
  Sense strand starting at position 3117 of SEQ ID NO: 2919
guauguguggaauacuauu

SEQ ID NO: 226717 - RNA, 19 nt, Artificial Sequence
  Description of Artificial Sequence: Synthetic oligonucleotide
  Antisense strand to SEQ ID NO: 226716
aauaguauuccacacauac

SEQ ID NO: 226718 - RNA, 19 nt, Artificial Sequence
  Description of Artificial Sequence: Synthetic oligonucleotide
  Sense strand starting at position 3238 of SEQ ID NO: 2919
guucucaaguaucugaaag

SEQ ID NO: 226719 - RNA, 19 nt, Artificial Sequence
  Description of Artificial Sequence: Synthetic oligonucleotide
  Antisense strand to SEQ ID NO: 226718
cuuucagauacuugagaac

SEQ ID NO: 226720 - RNA, 19 nt, Artificial Sequence
  Description of Artificial Sequence: Synthetic oligonucleotide
  Sense strand starting at position 3348 of SEQ ID NO: 2919
gaguguaagccucaauuag

SEQ ID NO: 226721 - RNA, 19 nt, Artificial Sequence
  Description of Artificial Sequence: Synthetic oligonucleotide
  Antisense strand to SEQ ID NO: 226720
cuaauugaggcuuacacuc

SEQ ID NO: 226722 - RNA, 19 nt, Artificial Sequence
  Description of Artificial Sequence: Synthetic oligonucleotide
  Sense strand starting at position 3515 of SEQ ID NO: 2919
uagacacgugccuguaauc

SEQ ID NO: 226723 - RNA, 19 nt, Artificial Sequence
  Description of Artificial Sequence: Synthetic oligonucleotide
  Antisense strand to SEQ ID NO: 226722
gauuacaggcacgugucua

SEQ ID NO: 226724 - RNA, 19 nt, Artificial Sequence
  Description of Artificial Sequence: Synthetic oligonucleotide
  Sense strand starting at position 3602 of SEQ ID NO: 2919
agaucaucccucugaguga

SEQ ID NO: 226725 - RNA, 19 nt, Artificial Sequence
  Description of Artificial Sequence: Synthetic oligonucleotide
  Antisense strand to SEQ ID NO: 226724
ucacucagagggaugaucu

SEQ ID NO: 226726 - RNA, 19 nt, Artificial Sequence
  Description of Artificial Sequence: Synthetic oligonucleotide
  Sense strand starting at position 3606 of SEQ ID NO: 2919
caucccucugagugacaga

SEQ ID NO: 226727 - RNA, 19 nt, Artificial Sequence
  Description of Artificial Sequence: Synthetic oligonucleotide
  Antisense strand to SEQ ID NO: 226726
ucugucacucagagggaug

SEQ ID NO: 226728 - RNA, 19 nt, Artificial Sequence
  Description of Artificial Sequence: Synthetic oligonucleotide
  Sense strand starting at position 3681 of SEQ ID NO: 2919
uugcacggugucgugaaua

SEQ ID NO: 226729 - RNA, 19 nt, Artificial Sequence
  Description of Artificial Sequence: Synthetic oligonucleotide
  Antisense strand to SEQ ID NO: 226728
uauucacgacaccgugcaa

SEQ ID NO: 226730 - RNA, 19 nt, Artificial Sequence
  Description of Artificial Sequence: Synthetic oligonucleotide
  Sense strand starting at position 3686 of SEQ ID NO: 2919
cggugucgugaauaaagcu

SEQ ID NO: 226731 - RNA, 19 nt, Artificial Sequence
  Description of Artificial Sequence: Synthetic oligonucleotide
  Antisense strand to SEQ ID NO: 226730
agcuuuauucacgacaccg

SEQ ID NO: 226732 - RNA, 19 nt, Artificial Sequence
  Description of Artificial Sequence: Synthetic oligonucleotide
  Sense strand starting at position 3692 of SEQ ID NO: 2919
cgugaauaaagcugauaau

SEQ ID NO: 226733 - RNA, 19 nt, Artificial Sequence
  Description of Artificial Sequence: Synthetic oligonucleotide
  Antisense strand to SEQ ID NO: 226732
auuaucagcuuuauucacg

SEQ ID NO: 226734 - RNA, 19 nt, Artificial Sequence
  Description of Artificial Sequence: Synthetic oligonucleotide
  Sense strand starting at position 3702 of SEQ ID NO: 2919
gcugauaauugaguacugu

SEQ ID NO: 226735 - RNA, 19 nt, Artificial Sequence
  Description of Artificial Sequence: Synthetic oligonucleotide
  Antisense strand to SEQ ID NO: 226734
acaguacucaauuaucagc

SEQ ID NO: 226736 - RNA, 19 nt, Artificial Sequence
  Description of Artificial Sequence: Synthetic oligonucleotide
  Sense strand starting at position 3703 of SEQ ID NO: 2919
cugauaauugaguacugua

SEQ ID NO: 226737 - RNA, 19 nt, Artificial Sequence
  Description of Artificial Sequence: Synthetic oligonucleotide
  Antisense strand to SEQ ID NO: 226736
uacaguacucaauuaucag

SEQ ID NO: 226738 - RNA, 19 nt, Artificial Sequence
  Description of Artificial Sequence: Synthetic oligonucleotide
  Sense strand starting at position 3952 of SEQ ID NO: 2919
cuuauugacuuagugaaau

SEQ ID NO: 226739 - RNA, 19 nt, Artificial Sequence
  Description of Artificial Sequence: Synthetic oligonucleotide
  Antisense strand to SEQ ID NO: 226738
auuucacuaagucaauaag

SEQ ID NO: 226740 - RNA, 19 nt, Artificial Sequence
  Description of Artificial Sequence: Synthetic oligonucleotide
  Sense strand starting at position 26 of SEQ ID NO: 2920
accagugccuccucagaua

SEQ ID NO: 226741 - RNA, 19 nt, Artificial Sequence
  Description of Artificial Sequence: Synthetic oligonucleotide
  Antisense strand to SEQ ID NO: 226740
uaucugaggaggcacuggu

SEQ ID NO: 226742 - RNA, 19 nt, Artificial Sequence
  Description of Artificial Sequence: Synthetic oligonucleotide
  Sense strand starting at position 41 of SEQ ID NO: 2920
gauacugaggacuguaguu

SEQ ID NO: 226743 - RNA, 19 nt, Artificial Sequence
  Description of Artificial Sequence: Synthetic oligonucleotide
  Antisense strand to SEQ ID NO: 226742
aacuacaguccucaguauc

SEQ ID NO: 226744 - RNA, 19 nt, Artificial Sequence
  Description of Artificial Sequence: Synthetic oligonucleotide
  Sense strand starting at position 46 of SEQ ID NO: 2920
ugaggacuguaguuccaua

SEQ ID NO: 226745 - RNA, 19 nt, Artificial Sequence
  Description of Artificial Sequence: Synthetic oligonucleotide
  Antisense strand to SEQ ID NO: 226744
uauggaacuacaguccuca

SEQ ID NO: 226746 - RNA, 19 nt, Artificial Sequence
  Description of Artificial Sequence: Synthetic oligonucleotide
  Sense strand starting at position 51 of SEQ ID NO: 2920
acuguaguuccauauuauc

SEQ ID NO: 226747 - RNA, 19 nt, Artificial Sequence
  Description of Artificial Sequence: Synthetic oligonucleotide
  Antisense strand to SEQ ID NO: 226746
gauaauauggaacuacagu

SEQ ID NO: 226748 - RNA, 19 nt, Artificial Sequence
  Description of Artificial Sequence: Synthetic oligonucleotide
  Sense strand starting at position 57 of SEQ ID NO: 2920
guuccauauuaucuuguua

SEQ ID NO: 226749 - RNA, 19 nt, Artificial Sequence
  Description of Artificial Sequence: Synthetic oligonucleotide
  Antisense strand to SEQ ID NO: 226748
uaacaagauaauauggaac

SEQ ID NO: 226750 - RNA, 19 nt, Artificial Sequence
  Description of Artificial Sequence: Synthetic oligonucleotide
  Sense strand starting at position 64 of SEQ ID NO: 2920
auuaucuuguuagugguua

SEQ ID NO: 226751 - RNA, 19 nt, Artificial Sequence
  Description of Artificial Sequence: Synthetic oligonucleotide
  Antisense strand to SEQ ID NO: 226750
uaaccacuaacaagauaau

SEQ ID NO: 226752 - RNA, 19 nt, Artificial Sequence
  Description of Artificial Sequence: Synthetic oligonucleotide
  Sense strand starting at position 68 of SEQ ID NO: 2920
ucuuguuagugguuaccuu

SEQ ID NO: 226753 - RNA, 19 nt, Artificial Sequence
  Description of Artificial Sequence: Synthetic oligonucleotide
  Antisense strand to SEQ ID NO: 226752
aagguaaccacuaacaaga

SEQ ID NO: 226754 - RNA, 19 nt, Artificial Sequence
  Description of Artificial Sequence: Synthetic oligonucleotide
  Sense strand starting at position 386 of SEQ ID NO: 2920
gcuauucucucaccucagu

SEQ ID NO: 226755 - RNA, 19 nt, Artificial Sequence
  Description of Artificial Sequence: Synthetic oligonucleotide
  Antisense strand to SEQ ID NO: 226754
acugaggugagagaauagc

SEQ ID NO: 226756 - RNA, 19 nt, Artificial Sequence
  Description of Artificial Sequence: Synthetic oligonucleotide
  Sense strand starting at position 408 of SEQ ID NO: 2920
cugauuaguugggacuaua

SEQ ID NO: 226757 - RNA, 19 nt, Artificial Sequence
  Description of Artificial Sequence: Synthetic oligonucleotide
  Antisense strand to SEQ ID NO: 226756
uauagucccaacuaaucag

SEQ ID NO: 226758 - RNA, 19 nt, Artificial Sequence
  Description of Artificial Sequence: Synthetic oligonucleotide
  Sense strand starting at position 506 of SEQ ID NO: 2920
gugcgaucucggcuaagug

SEQ ID NO: 226759 - RNA, 19 nt, Artificial Sequence
  Description of Artificial Sequence: Synthetic oligonucleotide
  Antisense strand to SEQ ID NO: 226758
cacuuagccgagaucgcac

SEQ ID NO: 226760 - RNA, 19 nt, Artificial Sequence
  Description of Artificial Sequence: Synthetic oligonucleotide
  Sense strand starting at position 827 of SEQ ID NO: 2920
gggcucaagugauccgacu

SEQ ID NO: 226761 - RNA, 19 nt, Artificial Sequence
  Description of Artificial Sequence: Synthetic oligonucleotide
  Antisense strand to SEQ ID NO: 226760
agucggaucacuugagccc

SEQ ID NO: 226762 - RNA, 19 nt, Artificial Sequence
  Description of Artificial Sequence: Synthetic oligonucleotide
  Sense strand starting at position 984 of SEQ ID NO: 2920
cguuguagugagccgugau

SEQ ID NO: 226763 - RNA, 19 nt, Artificial Sequence
  Description of Artificial Sequence: Synthetic oligonucleotide
  Antisense strand to SEQ ID NO: 226762
aucacggcucacuacaacg

SEQ ID NO: 226764 - RNA, 19 nt, Artificial Sequence
  Description of Artificial Sequence: Synthetic oligonucleotide
  Sense strand starting at position 1075 of SEQ ID NO: 2920
uaugaugugucuccagauu

SEQ ID NO: 226765 - RNA, 19 nt, Artificial Sequence
  Description of Artificial Sequence: Synthetic oligonucleotide
  Antisense strand to SEQ ID NO: 226764
aaucuggagacacaucaua

SEQ ID NO: 226766 - RNA, 19 nt, Artificial Sequence
  Description of Artificial Sequence: Synthetic oligonucleotide
  Sense strand starting at position 1545 of SEQ ID NO: 2920
ggaggauggcggugaguaa

SEQ ID NO: 226767 - RNA, 19 nt, Artificial Sequence
  Description of Artificial Sequence: Synthetic oligonucleotide
  Antisense strand to SEQ ID NO: 226766
uuacucaccgccauccucc

SEQ ID NO: 226768 - RNA, 19 nt, Artificial Sequence
  Description of Artificial Sequence: Synthetic oligonucleotide
  Sense strand starting at position 1546 of SEQ ID NO: 2920
gaggauggcggugaguaaa

SEQ ID NO: 226769 - RNA, 19 nt, Artificial Sequence
  Description of Artificial Sequence: Synthetic oligonucleotide
  Antisense strand to SEQ ID NO: 226768
uuuacucaccgccauccuc

SEQ ID NO: 226770 - RNA, 19 nt, Artificial Sequence
  Description of Artificial Sequence: Synthetic oligonucleotide
  Sense strand starting at position 1665 of SEQ ID NO: 2920
gaguuuagauucucuggga

SEQ ID NO: 226771 - RNA, 19 nt, Artificial Sequence
  Description of Artificial Sequence: Synthetic oligonucleotide
  Antisense strand to SEQ ID NO: 226770
ucccagagaaucuaaacuc

SEQ ID NO: 226772 - RNA, 19 nt, Artificial Sequence
  Description of Artificial Sequence: Synthetic oligonucleotide
  Sense strand starting at position 1668 of SEQ ID NO: 2920
uuuagauucucugggagac

SEQ ID NO: 226773 - RNA, 19 nt, Artificial Sequence
  Description of Artificial Sequence: Synthetic oligonucleotide
  Antisense strand to SEQ ID NO: 226772
gucucccagagaaucuaaa

SEQ ID NO: 226774 - RNA, 19 nt, Artificial Sequence
  Description of Artificial Sequence: Synthetic oligonucleotide
  Sense strand starting at position 1670 of SEQ ID NO: 2920
uagauucucugggagacca

SEQ ID NO: 226775 - RNA, 19 nt, Artificial Sequence
  Description of Artificial Sequence: Synthetic oligonucleotide
  Antisense strand to SEQ ID NO: 226774
uggucucccagagaaucua

SEQ ID NO: 226776 - RNA, 19 nt, Artificial Sequence
  Description of Artificial Sequence: Synthetic oligonucleotide
  Sense strand starting at position 1772 of SEQ ID NO: 2920
uggcgaaagccaggaauua

SEQ ID NO: 226777 - RNA, 19 nt, Artificial Sequence
  Description of Artificial Sequence: Synthetic oligonucleotide
  Antisense strand to SEQ ID NO: 226776
uaauuccuggcuuucgcca

SEQ ID NO: 226778 - RNA, 19 nt, Artificial Sequence
  Description of Artificial Sequence: Synthetic oligonucleotide
  Sense strand starting at position 1784 of SEQ ID NO: 2920
ggaauuaccgcgcaccuau

SEQ ID NO: 226779 - RNA, 19 nt, Artificial Sequence
  Description of Artificial Sequence: Synthetic oligonucleotide
  Antisense strand to SEQ ID NO: 226778
auaggugcgcgguaauucc

SEQ ID NO: 226780 - RNA, 19 nt, Artificial Sequence
  Description of Artificial Sequence: Synthetic oligonucleotide
  Sense strand starting at position 1795 of SEQ ID NO: 2920
gcaccuauucuggaccaga

SEQ ID NO: 226781 - RNA, 19 nt, Artificial Sequence
  Description of Artificial Sequence: Synthetic oligonucleotide
  Antisense strand to SEQ ID NO: 226780
ucugguccagaauaggugc

SEQ ID NO: 226782 - RNA, 19 nt, Artificial Sequence
  Description of Artificial Sequence: Synthetic oligonucleotide
  Sense strand starting at position 1844 of SEQ ID NO: 2920
guagacucucaagggugaa

SEQ ID NO: 226783 - RNA, 19 nt, Artificial Sequence
  Description of Artificial Sequence: Synthetic oligonucleotide
  Antisense strand to SEQ ID NO: 226782
uucacccuugagagucuac

SEQ ID NO: 226784 - RNA, 19 nt, Artificial Sequence
  Description of Artificial Sequence: Synthetic oligonucleotide
  Sense strand starting at position 2089 of SEQ ID NO: 2920
ccuugucagugacucgaaa

SEQ ID NO: 226785 - RNA, 19 nt, Artificial Sequence
  Description of Artificial Sequence: Synthetic oligonucleotide
  Antisense strand to SEQ ID NO: 226784
uuucgagucacugacaagg

SEQ ID NO: 226786 - RNA, 19 nt, Artificial Sequence
  Description of Artificial Sequence: Synthetic oligonucleotide
  Sense strand starting at position 2091 of SEQ ID NO: 2920
uugucagugacucgaaauu

SEQ ID NO: 226787 - RNA, 19 nt, Artificial Sequence
  Description of Artificial Sequence: Synthetic oligonucleotide
  Antisense strand to SEQ ID NO: 226786
aauuucgagucacugacaa

SEQ ID NO: 226788 - RNA, 19 nt, Artificial Sequence
  Description of Artificial Sequence: Synthetic oligonucleotide
  Sense strand starting at position 2104 of SEQ ID NO: 2920
gaaauuugcucagaaccga

SEQ ID NO: 226789 - RNA, 19 nt, Artificial Sequence
  Description of Artificial Sequence: Synthetic oligonucleotide
  Antisense strand to SEQ ID NO: 226788
ucgguucugagcaaauuuc

SEQ ID NO: 226790 - RNA, 19 nt, Artificial Sequence
  Description of Artificial Sequence: Synthetic oligonucleotide
  Sense strand starting at position 2523 of SEQ ID NO: 2920
agagcaaacugucugauca

SEQ ID NO: 226791 - RNA, 19 nt, Artificial Sequence
  Description of Artificial Sequence: Synthetic oligonucleotide
  Antisense strand to SEQ ID NO: 226790
ugaucagacaguuugcucu

SEQ ID NO: 226792 - RNA, 19 nt, Artificial Sequence
  Description of Artificial Sequence: Synthetic oligonucleotide
  Sense strand starting at position 2524 of SEQ ID NO: 2920
gagcaaacugucugaucac

SEQ ID NO: 226793 - RNA, 19 nt, Artificial Sequence
  Description of Artificial Sequence: Synthetic oligonucleotide
  Antisense strand to SEQ ID NO: 226792
gugaucagacaguuugcuc

SEQ ID NO: 226794 - RNA, 19 nt, Artificial Sequence
  Description of Artificial Sequence: Synthetic oligonucleotide
  Sense strand starting at position 2533 of SEQ ID NO: 2920
gucugaucacuugguuucu

SEQ ID NO: 226795 - RNA, 19 nt, Artificial Sequence
  Description of Artificial Sequence: Synthetic oligonucleotide
  Antisense strand to SEQ ID NO: 226794
agaaaccaagugaucagac

SEQ ID NO: 226796 - RNA, 19 nt, Artificial Sequence
  Description of Artificial Sequence: Synthetic oligonucleotide
  Sense strand starting at position 2534 of SEQ ID NO: 2920
ucugaucacuugguuucua

SEQ ID NO: 226797 - RNA, 19 nt, Artificial Sequence
  Description of Artificial Sequence: Synthetic oligonucleotide
  Antisense strand to SEQ ID NO: 226796
uagaaaccaagugaucaga

SEQ ID NO: 226798 - RNA, 19 nt, Artificial Sequence
  Description of Artificial Sequence: Synthetic oligonucleotide
  Sense strand starting at position 2535 of SEQ ID NO: 2920
cugaucacuugguuucuaa

SEQ ID NO: 226799 - RNA, 19 nt, Artificial Sequence
  Description of Artificial Sequence: Synthetic oligonucleotide
  Antisense strand to SEQ ID NO: 226798
uuagaaaccaagugaucag

SEQ ID NO: 226800 - RNA, 19 nt, Artificial Sequence
  Description of Artificial Sequence: Synthetic oligonucleotide
  Sense strand starting at position 3371 of SEQ ID NO: 2920
cugguaaggugcuuccuua

SEQ ID NO: 226801 - RNA, 19 nt, Artificial Sequence
  Description of Artificial Sequence: Synthetic oligonucleotide
  Antisense strand to SEQ ID NO: 226800
uaaggaagcaccuuaccag

SEQ ID NO: 226802 - RNA, 19 nt, Artificial Sequence
  Description of Artificial Sequence: Synthetic oligonucleotide
  Sense strand starting at position 3378 of SEQ ID NO: 2920
ggugcuuccuuaucuguaa

SEQ ID NO: 226803 - RNA, 19 nt, Artificial Sequence
  Description of Artificial Sequence: Synthetic oligonucleotide
  Antisense strand to SEQ ID NO: 226802
uuacagauaaggaagcacc

SEQ ID NO: 226804 - RNA, 19 nt, Artificial Sequence
  Description of Artificial Sequence: Synthetic oligonucleotide
  Sense strand starting at position 3379 of SEQ ID NO: 2920
gugcuuccuuaucuguaaa

SEQ ID NO: 226805 - RNA, 19 nt, Artificial Sequence
  Description of Artificial Sequence: Synthetic oligonucleotide
  Antisense strand to SEQ ID NO: 226804
uuuacagauaaggaagcac

SEQ ID NO: 226806 - RNA, 19 nt, Artificial Sequence
  Description of Artificial Sequence: Synthetic oligonucleotide
  Sense strand starting at position 3436 of SEQ ID NO: 2920
cuugaaugagcuuauguac

SEQ ID NO: 226807 - RNA, 19 nt, Artificial Sequence
  Description of Artificial Sequence: Synthetic oligonucleotide
  Antisense strand to SEQ ID NO: 226806
guacauaagcucauucaag

SEQ ID NO: 226808 - RNA, 19 nt, Artificial Sequence
  Description of Artificial Sequence: Synthetic oligonucleotide
  Sense strand starting at position 3443 of SEQ ID NO: 2920
gagcuuauguacucggaag

SEQ ID NO: 226809 - RNA, 19 nt, Artificial Sequence
  Description of Artificial Sequence: Synthetic oligonucleotide
  Antisense strand to SEQ ID NO: 226808
cuuccgaguacauaagcuc

SEQ ID NO: 226810 - RNA, 19 nt, Artificial Sequence
  Description of Artificial Sequence: Synthetic oligonucleotide
  Sense strand starting at position 3444 of SEQ ID NO: 2920
agcuuauguacucggaaga

SEQ ID NO: 226811 - RNA, 19 nt, Artificial Sequence
  Description of Artificial Sequence: Synthetic oligonucleotide
  Antisense strand to SEQ ID NO: 226810
ucuuccgaguacauaagcu

SEQ ID NO: 226812 - RNA, 19 nt, Artificial Sequence
  Description of Artificial Sequence: Synthetic oligonucleotide
  Sense strand starting at position 3445 of SEQ ID NO: 2920
gcuuauguacucggaagag

SEQ ID NO: 226813 - RNA, 19 nt, Artificial Sequence
  Description of Artificial Sequence: Synthetic oligonucleotide
  Antisense strand to SEQ ID NO: 226812
cucuuccgaguacauaagc

SEQ ID NO: 226814 - RNA, 19 nt, Artificial Sequence
  Description of Artificial Sequence: Synthetic oligonucleotide
  Sense strand starting at position 3504 of SEQ ID NO: 2920
gugucagugccaggacuua

SEQ ID NO: 226815 - RNA, 19 nt, Artificial Sequence
  Description of Artificial Sequence: Synthetic oligonucleotide
  Antisense strand to SEQ ID NO: 226814
uaaguccuggcacugacac

SEQ ID NO: 226816 - RNA, 19 nt, Artificial Sequence
  Description of Artificial Sequence: Synthetic oligonucleotide
  Sense strand starting at position 3617 of SEQ ID NO: 2920
gaggaugagccguguuuca

SEQ ID NO: 226817 - RNA, 19 nt, Artificial Sequence
  Description of Artificial Sequence: Synthetic oligonucleotide
  Antisense strand to SEQ ID NO: 226816
ugaaacacggcucauccuc

SEQ ID NO: 226818 - RNA, 19 nt, Artificial Sequence
  Description of Artificial Sequence: Synthetic oligonucleotide
  Sense strand starting at position 3739 of SEQ ID NO: 2920
ugaggucuuguuggcauga

SEQ ID NO: 226819 - RNA, 19 nt, Artificial Sequence
  Description of Artificial Sequence: Synthetic oligonucleotide
  Antisense strand to SEQ ID NO: 226818
ucaugccaacaagaccuca

SEQ ID NO: 226820 - RNA, 19 nt, Artificial Sequence
  Description of Artificial Sequence: Synthetic oligonucleotide
  Sense strand starting at position 10 of SEQ ID NO: 2921
cuugcuucgucucccaaga

SEQ ID NO: 226821 - RNA, 19 nt, Artificial Sequence
  Description of Artificial Sequence: Synthetic oligonucleotide
  Antisense strand to SEQ ID NO: 226820
ucuugggagacgaagcaag

SEQ ID NO: 226822 - RNA, 19 nt, Artificial Sequence
  Description of Artificial Sequence: Synthetic oligonucleotide
  Sense strand starting at position 23 of SEQ ID NO: 2921
ccaagacccucugagcaua

SEQ ID NO: 226823 - RNA, 19 nt, Artificial Sequence
  Description of Artificial Sequence: Synthetic oligonucleotide
  Antisense strand to SEQ ID NO: 226822
uaugcucagagggucuugg

SEQ ID NO: 226824 - RNA, 19 nt, Artificial Sequence
  Description of Artificial Sequence: Synthetic oligonucleotide
  Sense strand starting at position 57 of SEQ ID NO: 2921
acucuuagguagucaacua

SEQ ID NO: 226825 - RNA, 19 nt, Artificial Sequence
  Description of Artificial Sequence: Synthetic oligonucleotide
  Antisense strand to SEQ ID NO: 226824
uaguugacuaccuaagagu

SEQ ID NO: 226826 - RNA, 19 nt, Artificial Sequence
  Description of Artificial Sequence: Synthetic oligonucleotide
  Sense strand starting at position 78 of SEQ ID NO: 2921
aguugaucuuuccaaagau

SEQ ID NO: 226827 - RNA, 19 nt, Artificial Sequence
  Description of Artificial Sequence: Synthetic oligonucleotide
  Antisense strand to SEQ ID NO: 226826
aucuuuggaaagaucaacu

SEQ ID NO: 226828 - RNA, 19 nt, Artificial Sequence
  Description of Artificial Sequence: Synthetic oligonucleotide
  Sense strand starting at position 225 of SEQ ID NO: 2921
agggcagucuucccaugaa

SEQ ID NO: 226829 - RNA, 19 nt, Artificial Sequence
  Description of Artificial Sequence: Synthetic oligonucleotide
  Antisense strand to SEQ ID NO: 226828
uucaugggaagacugcccu

SEQ ID NO: 226830 - RNA, 19 nt, Artificial Sequence
  Description of Artificial Sequence: Synthetic oligonucleotide
  Sense strand starting at position 228 of SEQ ID NO: 2921
gcagucuucccaugaaagg

SEQ ID NO: 226831 - RNA, 19 nt, Artificial Sequence
  Description of Artificial Sequence: Synthetic oligonucleotide
  Antisense strand to SEQ ID NO: 226830
ccuuucaugggaagacugc

SEQ ID NO: 226832 - RNA, 19 nt, Artificial Sequence
  Description of Artificial Sequence: Synthetic oligonucleotide
  Sense strand starting at position 624 of SEQ ID NO: 2921
ucggcucaauucuggaaau

SEQ ID NO: 226833 - RNA, 19 nt, Artificial Sequence
  Description of Artificial Sequence: Synthetic oligonucleotide
  Antisense strand to SEQ ID NO: 226832
auuuccagaauugagccga

SEQ ID NO: 226834 - RNA, 19 nt, Artificial Sequence
  Description of Artificial Sequence: Synthetic oligonucleotide
  Sense strand starting at position 625 of SEQ ID NO: 2921
cggcucaauucuggaaaua

SEQ ID NO: 226835 - RNA, 19 nt, Artificial Sequence
  Description of Artificial Sequence: Synthetic oligonucleotide
  Antisense strand to SEQ ID NO: 226834
uauuuccagaauugagccg

SEQ ID NO: 226836 - RNA, 19 nt, Artificial Sequence
  Description of Artificial Sequence: Synthetic oligonucleotide
  Sense strand starting at position 641 of SEQ ID NO: 2921
auauuaauagcucgguuaa

SEQ ID NO: 226837 - RNA, 19 nt, Artificial Sequence
  Description of Artificial Sequence: Synthetic oligonucleotide
  Antisense strand to SEQ ID NO: 226836
uuaaccgagcuauuaauau

SEQ ID NO: 226838 - RNA, 19 nt, Artificial Sequence
  Description of Artificial Sequence: Synthetic oligonucleotide
  Sense strand starting at position 642 of SEQ ID NO: 2921
uauuaauagcucgguuaag

SEQ ID NO: 226839 - RNA, 19 nt, Artificial Sequence
  Description of Artificial Sequence: Synthetic oligonucleotide
  Antisense strand to SEQ ID NO: 226838
cuuaaccgagcuauuaaua

SEQ ID NO: 226840 - RNA, 19 nt, Artificial Sequence
  Description of Artificial Sequence: Synthetic oligonucleotide
  Sense strand starting at position 643 of SEQ ID NO: 2921
auuaauagcucgguuaaga

SEQ ID NO: 226841 - RNA, 19 nt, Artificial Sequence
  Description of Artificial Sequence: Synthetic oligonucleotide
  Antisense strand to SEQ ID NO: 226840
ucuuaaccgagcuauuaau

SEQ ID NO: 226842 - RNA, 19 nt, Artificial Sequence
  Description of Artificial Sequence: Synthetic oligonucleotide
  Sense strand starting at position 658 of SEQ ID NO: 2921
aagagcuuaccgggugcaa

SEQ ID NO: 226843 - RNA, 19 nt, Artificial Sequence
  Description of Artificial Sequence: Synthetic oligonucleotide
  Antisense strand to SEQ ID NO: 226842
uugcacccgguaagcucuu

SEQ ID NO: 226844 - RNA, 19 nt, Artificial Sequence
  Description of Artificial Sequence: Synthetic oligonucleotide
  Sense strand starting at position 947 of SEQ ID NO: 2921
gcgccugcuccaggaaagu

SEQ ID NO: 226845 - RNA, 19 nt, Artificial Sequence
  Description of Artificial Sequence: Synthetic oligonucleotide
  Antisense strand to SEQ ID NO: 226844
acuuuccuggagcaggcgc

SEQ ID NO: 226846 - RNA, 19 nt, Artificial Sequence
  Description of Artificial Sequence: Synthetic oligonucleotide
  Sense strand starting at position 956 of SEQ ID NO: 2921
ccaggaaaguccugaaucu

SEQ ID NO: 226847 - RNA, 19 nt, Artificial Sequence
  Description of Artificial Sequence: Synthetic oligonucleotide
  Antisense strand to SEQ ID NO: 226846
agauucaggacuuuccugg

SEQ ID NO: 226848 - RNA, 19 nt, Artificial Sequence
  Description of Artificial Sequence: Synthetic oligonucleotide
  Sense strand starting at position 1146 of SEQ ID NO: 2921
ggcucccuuuccuagaagu

SEQ ID NO: 226849 - RNA, 19 nt, Artificial Sequence
  Description of Artificial Sequence: Synthetic oligonucleotide
  Antisense strand to SEQ ID NO: 226848
acuucuaggaaagggagcc

SEQ ID NO: 226850 - RNA, 19 nt, Artificial Sequence
  Description of Artificial Sequence: Synthetic oligonucleotide
  Sense strand starting at position 1156 of SEQ ID NO: 2921
ccuagaaguugcuuucgga

SEQ ID NO: 226851 - RNA, 19 nt, Artificial Sequence
  Description of Artificial Sequence: Synthetic oligonucleotide
  Antisense strand to SEQ ID NO: 226850
uccgaaagcaacuucuagg

SEQ ID NO: 226852 - RNA, 19 nt, Artificial Sequence
  Description of Artificial Sequence: Synthetic oligonucleotide
  Sense strand starting at position 1164 of SEQ ID NO: 2921
uugcuuucggagcaaaucu

SEQ ID NO: 226853 - RNA, 19 nt, Artificial Sequence
  Description of Artificial Sequence: Synthetic oligonucleotide
  Antisense strand to SEQ ID NO: 226852
agauuugcuccgaaagcaa

SEQ ID NO: 226854 - RNA, 19 nt, Artificial Sequence
  Description of Artificial Sequence: Synthetic oligonucleotide
  Sense strand starting at position 1350 of SEQ ID NO: 2921
gcaagaucuggcugcguug

SEQ ID NO: 226855 - RNA, 19 nt, Artificial Sequence
  Description of Artificial Sequence: Synthetic oligonucleotide
  Antisense strand to SEQ ID NO: 226854
caacgcagccagaucuugc

SEQ ID NO: 226856 - RNA, 19 nt, Artificial Sequence
  Description of Artificial Sequence: Synthetic oligonucleotide
  Sense strand starting at position 1480 of SEQ ID NO: 2921
gcgggagcucacaguuuga

SEQ ID NO: 226857 - RNA, 19 nt, Artificial Sequence
  Description of Artificial Sequence: Synthetic oligonucleotide
  Antisense strand to SEQ ID NO: 226856
ucaaacugugagcucccgc

SEQ ID NO: 226858 - RNA, 19 nt, Artificial Sequence
  Description of Artificial Sequence: Synthetic oligonucleotide
  Sense strand starting at position 1484 of SEQ ID NO: 2921
gagcucacaguuugaacau

SEQ ID NO: 226859 - RNA, 19 nt, Artificial Sequence
  Description of Artificial Sequence: Synthetic oligonucleotide
  Antisense strand to SEQ ID NO: 226858
auguucaaacugugagcuc

SEQ ID NO: 226860 - RNA, 19 nt, Artificial Sequence
  Description of Artificial Sequence: Synthetic oligonucleotide
  Sense strand starting at position 2400 of SEQ ID NO: 2921
cacucauuggaacgaaaug

SEQ ID NO: 226861 - RNA, 19 nt, Artificial Sequence
  Description of Artificial Sequence: Synthetic oligonucleotide
  Antisense strand to SEQ ID NO: 226860
cauuucguuccaaugagug

SEQ ID NO: 226862 - RNA, 19 nt, Artificial Sequence
  Description of Artificial Sequence: Synthetic oligonucleotide
  Sense strand starting at position 2550 of SEQ ID NO: 2921
gcgugaaacgcacaagaaa

SEQ ID NO: 226863 - RNA, 19 nt, Artificial Sequence
  Description of Artificial Sequence: Synthetic oligonucleotide
  Antisense strand to SEQ ID NO: 226862
uuucuugugcguuucacgc

SEQ ID NO: 226864 - RNA, 19 nt, Artificial Sequence
  Description of Artificial Sequence: Synthetic oligonucleotide
  Sense strand starting at position 2674 of SEQ ID NO: 2921
guuagacugucucuacaaa

SEQ ID NO: 226865 - RNA, 19 nt, Artificial Sequence
  Description of Artificial Sequence: Synthetic oligonucleotide
  Antisense strand to SEQ ID NO: 226864
uuuguagagacagucuaac

SEQ ID NO: 226866 - RNA, 19 nt, Artificial Sequence
  Description of Artificial Sequence: Synthetic oligonucleotide
  Sense strand starting at position 2989 of SEQ ID NO: 2921
ggcugaugccgcuguuaca

SEQ ID NO: 226867 - RNA, 19 nt, Artificial Sequence
  Description of Artificial Sequence: Synthetic oligonucleotide
  Antisense strand to SEQ ID NO: 226866
uguaacagcggcaucagcc

SEQ ID NO: 226868 - RNA, 19 nt, Artificial Sequence
  Description of Artificial Sequence: Synthetic oligonucleotide
  Sense strand starting at position 2990 of SEQ ID NO: 2921
gcugaugccgcuguuacau

SEQ ID NO: 226869 - RNA, 19 nt, Artificial Sequence
  Description of Artificial Sequence: Synthetic oligonucleotide
  Antisense strand to SEQ ID NO: 226868
auguaacagcggcaucagc

SEQ ID NO: 226870 - RNA, 19 nt, Artificial Sequence
  Description of Artificial Sequence: Synthetic oligonucleotide
  Sense strand starting at position 3008 of SEQ ID NO: 2921
ucagccaggcguugagaau

SEQ ID NO: 226871 - RNA, 19 nt, Artificial Sequence
  Description of Artificial Sequence: Synthetic oligonucleotide
  Antisense strand to SEQ ID NO: 226870
auucucaacgccuggcuga

SEQ ID NO: 226872 - RNA, 19 nt, Artificial Sequence
  Description of Artificial Sequence: Synthetic oligonucleotide
  Sense strand starting at position 3017 of SEQ ID NO: 2921
cguugagaaucuuguaaac

SEQ ID NO: 226873 - RNA, 19 nt, Artificial Sequence
  Description of Artificial Sequence: Synthetic oligonucleotide
  Antisense strand to SEQ ID NO: 226872
guuuacaagauucucaacg

SEQ ID NO: 226874 - RNA, 19 nt, Artificial Sequence
  Description of Artificial Sequence: Synthetic oligonucleotide
  Sense strand starting at position 3019 of SEQ ID NO: 2921
uugagaaucuuguaaacac

SEQ ID NO: 226875 - RNA, 19 nt, Artificial Sequence
  Description of Artificial Sequence: Synthetic oligonucleotide
  Antisense strand to SEQ ID NO: 226874
guguuuacaagauucucaa

SEQ ID NO: 226876 - RNA, 19 nt, Artificial Sequence
  Description of Artificial Sequence: Synthetic oligonucleotide
  Sense strand starting at position 3113 of SEQ ID NO: 2921
cuggacuaugguugucuga

SEQ ID NO: 226877 - RNA, 19 nt, Artificial Sequence
  Description of Artificial Sequence: Synthetic oligonucleotide
  Antisense strand to SEQ ID NO: 226876
ucagacaaccauaguccag

SEQ ID NO: 226878 - RNA, 19 nt, Artificial Sequence
  Description of Artificial Sequence: Synthetic oligonucleotide
  Sense strand starting at position 3115 of SEQ ID NO: 2921
ggacuaugguugucugaga

SEQ ID NO: 226879 - RNA, 19 nt, Artificial Sequence
  Description of Artificial Sequence: Synthetic oligonucleotide
  Antisense strand to SEQ ID NO: 226878
ucucagacaaccauagucc

SEQ ID NO: 226880 - RNA, 19 nt, Artificial Sequence
  Description of Artificial Sequence: Synthetic oligonucleotide
  Sense strand starting at position 3116 of SEQ ID NO: 2921
gacuaugguugucugagac

SEQ ID NO: 226881 - RNA, 19 nt, Artificial Sequence
  Description of Artificial Sequence: Synthetic oligonucleotide
  Antisense strand to SEQ ID NO: 226880
gucucagacaaccauaguc

SEQ ID NO: 226882 - RNA, 19 nt, Artificial Sequence
  Description of Artificial Sequence: Synthetic oligonucleotide
  Sense strand starting at position 3267 of SEQ ID NO: 2921
caacuugacuugguacaga

SEQ ID NO: 226883 - RNA, 19 nt, Artificial Sequence
  Description of Artificial Sequence: Synthetic oligonucleotide
  Antisense strand to SEQ ID NO: 226882
ucuguaccaagucaaguug

SEQ ID NO: 226884 - RNA, 19 nt, Artificial Sequence
  Description of Artificial Sequence: Synthetic oligonucleotide
  Sense strand starting at position 3399 of SEQ ID NO: 2921
accacuuuaugugacacau

SEQ ID NO: 226885 - RNA, 19 nt, Artificial Sequence
  Description of Artificial Sequence: Synthetic oligonucleotide
  Antisense strand to SEQ ID NO: 226884
augugucacauaaaguggu

SEQ ID NO: 226886 - RNA, 19 nt, Artificial Sequence
  Description of Artificial Sequence: Synthetic oligonucleotide
  Sense strand starting at position 3697 of SEQ ID NO: 2921
gugaacuccuagccucaga

SEQ ID NO: 226887 - RNA, 19 nt, Artificial Sequence
  Description of Artificial Sequence: Synthetic oligonucleotide
  Antisense strand to SEQ ID NO: 226886
ucugaggcuaggaguucac

SEQ ID NO: 226888 - RNA, 19 nt, Artificial Sequence
  Description of Artificial Sequence: Synthetic oligonucleotide
  Sense strand starting at position 3811 of SEQ ID NO: 2921
uucuuauuccaucgagcuc

SEQ ID NO: 226889 - RNA, 19 nt, Artificial Sequence
  Description of Artificial Sequence: Synthetic oligonucleotide
  Antisense strand to SEQ ID NO: 226888
gagcucgauggaauaagaa

SEQ ID NO: 226890 - RNA, 19 nt, Artificial Sequence
  Description of Artificial Sequence: Synthetic oligonucleotide
  Sense strand starting at position 3822 of SEQ ID NO: 2921
ucgagcucuccucaagaaa

SEQ ID NO: 226891 - RNA, 19 nt, Artificial Sequence
  Description of Artificial Sequence: Synthetic oligonucleotide
  Antisense strand to SEQ ID NO: 226890
uuucuugaggagagcucga

SEQ ID NO: 226892 - RNA, 19 nt, Artificial Sequence
  Description of Artificial Sequence: Synthetic oligonucleotide
  Sense strand starting at position 30 of SEQ ID NO: 2922
gcacccagaugcuuugauu

SEQ ID NO: 226893 - RNA, 19 nt, Artificial Sequence
  Description of Artificial Sequence: Synthetic oligonucleotide
  Antisense strand to SEQ ID NO: 226892
aaucaaagcaucugggugc

SEQ ID NO: 226894 - RNA, 19 nt, Artificial Sequence
  Description of Artificial Sequence: Synthetic oligonucleotide
  Sense strand starting at position 128 of SEQ ID NO: 2922
agauaucucggguaaacga

SEQ ID NO: 226895 - RNA, 19 nt, Artificial Sequence
  Description of Artificial Sequence: Synthetic oligonucleotide
  Antisense strand to SEQ ID NO: 226894
ucguuuacccgagauaucu

SEQ ID NO: 226896 - RNA, 19 nt, Artificial Sequence
  Description of Artificial Sequence: Synthetic oligonucleotide
  Sense strand starting at position 136 of SEQ ID NO: 2922
cggguaaacgaccaaauua

SEQ ID NO: 226897 - RNA, 19 nt, Artificial Sequence
  Description of Artificial Sequence: Synthetic oligonucleotide
  Antisense strand to SEQ ID NO: 226896
uaauuuggucguuuacccg

SEQ ID NO: 226898 - RNA, 19 nt, Artificial Sequence
  Description of Artificial Sequence: Synthetic oligonucleotide
  Sense strand starting at position 212 of SEQ ID NO: 2922
uucugaugagccuguccua

SEQ ID NO: 226899 - RNA, 19 nt, Artificial Sequence
  Description of Artificial Sequence: Synthetic oligonucleotide
  Antisense strand to SEQ ID NO: 226898
uaggacaggcucaucagaa

SEQ ID NO: 226900 - RNA, 19 nt, Artificial Sequence
  Description of Artificial Sequence: Synthetic oligonucleotide
  Sense strand starting at position 215 of SEQ ID NO: 2922
ugaugagccuguccuaacu

SEQ ID NO: 226901 - RNA, 19 nt, Artificial Sequence
  Description of Artificial Sequence: Synthetic oligonucleotide
  Antisense strand to SEQ ID NO: 226900
aguuaggacaggcucauca

SEQ ID NO: 226902 - RNA, 19 nt, Artificial Sequence
  Description of Artificial Sequence: Synthetic oligonucleotide
  Sense strand starting at position 273 of SEQ ID NO: 2922
gucaaaugaucugcagcuu

SEQ ID NO: 226903 - RNA, 19 nt, Artificial Sequence
  Description of Artificial Sequence: Synthetic oligonucleotide
  Antisense strand to SEQ ID NO: 226902
aagcugcagaucauuugac

SEQ ID NO: 226904 - RNA, 19 nt, Artificial Sequence
  Description of Artificial Sequence: Synthetic oligonucleotide
  Sense strand starting at position 295 of SEQ ID NO: 2922
gcugcuaccucugcagaaa

SEQ ID NO: 226905 - RNA, 19 nt, Artificial Sequence
  Description of Artificial Sequence: Synthetic oligonucleotide
  Antisense strand to SEQ ID NO: 226904
uuucugcagagguagcagc

SEQ ID NO: 226906 - RNA, 19 nt, Artificial Sequence
  Description of Artificial Sequence: Synthetic oligonucleotide
  Sense strand starting at position 484 of SEQ ID NO: 2922
guccaagagaaaugguacu

SEQ ID NO: 226907 - RNA, 19 nt, Artificial Sequence
  Description of Artificial Sequence: Synthetic oligonucleotide
  Antisense strand to SEQ ID NO: 226906
aguaccauuucucuuggac

SEQ ID NO: 226908 - RNA, 19 nt, Artificial Sequence
  Description of Artificial Sequence: Synthetic oligonucleotide
  Sense strand starting at position 490 of SEQ ID NO: 2922
gagaaaugguacuugcuga

SEQ ID NO: 226909 - RNA, 19 nt, Artificial Sequence
  Description of Artificial Sequence: Synthetic oligonucleotide
  Antisense strand to SEQ ID NO: 226908
ucagcaaguaccauuucuc

SEQ ID NO: 226910 - RNA, 19 nt, Artificial Sequence
  Description of Artificial Sequence: Synthetic oligonucleotide
  Sense strand starting at position 520 of SEQ ID NO: 2922
gaugucucacccuggauca

SEQ ID NO: 226911 - RNA, 19 nt, Artificial Sequence
  Description of Artificial Sequence: Synthetic oligonucleotide
  Antisense strand to SEQ ID NO: 226910
ugauccagggugagacauc

SEQ ID NO: 226912 - RNA, 19 nt, Artificial Sequence
  Description of Artificial Sequence: Synthetic oligonucleotide
  Sense strand starting at position 522 of SEQ ID NO: 2922
ugucucacccuggaucaga

SEQ ID NO: 226913 - RNA, 19 nt, Artificial Sequence
  Description of Artificial Sequence: Synthetic oligonucleotide
  Antisense strand to SEQ ID NO: 226912
ucugauccagggugagaca

SEQ ID NO: 226914 - RNA, 19 nt, Artificial Sequence
  Description of Artificial Sequence: Synthetic oligonucleotide
  Sense strand starting at position 546 of SEQ ID NO: 2922
aaacguauuucugagcaac

SEQ ID NO: 226915 - RNA, 19 nt, Artificial Sequence
  Description of Artificial Sequence: Synthetic oligonucleotide
  Antisense strand to SEQ ID NO: 226914
guugcucagaaauacguuu

SEQ ID NO: 226916 - RNA, 19 nt, Artificial Sequence
  Description of Artificial Sequence: Synthetic oligonucleotide
  Sense strand starting at position 734 of SEQ ID NO: 2922
agccucagugauggguuaa

SEQ ID NO: 226917 - RNA, 19 nt, Artificial Sequence
  Description of Artificial Sequence: Synthetic oligonucleotide
  Antisense strand to SEQ ID NO: 226916
uuaacccaucacugaggcu

SEQ ID NO: 226918 - RNA, 19 nt, Artificial Sequence
  Description of Artificial Sequence: Synthetic oligonucleotide
  Sense strand starting at position 735 of SEQ ID NO: 2922
gccucagugauggguuaaa

SEQ ID NO: 226919 - RNA, 19 nt, Artificial Sequence
  Description of Artificial Sequence: Synthetic oligonucleotide
  Antisense strand to SEQ ID NO: 226918
uuuaacccaucacugaggc

SEQ ID NO: 226920 - RNA, 19 nt, Artificial Sequence
  Description of Artificial Sequence: Synthetic oligonucleotide
  Sense strand starting at position 746 of SEQ ID NO: 2922
ggguuaaauugggaacgca

SEQ ID NO: 226921 - RNA, 19 nt, Artificial Sequence
  Description of Artificial Sequence: Synthetic oligonucleotide
  Antisense strand to SEQ ID NO: 226920
ugcguucccaauuuaaccc

SEQ ID NO: 226922 - RNA, 19 nt, Artificial Sequence
  Description of Artificial Sequence: Synthetic oligonucleotide
  Sense strand starting at position 830 of SEQ ID NO: 2922
ugagcacagcuccaauuau

SEQ ID NO: 226923 - RNA, 19 nt, Artificial Sequence
  Description of Artificial Sequence: Synthetic oligonucleotide
  Antisense strand to SEQ ID NO: 226922
auaauuggagcugugcuca

SEQ ID NO: 226924 - RNA, 19 nt, Artificial Sequence
  Description of Artificial Sequence: Synthetic oligonucleotide
  Sense strand starting at position 868 of SEQ ID NO: 2922
cugccagagaccuggguuu

SEQ ID NO: 226925 - RNA, 19 nt, Artificial Sequence
  Description of Artificial Sequence: Synthetic oligonucleotide
  Antisense strand to SEQ ID NO: 226924
aaacccaggucucuggcag

SEQ ID NO: 226926 - RNA, 19 nt, Artificial Sequence
  Description of Artificial Sequence: Synthetic oligonucleotide
  Sense strand starting at position 896 of SEQ ID NO: 2922
uaugucuaccgggaucaca

SEQ ID NO: 226927 - RNA, 19 nt, Artificial Sequence
  Description of Artificial Sequence: Synthetic oligonucleotide
  Antisense strand to SEQ ID NO: 226926
ugugaucccgguagacaua

SEQ ID NO: 226928 - RNA, 19 nt, Artificial Sequence
  Description of Artificial Sequence: Synthetic oligonucleotide
  Sense strand starting at position 1443 of SEQ ID NO: 2922
uuuguuaauuccgcaaaug

SEQ ID NO: 226929 - RNA, 19 nt, Artificial Sequence
  Description of Artificial Sequence: Synthetic oligonucleotide
  Antisense strand to SEQ ID NO: 226928
cauuugcggaauuaacaaa

SEQ ID NO: 226930 - RNA, 19 nt, Artificial Sequence
  Description of Artificial Sequence: Synthetic oligonucleotide
  Sense strand starting at position 2413 of SEQ ID NO: 2922
agcgccguucucugaugaa

SEQ ID NO: 226931 - RNA, 19 nt, Artificial Sequence
  Description of Artificial Sequence: Synthetic oligonucleotide
  Antisense strand to SEQ ID NO: 226930
uucaucagagaacggcgcu

SEQ ID NO: 226932 - RNA, 19 nt, Artificial Sequence
  Description of Artificial Sequence: Synthetic oligonucleotide
  Sense strand starting at position 2578 of SEQ ID NO: 2922
gcaggaaguccgcuugcuu

SEQ ID NO: 226933 - RNA, 19 nt, Artificial Sequence
  Description of Artificial Sequence: Synthetic oligonucleotide
  Antisense strand to SEQ ID NO: 226932
aagcaagcggacuuccugc

SEQ ID NO: 226934 - RNA, 19 nt, Artificial Sequence
  Description of Artificial Sequence: Synthetic oligonucleotide
  Sense strand starting at position 2611 of SEQ ID NO: 2922
uuauauguguaauucgcaa

SEQ ID NO: 226935 - RNA, 19 nt, Artificial Sequence
  Description of Artificial Sequence: Synthetic oligonucleotide
  Antisense strand to SEQ ID NO: 226934
uugcgaauuacacauauaa

SEQ ID NO: 226936 - RNA, 19 nt, Artificial Sequence
  Description of Artificial Sequence: Synthetic oligonucleotide
  Sense strand starting at position 3192 of SEQ ID NO: 2922
gguugagaguuguuugggu

SEQ ID NO: 226937 - RNA, 19 nt, Artificial Sequence
  Description of Artificial Sequence: Synthetic oligonucleotide
  Antisense strand to SEQ ID NO: 226936
acccaaacaacucucaacc

SEQ ID NO: 226938 - RNA, 19 nt, Artificial Sequence
  Description of Artificial Sequence: Synthetic oligonucleotide
  Sense strand starting at position 3233 of SEQ ID NO: 2922
guagaaauauucuacuagu

SEQ ID NO: 226939 - RNA, 19 nt, Artificial Sequence
  Description of Artificial Sequence: Synthetic oligonucleotide
  Antisense strand to SEQ ID NO: 226938
acuaguagaauauuucuac

SEQ ID NO: 226940 - RNA, 19 nt, Artificial Sequence
  Description of Artificial Sequence: Synthetic oligonucleotide
  Sense strand starting at position 3239 of SEQ ID NO: 2922
auauucuacuaguagaagu

SEQ ID NO: 226941 - RNA, 19 nt, Artificial Sequence
  Description of Artificial Sequence: Synthetic oligonucleotide
  Antisense strand to SEQ ID NO: 226940
acuucuacuaguagaauau

SEQ ID NO: 226942 - RNA, 19 nt, Artificial Sequence
  Description of Artificial Sequence: Synthetic oligonucleotide
  Sense strand starting at position 3241 of SEQ ID NO: 2922
auucuacuaguagaaguua

SEQ ID NO: 226943 - RNA, 19 nt, Artificial Sequence
  Description of Artificial Sequence: Synthetic oligonucleotide
  Antisense strand to SEQ ID NO: 226942
uaacuucuacuaguagaau

SEQ ID NO: 226944 - RNA, 19 nt, Artificial Sequence
  Description of Artificial Sequence: Synthetic oligonucleotide
  Sense strand starting at position 3310 of SEQ ID NO: 2922
auuuaacguugagagguua

SEQ ID NO: 226945 - RNA, 19 nt, Artificial Sequence
  Description of Artificial Sequence: Synthetic oligonucleotide
  Antisense strand to SEQ ID NO: 226944
uaaccucucaacguuaaau

SEQ ID NO: 226946 - RNA, 19 nt, Artificial Sequence
  Description of Artificial Sequence: Synthetic oligonucleotide
  Sense strand starting at position 3322 of SEQ ID NO: 2922
gagguuaauuuauguuguu

SEQ ID NO: 226947 - RNA, 19 nt, Artificial Sequence
  Description of Artificial Sequence: Synthetic oligonucleotide
  Antisense strand to SEQ ID NO: 226946
aacaacauaaauuaaccuc

SEQ ID NO: 226948 - RNA, 19 nt, Artificial Sequence
  Description of Artificial Sequence: Synthetic oligonucleotide
  Sense strand starting at position 3327 of SEQ ID NO: 2922
uaauuuauguuguuaggcu

SEQ ID NO: 226949 - RNA, 19 nt, Artificial Sequence
  Description of Artificial Sequence: Synthetic oligonucleotide
  Antisense strand to SEQ ID NO: 226948
agccuaacaacauaaauua

SEQ ID NO: 226950 - RNA, 19 nt, Artificial Sequence
  Description of Artificial Sequence: Synthetic oligonucleotide
  Sense strand starting at position 3353 of SEQ ID NO: 2922
gugucuguaggccaaugau

SEQ ID NO: 226951 - RNA, 19 nt, Artificial Sequence
  Description of Artificial Sequence: Synthetic oligonucleotide
  Antisense strand to SEQ ID NO: 226950
aucauuggccuacagacac

SEQ ID NO: 226952 - RNA, 19 nt, Artificial Sequence
  Description of Artificial Sequence: Synthetic oligonucleotide
  Sense strand starting at position 3356 of SEQ ID NO: 2922
ucuguaggccaaugaucua

SEQ ID NO: 226953 - RNA, 19 nt, Artificial Sequence
  Description of Artificial Sequence: Synthetic oligonucleotide
  Antisense strand to SEQ ID NO: 226952
uagaucauuggccuacaga

SEQ ID NO: 226954 - RNA, 19 nt, Artificial Sequence
  Description of Artificial Sequence: Synthetic oligonucleotide
  Sense strand starting at position 3807 of SEQ ID NO: 2922
uggcuuuaagauugacuga

SEQ ID NO: 226955 - RNA, 19 nt, Artificial Sequence
  Description of Artificial Sequence: Synthetic oligonucleotide
  Antisense strand to SEQ ID NO: 226954
ucagucaaucuuaaagcca

SEQ ID NO: 226956 - RNA, 19 nt, Artificial Sequence
  Description of Artificial Sequence: Synthetic oligonucleotide
  Sense strand starting at position 3820 of SEQ ID NO: 2922
gacugagagucagacuuga

SEQ ID NO: 226957 - RNA, 19 nt, Artificial Sequence
  Description of Artificial Sequence: Synthetic oligonucleotide
  Antisense strand to SEQ ID NO: 226956
ucaagucugacucucaguc

SEQ ID NO: 226958 - RNA, 19 nt, Artificial Sequence
  Description of Artificial Sequence: Synthetic oligonucleotide
  Sense strand starting at position 3860 of SEQ ID NO: 2922
ucagcucuagcuugauaug

SEQ ID NO: 226959 - RNA, 19 nt, Artificial Sequence
  Description of Artificial Sequence: Synthetic oligonucleotide
  Antisense strand to SEQ ID NO: 226958
cauaucaagcuagagcuga

SEQ ID NO: 226960 - RNA, 19 nt, Artificial Sequence
  Description of Artificial Sequence: Synthetic oligonucleotide
  Sense strand starting at position 3861 of SEQ ID NO: 2922
cagcucuagcuugauauga

SEQ ID NO: 226961 - RNA, 19 nt, Artificial Sequence
  Description of Artificial Sequence: Synthetic oligonucleotide
  Antisense strand to SEQ ID NO: 226960
ucauaucaagcuagagcug

SEQ ID NO: 226962 - RNA, 19 nt, Artificial Sequence
  Description of Artificial Sequence: Synthetic oligonucleotide
  Sense strand starting at position 3930 of SEQ ID NO: 2922
caugaaacauuggugucua

SEQ ID NO: 226963 - RNA, 19 nt, Artificial Sequence
  Description of Artificial Sequence: Synthetic oligonucleotide
  Antisense strand to SEQ ID NO: 226962
uagacaccaauguuucaug

SEQ ID NO: 226964 - RNA, 19 nt, Artificial Sequence
  Description of Artificial Sequence: Synthetic oligonucleotide
  Sense strand starting at position 3934 of SEQ ID NO: 2922
aaacauuggugucuacagu

SEQ ID NO: 226965 - RNA, 19 nt, Artificial Sequence
  Description of Artificial Sequence: Synthetic oligonucleotide
  Antisense strand to SEQ ID NO: 226964
acuguagacaccaauguuu

SEQ ID NO: 226966 - RNA, 19 nt, Artificial Sequence
  Description of Artificial Sequence: Synthetic oligonucleotide
  Sense strand starting at position 3935 of SEQ ID NO: 2922
aacauuggugucuacagua

SEQ ID NO: 226967 - RNA, 19 nt, Artificial Sequence
  Description of Artificial Sequence: Synthetic oligonucleotide
  Antisense strand to SEQ ID NO: 226966
uacuguagacaccaauguu

SEQ ID NO: 226968 - RNA, 19 nt, Artificial Sequence
  Description of Artificial Sequence: Synthetic oligonucleotide
  Sense strand starting at position 3940 of SEQ ID NO: 2922
uggugucuacaguacagaa

SEQ ID NO: 226969 - RNA, 19 nt, Artificial Sequence
  Description of Artificial Sequence: Synthetic oligonucleotide
  Antisense strand to SEQ ID NO: 226968
uucuguacuguagacacca

SEQ ID NO: 226970 - RNA, 19 nt, Artificial Sequence
  Description of Artificial Sequence: Synthetic oligonucleotide
  Sense strand starting at position 3957 of SEQ ID NO: 2922
aaggaaaugcagugucugu

SEQ ID NO: 226971 - RNA, 19 nt, Artificial Sequence
  Description of Artificial Sequence: Synthetic oligonucleotide
  Antisense strand to SEQ ID NO: 226970
acagacacugcauuuccuu

SEQ ID NO: 226972 - RNA, 19 nt, Artificial Sequence
  Description of Artificial Sequence: Synthetic oligonucleotide
  Sense strand starting at position 218 of SEQ ID NO: 2923
agggauguccgccaccaga

SEQ ID NO: 226973 - RNA, 19 nt, Artificial Sequence
  Description of Artificial Sequence: Synthetic oligonucleotide
  Antisense strand to SEQ ID NO: 226972
ucugguggcggacaucccu

SEQ ID NO: 226974 - RNA, 19 nt, Artificial Sequence
  Description of Artificial Sequence: Synthetic oligonucleotide
  Sense strand starting at position 740 of SEQ ID NO: 2923
ccagaacgccucugggaaa

SEQ ID NO: 226975 - RNA, 19 nt, Artificial Sequence
  Description of Artificial Sequence: Synthetic oligonucleotide
  Antisense strand to SEQ ID NO: 226974
uuucccagaggcguucugg

SEQ ID NO: 226976 - RNA, 19 nt, Artificial Sequence
  Description of Artificial Sequence: Synthetic oligonucleotide
  Sense strand starting at position 899 of SEQ ID NO: 2923
cgacaugagguugaagagu

SEQ ID NO: 226977 - RNA, 19 nt, Artificial Sequence
  Description of Artificial Sequence: Synthetic oligonucleotide
  Antisense strand to SEQ ID NO: 226976
acucuucaaccucaugucg

SEQ ID NO: 226978 - RNA, 19 nt, Artificial Sequence
  Description of Artificial Sequence: Synthetic oligonucleotide
  Sense strand starting at position 940 of SEQ ID NO: 2923
cgggcacugccugaaugaa

SEQ ID NO: 226979 - RNA, 19 nt, Artificial Sequence
  Description of Artificial Sequence: Synthetic oligonucleotide
  Antisense strand to SEQ ID NO: 226978
uucauucaggcagugcccg

SEQ ID NO: 226980 - RNA, 19 nt, Artificial Sequence
  Description of Artificial Sequence: Synthetic oligonucleotide
  Sense strand starting at position 1096 of SEQ ID NO: 2923
gaaucagcucugggcacau

SEQ ID NO: 226981 - RNA, 19 nt, Artificial Sequence
  Description of Artificial Sequence: Synthetic oligonucleotide
  Antisense strand to SEQ ID NO: 226980
augugcccagagcugauuc

SEQ ID NO: 226982 - RNA, 19 nt, Artificial Sequence
  Description of Artificial Sequence: Synthetic oligonucleotide
  Sense strand starting at position 1745 of SEQ ID NO: 2923
ggcacucaccucugggaaa

SEQ ID NO: 226983 - RNA, 19 nt, Artificial Sequence
  Description of Artificial Sequence: Synthetic oligonucleotide
  Antisense strand to SEQ ID NO: 226982
uuucccagaggugagugcc

SEQ ID NO: 226984 - RNA, 19 nt, Artificial Sequence
  Description of Artificial Sequence: Synthetic oligonucleotide
  Sense strand starting at position 1953 of SEQ ID NO: 2923
gacguaaaugcccaaacau

SEQ ID NO: 226985 - RNA, 19 nt, Artificial Sequence
  Description of Artificial Sequence: Synthetic oligonucleotide
  Antisense strand to SEQ ID NO: 226984
auguuugggcauuuacguc

SEQ ID NO: 226986 - RNA, 19 nt, Artificial Sequence
  Description of Artificial Sequence: Synthetic oligonucleotide
  Sense strand starting at position 2226 of SEQ ID NO: 2923
gccacuaacuagcuugaca

SEQ ID NO: 226987 - RNA, 19 nt, Artificial Sequence
  Description of Artificial Sequence: Synthetic oligonucleotide
  Antisense strand to SEQ ID NO: 226986
ugucaagcuaguuaguggc

SEQ ID NO: 226988 - RNA, 19 nt, Artificial Sequence
  Description of Artificial Sequence: Synthetic oligonucleotide
  Sense strand starting at position 2265 of SEQ ID NO: 2923
guuucucaccugugcauuu

SEQ ID NO: 226989 - RNA, 19 nt, Artificial Sequence
  Description of Artificial Sequence: Synthetic oligonucleotide
  Antisense strand to SEQ ID NO: 226988
aaaugcacaggugagaaac

SEQ ID NO: 226990 - RNA, 19 nt, Artificial Sequence
  Description of Artificial Sequence: Synthetic oligonucleotide
  Sense strand starting at position 2276 of SEQ ID NO: 2923
gugcauuuccuguggagag

SEQ ID NO: 226991 - RNA, 19 nt, Artificial Sequence
  Description of Artificial Sequence: Synthetic oligonucleotide
  Antisense strand to SEQ ID NO: 226990
cucuccacaggaaaugcac

SEQ ID NO: 226992 - RNA, 19 nt, Artificial Sequence
  Description of Artificial Sequence: Synthetic oligonucleotide
  Sense strand starting at position 2404 of SEQ ID NO: 2923
uuaaauuugugcuaggaaa

SEQ ID NO: 226993 - RNA, 19 nt, Artificial Sequence
  Description of Artificial Sequence: Synthetic oligonucleotide
  Antisense strand to SEQ ID NO: 226992
uuuccuagcacaaauuuaa

SEQ ID NO: 226994 - RNA, 19 nt, Artificial Sequence
  Description of Artificial Sequence: Synthetic oligonucleotide
  Sense strand starting at position 2444 of SEQ ID NO: 2923
cuguaauacuuguuaacag

SEQ ID NO: 226995 - RNA, 19 nt, Artificial Sequence
  Description of Artificial Sequence: Synthetic oligonucleotide
  Antisense strand to SEQ ID NO: 226994
cuguuaacaaguauuacag

SEQ ID NO: 226996 - RNA, 19 nt, Artificial Sequence
  Description of Artificial Sequence: Synthetic oligonucleotide
  Sense strand starting at position 2658 of SEQ ID NO: 2923
ugaaauaacuuagagauug

SEQ ID NO: 226997 - RNA, 19 nt, Artificial Sequence
  Description of Artificial Sequence: Synthetic oligonucleotide
  Antisense strand to SEQ ID NO: 226996
caaucucuaaguuauuuca

SEQ ID NO: 226998 - RNA, 19 nt, Artificial Sequence
  Description of Artificial Sequence: Synthetic oligonucleotide
  Sense strand starting at position 2663 of SEQ ID NO: 2923
uaacuuagagauugugcca

SEQ ID NO: 226999 - RNA, 19 nt, Artificial Sequence
  Description of Artificial Sequence: Synthetic oligonucleotide
  Antisense strand to SEQ ID NO: 226998
uggcacaaucucuaaguua

SEQ ID NO: 227000 - RNA, 19 nt, Artificial Sequence
  Description of Artificial Sequence: Synthetic oligonucleotide
  Sense strand starting at position 2676 of SEQ ID NO: 2923
gugccauguccugacauaa

SEQ ID NO: 227001 - RNA, 19 nt, Artificial Sequence
  Description of Artificial Sequence: Synthetic oligonucleotide
  Antisense strand to SEQ ID NO: 227000
uuaugucaggacauggcac

SEQ ID NO: 227002 - RNA, 19 nt, Artificial Sequence
  Description of Artificial Sequence: Synthetic oligonucleotide
  Sense strand starting at position 2723 of SEQ ID NO: 2923
auaguacuccauuguaagg

SEQ ID NO: 227003 - RNA, 19 nt, Artificial Sequence
  Description of Artificial Sequence: Synthetic oligonucleotide
  Antisense strand to SEQ ID NO: 227002
ccuuacaauggaguacuau

SEQ ID NO: 227004 - RNA, 19 nt, Artificial Sequence
  Description of Artificial Sequence: Synthetic oligonucleotide
  Sense strand starting at position 2745 of SEQ ID NO: 2923
gaccuugaguuagucgauu

SEQ ID NO: 227005 - RNA, 19 nt, Artificial Sequence
  Description of Artificial Sequence: Synthetic oligonucleotide
  Antisense strand to SEQ ID NO: 227004
aaucgacuaacucaagguc

SEQ ID NO: 227006 - RNA, 19 nt, Artificial Sequence
  Description of Artificial Sequence: Synthetic oligonucleotide
  Sense strand starting at position 2747 of SEQ ID NO: 2923
ccuugaguuagucgauuug

SEQ ID NO: 227007 - RNA, 19 nt, Artificial Sequence
  Description of Artificial Sequence: Synthetic oligonucleotide
  Antisense strand to SEQ ID NO: 227006
caaaucgacuaacucaagg

SEQ ID NO: 227008 - RNA, 19 nt, Artificial Sequence
  Description of Artificial Sequence: Synthetic oligonucleotide
  Sense strand starting at position 2809 of SEQ ID NO: 2923
auaccaauguuguuggagu

SEQ ID NO: 227009 - RNA, 19 nt, Artificial Sequence
  Description of Artificial Sequence: Synthetic oligonucleotide
  Antisense strand to SEQ ID NO: 227008
acuccaacaacauugguau

SEQ ID NO: 227010 - RNA, 19 nt, Artificial Sequence
  Description of Artificial Sequence: Synthetic oligonucleotide
  Sense strand starting at position 2816 of SEQ ID NO: 2923
uguuguuggagucaacauc

SEQ ID NO: 227011 - RNA, 19 nt, Artificial Sequence
  Description of Artificial Sequence: Synthetic oligonucleotide
  Antisense strand to SEQ ID NO: 227010
gauguugacuccaacaaca

SEQ ID NO: 227012 - RNA, 19 nt, Artificial Sequence
  Description of Artificial Sequence: Synthetic oligonucleotide
  Sense strand starting at position 2843 of SEQ ID NO: 2923
uauaaaugugaaugugucu

SEQ ID NO: 227013 - RNA, 19 nt, Artificial Sequence
  Description of Artificial Sequence: Synthetic oligonucleotide
  Antisense strand to SEQ ID NO: 227012
agacacauucacauuuaua

SEQ ID NO: 227014 - RNA, 19 nt, Artificial Sequence
  Description of Artificial Sequence: Synthetic oligonucleotide
  Sense strand starting at position 2856 of SEQ ID NO: 2923
gugucugugagauaaauuc

SEQ ID NO: 227015 - RNA, 19 nt, Artificial Sequence
  Description of Artificial Sequence: Synthetic oligonucleotide
  Antisense strand to SEQ ID NO: 227014
gaauuuaucucacagacac

SEQ ID NO: 227016 - RNA, 19 nt, Artificial Sequence
  Description of Artificial Sequence: Synthetic oligonucleotide
  Sense strand starting at position 2866 of SEQ ID NO: 2923
gauaaauuccaacgagugu

SEQ ID NO: 227017 - RNA, 19 nt, Artificial Sequence
  Description of Artificial Sequence: Synthetic oligonucleotide
  Antisense strand to SEQ ID NO: 227016
acacucguuggaauuuauc

SEQ ID NO: 227018 - RNA, 19 nt, Artificial Sequence
  Description of Artificial Sequence: Synthetic oligonucleotide
  Sense strand starting at position 2870 of SEQ ID NO: 2923
aauuccaacgaguguaauu

SEQ ID NO: 227019 - RNA, 19 nt, Artificial Sequence
  Description of Artificial Sequence: Synthetic oligonucleotide
  Antisense strand to SEQ ID NO: 227018
aauuacacucguuggaauu

SEQ ID NO: 227020 - RNA, 19 nt, Artificial Sequence
  Description of Artificial Sequence: Synthetic oligonucleotide
  Sense strand starting at position 2890 of SEQ ID NO: 2923
ugugccaaaguauauguaa

SEQ ID NO: 227021 - RNA, 19 nt, Artificial Sequence
  Description of Artificial Sequence: Synthetic oligonucleotide
  Antisense strand to SEQ ID NO: 227020
uuacauauacuuuggcaca

SEQ ID NO: 227022 - RNA, 19 nt, Artificial Sequence
  Description of Artificial Sequence: Synthetic oligonucleotide
  Sense strand starting at position 2989 of SEQ ID NO: 2923
ugagaugcuucugcagaac

SEQ ID NO: 227023 - RNA, 19 nt, Artificial Sequence
  Description of Artificial Sequence: Synthetic oligonucleotide
  Antisense strand to SEQ ID NO: 227022
guucugcagaagcaucuca

SEQ ID NO: 227024 - RNA, 19 nt, Artificial Sequence
  Description of Artificial Sequence: Synthetic oligonucleotide
  Sense strand starting at position 3048 of SEQ ID NO: 2923
uguugaucccagcaacaca

SEQ ID NO: 227025 - RNA, 19 nt, Artificial Sequence
  Description of Artificial Sequence: Synthetic oligonucleotide
  Antisense strand to SEQ ID NO: 227024
uguguugcugggaucaaca

SEQ ID NO: 227026 - RNA, 19 nt, Artificial Sequence
  Description of Artificial Sequence: Synthetic oligonucleotide
  Sense strand starting at position 3067 of SEQ ID NO: 2923
cagggaauccgugggaaau

SEQ ID NO: 227027 - RNA, 19 nt, Artificial Sequence
  Description of Artificial Sequence: Synthetic oligonucleotide
  Antisense strand to SEQ ID NO: 227026
auuucccacggauucccug

SEQ ID NO: 227028 - RNA, 19 nt, Artificial Sequence
  Description of Artificial Sequence: Synthetic oligonucleotide
  Sense strand starting at position 3068 of SEQ ID NO: 2923
agggaauccgugggaaaua

SEQ ID NO: 227029 - RNA, 19 nt, Artificial Sequence
  Description of Artificial Sequence: Synthetic oligonucleotide
  Antisense strand to SEQ ID NO: 227028
uauuucccacggauucccu

SEQ ID NO: 227030 - RNA, 19 nt, Artificial Sequence
  Description of Artificial Sequence: Synthetic oligonucleotide
  Sense strand starting at position 3093 of SEQ ID NO: 2923
uggaaucaguacuugaaau

SEQ ID NO: 227031 - RNA, 19 nt, Artificial Sequence
  Description of Artificial Sequence: Synthetic oligonucleotide
  Antisense strand to SEQ ID NO: 227030
auuucaaguacugauucca

SEQ ID NO: 227032 - RNA, 19 nt, Artificial Sequence
  Description of Artificial Sequence: Synthetic oligonucleotide
  Sense strand starting at position 3106 of SEQ ID NO: 2923
ugaaauaauugggcuucuu

SEQ ID NO: 227033 - RNA, 19 nt, Artificial Sequence
  Description of Artificial Sequence: Synthetic oligonucleotide
  Antisense strand to SEQ ID NO: 227032
aagaagcccaauuauuuca

SEQ ID NO: 227034 - RNA, 19 nt, Artificial Sequence
  Description of Artificial Sequence: Synthetic oligonucleotide
  Sense strand starting at position 3150 of SEQ ID NO: 2923
ccuuaaggaggcugugaau

SEQ ID NO: 227035 - RNA, 19 nt, Artificial Sequence
  Description of Artificial Sequence: Synthetic oligonucleotide
  Antisense strand to SEQ ID NO: 227034
auucacagccuccuuaagg

SEQ ID NO: 227036 - RNA, 19 nt, Artificial Sequence
  Description of Artificial Sequence: Synthetic oligonucleotide
  Sense strand starting at position 3372 of SEQ ID NO: 2923
cauggaauagcauguucuu

SEQ ID NO: 227037 - RNA, 19 nt, Artificial Sequence
  Description of Artificial Sequence: Synthetic oligonucleotide
  Antisense strand to SEQ ID NO: 227036
aagaacaugcuauuccaug

SEQ ID NO: 227038 - RNA, 19 nt, Artificial Sequence
  Description of Artificial Sequence: Synthetic oligonucleotide
  Sense strand starting at position 3375 of SEQ ID NO: 2923
ggaauagcauguucuucuu

SEQ ID NO: 227039 - RNA, 19 nt, Artificial Sequence
  Description of Artificial Sequence: Synthetic oligonucleotide
  Antisense strand to SEQ ID NO: 227038
aagaagaacaugcuauucc

SEQ ID NO: 227040 - RNA, 19 nt, Artificial Sequence
  Description of Artificial Sequence: Synthetic oligonucleotide
  Sense strand starting at position 3402 of SEQ ID NO: 2923
gcaucaauuccugagacuc

SEQ ID NO: 227041 - RNA, 19 nt, Artificial Sequence
  Description of Artificial Sequence: Synthetic oligonucleotide
  Antisense strand to SEQ ID NO: 227040
gagucucaggaauugaugc

SEQ ID NO: 227042 - RNA, 19 nt, Artificial Sequence
  Description of Artificial Sequence: Synthetic oligonucleotide
  Sense strand starting at position 3515 of SEQ ID NO: 2923
cagcaucaugggcaguaua

SEQ ID NO: 227043 - RNA, 19 nt, Artificial Sequence
  Description of Artificial Sequence: Synthetic oligonucleotide
  Antisense strand to SEQ ID NO: 227042
uauacugcccaugaugcug

SEQ ID NO: 227044 - RNA, 19 nt, Artificial Sequence
  Description of Artificial Sequence: Synthetic oligonucleotide
  Sense strand starting at position 3927 of SEQ ID NO: 2923
cagugugucuuacuaaaug

SEQ ID NO: 227045 - RNA, 19 nt, Artificial Sequence
  Description of Artificial Sequence: Synthetic oligonucleotide
  Antisense strand to SEQ ID NO: 227044
cauuuaguaagacacacug

SEQ ID NO: 227046 - RNA, 19 nt, Artificial Sequence
  Description of Artificial Sequence: Synthetic oligonucleotide
  Sense strand starting at position 3963 of SEQ ID NO: 2923
guguuaguagcacauauau

SEQ ID NO: 227047 - RNA, 19 nt, Artificial Sequence
  Description of Artificial Sequence: Synthetic oligonucleotide
  Antisense strand to SEQ ID NO: 227046
auauaugugcuacuaacac

SEQ ID NO: 227048 - RNA, 19 nt, Artificial Sequence
  Description of Artificial Sequence: Synthetic oligonucleotide
  Sense strand starting at position 3972 of SEQ ID NO: 2923
gcacauauaugagcaugua

SEQ ID NO: 227049 - RNA, 19 nt, Artificial Sequence
  Description of Artificial Sequence: Synthetic oligonucleotide
  Antisense strand to SEQ ID NO: 227048
uacaugcucauauaugugc

SEQ ID NO: 227050 - RNA, 19 nt, Artificial Sequence
  Description of Artificial Sequence: Synthetic oligonucleotide
  Sense strand starting at position 3975 of SEQ ID NO: 2923
cauauaugagcauguagga

SEQ ID NO: 227051 - RNA, 19 nt, Artificial Sequence
  Description of Artificial Sequence: Synthetic oligonucleotide
  Antisense strand to SEQ ID NO: 227050
uccuacaugcucauauaug

SEQ ID NO: 227052 - RNA, 19 nt, Artificial Sequence
  Description of Artificial Sequence: Synthetic oligonucleotide
  Sense strand starting at position 480 of SEQ ID NO: 2925
acuuuaaagucacuuagua

SEQ ID NO: 227053 - RNA, 19 nt, Artificial Sequence
  Description of Artificial Sequence: Synthetic oligonucleotide
  Antisense strand to SEQ ID NO: 227052
uacuaagugacuuuaaagu

SEQ ID NO: 227054 - RNA, 19 nt, Artificial Sequence
  Description of Artificial Sequence: Synthetic oligonucleotide
  Sense strand starting at position 509 of SEQ ID NO: 2925
uguagaggcagaugaauua

SEQ ID NO: 227055 - RNA, 19 nt, Artificial Sequence
  Description of Artificial Sequence: Synthetic oligonucleotide
  Antisense strand to SEQ ID NO: 227054
uaauucaucugccucuaca

SEQ ID NO: 227056 - RNA, 19 nt, Artificial Sequence
  Description of Artificial Sequence: Synthetic oligonucleotide
  Sense strand starting at position 554 of SEQ ID NO: 2925
aggguucauggucagugaa

SEQ ID NO: 227057 - RNA, 19 nt, Artificial Sequence
  Description of Artificial Sequence: Synthetic oligonucleotide
  Antisense strand to SEQ ID NO: 227056
uucacugaccaugaacccu

SEQ ID NO: 227058 - RNA, 19 nt, Artificial Sequence
  Description of Artificial Sequence: Synthetic oligonucleotide
  Sense strand starting at position 557 of SEQ ID NO: 2925
guucauggucagugaagga

SEQ ID NO: 227059 - RNA, 19 nt, Artificial Sequence
  Description of Artificial Sequence: Synthetic oligonucleotide
  Antisense strand to SEQ ID NO: 227058
uccuucacugaccaugaac

SEQ ID NO: 227060 - RNA, 19 nt, Artificial Sequence
  Description of Artificial Sequence: Synthetic oligonucleotide
  Sense strand starting at position 689 of SEQ ID NO: 2925
aggccacaguuaucugaaa

SEQ ID NO: 227061 - RNA, 19 nt, Artificial Sequence
  Description of Artificial Sequence: Synthetic oligonucleotide
  Antisense strand to SEQ ID NO: 227060
uuucagauaacuguggccu

SEQ ID NO: 227062 - RNA, 19 nt, Artificial Sequence
  Description of Artificial Sequence: Synthetic oligonucleotide
  Sense strand starting at position 708 of SEQ ID NO: 2925
agagacugugggcaucauu

SEQ ID NO: 227063 - RNA, 19 nt, Artificial Sequence
  Description of Artificial Sequence: Synthetic oligonucleotide
  Antisense strand to SEQ ID NO: 227062
aaugaugcccacagucucu

SEQ ID NO: 227064 - RNA, 19 nt, Artificial Sequence
  Description of Artificial Sequence: Synthetic oligonucleotide
  Sense strand starting at position 913 of SEQ ID NO: 2925
uuaagacuuggcuggguau

SEQ ID NO: 227065 - RNA, 19 nt, Artificial Sequence
  Description of Artificial Sequence: Synthetic oligonucleotide
  Antisense strand to SEQ ID NO: 227064
auacccagccaagucuuaa

SEQ ID NO: 227066 - RNA, 19 nt, Artificial Sequence
  Description of Artificial Sequence: Synthetic oligonucleotide
  Sense strand starting at position 1145 of SEQ ID NO: 2925
cuuugugaggauuauguga

SEQ ID NO: 227067 - RNA, 19 nt, Artificial Sequence
  Description of Artificial Sequence: Synthetic oligonucleotide
  Antisense strand to SEQ ID NO: 227066
ucacauaauccucacaaag

SEQ ID NO: 227068 - RNA, 19 nt, Artificial Sequence
  Description of Artificial Sequence: Synthetic oligonucleotide
  Sense strand starting at position 1173 of SEQ ID NO: 2925
uuagcaauauugguuuaga

SEQ ID NO: 227069 - RNA, 19 nt, Artificial Sequence
  Description of Artificial Sequence: Synthetic oligonucleotide
  Antisense strand to SEQ ID NO: 227068
ucuaaaccaauauugcuaa

SEQ ID NO: 227070 - RNA, 19 nt, Artificial Sequence
  Description of Artificial Sequence: Synthetic oligonucleotide
  Sense strand starting at position 1174 of SEQ ID NO: 2925
uagcaauauugguuuagau

SEQ ID NO: 227071 - RNA, 19 nt, Artificial Sequence
  Description of Artificial Sequence: Synthetic oligonucleotide
  Antisense strand to SEQ ID NO: 227070
aucuaaaccaauauugcua

SEQ ID NO: 227072 - RNA, 19 nt, Artificial Sequence
  Description of Artificial Sequence: Synthetic oligonucleotide
  Sense strand starting at position 1176 of SEQ ID NO: 2925
gcaauauugguuuagauga

SEQ ID NO: 227073 - RNA, 19 nt, Artificial Sequence
  Description of Artificial Sequence: Synthetic oligonucleotide
  Antisense strand to SEQ ID NO: 227072
ucaucuaaaccaauauugc

SEQ ID NO: 227074 - RNA, 19 nt, Artificial Sequence
  Description of Artificial Sequence: Synthetic oligonucleotide
  Sense strand starting at position 1183 of SEQ ID NO: 2925
ugguuuagaugauuccuau

SEQ ID NO: 227075 - RNA, 19 nt, Artificial Sequence
  Description of Artificial Sequence: Synthetic oligonucleotide
  Antisense strand to SEQ ID NO: 227074
auaggaaucaucuaaacca

SEQ ID NO: 227076 - RNA, 19 nt, Artificial Sequence
  Description of Artificial Sequence: Synthetic oligonucleotide
  Sense strand starting at position 1186 of SEQ ID NO: 2925
uuuagaugauuccuaugug

SEQ ID NO: 227077 - RNA, 19 nt, Artificial Sequence
  Description of Artificial Sequence: Synthetic oligonucleotide
  Antisense strand to SEQ ID NO: 227076
cacauaggaaucaucuaaa

SEQ ID NO: 227078 - RNA, 19 nt, Artificial Sequence
  Description of Artificial Sequence: Synthetic oligonucleotide
  Sense strand starting at position 1667 of SEQ ID NO: 2925
cuagguuaucaaggaccau

SEQ ID NO: 227079 - RNA, 19 nt, Artificial Sequence
  Description of Artificial Sequence: Synthetic oligonucleotide
  Antisense strand to SEQ ID NO: 227078
augguccuugauaaccuag

SEQ ID NO: 227080 - RNA, 19 nt, Artificial Sequence
  Description of Artificial Sequence: Synthetic oligonucleotide
  Sense strand starting at position 1997 of SEQ ID NO: 2925
caguuaacacccuggagua

SEQ ID NO: 227081 - RNA, 19 nt, Artificial Sequence
  Description of Artificial Sequence: Synthetic oligonucleotide
  Antisense strand to SEQ ID NO: 227080
uacuccaggguguuaacug

SEQ ID NO: 227082 - RNA, 19 nt, Artificial Sequence
  Description of Artificial Sequence: Synthetic oligonucleotide
  Sense strand starting at position 1998 of SEQ ID NO: 2925
aguuaacacccuggaguau

SEQ ID NO: 227083 - RNA, 19 nt, Artificial Sequence
  Description of Artificial Sequence: Synthetic oligonucleotide
  Antisense strand to SEQ ID NO: 227082
auacuccaggguguuaacu

SEQ ID NO: 227084 - RNA, 19 nt, Artificial Sequence
  Description of Artificial Sequence: Synthetic oligonucleotide
  Sense strand starting at position 2007 of SEQ ID NO: 2925
ccuggaguaucugugauga

SEQ ID NO: 227085 - RNA, 19 nt, Artificial Sequence
  Description of Artificial Sequence: Synthetic oligonucleotide
  Antisense strand to SEQ ID NO: 227084
ucaucacagauacuccagg

SEQ ID NO: 227086 - RNA, 19 nt, Artificial Sequence
  Description of Artificial Sequence: Synthetic oligonucleotide
  Sense strand starting at position 2030 of SEQ ID NO: 2925
augggaggccuucagugau

SEQ ID NO: 227087 - RNA, 19 nt, Artificial Sequence
  Description of Artificial Sequence: Synthetic oligonucleotide
  Antisense strand to SEQ ID NO: 227086
aucacugaaggccucccau

SEQ ID NO: 227088 - RNA, 19 nt, Artificial Sequence
  Description of Artificial Sequence: Synthetic oligonucleotide
  Sense strand starting at position 2033 of SEQ ID NO: 2925
ggaggccuucagugauaca

SEQ ID NO: 227089 - RNA, 19 nt, Artificial Sequence
  Description of Artificial Sequence: Synthetic oligonucleotide
  Antisense strand to SEQ ID NO: 227088
uguaucacugaaggccucc

SEQ ID NO: 227090 - RNA, 19 nt, Artificial Sequence
  Description of Artificial Sequence: Synthetic oligonucleotide
  Sense strand starting at position 2064 of SEQ ID NO: 2925
gucagaagaccuggucaca

SEQ ID NO: 227091 - RNA, 19 nt, Artificial Sequence
  Description of Artificial Sequence: Synthetic oligonucleotide
  Antisense strand to SEQ ID NO: 227090
ugugaccaggucuucugac

SEQ ID NO: 227092 - RNA, 19 nt, Artificial Sequence
  Description of Artificial Sequence: Synthetic oligonucleotide
  Sense strand starting at position 2113 of SEQ ID NO: 2925
gcaggcaaaucaccucaau

SEQ ID NO: 227093 - RNA, 19 nt, Artificial Sequence
  Description of Artificial Sequence: Synthetic oligonucleotide
  Antisense strand to SEQ ID NO: 227092
auugaggugauuugccugc

SEQ ID NO: 227094 - RNA, 19 nt, Artificial Sequence
  Description of Artificial Sequence: Synthetic oligonucleotide
  Sense strand starting at position 2116 of SEQ ID NO: 2925
ggcaaaucaccucaauugu

SEQ ID NO: 227095 - RNA, 19 nt, Artificial Sequence
  Description of Artificial Sequence: Synthetic oligonucleotide
  Antisense strand to SEQ ID NO: 227094
acaauugaggugauuugcc

SEQ ID NO: 227096 - RNA, 19 nt, Artificial Sequence
  Description of Artificial Sequence: Synthetic oligonucleotide
  Sense strand starting at position 2198 of SEQ ID NO: 2925
agucauggacugcauaaua

SEQ ID NO: 227097 - RNA, 19 nt, Artificial Sequence
  Description of Artificial Sequence: Synthetic oligonucleotide
  Antisense strand to SEQ ID NO: 227096
uauuaugcaguccaugacu

SEQ ID NO: 227098 - RNA, 19 nt, Artificial Sequence
  Description of Artificial Sequence: Synthetic oligonucleotide
  Sense strand starting at position 2340 of SEQ ID NO: 2925
uguguagccauggacuaua

SEQ ID NO: 227099 - RNA, 19 nt, Artificial Sequence
  Description of Artificial Sequence: Synthetic oligonucleotide
  Antisense strand to SEQ ID NO: 227098
uauaguccauggcuacaca

SEQ ID NO: 227100 - RNA, 19 nt, Artificial Sequence
  Description of Artificial Sequence: Synthetic oligonucleotide
  Sense strand starting at position 2389 of SEQ ID NO: 2925
gugaguacccucuaugaug

SEQ ID NO: 227101 - RNA, 19 nt, Artificial Sequence
  Description of Artificial Sequence: Synthetic oligonucleotide
  Antisense strand to SEQ ID NO: 227100
caucauagaggguacucac

SEQ ID NO: 227102 - RNA, 19 nt, Artificial Sequence
  Description of Artificial Sequence: Synthetic oligonucleotide
  Sense strand starting at position 2497 of SEQ ID NO: 2925
uagauuucuugugaagauc

SEQ ID NO: 227103 - RNA, 19 nt, Artificial Sequence
  Description of Artificial Sequence: Synthetic oligonucleotide
  Antisense strand to SEQ ID NO: 227102
gaucuucacaagaaaucua

SEQ ID NO: 227104 - RNA, 19 nt, Artificial Sequence
  Description of Artificial Sequence: Synthetic oligonucleotide
  Sense strand starting at position 2568 of SEQ ID NO: 2925
guuauugucgcagagagga

SEQ ID NO: 227105 - RNA, 19 nt, Artificial Sequence
  Description of Artificial Sequence: Synthetic oligonucleotide
  Antisense strand to SEQ ID NO: 227104
uccucucugcgacaauaac

SEQ ID NO: 227106 - RNA, 19 nt, Artificial Sequence
  Description of Artificial Sequence: Synthetic oligonucleotide
  Sense strand starting at position 2570 of SEQ ID NO: 2925
uauugucgcagagaggaaa

SEQ ID NO: 227107 - RNA, 19 nt, Artificial Sequence
  Description of Artificial Sequence: Synthetic oligonucleotide
  Antisense strand to SEQ ID NO: 227106
uuuccucucugcgacaaua

SEQ ID NO: 227108 - RNA, 19 nt, Artificial Sequence
  Description of Artificial Sequence: Synthetic oligonucleotide
  Sense strand starting at position 2607 of SEQ ID NO: 2925
gacuguucuguuuacaaag

SEQ ID NO: 227109 - RNA, 19 nt, Artificial Sequence
  Description of Artificial Sequence: Synthetic oligonucleotide
  Antisense strand to SEQ ID NO: 227108
cuuuguaaacagaacaguc

SEQ ID NO: 227110 - RNA, 19 nt, Artificial Sequence
  Description of Artificial Sequence: Synthetic oligonucleotide
  Sense strand starting at position 2737 of SEQ ID NO: 2925
aguugagaauuccugauuc

SEQ ID NO: 227111 - RNA, 19 nt, Artificial Sequence
  Description of Artificial Sequence: Synthetic oligonucleotide
  Antisense strand to SEQ ID NO: 227110
gaaucaggaauucucaacu

SEQ ID NO: 227112 - RNA, 19 nt, Artificial Sequence
  Description of Artificial Sequence: Synthetic oligonucleotide
  Sense strand starting at position 2765 of SEQ ID NO: 2925
augucucagugauccugaa

SEQ ID NO: 227113 - RNA, 19 nt, Artificial Sequence
  Description of Artificial Sequence: Synthetic oligonucleotide
  Antisense strand to SEQ ID NO: 227112
uucaggaucacugagacau

SEQ ID NO: 227114 - RNA, 19 nt, Artificial Sequence
  Description of Artificial Sequence: Synthetic oligonucleotide
  Sense strand starting at position 2926 of SEQ ID NO: 2925
ugaagaaugcuaggaauuc

SEQ ID NO: 227115 - RNA, 19 nt, Artificial Sequence
  Description of Artificial Sequence: Synthetic oligonucleotide
  Antisense strand to SEQ ID NO: 227114
gaauuccuagcauucuuca

SEQ ID NO: 227116 - RNA, 19 nt, Artificial Sequence
  Description of Artificial Sequence: Synthetic oligonucleotide
  Sense strand starting at position 2965 of SEQ ID NO: 2925
auguguccugccuagggaa

SEQ ID NO: 227117 - RNA, 19 nt, Artificial Sequence
  Description of Artificial Sequence: Synthetic oligonucleotide
  Antisense strand to SEQ ID NO: 227116
uucccuaggcaggacacau

SEQ ID NO: 227118 - RNA, 19 nt, Artificial Sequence
  Description of Artificial Sequence: Synthetic oligonucleotide
  Sense strand starting at position 3140 of SEQ ID NO: 2925
gcuggugaugcaggaauaa

SEQ ID NO: 227119 - RNA, 19 nt, Artificial Sequence
  Description of Artificial Sequence: Synthetic oligonucleotide
  Antisense strand to SEQ ID NO: 227118
uuauuccugcaucaccagc

SEQ ID NO: 227120 - RNA, 19 nt, Artificial Sequence
  Description of Artificial Sequence: Synthetic oligonucleotide
  Sense strand starting at position 3152 of SEQ ID NO: 2925
ggaauaaccucugcagcca

SEQ ID NO: 227121 - RNA, 19 nt, Artificial Sequence
  Description of Artificial Sequence: Synthetic oligonucleotide
  Antisense strand to SEQ ID NO: 227120
uggcugcagagguuauucc

SEQ ID NO: 227122 - RNA, 19 nt, Artificial Sequence
  Description of Artificial Sequence: Synthetic oligonucleotide
  Sense strand starting at position 3299 of SEQ ID NO: 2925
acacauauaugggcuugaa

SEQ ID NO: 227123 - RNA, 19 nt, Artificial Sequence
  Description of Artificial Sequence: Synthetic oligonucleotide
  Antisense strand to SEQ ID NO: 227122
uucaagcccauauaugugu

SEQ ID NO: 227124 - RNA, 19 nt, Artificial Sequence
  Description of Artificial Sequence: Synthetic oligonucleotide
  Sense strand starting at position 3452 of SEQ ID NO: 2925
ccauaauguugggcuauaa

SEQ ID NO: 227125 - RNA, 19 nt, Artificial Sequence
  Description of Artificial Sequence: Synthetic oligonucleotide
  Antisense strand to SEQ ID NO: 227124
uuauagcccaacauuaugg

SEQ ID NO: 227126 - RNA, 19 nt, Artificial Sequence
  Description of Artificial Sequence: Synthetic oligonucleotide
  Sense strand starting at position 3527 of SEQ ID NO: 2925
aguguuauaguauacaaug

SEQ ID NO: 227127 - RNA, 19 nt, Artificial Sequence
  Description of Artificial Sequence: Synthetic oligonucleotide
  Antisense strand to SEQ ID NO: 227126
cauuguauacuauaacacu

SEQ ID NO: 227128 - RNA, 19 nt, Artificial Sequence
  Description of Artificial Sequence: Synthetic oligonucleotide
  Sense strand starting at position 3612 of SEQ ID NO: 2925
augguuuguagauauguua

SEQ ID NO: 227129 - RNA, 19 nt, Artificial Sequence
  Description of Artificial Sequence: Synthetic oligonucleotide
  Antisense strand to SEQ ID NO: 227128
uaacauaucuacaaaccau

SEQ ID NO: 227130 - RNA, 19 nt, Artificial Sequence
  Description of Artificial Sequence: Synthetic oligonucleotide
  Sense strand starting at position 3819 of SEQ ID NO: 2925
ggaauaaguuguucuuaga

SEQ ID NO: 227131 - RNA, 19 nt, Artificial Sequence
  Description of Artificial Sequence: Synthetic oligonucleotide
  Antisense strand to SEQ ID NO: 227130
ucuaagaacaacuuauucc

SEQ ID NO: 227132 - RNA, 19 nt, Artificial Sequence
  Description of Artificial Sequence: Synthetic oligonucleotide
  Sense strand starting at position 19 of SEQ ID NO: 2926
uugccugaguaagcauuua

SEQ ID NO: 227133 - RNA, 19 nt, Artificial Sequence
  Description of Artificial Sequence: Synthetic oligonucleotide
  Antisense strand to SEQ ID NO: 227132
uaaaugcuuacucaggcaa

SEQ ID NO: 227134 - RNA, 19 nt, Artificial Sequence
  Description of Artificial Sequence: Synthetic oligonucleotide
  Sense strand starting at position 95 of SEQ ID NO: 2926
ucuuuauccuaagcaagga

SEQ ID NO: 227135 - RNA, 19 nt, Artificial Sequence
  Description of Artificial Sequence: Synthetic oligonucleotide
  Antisense strand to SEQ ID NO: 227134
uccuugcuuaggauaaaga

SEQ ID NO: 227136 - RNA, 19 nt, Artificial Sequence
  Description of Artificial Sequence: Synthetic oligonucleotide
  Sense strand starting at position 216 of SEQ ID NO: 2926
acggauuaaugcucacaau

SEQ ID NO: 227137 - RNA, 19 nt, Artificial Sequence
  Description of Artificial Sequence: Synthetic oligonucleotide
  Antisense strand to SEQ ID NO: 227136
auugugagcauuaauccgu

SEQ ID NO: 227138 - RNA, 19 nt, Artificial Sequence
  Description of Artificial Sequence: Synthetic oligonucleotide
  Sense strand starting at position 217 of SEQ ID NO: 2926
cggauuaaugcucacaaua

SEQ ID NO: 227139 - RNA, 19 nt, Artificial Sequence
  Description of Artificial Sequence: Synthetic oligonucleotide
  Antisense strand to SEQ ID NO: 227138
uauugugagcauuaauccg

SEQ ID NO: 227140 - RNA, 19 nt, Artificial Sequence
  Description of Artificial Sequence: Synthetic oligonucleotide
  Sense strand starting at position 352 of SEQ ID NO: 2926
uccucugagccauacugaa

SEQ ID NO: 227141 - RNA, 19 nt, Artificial Sequence
  Description of Artificial Sequence: Synthetic oligonucleotide
  Antisense strand to SEQ ID NO: 227140
uucaguauggcucagagga

SEQ ID NO: 227142 - RNA, 19 nt, Artificial Sequence
  Description of Artificial Sequence: Synthetic oligonucleotide
  Sense strand starting at position 365 of SEQ ID NO: 2926
acugaagcgcaguaauuaa

SEQ ID NO: 227143 - RNA, 19 nt, Artificial Sequence
  Description of Artificial Sequence: Synthetic oligonucleotide
  Antisense strand to SEQ ID NO: 227142
uuaauuacugcgcuucagu

SEQ ID NO: 227144 - RNA, 19 nt, Artificial Sequence
  Description of Artificial Sequence: Synthetic oligonucleotide
  Sense strand starting at position 464 of SEQ ID NO: 2926
acacuagugcacuauagaa

SEQ ID NO: 227145 - RNA, 19 nt, Artificial Sequence
  Description of Artificial Sequence: Synthetic oligonucleotide
  Antisense strand to SEQ ID NO: 227144
uucuauagugcacuagugu

SEQ ID NO: 227146 - RNA, 19 nt, Artificial Sequence
  Description of Artificial Sequence: Synthetic oligonucleotide
  Sense strand starting at position 507 of SEQ ID NO: 2926
cagaguuuaggccacagua

SEQ ID NO: 227147 - RNA, 19 nt, Artificial Sequence
  Description of Artificial Sequence: Synthetic oligonucleotide
  Antisense strand to SEQ ID NO: 227146
uacuguggccuaaacucug

SEQ ID NO: 227148 - RNA, 19 nt, Artificial Sequence
  Description of Artificial Sequence: Synthetic oligonucleotide
  Sense strand starting at position 567 of SEQ ID NO: 2926
cuuaccauuucuucguaca

SEQ ID NO: 227149 - RNA, 19 nt, Artificial Sequence
  Description of Artificial Sequence: Synthetic oligonucleotide
  Antisense strand to SEQ ID NO: 227148
uguacgaagaaaugguaag

SEQ ID NO: 227150 - RNA, 19 nt, Artificial Sequence
  Description of Artificial Sequence: Synthetic oligonucleotide
  Sense strand starting at position 956 of SEQ ID NO: 2926
ggguauucuggagggcuga

SEQ ID NO: 227151 - RNA, 19 nt, Artificial Sequence
  Description of Artificial Sequence: Synthetic oligonucleotide
  Antisense strand to SEQ ID NO: 227150
ucagcccuccagaauaccc

SEQ ID NO: 227152 - RNA, 19 nt, Artificial Sequence
  Description of Artificial Sequence: Synthetic oligonucleotide
  Sense strand starting at position 957 of SEQ ID NO: 2926
gguauucuggagggcugaa

SEQ ID NO: 227153 - RNA, 19 nt, Artificial Sequence
  Description of Artificial Sequence: Synthetic oligonucleotide
  Antisense strand to SEQ ID NO: 227152
uucagcccuccagaauacc

SEQ ID NO: 227154 - RNA, 19 nt, Artificial Sequence
  Description of Artificial Sequence: Synthetic oligonucleotide
  Sense strand starting at position 1012 of SEQ ID NO: 2926
agagaaucaugagaaauga

SEQ ID NO: 227155 - RNA, 19 nt, Artificial Sequence
  Description of Artificial Sequence: Synthetic oligonucleotide
  Antisense strand to SEQ ID NO: 227154
ucauuucucaugauucucu

SEQ ID NO: 227156 - RNA, 19 nt, Artificial Sequence
  Description of Artificial Sequence: Synthetic oligonucleotide
  Sense strand starting at position 1248 of SEQ ID NO: 2926
cccuguuagcaucacugaa

SEQ ID NO: 227157 - RNA, 19 nt, Artificial Sequence
  Description of Artificial Sequence: Synthetic oligonucleotide
  Antisense strand to SEQ ID NO: 227156
uucagugaugcuaacaggg

SEQ ID NO: 227158 - RNA, 19 nt, Artificial Sequence
  Description of Artificial Sequence: Synthetic oligonucleotide
  Sense strand starting at position 1377 of SEQ ID NO: 2926
ccucaaguccgacaauaug

SEQ ID NO: 227159 - RNA, 19 nt, Artificial Sequence
  Description of Artificial Sequence: Synthetic oligonucleotide
  Antisense strand to SEQ ID NO: 227158
cauauugucggacuugagg

SEQ ID NO: 227160 - RNA, 19 nt, Artificial Sequence
  Description of Artificial Sequence: Synthetic oligonucleotide
  Sense strand starting at position 1387 of SEQ ID NO: 2926
gacaauaugugcuuggaac

SEQ ID NO: 227161 - RNA, 19 nt, Artificial Sequence
  Description of Artificial Sequence: Synthetic oligonucleotide
  Antisense strand to SEQ ID NO: 227160
guuccaagcacauauuguc

SEQ ID NO: 227162 - RNA, 19 nt, Artificial Sequence
  Description of Artificial Sequence: Synthetic oligonucleotide
  Sense strand starting at position 1388 of SEQ ID NO: 2926
acaauaugugcuuggaaca

SEQ ID NO: 227163 - RNA, 19 nt, Artificial Sequence
  Description of Artificial Sequence: Synthetic oligonucleotide
  Antisense strand to SEQ ID NO: 227162
uguuccaagcacauauugu

SEQ ID NO: 227164 - RNA, 19 nt, Artificial Sequence
  Description of Artificial Sequence: Synthetic oligonucleotide
  Sense strand starting at position 1393 of SEQ ID NO: 2926
augugcuuggaacaaauua

SEQ ID NO: 227165 - RNA, 19 nt, Artificial Sequence
  Description of Artificial Sequence: Synthetic oligonucleotide
  Antisense strand to SEQ ID NO: 227164
uaauuuguuccaagcacau

SEQ ID NO: 227166 - RNA, 19 nt, Artificial Sequence
  Description of Artificial Sequence: Synthetic oligonucleotide
  Sense strand starting at position 1476 of SEQ ID NO: 2926
gggaaaucuccaggcagag

SEQ ID NO: 227167 - RNA, 19 nt, Artificial Sequence
  Description of Artificial Sequence: Synthetic oligonucleotide
  Antisense strand to SEQ ID NO: 227166
cucugccuggagauuuccc

SEQ ID NO: 227168 - RNA, 19 nt, Artificial Sequence
  Description of Artificial Sequence: Synthetic oligonucleotide
  Sense strand starting at position 2254 of SEQ ID NO: 2926
gggcaccucauugguagaa

SEQ ID NO: 227169 - RNA, 19 nt, Artificial Sequence
  Description of Artificial Sequence: Synthetic oligonucleotide
  Antisense strand to SEQ ID NO: 227168
uucuaccaaugaggugccc

SEQ ID NO: 227170 - RNA, 19 nt, Artificial Sequence
  Description of Artificial Sequence: Synthetic oligonucleotide
  Sense strand starting at position 2410 of SEQ ID NO: 2926
uucugauuggcuuggagag

SEQ ID NO: 227171 - RNA, 19 nt, Artificial Sequence
  Description of Artificial Sequence: Synthetic oligonucleotide
  Antisense strand to SEQ ID NO: 227170
cucuccaagccaaucagaa

SEQ ID NO: 227172 - RNA, 19 nt, Artificial Sequence
  Description of Artificial Sequence: Synthetic oligonucleotide
  Sense strand starting at position 2445 of SEQ ID NO: 2926
aggaauagggaguguuuau

SEQ ID NO: 227173 - RNA, 19 nt, Artificial Sequence
  Description of Artificial Sequence: Synthetic oligonucleotide
  Antisense strand to SEQ ID NO: 227172
auaaacacucccuauuccu

SEQ ID NO: 227174 - RNA, 19 nt, Artificial Sequence
  Description of Artificial Sequence: Synthetic oligonucleotide
  Sense strand starting at position 2537 of SEQ ID NO: 2926
cccuaagggugauugcaga

SEQ ID NO: 227175 - RNA, 19 nt, Artificial Sequence
  Description of Artificial Sequence: Synthetic oligonucleotide
  Antisense strand to SEQ ID NO: 227174
ucugcaaucacccuuaggg

SEQ ID NO: 227176 - RNA, 19 nt, Artificial Sequence
  Description of Artificial Sequence: Synthetic oligonucleotide
  Sense strand starting at position 2706 of SEQ ID NO: 2926
cugggaucuuaccugacaa

SEQ ID NO: 227177 - RNA, 19 nt, Artificial Sequence
  Description of Artificial Sequence: Synthetic oligonucleotide
  Antisense strand to SEQ ID NO: 227176
uugucagguaagaucccag

SEQ ID NO: 227178 - RNA, 19 nt, Artificial Sequence
  Description of Artificial Sequence: Synthetic oligonucleotide
  Sense strand starting at position 2793 of SEQ ID NO: 2926
uggucuucagugggauuga

SEQ ID NO: 227179 - RNA, 19 nt, Artificial Sequence
  Description of Artificial Sequence: Synthetic oligonucleotide
  Antisense strand to SEQ ID NO: 227178
ucaaucccacugaagacca

SEQ ID NO: 227180 - RNA, 19 nt, Artificial Sequence
  Description of Artificial Sequence: Synthetic oligonucleotide
  Sense strand starting at position 2802 of SEQ ID NO: 2926
gugggauugaaucagcuga

SEQ ID NO: 227181 - RNA, 19 nt, Artificial Sequence
  Description of Artificial Sequence: Synthetic oligonucleotide
  Antisense strand to SEQ ID NO: 227180
ucagcugauucaaucccac

SEQ ID NO: 227182 - RNA, 19 nt, Artificial Sequence
  Description of Artificial Sequence: Synthetic oligonucleotide
  Sense strand starting at position 2847 of SEQ ID NO: 2926
auuucuuauuguucggagu

SEQ ID NO: 227183 - RNA, 19 nt, Artificial Sequence
  Description of Artificial Sequence: Synthetic oligonucleotide
  Antisense strand to SEQ ID NO: 227182
acuccgaacaauaagaaau

SEQ ID NO: 227184 - RNA, 19 nt, Artificial Sequence
  Description of Artificial Sequence: Synthetic oligonucleotide
  Sense strand starting at position 2919 of SEQ ID NO: 2926
ccuagugagaacuguagau

SEQ ID NO: 227185 - RNA, 19 nt, Artificial Sequence
  Description of Artificial Sequence: Synthetic oligonucleotide
  Antisense strand to SEQ ID NO: 227184
aucuacaguucucacuagg

SEQ ID NO: 227186 - RNA, 19 nt, Artificial Sequence
  Description of Artificial Sequence: Synthetic oligonucleotide
  Sense strand starting at position 2932 of SEQ ID NO: 2926
guagauggauuugggaaca

SEQ ID NO: 227187 - RNA, 19 nt, Artificial Sequence
  Description of Artificial Sequence: Synthetic oligonucleotide
  Antisense strand to SEQ ID NO: 227186
uguucccaaauccaucuac

SEQ ID NO: 227188 - RNA, 19 nt, Artificial Sequence
  Description of Artificial Sequence: Synthetic oligonucleotide
  Sense strand starting at position 3352 of SEQ ID NO: 2926
caaucuuacgaagguugga

SEQ ID NO: 227189 - RNA, 19 nt, Artificial Sequence
  Description of Artificial Sequence: Synthetic oligonucleotide
  Antisense strand to SEQ ID NO: 227188
uccaaccuucguaagauug

SEQ ID NO: 227190 - RNA, 19 nt, Artificial Sequence
  Description of Artificial Sequence: Synthetic oligonucleotide
  Sense strand starting at position 3383 of SEQ ID NO: 2926
uggacaaaguagcuugaaa

SEQ ID NO: 227191 - RNA, 19 nt, Artificial Sequence
  Description of Artificial Sequence: Synthetic oligonucleotide
  Antisense strand to SEQ ID NO: 227190
uuucaagcuacuuugucca

SEQ ID NO: 227192 - RNA, 19 nt, Artificial Sequence
  Description of Artificial Sequence: Synthetic oligonucleotide
  Sense strand starting at position 3446 of SEQ ID NO: 2926
agcagugaugggugagaau

SEQ ID NO: 227193 - RNA, 19 nt, Artificial Sequence
  Description of Artificial Sequence: Synthetic oligonucleotide
  Antisense strand to SEQ ID NO: 227192
auucucacccaucacugcu

SEQ ID NO: 227194 - RNA, 19 nt, Artificial Sequence
  Description of Artificial Sequence: Synthetic oligonucleotide
  Sense strand starting at position 3459 of SEQ ID NO: 2926
gagaauugaguccaucugu

SEQ ID NO: 227195 - RNA, 19 nt, Artificial Sequence
  Description of Artificial Sequence: Synthetic oligonucleotide
  Antisense strand to SEQ ID NO: 227194
acagauggacucaauucuc

SEQ ID NO: 227196 - RNA, 19 nt, Artificial Sequence
  Description of Artificial Sequence: Synthetic oligonucleotide
  Sense strand starting at position 3464 of SEQ ID NO: 2926
uugaguccaucuguagaca

SEQ ID NO: 227197 - RNA, 19 nt, Artificial Sequence
  Description of Artificial Sequence: Synthetic oligonucleotide
  Antisense strand to SEQ ID NO: 227196
ugucuacagauggacucaa

SEQ ID NO: 227198 - RNA, 19 nt, Artificial Sequence
  Description of Artificial Sequence: Synthetic oligonucleotide
  Sense strand starting at position 3465 of SEQ ID NO: 2926
ugaguccaucuguagacau

SEQ ID NO: 227199 - RNA, 19 nt, Artificial Sequence
  Description of Artificial Sequence: Synthetic oligonucleotide
  Antisense strand to SEQ ID NO: 227198
augucuacagauggacuca

SEQ ID NO: 227200 - RNA, 19 nt, Artificial Sequence
  Description of Artificial Sequence: Synthetic oligonucleotide
  Sense strand starting at position 3499 of SEQ ID NO: 2926
aguggagagacauguugaa

SEQ ID NO: 227201 - RNA, 19 nt, Artificial Sequence
  Description of Artificial Sequence: Synthetic oligonucleotide
  Antisense strand to SEQ ID NO: 227200
uucaacaugucucuccacu

SEQ ID NO: 227202 - RNA, 19 nt, Artificial Sequence
  Description of Artificial Sequence: Synthetic oligonucleotide
  Sense strand starting at position 3549 of SEQ ID NO: 2926
gcuugaauccaguaucuaa

SEQ ID NO: 227203 - RNA, 19 nt, Artificial Sequence
  Description of Artificial Sequence: Synthetic oligonucleotide
  Antisense strand to SEQ ID NO: 227202
uuagauacuggauucaagc

SEQ ID NO: 227204 - RNA, 19 nt, Artificial Sequence
  Description of Artificial Sequence: Synthetic oligonucleotide
  Sense strand starting at position 3716 of SEQ ID NO: 2926
uauuaagaguucucugaug

SEQ ID NO: 227205 - RNA, 19 nt, Artificial Sequence
  Description of Artificial Sequence: Synthetic oligonucleotide
  Antisense strand to SEQ ID NO: 227204
caucagagaacucuuaaua

SEQ ID NO: 227206 - RNA, 19 nt, Artificial Sequence
  Description of Artificial Sequence: Synthetic oligonucleotide
  Sense strand starting at position 3739 of SEQ ID NO: 2926
uccugagugguuuacgaag

SEQ ID NO: 227207 - RNA, 19 nt, Artificial Sequence
  Description of Artificial Sequence: Synthetic oligonucleotide
  Antisense strand to SEQ ID NO: 227206
cuucguaaaccacucagga

SEQ ID NO: 227208 - RNA, 19 nt, Artificial Sequence
  Description of Artificial Sequence: Synthetic oligonucleotide
  Sense strand starting at position 3935 of SEQ ID NO: 2926
uuauuacuguucucuggaa

SEQ ID NO: 227209 - RNA, 19 nt, Artificial Sequence
  Description of Artificial Sequence: Synthetic oligonucleotide
  Antisense strand to SEQ ID NO: 227208
uuccagagaacaguaauaa

SEQ ID NO: 227210 - RNA, 19 nt, Artificial Sequence
  Description of Artificial Sequence: Synthetic oligonucleotide
  Sense strand starting at position 3939 of SEQ ID NO: 2926
uacuguucucuggaaguuc

SEQ ID NO: 227211 - RNA, 19 nt, Artificial Sequence
  Description of Artificial Sequence: Synthetic oligonucleotide
  Antisense strand to SEQ ID NO: 227210
gaacuuccagagaacagua

SEQ ID NO: 227212 - RNA, 19 nt, Artificial Sequence
  Description of Artificial Sequence: Synthetic oligonucleotide
  Sense strand starting at position 126 of SEQ ID NO: 2924
cuuggcuuccuggacaaca

SEQ ID NO: 227213 - RNA, 19 nt, Artificial Sequence
  Description of Artificial Sequence: Synthetic oligonucleotide
  Antisense strand to SEQ ID NO: 227212
uguuguccaggaagccaag

SEQ ID NO: 227214 - RNA, 19 nt, Artificial Sequence
  Description of Artificial Sequence: Synthetic oligonucleotide
  Sense strand starting at position 232 of SEQ ID NO: 2924
gcgaccucuguacauaaua

SEQ ID NO: 227215 - RNA, 19 nt, Artificial Sequence
  Description of Artificial Sequence: Synthetic oligonucleotide
  Antisense strand to SEQ ID NO: 227214
uauuauguacagaggucgc

SEQ ID NO: 227216 - RNA, 19 nt, Artificial Sequence
  Description of Artificial Sequence: Synthetic oligonucleotide
  Sense strand starting at position 397 of SEQ ID NO: 2924
auaacccguccucaaagau

SEQ ID NO: 227217 - RNA, 19 nt, Artificial Sequence
  Description of Artificial Sequence: Synthetic oligonucleotide
  Antisense strand to SEQ ID NO: 227216
aucuuugaggacggguuau

SEQ ID NO: 227218 - RNA, 19 nt, Artificial Sequence
  Description of Artificial Sequence: Synthetic oligonucleotide
  Sense strand starting at position 493 of SEQ ID NO: 2924
ucaugugacucuccuuaua

SEQ ID NO: 227219 - RNA, 19 nt, Artificial Sequence
  Description of Artificial Sequence: Synthetic oligonucleotide
  Antisense strand to SEQ ID NO: 227218
uauaaggagagucacauga

SEQ ID NO: 227220 - RNA, 19 nt, Artificial Sequence
  Description of Artificial Sequence: Synthetic oligonucleotide
  Sense strand starting at position 495 of SEQ ID NO: 2924
augugacucuccuuauacu

SEQ ID NO: 227221 - RNA, 19 nt, Artificial Sequence
  Description of Artificial Sequence: Synthetic oligonucleotide
  Antisense strand to SEQ ID NO: 227220
aguauaaggagagucacau

SEQ ID NO: 227222 - RNA, 19 nt, Artificial Sequence
  Description of Artificial Sequence: Synthetic oligonucleotide
  Sense strand starting at position 563 of SEQ ID NO: 2924
uccacaguaccugguauaa

SEQ ID NO: 227223 - RNA, 19 nt, Artificial Sequence
  Description of Artificial Sequence: Synthetic oligonucleotide
  Antisense strand to SEQ ID NO: 227222
uuauaccagguacugugga

SEQ ID NO: 227224 - RNA, 19 nt, Artificial Sequence
  Description of Artificial Sequence: Synthetic oligonucleotide
  Sense strand starting at position 572 of SEQ ID NO: 2924
ccugguauaaaguagguaa

SEQ ID NO: 227225 - RNA, 19 nt, Artificial Sequence
  Description of Artificial Sequence: Synthetic oligonucleotide
  Antisense strand to SEQ ID NO: 227224
uuaccuacuuuauaccagg

SEQ ID NO: 227226 - RNA, 19 nt, Artificial Sequence
  Description of Artificial Sequence: Synthetic oligonucleotide
  Sense strand starting at position 575 of SEQ ID NO: 2924
gguauaaaguagguaauga

SEQ ID NO: 227227 - RNA, 19 nt, Artificial Sequence
  Description of Artificial Sequence: Synthetic oligonucleotide
  Antisense strand to SEQ ID NO: 227226
ucauuaccuacuuuauacc

SEQ ID NO: 227228 - RNA, 19 nt, Artificial Sequence
  Description of Artificial Sequence: Synthetic oligonucleotide
  Sense strand starting at position 765 of SEQ ID NO: 2924
gaauuacaguccuucugga

SEQ ID NO: 227229 - RNA, 19 nt, Artificial Sequence
  Description of Artificial Sequence: Synthetic oligonucleotide
  Antisense strand to SEQ ID NO: 227228
uccagaaggacuguaauuc

SEQ ID NO: 227230 - RNA, 19 nt, Artificial Sequence
  Description of Artificial Sequence: Synthetic oligonucleotide
  Sense strand starting at position 997 of SEQ ID NO: 2924
ccuuaaaucuggccaagaa

SEQ ID NO: 227231 - RNA, 19 nt, Artificial Sequence
  Description of Artificial Sequence: Synthetic oligonucleotide
  Antisense strand to SEQ ID NO: 227230
uucuuggccagauuuaagg

SEQ ID NO: 227232 - RNA, 19 nt, Artificial Sequence
  Description of Artificial Sequence: Synthetic oligonucleotide
  Sense strand starting at position 1050 of SEQ ID NO: 2924
uugccugaguaagcauuua

SEQ ID NO: 227233 - RNA, 19 nt, Artificial Sequence
  Description of Artificial Sequence: Synthetic oligonucleotide
  Antisense strand to SEQ ID NO: 227232
uaaaugcuuacucaggcaa

SEQ ID NO: 227234 - RNA, 19 nt, Artificial Sequence
  Description of Artificial Sequence: Synthetic oligonucleotide
  Sense strand starting at position 1126 of SEQ ID NO: 2924
ucuuuauccuaagcaagga

SEQ ID NO: 227235 - RNA, 19 nt, Artificial Sequence
  Description of Artificial Sequence: Synthetic oligonucleotide
  Antisense strand to SEQ ID NO: 227234
uccuugcuuaggauaaaga

SEQ ID NO: 227236 - RNA, 19 nt, Artificial Sequence
  Description of Artificial Sequence: Synthetic oligonucleotide
  Sense strand starting at position 1247 of SEQ ID NO: 2924
acggauuaaugcucacaau

SEQ ID NO: 227237 - RNA, 19 nt, Artificial Sequence
  Description of Artificial Sequence: Synthetic oligonucleotide
  Antisense strand to SEQ ID NO: 227236
auugugagcauuaauccgu

SEQ ID NO: 227238 - RNA, 19 nt, Artificial Sequence
  Description of Artificial Sequence: Synthetic oligonucleotide
  Sense strand starting at position 1248 of SEQ ID NO: 2924
cggauuaaugcucacaaua

SEQ ID NO: 227239 - RNA, 19 nt, Artificial Sequence
  Description of Artificial Sequence: Synthetic oligonucleotide
  Antisense strand to SEQ ID NO: 227238
uauugugagcauuaauccg

SEQ ID NO: 227240 - RNA, 19 nt, Artificial Sequence
  Description of Artificial Sequence: Synthetic oligonucleotide
  Sense strand starting at position 1355 of SEQ ID NO: 2924
uguauuuagugugcucuca

SEQ ID NO: 227241 - RNA, 19 nt, Artificial Sequence
  Description of Artificial Sequence: Synthetic oligonucleotide
  Antisense strand to SEQ ID NO: 227240
ugagagcacacuaaauaca

SEQ ID NO: 227242 - RNA, 19 nt, Artificial Sequence
  Description of Artificial Sequence: Synthetic oligonucleotide
  Sense strand starting at position 1383 of SEQ ID NO: 2924
uccucugagccauacugaa

SEQ ID NO: 227243 - RNA, 19 nt, Artificial Sequence
  Description of Artificial Sequence: Synthetic oligonucleotide
  Antisense strand to SEQ ID NO: 227242
uucaguauggcucagagga

SEQ ID NO: 227244 - RNA, 19 nt, Artificial Sequence
  Description of Artificial Sequence: Synthetic oligonucleotide
  Sense strand starting at position 1396 of SEQ ID NO: 2924
acugaagcgcaguaauuaa

SEQ ID NO: 227245 - RNA, 19 nt, Artificial Sequence
  Description of Artificial Sequence: Synthetic oligonucleotide
  Antisense strand to SEQ ID NO: 227244
uuaauuacugcgcuucagu

SEQ ID NO: 227246 - RNA, 19 nt, Artificial Sequence
  Description of Artificial Sequence: Synthetic oligonucleotide
  Sense strand starting at position 1495 of SEQ ID NO: 2924
acacuagugcacuauagaa

SEQ ID NO: 227247 - RNA, 19 nt, Artificial Sequence
  Description of Artificial Sequence: Synthetic oligonucleotide
  Antisense strand to SEQ ID NO: 227246
uucuauagugcacuagugu

SEQ ID NO: 227248 - RNA, 19 nt, Artificial Sequence
  Description of Artificial Sequence: Synthetic oligonucleotide
  Sense strand starting at position 1538 of SEQ ID NO: 2924
cagaguuuaggccacagua

SEQ ID NO: 227249 - RNA, 19 nt, Artificial Sequence
  Description of Artificial Sequence: Synthetic oligonucleotide
  Antisense strand to SEQ ID NO: 227248
uacuguggccuaaacucug

SEQ ID NO: 227250 - RNA, 19 nt, Artificial Sequence
  Description of Artificial Sequence: Synthetic oligonucleotide
  Sense strand starting at position 1598 of SEQ ID NO: 2924
cuuaccauuucuucguaca

SEQ ID NO: 227251 - RNA, 19 nt, Artificial Sequence
  Description of Artificial Sequence: Synthetic oligonucleotide
  Antisense strand to SEQ ID NO: 227250
uguacgaagaaaugguaag

SEQ ID NO: 227252 - RNA, 19 nt, Artificial Sequence
  Description of Artificial Sequence: Synthetic oligonucleotide
  Sense strand starting at position 1987 of SEQ ID NO: 2924
ggguauucuggagggcuga

SEQ ID NO: 227253 - RNA, 19 nt, Artificial Sequence
  Description of Artificial Sequence: Synthetic oligonucleotide
  Antisense strand to SEQ ID NO: 227252
ucagcccuccagaauaccc

SEQ ID NO: 227254 - RNA, 19 nt, Artificial Sequence
  Description of Artificial Sequence: Synthetic oligonucleotide
  Sense strand starting at position 1988 of SEQ ID NO: 2924
gguauucuggagggcugaa

SEQ ID NO: 227255 - RNA, 19 nt, Artificial Sequence
  Description of Artificial Sequence: Synthetic oligonucleotide
  Antisense strand to SEQ ID NO: 227254
uucagcccuccagaauacc

SEQ ID NO: 227256 - RNA, 19 nt, Artificial Sequence
  Description of Artificial Sequence: Synthetic oligonucleotide
  Sense strand starting at position 2043 of SEQ ID NO: 2924
agagaaucaugagaaauga

SEQ ID NO: 227257 - RNA, 19 nt, Artificial Sequence
  Description of Artificial Sequence: Synthetic oligonucleotide
  Antisense strand to SEQ ID NO: 227256
ucauuucucaugauucucu

SEQ ID NO: 227258 - RNA, 19 nt, Artificial Sequence
  Description of Artificial Sequence: Synthetic oligonucleotide
  Sense strand starting at position 2279 of SEQ ID NO: 2924
cccuguuagcaucacugaa

SEQ ID NO: 227259 - RNA, 19 nt, Artificial Sequence
  Description of Artificial Sequence: Synthetic oligonucleotide
  Antisense strand to SEQ ID NO: 227258
uucagugaugcuaacaggg

SEQ ID NO: 227260 - RNA, 19 nt, Artificial Sequence
  Description of Artificial Sequence: Synthetic oligonucleotide
  Sense strand starting at position 2408 of SEQ ID NO: 2924
ccucaaguccgacaauaug

SEQ ID NO: 227261 - RNA, 19 nt, Artificial Sequence
  Description of Artificial Sequence: Synthetic oligonucleotide
  Antisense strand to SEQ ID NO: 227260
cauauugucggacuugagg

SEQ ID NO: 227262 - RNA, 19 nt, Artificial Sequence
  Description of Artificial Sequence: Synthetic oligonucleotide
  Sense strand starting at position 2418 of SEQ ID NO: 2924
gacaauaugugcuuggaac

SEQ ID NO: 227263 - RNA, 19 nt, Artificial Sequence
  Description of Artificial Sequence: Synthetic oligonucleotide
  Antisense strand to SEQ ID NO: 227262
guuccaagcacauauuguc

SEQ ID NO: 227264 - RNA, 19 nt, Artificial Sequence
  Description of Artificial Sequence: Synthetic oligonucleotide
  Sense strand starting at position 2419 of SEQ ID NO: 2924
acaauaugugcuuggaaca

SEQ ID NO: 227265 - RNA, 19 nt, Artificial Sequence
  Description of Artificial Sequence: Synthetic oligonucleotide
  Antisense strand to SEQ ID NO: 227264
uguuccaagcacauauugu

SEQ ID NO: 227266 - RNA, 19 nt, Artificial Sequence
  Description of Artificial Sequence: Synthetic oligonucleotide
  Sense strand starting at position 2424 of SEQ ID NO: 2924
augugcuuggaacaaauua

SEQ ID NO: 227267 - RNA, 19 nt, Artificial Sequence
  Description of Artificial Sequence: Synthetic oligonucleotide
  Antisense strand to SEQ ID NO: 227266
uaauuuguuccaagcacau

SEQ ID NO: 227268 - RNA, 19 nt, Artificial Sequence
  Description of Artificial Sequence: Synthetic oligonucleotide
  Sense strand starting at position 2507 of SEQ ID NO: 2924
gggaaaucuccaggcagag

SEQ ID NO: 227269 - RNA, 19 nt, Artificial Sequence
  Description of Artificial Sequence: Synthetic oligonucleotide
  Antisense strand to SEQ ID NO: 227268
cucugccuggagauuuccc

SEQ ID NO: 227270 - RNA, 19 nt, Artificial Sequence
  Description of Artificial Sequence: Synthetic oligonucleotide
  Sense strand starting at position 3285 of SEQ ID NO: 2924
gggcaccucauugguagaa

SEQ ID NO: 227271 - RNA, 19 nt, Artificial Sequence
  Description of Artificial Sequence: Synthetic oligonucleotide
  Antisense strand to SEQ ID NO: 227270
uucuaccaaugaggugccc

SEQ ID NO: 227272 - RNA, 19 nt, Artificial Sequence
  Description of Artificial Sequence: Synthetic oligonucleotide
  Sense strand starting at position 3441 of SEQ ID NO: 2924
uucugauuggcuuggagag

SEQ ID NO: 227273 - RNA, 19 nt, Artificial Sequence
  Description of Artificial Sequence: Synthetic oligonucleotide
  Antisense strand to SEQ ID NO: 227272
cucuccaagccaaucagaa

SEQ ID NO: 227274 - RNA, 19 nt, Artificial Sequence
  Description of Artificial Sequence: Synthetic oligonucleotide
  Sense strand starting at position 3476 of SEQ ID NO: 2924
aggaauagggaguguuuau

SEQ ID NO: 227275 - RNA, 19 nt, Artificial Sequence
  Description of Artificial Sequence: Synthetic oligonucleotide
  Antisense strand to SEQ ID NO: 227274
auaaacacucccuauuccu

SEQ ID NO: 227276 - RNA, 19 nt, Artificial Sequence
  Description of Artificial Sequence: Synthetic oligonucleotide
  Sense strand starting at position 3495 of SEQ ID NO: 2924
agugaacugcaaggugauu

SEQ ID NO: 227277 - RNA, 19 nt, Artificial Sequence
  Description of Artificial Sequence: Synthetic oligonucleotide
  Antisense strand to SEQ ID NO: 227276
aaucaccuugcaguucacu

SEQ ID NO: 227278 - RNA, 19 nt, Artificial Sequence
  Description of Artificial Sequence: Synthetic oligonucleotide
  Sense strand starting at position 3568 of SEQ ID NO: 2924
cccuaagggugauugcaga

SEQ ID NO: 227279 - RNA, 19 nt, Artificial Sequence
  Description of Artificial Sequence: Synthetic oligonucleotide
  Antisense strand to SEQ ID NO: 227278
ucugcaaucacccuuaggg

SEQ ID NO: 227280 - RNA, 19 nt, Artificial Sequence
  Description of Artificial Sequence: Synthetic oligonucleotide
  Sense strand starting at position 3737 of SEQ ID NO: 2924
cugggaucuuaccugacaa

SEQ ID NO: 227281 - RNA, 19 nt, Artificial Sequence
  Description of Artificial Sequence: Synthetic oligonucleotide
  Antisense strand to SEQ ID NO: 227280
uugucagguaagaucccag

SEQ ID NO: 227282 - RNA, 19 nt, Artificial Sequence
  Description of Artificial Sequence: Synthetic oligonucleotide
  Sense strand starting at position 3824 of SEQ ID NO: 2924
uggucuucagugggauuga

SEQ ID NO: 227283 - RNA, 19 nt, Artificial Sequence
  Description of Artificial Sequence: Synthetic oligonucleotide
  Antisense strand to SEQ ID NO: 227282
ucaaucccacugaagacca

SEQ ID NO: 227284 - RNA, 19 nt, Artificial Sequence
  Description of Artificial Sequence: Synthetic oligonucleotide
  Sense strand starting at position 3833 of SEQ ID NO: 2924
gugggauugaaucagcuga

SEQ ID NO: 227285 - RNA, 19 nt, Artificial Sequence
  Description of Artificial Sequence: Synthetic oligonucleotide
  Antisense strand to SEQ ID NO: 227284
ucagcugauucaaucccac

SEQ ID NO: 227286 - RNA, 19 nt, Artificial Sequence
  Description of Artificial Sequence: Synthetic oligonucleotide
  Sense strand starting at position 3878 of SEQ ID NO: 2924
auuucuuauuguucggagu

SEQ ID NO: 227287 - RNA, 19 nt, Artificial Sequence
  Description of Artificial Sequence: Synthetic oligonucleotide
  Antisense strand to SEQ ID NO: 227286
acuccgaacaauaagaaau

SEQ ID NO: 227288 - RNA, 19 nt, Artificial Sequence
  Description of Artificial Sequence: Synthetic oligonucleotide
  Sense strand starting at position 3950 of SEQ ID NO: 2924
ccuagugagaacuguagau

SEQ ID NO: 227289 - RNA, 19 nt, Artificial Sequence
  Description of Artificial Sequence: Synthetic oligonucleotide
  Antisense strand to SEQ ID NO: 227288
aucuacaguucucacuagg

SEQ ID NO: 227290 - RNA, 19 nt, Artificial Sequence
  Description of Artificial Sequence: Synthetic oligonucleotide
  Sense strand starting at position 3963 of SEQ ID NO: 2924
guagauggauuugggaaca

SEQ ID NO: 227291 - RNA, 19 nt, Artificial Sequence
  Description of Artificial Sequence: Synthetic oligonucleotide
  Antisense strand to SEQ ID NO: 227290
uguucccaaauccaucuac

SEQ ID NO: 227292 - RNA, 19 nt, Artificial Sequence
  Description of Artificial Sequence: Synthetic oligonucleotide
  Sense strand starting at position 83 of SEQ ID NO: 2927
gugggagccugagucuuaa

SEQ ID NO: 227293 - RNA, 19 nt, Artificial Sequence
  Description of Artificial Sequence: Synthetic oligonucleotide
  Antisense strand to SEQ ID NO: 227292
uuaagacucaggcucccac

SEQ ID NO: 227294 - RNA, 19 nt, Artificial Sequence
  Description of Artificial Sequence: Synthetic oligonucleotide
  Sense strand starting at position 158 of SEQ ID NO: 2927
aauggcuggccuugaaguu

SEQ ID NO: 227295 - RNA, 19 nt, Artificial Sequence
  Description of Artificial Sequence: Synthetic oligonucleotide
  Antisense strand to SEQ ID NO: 227294
aacuucaaggccagccauu

SEQ ID NO: 227296 - RNA, 19 nt, Artificial Sequence
  Description of Artificial Sequence: Synthetic oligonucleotide
  Sense strand starting at position 195 of SEQ ID NO: 2927
agugaagccuguucucuaa

SEQ ID NO: 227297 - RNA, 19 nt, Artificial Sequence
  Description of Artificial Sequence: Synthetic oligonucleotide
  Antisense strand to SEQ ID NO: 227296
uuagagaacaggcuucacu

SEQ ID NO: 227298 - RNA, 19 nt, Artificial Sequence
  Description of Artificial Sequence: Synthetic oligonucleotide
  Sense strand starting at position 198 of SEQ ID NO: 2927
gaagccuguucucuaaaga

SEQ ID NO: 227299 - RNA, 19 nt, Artificial Sequence
  Description of Artificial Sequence: Synthetic oligonucleotide
  Antisense strand to SEQ ID NO: 227298
ucuuuagagaacaggcuuc

SEQ ID NO: 227300 - RNA, 19 nt, Artificial Sequence
  Description of Artificial Sequence: Synthetic oligonucleotide
  Sense strand starting at position 231 of SEQ ID NO: 2927
gguggacuucucugaaugc

SEQ ID NO: 227301 - RNA, 19 nt, Artificial Sequence
  Description of Artificial Sequence: Synthetic oligonucleotide
  Antisense strand to SEQ ID NO: 227300
gcauucagagaaguccacc

SEQ ID NO: 227302 - RNA, 19 nt, Artificial Sequence
  Description of Artificial Sequence: Synthetic oligonucleotide
  Sense strand starting at position 314 of SEQ ID NO: 2927
gaugacucauucucagagu

SEQ ID NO: 227303 - RNA, 19 nt, Artificial Sequence
  Description of Artificial Sequence: Synthetic oligonucleotide
  Antisense strand to SEQ ID NO: 227302
acucugagaaugagucauc

SEQ ID NO: 227304 - RNA, 19 nt, Artificial Sequence
  Description of Artificial Sequence: Synthetic oligonucleotide
  Sense strand starting at position 402 of SEQ ID NO: 2927
uuuagauggcucugcacaa

SEQ ID NO: 227305 - RNA, 19 nt, Artificial Sequence
  Description of Artificial Sequence: Synthetic oligonucleotide
  Antisense strand to SEQ ID NO: 227304
uugugcagagccaucuaaa

SEQ ID NO: 227306 - RNA, 19 nt, Artificial Sequence
  Description of Artificial Sequence: Synthetic oligonucleotide
  Sense strand starting at position 403 of SEQ ID NO: 2927
uuagauggcucugcacaau

SEQ ID NO: 227307 - RNA, 19 nt, Artificial Sequence
  Description of Artificial Sequence: Synthetic oligonucleotide
  Antisense strand to SEQ ID NO: 227306
auugugcagagccaucuaa

SEQ ID NO: 227308 - RNA, 19 nt, Artificial Sequence
  Description of Artificial Sequence: Synthetic oligonucleotide
  Sense strand starting at position 589 of SEQ ID NO: 2927
ucuguugagucuccaagau

SEQ ID NO: 227309 - RNA, 19 nt, Artificial Sequence
  Description of Artificial Sequence: Synthetic oligonucleotide
  Antisense strand to SEQ ID NO: 227308
aucuuggagacucaacaga

SEQ ID NO: 227310 - RNA, 19 nt, Artificial Sequence
  Description of Artificial Sequence: Synthetic oligonucleotide
  Sense strand starting at position 617 of SEQ ID NO: 2927
ggagcucugcuuuagagaa

SEQ ID NO: 227311 - RNA, 19 nt, Artificial Sequence
  Description of Artificial Sequence: Synthetic oligonucleotide
  Antisense strand to SEQ ID NO: 227310
uucucuaaagcagagcucc

SEQ ID NO: 227312 - RNA, 19 nt, Artificial Sequence
  Description of Artificial Sequence: Synthetic oligonucleotide
  Sense strand starting at position 902 of SEQ ID NO: 2927
ugggaauggcuuuacacuu

SEQ ID NO: 227313 - RNA, 19 nt, Artificial Sequence
  Description of Artificial Sequence: Synthetic oligonucleotide
  Antisense strand to SEQ ID NO: 227312
aaguguaaagccauuccca

SEQ ID NO: 227314 - RNA, 19 nt, Artificial Sequence
  Description of Artificial Sequence: Synthetic oligonucleotide
  Sense strand starting at position 909 of SEQ ID NO: 2927
ggcuuuacacuugaauacu

SEQ ID NO: 227315 - RNA, 19 nt, Artificial Sequence
  Description of Artificial Sequence: Synthetic oligonucleotide
  Antisense strand to SEQ ID NO: 227314
aguauucaaguguaaagcc

SEQ ID NO: 227316 - RNA, 19 nt, Artificial Sequence
  Description of Artificial Sequence: Synthetic oligonucleotide
  Sense strand starting at position 2201 of SEQ ID NO: 2927
gaggucaauucccuaggaa

SEQ ID NO: 227317 - RNA, 19 nt, Artificial Sequence
  Description of Artificial Sequence: Synthetic oligonucleotide
  Antisense strand to SEQ ID NO: 227316
uuccuagggaauugaccuc

SEQ ID NO: 227318 - RNA, 19 nt, Artificial Sequence
  Description of Artificial Sequence: Synthetic oligonucleotide
  Sense strand starting at position 2409 of SEQ ID NO: 2927
ccugcaaguauugggaauu

SEQ ID NO: 227319 - RNA, 19 nt, Artificial Sequence
  Description of Artificial Sequence: Synthetic oligonucleotide
  Antisense strand to SEQ ID NO: 227318
aauucccaauacuugcagg

SEQ ID NO: 227320 - RNA, 19 nt, Artificial Sequence
  Description of Artificial Sequence: Synthetic oligonucleotide
  Sense strand starting at position 2463 of SEQ ID NO: 2927
uacagagaugagugcugaa

SEQ ID NO: 227321 - RNA, 19 nt, Artificial Sequence
  Description of Artificial Sequence: Synthetic oligonucleotide
  Antisense strand to SEQ ID NO: 227320
uucagcacucaucucugua

SEQ ID NO: 227322 - RNA, 19 nt, Artificial Sequence
  Description of Artificial Sequence: Synthetic oligonucleotide
  Sense strand starting at position 2613 of SEQ ID NO: 2927
gacuguaagcuggauccua

SEQ ID NO: 227323 - RNA, 19 nt, Artificial Sequence
  Description of Artificial Sequence: Synthetic oligonucleotide
  Antisense strand to SEQ ID NO: 227322
uaggauccagcuuacaguc

SEQ ID NO: 227324 - RNA, 19 nt, Artificial Sequence
  Description of Artificial Sequence: Synthetic oligonucleotide
  Sense strand starting at position 2640 of SEQ ID NO: 2927
auugacauccauuguucua

SEQ ID NO: 227325 - RNA, 19 nt, Artificial Sequence
  Description of Artificial Sequence: Synthetic oligonucleotide
  Antisense strand to SEQ ID NO: 227324
uagaacaauggaugucaau

SEQ ID NO: 227326 - RNA, 19 nt, Artificial Sequence
  Description of Artificial Sequence: Synthetic oligonucleotide
  Sense strand starting at position 2643 of SEQ ID NO: 2927
gacauccauuguucuagga

SEQ ID NO: 227327 - RNA, 19 nt, Artificial Sequence
  Description of Artificial Sequence: Synthetic oligonucleotide
  Antisense strand to SEQ ID NO: 227326
uccuagaacaauggauguc

SEQ ID NO: 227328 - RNA, 19 nt, Artificial Sequence
  Description of Artificial Sequence: Synthetic oligonucleotide
  Sense strand starting at position 2674 of SEQ ID NO: 2927
uuugcaaaggcuugaggaa

SEQ ID NO: 227329 - RNA, 19 nt, Artificial Sequence
  Description of Artificial Sequence: Synthetic oligonucleotide
  Antisense strand to SEQ ID NO: 227328
uuccucaagccuuugcaaa

SEQ ID NO: 227330 - RNA, 19 nt, Artificial Sequence
  Description of Artificial Sequence: Synthetic oligonucleotide
  Sense strand starting at position 2688 of SEQ ID NO: 2927
aggaacuugguguguccaa

SEQ ID NO: 227331 - RNA, 19 nt, Artificial Sequence
  Description of Artificial Sequence: Synthetic oligonucleotide
  Antisense strand to SEQ ID NO: 227330
uuggacacaccaaguuccu

SEQ ID NO: 227332 - RNA, 19 nt, Artificial Sequence
  Description of Artificial Sequence: Synthetic oligonucleotide
  Sense strand starting at position 2711 of SEQ ID NO: 2927
gaguaaacaguuuggcaua

SEQ ID NO: 227333 - RNA, 19 nt, Artificial Sequence
  Description of Artificial Sequence: Synthetic oligonucleotide
  Antisense strand to SEQ ID NO: 227332
uaugccaaacuguuuacuc

SEQ ID NO: 227334 - RNA, 19 nt, Artificial Sequence
  Description of Artificial Sequence: Synthetic oligonucleotide
  Sense strand starting at position 2778 of SEQ ID NO: 2927
caugaaaggcuuugccaga

SEQ ID NO: 227335 - RNA, 19 nt, Artificial Sequence
  Description of Artificial Sequence: Synthetic oligonucleotide
  Antisense strand to SEQ ID NO: 227334
ucuggcaaagccuuucaug

SEQ ID NO: 227336 - RNA, 19 nt, Artificial Sequence
  Description of Artificial Sequence: Synthetic oligonucleotide
  Sense strand starting at position 2869 of SEQ ID NO: 2927
ugggcuaaguucucaguga

SEQ ID NO: 227337 - RNA, 19 nt, Artificial Sequence
  Description of Artificial Sequence: Synthetic oligonucleotide
  Antisense strand to SEQ ID NO: 227336
ucacugagaacuuagccca

SEQ ID NO: 227338 - RNA, 19 nt, Artificial Sequence
  Description of Artificial Sequence: Synthetic oligonucleotide
  Sense strand starting at position 2873 of SEQ ID NO: 2927
cuaaguucucagugaacau

SEQ ID NO: 227339 - RNA, 19 nt, Artificial Sequence
  Description of Artificial Sequence: Synthetic oligonucleotide
  Antisense strand to SEQ ID NO: 227338
auguucacugagaacuuag

SEQ ID NO: 227340 - RNA, 19 nt, Artificial Sequence
  Description of Artificial Sequence: Synthetic oligonucleotide
  Sense strand starting at position 2880 of SEQ ID NO: 2927
cucagugaacauugcuuua

SEQ ID NO: 227341 - RNA, 19 nt, Artificial Sequence
  Description of Artificial Sequence: Synthetic oligonucleotide
  Antisense strand to SEQ ID NO: 227340
uaaagcaauguucacugag

SEQ ID NO: 227342 - RNA, 19 nt, Artificial Sequence
  Description of Artificial Sequence: Synthetic oligonucleotide
  Sense strand starting at position 2984 of SEQ ID NO: 2927
gugcaucguguguagagaa

SEQ ID NO: 227343 - RNA, 19 nt, Artificial Sequence
  Description of Artificial Sequence: Synthetic oligonucleotide
  Antisense strand to SEQ ID NO: 227342
uucucuacacacgaugcac

SEQ ID NO: 227344 - RNA, 19 nt, Artificial Sequence
  Description of Artificial Sequence: Synthetic oligonucleotide
  Sense strand starting at position 3042 of SEQ ID NO: 2927
uuguauuggcaccauucua

SEQ ID NO: 227345 - RNA, 19 nt, Artificial Sequence
  Description of Artificial Sequence: Synthetic oligonucleotide
  Antisense strand to SEQ ID NO: 227344
uagaauggugccaauacaa

SEQ ID NO: 227346 - RNA, 19 nt, Artificial Sequence
  Description of Artificial Sequence: Synthetic oligonucleotide
  Sense strand starting at position 3392 of SEQ ID NO: 2927
ccacuugguuccucauacu

SEQ ID NO: 227347 - RNA, 19 nt, Artificial Sequence
  Description of Artificial Sequence: Synthetic oligonucleotide
  Antisense strand to SEQ ID NO: 227346
aguaugaggaaccaagugg

SEQ ID NO: 227348 - RNA, 19 nt, Artificial Sequence
  Description of Artificial Sequence: Synthetic oligonucleotide
  Sense strand starting at position 3436 of SEQ ID NO: 2927
acguguuugcuucccuuua

SEQ ID NO: 227349 - RNA, 19 nt, Artificial Sequence
  Description of Artificial Sequence: Synthetic oligonucleotide
  Antisense strand to SEQ ID NO: 227348
uaaagggaagcaaacacgu

SEQ ID NO: 227350 - RNA, 19 nt, Artificial Sequence
  Description of Artificial Sequence: Synthetic oligonucleotide
  Sense strand starting at position 3448 of SEQ ID NO: 2927
cccuuuaugccaugacugu

SEQ ID NO: 227351 - RNA, 19 nt, Artificial Sequence
  Description of Artificial Sequence: Synthetic oligonucleotide
  Antisense strand to SEQ ID NO: 227350
acagucauggcauaaaggg

SEQ ID NO: 227352 - RNA, 19 nt, Artificial Sequence
  Description of Artificial Sequence: Synthetic oligonucleotide
  Sense strand starting at position 3449 of SEQ ID NO: 2927
ccuuuaugccaugacugua

SEQ ID NO: 227353 - RNA, 19 nt, Artificial Sequence
  Description of Artificial Sequence: Synthetic oligonucleotide
  Antisense strand to SEQ ID NO: 227352
uacagucauggcauaaagg

SEQ ID NO: 227354 - RNA, 19 nt, Artificial Sequence
  Description of Artificial Sequence: Synthetic oligonucleotide
  Sense strand starting at position 3480 of SEQ ID NO: 2927
ccucucuaggcaugcagaa

SEQ ID NO: 227355 - RNA, 19 nt, Artificial Sequence
  Description of Artificial Sequence: Synthetic oligonucleotide
  Antisense strand to SEQ ID NO: 227354
uucugcaugccuagagagg

SEQ ID NO: 227356 - RNA, 19 nt, Artificial Sequence
  Description of Artificial Sequence: Synthetic oligonucleotide
  Sense strand starting at position 3630 of SEQ ID NO: 2927
cugcaaugggauuggagaa

SEQ ID NO: 227357 - RNA, 19 nt, Artificial Sequence
  Description of Artificial Sequence: Synthetic oligonucleotide
  Antisense strand to SEQ ID NO: 227356
uucuccaaucccauugcag

SEQ ID NO: 227358 - RNA, 19 nt, Artificial Sequence
  Description of Artificial Sequence: Synthetic oligonucleotide
  Sense strand starting at position 3686 of SEQ ID NO: 2927
uugucagaucuugguaugu

SEQ ID NO: 227359 - RNA, 19 nt, Artificial Sequence
  Description of Artificial Sequence: Synthetic oligonucleotide
  Antisense strand to SEQ ID NO: 227358
acauaccaagaucugacaa

SEQ ID NO: 227360 - RNA, 19 nt, Artificial Sequence
  Description of Artificial Sequence: Synthetic oligonucleotide
  Sense strand starting at position 3690 of SEQ ID NO: 2927
cagaucuugguaugugaua

SEQ ID NO: 227361 - RNA, 19 nt, Artificial Sequence
  Description of Artificial Sequence: Synthetic oligonucleotide
  Antisense strand to SEQ ID NO: 227360
uaucacauaccaagaucug

SEQ ID NO: 227362 - RNA, 19 nt, Artificial Sequence
  Description of Artificial Sequence: Synthetic oligonucleotide
  Sense strand starting at position 3782 of SEQ ID NO: 2927
uggagaagcucuuccacua

SEQ ID NO: 227363 - RNA, 19 nt, Artificial Sequence
  Description of Artificial Sequence: Synthetic oligonucleotide
  Antisense strand to SEQ ID NO: 227362
uaguggaagagcuucucca

SEQ ID NO: 227364 - RNA, 19 nt, Artificial Sequence
  Description of Artificial Sequence: Synthetic oligonucleotide
  Sense strand starting at position 3933 of SEQ ID NO: 2927
gggauuaucagaggccagu

SEQ ID NO: 227365 - RNA, 19 nt, Artificial Sequence
  Description of Artificial Sequence: Synthetic oligonucleotide
  Antisense strand to SEQ ID NO: 227364
acuggccucugauaauccc

SEQ ID NO: 227366 - RNA, 19 nt, Artificial Sequence
  Description of Artificial Sequence: Synthetic oligonucleotide
  Sense strand starting at position 3943 of SEQ ID NO: 2927
gaggccagugcugaauaga

SEQ ID NO: 227367 - RNA, 19 nt, Artificial Sequence
  Description of Artificial Sequence: Synthetic oligonucleotide
  Antisense strand to SEQ ID NO: 227366
ucuauucagcacuggccuc

SEQ ID NO: 227368 - RNA, 19 nt, Artificial Sequence
  Description of Artificial Sequence: Synthetic oligonucleotide
  Sense strand starting at position 3946 of SEQ ID NO: 2927
gccagugcugaauagaauc

SEQ ID NO: 227369 - RNA, 19 nt, Artificial Sequence
  Description of Artificial Sequence: Synthetic oligonucleotide
  Antisense strand to SEQ ID NO: 227368
gauucuauucagcacuggc

SEQ ID NO: 227370 - RNA, 19 nt, Artificial Sequence
  Description of Artificial Sequence: Synthetic oligonucleotide
  Sense strand starting at position 3954 of SEQ ID NO: 2927
ugaauagaaucuccuuagu

SEQ ID NO: 227371 - RNA, 19 nt, Artificial Sequence
  Description of Artificial Sequence: Synthetic oligonucleotide
  Antisense strand to SEQ ID NO: 227370
acuaaggagauucuauuca

SEQ ID NO: 227372 - RNA, 19 nt, Artificial Sequence
  Description of Artificial Sequence: Synthetic oligonucleotide
  Sense strand starting at position 298 of SEQ ID NO: 2929
acuaaacauuguguuacaa

SEQ ID NO: 227373 - RNA, 19 nt, Artificial Sequence
  Description of Artificial Sequence: Synthetic oligonucleotide
  Antisense strand to SEQ ID NO: 227372
uuguaacacaauguuuagu

SEQ ID NO: 227374 - RNA, 19 nt, Artificial Sequence
  Description of Artificial Sequence: Synthetic oligonucleotide
  Sense strand starting at position 333 of SEQ ID NO: 2929
guacaauaauaugcuguau

SEQ ID NO: 227375 - RNA, 19 nt, Artificial Sequence
  Description of Artificial Sequence: Synthetic oligonucleotide
  Antisense strand to SEQ ID NO: 227374
auacagcauauuauuguac

SEQ ID NO: 227376 - RNA, 19 nt, Artificial Sequence
  Description of Artificial Sequence: Synthetic oligonucleotide
  Sense strand starting at position 440 of SEQ ID NO: 2929
auguuugcccaaugaggaa

SEQ ID NO: 227377 - RNA, 19 nt, Artificial Sequence
  Description of Artificial Sequence: Synthetic oligonucleotide
  Antisense strand to SEQ ID NO: 227376
uuccucauugggcaaacau

SEQ ID NO: 227378 - RNA, 19 nt, Artificial Sequence
  Description of Artificial Sequence: Synthetic oligonucleotide
  Sense strand starting at position 484 of SEQ ID NO: 2929
auguauucuccuuguuaag

SEQ ID NO: 227379 - RNA, 19 nt, Artificial Sequence
  Description of Artificial Sequence: Synthetic oligonucleotide
  Antisense strand to SEQ ID NO: 227378
cuuaacaaggagaauacau

SEQ ID NO: 227380 - RNA, 19 nt, Artificial Sequence
  Description of Artificial Sequence: Synthetic oligonucleotide
  Sense strand starting at position 506 of SEQ ID NO: 2929
ugcauaacuguauauggga

SEQ ID NO: 227381 - RNA, 19 nt, Artificial Sequence
  Description of Artificial Sequence: Synthetic oligonucleotide
  Antisense strand to SEQ ID NO: 227380
ucccauauacaguuaugca

SEQ ID NO: 227382 - RNA, 19 nt, Artificial Sequence
  Description of Artificial Sequence: Synthetic oligonucleotide
  Sense strand starting at position 633 of SEQ ID NO: 2929
gugagugaccacuguacau

SEQ ID NO: 227383 - RNA, 19 nt, Artificial Sequence
  Description of Artificial Sequence: Synthetic oligonucleotide
  Antisense strand to SEQ ID NO: 227382
auguacaguggucacucac

SEQ ID NO: 227384 - RNA, 19 nt, Artificial Sequence
  Description of Artificial Sequence: Synthetic oligonucleotide
  Sense strand starting at position 635 of SEQ ID NO: 2929
gagugaccacuguacauua

SEQ ID NO: 227385 - RNA, 19 nt, Artificial Sequence
  Description of Artificial Sequence: Synthetic oligonucleotide
  Antisense strand to SEQ ID NO: 227384
uaauguacaguggucacuc

SEQ ID NO: 227386 - RNA, 19 nt, Artificial Sequence
  Description of Artificial Sequence: Synthetic oligonucleotide
  Sense strand starting at position 694 of SEQ ID NO: 2929
uguacuuccucauuuaggu

SEQ ID NO: 227387 - RNA, 19 nt, Artificial Sequence
  Description of Artificial Sequence: Synthetic oligonucleotide
  Antisense strand to SEQ ID NO: 227386
accuaaaugaggaaguaca

SEQ ID NO: 227388 - RNA, 19 nt, Artificial Sequence
  Description of Artificial Sequence: Synthetic oligonucleotide
  Sense strand starting at position 940 of SEQ ID NO: 2929
cuuuacucuguaugaaagu

SEQ ID NO: 227389 - RNA, 19 nt, Artificial Sequence
  Description of Artificial Sequence: Synthetic oligonucleotide
  Antisense strand to SEQ ID NO: 227388
acuuucauacagaguaaag

SEQ ID NO: 227390 - RNA, 19 nt, Artificial Sequence
  Description of Artificial Sequence: Synthetic oligonucleotide
  Sense strand starting at position 996 of SEQ ID NO: 2929
guucccauuuauuaggaaa

SEQ ID NO: 227391 - RNA, 19 nt, Artificial Sequence
  Description of Artificial Sequence: Synthetic oligonucleotide
  Antisense strand to SEQ ID NO: 227390
uuuccuaauaaaugggaac

SEQ ID NO: 227392 - RNA, 19 nt, Artificial Sequence
  Description of Artificial Sequence: Synthetic oligonucleotide
  Sense strand starting at position 1211 of SEQ ID NO: 2929
guacucuagucaucacuac

SEQ ID NO: 227393 - RNA, 19 nt, Artificial Sequence
  Description of Artificial Sequence: Synthetic oligonucleotide
  Antisense strand to SEQ ID NO: 227392
guagugaugacuagaguac

SEQ ID NO: 227394 - RNA, 19 nt, Artificial Sequence
  Description of Artificial Sequence: Synthetic oligonucleotide
  Sense strand starting at position 1311 of SEQ ID NO: 2929
cuuguugaagcauggaaag

SEQ ID NO: 227395 - RNA, 19 nt, Artificial Sequence
  Description of Artificial Sequence: Synthetic oligonucleotide
  Antisense strand to SEQ ID NO: 227394
cuuuccaugcuucaacaag

SEQ ID NO: 227396 - RNA, 19 nt, Artificial Sequence
  Description of Artificial Sequence: Synthetic oligonucleotide
  Sense strand starting at position 1382 of SEQ ID NO: 2929
acuuuaugccaagagcacu

SEQ ID NO: 227397 - RNA, 19 nt, Artificial Sequence
  Description of Artificial Sequence: Synthetic oligonucleotide
  Antisense strand to SEQ ID NO: 227396
agugcucuuggcauaaagu

SEQ ID NO: 227398 - RNA, 19 nt, Artificial Sequence
  Description of Artificial Sequence: Synthetic oligonucleotide
  Sense strand starting at position 1413 of SEQ ID NO: 2929
aaguguugaccucaaaguu

SEQ ID NO: 227399 - RNA, 19 nt, Artificial Sequence
  Description of Artificial Sequence: Synthetic oligonucleotide
  Antisense strand to SEQ ID NO: 227398
aacuuugaggucaacacuu

SEQ ID NO: 227400 - RNA, 19 nt, Artificial Sequence
  Description of Artificial Sequence: Synthetic oligonucleotide
  Sense strand starting at position 1875 of SEQ ID NO: 2929
uguggagguccugaauuag

SEQ ID NO: 227401 - RNA, 19 nt, Artificial Sequence
  Description of Artificial Sequence: Synthetic oligonucleotide
  Antisense strand to SEQ ID NO: 227400
cuaauucaggaccuccaca

SEQ ID NO: 227402 - RNA, 19 nt, Artificial Sequence
  Description of Artificial Sequence: Synthetic oligonucleotide
  Sense strand starting at position 1926 of SEQ ID NO: 2929
uucugacgguauguauuaa

SEQ ID NO: 227403 - RNA, 19 nt, Artificial Sequence
  Description of Artificial Sequence: Synthetic oligonucleotide
  Antisense strand to SEQ ID NO: 227402
uuaauacauaccgucagaa

SEQ ID NO: 227404 - RNA, 19 nt, Artificial Sequence
  Description of Artificial Sequence: Synthetic oligonucleotide
  Sense strand starting at position 1938 of SEQ ID NO: 2929
guauuaaguuccuccauga

SEQ ID NO: 227405 - RNA, 19 nt, Artificial Sequence
  Description of Artificial Sequence: Synthetic oligonucleotide
  Antisense strand to SEQ ID NO: 227404
ucauggaggaacuuaauac

SEQ ID NO: 227406 - RNA, 19 nt, Artificial Sequence
  Description of Artificial Sequence: Synthetic oligonucleotide
  Sense strand starting at position 1980 of SEQ ID NO: 2929
gccauuucuucuucccgua

SEQ ID NO: 227407 - RNA, 19 nt, Artificial Sequence
  Description of Artificial Sequence: Synthetic oligonucleotide
  Antisense strand to SEQ ID NO: 227406
uacgggaagaagaaauggc

SEQ ID NO: 227408 - RNA, 19 nt, Artificial Sequence
  Description of Artificial Sequence: Synthetic oligonucleotide
  Sense strand starting at position 1992 of SEQ ID NO: 2929
ucccguauccuacaaugga

SEQ ID NO: 227409 - RNA, 19 nt, Artificial Sequence
  Description of Artificial Sequence: Synthetic oligonucleotide
  Antisense strand to SEQ ID NO: 227408
uccauuguaggauacggga

SEQ ID NO: 227410 - RNA, 19 nt, Artificial Sequence
  Description of Artificial Sequence: Synthetic oligonucleotide
  Sense strand starting at position 1995 of SEQ ID NO: 2929
cguauccuacaauggaaga

SEQ ID NO: 227411 - RNA, 19 nt, Artificial Sequence
  Description of Artificial Sequence: Synthetic oligonucleotide
  Antisense strand to SEQ ID NO: 227410
ucuuccauuguaggauacg

SEQ ID NO: 227412 - RNA, 19 nt, Artificial Sequence
  Description of Artificial Sequence: Synthetic oligonucleotide
  Sense strand starting at position 2368 of SEQ ID NO: 2929
aaacucaacuggucaguga

SEQ ID NO: 227413 - RNA, 19 nt, Artificial Sequence
  Description of Artificial Sequence: Synthetic oligonucleotide
  Antisense strand to SEQ ID NO: 227412
ucacugaccaguugaguuu

SEQ ID NO: 227414 - RNA, 19 nt, Artificial Sequence
  Description of Artificial Sequence: Synthetic oligonucleotide
  Sense strand starting at position 2580 of SEQ ID NO: 2929
gcaagugugccugugugga

SEQ ID NO: 227415 - RNA, 19 nt, Artificial Sequence
  Description of Artificial Sequence: Synthetic oligonucleotide
  Antisense strand to SEQ ID NO: 227414
uccacacaggcacacuugc

SEQ ID NO: 227416 - RNA, 19 nt, Artificial Sequence
  Description of Artificial Sequence: Synthetic oligonucleotide
  Sense strand starting at position 3258 of SEQ ID NO: 2929
gagugauaccagcgaagac

SEQ ID NO: 227417 - RNA, 19 nt, Artificial Sequence
  Description of Artificial Sequence: Synthetic oligonucleotide
  Antisense strand to SEQ ID NO: 227416
gucuucgcugguaucacuc

SEQ ID NO: 227418 - RNA, 19 nt, Artificial Sequence
  Description of Artificial Sequence: Synthetic oligonucleotide
  Sense strand starting at position 3259 of SEQ ID NO: 2929
agugauaccagcgaagacu

SEQ ID NO: 227419 - RNA, 19 nt, Artificial Sequence
  Description of Artificial Sequence: Synthetic oligonucleotide
  Antisense strand to SEQ ID NO: 227418
agucuucgcugguaucacu

SEQ ID NO: 227420 - RNA, 19 nt, Artificial Sequence
  Description of Artificial Sequence: Synthetic oligonucleotide
  Sense strand starting at position 3322 of SEQ ID NO: 2929
ccucgaugccucgaugaag

SEQ ID NO: 227421 - RNA, 19 nt, Artificial Sequence
  Description of Artificial Sequence: Synthetic oligonucleotide
  Antisense strand to SEQ ID NO: 227420
cuucaucgaggcaucgagg

SEQ ID NO: 227422 - RNA, 19 nt, Artificial Sequence
  Description of Artificial Sequence: Synthetic oligonucleotide
  Sense strand starting at position 3325 of SEQ ID NO: 2929
cgaugccucgaugaagauu

SEQ ID NO: 227423 - RNA, 19 nt, Artificial Sequence
  Description of Artificial Sequence: Synthetic oligonucleotide
  Antisense strand to SEQ ID NO: 227422
aaucuucaucgaggcaucg

SEQ ID NO: 227424 - RNA, 19 nt, Artificial Sequence
  Description of Artificial Sequence: Synthetic oligonucleotide
  Sense strand starting at position 3333 of SEQ ID NO: 2929
cgaugaagauuguuuagga

SEQ ID NO: 227425 - RNA, 19 nt, Artificial Sequence
  Description of Artificial Sequence: Synthetic oligonucleotide
  Antisense strand to SEQ ID NO: 227424
uccuaaacaaucuucaucg

SEQ ID NO: 227426 - RNA, 19 nt, Artificial Sequence
  Description of Artificial Sequence: Synthetic oligonucleotide
  Sense strand starting at position 3340 of SEQ ID NO: 2929
gauuguuuaggauguuucu

SEQ ID NO: 227427 - RNA, 19 nt, Artificial Sequence
  Description of Artificial Sequence: Synthetic oligonucleotide
  Antisense strand to SEQ ID NO: 227426
agaaacauccuaaacaauc

SEQ ID NO: 227428 - RNA, 19 nt, Artificial Sequence
  Description of Artificial Sequence: Synthetic oligonucleotide
  Sense strand starting at position 3474 of SEQ ID NO: 2929
gcuggauaaucugugguau

SEQ ID NO: 227429 - RNA, 19 nt, Artificial Sequence
  Description of Artificial Sequence: Synthetic oligonucleotide
  Antisense strand to SEQ ID NO: 227428
auaccacagauuauccagc

SEQ ID NO: 227430 - RNA, 19 nt, Artificial Sequence
  Description of Artificial Sequence: Synthetic oligonucleotide
  Sense strand starting at position 3475 of SEQ ID NO: 2929
cuggauaaucugugguauc

SEQ ID NO: 227431 - RNA, 19 nt, Artificial Sequence
  Description of Artificial Sequence: Synthetic oligonucleotide
  Antisense strand to SEQ ID NO: 227430
gauaccacagauuauccag

SEQ ID NO: 227432 - RNA, 19 nt, Artificial Sequence
  Description of Artificial Sequence: Synthetic oligonucleotide
  Sense strand starting at position 3527 of SEQ ID NO: 2929
aaauucgguuacucuaaga

SEQ ID NO: 227433 - RNA, 19 nt, Artificial Sequence
  Description of Artificial Sequence: Synthetic oligonucleotide
  Antisense strand to SEQ ID NO: 227432
ucuuagaguaaccgaauuu

SEQ ID NO: 227434 - RNA, 19 nt, Artificial Sequence
  Description of Artificial Sequence: Synthetic oligonucleotide
  Sense strand starting at position 3553 of SEQ ID NO: 2929
uaagcuugauugucaaaug

SEQ ID NO: 227435 - RNA, 19 nt, Artificial Sequence
  Description of Artificial Sequence: Synthetic oligonucleotide
  Antisense strand to SEQ ID NO: 227434
cauuugacaaucaagcuua

SEQ ID NO: 227436 - RNA, 19 nt, Artificial Sequence
  Description of Artificial Sequence: Synthetic oligonucleotide
  Sense strand starting at position 3590 of SEQ ID NO: 2929
ccucaaugugcacgaauuu

SEQ ID NO: 227437 - RNA, 19 nt, Artificial Sequence
  Description of Artificial Sequence: Synthetic oligonucleotide
  Antisense strand to SEQ ID NO: 227436
aaauucgugcacauugagg

SEQ ID NO: 227438 - RNA, 19 nt, Artificial Sequence
  Description of Artificial Sequence: Synthetic oligonucleotide
  Sense strand starting at position 3656 of SEQ ID NO: 2929
gccuauuucucaguaguca

SEQ ID NO: 227439 - RNA, 19 nt, Artificial Sequence
  Description of Artificial Sequence: Synthetic oligonucleotide
  Antisense strand to SEQ ID NO: 227438
ugacuacugagaaauaggc

SEQ ID NO: 227440 - RNA, 19 nt, Artificial Sequence
  Description of Artificial Sequence: Synthetic oligonucleotide
  Sense strand starting at position 3664 of SEQ ID NO: 2929
cucaguagucagcauuaag

SEQ ID NO: 227441 - RNA, 19 nt, Artificial Sequence
  Description of Artificial Sequence: Synthetic oligonucleotide
  Antisense strand to SEQ ID NO: 227440
cuuaaugcugacuacugag

SEQ ID NO: 227442 - RNA, 19 nt, Artificial Sequence
  Description of Artificial Sequence: Synthetic oligonucleotide
  Sense strand starting at position 3682 of SEQ ID NO: 2929
gccugccuggaccaauaua

SEQ ID NO: 227443 - RNA, 19 nt, Artificial Sequence
  Description of Artificial Sequence: Synthetic oligonucleotide
  Antisense strand to SEQ ID NO: 227442
uauauugguccaggcaggc

SEQ ID NO: 227444 - RNA, 19 nt, Artificial Sequence
  Description of Artificial Sequence: Synthetic oligonucleotide
  Sense strand starting at position 3827 of SEQ ID NO: 2929
guuguuuaaaccuagguua

SEQ ID NO: 227445 - RNA, 19 nt, Artificial Sequence
  Description of Artificial Sequence: Synthetic oligonucleotide
  Antisense strand to SEQ ID NO: 227444
uaaccuagguuuaaacaac

SEQ ID NO: 227446 - RNA, 19 nt, Artificial Sequence
  Description of Artificial Sequence: Synthetic oligonucleotide
  Sense strand starting at position 3829 of SEQ ID NO: 2929
uguuuaaaccuagguuaaa

SEQ ID NO: 227447 - RNA, 19 nt, Artificial Sequence
  Description of Artificial Sequence: Synthetic oligonucleotide
  Antisense strand to SEQ ID NO: 227446
uuuaaccuagguuuaaaca

SEQ ID NO: 227448 - RNA, 19 nt, Artificial Sequence
  Description of Artificial Sequence: Synthetic oligonucleotide
  Sense strand starting at position 3860 of SEQ ID NO: 2929
acaguauaacucugaguaa

SEQ ID NO: 227449 - RNA, 19 nt, Artificial Sequence
  Description of Artificial Sequence: Synthetic oligonucleotide
  Antisense strand to SEQ ID NO: 227448
uuacucagaguuauacugu

SEQ ID NO: 227450 - RNA, 19 nt, Artificial Sequence
  Description of Artificial Sequence: Synthetic oligonucleotide
  Sense strand starting at position 3863 of SEQ ID NO: 2929
guauaacucugaguaauua

SEQ ID NO: 227451 - RNA, 19 nt, Artificial Sequence
  Description of Artificial Sequence: Synthetic oligonucleotide
  Antisense strand to SEQ ID NO: 227450
uaauuacucagaguuauac

SEQ ID NO: 227452 - RNA, 19 nt, Artificial Sequence
  Description of Artificial Sequence: Synthetic oligonucleotide
  Sense strand starting at position 2 of SEQ ID NO: 2928
ggugaucaccuccagguuu

SEQ ID NO: 227453 - RNA, 19 nt, Artificial Sequence
  Description of Artificial Sequence: Synthetic oligonucleotide
  Antisense strand to SEQ ID NO: 227452
aaaccuggaggugaucacc

SEQ ID NO: 227454 - RNA, 19 nt, Artificial Sequence
  Description of Artificial Sequence: Synthetic oligonucleotide
  Sense strand starting at position 26 of SEQ ID NO: 2928
uuuaaauuccacggacaca

SEQ ID NO: 227455 - RNA, 19 nt, Artificial Sequence
  Description of Artificial Sequence: Synthetic oligonucleotide
  Antisense strand to SEQ ID NO: 227454
uguguccguggaauuuaaa

SEQ ID NO: 227456 - RNA, 19 nt, Artificial Sequence
  Description of Artificial Sequence: Synthetic oligonucleotide
  Sense strand starting at position 40 of SEQ ID NO: 2928
acacaaugaugguucucaa

SEQ ID NO: 227457 - RNA, 19 nt, Artificial Sequence
  Description of Artificial Sequence: Synthetic oligonucleotide
  Antisense strand to SEQ ID NO: 227456
uugagaaccaucauugugu

SEQ ID NO: 227458 - RNA, 19 nt, Artificial Sequence
  Description of Artificial Sequence: Synthetic oligonucleotide
  Sense strand starting at position 391 of SEQ ID NO: 2928
agugcaauaucugcauucu

SEQ ID NO: 227459 - RNA, 19 nt, Artificial Sequence
  Description of Artificial Sequence: Synthetic oligonucleotide
  Antisense strand to SEQ ID NO: 227458
agaaugcagauauugcacu

SEQ ID NO: 227460 - RNA, 19 nt, Artificial Sequence
  Description of Artificial Sequence: Synthetic oligonucleotide
  Sense strand starting at position 539 of SEQ ID NO: 2928
acuaauuagugagcucuuu

SEQ ID NO: 227461 - RNA, 19 nt, Artificial Sequence
  Description of Artificial Sequence: Synthetic oligonucleotide
  Antisense strand to SEQ ID NO: 227460
aaagagcucacuaauuagu

SEQ ID NO: 227462 - RNA, 19 nt, Artificial Sequence
  Description of Artificial Sequence: Synthetic oligonucleotide
  Sense strand starting at position 1021 of SEQ ID NO: 2928
gaggaaggcugcucugaua

SEQ ID NO: 227463 - RNA, 19 nt, Artificial Sequence
  Description of Artificial Sequence: Synthetic oligonucleotide
  Antisense strand to SEQ ID NO: 227462
uaucagagcagccuuccuc

SEQ ID NO: 227464 - RNA, 19 nt, Artificial Sequence
  Description of Artificial Sequence: Synthetic oligonucleotide
  Sense strand starting at position 1221 of SEQ ID NO: 2928
gccugugagccuuaauaaa

SEQ ID NO: 227465 - RNA, 19 nt, Artificial Sequence
  Description of Artificial Sequence: Synthetic oligonucleotide
  Antisense strand to SEQ ID NO: 227464
uuuauuaaggcucacaggc

SEQ ID NO: 227466 - RNA, 19 nt, Artificial Sequence
  Description of Artificial Sequence: Synthetic oligonucleotide
  Sense strand starting at position 1291 of SEQ ID NO: 2928
gggagagucugguucuuac

SEQ ID NO: 227467 - RNA, 19 nt, Artificial Sequence
  Description of Artificial Sequence: Synthetic oligonucleotide
  Antisense strand to SEQ ID NO: 227466
guaagaaccagacucuccc

SEQ ID NO: 227468 - RNA, 19 nt, Artificial Sequence
  Description of Artificial Sequence: Synthetic oligonucleotide
  Sense strand starting at position 1294 of SEQ ID NO: 2928
agagucugguucuuacuua

SEQ ID NO: 227469 - RNA, 19 nt, Artificial Sequence
  Description of Artificial Sequence: Synthetic oligonucleotide
  Antisense strand to SEQ ID NO: 227468
uaaguaagaaccagacucu

SEQ ID NO: 227470 - RNA, 19 nt, Artificial Sequence
  Description of Artificial Sequence: Synthetic oligonucleotide
  Sense strand starting at position 1326 of SEQ ID NO: 2928
gaugcugagguguggagaa

SEQ ID NO: 227471 - RNA, 19 nt, Artificial Sequence
  Description of Artificial Sequence: Synthetic oligonucleotide
  Antisense strand to SEQ ID NO: 227470
uucuccacaccucagcauc

SEQ ID NO: 227472 - RNA, 19 nt, Artificial Sequence
  Description of Artificial Sequence: Synthetic oligonucleotide
  Sense strand starting at position 1421 of SEQ ID NO: 2928
ugcaacucuccacggaaga

SEQ ID NO: 227473 - RNA, 19 nt, Artificial Sequence
  Description of Artificial Sequence: Synthetic oligonucleotide
  Antisense strand to SEQ ID NO: 227472
ucuuccguggagaguugca

SEQ ID NO: 227474 - RNA, 19 nt, Artificial Sequence
  Description of Artificial Sequence: Synthetic oligonucleotide
  Sense strand starting at position 1460 of SEQ ID NO: 2928
ucagccagucuaugaguau

SEQ ID NO: 227475 - RNA, 19 nt, Artificial Sequence
  Description of Artificial Sequence: Synthetic oligonucleotide
  Antisense strand to SEQ ID NO: 227474
auacucauagacuggcuga

SEQ ID NO: 227476 - RNA, 19 nt, Artificial Sequence
  Description of Artificial Sequence: Synthetic oligonucleotide
  Sense strand starting at position 1546 of SEQ ID NO: 2928
acaacugcugccugggaaa

SEQ ID NO: 227477 - RNA, 19 nt, Artificial Sequence
  Description of Artificial Sequence: Synthetic oligonucleotide
  Antisense strand to SEQ ID NO: 227476
uuucccaggcagcaguugu

SEQ ID NO: 227478 - RNA, 19 nt, Artificial Sequence
  Description of Artificial Sequence: Synthetic oligonucleotide
  Sense strand starting at position 1548 of SEQ ID NO: 2928
aacugcugccugggaaaua

SEQ ID NO: 227479 - RNA, 19 nt, Artificial Sequence
  Description of Artificial Sequence: Synthetic oligonucleotide
  Antisense strand to SEQ ID NO: 227478
uauuucccaggcagcaguu

SEQ ID NO: 227480 - RNA, 19 nt, Artificial Sequence
  Description of Artificial Sequence: Synthetic oligonucleotide
  Sense strand starting at position 1569 of SEQ ID NO: 2928
uguuacuugcacugauaaa

SEQ ID NO: 227481 - RNA, 19 nt, Artificial Sequence
  Description of Artificial Sequence: Synthetic oligonucleotide
  Antisense strand to SEQ ID NO: 227480
uuuaucagugcaaguaaca

SEQ ID NO: 227482 - RNA, 19 nt, Artificial Sequence
  Description of Artificial Sequence: Synthetic oligonucleotide
  Sense strand starting at position 1914 of SEQ ID NO: 2928
gagagcugguucucaguuu

SEQ ID NO: 227483 - RNA, 19 nt, Artificial Sequence
  Description of Artificial Sequence: Synthetic oligonucleotide
  Antisense strand to SEQ ID NO: 227482
aaacugagaaccagcucuc

SEQ ID NO: 227484 - RNA, 19 nt, Artificial Sequence
  Description of Artificial Sequence: Synthetic oligonucleotide
  Sense strand starting at position 1918 of SEQ ID NO: 2928
gcugguucucaguuucguu

SEQ ID NO: 227485 - RNA, 19 nt, Artificial Sequence
  Description of Artificial Sequence: Synthetic oligonucleotide
  Antisense strand to SEQ ID NO: 227484
aacgaaacugagaaccagc

SEQ ID NO: 227486 - RNA, 19 nt, Artificial Sequence
  Description of Artificial Sequence: Synthetic oligonucleotide
  Sense strand starting at position 2609 of SEQ ID NO: 2928
accaguaguccucgauuua

SEQ ID NO: 227487 - RNA, 19 nt, Artificial Sequence
  Description of Artificial Sequence: Synthetic oligonucleotide
  Antisense strand to SEQ ID NO: 227486
uaaaucgaggacuacuggu

SEQ ID NO: 227488 - RNA, 19 nt, Artificial Sequence
  Description of Artificial Sequence: Synthetic oligonucleotide
  Sense strand starting at position 2616 of SEQ ID NO: 2928
guccucgauuuauagaaau

SEQ ID NO: 227489 - RNA, 19 nt, Artificial Sequence
  Description of Artificial Sequence: Synthetic oligonucleotide
  Antisense strand to SEQ ID NO: 227488
auuucuauaaaucgaggac

SEQ ID NO: 227490 - RNA, 19 nt, Artificial Sequence
  Description of Artificial Sequence: Synthetic oligonucleotide
  Sense strand starting at position 2700 of SEQ ID NO: 2928
agugacuaaugaguauuga

SEQ ID NO: 227491 - RNA, 19 nt, Artificial Sequence
  Description of Artificial Sequence: Synthetic oligonucleotide
  Antisense strand to SEQ ID NO: 227490
ucaauacucauuagucacu

SEQ ID NO: 227492 - RNA, 19 nt, Artificial Sequence
  Description of Artificial Sequence: Synthetic oligonucleotide
  Sense strand starting at position 2732 of SEQ ID NO: 2928
uggauuaacacagguagua

SEQ ID NO: 227493 - RNA, 19 nt, Artificial Sequence
  Description of Artificial Sequence: Synthetic oligonucleotide
  Antisense strand to SEQ ID NO: 227492
uacuaccuguguuaaucca

SEQ ID NO: 227494 - RNA, 19 nt, Artificial Sequence
  Description of Artificial Sequence: Synthetic oligonucleotide
  Sense strand starting at position 2758 of SEQ ID NO: 2928
gaguuagaauuauaaccag

SEQ ID NO: 227495 - RNA, 19 nt, Artificial Sequence
  Description of Artificial Sequence: Synthetic oligonucleotide
  Antisense strand to SEQ ID NO: 227494
cugguuauaauucuaacuc

SEQ ID NO: 227496 - RNA, 19 nt, Artificial Sequence
  Description of Artificial Sequence: Synthetic oligonucleotide
  Sense strand starting at position 2764 of SEQ ID NO: 2928
gaauuauaaccaggaguuu

SEQ ID NO: 227497 - RNA, 19 nt, Artificial Sequence
  Description of Artificial Sequence: Synthetic oligonucleotide
  Antisense strand to SEQ ID NO: 227496
aaacuccugguuauaauuc

SEQ ID NO: 227498 - RNA, 19 nt, Artificial Sequence
  Description of Artificial Sequence: Synthetic oligonucleotide
  Sense strand starting at position 2775 of SEQ ID NO: 2928
aggaguuuguacucucagu

SEQ ID NO: 227499 - RNA, 19 nt, Artificial Sequence
  Description of Artificial Sequence: Synthetic oligonucleotide
  Antisense strand to SEQ ID NO: 227498
acugagaguacaaacuccu

SEQ ID NO: 227500 - RNA, 19 nt, Artificial Sequence
  Description of Artificial Sequence: Synthetic oligonucleotide
  Sense strand starting at position 2780 of SEQ ID NO: 2928
uuuguacucucaguaucuu

SEQ ID NO: 227501 - RNA, 19 nt, Artificial Sequence
  Description of Artificial Sequence: Synthetic oligonucleotide
  Antisense strand to SEQ ID NO: 227500
aagauacugagaguacaaa

SEQ ID NO: 227502 - RNA, 19 nt, Artificial Sequence
  Description of Artificial Sequence: Synthetic oligonucleotide
  Sense strand starting at position 2781 of SEQ ID NO: 2928
uuguacucucaguaucuua

SEQ ID NO: 227503 - RNA, 19 nt, Artificial Sequence
  Description of Artificial Sequence: Synthetic oligonucleotide
  Antisense strand to SEQ ID NO: 227502
uaagauacugagaguacaa

SEQ ID NO: 227504 - RNA, 19 nt, Artificial Sequence
  Description of Artificial Sequence: Synthetic oligonucleotide
  Sense strand starting at position 2788 of SEQ ID NO: 2928
cucaguaucuuagcuggga

SEQ ID NO: 227505 - RNA, 19 nt, Artificial Sequence
  Description of Artificial Sequence: Synthetic oligonucleotide
  Antisense strand to SEQ ID NO: 227504
ucccagcuaagauacugag

SEQ ID NO: 227506 - RNA, 19 nt, Artificial Sequence
  Description of Artificial Sequence: Synthetic oligonucleotide
  Sense strand starting at position 2789 of SEQ ID NO: 2928
ucaguaucuuagcugggau

SEQ ID NO: 227507 - RNA, 19 nt, Artificial Sequence
  Description of Artificial Sequence: Synthetic oligonucleotide
  Antisense strand to SEQ ID NO: 227506
aucccagcuaagauacuga

SEQ ID NO: 227508 - RNA, 19 nt, Artificial Sequence
  Description of Artificial Sequence: Synthetic oligonucleotide
  Sense strand starting at position 2791 of SEQ ID NO: 2928
aguaucuuagcugggauaa

SEQ ID NO: 227509 - RNA, 19 nt, Artificial Sequence
  Description of Artificial Sequence: Synthetic oligonucleotide
  Antisense strand to SEQ ID NO: 227508
uuaucccagcuaagauacu

SEQ ID NO: 227510 - RNA, 19 nt, Artificial Sequence
  Description of Artificial Sequence: Synthetic oligonucleotide
  Sense strand starting at position 2792 of SEQ ID NO: 2928
guaucuuagcugggauaag

SEQ ID NO: 227511 - RNA, 19 nt, Artificial Sequence
  Description of Artificial Sequence: Synthetic oligonucleotide
  Antisense strand to SEQ ID NO: 227510
cuuaucccagcuaagauac

SEQ ID NO: 227512 - RNA, 19 nt, Artificial Sequence
  Description of Artificial Sequence: Synthetic oligonucleotide
  Sense strand starting at position 3262 of SEQ ID NO: 2928
agcucugguccugggcaua

SEQ ID NO: 227513 - RNA, 19 nt, Artificial Sequence
  Description of Artificial Sequence: Synthetic oligonucleotide
  Antisense strand to SEQ ID NO: 227512
uaugcccaggaccagagcu

SEQ ID NO: 227514 - RNA, 19 nt, Artificial Sequence
  Description of Artificial Sequence: Synthetic oligonucleotide
  Sense strand starting at position 3352 of SEQ ID NO: 2928
guggcauuuccaggugaca

SEQ ID NO: 227515 - RNA, 19 nt, Artificial Sequence
  Description of Artificial Sequence: Synthetic oligonucleotide
  Antisense strand to SEQ ID NO: 227514
ugucaccuggaaaugccac

SEQ ID NO: 227516 - RNA, 19 nt, Artificial Sequence
  Description of Artificial Sequence: Synthetic oligonucleotide
  Sense strand starting at position 3394 of SEQ ID NO: 2928
guccauuugucagcuuugu

SEQ ID NO: 227517 - RNA, 19 nt, Artificial Sequence
  Description of Artificial Sequence: Synthetic oligonucleotide
  Antisense strand to SEQ ID NO: 227516
acaaagcugacaaauggac

SEQ ID NO: 227518 - RNA, 19 nt, Artificial Sequence
  Description of Artificial Sequence: Synthetic oligonucleotide
  Sense strand starting at position 3524 of SEQ ID NO: 2928
uaagcaugaucagaggaca

SEQ ID NO: 227519 - RNA, 19 nt, Artificial Sequence
  Description of Artificial Sequence: Synthetic oligonucleotide
  Antisense strand to SEQ ID NO: 227518
uguccucugaucaugcuua

SEQ ID NO: 227520 - RNA, 19 nt, Artificial Sequence
  Description of Artificial Sequence: Synthetic oligonucleotide
  Sense strand starting at position 3641 of SEQ ID NO: 2928
augauaucagaggguuggu

SEQ ID NO: 227521 - RNA, 19 nt, Artificial Sequence
  Description of Artificial Sequence: Synthetic oligonucleotide
  Antisense strand to SEQ ID NO: 227520
accaacccucugauaucau

SEQ ID NO: 227522 - RNA, 19 nt, Artificial Sequence
  Description of Artificial Sequence: Synthetic oligonucleotide
  Sense strand starting at position 3644 of SEQ ID NO: 2928
auaucagaggguuggugau

SEQ ID NO: 227523 - RNA, 19 nt, Artificial Sequence
  Description of Artificial Sequence: Synthetic oligonucleotide
  Antisense strand to SEQ ID NO: 227522
aucaccaacccucugauau

SEQ ID NO: 227524 - RNA, 19 nt, Artificial Sequence
  Description of Artificial Sequence: Synthetic oligonucleotide
  Sense strand starting at position 3679 of SEQ ID NO: 2928
auaugauaugggugaaccu

SEQ ID NO: 227525 - RNA, 19 nt, Artificial Sequence
  Description of Artificial Sequence: Synthetic oligonucleotide
  Antisense strand to SEQ ID NO: 227524
agguucacccauaucauau

SEQ ID NO: 227526 - RNA, 19 nt, Artificial Sequence
  Description of Artificial Sequence: Synthetic oligonucleotide
  Sense strand starting at position 3694 of SEQ ID NO: 2928
accucuuggaauggguaaa

SEQ ID NO: 227527 - RNA, 19 nt, Artificial Sequence
  Description of Artificial Sequence: Synthetic oligonucleotide
  Antisense strand to SEQ ID NO: 227526
uuuacccauuccaagaggu

SEQ ID NO: 227528 - RNA, 19 nt, Artificial Sequence
  Description of Artificial Sequence: Synthetic oligonucleotide
  Sense strand starting at position 3704 of SEQ ID NO: 2928
auggguaaagugugagcau

SEQ ID NO: 227529 - RNA, 19 nt, Artificial Sequence
  Description of Artificial Sequence: Synthetic oligonucleotide
  Antisense strand to SEQ ID NO: 227528
augcucacacuuuacccau

SEQ ID NO: 227530 - RNA, 19 nt, Artificial Sequence
  Description of Artificial Sequence: Synthetic oligonucleotide
  Sense strand starting at position 3707 of SEQ ID NO: 2928
gguaaagugugagcauauu

SEQ ID NO: 227531 - RNA, 19 nt, Artificial Sequence
  Description of Artificial Sequence: Synthetic oligonucleotide
  Antisense strand to SEQ ID NO: 227530
aauaugcucacacuuuacc

SEQ ID NO: 227532 - RNA, 19 nt, Artificial Sequence
  Description of Artificial Sequence: Synthetic oligonucleotide
  Sense strand starting at position 91 of SEQ ID NO: 2930
cuuguuaaccaguaaguac

SEQ ID NO: 227533 - RNA, 19 nt, Artificial Sequence
  Description of Artificial Sequence: Synthetic oligonucleotide
  Antisense strand to SEQ ID NO: 227532
guacuuacugguuaacaag

SEQ ID NO: 227534 - RNA, 19 nt, Artificial Sequence
  Description of Artificial Sequence: Synthetic oligonucleotide
  Sense strand starting at position 400 of SEQ ID NO: 2930
ucuaguaaugacuauaagu

SEQ ID NO: 227535 - RNA, 19 nt, Artificial Sequence
  Description of Artificial Sequence: Synthetic oligonucleotide
  Antisense strand to SEQ ID NO: 227534
acuuauagucauuacuaga

SEQ ID NO: 227536 - RNA, 19 nt, Artificial Sequence
  Description of Artificial Sequence: Synthetic oligonucleotide
  Sense strand starting at position 442 of SEQ ID NO: 2930
cccagccuucccuaguuua

SEQ ID NO: 227537 - RNA, 19 nt, Artificial Sequence
  Description of Artificial Sequence: Synthetic oligonucleotide
  Antisense strand to SEQ ID NO: 227536
uaaacuagggaaggcuggg

SEQ ID NO: 227538 - RNA, 19 nt, Artificial Sequence
  Description of Artificial Sequence: Synthetic oligonucleotide
  Sense strand starting at position 564 of SEQ ID NO: 2930
cuuacauugugucuagacu

SEQ ID NO: 227539 - RNA, 19 nt, Artificial Sequence
  Description of Artificial Sequence: Synthetic oligonucleotide
  Antisense strand to SEQ ID NO: 227538
agucuagacacaauguaag

SEQ ID NO: 227540 - RNA, 19 nt, Artificial Sequence
  Description of Artificial Sequence: Synthetic oligonucleotide
  Sense strand starting at position 565 of SEQ ID NO: 2930
uuacauugugucuagacuu

SEQ ID NO: 227541 - RNA, 19 nt, Artificial Sequence
  Description of Artificial Sequence: Synthetic oligonucleotide
  Antisense strand to SEQ ID NO: 227540
aagucuagacacaauguaa

SEQ ID NO: 227542 - RNA, 19 nt, Artificial Sequence
  Description of Artificial Sequence: Synthetic oligonucleotide
  Sense strand starting at position 726 of SEQ ID NO: 2930
ucaagaaucugacuauagc

SEQ ID NO: 227543 - RNA, 19 nt, Artificial Sequence
  Description of Artificial Sequence: Synthetic oligonucleotide
  Antisense strand to SEQ ID NO: 227542
gcuauagucagauucuuga

SEQ ID NO: 227544 - RNA, 19 nt, Artificial Sequence
  Description of Artificial Sequence: Synthetic oligonucleotide
  Sense strand starting at position 750 of SEQ ID NO: 2930
aacuuuagcgugcaagaau

SEQ ID NO: 227545 - RNA, 19 nt, Artificial Sequence
  Description of Artificial Sequence: Synthetic oligonucleotide
  Antisense strand to SEQ ID NO: 227544
auucuugcacgcuaaaguu

SEQ ID NO: 227546 - RNA, 19 nt, Artificial Sequence
  Description of Artificial Sequence: Synthetic oligonucleotide
  Sense strand starting at position 753 of SEQ ID NO: 2930
uuuagcgugcaagaauuau

SEQ ID NO: 227547 - RNA, 19 nt, Artificial Sequence
  Description of Artificial Sequence: Synthetic oligonucleotide
  Antisense strand to SEQ ID NO: 227546
auaauucuugcacgcuaaa

SEQ ID NO: 227548 - RNA, 19 nt, Artificial Sequence
  Description of Artificial Sequence: Synthetic oligonucleotide
  Sense strand starting at position 765 of SEQ ID NO: 2930
gaauuauccggcgugcuug

SEQ ID NO: 227549 - RNA, 19 nt, Artificial Sequence
  Description of Artificial Sequence: Synthetic oligonucleotide
  Antisense strand to SEQ ID NO: 227548
caagcacgccggauaauuc

SEQ ID NO: 227550 - RNA, 19 nt, Artificial Sequence
  Description of Artificial Sequence: Synthetic oligonucleotide
  Sense strand starting at position 802 of SEQ ID NO: 2930
ggcucuuacccagggaaug

SEQ ID NO: 227551 - RNA, 19 nt, Artificial Sequence
  Description of Artificial Sequence: Synthetic oligonucleotide
  Antisense strand to SEQ ID NO: 227550
cauucccuggguaagagcc

SEQ ID NO: 227552 - RNA, 19 nt, Artificial Sequence
  Description of Artificial Sequence: Synthetic oligonucleotide
  Sense strand starting at position 803 of SEQ ID NO: 2930
gcucuuacccagggaaugu

SEQ ID NO: 227553 - RNA, 19 nt, Artificial Sequence
  Description of Artificial Sequence: Synthetic oligonucleotide
  Antisense strand to SEQ ID NO: 227552
acauucccuggguaagagc

SEQ ID NO: 227554 - RNA, 19 nt, Artificial Sequence
  Description of Artificial Sequence: Synthetic oligonucleotide
  Sense strand starting at position 894 of SEQ ID NO: 2930
agguguuccgcagaucuca

SEQ ID NO: 227555 - RNA, 19 nt, Artificial Sequence
  Description of Artificial Sequence: Synthetic oligonucleotide
  Antisense strand to SEQ ID NO: 227554
ugagaucugcggaacaccu

SEQ ID NO: 227556 - RNA, 19 nt, Artificial Sequence
  Description of Artificial Sequence: Synthetic oligonucleotide
  Sense strand starting at position 1031 of SEQ ID NO: 2930
aggugaugugcguaaggaa

SEQ ID NO: 227557 - RNA, 19 nt, Artificial Sequence
  Description of Artificial Sequence: Synthetic oligonucleotide
  Antisense strand to SEQ ID NO: 227556
uuccuuacgcacaucaccu

SEQ ID NO: 227558 - RNA, 19 nt, Artificial Sequence
  Description of Artificial Sequence: Synthetic oligonucleotide
  Sense strand starting at position 2034 of SEQ ID NO: 2930
guaauuucgucguucgagg

SEQ ID NO: 227559 - RNA, 19 nt, Artificial Sequence
  Description of Artificial Sequence: Synthetic oligonucleotide
  Antisense strand to SEQ ID NO: 227558
ccucgaacgacgaaauuac

SEQ ID NO: 227560 - RNA, 19 nt, Artificial Sequence
  Description of Artificial Sequence: Synthetic oligonucleotide
  Sense strand starting at position 2070 of SEQ ID NO: 2930
cgcaauuaccaaugagaaa

SEQ ID NO: 227561 - RNA, 19 nt, Artificial Sequence
  Description of Artificial Sequence: Synthetic oligonucleotide
  Antisense strand to SEQ ID NO: 227560
uuucucauugguaauugcg

SEQ ID NO: 227562 - RNA, 19 nt, Artificial Sequence
  Description of Artificial Sequence: Synthetic oligonucleotide
  Sense strand starting at position 2126 of SEQ ID NO: 2930
ucaucaguucccggaauac

SEQ ID NO: 227563 - RNA, 19 nt, Artificial Sequence
  Description of Artificial Sequence: Synthetic oligonucleotide
  Antisense strand to SEQ ID NO: 227562
guauuccgggaacugauga

SEQ ID NO: 227564 - RNA, 19 nt, Artificial Sequence
  Description of Artificial Sequence: Synthetic oligonucleotide
  Sense strand starting at position 2137 of SEQ ID NO: 2930
cggaauaccuuuccuacaa

SEQ ID NO: 227565 - RNA, 19 nt, Artificial Sequence
  Description of Artificial Sequence: Synthetic oligonucleotide
  Antisense strand to SEQ ID NO: 227564
uuguaggaaagguauuccg

SEQ ID NO: 227566 - RNA, 19 nt, Artificial Sequence
  Description of Artificial Sequence: Synthetic oligonucleotide
  Sense strand starting at position 2212 of SEQ ID NO: 2930
cuugaagaucauuggugga

SEQ ID NO: 227567 - RNA, 19 nt, Artificial Sequence
  Description of Artificial Sequence: Synthetic oligonucleotide
  Antisense strand to SEQ ID NO: 227566
uccaccaaugaucuucaag

SEQ ID NO: 227568 - RNA, 19 nt, Artificial Sequence
  Description of Artificial Sequence: Synthetic oligonucleotide
  Sense strand starting at position 2253 of SEQ ID NO: 2930
gcgcuaacugccucuugau

SEQ ID NO: 227569 - RNA, 19 nt, Artificial Sequence
  Description of Artificial Sequence: Synthetic oligonucleotide
  Antisense strand to SEQ ID NO: 227568
aucaagaggcaguuagcgc

SEQ ID NO: 227570 - RNA, 19 nt, Artificial Sequence
  Description of Artificial Sequence: Synthetic oligonucleotide
  Sense strand starting at position 2262 of SEQ ID NO: 2930
gccucuugauugguuggaa

SEQ ID NO: 227571 - RNA, 19 nt, Artificial Sequence
  Description of Artificial Sequence: Synthetic oligonucleotide
  Antisense strand to SEQ ID NO: 227570
uuccaaccaaucaagaggc

SEQ ID NO: 227572 - RNA, 19 nt, Artificial Sequence
  Description of Artificial Sequence: Synthetic oligonucleotide
  Sense strand starting at position 2297 of SEQ ID NO: 2930
ggcggauucugacugugaa

SEQ ID NO: 227573 - RNA, 19 nt, Artificial Sequence
  Description of Artificial Sequence: Synthetic oligonucleotide
  Antisense strand to SEQ ID NO: 227572
uucacagucagaauccgcc

SEQ ID NO: 227574 - RNA, 19 nt, Artificial Sequence
  Description of Artificial Sequence: Synthetic oligonucleotide
  Sense strand starting at position 2298 of SEQ ID NO: 2930
gcggauucugacugugaag

SEQ ID NO: 227575 - RNA, 19 nt, Artificial Sequence
  Description of Artificial Sequence: Synthetic oligonucleotide
  Antisense strand to SEQ ID NO: 227574
cuucacagucagaauccgc

SEQ ID NO: 227576 - RNA, 19 nt, Artificial Sequence
  Description of Artificial Sequence: Synthetic oligonucleotide
  Sense strand starting at position 2300 of SEQ ID NO: 2930
ggauucugacugugaagag

SEQ ID NO: 227577 - RNA, 19 nt, Artificial Sequence
  Description of Artificial Sequence: Synthetic oligonucleotide
  Antisense strand to SEQ ID NO: 227576
cucuucacagucagaaucc

SEQ ID NO: 227578 - RNA, 19 nt, Artificial Sequence
  Description of Artificial Sequence: Synthetic oligonucleotide
  Sense strand starting at position 2374 of SEQ ID NO: 2930
ccuuaaaggagcugguauu

SEQ ID NO: 227579 - RNA, 19 nt, Artificial Sequence
  Description of Artificial Sequence: Synthetic oligonucleotide
  Antisense strand to SEQ ID NO: 227578
aauaccagcuccuuuaagg

SEQ ID NO: 227580 - RNA, 19 nt, Artificial Sequence
  Description of Artificial Sequence: Synthetic oligonucleotide
  Sense strand starting at position 2406 of SEQ ID NO: 2930
agccuagucuacuuaggaa

SEQ ID NO: 227581 - RNA, 19 nt, Artificial Sequence
  Description of Artificial Sequence: Synthetic oligonucleotide
  Antisense strand to SEQ ID NO: 227580
uuccuaaguagacuaggcu

SEQ ID NO: 227582 - RNA, 19 nt, Artificial Sequence
  Description of Artificial Sequence: Synthetic oligonucleotide
  Sense strand starting at position 2539 of SEQ ID NO: 2930
ccgcuuguuagagauggca

SEQ ID NO: 227583 - RNA, 19 nt, Artificial Sequence
  Description of Artificial Sequence: Synthetic oligonucleotide
  Antisense strand to SEQ ID NO: 227582
ugccaucucuaacaagcgg

SEQ ID NO: 227584 - RNA, 19 nt, Artificial Sequence
  Description of Artificial Sequence: Synthetic oligonucleotide
  Sense strand starting at position 2552 of SEQ ID NO: 2930
auggcagugaccugugaca

SEQ ID NO: 227585 - RNA, 19 nt, Artificial Sequence
  Description of Artificial Sequence: Synthetic oligonucleotide
  Antisense strand to SEQ ID NO: 227584
ugucacaggucacugccau

SEQ ID NO: 227586 - RNA, 19 nt, Artificial Sequence
  Description of Artificial Sequence: Synthetic oligonucleotide
  Sense strand starting at position 2554 of SEQ ID NO: 2930
ggcagugaccugugacaau

SEQ ID NO: 227587 - RNA, 19 nt, Artificial Sequence
  Description of Artificial Sequence: Synthetic oligonucleotide
  Antisense strand to SEQ ID NO: 227586
auugucacaggucacugcc

SEQ ID NO: 227588 - RNA, 19 nt, Artificial Sequence
  Description of Artificial Sequence: Synthetic oligonucleotide
  Sense strand starting at position 2717 of SEQ ID NO: 2930
cgcuuuguaccucaccaaa

SEQ ID NO: 227589 - RNA, 19 nt, Artificial Sequence
  Description of Artificial Sequence: Synthetic oligonucleotide
  Antisense strand to SEQ ID NO: 227588
uuuggugagguacaaagcg

SEQ ID NO: 227590 - RNA, 19 nt, Artificial Sequence
  Description of Artificial Sequence: Synthetic oligonucleotide
  Sense strand starting at position 2815 of SEQ ID NO: 2930
agucaagacuuccugaaga

SEQ ID NO: 227591 - RNA, 19 nt, Artificial Sequence
  Description of Artificial Sequence: Synthetic oligonucleotide
  Antisense strand to SEQ ID NO: 227590
ucuucaggaagucuugacu

SEQ ID NO: 227592 - RNA, 19 nt, Artificial Sequence
  Description of Artificial Sequence: Synthetic oligonucleotide
  Sense strand starting at position 2913 of SEQ ID NO: 2930
ggcuauuacccgcaucaaa

SEQ ID NO: 227593 - RNA, 19 nt, Artificial Sequence
  Description of Artificial Sequence: Synthetic oligonucleotide
  Antisense strand to SEQ ID NO: 227592
uuugaugcggguaauagcc

SEQ ID NO: 227594 - RNA, 19 nt, Artificial Sequence
  Description of Artificial Sequence: Synthetic oligonucleotide
  Sense strand starting at position 3005 of SEQ ID NO: 2930
gcuugaccauaguucucua

SEQ ID NO: 227595 - RNA, 19 nt, Artificial Sequence
  Description of Artificial Sequence: Synthetic oligonucleotide
  Antisense strand to SEQ ID NO: 227594
uagagaacuauggucaagc

SEQ ID NO: 227596 - RNA, 19 nt, Artificial Sequence
  Description of Artificial Sequence: Synthetic oligonucleotide
  Sense strand starting at position 3212 of SEQ ID NO: 2930
cugcaauuuacgggcauua

SEQ ID NO: 227597 - RNA, 19 nt, Artificial Sequence
  Description of Artificial Sequence: Synthetic oligonucleotide
  Antisense strand to SEQ ID NO: 227596
uaaugcccguaaauugcag

SEQ ID NO: 227598 - RNA, 19 nt, Artificial Sequence
  Description of Artificial Sequence: Synthetic oligonucleotide
  Sense strand starting at position 3385 of SEQ ID NO: 2930
gugucuuugcuccucugua

SEQ ID NO: 227599 - RNA, 19 nt, Artificial Sequence
  Description of Artificial Sequence: Synthetic oligonucleotide
  Antisense strand to SEQ ID NO: 227598
uacagaggagcaaagacac

SEQ ID NO: 227600 - RNA, 19 nt, Artificial Sequence
  Description of Artificial Sequence: Synthetic oligonucleotide
  Sense strand starting at position 3549 of SEQ ID NO: 2930
agcuguauuugauccagca

SEQ ID NO: 227601 - RNA, 19 nt, Artificial Sequence
  Description of Artificial Sequence: Synthetic oligonucleotide
  Antisense strand to SEQ ID NO: 227600
ugcuggaucaaauacagcu

SEQ ID NO: 227602 - RNA, 19 nt, Artificial Sequence
  Description of Artificial Sequence: Synthetic oligonucleotide
  Sense strand starting at position 3811 of SEQ ID NO: 2930
cuaggaaacuucccaggua

SEQ ID NO: 227603 - RNA, 19 nt, Artificial Sequence
  Description of Artificial Sequence: Synthetic oligonucleotide
  Antisense strand to SEQ ID NO: 227602
uaccugggaaguuuccuag

SEQ ID NO: 227604 - RNA, 19 nt, Artificial Sequence
  Description of Artificial Sequence: Synthetic oligonucleotide
  Sense strand starting at position 3814 of SEQ ID NO: 2930
ggaaacuucccagguauau

SEQ ID NO: 227605 - RNA, 19 nt, Artificial Sequence
  Description of Artificial Sequence: Synthetic oligonucleotide
  Antisense strand to SEQ ID NO: 227604
auauaccugggaaguuucc

SEQ ID NO: 227606 - RNA, 19 nt, Artificial Sequence
  Description of Artificial Sequence: Synthetic oligonucleotide
  Sense strand starting at position 3826 of SEQ ID NO: 2930
gguauaugaguuugcuaga

SEQ ID NO: 227607 - RNA, 19 nt, Artificial Sequence
  Description of Artificial Sequence: Synthetic oligonucleotide
  Antisense strand to SEQ ID NO: 227606
ucuagcaaacucauauacc

SEQ ID NO: 227608 - RNA, 19 nt, Artificial Sequence
  Description of Artificial Sequence: Synthetic oligonucleotide
  Sense strand starting at position 3899 of SEQ ID NO: 2930
cucgaaguucuggaggcua

SEQ ID NO: 227609 - RNA, 19 nt, Artificial Sequence
  Description of Artificial Sequence: Synthetic oligonucleotide
  Antisense strand to SEQ ID NO: 227608
uagccuccagaacuucgag

SEQ ID NO: 227610 - RNA, 19 nt, Artificial Sequence
  Description of Artificial Sequence: Synthetic oligonucleotide
  Sense strand starting at position 3901 of SEQ ID NO: 2930
cgaaguucuggaggcuaga

SEQ ID NO: 227611 - RNA, 19 nt, Artificial Sequence
  Description of Artificial Sequence: Synthetic oligonucleotide
  Antisense strand to SEQ ID NO: 227610
ucuagccuccagaacuucg

SEQ ID NO: 227612 - RNA, 19 nt, Artificial Sequence
  Description of Artificial Sequence: Synthetic oligonucleotide
  Sense strand starting at position 91 of SEQ ID NO: 2932
augggauggcggugucaca

SEQ ID NO: 227613 - RNA, 19 nt, Artificial Sequence
  Description of Artificial Sequence: Synthetic oligonucleotide
  Antisense strand to SEQ ID NO: 227612
ugugacaccgccaucccau

SEQ ID NO: 227614 - RNA, 19 nt, Artificial Sequence
  Description of Artificial Sequence: Synthetic oligonucleotide
  Sense strand starting at position 101 of SEQ ID NO: 2932
ggugucacauacuuugaaa

SEQ ID NO: 227615 - RNA, 19 nt, Artificial Sequence
  Description of Artificial Sequence: Synthetic oligonucleotide
  Antisense strand to SEQ ID NO: 227614
uuucaaaguaugugacacc

SEQ ID NO: 227616 - RNA, 19 nt, Artificial Sequence
  Description of Artificial Sequence: Synthetic oligonucleotide
  Sense strand starting at position 319 of SEQ ID NO: 2932
ccucauaaacugggucaga

SEQ ID NO: 227617 - RNA, 19 nt, Artificial Sequence
  Description of Artificial Sequence: Synthetic oligonucleotide
  Antisense strand to SEQ ID NO: 227616
ucugacccaguuuaugagg

SEQ ID NO: 227618 - RNA, 19 nt, Artificial Sequence
  Description of Artificial Sequence: Synthetic oligonucleotide
  Sense strand starting at position 393 of SEQ ID NO: 2932
aauccuuucguguaggaac

SEQ ID NO: 227619 - RNA, 19 nt, Artificial Sequence
  Description of Artificial Sequence: Synthetic oligonucleotide
  Antisense strand to SEQ ID NO: 227618
guuccuacacgaaaggauu

SEQ ID NO: 227620 - RNA, 19 nt, Artificial Sequence
  Description of Artificial Sequence: Synthetic oligonucleotide
  Sense strand starting at position 432 of SEQ ID NO: 2932
ggaccaauggcccagaguu

SEQ ID NO: 227621 - RNA, 19 nt, Artificial Sequence
  Description of Artificial Sequence: Synthetic oligonucleotide
  Antisense strand to SEQ ID NO: 227620
aacucugggccauuggucc

SEQ ID NO: 227622 - RNA, 19 nt, Artificial Sequence
  Description of Artificial Sequence: Synthetic oligonucleotide
  Sense strand starting at position 434 of SEQ ID NO: 2932
accaauggcccagaguuua

SEQ ID NO: 227623 - RNA, 19 nt, Artificial Sequence
  Description of Artificial Sequence: Synthetic oligonucleotide
  Antisense strand to SEQ ID NO: 227622
uaaacucugggccauuggu

SEQ ID NO: 227624 - RNA, 19 nt, Artificial Sequence
  Description of Artificial Sequence: Synthetic oligonucleotide
  Sense strand starting at position 488 of SEQ ID NO: 2932
guaagacuacucugaccca

SEQ ID NO: 227625 - RNA, 19 nt, Artificial Sequence
  Description of Artificial Sequence: Synthetic oligonucleotide
  Antisense strand to SEQ ID NO: 227624
ugggucagaguagucuuac

SEQ ID NO: 227626 - RNA, 19 nt, Artificial Sequence
  Description of Artificial Sequence: Synthetic oligonucleotide
  Sense strand starting at position 636 of SEQ ID NO: 2932
agaaguaggucaucaaccu

SEQ ID NO: 227627 - RNA, 19 nt, Artificial Sequence
  Description of Artificial Sequence: Synthetic oligonucleotide
  Antisense strand to SEQ ID NO: 227626
agguugaugaccuacuucu

SEQ ID NO: 227628 - RNA, 19 nt, Artificial Sequence
  Description of Artificial Sequence: Synthetic oligonucleotide
  Sense strand starting at position 643 of SEQ ID NO: 2932
ggucaucaaccugagggua

SEQ ID NO: 227629 - RNA, 19 nt, Artificial Sequence
  Description of Artificial Sequence: Synthetic oligonucleotide
  Antisense strand to SEQ ID NO: 227628
uacccucagguugaugacc

SEQ ID NO: 227630 - RNA, 19 nt, Artificial Sequence
  Description of Artificial Sequence: Synthetic oligonucleotide
  Sense strand starting at position 717 of SEQ ID NO: 2932
ggucuugaaauguguaauu

SEQ ID NO: 227631 - RNA, 19 nt, Artificial Sequence
  Description of Artificial Sequence: Synthetic oligonucleotide
  Antisense strand to SEQ ID NO: 227630
aauuacacauuucaagacc

SEQ ID NO: 227632 - RNA, 19 nt, Artificial Sequence
  Description of Artificial Sequence: Synthetic oligonucleotide
  Sense strand starting at position 727 of SEQ ID NO: 2932
uguguaauuugcucuuagg

SEQ ID NO: 227633 - RNA, 19 nt, Artificial Sequence
  Description of Artificial Sequence: Synthetic oligonucleotide
  Antisense strand to SEQ ID NO: 227632
ccuaagagcaaauuacaca

SEQ ID NO: 227634 - RNA, 19 nt, Artificial Sequence
  Description of Artificial Sequence: Synthetic oligonucleotide
  Sense strand starting at position 844 of SEQ ID NO: 2932
ucagaacucugggucccaa

SEQ ID NO: 227635 - RNA, 19 nt, Artificial Sequence
  Description of Artificial Sequence: Synthetic oligonucleotide
  Antisense strand to SEQ ID NO: 227634
uugggacccagaguucuga

SEQ ID NO: 227636 - RNA, 19 nt, Artificial Sequence
  Description of Artificial Sequence: Synthetic oligonucleotide
  Sense strand starting at position 897 of SEQ ID NO: 2932
gccugagcuggcguuauaa

SEQ ID NO: 227637 - RNA, 19 nt, Artificial Sequence
  Description of Artificial Sequence: Synthetic oligonucleotide
  Antisense strand to SEQ ID NO: 227636
uuauaacgccagcucaggc

SEQ ID NO: 227638 - RNA, 19 nt, Artificial Sequence
  Description of Artificial Sequence: Synthetic oligonucleotide
  Sense strand starting at position 899 of SEQ ID NO: 2932
cugagcuggcguuauaauu

SEQ ID NO: 227639 - RNA, 19 nt, Artificial Sequence
  Description of Artificial Sequence: Synthetic oligonucleotide
  Antisense strand to SEQ ID NO: 227638
aauuauaacgccagcucag

SEQ ID NO: 227640 - RNA, 19 nt, Artificial Sequence
  Description of Artificial Sequence: Synthetic oligonucleotide
  Sense strand starting at position 905 of SEQ ID NO: 2932
uggcguuauaauuaggagu

SEQ ID NO: 227641 - RNA, 19 nt, Artificial Sequence
  Description of Artificial Sequence: Synthetic oligonucleotide
  Antisense strand to SEQ ID NO: 227640
acuccuaauuauaacgcca

SEQ ID NO: 227642 - RNA, 19 nt, Artificial Sequence
  Description of Artificial Sequence: Synthetic oligonucleotide
  Sense strand starting at position 918 of SEQ ID NO: 2932
aggaguaagggaggucuua

SEQ ID NO: 227643 - RNA, 19 nt, Artificial Sequence
  Description of Artificial Sequence: Synthetic oligonucleotide
  Antisense strand to SEQ ID NO: 227642
uaagaccucccuuacuccu

SEQ ID NO: 227644 - RNA, 19 nt, Artificial Sequence
  Description of Artificial Sequence: Synthetic oligonucleotide
  Sense strand starting at position 1098 of SEQ ID NO: 2932
gaacuuucucccgaggagu

SEQ ID NO: 227645 - RNA, 19 nt, Artificial Sequence
  Description of Artificial Sequence: Synthetic oligonucleotide
  Antisense strand to SEQ ID NO: 227644
acuccucgggagaaaguuc

SEQ ID NO: 227646 - RNA, 19 nt, Artificial Sequence
  Description of Artificial Sequence: Synthetic oligonucleotide
  Sense strand starting at position 1147 of SEQ ID NO: 2932
ucugguugggccuacuaaa

SEQ ID NO: 227647 - RNA, 19 nt, Artificial Sequence
  Description of Artificial Sequence: Synthetic oligonucleotide
  Antisense strand to SEQ ID NO: 227646
uuuaguaggcccaaccaga

SEQ ID NO: 227648 - RNA, 19 nt, Artificial Sequence
  Description of Artificial Sequence: Synthetic oligonucleotide
  Sense strand starting at position 1363 of SEQ ID NO: 2932
uugacauugggcugcagau

SEQ ID NO: 227649 - RNA, 19 nt, Artificial Sequence
  Description of Artificial Sequence: Synthetic oligonucleotide
  Antisense strand to SEQ ID NO: 227648
aucugcagcccaaugucaa

SEQ ID NO: 227650 - RNA, 19 nt, Artificial Sequence
  Description of Artificial Sequence: Synthetic oligonucleotide
  Sense strand starting at position 1582 of SEQ ID NO: 2932
ugguuaaaucccuaguucu

SEQ ID NO: 227651 - RNA, 19 nt, Artificial Sequence
  Description of Artificial Sequence: Synthetic oligonucleotide
  Antisense strand to SEQ ID NO: 227650
agaacuagggauuuaacca

SEQ ID NO: 227652 - RNA, 19 nt, Artificial Sequence
  Description of Artificial Sequence: Synthetic oligonucleotide
  Sense strand starting at position 1672 of SEQ ID NO: 2932
aucauauaucccuaggguu

SEQ ID NO: 227653 - RNA, 19 nt, Artificial Sequence
  Description of Artificial Sequence: Synthetic oligonucleotide
  Antisense strand to SEQ ID NO: 227652
aacccuagggauauaugau

SEQ ID NO: 227654 - RNA, 19 nt, Artificial Sequence
  Description of Artificial Sequence: Synthetic oligonucleotide
  Sense strand starting at position 3025 of SEQ ID NO: 2932
aacacaagcguccgaauuu

SEQ ID NO: 227655 - RNA, 19 nt, Artificial Sequence
  Description of Artificial Sequence: Synthetic oligonucleotide
  Antisense strand to SEQ ID NO: 227654
aaauucggacgcuuguguu

SEQ ID NO: 227656 - RNA, 19 nt, Artificial Sequence
  Description of Artificial Sequence: Synthetic oligonucleotide
  Sense strand starting at position 3068 of SEQ ID NO: 2932
gggacuuggcccuggcgaa

SEQ ID NO: 227657 - RNA, 19 nt, Artificial Sequence
  Description of Artificial Sequence: Synthetic oligonucleotide
  Antisense strand to SEQ ID NO: 227656
uucgccagggccaaguccc

SEQ ID NO: 227658 - RNA, 19 nt, Artificial Sequence
  Description of Artificial Sequence: Synthetic oligonucleotide
  Sense strand starting at position 3069 of SEQ ID NO: 2932
ggacuuggcccuggcgaaa

SEQ ID NO: 227659 - RNA, 19 nt, Artificial Sequence
  Description of Artificial Sequence: Synthetic oligonucleotide
  Antisense strand to SEQ ID NO: 227658
uuucgccagggccaagucc

SEQ ID NO: 227660 - RNA, 19 nt, Artificial Sequence
  Description of Artificial Sequence: Synthetic oligonucleotide
  Sense strand starting at position 3093 of SEQ ID NO: 2932
cgaacuaucccucgggaga

SEQ ID NO: 227661 - RNA, 19 nt, Artificial Sequence
  Description of Artificial Sequence: Synthetic oligonucleotide
  Antisense strand to SEQ ID NO: 227660
ucucccgagggauaguucg

SEQ ID NO: 227662 - RNA, 19 nt, Artificial Sequence
  Description of Artificial Sequence: Synthetic oligonucleotide
  Sense strand starting at position 3094 of SEQ ID NO: 2932
gaacuaucccucgggagau

SEQ ID NO: 227663 - RNA, 19 nt, Artificial Sequence
  Description of Artificial Sequence: Synthetic oligonucleotide
  Antisense strand to SEQ ID NO: 227662
aucucccgagggauaguuc

SEQ ID NO: 227664 - RNA, 19 nt, Artificial Sequence
  Description of Artificial Sequence: Synthetic oligonucleotide
  Sense strand starting at position 3128 of SEQ ID NO: 2932
gcgaguugccaggcaacuu

SEQ ID NO: 227665 - RNA, 19 nt, Artificial Sequence
  Description of Artificial Sequence: Synthetic oligonucleotide
  Antisense strand to SEQ ID NO: 227664
aaguugccuggcaacucgc

SEQ ID NO: 227666 - RNA, 19 nt, Artificial Sequence
  Description of Artificial Sequence: Synthetic oligonucleotide
  Sense strand starting at position 3208 of SEQ ID NO: 2932
uguccucaggccuauaaca

SEQ ID NO: 227667 - RNA, 19 nt, Artificial Sequence
  Description of Artificial Sequence: Synthetic oligonucleotide
  Antisense strand to SEQ ID NO: 227666
uguuauaggccugaggaca

SEQ ID NO: 227668 - RNA, 19 nt, Artificial Sequence
  Description of Artificial Sequence: Synthetic oligonucleotide
  Sense strand starting at position 3426 of SEQ ID NO: 2932
ugguuuaucuugucugaca

SEQ ID NO: 227669 - RNA, 19 nt, Artificial Sequence
  Description of Artificial Sequence: Synthetic oligonucleotide
  Antisense strand to SEQ ID NO: 227668
ugucagacaagauaaacca

SEQ ID NO: 227670 - RNA, 19 nt, Artificial Sequence
  Description of Artificial Sequence: Synthetic oligonucleotide
  Sense strand starting at position 3427 of SEQ ID NO: 2932
gguuuaucuugucugacau

SEQ ID NO: 227671 - RNA, 19 nt, Artificial Sequence
  Description of Artificial Sequence: Synthetic oligonucleotide
  Antisense strand to SEQ ID NO: 227670
augucagacaagauaaacc

SEQ ID NO: 227672 - RNA, 19 nt, Artificial Sequence
  Description of Artificial Sequence: Synthetic oligonucleotide
  Sense strand starting at position 3428 of SEQ ID NO: 2932
guuuaucuugucugacauu

SEQ ID NO: 227673 - RNA, 19 nt, Artificial Sequence
  Description of Artificial Sequence: Synthetic oligonucleotide
  Antisense strand to SEQ ID NO: 227672
aaugucagacaagauaaac

SEQ ID NO: 227674 - RNA, 19 nt, Artificial Sequence
  Description of Artificial Sequence: Synthetic oligonucleotide
  Sense strand starting at position 3689 of SEQ ID NO: 2932
cggcucauuucaguguguu

SEQ ID NO: 227675 - RNA, 19 nt, Artificial Sequence
  Description of Artificial Sequence: Synthetic oligonucleotide
  Antisense strand to SEQ ID NO: 227674
aacacacugaaaugagccg

SEQ ID NO: 227676 - RNA, 19 nt, Artificial Sequence
  Description of Artificial Sequence: Synthetic oligonucleotide
  Sense strand starting at position 3701 of SEQ ID NO: 2932
guguguuuagcugugccaa

SEQ ID NO: 227677 - RNA, 19 nt, Artificial Sequence
  Description of Artificial Sequence: Synthetic oligonucleotide
  Antisense strand to SEQ ID NO: 227676
uuggcacagcuaaacacac

SEQ ID NO: 227678 - RNA, 19 nt, Artificial Sequence
  Description of Artificial Sequence: Synthetic oligonucleotide
  Sense strand starting at position 3713 of SEQ ID NO: 2932
gugccaauuaucguuaugu

SEQ ID NO: 227679 - RNA, 19 nt, Artificial Sequence
  Description of Artificial Sequence: Synthetic oligonucleotide
  Antisense strand to SEQ ID NO: 227678
acauaacgauaauuggcac

SEQ ID NO: 227680 - RNA, 19 nt, Artificial Sequence
  Description of Artificial Sequence: Synthetic oligonucleotide
  Sense strand starting at position 3715 of SEQ ID NO: 2932
gccaauuaucguuauguau

SEQ ID NO: 227681 - RNA, 19 nt, Artificial Sequence
  Description of Artificial Sequence: Synthetic oligonucleotide
  Antisense strand to SEQ ID NO: 227680
auacauaacgauaauuggc

SEQ ID NO: 227682 - RNA, 19 nt, Artificial Sequence
  Description of Artificial Sequence: Synthetic oligonucleotide
  Sense strand starting at position 3730 of SEQ ID NO: 2932
guaucugugaugcaauguu

SEQ ID NO: 227683 - RNA, 19 nt, Artificial Sequence
  Description of Artificial Sequence: Synthetic oligonucleotide
  Antisense strand to SEQ ID NO: 227682
aacauugcaucacagauac

SEQ ID NO: 227684 - RNA, 19 nt, Artificial Sequence
  Description of Artificial Sequence: Synthetic oligonucleotide
  Sense strand starting at position 3787 of SEQ ID NO: 2932
ucaguagagcuccacugau

SEQ ID NO: 227685 - RNA, 19 nt, Artificial Sequence
  Description of Artificial Sequence: Synthetic oligonucleotide
  Antisense strand to SEQ ID NO: 227684
aucaguggagcucuacuga

SEQ ID NO: 227686 - RNA, 19 nt, Artificial Sequence
  Description of Artificial Sequence: Synthetic oligonucleotide
  Sense strand starting at position 3800 of SEQ ID NO: 2932
acugauaauuaguugugca

SEQ ID NO: 227687 - RNA, 19 nt, Artificial Sequence
  Description of Artificial Sequence: Synthetic oligonucleotide
  Antisense strand to SEQ ID NO: 227686
ugcacaacuaauuaucagu

SEQ ID NO: 227688 - RNA, 19 nt, Artificial Sequence
  Description of Artificial Sequence: Synthetic oligonucleotide
  Sense strand starting at position 3822 of SEQ ID NO: 2932
cugaacaaguuaccugaua

SEQ ID NO: 227689 - RNA, 19 nt, Artificial Sequence
  Description of Artificial Sequence: Synthetic oligonucleotide
  Antisense strand to SEQ ID NO: 227688
uaucagguaacuuguucag

SEQ ID NO: 227690 - RNA, 19 nt, Artificial Sequence
  Description of Artificial Sequence: Synthetic oligonucleotide
  Sense strand starting at position 3823 of SEQ ID NO: 2932
ugaacaaguuaccugauau

SEQ ID NO: 227691 - RNA, 19 nt, Artificial Sequence
  Description of Artificial Sequence: Synthetic oligonucleotide
  Antisense strand to SEQ ID NO: 227690
auaucagguaacuuguuca

SEQ ID NO: 227692 - RNA, 19 nt, Artificial Sequence
  Description of Artificial Sequence: Synthetic oligonucleotide
  Sense strand starting at position 27 of SEQ ID NO: 2931
ggaccaauggcccagaguu

SEQ ID NO: 227693 - RNA, 19 nt, Artificial Sequence
  Description of Artificial Sequence: Synthetic oligonucleotide
  Antisense strand to SEQ ID NO: 227692
aacucugggccauuggucc

SEQ ID NO: 227694 - RNA, 19 nt, Artificial Sequence
  Description of Artificial Sequence: Synthetic oligonucleotide
  Sense strand starting at position 29 of SEQ ID NO: 2931
accaauggcccagaguuua

SEQ ID NO: 227695 - RNA, 19 nt, Artificial Sequence
  Description of Artificial Sequence: Synthetic oligonucleotide
  Antisense strand to SEQ ID NO: 227694
uaaacucugggccauuggu

SEQ ID NO: 227696 - RNA, 19 nt, Artificial Sequence
  Description of Artificial Sequence: Synthetic oligonucleotide
  Sense strand starting at position 83 of SEQ ID NO: 2931
guaagacuacucugaccca

SEQ ID NO: 227697 - RNA, 19 nt, Artificial Sequence
  Description of Artificial Sequence: Synthetic oligonucleotide
  Antisense strand to SEQ ID NO: 227696
ugggucagaguagucuuac

SEQ ID NO: 227698 - RNA, 19 nt, Artificial Sequence
  Description of Artificial Sequence: Synthetic oligonucleotide
  Sense strand starting at position 231 of SEQ ID NO: 2931
agaaguaggucaucaaccu

SEQ ID NO: 227699 - RNA, 19 nt, Artificial Sequence
  Description of Artificial Sequence: Synthetic oligonucleotide
  Antisense strand to SEQ ID NO: 227698
agguugaugaccuacuucu

SEQ ID NO: 227700 - RNA, 19 nt, Artificial Sequence
  Description of Artificial Sequence: Synthetic oligonucleotide
  Sense strand starting at position 238 of SEQ ID NO: 2931
ggucaucaaccugagggua

SEQ ID NO: 227701 - RNA, 19 nt, Artificial Sequence
  Description of Artificial Sequence: Synthetic oligonucleotide
  Antisense strand to SEQ ID NO: 227700
uacccucagguugaugacc

SEQ ID NO: 227702 - RNA, 19 nt, Artificial Sequence
  Description of Artificial Sequence: Synthetic oligonucleotide
  Sense strand starting at position 312 of SEQ ID NO: 2931
ggucuugaaauguguaauu

SEQ ID NO: 227703 - RNA, 19 nt, Artificial Sequence
  Description of Artificial Sequence: Synthetic oligonucleotide
  Antisense strand to SEQ ID NO: 227702
aauuacacauuucaagacc

SEQ ID NO: 227704 - RNA, 19 nt, Artificial Sequence
  Description of Artificial Sequence: Synthetic oligonucleotide
  Sense strand starting at position 322 of SEQ ID NO: 2931
uguguaauuugcucuuagg

SEQ ID NO: 227705 - RNA, 19 nt, Artificial Sequence
  Description of Artificial Sequence: Synthetic oligonucleotide
  Antisense strand to SEQ ID NO: 227704
ccuaagagcaaauuacaca

SEQ ID NO: 227706 - RNA, 19 nt, Artificial Sequence
  Description of Artificial Sequence: Synthetic oligonucleotide
  Sense strand starting at position 439 of SEQ ID NO: 2931
ucagaacucugggucccaa

SEQ ID NO: 227707 - RNA, 19 nt, Artificial Sequence
  Description of Artificial Sequence: Synthetic oligonucleotide
  Antisense strand to SEQ ID NO: 227706
uugggacccagaguucuga

SEQ ID NO: 227708 - RNA, 19 nt, Artificial Sequence
  Description of Artificial Sequence: Synthetic oligonucleotide
  Sense strand starting at position 492 of SEQ ID NO: 2931
gccugagcuggcguuauaa

SEQ ID NO: 227709 - RNA, 19 nt, Artificial Sequence
  Description of Artificial Sequence: Synthetic oligonucleotide
  Antisense strand to SEQ ID NO: 227708
uuauaacgccagcucaggc

SEQ ID NO: 227710 - RNA, 19 nt, Artificial Sequence
  Description of Artificial Sequence: Synthetic oligonucleotide
  Sense strand starting at position 500 of SEQ ID NO: 2931
uggcguuauaauuaggagu

SEQ ID NO: 227711 - RNA, 19 nt, Artificial Sequence
  Description of Artificial Sequence: Synthetic oligonucleotide
  Antisense strand to SEQ ID NO: 227710
acuccuaauuauaacgcca

SEQ ID NO: 227712 - RNA, 19 nt, Artificial Sequence
  Description of Artificial Sequence: Synthetic oligonucleotide
  Sense strand starting at position 513 of SEQ ID NO: 2931
aggaguaagggaggucuua

SEQ ID NO: 227713 - RNA, 19 nt, Artificial Sequence
  Description of Artificial Sequence: Synthetic oligonucleotide
  Antisense strand to SEQ ID NO: 227712
uaagaccucccuuacuccu

SEQ ID NO: 227714 - RNA, 19 nt, Artificial Sequence
  Description of Artificial Sequence: Synthetic oligonucleotide
  Sense strand starting at position 693 of SEQ ID NO: 2931
gaacuuucucccgaggagu

SEQ ID NO: 227715 - RNA, 19 nt, Artificial Sequence
  Description of Artificial Sequence: Synthetic oligonucleotide
  Antisense strand to SEQ ID NO: 227714
acuccucgggagaaaguuc

SEQ ID NO: 227716 - RNA, 19 nt, Artificial Sequence
  Description of Artificial Sequence: Synthetic oligonucleotide
  Sense strand starting at position 742 of SEQ ID NO: 2931
ucugguugggccuacuaaa

SEQ ID NO: 227717 - RNA, 19 nt, Artificial Sequence
  Description of Artificial Sequence: Synthetic oligonucleotide
  Antisense strand to SEQ ID NO: 227716
uuuaguaggcccaaccaga

SEQ ID NO: 227718 - RNA, 19 nt, Artificial Sequence
  Description of Artificial Sequence: Synthetic oligonucleotide
  Sense strand starting at position 958 of SEQ ID NO: 2931
uugacauugggcugcagau

SEQ ID NO: 227719 - RNA, 19 nt, Artificial Sequence
  Description of Artificial Sequence: Synthetic oligonucleotide
  Antisense strand to SEQ ID NO: 227718
aucugcagcccaaugucaa

SEQ ID NO: 227720 - RNA, 19 nt, Artificial Sequence
  Description of Artificial Sequence: Synthetic oligonucleotide
  Sense strand starting at position 1177 of SEQ ID NO: 2931
ugguuaaaucccuaguucu

SEQ ID NO: 227721 - RNA, 19 nt, Artificial Sequence
  Description of Artificial Sequence: Synthetic oligonucleotide
  Antisense strand to SEQ ID NO: 227720
agaacuagggauuuaacca

SEQ ID NO: 227722 - RNA, 19 nt, Artificial Sequence
  Description of Artificial Sequence: Synthetic oligonucleotide
  Sense strand starting at position 1267 of SEQ ID NO: 2931
aucauauaucccuaggguu

SEQ ID NO: 227723 - RNA, 19 nt, Artificial Sequence
  Description of Artificial Sequence: Synthetic oligonucleotide
  Antisense strand to SEQ ID NO: 227722
aacccuagggauauaugau

SEQ ID NO: 227724 - RNA, 19 nt, Artificial Sequence
  Description of Artificial Sequence: Synthetic oligonucleotide
  Sense strand starting at position 2620 of SEQ ID NO: 2931
aacacaagcguccgaauuu

SEQ ID NO: 227725 - RNA, 19 nt, Artificial Sequence
  Description of Artificial Sequence: Synthetic oligonucleotide
  Antisense strand to SEQ ID NO: 227724
aaauucggacgcuuguguu

SEQ ID NO: 227726 - RNA, 19 nt, Artificial Sequence
  Description of Artificial Sequence: Synthetic oligonucleotide
  Sense strand starting at position 2664 of SEQ ID NO: 2931
ggacuuggcccuggcgaaa

SEQ ID NO: 227727 - RNA, 19 nt, Artificial Sequence
  Description of Artificial Sequence: Synthetic oligonucleotide
  Antisense strand to SEQ ID NO: 227726
uuucgccagggccaagucc

SEQ ID NO: 227728 - RNA, 19 nt, Artificial Sequence
  Description of Artificial Sequence: Synthetic oligonucleotide
  Sense strand starting at position 2688 of SEQ ID NO: 2931
cgaacuaucccucgggaga

SEQ ID NO: 227729 - RNA, 19 nt, Artificial Sequence
  Description of Artificial Sequence: Synthetic oligonucleotide
  Antisense strand to SEQ ID NO: 227728
ucucccgagggauaguucg

SEQ ID NO: 227730 - RNA, 19 nt, Artificial Sequence
  Description of Artificial Sequence: Synthetic oligonucleotide
  Sense strand starting at position 2689 of SEQ ID NO: 2931
gaacuaucccucgggagau

SEQ ID NO: 227731 - RNA, 19 nt, Artificial Sequence
  Description of Artificial Sequence: Synthetic oligonucleotide
  Antisense strand to SEQ ID NO: 227730
aucucccgagggauaguuc

SEQ ID NO: 227732 - RNA, 19 nt, Artificial Sequence
  Description of Artificial Sequence: Synthetic oligonucleotide
  Sense strand starting at position 2723 of SEQ ID NO: 2931
gcgaguugccaggcaacuu

SEQ ID NO: 227733 - RNA, 19 nt, Artificial Sequence
  Description of Artificial Sequence: Synthetic oligonucleotide
  Antisense strand to SEQ ID NO: 227732
aaguugccuggcaacucgc

SEQ ID NO: 227734 - RNA, 19 nt, Artificial Sequence
  Description of Artificial Sequence: Synthetic oligonucleotide
  Sense strand starting at position 2803 of SEQ ID NO: 2931
uguccucaggccuauaaca

SEQ ID NO: 227735 - RNA, 19 nt, Artificial Sequence
  Description of Artificial Sequence: Synthetic oligonucleotide
  Antisense strand to SEQ ID NO: 227734
uguuauaggccugaggaca

SEQ ID NO: 227736 - RNA, 19 nt, Artificial Sequence
  Description of Artificial Sequence: Synthetic oligonucleotide
  Sense strand starting at position 3021 of SEQ ID NO: 2931
ugguuuaucuugucugaca

SEQ ID NO: 227737 - RNA, 19 nt, Artificial Sequence
  Description of Artificial Sequence: Synthetic oligonucleotide
  Antisense strand to SEQ ID NO: 227736
ugucagacaagauaaacca

SEQ ID NO: 227738 - RNA, 19 nt, Artificial Sequence
  Description of Artificial Sequence: Synthetic oligonucleotide
  Sense strand starting at position 3022 of SEQ ID NO: 2931
gguuuaucuugucugacau

SEQ ID NO: 227739 - RNA, 19 nt, Artificial Sequence
  Description of Artificial Sequence: Synthetic oligonucleotide
  Antisense strand to SEQ ID NO: 227738
augucagacaagauaaacc

SEQ ID NO: 227740 - RNA, 19 nt, Artificial Sequence
  Description of Artificial Sequence: Synthetic oligonucleotide
  Sense strand starting at position 3284 of SEQ ID NO: 2931
cggcucauuucaguguguu

SEQ ID NO: 227741 - RNA, 19 nt, Artificial Sequence
  Description of Artificial Sequence: Synthetic oligonucleotide
  Antisense strand to SEQ ID NO: 227740
aacacacugaaaugagccg

SEQ ID NO: 227742 - RNA, 19 nt, Artificial Sequence
  Description of Artificial Sequence: Synthetic oligonucleotide
  Sense strand starting at position 3296 of SEQ ID NO: 2931
guguguuuagcugugccaa

SEQ ID NO: 227743 - RNA, 19 nt, Artificial Sequence
  Description of Artificial Sequence: Synthetic oligonucleotide
  Antisense strand to SEQ ID NO: 227742
uuggcacagcuaaacacac

SEQ ID NO: 227744 - RNA, 19 nt, Artificial Sequence
  Description of Artificial Sequence: Synthetic oligonucleotide
  Sense strand starting at position 3308 of SEQ ID NO: 2931
gugccaauuaucguuaugu

SEQ ID NO: 227745 - RNA, 19 nt, Artificial Sequence
  Description of Artificial Sequence: Synthetic oligonucleotide
  Antisense strand to SEQ ID NO: 227744
acauaacgauaauuggcac

SEQ ID NO: 227746 - RNA, 19 nt, Artificial Sequence
  Description of Artificial Sequence: Synthetic oligonucleotide
  Sense strand starting at position 3310 of SEQ ID NO: 2931
gccaauuaucguuauguau

SEQ ID NO: 227747 - RNA, 19 nt, Artificial Sequence
  Description of Artificial Sequence: Synthetic oligonucleotide
  Antisense strand to SEQ ID NO: 227746
auacauaacgauaauuggc

SEQ ID NO: 227748 - RNA, 19 nt, Artificial Sequence
  Description of Artificial Sequence: Synthetic oligonucleotide
  Sense strand starting at position 3325 of SEQ ID NO: 2931
guaucugugaugcaauguu

SEQ ID NO: 227749 - RNA, 19 nt, Artificial Sequence
  Description of Artificial Sequence: Synthetic oligonucleotide
  Antisense strand to SEQ ID NO: 227748
aacauugcaucacagauac

SEQ ID NO: 227750 - RNA, 19 nt, Artificial Sequence
  Description of Artificial Sequence: Synthetic oligonucleotide
  Sense strand starting at position 3382 of SEQ ID NO: 2931
ucaguagagcuccacugau

SEQ ID NO: 227751 - RNA, 19 nt, Artificial Sequence
  Description of Artificial Sequence: Synthetic oligonucleotide
  Antisense strand to SEQ ID NO: 227750
aucaguggagcucuacuga

SEQ ID NO: 227752 - RNA, 19 nt, Artificial Sequence
  Description of Artificial Sequence: Synthetic oligonucleotide
  Sense strand starting at position 3395 of SEQ ID NO: 2931
acugauaauuaguugugca

SEQ ID NO: 227753 - RNA, 19 nt, Artificial Sequence
  Description of Artificial Sequence: Synthetic oligonucleotide
  Antisense strand to SEQ ID NO: 227752
ugcacaacuaauuaucagu

SEQ ID NO: 227754 - RNA, 19 nt, Artificial Sequence
  Description of Artificial Sequence: Synthetic oligonucleotide
  Sense strand starting at position 3417 of SEQ ID NO: 2931
cugaacaaguuaccugaua

SEQ ID NO: 227755 - RNA, 19 nt, Artificial Sequence
  Description of Artificial Sequence: Synthetic oligonucleotide
  Antisense strand to SEQ ID NO: 227754
uaucagguaacuuguucag

SEQ ID NO: 227756 - RNA, 19 nt, Artificial Sequence
  Description of Artificial Sequence: Synthetic oligonucleotide
  Sense strand starting at position 3418 of SEQ ID NO: 2931
ugaacaaguuaccugauau

SEQ ID NO: 227757 - RNA, 19 nt, Artificial Sequence
  Description of Artificial Sequence: Synthetic oligonucleotide
  Antisense strand to SEQ ID NO: 227756
auaucagguaacuuguuca

SEQ ID NO: 227758 - RNA, 19 nt, Artificial Sequence
  Description of Artificial Sequence: Synthetic oligonucleotide
  Sense strand starting at position 3702 of SEQ ID NO: 2931
aggcaugaggccuguagaa

SEQ ID NO: 227759 - RNA, 19 nt, Artificial Sequence
  Description of Artificial Sequence: Synthetic oligonucleotide
  Antisense strand to SEQ ID NO: 227758
uucuacaggccucaugccu

SEQ ID NO: 227760 - RNA, 19 nt, Artificial Sequence
  Description of Artificial Sequence: Synthetic oligonucleotide
  Sense strand starting at position 3704 of SEQ ID NO: 2931
gcaugaggccuguagaaac

SEQ ID NO: 227761 - RNA, 19 nt, Artificial Sequence
  Description of Artificial Sequence: Synthetic oligonucleotide
  Antisense strand to SEQ ID NO: 227760
guuucuacaggccucaugc

SEQ ID NO: 227762 - RNA, 19 nt, Artificial Sequence
  Description of Artificial Sequence: Synthetic oligonucleotide
  Sense strand starting at position 3759 of SEQ ID NO: 2931
uggauucuuugaucugcaa

SEQ ID NO: 227763 - RNA, 19 nt, Artificial Sequence
  Description of Artificial Sequence: Synthetic oligonucleotide
  Antisense strand to SEQ ID NO: 227762
uugcagaucaaagaaucca

SEQ ID NO: 227764 - RNA, 19 nt, Artificial Sequence
  Description of Artificial Sequence: Synthetic oligonucleotide
  Sense strand starting at position 3762 of SEQ ID NO: 2931
auucuuugaucugcaaagu

SEQ ID NO: 227765 - RNA, 19 nt, Artificial Sequence
  Description of Artificial Sequence: Synthetic oligonucleotide
  Antisense strand to SEQ ID NO: 227764
acuuugcagaucaaagaau

SEQ ID NO: 227766 - RNA, 19 nt, Artificial Sequence
  Description of Artificial Sequence: Synthetic oligonucleotide
  Sense strand starting at position 3763 of SEQ ID NO: 2931
uucuuugaucugcaaaguc

SEQ ID NO: 227767 - RNA, 19 nt, Artificial Sequence
  Description of Artificial Sequence: Synthetic oligonucleotide
  Antisense strand to SEQ ID NO: 227766
gacuuugcagaucaaagaa

SEQ ID NO: 227768 - RNA, 19 nt, Artificial Sequence
  Description of Artificial Sequence: Synthetic oligonucleotide
  Sense strand starting at position 3805 of SEQ ID NO: 2931
ugaacagacuuagcuauua

SEQ ID NO: 227769 - RNA, 19 nt, Artificial Sequence
  Description of Artificial Sequence: Synthetic oligonucleotide
  Antisense strand to SEQ ID NO: 227768
uaauagcuaagucuguuca

SEQ ID NO: 227770 - RNA, 19 nt, Artificial Sequence
  Description of Artificial Sequence: Synthetic oligonucleotide
  Sense strand starting at position 3943 of SEQ ID NO: 2931
ggcugacuuguacacagua

SEQ ID NO: 227771 - RNA, 19 nt, Artificial Sequence
  Description of Artificial Sequence: Synthetic oligonucleotide
  Antisense strand to SEQ ID NO: 227770
uacuguguacaagucagcc

SEQ ID NO: 227772 - RNA, 19 nt, Artificial Sequence
  Description of Artificial Sequence: Synthetic oligonucleotide
  Sense strand starting at position 48 of SEQ ID NO: 2933
acagaauuguuagaguaga

SEQ ID NO: 227773 - RNA, 19 nt, Artificial Sequence
  Description of Artificial Sequence: Synthetic oligonucleotide
  Antisense strand to SEQ ID NO: 227772
ucuacucuaacaauucugu

SEQ ID NO: 227774 - RNA, 19 nt, Artificial Sequence
  Description of Artificial Sequence: Synthetic oligonucleotide
  Sense strand starting at position 388 of SEQ ID NO: 2933
uagcaagaucccuguggaa

SEQ ID NO: 227775 - RNA, 19 nt, Artificial Sequence
  Description of Artificial Sequence: Synthetic oligonucleotide
  Antisense strand to SEQ ID NO: 227774
uuccacagggaucuugcua

SEQ ID NO: 227776 - RNA, 19 nt, Artificial Sequence
  Description of Artificial Sequence: Synthetic oligonucleotide
  Sense strand starting at position 390 of SEQ ID NO: 2933
gcaagaucccuguggaagu

SEQ ID NO: 227777 - RNA, 19 nt, Artificial Sequence
  Description of Artificial Sequence: Synthetic oligonucleotide
  Antisense strand to SEQ ID NO: 227776
acuuccacagggaucuugc

SEQ ID NO: 227778 - RNA, 19 nt, Artificial Sequence
  Description of Artificial Sequence: Synthetic oligonucleotide
  Sense strand starting at position 401 of SEQ ID NO: 2933
guggaaguccauuauuacc

SEQ ID NO: 227779 - RNA, 19 nt, Artificial Sequence
  Description of Artificial Sequence: Synthetic oligonucleotide
  Antisense strand to SEQ ID NO: 227778
gguaauaauggacuuccac

SEQ ID NO: 227780 - RNA, 19 nt, Artificial Sequence
  Description of Artificial Sequence: Synthetic oligonucleotide
  Sense strand starting at position 403 of SEQ ID NO: 2933
ggaaguccauuauuaccau

SEQ ID NO: 227781 - RNA, 19 nt, Artificial Sequence
  Description of Artificial Sequence: Synthetic oligonucleotide
  Antisense strand to SEQ ID NO: 227780
augguaauaauggacuucc

SEQ ID NO: 227782 - RNA, 19 nt, Artificial Sequence
  Description of Artificial Sequence: Synthetic oligonucleotide
  Sense strand starting at position 447 of SEQ ID NO: 2933
uggguaggcuugagcuaga

SEQ ID NO: 227783 - RNA, 19 nt, Artificial Sequence
  Description of Artificial Sequence: Synthetic oligonucleotide
  Antisense strand to SEQ ID NO: 227782
ucuagcucaagccuaccca

SEQ ID NO: 227784 - RNA, 19 nt, Artificial Sequence
  Description of Artificial Sequence: Synthetic oligonucleotide
  Sense strand starting at position 450 of SEQ ID NO: 2933
guaggcuugagcuagauga

SEQ ID NO: 227785 - RNA, 19 nt, Artificial Sequence
  Description of Artificial Sequence: Synthetic oligonucleotide
  Antisense strand to SEQ ID NO: 227784
ucaucuagcucaagccuac

SEQ ID NO: 227786 - RNA, 19 nt, Artificial Sequence
  Description of Artificial Sequence: Synthetic oligonucleotide
  Sense strand starting at position 457 of SEQ ID NO: 2933
ugagcuagaugacccauaa

SEQ ID NO: 227787 - RNA, 19 nt, Artificial Sequence
  Description of Artificial Sequence: Synthetic oligonucleotide
  Antisense strand to SEQ ID NO: 227786
uuaugggucaucuagcuca

SEQ ID NO: 227788 - RNA, 19 nt, Artificial Sequence
  Description of Artificial Sequence: Synthetic oligonucleotide
  Sense strand starting at position 479 of SEQ ID NO: 2933
gucuucuuaggaugacauu

SEQ ID NO: 227789 - RNA, 19 nt, Artificial Sequence
  Description of Artificial Sequence: Synthetic oligonucleotide
  Antisense strand to SEQ ID NO: 227788
aaugucauccuaagaagac

SEQ ID NO: 227790 - RNA, 19 nt, Artificial Sequence
  Description of Artificial Sequence: Synthetic oligonucleotide
  Sense strand starting at position 503 of SEQ ID NO: 2933
uguucaaaucaguggagga

SEQ ID NO: 227791 - RNA, 19 nt, Artificial Sequence
  Description of Artificial Sequence: Synthetic oligonucleotide
  Antisense strand to SEQ ID NO: 227790
uccuccacugauuugaaca

SEQ ID NO: 227792 - RNA, 19 nt, Artificial Sequence
  Description of Artificial Sequence: Synthetic oligonucleotide
  Sense strand starting at position 526 of SEQ ID NO: 2933
guauaaggguuccagaaag

SEQ ID NO: 227793 - RNA, 19 nt, Artificial Sequence
  Description of Artificial Sequence: Synthetic oligonucleotide
  Antisense strand to SEQ ID NO: 227792
cuuucuggaacccuuauac

SEQ ID NO: 227794 - RNA, 19 nt, Artificial Sequence
  Description of Artificial Sequence: Synthetic oligonucleotide
  Sense strand starting at position 558 of SEQ ID NO: 2933
ggauuuggaucuggagcua

SEQ ID NO: 227795 - RNA, 19 nt, Artificial Sequence
  Description of Artificial Sequence: Synthetic oligonucleotide
  Antisense strand to SEQ ID NO: 227794
uagcuccagauccaaaucc

SEQ ID NO: 227796 - RNA, 19 nt, Artificial Sequence
  Description of Artificial Sequence: Synthetic oligonucleotide
  Sense strand starting at position 579 of SEQ ID NO: 2933
uguugcaggguuuacaaua

SEQ ID NO: 227797 - RNA, 19 nt, Artificial Sequence
  Description of Artificial Sequence: Synthetic oligonucleotide
  Antisense strand to SEQ ID NO: 227796
uauuguaaacccugcaaca

SEQ ID NO: 227798 - RNA, 19 nt, Artificial Sequence
  Description of Artificial Sequence: Synthetic oligonucleotide
  Sense strand starting at position 637 of SEQ ID NO: 2933
gggacaggcucaguuaaac

SEQ ID NO: 227799 - RNA, 19 nt, Artificial Sequence
  Description of Artificial Sequence: Synthetic oligonucleotide
  Antisense strand to SEQ ID NO: 227798
guuuaacugagccuguccc

SEQ ID NO: 227800 - RNA, 19 nt, Artificial Sequence
  Description of Artificial Sequence: Synthetic oligonucleotide
  Sense strand starting at position 677 of SEQ ID NO: 2933
ggcaaagacuuucucaagu

SEQ ID NO: 227801 - RNA, 19 nt, Artificial Sequence
  Description of Artificial Sequence: Synthetic oligonucleotide
  Antisense strand to SEQ ID NO: 227800
acuugagaaagucuuugcc

SEQ ID NO: 227802 - RNA, 19 nt, Artificial Sequence
  Description of Artificial Sequence: Synthetic oligonucleotide
  Sense strand starting at position 849 of SEQ ID NO: 2933
guaauuccacuuuacguuu

SEQ ID NO: 227803 - RNA, 19 nt, Artificial Sequence
  Description of Artificial Sequence: Synthetic oligonucleotide
  Antisense strand to SEQ ID NO: 227802
aaacguaaaguggaauuac

SEQ ID NO: 227804 - RNA, 19 nt, Artificial Sequence
  Description of Artificial Sequence: Synthetic oligonucleotide
  Sense strand starting at position 852 of SEQ ID NO: 2933
auuccacuuuacguuuaua

SEQ ID NO: 227805 - RNA, 19 nt, Artificial Sequence
  Description of Artificial Sequence: Synthetic oligonucleotide
  Antisense strand to SEQ ID NO: 227804
uauaaacguaaaguggaau

SEQ ID NO: 227806 - RNA, 19 nt, Artificial Sequence
  Description of Artificial Sequence: Synthetic oligonucleotide
  Sense strand starting at position 865 of SEQ ID NO: 2933
uuuauaucgcaauaguuag

SEQ ID NO: 227807 - RNA, 19 nt, Artificial Sequence
  Description of Artificial Sequence: Synthetic oligonucleotide
  Antisense strand to SEQ ID NO: 227806
cuaacuauugcgauauaaa

SEQ ID NO: 227808 - RNA, 19 nt, Artificial Sequence
  Description of Artificial Sequence: Synthetic oligonucleotide
  Sense strand starting at position 965 of SEQ ID NO: 2933
acuaaugugguuugagcaa

SEQ ID NO: 227809 - RNA, 19 nt, Artificial Sequence
  Description of Artificial Sequence: Synthetic oligonucleotide
  Antisense strand to SEQ ID NO: 227808
uugcucaaaccacauuagu

SEQ ID NO: 227810 - RNA, 19 nt, Artificial Sequence
  Description of Artificial Sequence: Synthetic oligonucleotide
  Sense strand starting at position 1033 of SEQ ID NO: 2933
uggugaaucugggacuaga

SEQ ID NO: 227811 - RNA, 19 nt, Artificial Sequence
  Description of Artificial Sequence: Synthetic oligonucleotide
  Antisense strand to SEQ ID NO: 227810
ucuagucccagauucacca

SEQ ID NO: 227812 - RNA, 19 nt, Artificial Sequence
  Description of Artificial Sequence: Synthetic oligonucleotide
  Sense strand starting at position 1084 of SEQ ID NO: 2933
uuacuagacuacuagaaga

SEQ ID NO: 227813 - RNA, 19 nt, Artificial Sequence
  Description of Artificial Sequence: Synthetic oligonucleotide
  Antisense strand to SEQ ID NO: 227812
ucuucuaguagucuaguaa

SEQ ID NO: 227814 - RNA, 19 nt, Artificial Sequence
  Description of Artificial Sequence: Synthetic oligonucleotide
  Sense strand starting at position 1190 of SEQ ID NO: 2933
cuguuugaugcugaaacua

SEQ ID NO: 227815 - RNA, 19 nt, Artificial Sequence
  Description of Artificial Sequence: Synthetic oligonucleotide
  Antisense strand to SEQ ID NO: 227814
uaguuucagcaucaaacag

SEQ ID NO: 227816 - RNA, 19 nt, Artificial Sequence
  Description of Artificial Sequence: Synthetic oligonucleotide
  Sense strand starting at position 1301 of SEQ ID NO: 2933
uaggaagagucucaggaag

SEQ ID NO: 227817 - RNA, 19 nt, Artificial Sequence
  Description of Artificial Sequence: Synthetic oligonucleotide
  Antisense strand to SEQ ID NO: 227816
cuuccugagacucuuccua

SEQ ID NO: 227818 - RNA, 19 nt, Artificial Sequence
  Description of Artificial Sequence: Synthetic oligonucleotide
  Sense strand starting at position 1658 of SEQ ID NO: 2933
ccgggacuccgguauccau

SEQ ID NO: 227819 - RNA, 19 nt, Artificial Sequence
  Description of Artificial Sequence: Synthetic oligonucleotide
  Antisense strand to SEQ ID NO: 227818
auggauaccggagucccgg

SEQ ID NO: 227820 - RNA, 19 nt, Artificial Sequence
  Description of Artificial Sequence: Synthetic oligonucleotide
  Sense strand starting at position 2191 of SEQ ID NO: 2933
ggacucgcugcuugguaaa

SEQ ID NO: 227821 - RNA, 19 nt, Artificial Sequence
  Description of Artificial Sequence: Synthetic oligonucleotide
  Antisense strand to SEQ ID NO: 227820
uuuaccaagcagcgagucc

SEQ ID NO: 227822 - RNA, 19 nt, Artificial Sequence
  Description of Artificial Sequence: Synthetic oligonucleotide
  Sense strand starting at position 2292 of SEQ ID NO: 2933
gccacuguacuauggcaua

SEQ ID NO: 227823 - RNA, 19 nt, Artificial Sequence
  Description of Artificial Sequence: Synthetic oligonucleotide
  Antisense strand to SEQ ID NO: 227822
uaugccauaguacaguggc

SEQ ID NO: 227824 - RNA, 19 nt, Artificial Sequence
  Description of Artificial Sequence: Synthetic oligonucleotide
  Sense strand starting at position 2372 of SEQ ID NO: 2933
cccugaguccagcaauugu

SEQ ID NO: 227825 - RNA, 19 nt, Artificial Sequence
  Description of Artificial Sequence: Synthetic oligonucleotide
  Antisense strand to SEQ ID NO: 227824
acaauugcuggacucaggg

SEQ ID NO: 227826 - RNA, 19 nt, Artificial Sequence
  Description of Artificial Sequence: Synthetic oligonucleotide
  Sense strand starting at position 2475 of SEQ ID NO: 2933
ucaugauuucugugucugu

SEQ ID NO: 227827 - RNA, 19 nt, Artificial Sequence
  Description of Artificial Sequence: Synthetic oligonucleotide
  Antisense strand to SEQ ID NO: 227826
acagacacagaaaucauga

SEQ ID NO: 227828 - RNA, 19 nt, Artificial Sequence
  Description of Artificial Sequence: Synthetic oligonucleotide
  Sense strand starting at position 2476 of SEQ ID NO: 2933
caugauuucugugucuguu

SEQ ID NO: 227829 - RNA, 19 nt, Artificial Sequence
  Description of Artificial Sequence: Synthetic oligonucleotide
  Antisense strand to SEQ ID NO: 227828
aacagacacagaaaucaug

SEQ ID NO: 227830 - RNA, 19 nt, Artificial Sequence
  Description of Artificial Sequence: Synthetic oligonucleotide
  Sense strand starting at position 2478 of SEQ ID NO: 2933
ugauuucugugucuguuau

SEQ ID NO: 227831 - RNA, 19 nt, Artificial Sequence
  Description of Artificial Sequence: Synthetic oligonucleotide
  Antisense strand to SEQ ID NO: 227830
auaacagacacagaaauca

SEQ ID NO: 227832 - RNA, 19 nt, Artificial Sequence
  Description of Artificial Sequence: Synthetic oligonucleotide
  Sense strand starting at position 2479 of SEQ ID NO: 2933
gauuucugugucuguuaug

SEQ ID NO: 227833 - RNA, 19 nt, Artificial Sequence
  Description of Artificial Sequence: Synthetic oligonucleotide
  Antisense strand to SEQ ID NO: 227832
cauaacagacacagaaauc

SEQ ID NO: 227834 - RNA, 19 nt, Artificial Sequence
  Description of Artificial Sequence: Synthetic oligonucleotide
  Sense strand starting at position 2565 of SEQ ID NO: 2933
uuuauaagacguggaacuu

SEQ ID NO: 227835 - RNA, 19 nt, Artificial Sequence
  Description of Artificial Sequence: Synthetic oligonucleotide
  Antisense strand to SEQ ID NO: 227834
aaguuccacgucuuauaaa

SEQ ID NO: 227836 - RNA, 19 nt, Artificial Sequence
  Description of Artificial Sequence: Synthetic oligonucleotide
  Sense strand starting at position 2571 of SEQ ID NO: 2933
agacguggaacuuaauguu

SEQ ID NO: 227837 - RNA, 19 nt, Artificial Sequence
  Description of Artificial Sequence: Synthetic oligonucleotide
  Antisense strand to SEQ ID NO: 227836
aacauuaaguuccacgucu

SEQ ID NO: 227838 - RNA, 19 nt, Artificial Sequence
  Description of Artificial Sequence: Synthetic oligonucleotide
  Sense strand starting at position 2675 of SEQ ID NO: 2933
uauugagauuaggcgaauu

SEQ ID NO: 227839 - RNA, 19 nt, Artificial Sequence
  Description of Artificial Sequence: Synthetic oligonucleotide
  Antisense strand to SEQ ID NO: 227838
aauucgccuaaucucaaua

SEQ ID NO: 227840 - RNA, 19 nt, Artificial Sequence
  Description of Artificial Sequence: Synthetic oligonucleotide
  Sense strand starting at position 2687 of SEQ ID NO: 2933
gcgaauuaaugacucugca

SEQ ID NO: 227841 - RNA, 19 nt, Artificial Sequence
  Description of Artificial Sequence: Synthetic oligonucleotide
  Antisense strand to SEQ ID NO: 227840
ugcagagucauuaauucgc

SEQ ID NO: 227842 - RNA, 19 nt, Artificial Sequence
  Description of Artificial Sequence: Synthetic oligonucleotide
  Sense strand starting at position 3047 of SEQ ID NO: 2933
cucuaugaaagcugagaga

SEQ ID NO: 227843 - RNA, 19 nt, Artificial Sequence
  Description of Artificial Sequence: Synthetic oligonucleotide
  Antisense strand to SEQ ID NO: 227842
ucucucagcuuucauagag

SEQ ID NO: 227844 - RNA, 19 nt, Artificial Sequence
  Description of Artificial Sequence: Synthetic oligonucleotide
  Sense strand starting at position 3201 of SEQ ID NO: 2933
ccagaagcuuuagcuaaga

SEQ ID NO: 227845 - RNA, 19 nt, Artificial Sequence
  Description of Artificial Sequence: Synthetic oligonucleotide
  Antisense strand to SEQ ID NO: 227844
ucuuagcuaaagcuucugg

SEQ ID NO: 227846 - RNA, 19 nt, Artificial Sequence
  Description of Artificial Sequence: Synthetic oligonucleotide
  Sense strand starting at position 3463 of SEQ ID NO: 2933
cuacucuacccgugcuaua

SEQ ID NO: 227847 - RNA, 19 nt, Artificial Sequence
  Description of Artificial Sequence: Synthetic oligonucleotide
  Antisense strand to SEQ ID NO: 227846
uauagcacggguagaguag

SEQ ID NO: 227848 - RNA, 19 nt, Artificial Sequence
  Description of Artificial Sequence: Synthetic oligonucleotide
  Sense strand starting at position 3468 of SEQ ID NO: 2933
cuacccgugcuauauaaau

SEQ ID NO: 227849 - RNA, 19 nt, Artificial Sequence
  Description of Artificial Sequence: Synthetic oligonucleotide
  Antisense strand to SEQ ID NO: 227848
auuuauauagcacggguag

SEQ ID NO: 227850 - RNA, 19 nt, Artificial Sequence
  Description of Artificial Sequence: Synthetic oligonucleotide
  Sense strand starting at position 3782 of SEQ ID NO: 2933
uagugaugucucugaugga

SEQ ID NO: 227851 - RNA, 19 nt, Artificial Sequence
  Description of Artificial Sequence: Synthetic oligonucleotide
  Antisense strand to SEQ ID NO: 227850
uccaucagagacaucacua

SEQ ID NO: 227852 - RNA, 19 nt, Artificial Sequence
  Description of Artificial Sequence: Synthetic oligonucleotide
  Sense strand starting at position 488 of SEQ ID NO: 2934
augugcuaacaaugguuga

SEQ ID NO: 227853 - RNA, 19 nt, Artificial Sequence
  Description of Artificial Sequence: Synthetic oligonucleotide
  Antisense strand to SEQ ID NO: 227852
ucaaccauuguuagcacau

SEQ ID NO: 227854 - RNA, 19 nt, Artificial Sequence
  Description of Artificial Sequence: Synthetic oligonucleotide
  Sense strand starting at position 489 of SEQ ID NO: 2934
ugugcuaacaaugguugaa

SEQ ID NO: 227855 - RNA, 19 nt, Artificial Sequence
  Description of Artificial Sequence: Synthetic oligonucleotide
  Antisense strand to SEQ ID NO: 227854
uucaaccauuguuagcaca

SEQ ID NO: 227856 - RNA, 19 nt, Artificial Sequence
  Description of Artificial Sequence: Synthetic oligonucleotide
  Sense strand starting at position 502 of SEQ ID NO: 2934
guugaaggcagguaauuaa

SEQ ID NO: 227857 - RNA, 19 nt, Artificial Sequence
  Description of Artificial Sequence: Synthetic oligonucleotide
  Antisense strand to SEQ ID NO: 227856
uuaauuaccugccuucaac

SEQ ID NO: 227858 - RNA, 19 nt, Artificial Sequence
  Description of Artificial Sequence: Synthetic oligonucleotide
  Sense strand starting at position 741 of SEQ ID NO: 2934
agacuaucuuuguugucuu

SEQ ID NO: 227859 - RNA, 19 nt, Artificial Sequence
  Description of Artificial Sequence: Synthetic oligonucleotide
  Antisense strand to SEQ ID NO: 227858
aagacaacaaagauagucu

SEQ ID NO: 227860 - RNA, 19 nt, Artificial Sequence
  Description of Artificial Sequence: Synthetic oligonucleotide
  Sense strand starting at position 946 of SEQ ID NO: 2934
gaacguguaauguaacaga

SEQ ID NO: 227861 - RNA, 19 nt, Artificial Sequence
  Description of Artificial Sequence: Synthetic oligonucleotide
  Antisense strand to SEQ ID NO: 227860
ucuguuacauuacacguuc

SEQ ID NO: 227862 - RNA, 19 nt, Artificial Sequence
  Description of Artificial Sequence: Synthetic oligonucleotide
  Sense strand starting at position 1054 of SEQ ID NO: 2934
agguaaguaacucgcauau

SEQ ID NO: 227863 - RNA, 19 nt, Artificial Sequence
  Description of Artificial Sequence: Synthetic oligonucleotide
  Antisense strand to SEQ ID NO: 227862
auaugcgaguuacuuaccu

SEQ ID NO: 227864 - RNA, 19 nt, Artificial Sequence
  Description of Artificial Sequence: Synthetic oligonucleotide
  Sense strand starting at position 1096 of SEQ ID NO: 2934
cauugcaggugguuagaaa

SEQ ID NO: 227865 - RNA, 19 nt, Artificial Sequence
  Description of Artificial Sequence: Synthetic oligonucleotide
  Antisense strand to SEQ ID NO: 227864
uuucuaaccaccugcaaug

SEQ ID NO: 227866 - RNA, 19 nt, Artificial Sequence
  Description of Artificial Sequence: Synthetic oligonucleotide
  Sense strand starting at position 1329 of SEQ ID NO: 2934
accugaaaccgcgaguaga

SEQ ID NO: 227867 - RNA, 19 nt, Artificial Sequence
  Description of Artificial Sequence: Synthetic oligonucleotide
  Antisense strand to SEQ ID NO: 227866
ucuacucgcgguuucaggu

SEQ ID NO: 227868 - RNA, 19 nt, Artificial Sequence
  Description of Artificial Sequence: Synthetic oligonucleotide
  Sense strand starting at position 1398 of SEQ ID NO: 2934
acagguauaagaggcauaa

SEQ ID NO: 227869 - RNA, 19 nt, Artificial Sequence
  Description of Artificial Sequence: Synthetic oligonucleotide
  Antisense strand to SEQ ID NO: 227868
uuaugccucuuauaccugu

SEQ ID NO: 227870 - RNA, 19 nt, Artificial Sequence
  Description of Artificial Sequence: Synthetic oligonucleotide
  Sense strand starting at position 2179 of SEQ ID NO: 2934
ggacaaugaagcugucaau

SEQ ID NO: 227871 - RNA, 19 nt, Artificial Sequence
  Description of Artificial Sequence: Synthetic oligonucleotide
  Antisense strand to SEQ ID NO: 227870
auugacagcuucauugucc

SEQ ID NO: 227872 - RNA, 19 nt, Artificial Sequence
  Description of Artificial Sequence: Synthetic oligonucleotide
  Sense strand starting at position 2191 of SEQ ID NO: 2934
ugucaauuucgccaccuca

SEQ ID NO: 227873 - RNA, 19 nt, Artificial Sequence
  Description of Artificial Sequence: Synthetic oligonucleotide
  Antisense strand to SEQ ID NO: 227872
ugagguggcgaaauugaca

SEQ ID NO: 227874 - RNA, 19 nt, Artificial Sequence
  Description of Artificial Sequence: Synthetic oligonucleotide
  Sense strand starting at position 2256 of SEQ ID NO: 2934
ugggcuucccuuuauaucu

SEQ ID NO: 227875 - RNA, 19 nt, Artificial Sequence
  Description of Artificial Sequence: Synthetic oligonucleotide
  Antisense strand to SEQ ID NO: 227874
agauauaaagggaagccca

SEQ ID NO: 227876 - RNA, 19 nt, Artificial Sequence
  Description of Artificial Sequence: Synthetic oligonucleotide
  Sense strand starting at position 2277 of SEQ ID NO: 2934
guauucucagccgcacgaa

SEQ ID NO: 227877 - RNA, 19 nt, Artificial Sequence
  Description of Artificial Sequence: Synthetic oligonucleotide
  Antisense strand to SEQ ID NO: 227876
uucgugcggcugagaauac

SEQ ID NO: 227878 - RNA, 19 nt, Artificial Sequence
  Description of Artificial Sequence: Synthetic oligonucleotide
  Sense strand starting at position 2289 of SEQ ID NO: 2934
gcacgaaguucaguaaaga

SEQ ID NO: 227879 - RNA, 19 nt, Artificial Sequence
  Description of Artificial Sequence: Synthetic oligonucleotide
  Antisense strand to SEQ ID NO: 227878
ucuuuacugaacuucgugc

SEQ ID NO: 227880 - RNA, 19 nt, Artificial Sequence
  Description of Artificial Sequence: Synthetic oligonucleotide
  Sense strand starting at position 2369 of SEQ ID NO: 2934
agggaccucucaguaacau

SEQ ID NO: 227881 - RNA, 19 nt, Artificial Sequence
  Description of Artificial Sequence: Synthetic oligonucleotide
  Antisense strand to SEQ ID NO: 227880
auguuacugagaggucccu

SEQ ID NO: 227882 - RNA, 19 nt, Artificial Sequence
  Description of Artificial Sequence: Synthetic oligonucleotide
  Sense strand starting at position 2439 of SEQ ID NO: 2934
gccgaucaauucccuaaca

SEQ ID NO: 227883 - RNA, 19 nt, Artificial Sequence
  Description of Artificial Sequence: Synthetic oligonucleotide
  Antisense strand to SEQ ID NO: 227882
uguuagggaauugaucggc

SEQ ID NO: 227884 - RNA, 19 nt, Artificial Sequence
  Description of Artificial Sequence: Synthetic oligonucleotide
  Sense strand starting at position 2505 of SEQ ID NO: 2934
cuguguuucgaagagucaa

SEQ ID NO: 227885 - RNA, 19 nt, Artificial Sequence
  Description of Artificial Sequence: Synthetic oligonucleotide
  Antisense strand to SEQ ID NO: 227884
uugacucuucgaaacacag

SEQ ID NO: 227886 - RNA, 19 nt, Artificial Sequence
  Description of Artificial Sequence: Synthetic oligonucleotide
  Sense strand starting at position 2561 of SEQ ID NO: 2934
cuggaucuggccggugaua

SEQ ID NO: 227887 - RNA, 19 nt, Artificial Sequence
  Description of Artificial Sequence: Synthetic oligonucleotide
  Antisense strand to SEQ ID NO: 227886
uaucaccggccagauccag

SEQ ID NO: 227888 - RNA, 19 nt, Artificial Sequence
  Description of Artificial Sequence: Synthetic oligonucleotide
  Sense strand starting at position 2563 of SEQ ID NO: 2934
ggaucuggccggugauauu

SEQ ID NO: 227889 - RNA, 19 nt, Artificial Sequence
  Description of Artificial Sequence: Synthetic oligonucleotide
  Antisense strand to SEQ ID NO: 227888
aauaucaccggccagaucc

SEQ ID NO: 227890 - RNA, 19 nt, Artificial Sequence
  Description of Artificial Sequence: Synthetic oligonucleotide
  Sense strand starting at position 2600 of SEQ ID NO: 2934
aaaguuaauugugcuguau

SEQ ID NO: 227891 - RNA, 19 nt, Artificial Sequence
  Description of Artificial Sequence: Synthetic oligonucleotide
  Antisense strand to SEQ ID NO: 227890
auacagcacaauuaacuuu

SEQ ID NO: 227892 - RNA, 19 nt, Artificial Sequence
  Description of Artificial Sequence: Synthetic oligonucleotide
  Sense strand starting at position 2620 of SEQ ID NO: 2934
uguuuaugccucgacuuua

SEQ ID NO: 227893 - RNA, 19 nt, Artificial Sequence
  Description of Artificial Sequence: Synthetic oligonucleotide
  Antisense strand to SEQ ID NO: 227892
uaaagucgaggcauaaaca

SEQ ID NO: 227894 - RNA, 19 nt, Artificial Sequence
  Description of Artificial Sequence: Synthetic oligonucleotide
  Sense strand starting at position 2625 of SEQ ID NO: 2934
augccucgacuuuaggaaa

SEQ ID NO: 227895 - RNA, 19 nt, Artificial Sequence
  Description of Artificial Sequence: Synthetic oligonucleotide
  Antisense strand to SEQ ID NO: 227894
uuuccuaaagucgaggcau

SEQ ID NO: 227896 - RNA, 19 nt, Artificial Sequence
  Description of Artificial Sequence: Synthetic oligonucleotide
  Sense strand starting at position 2732 of SEQ ID NO: 2934
gagcacagcugucucauuu

SEQ ID NO: 227897 - RNA, 19 nt, Artificial Sequence
  Description of Artificial Sequence: Synthetic oligonucleotide
  Antisense strand to SEQ ID NO: 227896
aaaugagacagcugugcuc

SEQ ID NO: 227898 - RNA, 19 nt, Artificial Sequence
  Description of Artificial Sequence: Synthetic oligonucleotide
  Sense strand starting at position 2811 of SEQ ID NO: 2934
cagccugcgcacuaagaaa

SEQ ID NO: 227899 - RNA, 19 nt, Artificial Sequence
  Description of Artificial Sequence: Synthetic oligonucleotide
  Antisense strand to SEQ ID NO: 227898
uuucuuagugcgcaggcug

SEQ ID NO: 227900 - RNA, 19 nt, Artificial Sequence
  Description of Artificial Sequence: Synthetic oligonucleotide
  Sense strand starting at position 2867 of SEQ ID NO: 2934
gccguguacccggaggaaa

SEQ ID NO: 227901 - RNA, 19 nt, Artificial Sequence
  Description of Artificial Sequence: Synthetic oligonucleotide
  Antisense strand to SEQ ID NO: 227900
uuuccuccggguacacggc

SEQ ID NO: 227902 - RNA, 19 nt, Artificial Sequence
  Description of Artificial Sequence: Synthetic oligonucleotide
  Sense strand starting at position 2983 of SEQ ID NO: 2934
aggugauaucgcgcgaggu

SEQ ID NO: 227903 - RNA, 19 nt, Artificial Sequence
  Description of Artificial Sequence: Synthetic oligonucleotide
  Antisense strand to SEQ ID NO: 227902
accucgcgcgauaucaccu

SEQ ID NO: 227904 - RNA, 19 nt, Artificial Sequence
  Description of Artificial Sequence: Synthetic oligonucleotide
  Sense strand starting at position 3173 of SEQ ID NO: 2934
ccgggugcuggugaacauu

SEQ ID NO: 227905 - RNA, 19 nt, Artificial Sequence
  Description of Artificial Sequence: Synthetic oligonucleotide
  Antisense strand to SEQ ID NO: 227904
aauguucaccagcacccgg

SEQ ID NO: 227906 - RNA, 19 nt, Artificial Sequence
  Description of Artificial Sequence: Synthetic oligonucleotide
  Sense strand starting at position 3405 of SEQ ID NO: 2934
ggcggauaccuguaagggu

SEQ ID NO: 227907 - RNA, 19 nt, Artificial Sequence
  Description of Artificial Sequence: Synthetic oligonucleotide
  Antisense strand to SEQ ID NO: 227906
acccuuacagguauccgcc

SEQ ID NO: 227908 - RNA, 19 nt, Artificial Sequence
  Description of Artificial Sequence: Synthetic oligonucleotide
  Sense strand starting at position 3429 of SEQ ID NO: 2934
ggaaaugacuagggaauuu

SEQ ID NO: 227909 - RNA, 19 nt, Artificial Sequence
  Description of Artificial Sequence: Synthetic oligonucleotide
  Antisense strand to SEQ ID NO: 227908
aaauucccuagucauuucc

SEQ ID NO: 227910 - RNA, 19 nt, Artificial Sequence
  Description of Artificial Sequence: Synthetic oligonucleotide
  Sense strand starting at position 3639 of SEQ ID NO: 2934
auuaaauucugggcucauu

SEQ ID NO: 227911 - RNA, 19 nt, Artificial Sequence
  Description of Artificial Sequence: Synthetic oligonucleotide
  Antisense strand to SEQ ID NO: 227910
aaugagcccagaauuuaau

SEQ ID NO: 227912 - RNA, 19 nt, Artificial Sequence
  Description of Artificial Sequence: Synthetic oligonucleotide
  Sense strand starting at position 3649 of SEQ ID NO: 2934
gggcucauucuauaaaguu

SEQ ID NO: 227913 - RNA, 19 nt, Artificial Sequence
  Description of Artificial Sequence: Synthetic oligonucleotide
  Antisense strand to SEQ ID NO: 227912
aacuuuauagaaugagccc

SEQ ID NO: 227914 - RNA, 19 nt, Artificial Sequence
  Description of Artificial Sequence: Synthetic oligonucleotide
  Sense strand starting at position 3687 of SEQ ID NO: 2934
ugcuuaucccuggagcaca

SEQ ID NO: 227915 - RNA, 19 nt, Artificial Sequence
  Description of Artificial Sequence: Synthetic oligonucleotide
  Antisense strand to SEQ ID NO: 227914
ugugcuccagggauaagca

SEQ ID NO: 227916 - RNA, 19 nt, Artificial Sequence
  Description of Artificial Sequence: Synthetic oligonucleotide
  Sense strand starting at position 3805 of SEQ ID NO: 2934
uggaaaucuuugcuguguu

SEQ ID NO: 227917 - RNA, 19 nt, Artificial Sequence
  Description of Artificial Sequence: Synthetic oligonucleotide
  Antisense strand to SEQ ID NO: 227916
aacacagcaaagauuucca

SEQ ID NO: 227918 - RNA, 19 nt, Artificial Sequence
  Description of Artificial Sequence: Synthetic oligonucleotide
  Sense strand starting at position 3808 of SEQ ID NO: 2934
aaaucuuugcuguguuuga

SEQ ID NO: 227919 - RNA, 19 nt, Artificial Sequence
  Description of Artificial Sequence: Synthetic oligonucleotide
  Antisense strand to SEQ ID NO: 227918
ucaaacacagcaaagauuu

SEQ ID NO: 227920 - RNA, 19 nt, Artificial Sequence
  Description of Artificial Sequence: Synthetic oligonucleotide
  Sense strand starting at position 3809 of SEQ ID NO: 2934
aaucuuugcuguguuugaa

SEQ ID NO: 227921 - RNA, 19 nt, Artificial Sequence
  Description of Artificial Sequence: Synthetic oligonucleotide
  Antisense strand to SEQ ID NO: 227920
uucaaacacagcaaagauu

SEQ ID NO: 227922 - RNA, 19 nt, Artificial Sequence
  Description of Artificial Sequence: Synthetic oligonucleotide
  Sense strand starting at position 3812 of SEQ ID NO: 2934
cuuugcuguguuugaaaua

SEQ ID NO: 227923 - RNA, 19 nt, Artificial Sequence
  Description of Artificial Sequence: Synthetic oligonucleotide
  Antisense strand to SEQ ID NO: 227922
uauuucaaacacagcaaag

SEQ ID NO: 227924 - RNA, 19 nt, Artificial Sequence
  Description of Artificial Sequence: Synthetic oligonucleotide
  Sense strand starting at position 3856 of SEQ ID NO: 2934
ucacgaggagcuuacaauu

SEQ ID NO: 227925 - RNA, 19 nt, Artificial Sequence
  Description of Artificial Sequence: Synthetic oligonucleotide
  Antisense strand to SEQ ID NO: 227924
aauuguaagcuccucguga

SEQ ID NO: 227926 - RNA, 19 nt, Artificial Sequence
  Description of Artificial Sequence: Synthetic oligonucleotide
  Sense strand starting at position 3900 of SEQ ID NO: 2934
gaaacuuaacaguguagua

SEQ ID NO: 227927 - RNA, 19 nt, Artificial Sequence
  Description of Artificial Sequence: Synthetic oligonucleotide
  Antisense strand to SEQ ID NO: 227926
uacuacacuguuaaguuuc

SEQ ID NO: 227928 - RNA, 19 nt, Artificial Sequence
  Description of Artificial Sequence: Synthetic oligonucleotide
  Sense strand starting at position 3978 of SEQ ID NO: 2934
ugcuguguucuauggagau

SEQ ID NO: 227929 - RNA, 19 nt, Artificial Sequence
  Description of Artificial Sequence: Synthetic oligonucleotide
  Antisense strand to SEQ ID NO: 227928
aucuccauagaacacagca

SEQ ID NO: 227930 - RNA, 19 nt, Artificial Sequence
  Description of Artificial Sequence: Synthetic oligonucleotide
  Sense strand starting at position 3980 of SEQ ID NO: 2934
cuguguucuauggagauac

SEQ ID NO: 227931 - RNA, 19 nt, Artificial Sequence
  Description of Artificial Sequence: Synthetic oligonucleotide
  Antisense strand to SEQ ID NO: 227930
guaucuccauagaacacag

SEQ ID NO: 227932 - RNA, 19 nt, Artificial Sequence
  Description of Artificial Sequence: Synthetic oligonucleotide
  Sense strand starting at position 293 of SEQ ID NO: 2935
uguuucugacaauggaguu

SEQ ID NO: 227933 - RNA, 19 nt, Artificial Sequence
  Description of Artificial Sequence: Synthetic oligonucleotide
  Antisense strand to SEQ ID NO: 227932
aacuccauugucagaaaca

SEQ ID NO: 227934 - RNA, 19 nt, Artificial Sequence
  Description of Artificial Sequence: Synthetic oligonucleotide
  Sense strand starting at position 294 of SEQ ID NO: 2935
guuucugacaauggaguua

SEQ ID NO: 227935 - RNA, 19 nt, Artificial Sequence
  Description of Artificial Sequence: Synthetic oligonucleotide
  Antisense strand to SEQ ID NO: 227934
uaacuccauugucagaaac

SEQ ID NO: 227936 - RNA, 19 nt, Artificial Sequence
  Description of Artificial Sequence: Synthetic oligonucleotide
  Sense strand starting at position 364 of SEQ ID NO: 2935
guggguggucuuagcugaa

SEQ ID NO: 227937 - RNA, 19 nt, Artificial Sequence
  Description of Artificial Sequence: Synthetic oligonucleotide
  Antisense strand to SEQ ID NO: 227936
uucagcuaagaccacccac

SEQ ID NO: 227938 - RNA, 19 nt, Artificial Sequence
  Description of Artificial Sequence: Synthetic oligonucleotide
  Sense strand starting at position 445 of SEQ ID NO: 2935
gguuccaacaaugguagaa

SEQ ID NO: 227939 - RNA, 19 nt, Artificial Sequence
  Description of Artificial Sequence: Synthetic oligonucleotide
  Antisense strand to SEQ ID NO: 227938
uucuaccauuguuggaacc

SEQ ID NO: 227940 - RNA, 19 nt, Artificial Sequence
  Description of Artificial Sequence: Synthetic oligonucleotide
  Sense strand starting at position 565 of SEQ ID NO: 2935
gacauugcuucccucagga

SEQ ID NO: 227941 - RNA, 19 nt, Artificial Sequence
  Description of Artificial Sequence: Synthetic oligonucleotide
  Antisense strand to SEQ ID NO: 227940
uccugagggaagcaauguc

SEQ ID NO: 227942 - RNA, 19 nt, Artificial Sequence
  Description of Artificial Sequence: Synthetic oligonucleotide
  Sense strand starting at position 702 of SEQ ID NO: 2935
ucacaacuuugggugacua

SEQ ID NO: 227943 - RNA, 19 nt, Artificial Sequence
  Description of Artificial Sequence: Synthetic oligonucleotide
  Antisense strand to SEQ ID NO: 227942
uagucacccaaaguuguga

SEQ ID NO: 227944 - RNA, 19 nt, Artificial Sequence
  Description of Artificial Sequence: Synthetic oligonucleotide
  Sense strand starting at position 703 of SEQ ID NO: 2935
cacaacuuugggugacuaa

SEQ ID NO: 227945 - RNA, 19 nt, Artificial Sequence
  Description of Artificial Sequence: Synthetic oligonucleotide
  Antisense strand to SEQ ID NO: 227944
uuagucacccaaaguugug

SEQ ID NO: 227946 - RNA, 19 nt, Artificial Sequence
  Description of Artificial Sequence: Synthetic oligonucleotide
  Sense strand starting at position 789 of SEQ ID NO: 2935
ggaugcuuugauuauuaac

SEQ ID NO: 227947 - RNA, 19 nt, Artificial Sequence
  Description of Artificial Sequence: Synthetic oligonucleotide
  Antisense strand to SEQ ID NO: 227946
guuaauaaucaaagcaucc

SEQ ID NO: 227948 - RNA, 19 nt, Artificial Sequence
  Description of Artificial Sequence: Synthetic oligonucleotide
  Sense strand starting at position 842 of SEQ ID NO: 2935
ugacauguggcucacugua

SEQ ID NO: 227949 - RNA, 19 nt, Artificial Sequence
  Description of Artificial Sequence: Synthetic oligonucleotide
  Antisense strand to SEQ ID NO: 227948
uacagugagccacauguca

SEQ ID NO: 227950 - RNA, 19 nt, Artificial Sequence
  Description of Artificial Sequence: Synthetic oligonucleotide
  Sense strand starting at position 1158 of SEQ ID NO: 2935
aguuacuaucuguagcaga

SEQ ID NO: 227951 - RNA, 19 nt, Artificial Sequence
  Description of Artificial Sequence: Synthetic oligonucleotide
  Antisense strand to SEQ ID NO: 227950
ucugcuacagauaguaacu

SEQ ID NO: 227952 - RNA, 19 nt, Artificial Sequence
  Description of Artificial Sequence: Synthetic oligonucleotide
  Sense strand starting at position 1219 of SEQ ID NO: 2935
aggcaaauuccugauaguu

SEQ ID NO: 227953 - RNA, 19 nt, Artificial Sequence
  Description of Artificial Sequence: Synthetic oligonucleotide
  Antisense strand to SEQ ID NO: 227952
aacuaucaggaauuugccu

SEQ ID NO: 227954 - RNA, 19 nt, Artificial Sequence
  Description of Artificial Sequence: Synthetic oligonucleotide
  Sense strand starting at position 1334 of SEQ ID NO: 2935
aacugcuugcuggagguua

SEQ ID NO: 227955 - RNA, 19 nt, Artificial Sequence
  Description of Artificial Sequence: Synthetic oligonucleotide
  Antisense strand to SEQ ID NO: 227954
uaaccuccagcaagcaguu

SEQ ID NO: 227956 - RNA, 19 nt, Artificial Sequence
  Description of Artificial Sequence: Synthetic oligonucleotide
  Sense strand starting at position 1346 of SEQ ID NO: 2935
gagguuagauucucugcau

SEQ ID NO: 227957 - RNA, 19 nt, Artificial Sequence
  Description of Artificial Sequence: Synthetic oligonucleotide
  Antisense strand to SEQ ID NO: 227956
augcagagaaucuaaccuc

SEQ ID NO: 227958 - RNA, 19 nt, Artificial Sequence
  Description of Artificial Sequence: Synthetic oligonucleotide
  Sense strand starting at position 1347 of SEQ ID NO: 2935
agguuagauucucugcaua

SEQ ID NO: 227959 - RNA, 19 nt, Artificial Sequence
  Description of Artificial Sequence: Synthetic oligonucleotide
  Antisense strand to SEQ ID NO: 227958
uaugcagagaaucuaaccu

SEQ ID NO: 227960 - RNA, 19 nt, Artificial Sequence
  Description of Artificial Sequence: Synthetic oligonucleotide
  Sense strand starting at position 1349 of SEQ ID NO: 2935
guuagauucucugcauagg

SEQ ID NO: 227961 - RNA, 19 nt, Artificial Sequence
  Description of Artificial Sequence: Synthetic oligonucleotide
  Antisense strand to SEQ ID NO: 227960
ccuaugcagagaaucuaac

SEQ ID NO: 227962 - RNA, 19 nt, Artificial Sequence
  Description of Artificial Sequence: Synthetic oligonucleotide
  Sense strand starting at position 1350 of SEQ ID NO: 2935
uuagauucucugcauagga

SEQ ID NO: 227963 - RNA, 19 nt, Artificial Sequence
  Description of Artificial Sequence: Synthetic oligonucleotide
  Antisense strand to SEQ ID NO: 227962
uccuaugcagagaaucuaa

SEQ ID NO: 227964 - RNA, 19 nt, Artificial Sequence
  Description of Artificial Sequence: Synthetic oligonucleotide
  Sense strand starting at position 1872 of SEQ ID NO: 2935
aaguguuaacgcguucuca

SEQ ID NO: 227965 - RNA, 19 nt, Artificial Sequence
  Description of Artificial Sequence: Synthetic oligonucleotide
  Antisense strand to SEQ ID NO: 227964
ugagaacgcguuaacacuu

SEQ ID NO: 227966 - RNA, 19 nt, Artificial Sequence
  Description of Artificial Sequence: Synthetic oligonucleotide
  Sense strand starting at position 1873 of SEQ ID NO: 2935
aguguuaacgcguucucac

SEQ ID NO: 227967 - RNA, 19 nt, Artificial Sequence
  Description of Artificial Sequence: Synthetic oligonucleotide
  Antisense strand to SEQ ID NO: 227966
gugagaacgcguuaacacu

SEQ ID NO: 227968 - RNA, 19 nt, Artificial Sequence
  Description of Artificial Sequence: Synthetic oligonucleotide
  Sense strand starting at position 2047 of SEQ ID NO: 2935
ggucaaucaucaccugaga

SEQ ID NO: 227969 - RNA, 19 nt, Artificial Sequence
  Description of Artificial Sequence: Synthetic oligonucleotide
  Antisense strand to SEQ ID NO: 227968
ucucaggugaugauugacc

SEQ ID NO: 227970 - RNA, 19 nt, Artificial Sequence
  Description of Artificial Sequence: Synthetic oligonucleotide
  Sense strand starting at position 2267 of SEQ ID NO: 2935
caaaguuuacuugggacua

SEQ ID NO: 227971 - RNA, 19 nt, Artificial Sequence
  Description of Artificial Sequence: Synthetic oligonucleotide
  Antisense strand to SEQ ID NO: 227970
uagucccaaguaaacuuug

SEQ ID NO: 227972 - RNA, 19 nt, Artificial Sequence
  Description of Artificial Sequence: Synthetic oligonucleotide
  Sense strand starting at position 2302 of SEQ ID NO: 2935
cgaauccuuucuccgaaga

SEQ ID NO: 227973 - RNA, 19 nt, Artificial Sequence
  Description of Artificial Sequence: Synthetic oligonucleotide
  Antisense strand to SEQ ID NO: 227972
ucuucggagaaaggauucg

SEQ ID NO: 227974 - RNA, 19 nt, Artificial Sequence
  Description of Artificial Sequence: Synthetic oligonucleotide
  Sense strand starting at position 2307 of SEQ ID NO: 2935
ccuuucuccgaagauguca

SEQ ID NO: 227975 - RNA, 19 nt, Artificial Sequence
  Description of Artificial Sequence: Synthetic oligonucleotide
  Antisense strand to SEQ ID NO: 227974
ugacaucuucggagaaagg

SEQ ID NO: 227976 - RNA, 19 nt, Artificial Sequence
  Description of Artificial Sequence: Synthetic oligonucleotide
  Sense strand starting at position 2584 of SEQ ID NO: 2935
cgggaauaguagucccaag

SEQ ID NO: 227977 - RNA, 19 nt, Artificial Sequence
  Description of Artificial Sequence: Synthetic oligonucleotide
  Antisense strand to SEQ ID NO: 227976
cuugggacuacuauucccg

SEQ ID NO: 227978 - RNA, 19 nt, Artificial Sequence
  Description of Artificial Sequence: Synthetic oligonucleotide
  Sense strand starting at position 2667 of SEQ ID NO: 2935
gcucguggaacugauaauc

SEQ ID NO: 227979 - RNA, 19 nt, Artificial Sequence
  Description of Artificial Sequence: Synthetic oligonucleotide
  Antisense strand to SEQ ID NO: 227978
gauuaucaguuccacgagc

SEQ ID NO: 227980 - RNA, 19 nt, Artificial Sequence
  Description of Artificial Sequence: Synthetic oligonucleotide
  Sense strand starting at position 2689 of SEQ ID NO: 2935
gugacucauuccuccacuu

SEQ ID NO: 227981 - RNA, 19 nt, Artificial Sequence
  Description of Artificial Sequence: Synthetic oligonucleotide
  Antisense strand to SEQ ID NO: 227980
aaguggaggaaugagucac

SEQ ID NO: 227982 - RNA, 19 nt, Artificial Sequence
  Description of Artificial Sequence: Synthetic oligonucleotide
  Sense strand starting at position 2773 of SEQ ID NO: 2935
cagaaaugcguaggaaauu

SEQ ID NO: 227983 - RNA, 19 nt, Artificial Sequence
  Description of Artificial Sequence: Synthetic oligonucleotide
  Antisense strand to SEQ ID NO: 227982
aauuuccuacgcauuucug

SEQ ID NO: 227984 - RNA, 19 nt, Artificial Sequence
  Description of Artificial Sequence: Synthetic oligonucleotide
  Sense strand starting at position 2846 of SEQ ID NO: 2935
auugaacccuaguucugaa

SEQ ID NO: 227985 - RNA, 19 nt, Artificial Sequence
  Description of Artificial Sequence: Synthetic oligonucleotide
  Antisense strand to SEQ ID NO: 227984
uucagaacuaggguucaau

SEQ ID NO: 227986 - RNA, 19 nt, Artificial Sequence
  Description of Artificial Sequence: Synthetic oligonucleotide
  Sense strand starting at position 2944 of SEQ ID NO: 2935
gcuucuagaguuuaaagag

SEQ ID NO: 227987 - RNA, 19 nt, Artificial Sequence
  Description of Artificial Sequence: Synthetic oligonucleotide
  Antisense strand to SEQ ID NO: 227986
cucuuuaaacucuagaagc

SEQ ID NO: 227988 - RNA, 19 nt, Artificial Sequence
  Description of Artificial Sequence: Synthetic oligonucleotide
  Sense strand starting at position 2985 of SEQ ID NO: 2935
ggaucaccuguuugaucua

SEQ ID NO: 227989 - RNA, 19 nt, Artificial Sequence
  Description of Artificial Sequence: Synthetic oligonucleotide
  Antisense strand to SEQ ID NO: 227988
uagaucaaacaggugaucc

SEQ ID NO: 227990 - RNA, 19 nt, Artificial Sequence
  Description of Artificial Sequence: Synthetic oligonucleotide
  Sense strand starting at position 3135 of SEQ ID NO: 2935
gucacuaauuugcugcaua

SEQ ID NO: 227991 - RNA, 19 nt, Artificial Sequence
  Description of Artificial Sequence: Synthetic oligonucleotide
  Antisense strand to SEQ ID NO: 227990
uaugcagcaaauuagugac

SEQ ID NO: 227992 - RNA, 19 nt, Artificial Sequence
  Description of Artificial Sequence: Synthetic oligonucleotide
  Sense strand starting at position 3186 of SEQ ID NO: 2935
ugagaugacuagcuuaacu

SEQ ID NO: 227993 - RNA, 19 nt, Artificial Sequence
  Description of Artificial Sequence: Synthetic oligonucleotide
  Antisense strand to SEQ ID NO: 227992
aguuaagcuagucaucuca

SEQ ID NO: 227994 - RNA, 19 nt, Artificial Sequence
  Description of Artificial Sequence: Synthetic oligonucleotide
  Sense strand starting at position 3214 of SEQ ID NO: 2935
accggauugugaucuauua

SEQ ID NO: 227995 - RNA, 19 nt, Artificial Sequence
  Description of Artificial Sequence: Synthetic oligonucleotide
  Antisense strand to SEQ ID NO: 227994
uaauagaucacaauccggu

SEQ ID NO: 227996 - RNA, 19 nt, Artificial Sequence
  Description of Artificial Sequence: Synthetic oligonucleotide
  Sense strand starting at position 3216 of SEQ ID NO: 2935
cggauugugaucuauuagu

SEQ ID NO: 227997 - RNA, 19 nt, Artificial Sequence
  Description of Artificial Sequence: Synthetic oligonucleotide
  Antisense strand to SEQ ID NO: 227996
acuaauagaucacaauccg

SEQ ID NO: 227998 - RNA, 19 nt, Artificial Sequence
  Description of Artificial Sequence: Synthetic oligonucleotide
  Sense strand starting at position 3223 of SEQ ID NO: 2935
ugaucuauuagugggcuau

SEQ ID NO: 227999 - RNA, 19 nt, Artificial Sequence
  Description of Artificial Sequence: Synthetic oligonucleotide
  Antisense strand to SEQ ID NO: 227998
auagcccacuaauagauca

SEQ ID NO: 228000 - RNA, 19 nt, Artificial Sequence
  Description of Artificial Sequence: Synthetic oligonucleotide
  Sense strand starting at position 3224 of SEQ ID NO: 2935
gaucuauuagugggcuaug

SEQ ID NO: 228001 - RNA, 19 nt, Artificial Sequence
  Description of Artificial Sequence: Synthetic oligonucleotide
  Antisense strand to SEQ ID NO: 228000
cauagcccacuaauagauc

SEQ ID NO: 228002 - RNA, 19 nt, Artificial Sequence
  Description of Artificial Sequence: Synthetic oligonucleotide
  Sense strand starting at position 3225 of SEQ ID NO: 2935
aucuauuagugggcuauga

SEQ ID NO: 228003 - RNA, 19 nt, Artificial Sequence
  Description of Artificial Sequence: Synthetic oligonucleotide
  Antisense strand to SEQ ID NO: 228002
ucauagcccacuaauagau

SEQ ID NO: 228004 - RNA, 19 nt, Artificial Sequence
  Description of Artificial Sequence: Synthetic oligonucleotide
  Sense strand starting at position 3227 of SEQ ID NO: 2935
cuauuagugggcuaugaaa

SEQ ID NO: 228005 - RNA, 19 nt, Artificial Sequence
  Description of Artificial Sequence: Synthetic oligonucleotide
  Antisense strand to SEQ ID NO: 228004
uuucauagcccacuaauag

SEQ ID NO: 228006 - RNA, 19 nt, Artificial Sequence
  Description of Artificial Sequence: Synthetic oligonucleotide
  Sense strand starting at position 3229 of SEQ ID NO: 2935
auuagugggcuaugaaauc

SEQ ID NO: 228007 - RNA, 19 nt, Artificial Sequence
  Description of Artificial Sequence: Synthetic oligonucleotide
  Antisense strand to SEQ ID NO: 228006
gauuucauagcccacuaau

SEQ ID NO: 228008 - RNA, 19 nt, Artificial Sequence
  Description of Artificial Sequence: Synthetic oligonucleotide
  Sense strand starting at position 3584 of SEQ ID NO: 2935
aucagagugcauuauacau

SEQ ID NO: 228009 - RNA, 19 nt, Artificial Sequence
  Description of Artificial Sequence: Synthetic oligonucleotide
  Antisense strand to SEQ ID NO: 228008
auguauaaugcacucugau

SEQ ID NO: 228010 - RNA, 19 nt, Artificial Sequence
  Description of Artificial Sequence: Synthetic oligonucleotide
  Sense strand starting at position 3781 of SEQ ID NO: 2935
aacagaucuugugucggaa

SEQ ID NO: 228011 - RNA, 19 nt, Artificial Sequence
  Description of Artificial Sequence: Synthetic oligonucleotide
  Antisense strand to SEQ ID NO: 228010
uuccgacacaagaucuguu

SEQ ID NO: 228012 - RNA, 19 nt, Artificial Sequence
  Description of Artificial Sequence: Synthetic oligonucleotide
  Sense strand starting at position 141 of SEQ ID NO: 2936
gccaaacuguugucucagu

SEQ ID NO: 228013 - RNA, 19 nt, Artificial Sequence
  Description of Artificial Sequence: Synthetic oligonucleotide
  Antisense strand to SEQ ID NO: 228012
acugagacaacaguuuggc

SEQ ID NO: 228014 - RNA, 19 nt, Artificial Sequence
  Description of Artificial Sequence: Synthetic oligonucleotide
  Sense strand starting at position 142 of SEQ ID NO: 2936
ccaaacuguugucucagua

SEQ ID NO: 228015 - RNA, 19 nt, Artificial Sequence
  Description of Artificial Sequence: Synthetic oligonucleotide
  Antisense strand to SEQ ID NO: 228014
uacugagacaacaguuugg

SEQ ID NO: 228016 - RNA, 19 nt, Artificial Sequence
  Description of Artificial Sequence: Synthetic oligonucleotide
  Sense strand starting at position 152 of SEQ ID NO: 2936
gucucaguaucuccucaaa

SEQ ID NO: 228017 - RNA, 19 nt, Artificial Sequence
  Description of Artificial Sequence: Synthetic oligonucleotide
  Antisense strand to SEQ ID NO: 228016
uuugaggagauacugagac

SEQ ID NO: 228018 - RNA, 19 nt, Artificial Sequence
  Description of Artificial Sequence: Synthetic oligonucleotide
  Sense strand starting at position 453 of SEQ ID NO: 2936
agauacaugcccuggagga

SEQ ID NO: 228019 - RNA, 19 nt, Artificial Sequence
  Description of Artificial Sequence: Synthetic oligonucleotide
  Antisense strand to SEQ ID NO: 228018
uccuccagggcauguaucu

SEQ ID NO: 228020 - RNA, 19 nt, Artificial Sequence
  Description of Artificial Sequence: Synthetic oligonucleotide
  Sense strand starting at position 575 of SEQ ID NO: 2936
cacgcuuuccuguguagca

SEQ ID NO: 228021 - RNA, 19 nt, Artificial Sequence
  Description of Artificial Sequence: Synthetic oligonucleotide
  Antisense strand to SEQ ID NO: 228020
ugcuacacaggaaagcgug

SEQ ID NO: 228022 - RNA, 19 nt, Artificial Sequence
  Description of Artificial Sequence: Synthetic oligonucleotide
  Sense strand starting at position 968 of SEQ ID NO: 2936
uggugucagaauuauggau

SEQ ID NO: 228023 - RNA, 19 nt, Artificial Sequence
  Description of Artificial Sequence: Synthetic oligonucleotide
  Antisense strand to SEQ ID NO: 228022
auccauaauucugacacca

SEQ ID NO: 228024 - RNA, 19 nt, Artificial Sequence
  Description of Artificial Sequence: Synthetic oligonucleotide
  Sense strand starting at position 970 of SEQ ID NO: 2936
gugucagaauuauggauua

SEQ ID NO: 228025 - RNA, 19 nt, Artificial Sequence
  Description of Artificial Sequence: Synthetic oligonucleotide
  Antisense strand to SEQ ID NO: 228024
uaauccauaauucugacac

SEQ ID NO: 228026 - RNA, 19 nt, Artificial Sequence
  Description of Artificial Sequence: Synthetic oligonucleotide
  Sense strand starting at position 2079 of SEQ ID NO: 2936
ucuuguuaacuccgggaaa

SEQ ID NO: 228027 - RNA, 19 nt, Artificial Sequence
  Description of Artificial Sequence: Synthetic oligonucleotide
  Antisense strand to SEQ ID NO: 228026
uuucccggaguuaacaaga

SEQ ID NO: 228028 - RNA, 19 nt, Artificial Sequence
  Description of Artificial Sequence: Synthetic oligonucleotide
  Sense strand starting at position 2080 of SEQ ID NO: 2936
cuuguuaacuccgggaaag

SEQ ID NO: 228029 - RNA, 19 nt, Artificial Sequence
  Description of Artificial Sequence: Synthetic oligonucleotide
  Antisense strand to SEQ ID NO: 228028
cuuucccggaguuaacaag

SEQ ID NO: 228030 - RNA, 19 nt, Artificial Sequence
  Description of Artificial Sequence: Synthetic oligonucleotide
  Sense strand starting at position 2081 of SEQ ID NO: 2936
uuguuaacuccgggaaaga

SEQ ID NO: 228031 - RNA, 19 nt, Artificial Sequence
  Description of Artificial Sequence: Synthetic oligonucleotide
  Antisense strand to SEQ ID NO: 228030
ucuuucccggaguuaacaa

SEQ ID NO: 228032 - RNA, 19 nt, Artificial Sequence
  Description of Artificial Sequence: Synthetic oligonucleotide
  Sense strand starting at position 2428 of SEQ ID NO: 2936
gggagagugacuuguccaa

SEQ ID NO: 228033 - RNA, 19 nt, Artificial Sequence
  Description of Artificial Sequence: Synthetic oligonucleotide
  Antisense strand to SEQ ID NO: 228032
uuggacaagucacucuccc

SEQ ID NO: 228034 - RNA, 19 nt, Artificial Sequence
  Description of Artificial Sequence: Synthetic oligonucleotide
  Sense strand starting at position 2489 of SEQ ID NO: 2936
aauacuaggucagugacuu

SEQ ID NO: 228035 - RNA, 19 nt, Artificial Sequence
  Description of Artificial Sequence: Synthetic oligonucleotide
  Antisense strand to SEQ ID NO: 228034
aagucacugaccuaguauu

SEQ ID NO: 228036 - RNA, 19 nt, Artificial Sequence
  Description of Artificial Sequence: Synthetic oligonucleotide
  Sense strand starting at position 2495 of SEQ ID NO: 2936
aggucagugacuugggaga

SEQ ID NO: 228037 - RNA, 19 nt, Artificial Sequence
  Description of Artificial Sequence: Synthetic oligonucleotide
  Antisense strand to SEQ ID NO: 228036
ucucccaagucacugaccu

SEQ ID NO: 228038 - RNA, 19 nt, Artificial Sequence
  Description of Artificial Sequence: Synthetic oligonucleotide
  Sense strand starting at position 2497 of SEQ ID NO: 2936
gucagugacuugggagaaa

SEQ ID NO: 228039 - RNA, 19 nt, Artificial Sequence
  Description of Artificial Sequence: Synthetic oligonucleotide
  Antisense strand to SEQ ID NO: 228038
uuucucccaagucacugac

SEQ ID NO: 228040 - RNA, 19 nt, Artificial Sequence
  Description of Artificial Sequence: Synthetic oligonucleotide
  Sense strand starting at position 2949 of SEQ ID NO: 2936
gcuucugucaagcgguaga

SEQ ID NO: 228041 - RNA, 19 nt, Artificial Sequence
  Description of Artificial Sequence: Synthetic oligonucleotide
  Antisense strand to SEQ ID NO: 228040
ucuaccgcuugacagaagc

SEQ ID NO: 228042 - RNA, 19 nt, Artificial Sequence
  Description of Artificial Sequence: Synthetic oligonucleotide
  Sense strand starting at position 3074 of SEQ ID NO: 2936
ugagguaaaucgggaccua

SEQ ID NO: 228043 - RNA, 19 nt, Artificial Sequence
  Description of Artificial Sequence: Synthetic oligonucleotide
  Antisense strand to SEQ ID NO: 228042
uaggucccgauuuaccuca

SEQ ID NO: 228044 - RNA, 19 nt, Artificial Sequence
  Description of Artificial Sequence: Synthetic oligonucleotide
  Sense strand starting at position 3128 of SEQ ID NO: 2936
ggaggcaagucugauagcu

SEQ ID NO: 228045 - RNA, 19 nt, Artificial Sequence
  Description of Artificial Sequence: Synthetic oligonucleotide
  Antisense strand to SEQ ID NO: 228044
agcuaucagacuugccucc

SEQ ID NO: 228046 - RNA, 19 nt, Artificial Sequence
  Description of Artificial Sequence: Synthetic oligonucleotide
  Sense strand starting at position 3137 of SEQ ID NO: 2936
ucugauagcucucagugac

SEQ ID NO: 228047 - RNA, 19 nt, Artificial Sequence
  Description of Artificial Sequence: Synthetic oligonucleotide
  Antisense strand to SEQ ID NO: 228046
gucacugagagcuaucaga

SEQ ID NO: 228048 - RNA, 19 nt, Artificial Sequence
  Description of Artificial Sequence: Synthetic oligonucleotide
  Sense strand starting at position 3166 of SEQ ID NO: 2936
ccgucagccugaccugaaa

SEQ ID NO: 228049 - RNA, 19 nt, Artificial Sequence
  Description of Artificial Sequence: Synthetic oligonucleotide
  Antisense strand to SEQ ID NO: 228048
uuucaggucaggcugacgg

SEQ ID NO: 228050 - RNA, 19 nt, Artificial Sequence
  Description of Artificial Sequence: Synthetic oligonucleotide
  Sense strand starting at position 3169 of SEQ ID NO: 2936
ucagccugaccugaaaguu

SEQ ID NO: 228051 - RNA, 19 nt, Artificial Sequence
  Description of Artificial Sequence: Synthetic oligonucleotide
  Antisense strand to SEQ ID NO: 228050
aacuuucaggucaggcuga

SEQ ID NO: 228052 - RNA, 19 nt, Artificial Sequence
  Description of Artificial Sequence: Synthetic oligonucleotide
  Sense strand starting at position 3265 of SEQ ID NO: 2936
ggugggaugcuugggagaa

SEQ ID NO: 228053 - RNA, 19 nt, Artificial Sequence
  Description of Artificial Sequence: Synthetic oligonucleotide
  Antisense strand to SEQ ID NO: 228052
uucucccaagcaucccacc

SEQ ID NO: 228054 - RNA, 19 nt, Artificial Sequence
  Description of Artificial Sequence: Synthetic oligonucleotide
  Sense strand starting at position 3266 of SEQ ID NO: 2936
gugggaugcuugggagaaa

SEQ ID NO: 228055 - RNA, 19 nt, Artificial Sequence
  Description of Artificial Sequence: Synthetic oligonucleotide
  Antisense strand to SEQ ID NO: 228054
uuucucccaagcaucccac

SEQ ID NO: 228056 - RNA, 19 nt, Artificial Sequence
  Description of Artificial Sequence: Synthetic oligonucleotide
  Sense strand starting at position 3398 of SEQ ID NO: 2936
aacugagguuguuggagaa

SEQ ID NO: 228057 - RNA, 19 nt, Artificial Sequence
  Description of Artificial Sequence: Synthetic oligonucleotide
  Antisense strand to SEQ ID NO: 228056
uucuccaacaaccucaguu

SEQ ID NO: 228058 - RNA, 19 nt, Artificial Sequence
  Description of Artificial Sequence: Synthetic oligonucleotide
  Sense strand starting at position 3489 of SEQ ID NO: 2936
gaugauguguguuccagcu

SEQ ID NO: 228059 - RNA, 19 nt, Artificial Sequence
  Description of Artificial Sequence: Synthetic oligonucleotide
  Antisense strand to SEQ ID NO: 228058
agcuggaacacacaucauc

SEQ ID NO: 228060 - RNA, 19 nt, Artificial Sequence
  Description of Artificial Sequence: Synthetic oligonucleotide
  Sense strand starting at position 3711 of SEQ ID NO: 2936
aucccacuuugugaggauu

SEQ ID NO: 228061 - RNA, 19 nt, Artificial Sequence
  Description of Artificial Sequence: Synthetic oligonucleotide
  Antisense strand to SEQ ID NO: 228060
aauccucacaaagugggau

SEQ ID NO: 228062 - RNA, 19 nt, Artificial Sequence
  Description of Artificial Sequence: Synthetic oligonucleotide
  Sense strand starting at position 3713 of SEQ ID NO: 2936
cccacuuugugaggauuaa

SEQ ID NO: 228063 - RNA, 19 nt, Artificial Sequence
  Description of Artificial Sequence: Synthetic oligonucleotide
  Antisense strand to SEQ ID NO: 228062
uuaauccucacaaaguggg

SEQ ID NO: 228064 - RNA, 19 nt, Artificial Sequence
  Description of Artificial Sequence: Synthetic oligonucleotide
  Sense strand starting at position 3729 of SEQ ID NO: 2936
uaaguaagucagugcaugu

SEQ ID NO: 228065 - RNA, 19 nt, Artificial Sequence
  Description of Artificial Sequence: Synthetic oligonucleotide
  Antisense strand to SEQ ID NO: 228064
acaugcacugacuuacuua

SEQ ID NO: 228066 - RNA, 19 nt, Artificial Sequence
  Description of Artificial Sequence: Synthetic oligonucleotide
  Sense strand starting at position 3745 of SEQ ID NO: 2936
uguaaagcauucuagaaca

SEQ ID NO: 228067 - RNA, 19 nt, Artificial Sequence
  Description of Artificial Sequence: Synthetic oligonucleotide
  Antisense strand to SEQ ID NO: 228066
uguucuagaaugcuuuaca

SEQ ID NO: 228068 - RNA, 19 nt, Artificial Sequence
  Description of Artificial Sequence: Synthetic oligonucleotide
  Sense strand starting at position 3775 of SEQ ID NO: 2936
augguaaaugcucaaucaa

SEQ ID NO: 228069 - RNA, 19 nt, Artificial Sequence
  Description of Artificial Sequence: Synthetic oligonucleotide
  Antisense strand to SEQ ID NO: 228068
uugauugagcauuuaccau

SEQ ID NO: 228070 - RNA, 19 nt, Artificial Sequence
  Description of Artificial Sequence: Synthetic oligonucleotide
  Sense strand starting at position 3841 of SEQ ID NO: 2936
agagguagauuguggacaa

SEQ ID NO: 228071 - RNA, 19 nt, Artificial Sequence
  Description of Artificial Sequence: Synthetic oligonucleotide
  Antisense strand to SEQ ID NO: 228070
uuguccacaaucuaccucu

SEQ ID NO: 228072 - RNA, 19 nt, Artificial Sequence
  Description of Artificial Sequence: Synthetic oligonucleotide
  Sense strand starting at position 3842 of SEQ ID NO: 2936
gagguagauuguggacaaa

SEQ ID NO: 228073 - RNA, 19 nt, Artificial Sequence
  Description of Artificial Sequence: Synthetic oligonucleotide
  Antisense strand to SEQ ID NO: 228072
uuuguccacaaucuaccuc

SEQ ID NO: 228074 - RNA, 19 nt, Artificial Sequence
  Description of Artificial Sequence: Synthetic oligonucleotide
  Sense strand starting at position 3870 of SEQ ID NO: 2936
ggcucaaaugacugguuau

SEQ ID NO: 228075 - RNA, 19 nt, Artificial Sequence
  Description of Artificial Sequence: Synthetic oligonucleotide
  Antisense strand to SEQ ID NO: 228074
auaaccagucauuugagcc

SEQ ID NO: 228076 - RNA, 19 nt, Artificial Sequence
  Description of Artificial Sequence: Synthetic oligonucleotide
  Sense strand starting at position 3871 of SEQ ID NO: 2936
gcucaaaugacugguuaug

SEQ ID NO: 228077 - RNA, 19 nt, Artificial Sequence
  Description of Artificial Sequence: Synthetic oligonucleotide
  Antisense strand to SEQ ID NO: 228076
cauaaccagucauuugagc

SEQ ID NO: 228078 - RNA, 19 nt, Artificial Sequence
  Description of Artificial Sequence: Synthetic oligonucleotide
  Sense strand starting at position 3873 of SEQ ID NO: 2936
ucaaaugacugguuaugag

SEQ ID NO: 228079 - RNA, 19 nt, Artificial Sequence
  Description of Artificial Sequence: Synthetic oligonucleotide
  Antisense strand to SEQ ID NO: 228078
cucauaaccagucauuuga

SEQ ID NO: 228080 - RNA, 19 nt, Artificial Sequence
  Description of Artificial Sequence: Synthetic oligonucleotide
  Sense strand starting at position 3882 of SEQ ID NO: 2936
ugguuaugagguuguauug

SEQ ID NO: 228081 - RNA, 19 nt, Artificial Sequence
  Description of Artificial Sequence: Synthetic oligonucleotide
  Antisense strand to SEQ ID NO: 228080
caauacaaccucauaacca

SEQ ID NO: 228082 - RNA, 19 nt, Artificial Sequence
  Description of Artificial Sequence: Synthetic oligonucleotide
  Sense strand starting at position 3934 of SEQ ID NO: 2936
gaaagaagguauugugggu

SEQ ID NO: 228083 - RNA, 19 nt, Artificial Sequence
  Description of Artificial Sequence: Synthetic oligonucleotide
  Antisense strand to SEQ ID NO: 228082
acccacaauaccuucuuuc

SEQ ID NO: 228084 - RNA, 19 nt, Artificial Sequence
  Description of Artificial Sequence: Synthetic oligonucleotide
  Sense strand starting at position 3938 of SEQ ID NO: 2936
gaagguauugugggugaga

SEQ ID NO: 228085 - RNA, 19 nt, Artificial Sequence
  Description of Artificial Sequence: Synthetic oligonucleotide
  Antisense strand to SEQ ID NO: 228084
ucucacccacaauaccuuc

SEQ ID NO: 228086 - RNA, 19 nt, Artificial Sequence
  Description of Artificial Sequence: Synthetic oligonucleotide
  Sense strand starting at position 3939 of SEQ ID NO: 2936
aagguauugugggugagag

SEQ ID NO: 228087 - RNA, 19 nt, Artificial Sequence
  Description of Artificial Sequence: Synthetic oligonucleotide
  Antisense strand to SEQ ID NO: 228086
cucucacccacaauaccuu

SEQ ID NO: 228088 - RNA, 19 nt, Artificial Sequence
  Description of Artificial Sequence: Synthetic oligonucleotide
  Sense strand starting at position 3949 of SEQ ID NO: 2936
gggugagagcgcugaauac

SEQ ID NO: 228089 - RNA, 19 nt, Artificial Sequence
  Description of Artificial Sequence: Synthetic oligonucleotide
  Antisense strand to SEQ ID NO: 228088
guauucagcgcucucaccc

SEQ ID NO: 228090 - RNA, 19 nt, Artificial Sequence
  Description of Artificial Sequence: Synthetic oligonucleotide
  Sense strand starting at position 3958 of SEQ ID NO: 2936
cgcugaauacggugucaga

SEQ ID NO: 228091 - RNA, 19 nt, Artificial Sequence
  Description of Artificial Sequence: Synthetic oligonucleotide
  Antisense strand to SEQ ID NO: 228090
ucugacaccguauucagcg

SEQ ID NO: 228092 - RNA, 19 nt, Artificial Sequence
  Description of Artificial Sequence: Synthetic oligonucleotide
  Sense strand starting at position 148 of SEQ ID NO: 2937
guccaacacuuacugugaa

SEQ ID NO: 228093 - RNA, 19 nt, Artificial Sequence
  Description of Artificial Sequence: Synthetic oligonucleotide
  Antisense strand to SEQ ID NO: 228092
uucacaguaaguguuggac

SEQ ID NO: 228094 - RNA, 19 nt, Artificial Sequence
  Description of Artificial Sequence: Synthetic oligonucleotide
  Sense strand starting at position 281 of SEQ ID NO: 2937
ugccuuugaggaggaaaga

SEQ ID NO: 228095 - RNA, 19 nt, Artificial Sequence
  Description of Artificial Sequence: Synthetic oligonucleotide
  Antisense strand to SEQ ID NO: 228094
ucuuuccuccucaaaggca

SEQ ID NO: 228096 - RNA, 19 nt, Artificial Sequence
  Description of Artificial Sequence: Synthetic oligonucleotide
  Sense strand starting at position 481 of SEQ ID NO: 2937
ucucgauauuaucuggaua

SEQ ID NO: 228097 - RNA, 19 nt, Artificial Sequence
  Description of Artificial Sequence: Synthetic oligonucleotide
  Antisense strand to SEQ ID NO: 228096
uauccagauaauaucgaga

SEQ ID NO: 228098 - RNA, 19 nt, Artificial Sequence
  Description of Artificial Sequence: Synthetic oligonucleotide
  Sense strand starting at position 533 of SEQ ID NO: 2937
agugaacauuaaccaagua

SEQ ID NO: 228099 - RNA, 19 nt, Artificial Sequence
  Description of Artificial Sequence: Synthetic oligonucleotide
  Antisense strand to SEQ ID NO: 228098
uacuugguuaauguucacu

SEQ ID NO: 228100 - RNA, 19 nt, Artificial Sequence
  Description of Artificial Sequence: Synthetic oligonucleotide
  Sense strand starting at position 576 of SEQ ID NO: 2937
aagaaaggcgucugaauac

SEQ ID NO: 228101 - RNA, 19 nt, Artificial Sequence
  Description of Artificial Sequence: Synthetic oligonucleotide
  Antisense strand to SEQ ID NO: 228100
guauucagacgccuuucuu

SEQ ID NO: 228102 - RNA, 19 nt, Artificial Sequence
  Description of Artificial Sequence: Synthetic oligonucleotide
  Sense strand starting at position 728 of SEQ ID NO: 2937
ggccucgaagaauaguaau

SEQ ID NO: 228103 - RNA, 19 nt, Artificial Sequence
  Description of Artificial Sequence: Synthetic oligonucleotide
  Antisense strand to SEQ ID NO: 228102
auuacuauucuucgaggcc

SEQ ID NO: 228104 - RNA, 19 nt, Artificial Sequence
  Description of Artificial Sequence: Synthetic oligonucleotide
  Sense strand starting at position 770 of SEQ ID NO: 2937
cgaauacuagccuggaguu

SEQ ID NO: 228105 - RNA, 19 nt, Artificial Sequence
  Description of Artificial Sequence: Synthetic oligonucleotide
  Antisense strand to SEQ ID NO: 228104
aacuccaggcuaguauucg

SEQ ID NO: 228106 - RNA, 19 nt, Artificial Sequence
  Description of Artificial Sequence: Synthetic oligonucleotide
  Sense strand starting at position 771 of SEQ ID NO: 2937
gaauacuagccuggaguuu

SEQ ID NO: 228107 - RNA, 19 nt, Artificial Sequence
  Description of Artificial Sequence: Synthetic oligonucleotide
  Antisense strand to SEQ ID NO: 228106
aaacuccaggcuaguauuc

SEQ ID NO: 228108 - RNA, 19 nt, Artificial Sequence
  Description of Artificial Sequence: Synthetic oligonucleotide
  Sense strand starting at position 1138 of SEQ ID NO: 2937
aaggaaguugccuacuacu

SEQ ID NO: 228109 - RNA, 19 nt, Artificial Sequence
  Description of Artificial Sequence: Synthetic oligonucleotide
  Antisense strand to SEQ ID NO: 228108
aguaguaggcaacuuccuu

SEQ ID NO: 228110 - RNA, 19 nt, Artificial Sequence
  Description of Artificial Sequence: Synthetic oligonucleotide
  Sense strand starting at position 1146 of SEQ ID NO: 2937
ugccuacuacucugaagga

SEQ ID NO: 228111 - RNA, 19 nt, Artificial Sequence
  Description of Artificial Sequence: Synthetic oligonucleotide
  Antisense strand to SEQ ID NO: 228110
uccuucagaguaguaggca

SEQ ID NO: 228112 - RNA, 19 nt, Artificial Sequence
  Description of Artificial Sequence: Synthetic oligonucleotide
  Sense strand starting at position 1292 of SEQ ID NO: 2937
gaaagagaggcguguaugu

SEQ ID NO: 228113 - RNA, 19 nt, Artificial Sequence
  Description of Artificial Sequence: Synthetic oligonucleotide
  Antisense strand to SEQ ID NO: 228112
acauacacgccucucuuuc

SEQ ID NO: 228114 - RNA, 19 nt, Artificial Sequence
  Description of Artificial Sequence: Synthetic oligonucleotide
  Sense strand starting at position 1343 of SEQ ID NO: 2937
gagccuggauuugaagaaa

SEQ ID NO: 228115 - RNA, 19 nt, Artificial Sequence
  Description of Artificial Sequence: Synthetic oligonucleotide
  Antisense strand to SEQ ID NO: 228114
uuucuucaaauccaggcuc

SEQ ID NO: 228116 - RNA, 19 nt, Artificial Sequence
  Description of Artificial Sequence: Synthetic oligonucleotide
  Sense strand starting at position 2219 of SEQ ID NO: 2937
uuuggaagcugguuccaaa

SEQ ID NO: 228117 - RNA, 19 nt, Artificial Sequence
  Description of Artificial Sequence: Synthetic oligonucleotide
  Antisense strand to SEQ ID NO: 228116
uuuggaaccagcuuccaaa

SEQ ID NO: 228118 - RNA, 19 nt, Artificial Sequence
  Description of Artificial Sequence: Synthetic oligonucleotide
  Sense strand starting at position 2272 of SEQ ID NO: 2937
uacucugaugcaugaagga

SEQ ID NO: 228119 - RNA, 19 nt, Artificial Sequence
  Description of Artificial Sequence: Synthetic oligonucleotide
  Antisense strand to SEQ ID NO: 228118
uccuucaugcaucagagua

SEQ ID NO: 228120 - RNA, 19 nt, Artificial Sequence
  Description of Artificial Sequence: Synthetic oligonucleotide
  Sense strand starting at position 2452 of SEQ ID NO: 2937
cuucuugacuagcucgaua

SEQ ID NO: 228121 - RNA, 19 nt, Artificial Sequence
  Description of Artificial Sequence: Synthetic oligonucleotide
  Antisense strand to SEQ ID NO: 228120
uaucgagcuagucaagaag

SEQ ID NO: 228122 - RNA, 19 nt, Artificial Sequence
  Description of Artificial Sequence: Synthetic oligonucleotide
  Sense strand starting at position 2609 of SEQ ID NO: 2937
ggucaucgaaccuaguaga

SEQ ID NO: 228123 - RNA, 19 nt, Artificial Sequence
  Description of Artificial Sequence: Synthetic oligonucleotide
  Antisense strand to SEQ ID NO: 228122
ucuacuagguucgaugacc

SEQ ID NO: 228124 - RNA, 19 nt, Artificial Sequence
  Description of Artificial Sequence: Synthetic oligonucleotide
  Sense strand starting at position 2688 of SEQ ID NO: 2937
ccauauauggcaggcuaua

SEQ ID NO: 228125 - RNA, 19 nt, Artificial Sequence
  Description of Artificial Sequence: Synthetic oligonucleotide
  Antisense strand to SEQ ID NO: 228124
uauagccugccauauaugg

SEQ ID NO: 228126 - RNA, 19 nt, Artificial Sequence
  Description of Artificial Sequence: Synthetic oligonucleotide
  Sense strand starting at position 2755 of SEQ ID NO: 2937
cacugaguucuaggcccaa

SEQ ID NO: 228127 - RNA, 19 nt, Artificial Sequence
  Description of Artificial Sequence: Synthetic oligonucleotide
  Antisense strand to SEQ ID NO: 228126
uugggccuagaacucagug

SEQ ID NO: 228128 - RNA, 19 nt, Artificial Sequence
  Description of Artificial Sequence: Synthetic oligonucleotide
  Sense strand starting at position 2767 of SEQ ID NO: 2937
ggcccaacuccguaugacu

SEQ ID NO: 228129 - RNA, 19 nt, Artificial Sequence
  Description of Artificial Sequence: Synthetic oligonucleotide
  Antisense strand to SEQ ID NO: 228128
agucauacggaguugggcc

SEQ ID NO: 228130 - RNA, 19 nt, Artificial Sequence
  Description of Artificial Sequence: Synthetic oligonucleotide
  Sense strand starting at position 2774 of SEQ ID NO: 2937
cuccguaugacucaagagu

SEQ ID NO: 228131 - RNA, 19 nt, Artificial Sequence
  Description of Artificial Sequence: Synthetic oligonucleotide
  Antisense strand to SEQ ID NO: 228130
acucuugagucauacggag

SEQ ID NO: 228132 - RNA, 19 nt, Artificial Sequence
  Description of Artificial Sequence: Synthetic oligonucleotide
  Sense strand starting at position 2780 of SEQ ID NO: 2937
augacucaagagugucaaa

SEQ ID NO: 228133 - RNA, 19 nt, Artificial Sequence
  Description of Artificial Sequence: Synthetic oligonucleotide
  Antisense strand to SEQ ID NO: 228132
uuugacacucuugagucau

SEQ ID NO: 228134 - RNA, 19 nt, Artificial Sequence
  Description of Artificial Sequence: Synthetic oligonucleotide
  Sense strand starting at position 2790 of SEQ ID NO: 2937
agugucaaaucaccuaauu

SEQ ID NO: 228135 - RNA, 19 nt, Artificial Sequence
  Description of Artificial Sequence: Synthetic oligonucleotide
  Antisense strand to SEQ ID NO: 228134
aauuaggugauuugacacu

SEQ ID NO: 228136 - RNA, 19 nt, Artificial Sequence
  Description of Artificial Sequence: Synthetic oligonucleotide
  Sense strand starting at position 2803 of SEQ ID NO: 2937
cuaauuuauuuaggcguca

SEQ ID NO: 228137 - RNA, 19 nt, Artificial Sequence
  Description of Artificial Sequence: Synthetic oligonucleotide
  Antisense strand to SEQ ID NO: 228136
ugacgccuaaauaaauuag

SEQ ID NO: 228138 - RNA, 19 nt, Artificial Sequence
  Description of Artificial Sequence: Synthetic oligonucleotide
  Sense strand starting at position 2835 of SEQ ID NO: 2937
caaauugguugucuggaca

SEQ ID NO: 228139 - RNA, 19 nt, Artificial Sequence
  Description of Artificial Sequence: Synthetic oligonucleotide
  Antisense strand to SEQ ID NO: 228138
uguccagacaaccaauuug

SEQ ID NO: 228140 - RNA, 19 nt, Artificial Sequence
  Description of Artificial Sequence: Synthetic oligonucleotide
  Sense strand starting at position 2838 of SEQ ID NO: 2937
auugguugucuggacaugu

SEQ ID NO: 228141 - RNA, 19 nt, Artificial Sequence
  Description of Artificial Sequence: Synthetic oligonucleotide
  Antisense strand to SEQ ID NO: 228140
acauguccagacaaccaau

SEQ ID NO: 228142 - RNA, 19 nt, Artificial Sequence
  Description of Artificial Sequence: Synthetic oligonucleotide
  Sense strand starting at position 2930 of SEQ ID NO: 2937
agacuuucucaugguuugu

SEQ ID NO: 228143 - RNA, 19 nt, Artificial Sequence
  Description of Artificial Sequence: Synthetic oligonucleotide
  Antisense strand to SEQ ID NO: 228142
acaaaccaugagaaagucu

SEQ ID NO: 228144 - RNA, 19 nt, Artificial Sequence
  Description of Artificial Sequence: Synthetic oligonucleotide
  Sense strand starting at position 2963 of SEQ ID NO: 2937
ggcucaguugugcagauua

SEQ ID NO: 228145 - RNA, 19 nt, Artificial Sequence
  Description of Artificial Sequence: Synthetic oligonucleotide
  Antisense strand to SEQ ID NO: 228144
uaaucugcacaacugagcc

SEQ ID NO: 228146 - RNA, 19 nt, Artificial Sequence
  Description of Artificial Sequence: Synthetic oligonucleotide
  Sense strand starting at position 2965 of SEQ ID NO: 2937
cucaguugugcagauuaga

SEQ ID NO: 228147 - RNA, 19 nt, Artificial Sequence
  Description of Artificial Sequence: Synthetic oligonucleotide
  Antisense strand to SEQ ID NO: 228146
ucuaaucugcacaacugag

SEQ ID NO: 228148 - RNA, 19 nt, Artificial Sequence
  Description of Artificial Sequence: Synthetic oligonucleotide
  Sense strand starting at position 2968 of SEQ ID NO: 2937
aguugugcagauuagagua

SEQ ID NO: 228149 - RNA, 19 nt, Artificial Sequence
  Description of Artificial Sequence: Synthetic oligonucleotide
  Antisense strand to SEQ ID NO: 228148
uacucuaaucugcacaacu

SEQ ID NO: 228150 - RNA, 19 nt, Artificial Sequence
  Description of Artificial Sequence: Synthetic oligonucleotide
  Sense strand starting at position 2996 of SEQ ID NO: 2937
agagcuguaagguacugaa

SEQ ID NO: 228151 - RNA, 19 nt, Artificial Sequence
  Description of Artificial Sequence: Synthetic oligonucleotide
  Antisense strand to SEQ ID NO: 228150
uucaguaccuuacagcucu

SEQ ID NO: 228152 - RNA, 19 nt, Artificial Sequence
  Description of Artificial Sequence: Synthetic oligonucleotide
  Sense strand starting at position 3348 of SEQ ID NO: 2937
cagacuaaacggugucuaa

SEQ ID NO: 228153 - RNA, 19 nt, Artificial Sequence
  Description of Artificial Sequence: Synthetic oligonucleotide
  Antisense strand to SEQ ID NO: 228152
uuagacaccguuuagucug

SEQ ID NO: 228154 - RNA, 19 nt, Artificial Sequence
  Description of Artificial Sequence: Synthetic oligonucleotide
  Sense strand starting at position 3451 of SEQ ID NO: 2937
cuaaguaaauguuugagaa

SEQ ID NO: 228155 - RNA, 19 nt, Artificial Sequence
  Description of Artificial Sequence: Synthetic oligonucleotide
  Antisense strand to SEQ ID NO: 228154
uucucaaacauuuacuuag

SEQ ID NO: 228156 - RNA, 19 nt, Artificial Sequence
  Description of Artificial Sequence: Synthetic oligonucleotide
  Sense strand starting at position 3452 of SEQ ID NO: 2937
uaaguaaauguuugagaag

SEQ ID NO: 228157 - RNA, 19 nt, Artificial Sequence
  Description of Artificial Sequence: Synthetic oligonucleotide
  Antisense strand to SEQ ID NO: 228156
cuucucaaacauuuacuua

SEQ ID NO: 228158 - RNA, 19 nt, Artificial Sequence
  Description of Artificial Sequence: Synthetic oligonucleotide
  Sense strand starting at position 3517 of SEQ ID NO: 2937
cugccuuaggucgauuaaa

SEQ ID NO: 228159 - RNA, 19 nt, Artificial Sequence
  Description of Artificial Sequence: Synthetic oligonucleotide
  Antisense strand to SEQ ID NO: 228158
uuuaaucgaccuaaggcag

SEQ ID NO: 228160 - RNA, 19 nt, Artificial Sequence
  Description of Artificial Sequence: Synthetic oligonucleotide
  Sense strand starting at position 3549 of SEQ ID NO: 2937
ggcauauugguauacauau

SEQ ID NO: 228161 - RNA, 19 nt, Artificial Sequence
  Description of Artificial Sequence: Synthetic oligonucleotide
  Antisense strand to SEQ ID NO: 228160
auauguauaccaauaugcc

SEQ ID NO: 228162 - RNA, 19 nt, Artificial Sequence
  Description of Artificial Sequence: Synthetic oligonucleotide
  Sense strand starting at position 3656 of SEQ ID NO: 2937
aggaauguagucuguguau

SEQ ID NO: 228163 - RNA, 19 nt, Artificial Sequence
  Description of Artificial Sequence: Synthetic oligonucleotide
  Antisense strand to SEQ ID NO: 228162
auacacagacuacauuccu

SEQ ID NO: 228164 - RNA, 19 nt, Artificial Sequence
  Description of Artificial Sequence: Synthetic oligonucleotide
  Sense strand starting at position 3734 of SEQ ID NO: 2937
cguggcauucaucagaguu

SEQ ID NO: 228165 - RNA, 19 nt, Artificial Sequence
  Description of Artificial Sequence: Synthetic oligonucleotide
  Antisense strand to SEQ ID NO: 228164
aacucugaugaaugccacg

SEQ ID NO: 228166 - RNA, 19 nt, Artificial Sequence
  Description of Artificial Sequence: Synthetic oligonucleotide
  Sense strand starting at position 3835 of SEQ ID NO: 2937
guaggagaguuaguacauc

SEQ ID NO: 228167 - RNA, 19 nt, Artificial Sequence
  Description of Artificial Sequence: Synthetic oligonucleotide
  Antisense strand to SEQ ID NO: 228166
gauguacuaacucuccuac

SEQ ID NO: 228168 - RNA, 19 nt, Artificial Sequence
  Description of Artificial Sequence: Synthetic oligonucleotide
  Sense strand starting at position 3846 of SEQ ID NO: 2937
aguacaucccagcaguuaa

SEQ ID NO: 228169 - RNA, 19 nt, Artificial Sequence
  Description of Artificial Sequence: Synthetic oligonucleotide
  Antisense strand to SEQ ID NO: 228168
uuaacugcugggauguacu

SEQ ID NO: 228170 - RNA, 19 nt, Artificial Sequence
  Description of Artificial Sequence: Synthetic oligonucleotide
  Sense strand starting at position 3914 of SEQ ID NO: 2937
auguacuagcuaugaaaca

SEQ ID NO: 228171 - RNA, 19 nt, Artificial Sequence
  Description of Artificial Sequence: Synthetic oligonucleotide
  Antisense strand to SEQ ID NO: 228170
uguuucauagcuaguacau

SEQ ID NO: 228172 - RNA, 19 nt, Artificial Sequence
  Description of Artificial Sequence: Synthetic oligonucleotide
  Sense strand starting at position 395 of SEQ ID NO: 2938
auuugugucauacgugaca

SEQ ID NO: 228173 - RNA, 19 nt, Artificial Sequence
  Description of Artificial Sequence: Synthetic oligonucleotide
  Antisense strand to SEQ ID NO: 228172
ugucacguaugacacaaau

SEQ ID NO: 228174 - RNA, 19 nt, Artificial Sequence
  Description of Artificial Sequence: Synthetic oligonucleotide
  Sense strand starting at position 398 of SEQ ID NO: 2938
ugugucauacgugacauga

SEQ ID NO: 228175 - RNA, 19 nt, Artificial Sequence
  Description of Artificial Sequence: Synthetic oligonucleotide
  Antisense strand to SEQ ID NO: 228174
ucaugucacguaugacaca

SEQ ID NO: 228176 - RNA, 19 nt, Artificial Sequence
  Description of Artificial Sequence: Synthetic oligonucleotide
  Sense strand starting at position 446 of SEQ ID NO: 2938
ucuugagaacauuagcacu

SEQ ID NO: 228177 - RNA, 19 nt, Artificial Sequence
  Description of Artificial Sequence: Synthetic oligonucleotide
  Antisense strand to SEQ ID NO: 228176
agugcuaauguucucaaga

SEQ ID NO: 228178 - RNA, 19 nt, Artificial Sequence
  Description of Artificial Sequence: Synthetic oligonucleotide
  Sense strand starting at position 516 of SEQ ID NO: 2938
agugcuugccuucuguaac

SEQ ID NO: 228179 - RNA, 19 nt, Artificial Sequence
  Description of Artificial Sequence: Synthetic oligonucleotide
  Antisense strand to SEQ ID NO: 228178
guuacagaaggcaagcacu

SEQ ID NO: 228180 - RNA, 19 nt, Artificial Sequence
  Description of Artificial Sequence: Synthetic oligonucleotide
  Sense strand starting at position 712 of SEQ ID NO: 2938
auauucugagaauguaaug

SEQ ID NO: 228181 - RNA, 19 nt, Artificial Sequence
  Description of Artificial Sequence: Synthetic oligonucleotide
  Antisense strand to SEQ ID NO: 228180
cauuacauucucagaauau

SEQ ID NO: 228182 - RNA, 19 nt, Artificial Sequence
  Description of Artificial Sequence: Synthetic oligonucleotide
  Sense strand starting at position 718 of SEQ ID NO: 2938
ugagaauguaaugguaguu

SEQ ID NO: 228183 - RNA, 19 nt, Artificial Sequence
  Description of Artificial Sequence: Synthetic oligonucleotide
  Antisense strand to SEQ ID NO: 228182
aacuaccauuacauucuca

SEQ ID NO: 228184 - RNA, 19 nt, Artificial Sequence
  Description of Artificial Sequence: Synthetic oligonucleotide
  Sense strand starting at position 731 of SEQ ID NO: 2938
guaguuguucuacaucaau

SEQ ID NO: 228185 - RNA, 19 nt, Artificial Sequence
  Description of Artificial Sequence: Synthetic oligonucleotide
  Antisense strand to SEQ ID NO: 228184
auugauguagaacaacuac

SEQ ID NO: 228186 - RNA, 19 nt, Artificial Sequence
  Description of Artificial Sequence: Synthetic oligonucleotide
  Sense strand starting at position 734 of SEQ ID NO: 2938
guuguucuacaucaaugaa

SEQ ID NO: 228187 - RNA, 19 nt, Artificial Sequence
  Description of Artificial Sequence: Synthetic oligonucleotide
  Antisense strand to SEQ ID NO: 228186
uucauugauguagaacaac

SEQ ID NO: 228188 - RNA, 19 nt, Artificial Sequence
  Description of Artificial Sequence: Synthetic oligonucleotide
  Sense strand starting at position 757 of SEQ ID NO: 2938
acaaguuuggaagguauaa

SEQ ID NO: 228189 - RNA, 19 nt, Artificial Sequence
  Description of Artificial Sequence: Synthetic oligonucleotide
  Antisense strand to SEQ ID NO: 228188
uuauaccuuccaaacuugu

SEQ ID NO: 228190 - RNA, 19 nt, Artificial Sequence
  Description of Artificial Sequence: Synthetic oligonucleotide
  Sense strand starting at position 773 of SEQ ID NO: 2938
uaaauauggucucugucag

SEQ ID NO: 228191 - RNA, 19 nt, Artificial Sequence
  Description of Artificial Sequence: Synthetic oligonucleotide
  Antisense strand to SEQ ID NO: 228190
cugacagagaccauauuua

SEQ ID NO: 228192 - RNA, 19 nt, Artificial Sequence
  Description of Artificial Sequence: Synthetic oligonucleotide
  Sense strand starting at position 780 of SEQ ID NO: 2938
ggucucugucaguuguagu

SEQ ID NO: 228193 - RNA, 19 nt, Artificial Sequence
  Description of Artificial Sequence: Synthetic oligonucleotide
  Antisense strand to SEQ ID NO: 228192
acuacaacugacagagacc

SEQ ID NO: 228194 - RNA, 19 nt, Artificial Sequence
  Description of Artificial Sequence: Synthetic oligonucleotide
  Sense strand starting at position 877 of SEQ ID NO: 2938
aaggauucccugugaacag

SEQ ID NO: 228195 - RNA, 19 nt, Artificial Sequence
  Description of Artificial Sequence: Synthetic oligonucleotide
  Antisense strand to SEQ ID NO: 228194
cuguucacagggaauccuu

SEQ ID NO: 228196 - RNA, 19 nt, Artificial Sequence
  Description of Artificial Sequence: Synthetic oligonucleotide
  Sense strand starting at position 948 of SEQ ID NO: 2938
aaaugugucugguccaaag

SEQ ID NO: 228197 - RNA, 19 nt, Artificial Sequence
  Description of Artificial Sequence: Synthetic oligonucleotide
  Antisense strand to SEQ ID NO: 228196
cuuuggaccagacacauuu

SEQ ID NO: 228198 - RNA, 19 nt, Artificial Sequence
  Description of Artificial Sequence: Synthetic oligonucleotide
  Sense strand starting at position 950 of SEQ ID NO: 2938
augugucugguccaaagau

SEQ ID NO: 228199 - RNA, 19 nt, Artificial Sequence
  Description of Artificial Sequence: Synthetic oligonucleotide
  Antisense strand to SEQ ID NO: 228198
aucuuuggaccagacacau

SEQ ID NO: 228200 - RNA, 19 nt, Artificial Sequence
  Description of Artificial Sequence: Synthetic oligonucleotide
  Sense strand starting at position 1188 of SEQ ID NO: 2938
auaaauaugcuuugggcau

SEQ ID NO: 228201 - RNA, 19 nt, Artificial Sequence
  Description of Artificial Sequence: Synthetic oligonucleotide
  Antisense strand to SEQ ID NO: 228200
augcccaaagcauauuuau

SEQ ID NO: 228202 - RNA, 19 nt, Artificial Sequence
  Description of Artificial Sequence: Synthetic oligonucleotide
  Sense strand starting at position 1192 of SEQ ID NO: 2938
auaugcuuugggcauuaaa

SEQ ID NO: 228203 - RNA, 19 nt, Artificial Sequence
  Description of Artificial Sequence: Synthetic oligonucleotide
  Antisense strand to SEQ ID NO: 228202
uuuaaugcccaaagcauau

SEQ ID NO: 228204 - RNA, 19 nt, Artificial Sequence
  Description of Artificial Sequence: Synthetic oligonucleotide
  Sense strand starting at position 1335 of SEQ ID NO: 2938
uccucuugcuuacugagaa

SEQ ID NO: 228205 - RNA, 19 nt, Artificial Sequence
  Description of Artificial Sequence: Synthetic oligonucleotide
  Antisense strand to SEQ ID NO: 228204
uucucaguaagcaagagga

SEQ ID NO: 228206 - RNA, 19 nt, Artificial Sequence
  Description of Artificial Sequence: Synthetic oligonucleotide
  Sense strand starting at position 1501 of SEQ ID NO: 2938
acucaacuccuuggagauu

SEQ ID NO: 228207 - RNA, 19 nt, Artificial Sequence
  Description of Artificial Sequence: Synthetic oligonucleotide
  Antisense strand to SEQ ID NO: 228206
aaucuccaaggaguugagu

SEQ ID NO: 228208 - RNA, 19 nt, Artificial Sequence
  Description of Artificial Sequence: Synthetic oligonucleotide
  Sense strand starting at position 1502 of SEQ ID NO: 2938
cucaacuccuuggagauuu

SEQ ID NO: 228209 - RNA, 19 nt, Artificial Sequence
  Description of Artificial Sequence: Synthetic oligonucleotide
  Antisense strand to SEQ ID NO: 228208
aaaucuccaaggaguugag

SEQ ID NO: 228210 - RNA, 19 nt, Artificial Sequence
  Description of Artificial Sequence: Synthetic oligonucleotide
  Sense strand starting at position 1525 of SEQ ID NO: 2938
gccagaauuccggagggau

SEQ ID NO: 228211 - RNA, 19 nt, Artificial Sequence
  Description of Artificial Sequence: Synthetic oligonucleotide
  Antisense strand to SEQ ID NO: 228210
aucccuccggaauucuggc

SEQ ID NO: 228212 - RNA, 19 nt, Artificial Sequence
  Description of Artificial Sequence: Synthetic oligonucleotide
  Sense strand starting at position 2308 of SEQ ID NO: 2938
ugcauaucccaacagcgau

SEQ ID NO: 228213 - RNA, 19 nt, Artificial Sequence
  Description of Artificial Sequence: Synthetic oligonucleotide
  Antisense strand to SEQ ID NO: 228212
aucgcuguugggauaugca

SEQ ID NO: 228214 - RNA, 19 nt, Artificial Sequence
  Description of Artificial Sequence: Synthetic oligonucleotide
  Sense strand starting at position 2382 of SEQ ID NO: 2938
ggauuuauucugcgauagc

SEQ ID NO: 228215 - RNA, 19 nt, Artificial Sequence
  Description of Artificial Sequence: Synthetic oligonucleotide
  Antisense strand to SEQ ID NO: 228214
gcuaucgcagaauaaaucc

SEQ ID NO: 228216 - RNA, 19 nt, Artificial Sequence
  Description of Artificial Sequence: Synthetic oligonucleotide
  Sense strand starting at position 2391 of SEQ ID NO: 2938
cugcgauagccuugauuug

SEQ ID NO: 228217 - RNA, 19 nt, Artificial Sequence
  Description of Artificial Sequence: Synthetic oligonucleotide
  Antisense strand to SEQ ID NO: 228216
caaaucaaggcuaucgcag

SEQ ID NO: 228218 - RNA, 19 nt, Artificial Sequence
  Description of Artificial Sequence: Synthetic oligonucleotide
  Sense strand starting at position 2437 of SEQ ID NO: 2938
cgccgucuuuggauccgaa

SEQ ID NO: 228219 - RNA, 19 nt, Artificial Sequence
  Description of Artificial Sequence: Synthetic oligonucleotide
  Antisense strand to SEQ ID NO: 228218
uucggauccaaagacggcg

SEQ ID NO: 228220 - RNA, 19 nt, Artificial Sequence
  Description of Artificial Sequence: Synthetic oligonucleotide
  Sense strand starting at position 2459 of SEQ ID NO: 2938
gacagucuauauccaggaa

SEQ ID NO: 228221 - RNA, 19 nt, Artificial Sequence
  Description of Artificial Sequence: Synthetic oligonucleotide
  Antisense strand to SEQ ID NO: 228220
uuccuggauauagacuguc

SEQ ID NO: 228222 - RNA, 19 nt, Artificial Sequence
  Description of Artificial Sequence: Synthetic oligonucleotide
  Sense strand starting at position 2463 of SEQ ID NO: 2938
gucuauauccaggaagcga

SEQ ID NO: 228223 - RNA, 19 nt, Artificial Sequence
  Description of Artificial Sequence: Synthetic oligonucleotide
  Antisense strand to SEQ ID NO: 228222
ucgcuuccuggauauagac

SEQ ID NO: 228224 - RNA, 19 nt, Artificial Sequence
  Description of Artificial Sequence: Synthetic oligonucleotide
  Sense strand starting at position 2617 of SEQ ID NO: 2938
ugauaugaaauaugcguaa

SEQ ID NO: 228225 - RNA, 19 nt, Artificial Sequence
  Description of Artificial Sequence: Synthetic oligonucleotide
  Antisense strand to SEQ ID NO: 228224
uuacgcauauuucauauca

SEQ ID NO: 228226 - RNA, 19 nt, Artificial Sequence
  Description of Artificial Sequence: Synthetic oligonucleotide
  Sense strand starting at position 2620 of SEQ ID NO: 2938
uaugaaauaugcguaaaug

SEQ ID NO: 228227 - RNA, 19 nt, Artificial Sequence
  Description of Artificial Sequence: Synthetic oligonucleotide
  Antisense strand to SEQ ID NO: 228226
cauuuacgcauauuucaua

SEQ ID NO: 228228 - RNA, 19 nt, Artificial Sequence
  Description of Artificial Sequence: Synthetic oligonucleotide
  Sense strand starting at position 2621 of SEQ ID NO: 2938
augaaauaugcguaaaugc

SEQ ID NO: 228229 - RNA, 19 nt, Artificial Sequence
  Description of Artificial Sequence: Synthetic oligonucleotide
  Antisense strand to SEQ ID NO: 228228
gcauuuacgcauauuucau

SEQ ID NO: 228230 - RNA, 19 nt, Artificial Sequence
  Description of Artificial Sequence: Synthetic oligonucleotide
  Sense strand starting at position 2759 of SEQ ID NO: 2938
auaaucauauccuccguga

SEQ ID NO: 228231 - RNA, 19 nt, Artificial Sequence
  Description of Artificial Sequence: Synthetic oligonucleotide
  Antisense strand to SEQ ID NO: 228230
ucacggaggauaugauuau

SEQ ID NO: 228232 - RNA, 19 nt, Artificial Sequence
  Description of Artificial Sequence: Synthetic oligonucleotide
  Sense strand starting at position 2835 of SEQ ID NO: 2938
uccaauccgcaucaugaaa

SEQ ID NO: 228233 - RNA, 19 nt, Artificial Sequence
  Description of Artificial Sequence: Synthetic oligonucleotide
  Antisense strand to SEQ ID NO: 228232
uuucaugaugcggauugga

SEQ ID NO: 228234 - RNA, 19 nt, Artificial Sequence
  Description of Artificial Sequence: Synthetic oligonucleotide
  Sense strand starting at position 2848 of SEQ ID NO: 2938
augaaagauugucuuacuc

SEQ ID NO: 228235 - RNA, 19 nt, Artificial Sequence
  Description of Artificial Sequence: Synthetic oligonucleotide
  Antisense strand to SEQ ID NO: 228234
gaguaagacaaucuuucau

SEQ ID NO: 228236 - RNA, 19 nt, Artificial Sequence
  Description of Artificial Sequence: Synthetic oligonucleotide
  Sense strand starting at position 2852 of SEQ ID NO: 2938
aagauugucuuacucggaa

SEQ ID NO: 228237 - RNA, 19 nt, Artificial Sequence
  Description of Artificial Sequence: Synthetic oligonucleotide
  Antisense strand to SEQ ID NO: 228236
uuccgaguaagacaaucuu

SEQ ID NO: 228238 - RNA, 19 nt, Artificial Sequence
  Description of Artificial Sequence: Synthetic oligonucleotide
  Sense strand starting at position 2855 of SEQ ID NO: 2938
auugucuuacucggaagaa

SEQ ID NO: 228239 - RNA, 19 nt, Artificial Sequence
  Description of Artificial Sequence: Synthetic oligonucleotide
  Antisense strand to SEQ ID NO: 228238
uucuuccgaguaagacaau

SEQ ID NO: 228240 - RNA, 19 nt, Artificial Sequence
  Description of Artificial Sequence: Synthetic oligonucleotide
  Sense strand starting at position 2917 of SEQ ID NO: 2938
gcuccuggucgaggagaaa

SEQ ID NO: 228241 - RNA, 19 nt, Artificial Sequence
  Description of Artificial Sequence: Synthetic oligonucleotide
  Antisense strand to SEQ ID NO: 228240
uuucuccucgaccaggagc

SEQ ID NO: 228242 - RNA, 19 nt, Artificial Sequence
  Description of Artificial Sequence: Synthetic oligonucleotide
  Sense strand starting at position 3443 of SEQ ID NO: 2938
aggcgagaucucgccgcuu

SEQ ID NO: 228243 - RNA, 19 nt, Artificial Sequence
  Description of Artificial Sequence: Synthetic oligonucleotide
  Antisense strand to SEQ ID NO: 228242
aagcggcgagaucucgccu

SEQ ID NO: 228244 - RNA, 19 nt, Artificial Sequence
  Description of Artificial Sequence: Synthetic oligonucleotide
  Sense strand starting at position 3446 of SEQ ID NO: 2938
cgagaucucgccgcuugga

SEQ ID NO: 228245 - RNA, 19 nt, Artificial Sequence
  Description of Artificial Sequence: Synthetic oligonucleotide
  Antisense strand to SEQ ID NO: 228244
uccaagcggcgagaucucg

SEQ ID NO: 228246 - RNA, 19 nt, Artificial Sequence
  Description of Artificial Sequence: Synthetic oligonucleotide
  Sense strand starting at position 3877 of SEQ ID NO: 2938
cugacucaagcuuaaguuu

SEQ ID NO: 228247 - RNA, 19 nt, Artificial Sequence
  Description of Artificial Sequence: Synthetic oligonucleotide
  Antisense strand to SEQ ID NO: 228246
aaacuuaagcuugagucag

SEQ ID NO: 228248 - RNA, 19 nt, Artificial Sequence
  Description of Artificial Sequence: Synthetic oligonucleotide
  Sense strand starting at position 3946 of SEQ ID NO: 2938
agugcaguucugccaaguu

SEQ ID NO: 228249 - RNA, 19 nt, Artificial Sequence
  Description of Artificial Sequence: Synthetic oligonucleotide
  Antisense strand to SEQ ID NO: 228248
aacuuggcagaacugcacu

SEQ ID NO: 228250 - RNA, 19 nt, Artificial Sequence
  Description of Artificial Sequence: Synthetic oligonucleotide
  Sense strand starting at position 3953 of SEQ ID NO: 2938
uucugccaaguuuaagaaa

SEQ ID NO: 228251 - RNA, 19 nt, Artificial Sequence
  Description of Artificial Sequence: Synthetic oligonucleotide
  Antisense strand to SEQ ID NO: 228250
uuucuuaaacuuggcagaa

SEQ ID NO: 228252 - RNA, 19 nt, Artificial Sequence
  Description of Artificial Sequence: Synthetic oligonucleotide
  Sense strand starting at position 106 of SEQ ID NO: 2939
uaaagugaugccuguacaa

SEQ ID NO: 228253 - RNA, 19 nt, Artificial Sequence
  Description of Artificial Sequence: Synthetic oligonucleotide
  Antisense strand to SEQ ID NO: 228252
uuguacaggcaucacuuua

SEQ ID NO: 228254 - RNA, 19 nt, Artificial Sequence
  Description of Artificial Sequence: Synthetic oligonucleotide
  Sense strand starting at position 108 of SEQ ID NO: 2939
aagugaugccuguacaaau

SEQ ID NO: 228255 - RNA, 19 nt, Artificial Sequence
  Description of Artificial Sequence: Synthetic oligonucleotide
  Antisense strand to SEQ ID NO: 228254
auuuguacaggcaucacuu

SEQ ID NO: 228256 - RNA, 19 nt, Artificial Sequence
  Description of Artificial Sequence: Synthetic oligonucleotide
  Sense strand starting at position 302 of SEQ ID NO: 2939
aguggaggaucuuuauuag

SEQ ID NO: 228257 - RNA, 19 nt, Artificial Sequence
  Description of Artificial Sequence: Synthetic oligonucleotide
  Antisense strand to SEQ ID NO: 228256
cuaauaaagauccuccacu

SEQ ID NO: 228258 - RNA, 19 nt, Artificial Sequence
  Description of Artificial Sequence: Synthetic oligonucleotide
  Sense strand starting at position 305 of SEQ ID NO: 2939
ggaggaucuuuauuagcaa

SEQ ID NO: 228259 - RNA, 19 nt, Artificial Sequence
  Description of Artificial Sequence: Synthetic oligonucleotide
  Antisense strand to SEQ ID NO: 228258
uugcuaauaaagauccucc

SEQ ID NO: 228260 - RNA, 19 nt, Artificial Sequence
  Description of Artificial Sequence: Synthetic oligonucleotide
  Sense strand starting at position 306 of SEQ ID NO: 2939
gaggaucuuuauuagcaag

SEQ ID NO: 228261 - RNA, 19 nt, Artificial Sequence
  Description of Artificial Sequence: Synthetic oligonucleotide
  Antisense strand to SEQ ID NO: 228260
cuugcuaauaaagauccuc

SEQ ID NO: 228262 - RNA, 19 nt, Artificial Sequence
  Description of Artificial Sequence: Synthetic oligonucleotide
  Sense strand starting at position 323 of SEQ ID NO: 2939
agccgauugcuggaugcaa

SEQ ID NO: 228263 - RNA, 19 nt, Artificial Sequence
  Description of Artificial Sequence: Synthetic oligonucleotide
  Antisense strand to SEQ ID NO: 228262
uugcauccagcaaucggcu

SEQ ID NO: 228264 - RNA, 19 nt, Artificial Sequence
  Description of Artificial Sequence: Synthetic oligonucleotide
  Sense strand starting at position 462 of SEQ ID NO: 2939
gcggaagccaguuugcuua

SEQ ID NO: 228265 - RNA, 19 nt, Artificial Sequence
  Description of Artificial Sequence: Synthetic oligonucleotide
  Antisense strand to SEQ ID NO: 228264
uaagcaaacuggcuuccgc

SEQ ID NO: 228266 - RNA, 19 nt, Artificial Sequence
  Description of Artificial Sequence: Synthetic oligonucleotide
  Sense strand starting at position 469 of SEQ ID NO: 2939
ccaguuugcuuacugcaaa

SEQ ID NO: 228267 - RNA, 19 nt, Artificial Sequence
  Description of Artificial Sequence: Synthetic oligonucleotide
  Antisense strand to SEQ ID NO: 228266
uuugcaguaagcaaacugg

SEQ ID NO: 228268 - RNA, 19 nt, Artificial Sequence
  Description of Artificial Sequence: Synthetic oligonucleotide
  Sense strand starting at position 512 of SEQ ID NO: 2939
gcacgugugacuuggagaa

SEQ ID NO: 228269 - RNA, 19 nt, Artificial Sequence
  Description of Artificial Sequence: Synthetic oligonucleotide
  Antisense strand to SEQ ID NO: 228268
uucuccaagucacacgugc

SEQ ID NO: 228270 - RNA, 19 nt, Artificial Sequence
  Description of Artificial Sequence: Synthetic oligonucleotide
  Sense strand starting at position 514 of SEQ ID NO: 2939
acgugugacuuggagaagu

SEQ ID NO: 228271 - RNA, 19 nt, Artificial Sequence
  Description of Artificial Sequence: Synthetic oligonucleotide
  Antisense strand to SEQ ID NO: 228270
acuucuccaagucacacgu

SEQ ID NO: 228272 - RNA, 19 nt, Artificial Sequence
  Description of Artificial Sequence: Synthetic oligonucleotide
  Sense strand starting at position 535 of SEQ ID NO: 2939
ggccaagguugccgagaaa

SEQ ID NO: 228273 - RNA, 19 nt, Artificial Sequence
  Description of Artificial Sequence: Synthetic oligonucleotide
  Antisense strand to SEQ ID NO: 228272
uuucucggcaaccuuggcc

SEQ ID NO: 228274 - RNA, 19 nt, Artificial Sequence
  Description of Artificial Sequence: Synthetic oligonucleotide
  Sense strand starting at position 538 of SEQ ID NO: 2939
caagguugccgagaaacau

SEQ ID NO: 228275 - RNA, 19 nt, Artificial Sequence
  Description of Artificial Sequence: Synthetic oligonucleotide
  Antisense strand to SEQ ID NO: 228274
auguuucucggcaaccuug

SEQ ID NO: 228276 - RNA, 19 nt, Artificial Sequence
  Description of Artificial Sequence: Synthetic oligonucleotide
  Sense strand starting at position 547 of SEQ ID NO: 2939
cgagaaacaucccaagaca

SEQ ID NO: 228277 - RNA, 19 nt, Artificial Sequence
  Description of Artificial Sequence: Synthetic oligonucleotide
  Antisense strand to SEQ ID NO: 228276
ugucuugggauguuucucg

SEQ ID NO: 228278 - RNA, 19 nt, Artificial Sequence
  Description of Artificial Sequence: Synthetic oligonucleotide
  Sense strand starting at position 717 of SEQ ID NO: 2939
aagcguggugcgagguuaa

SEQ ID NO: 228279 - RNA, 19 nt, Artificial Sequence
  Description of Artificial Sequence: Synthetic oligonucleotide
  Antisense strand to SEQ ID NO: 228278
uuaaccucgcaccacgcuu

SEQ ID NO: 228280 - RNA, 19 nt, Artificial Sequence
  Description of Artificial Sequence: Synthetic oligonucleotide
  Sense strand starting at position 763 of SEQ ID NO: 2939
uguacucuggucugagacu

SEQ ID NO: 228281 - RNA, 19 nt, Artificial Sequence
  Description of Artificial Sequence: Synthetic oligonucleotide
  Antisense strand to SEQ ID NO: 228280
agucucagaccagaguaca

SEQ ID NO: 228282 - RNA, 19 nt, Artificial Sequence
  Description of Artificial Sequence: Synthetic oligonucleotide
  Sense strand starting at position 853 of SEQ ID NO: 2939
uugcguccgaacugguaua

SEQ ID NO: 228283 - RNA, 19 nt, Artificial Sequence
  Description of Artificial Sequence: Synthetic oligonucleotide
  Antisense strand to SEQ ID NO: 228282
uauaccaguucggacgcaa

SEQ ID NO: 228284 - RNA, 19 nt, Artificial Sequence
  Description of Artificial Sequence: Synthetic oligonucleotide
  Sense strand starting at position 899 of SEQ ID NO: 2939
ccugcuuuccugggaggga

SEQ ID NO: 228285 - RNA, 19 nt, Artificial Sequence
  Description of Artificial Sequence: Synthetic oligonucleotide
  Antisense strand to SEQ ID NO: 228284
ucccucccaggaaagcagg

SEQ ID NO: 228286 - RNA, 19 nt, Artificial Sequence
  Description of Artificial Sequence: Synthetic oligonucleotide
  Sense strand starting at position 990 of SEQ ID NO: 2939
gcagccuucccggcaguaa

SEQ ID NO: 228287 - RNA, 19 nt, Artificial Sequence
  Description of Artificial Sequence: Synthetic oligonucleotide
  Antisense strand to SEQ ID NO: 228286
uuacugccgggaaggcugc

SEQ ID NO: 228288 - RNA, 19 nt, Artificial Sequence
  Description of Artificial Sequence: Synthetic oligonucleotide
  Sense strand starting at position 1001 of SEQ ID NO: 2939
ggcaguaacuucuaaacag

SEQ ID NO: 228289 - RNA, 19 nt, Artificial Sequence
  Description of Artificial Sequence: Synthetic oligonucleotide
  Antisense strand to SEQ ID NO: 228288
cuguuuagaaguuacugcc

SEQ ID NO: 228290 - RNA, 19 nt, Artificial Sequence
  Description of Artificial Sequence: Synthetic oligonucleotide
  Sense strand starting at position 2285 of SEQ ID NO: 2939
ccgggaugucguuucaguu

SEQ ID NO: 228291 - RNA, 19 nt, Artificial Sequence
  Description of Artificial Sequence: Synthetic oligonucleotide
  Antisense strand to SEQ ID NO: 228290
aacugaaacgacaucccgg

SEQ ID NO: 228292 - RNA, 19 nt, Artificial Sequence
  Description of Artificial Sequence: Synthetic oligonucleotide
  Sense strand starting at position 2286 of SEQ ID NO: 2939
cgggaugucguuucaguuc

SEQ ID NO: 228293 - RNA, 19 nt, Artificial Sequence
  Description of Artificial Sequence: Synthetic oligonucleotide
  Antisense strand to SEQ ID NO: 228292
gaacugaaacgacaucccg

SEQ ID NO: 228294 - RNA, 19 nt, Artificial Sequence
  Description of Artificial Sequence: Synthetic oligonucleotide
  Sense strand starting at position 2447 of SEQ ID NO: 2939
cgaccuuguuccugagguu

SEQ ID NO: 228295 - RNA, 19 nt, Artificial Sequence
  Description of Artificial Sequence: Synthetic oligonucleotide
  Antisense strand to SEQ ID NO: 228294
aaccucaggaacaaggucg

SEQ ID NO: 228296 - RNA, 19 nt, Artificial Sequence
  Description of Artificial Sequence: Synthetic oligonucleotide
  Sense strand starting at position 2448 of SEQ ID NO: 2939
gaccuuguuccugagguuu

SEQ ID NO: 228297 - RNA, 19 nt, Artificial Sequence
  Description of Artificial Sequence: Synthetic oligonucleotide
  Antisense strand to SEQ ID NO: 228296
aaaccucaggaacaagguc

SEQ ID NO: 228298 - RNA, 19 nt, Artificial Sequence
  Description of Artificial Sequence: Synthetic oligonucleotide
  Sense strand starting at position 2746 of SEQ ID NO: 2939
gagacacuguggcuuaaau

SEQ ID NO: 228299 - RNA, 19 nt, Artificial Sequence
  Description of Artificial Sequence: Synthetic oligonucleotide
  Antisense strand to SEQ ID NO: 228298
auuuaagccacagugucuc

SEQ ID NO: 228300 - RNA, 19 nt, Artificial Sequence
  Description of Artificial Sequence: Synthetic oligonucleotide
  Sense strand starting at position 2748 of SEQ ID NO: 2939
gacacuguggcuuaaauug

SEQ ID NO: 228301 - RNA, 19 nt, Artificial Sequence
  Description of Artificial Sequence: Synthetic oligonucleotide
  Antisense strand to SEQ ID NO: 228300
caauuuaagccacaguguc

SEQ ID NO: 228302 - RNA, 19 nt, Artificial Sequence
  Description of Artificial Sequence: Synthetic oligonucleotide
  Sense strand starting at position 3329 of SEQ ID NO: 2939
ccacucgacugcuccgaaa

SEQ ID NO: 228303 - RNA, 19 nt, Artificial Sequence
  Description of Artificial Sequence: Synthetic oligonucleotide
  Antisense strand to SEQ ID NO: 228302
uuucggagcagucgagugg

SEQ ID NO: 228304 - RNA, 19 nt, Artificial Sequence
  Description of Artificial Sequence: Synthetic oligonucleotide
  Sense strand starting at position 3491 of SEQ ID NO: 2939
gcgccuucggaaggaauga

SEQ ID NO: 228305 - RNA, 19 nt, Artificial Sequence
  Description of Artificial Sequence: Synthetic oligonucleotide
  Antisense strand to SEQ ID NO: 228304
ucauuccuuccgaaggcgc

SEQ ID NO: 228306 - RNA, 19 nt, Artificial Sequence
  Description of Artificial Sequence: Synthetic oligonucleotide
  Sense strand starting at position 3537 of SEQ ID NO: 2939
gcuggccucuccggagauu

SEQ ID NO: 228307 - RNA, 19 nt, Artificial Sequence
  Description of Artificial Sequence: Synthetic oligonucleotide
  Antisense strand to SEQ ID NO: 228306
aaucuccggagaggccagc

SEQ ID NO: 228308 - RNA, 19 nt, Artificial Sequence
  Description of Artificial Sequence: Synthetic oligonucleotide
  Sense strand starting at position 3546 of SEQ ID NO: 2939
uccggagauuuccagcuuu

SEQ ID NO: 228309 - RNA, 19 nt, Artificial Sequence
  Description of Artificial Sequence: Synthetic oligonucleotide
  Antisense strand to SEQ ID NO: 228308
aaagcuggaaaucuccgga

SEQ ID NO: 228310 - RNA, 19 nt, Artificial Sequence
  Description of Artificial Sequence: Synthetic oligonucleotide
  Sense strand starting at position 3554 of SEQ ID NO: 2939
uuuccagcuuucugugaug

SEQ ID NO: 228311 - RNA, 19 nt, Artificial Sequence
  Description of Artificial Sequence: Synthetic oligonucleotide
  Antisense strand to SEQ ID NO: 228310
caucacagaaagcuggaaa

SEQ ID NO: 228312 - RNA, 19 nt, Artificial Sequence
  Description of Artificial Sequence: Synthetic oligonucleotide
  Sense strand starting at position 3556 of SEQ ID NO: 2939
uccagcuuucugugauggu

SEQ ID NO: 228313 - RNA, 19 nt, Artificial Sequence
  Description of Artificial Sequence: Synthetic oligonucleotide
  Antisense strand to SEQ ID NO: 228312
accaucacagaaagcugga

SEQ ID NO: 228314 - RNA, 19 nt, Artificial Sequence
  Description of Artificial Sequence: Synthetic oligonucleotide
  Sense strand starting at position 3559 of SEQ ID NO: 2939
agcuuucugugauggucuu

SEQ ID NO: 228315 - RNA, 19 nt, Artificial Sequence
  Description of Artificial Sequence: Synthetic oligonucleotide
  Antisense strand to SEQ ID NO: 228314
aagaccaucacagaaagcu

SEQ ID NO: 228316 - RNA, 19 nt, Artificial Sequence
  Description of Artificial Sequence: Synthetic oligonucleotide
  Sense strand starting at position 3560 of SEQ ID NO: 2939
gcuuucugugauggucuuu

SEQ ID NO: 228317 - RNA, 19 nt, Artificial Sequence
  Description of Artificial Sequence: Synthetic oligonucleotide
  Antisense strand to SEQ ID NO: 228316
aaagaccaucacagaaagc

SEQ ID NO: 228318 - RNA, 19 nt, Artificial Sequence
  Description of Artificial Sequence: Synthetic oligonucleotide
  Sense strand starting at position 3685 of SEQ ID NO: 2939
ccacccucagucugggaaa

SEQ ID NO: 228319 - RNA, 19 nt, Artificial Sequence
  Description of Artificial Sequence: Synthetic oligonucleotide
  Antisense strand to SEQ ID NO: 228318
uuucccagacugagggugg

SEQ ID NO: 228320 - RNA, 19 nt, Artificial Sequence
  Description of Artificial Sequence: Synthetic oligonucleotide
  Sense strand starting at position 3861 of SEQ ID NO: 2939
gcggguucaguuggguaaa

SEQ ID NO: 228321 - RNA, 19 nt, Artificial Sequence
  Description of Artificial Sequence: Synthetic oligonucleotide
  Antisense strand to SEQ ID NO: 228320
uuuacccaacugaacccgc

SEQ ID NO: 228322 - RNA, 19 nt, Artificial Sequence
  Description of Artificial Sequence: Synthetic oligonucleotide
  Sense strand starting at position 3864 of SEQ ID NO: 2939
gguucaguuggguaaacgu

SEQ ID NO: 228323 - RNA, 19 nt, Artificial Sequence
  Description of Artificial Sequence: Synthetic oligonucleotide
  Antisense strand to SEQ ID NO: 228322
acguuuacccaacugaacc

SEQ ID NO: 228324 - RNA, 19 nt, Artificial Sequence
  Description of Artificial Sequence: Synthetic oligonucleotide
  Sense strand starting at position 3893 of SEQ ID NO: 2939
ugugcucugcggugacaga

SEQ ID NO: 228325 - RNA, 19 nt, Artificial Sequence
  Description of Artificial Sequence: Synthetic oligonucleotide
  Antisense strand to SEQ ID NO: 228324
ucugucaccgcagagcaca

SEQ ID NO: 228326 - RNA, 19 nt, Artificial Sequence
  Description of Artificial Sequence: Synthetic oligonucleotide
  Sense strand starting at position 3974 of SEQ ID NO: 2939
gcgcuccuagccugguaau

SEQ ID NO: 228327 - RNA, 19 nt, Artificial Sequence
  Description of Artificial Sequence: Synthetic oligonucleotide
  Antisense strand to SEQ ID NO: 228326
auuaccaggcuaggagcgc

SEQ ID NO: 228328 - RNA, 19 nt, Artificial Sequence
  Description of Artificial Sequence: Synthetic oligonucleotide
  Sense strand starting at position 3977 of SEQ ID NO: 2939
cuccuagccugguaaugaa

SEQ ID NO: 228329 - RNA, 19 nt, Artificial Sequence
  Description of Artificial Sequence: Synthetic oligonucleotide
  Antisense strand to SEQ ID NO: 228328
uucauuaccaggcuaggag

SEQ ID NO: 228330 - RNA, 19 nt, Artificial Sequence
  Description of Artificial Sequence: Synthetic oligonucleotide
  Sense strand starting at position 112 of SEQ ID NO: 2940
uggguacucaccggaggau

SEQ ID NO: 228331 - RNA, 19 nt, Artificial Sequence
  Description of Artificial Sequence: Synthetic oligonucleotide
  Antisense strand to SEQ ID NO: 228330
auccuccggugaguaccca

SEQ ID NO: 228332 - RNA, 19 nt, Artificial Sequence
  Description of Artificial Sequence: Synthetic oligonucleotide
  Sense strand starting at position 179 of SEQ ID NO: 2940
ggcugcugcgagucaguuu

SEQ ID NO: 228333 - RNA, 19 nt, Artificial Sequence
  Description of Artificial Sequence: Synthetic oligonucleotide
  Antisense strand to SEQ ID NO: 228332
aaacugacucgcagcagcc

SEQ ID NO: 228334 - RNA, 19 nt, Artificial Sequence
  Description of Artificial Sequence: Synthetic oligonucleotide
  Sense strand starting at position 652 of SEQ ID NO: 2940
caggauguugucgaugaaa

SEQ ID NO: 228335 - RNA, 19 nt, Artificial Sequence
  Description of Artificial Sequence: Synthetic oligonucleotide
  Antisense strand to SEQ ID NO: 228334
uuucaucgacaacauccug

SEQ ID NO: 228336 - RNA, 19 nt, Artificial Sequence
  Description of Artificial Sequence: Synthetic oligonucleotide
  Sense strand starting at position 1149 of SEQ ID NO: 2940
ccuggaucgcucguucuua

SEQ ID NO: 228337 - RNA, 19 nt, Artificial Sequence
  Description of Artificial Sequence: Synthetic oligonucleotide
  Antisense strand to SEQ ID NO: 228336
uaagaacgagcgauccagg

SEQ ID NO: 228338 - RNA, 19 nt, Artificial Sequence
  Description of Artificial Sequence: Synthetic oligonucleotide
  Sense strand starting at position 1163 of SEQ ID NO: 2940
ucuuaucuagcagauagau

SEQ ID NO: 228339 - RNA, 19 nt, Artificial Sequence
  Description of Artificial Sequence: Synthetic oligonucleotide
  Antisense strand to SEQ ID NO: 228338
aucuaucugcuagauaaga

SEQ ID NO: 228340 - RNA, 19 nt, Artificial Sequence
  Description of Artificial Sequence: Synthetic oligonucleotide
  Sense strand starting at position 1486 of SEQ ID NO: 2940
ccuuuaaucgccuuugcuu

SEQ ID NO: 228341 - RNA, 19 nt, Artificial Sequence
  Description of Artificial Sequence: Synthetic oligonucleotide
  Antisense strand to SEQ ID NO: 228340
aagcaaaggcgauuaaagg

SEQ ID NO: 228342 - RNA, 19 nt, Artificial Sequence
  Description of Artificial Sequence: Synthetic oligonucleotide
  Sense strand starting at position 1487 of SEQ ID NO: 2940
cuuuaaucgccuuugcuuu

SEQ ID NO: 228343 - RNA, 19 nt, Artificial Sequence
  Description of Artificial Sequence: Synthetic oligonucleotide
  Antisense strand to SEQ ID NO: 228342
aaagcaaaggcgauuaaag

SEQ ID NO: 228344 - RNA, 19 nt, Artificial Sequence
  Description of Artificial Sequence: Synthetic oligonucleotide
  Sense strand starting at position 1749 of SEQ ID NO: 2940
cgggacuuugcggauaaau

SEQ ID NO: 228345 - RNA, 19 nt, Artificial Sequence
  Description of Artificial Sequence: Synthetic oligonucleotide
  Antisense strand to SEQ ID NO: 228344
auuuauccgcaaagucccg

SEQ ID NO: 228346 - RNA, 19 nt, Artificial Sequence
  Description of Artificial Sequence: Synthetic oligonucleotide
  Sense strand starting at position 1981 of SEQ ID NO: 2940
ggauuaugggucugugagc

SEQ ID NO: 228347 - RNA, 19 nt, Artificial Sequence
  Description of Artificial Sequence: Synthetic oligonucleotide
  Antisense strand to SEQ ID NO: 228346
gcucacagacccauaaucc

SEQ ID NO: 228348 - RNA, 19 nt, Artificial Sequence
  Description of Artificial Sequence: Synthetic oligonucleotide
  Sense strand starting at position 1982 of SEQ ID NO: 2940
gauuaugggucugugagcu

SEQ ID NO: 228349 - RNA, 19 nt, Artificial Sequence
  Description of Artificial Sequence: Synthetic oligonucleotide
  Antisense strand to SEQ ID NO: 228348
agcucacagacccauaauc

SEQ ID NO: 228350 - RNA, 19 nt, Artificial Sequence
  Description of Artificial Sequence: Synthetic oligonucleotide
  Sense strand starting at position 2089 of SEQ ID NO: 2940
guugcuguuauugaaggau

SEQ ID NO: 228351 - RNA, 19 nt, Artificial Sequence
  Description of Artificial Sequence: Synthetic oligonucleotide
  Antisense strand to SEQ ID NO: 228350
auccuucaauaacagcaac

SEQ ID NO: 228352 - RNA, 19 nt, Artificial Sequence
  Description of Artificial Sequence: Synthetic oligonucleotide
  Sense strand starting at position 2093 of SEQ ID NO: 2940
cuguuauugaaggaugggu

SEQ ID NO: 228353 - RNA, 19 nt, Artificial Sequence
  Description of Artificial Sequence: Synthetic oligonucleotide
  Antisense strand to SEQ ID NO: 228352
acccauccuucaauaacag

SEQ ID NO: 228354 - RNA, 19 nt, Artificial Sequence
  Description of Artificial Sequence: Synthetic oligonucleotide
  Sense strand starting at position 2215 of SEQ ID NO: 2940
gaccuagaguugguuacuu

SEQ ID NO: 228355 - RNA, 19 nt, Artificial Sequence
  Description of Artificial Sequence: Synthetic oligonucleotide
  Antisense strand to SEQ ID NO: 228354
aaguaaccaacucuagguc

SEQ ID NO: 228356 - RNA, 19 nt, Artificial Sequence
  Description of Artificial Sequence: Synthetic oligonucleotide
  Sense strand starting at position 2492 of SEQ ID NO: 2940
ccgggcaacgcagauuaau

SEQ ID NO: 228357 - RNA, 19 nt, Artificial Sequence
  Description of Artificial Sequence: Synthetic oligonucleotide
  Antisense strand to SEQ ID NO: 228356
auuaaucugcguugcccgg

SEQ ID NO: 228358 - RNA, 19 nt, Artificial Sequence
  Description of Artificial Sequence: Synthetic oligonucleotide
  Sense strand starting at position 2577 of SEQ ID NO: 2940
caggguaaccucuguguua

SEQ ID NO: 228359 - RNA, 19 nt, Artificial Sequence
  Description of Artificial Sequence: Synthetic oligonucleotide
  Antisense strand to SEQ ID NO: 228358
uaacacagagguuacccug

SEQ ID NO: 228360 - RNA, 19 nt, Artificial Sequence
  Description of Artificial Sequence: Synthetic oligonucleotide
  Sense strand starting at position 2578 of SEQ ID NO: 2940
aggguaaccucuguguuag

SEQ ID NO: 228361 - RNA, 19 nt, Artificial Sequence
  Description of Artificial Sequence: Synthetic oligonucleotide
  Antisense strand to SEQ ID NO: 228360
cuaacacagagguuacccu

SEQ ID NO: 228362 - RNA, 19 nt, Artificial Sequence
  Description of Artificial Sequence: Synthetic oligonucleotide
  Sense strand starting at position 2579 of SEQ ID NO: 2940
ggguaaccucuguguuaga

SEQ ID NO: 228363 - RNA, 19 nt, Artificial Sequence
  Description of Artificial Sequence: Synthetic oligonucleotide
  Antisense strand to SEQ ID NO: 228362
ucuaacacagagguuaccc

SEQ ID NO: 228364 - RNA, 19 nt, Artificial Sequence
  Description of Artificial Sequence: Synthetic oligonucleotide
  Sense strand starting at position 2580 of SEQ ID NO: 2940
gguaaccucuguguuagau

SEQ ID NO: 228365 - RNA, 19 nt, Artificial Sequence
  Description of Artificial Sequence: Synthetic oligonucleotide
  Antisense strand to SEQ ID NO: 228364
aucuaacacagagguuacc

SEQ ID NO: 228366 - RNA, 19 nt, Artificial Sequence
  Description of Artificial Sequence: Synthetic oligonucleotide
  Sense strand starting at position 2589 of SEQ ID NO: 2940
uguguuagauuucccugca

SEQ ID NO: 228367 - RNA, 19 nt, Artificial Sequence
  Description of Artificial Sequence: Synthetic oligonucleotide
  Antisense strand to SEQ ID NO: 228366
ugcagggaaaucuaacaca

SEQ ID NO: 228368 - RNA, 19 nt, Artificial Sequence
  Description of Artificial Sequence: Synthetic oligonucleotide
  Sense strand starting at position 2590 of SEQ ID NO: 2940
guguuagauuucccugcaa

SEQ ID NO: 228369 - RNA, 19 nt, Artificial Sequence
  Description of Artificial Sequence: Synthetic oligonucleotide
  Antisense strand to SEQ ID NO: 228368
uugcagggaaaucuaacac

SEQ ID NO: 228370 - RNA, 19 nt, Artificial Sequence
  Description of Artificial Sequence: Synthetic oligonucleotide
  Sense strand starting at position 2665 of SEQ ID NO: 2940
aguugugaacagggaguuu

SEQ ID NO: 228371 - RNA, 19 nt, Artificial Sequence
  Description of Artificial Sequence: Synthetic oligonucleotide
  Antisense strand to SEQ ID NO: 228370
aaacucccuguucacaacu

SEQ ID NO: 228372 - RNA, 19 nt, Artificial Sequence
  Description of Artificial Sequence: Synthetic oligonucleotide
  Sense strand starting at position 2674 of SEQ ID NO: 2940
cagggaguuucccucaauu

SEQ ID NO: 228373 - RNA, 19 nt, Artificial Sequence
  Description of Artificial Sequence: Synthetic oligonucleotide
  Antisense strand to SEQ ID NO: 228372
aauugagggaaacucccug

SEQ ID NO: 228374 - RNA, 19 nt, Artificial Sequence
  Description of Artificial Sequence: Synthetic oligonucleotide
  Sense strand starting at position 2676 of SEQ ID NO: 2940
gggaguuucccucaauugc

SEQ ID NO: 228375 - RNA, 19 nt, Artificial Sequence
  Description of Artificial Sequence: Synthetic oligonucleotide
  Antisense strand to SEQ ID NO: 228374
gcaauugagggaaacuccc

SEQ ID NO: 228376 - RNA, 19 nt, Artificial Sequence
  Description of Artificial Sequence: Synthetic oligonucleotide
  Sense strand starting at position 2703 of SEQ ID NO: 2940
ugaauuuccugggauugcu

SEQ ID NO: 228377 - RNA, 19 nt, Artificial Sequence
  Description of Artificial Sequence: Synthetic oligonucleotide
  Antisense strand to SEQ ID NO: 228376
agcaaucccaggaaauuca

SEQ ID NO: 228378 - RNA, 19 nt, Artificial Sequence
  Description of Artificial Sequence: Synthetic oligonucleotide
  Sense strand starting at position 2829 of SEQ ID NO: 2940
ucgcuauuuccuggucgag

SEQ ID NO: 228379 - RNA, 19 nt, Artificial Sequence
  Description of Artificial Sequence: Synthetic oligonucleotide
  Antisense strand to SEQ ID NO: 228378
cucgaccaggaaauagcga

SEQ ID NO: 228380 - RNA, 19 nt, Artificial Sequence
  Description of Artificial Sequence: Synthetic oligonucleotide
  Sense strand starting at position 2862 of SEQ ID NO: 2940
uucucauaaccgggaaugu

SEQ ID NO: 228381 - RNA, 19 nt, Artificial Sequence
  Description of Artificial Sequence: Synthetic oligonucleotide
  Antisense strand to SEQ ID NO: 228380
acauucccgguuaugagaa

SEQ ID NO: 228382 - RNA, 19 nt, Artificial Sequence
  Description of Artificial Sequence: Synthetic oligonucleotide
  Sense strand starting at position 2923 of SEQ ID NO: 2940
cgggacuugucuccggauu

SEQ ID NO: 228383 - RNA, 19 nt, Artificial Sequence
  Description of Artificial Sequence: Synthetic oligonucleotide
  Antisense strand to SEQ ID NO: 228382
aauccggagacaagucccg

SEQ ID NO: 228384 - RNA, 19 nt, Artificial Sequence
  Description of Artificial Sequence: Synthetic oligonucleotide
  Sense strand starting at position 2924 of SEQ ID NO: 2940
gggacuugucuccggauuc

SEQ ID NO: 228385 - RNA, 19 nt, Artificial Sequence
  Description of Artificial Sequence: Synthetic oligonucleotide
  Antisense strand to SEQ ID NO: 228384
gaauccggagacaaguccc

SEQ ID NO: 228386 - RNA, 19 nt, Artificial Sequence
  Description of Artificial Sequence: Synthetic oligonucleotide
  Sense strand starting at position 2987 of SEQ ID NO: 2940
cgagaaaggcgucagcaaa

SEQ ID NO: 228387 - RNA, 19 nt, Artificial Sequence
  Description of Artificial Sequence: Synthetic oligonucleotide
  Antisense strand to SEQ ID NO: 228386
uuugcugacgccuuucucg

SEQ ID NO: 228388 - RNA, 19 nt, Artificial Sequence
  Description of Artificial Sequence: Synthetic oligonucleotide
  Sense strand starting at position 3318 of SEQ ID NO: 2940
ugaguucccggcuagacuu

SEQ ID NO: 228389 - RNA, 19 nt, Artificial Sequence
  Description of Artificial Sequence: Synthetic oligonucleotide
  Antisense strand to SEQ ID NO: 228388
aagucuagccgggaacuca

SEQ ID NO: 228390 - RNA, 19 nt, Artificial Sequence
  Description of Artificial Sequence: Synthetic oligonucleotide
  Sense strand starting at position 3541 of SEQ ID NO: 2940
uugaaaucuuuaucccgca

SEQ ID NO: 228391 - RNA, 19 nt, Artificial Sequence
  Description of Artificial Sequence: Synthetic oligonucleotide
  Antisense strand to SEQ ID NO: 228390
ugcgggauaaagauuucaa

SEQ ID NO: 228392 - RNA, 19 nt, Artificial Sequence
  Description of Artificial Sequence: Synthetic oligonucleotide
  Sense strand starting at position 3542 of SEQ ID NO: 2940
ugaaaucuuuaucccgcaa

SEQ ID NO: 228393 - RNA, 19 nt, Artificial Sequence
  Description of Artificial Sequence: Synthetic oligonucleotide
  Antisense strand to SEQ ID NO: 228392
uugcgggauaaagauuuca

SEQ ID NO: 228394 - RNA, 19 nt, Artificial Sequence
  Description of Artificial Sequence: Synthetic oligonucleotide
  Sense strand starting at position 3546 of SEQ ID NO: 2940
aucuuuaucccgcaagcaa

SEQ ID NO: 228395 - RNA, 19 nt, Artificial Sequence
  Description of Artificial Sequence: Synthetic oligonucleotide
  Antisense strand to SEQ ID NO: 228394
uugcuugcgggauaaagau

SEQ ID NO: 228396 - RNA, 19 nt, Artificial Sequence
  Description of Artificial Sequence: Synthetic oligonucleotide
  Sense strand starting at position 3563 of SEQ ID NO: 2940
aagcguggguacuuaauua

SEQ ID NO: 228397 - RNA, 19 nt, Artificial Sequence
  Description of Artificial Sequence: Synthetic oligonucleotide
  Antisense strand to SEQ ID NO: 228396
uaauuaaguacccacgcuu

SEQ ID NO: 228398 - RNA, 19 nt, Artificial Sequence
  Description of Artificial Sequence: Synthetic oligonucleotide
  Sense strand starting at position 3567 of SEQ ID NO: 2940
guggguacuuaauuaaauu

SEQ ID NO: 228399 - RNA, 19 nt, Artificial Sequence
  Description of Artificial Sequence: Synthetic oligonucleotide
  Antisense strand to SEQ ID NO: 228398
aauuuaauuaaguacccac

SEQ ID NO: 228400 - RNA, 19 nt, Artificial Sequence
  Description of Artificial Sequence: Synthetic oligonucleotide
  Sense strand starting at position 3643 of SEQ ID NO: 2940
ccuuucagcgcgguaaaua

SEQ ID NO: 228401 - RNA, 19 nt, Artificial Sequence
  Description of Artificial Sequence: Synthetic oligonucleotide
  Antisense strand to SEQ ID NO: 228400
uauuuaccgcgcugaaagg

SEQ ID NO: 228402 - RNA, 19 nt, Artificial Sequence
  Description of Artificial Sequence: Synthetic oligonucleotide
  Sense strand starting at position 3767 of SEQ ID NO: 2940
ucaucacaggccugugaau

SEQ ID NO: 228403 - RNA, 19 nt, Artificial Sequence
  Description of Artificial Sequence: Synthetic oligonucleotide
  Antisense strand to SEQ ID NO: 228402
auucacaggccugugauga

SEQ ID NO: 228404 - RNA, 19 nt, Artificial Sequence
  Description of Artificial Sequence: Synthetic oligonucleotide
  Sense strand starting at position 3769 of SEQ ID NO: 2940
aucacaggccugugaauaa

SEQ ID NO: 228405 - RNA, 19 nt, Artificial Sequence
  Description of Artificial Sequence: Synthetic oligonucleotide
  Antisense strand to SEQ ID NO: 228404
uuauucacaggccugugau

SEQ ID NO: 228406 - RNA, 19 nt, Artificial Sequence
  Description of Artificial Sequence: Synthetic oligonucleotide
  Sense strand starting at position 3819 of SEQ ID NO: 2940
uggcaagacgcuuaaucaa

SEQ ID NO: 228407 - RNA, 19 nt, Artificial Sequence
  Description of Artificial Sequence: Synthetic oligonucleotide
  Antisense strand to SEQ ID NO: 228406
uugauuaagcgucuugcca

SEQ ID NO: 228408 - RNA, 19 nt, Artificial Sequence
  Description of Artificial Sequence: Synthetic oligonucleotide
  Sense strand starting at position 3949 of SEQ ID NO: 2940
gacuuuauugacggcuuaa

SEQ ID NO: 228409 - RNA, 19 nt, Artificial Sequence
  Description of Artificial Sequence: Synthetic oligonucleotide
  Antisense strand to SEQ ID NO: 228408
uuaagccgucaauaaaguc

SEQ ID NO: 228410 - RNA, 19 nt, Artificial Sequence
  Description of Artificial Sequence: Synthetic oligonucleotide
  Sense strand starting at position 17 of SEQ ID NO: 2941
ucacuugucuugggucuga

SEQ ID NO: 228411 - RNA, 19 nt, Artificial Sequence
  Description of Artificial Sequence: Synthetic oligonucleotide
  Antisense strand to SEQ ID NO: 228410
ucagacccaagacaaguga

SEQ ID NO: 228412 - RNA, 19 nt, Artificial Sequence
  Description of Artificial Sequence: Synthetic oligonucleotide
  Sense strand starting at position 147 of SEQ ID NO: 2941
gcgcgauucgcucccguuu

SEQ ID NO: 228413 - RNA, 19 nt, Artificial Sequence
  Description of Artificial Sequence: Synthetic oligonucleotide
  Antisense strand to SEQ ID NO: 228412
aaacgggagcgaaucgcgc

SEQ ID NO: 228414 - RNA, 19 nt, Artificial Sequence
  Description of Artificial Sequence: Synthetic oligonucleotide
  Sense strand starting at position 148 of SEQ ID NO: 2941
cgcgauucgcucccguuua

SEQ ID NO: 228415 - RNA, 19 nt, Artificial Sequence
  Description of Artificial Sequence: Synthetic oligonucleotide
  Antisense strand to SEQ ID NO: 228414
uaaacgggagcgaaucgcg

SEQ ID NO: 228416 - RNA, 19 nt, Artificial Sequence
  Description of Artificial Sequence: Synthetic oligonucleotide
  Sense strand starting at position 149 of SEQ ID NO: 2941
gcgauucgcucccguuuau

SEQ ID NO: 228417 - RNA, 19 nt, Artificial Sequence
  Description of Artificial Sequence: Synthetic oligonucleotide
  Antisense strand to SEQ ID NO: 228416
auaaacgggagcgaaucgc

SEQ ID NO: 228418 - RNA, 19 nt, Artificial Sequence
  Description of Artificial Sequence: Synthetic oligonucleotide
  Sense strand starting at position 153 of SEQ ID NO: 2941
uucgcucccguuuaucaaa

SEQ ID NO: 228419 - RNA, 19 nt, Artificial Sequence
  Description of Artificial Sequence: Synthetic oligonucleotide
  Antisense strand to SEQ ID NO: 228418
uuugauaaacgggagcgaa

SEQ ID NO: 228420 - RNA, 19 nt, Artificial Sequence
  Description of Artificial Sequence: Synthetic oligonucleotide
  Sense strand starting at position 164 of SEQ ID NO: 2941
uuaucaaauccuuaucggu

SEQ ID NO: 228421 - RNA, 19 nt, Artificial Sequence
  Description of Artificial Sequence: Synthetic oligonucleotide
  Antisense strand to SEQ ID NO: 228420
accgauaaggauuugauaa

SEQ ID NO: 228422 - RNA, 19 nt, Artificial Sequence
  Description of Artificial Sequence: Synthetic oligonucleotide
  Sense strand starting at position 200 of SEQ ID NO: 2941
gcugcuuucgaccggagga

SEQ ID NO: 228423 - RNA, 19 nt, Artificial Sequence
  Description of Artificial Sequence: Synthetic oligonucleotide
  Antisense strand to SEQ ID NO: 228422
uccuccggucgaaagcagc

SEQ ID NO: 228424 - RNA, 19 nt, Artificial Sequence
  Description of Artificial Sequence: Synthetic oligonucleotide
  Sense strand starting at position 201 of SEQ ID NO: 2941
cugcuuucgaccggaggau

SEQ ID NO: 228425 - RNA, 19 nt, Artificial Sequence
  Description of Artificial Sequence: Synthetic oligonucleotide
  Antisense strand to SEQ ID NO: 228424
auccuccggucgaaagcag

SEQ ID NO: 228426 - RNA, 19 nt, Artificial Sequence
  Description of Artificial Sequence: Synthetic oligonucleotide
  Sense strand starting at position 202 of SEQ ID NO: 2941
ugcuuucgaccggaggaua

SEQ ID NO: 228427 - RNA, 19 nt, Artificial Sequence
  Description of Artificial Sequence: Synthetic oligonucleotide
  Antisense strand to SEQ ID NO: 228426
uauccuccggucgaaagca

SEQ ID NO: 228428 - RNA, 19 nt, Artificial Sequence
  Description of Artificial Sequence: Synthetic oligonucleotide
  Sense strand starting at position 648 of SEQ ID NO: 2941
gcaagaaauggccagaguu

SEQ ID NO: 228429 - RNA, 19 nt, Artificial Sequence
  Description of Artificial Sequence: Synthetic oligonucleotide
  Antisense strand to SEQ ID NO: 228428
aacucuggccauuucuugc

SEQ ID NO: 228430 - RNA, 19 nt, Artificial Sequence
  Description of Artificial Sequence: Synthetic oligonucleotide
  Sense strand starting at position 1026 of SEQ ID NO: 2941
uuggaaggacuccgcgaau

SEQ ID NO: 228431 - RNA, 19 nt, Artificial Sequence
  Description of Artificial Sequence: Synthetic oligonucleotide
  Antisense strand to SEQ ID NO: 228430
auucgcggaguccuuccaa

SEQ ID NO: 228432 - RNA, 19 nt, Artificial Sequence
  Description of Artificial Sequence: Synthetic oligonucleotide
  Sense strand starting at position 1265 of SEQ ID NO: 2941
cgcagaagucuccacugca

SEQ ID NO: 228433 - RNA, 19 nt, Artificial Sequence
  Description of Artificial Sequence: Synthetic oligonucleotide
  Antisense strand to SEQ ID NO: 228432
ugcaguggagacuucugcg

SEQ ID NO: 228434 - RNA, 19 nt, Artificial Sequence
  Description of Artificial Sequence: Synthetic oligonucleotide
  Sense strand starting at position 1268 of SEQ ID NO: 2941
agaagucuccacugcaaag

SEQ ID NO: 228435 - RNA, 19 nt, Artificial Sequence
  Description of Artificial Sequence: Synthetic oligonucleotide
  Antisense strand to SEQ ID NO: 228434
cuuugcaguggagacuucu

SEQ ID NO: 228436 - RNA, 19 nt, Artificial Sequence
  Description of Artificial Sequence: Synthetic oligonucleotide
  Sense strand starting at position 2605 of SEQ ID NO: 2941
gaagcagugcaaggaaauu

SEQ ID NO: 228437 - RNA, 19 nt, Artificial Sequence
  Description of Artificial Sequence: Synthetic oligonucleotide
  Antisense strand to SEQ ID NO: 228436
aauuuccuugcacugcuuc

SEQ ID NO: 228438 - RNA, 19 nt, Artificial Sequence
  Description of Artificial Sequence: Synthetic oligonucleotide
  Sense strand starting at position 2611 of SEQ ID NO: 2941
gugcaaggaaauugaucua

SEQ ID NO: 228439 - RNA, 19 nt, Artificial Sequence
  Description of Artificial Sequence: Synthetic oligonucleotide
  Antisense strand to SEQ ID NO: 228438
uagaucaauuuccuugcac

SEQ ID NO: 228440 - RNA, 19 nt, Artificial Sequence
  Description of Artificial Sequence: Synthetic oligonucleotide
  Sense strand starting at position 2753 of SEQ ID NO: 2941
aguucagaauuggagaagu

SEQ ID NO: 228441 - RNA, 19 nt, Artificial Sequence
  Description of Artificial Sequence: Synthetic oligonucleotide
  Antisense strand to SEQ ID NO: 228440
acuucuccaauucugaacu

SEQ ID NO: 228442 - RNA, 19 nt, Artificial Sequence
  Description of Artificial Sequence: Synthetic oligonucleotide
  Sense strand starting at position 2785 of SEQ ID NO: 2941
cagugugaucuuggaguga

SEQ ID NO: 228443 - RNA, 19 nt, Artificial Sequence
  Description of Artificial Sequence: Synthetic oligonucleotide
  Antisense strand to SEQ ID NO: 228442
ucacuccaagaucacacug

SEQ ID NO: 228444 - RNA, 19 nt, Artificial Sequence
  Description of Artificial Sequence: Synthetic oligonucleotide
  Sense strand starting at position 2789 of SEQ ID NO: 2941
gugaucuuggagugacaag

SEQ ID NO: 228445 - RNA, 19 nt, Artificial Sequence
  Description of Artificial Sequence: Synthetic oligonucleotide
  Antisense strand to SEQ ID NO: 228444
cuugucacuccaagaucac

SEQ ID NO: 228446 - RNA, 19 nt, Artificial Sequence
  Description of Artificial Sequence: Synthetic oligonucleotide
  Sense strand starting at position 2892 of SEQ ID NO: 2941
ggcuacagguguuggaaau

SEQ ID NO: 228447 - RNA, 19 nt, Artificial Sequence
  Description of Artificial Sequence: Synthetic oligonucleotide
  Antisense strand to SEQ ID NO: 228446
auuuccaacaccuguagcc

SEQ ID NO: 228448 - RNA, 19 nt, Artificial Sequence
  Description of Artificial Sequence: Synthetic oligonucleotide
  Sense strand starting at position 2893 of SEQ ID NO: 2941
gcuacagguguuggaaauu

SEQ ID NO: 228449 - RNA, 19 nt, Artificial Sequence
  Description of Artificial Sequence: Synthetic oligonucleotide
  Antisense strand to SEQ ID NO: 228448
aauuuccaacaccuguagc

SEQ ID NO: 228450 - RNA, 19 nt, Artificial Sequence
  Description of Artificial Sequence: Synthetic oligonucleotide
  Sense strand starting at position 2938 of SEQ ID NO: 2941
acgguuagcgcucagggau

SEQ ID NO: 228451 - RNA, 19 nt, Artificial Sequence
  Description of Artificial Sequence: Synthetic oligonucleotide
  Antisense strand to SEQ ID NO: 228450
aucccugagcgcuaaccgu

SEQ ID NO: 228452 - RNA, 19 nt, Artificial Sequence
  Description of Artificial Sequence: Synthetic oligonucleotide
  Sense strand starting at position 2939 of SEQ ID NO: 2941
cgguuagcgcucagggauu

SEQ ID NO: 228453 - RNA, 19 nt, Artificial Sequence
  Description of Artificial Sequence: Synthetic oligonucleotide
  Antisense strand to SEQ ID NO: 228452
aaucccugagcgcuaaccg

SEQ ID NO: 228454 - RNA, 19 nt, Artificial Sequence
  Description of Artificial Sequence: Synthetic oligonucleotide
  Sense strand starting at position 3122 of SEQ ID NO: 2941
acagguguaacuugaaguu

SEQ ID NO: 228455 - RNA, 19 nt, Artificial Sequence
  Description of Artificial Sequence: Synthetic oligonucleotide
  Antisense strand to SEQ ID NO: 228454
aacuucaaguuacaccugu

SEQ ID NO: 228456 - RNA, 19 nt, Artificial Sequence
  Description of Artificial Sequence: Synthetic oligonucleotide
  Sense strand starting at position 3150 of SEQ ID NO: 2941
gggccaaagaacuggucua

SEQ ID NO: 228457 - RNA, 19 nt, Artificial Sequence
  Description of Artificial Sequence: Synthetic oligonucleotide
  Antisense strand to SEQ ID NO: 228456
uagaccaguucuuuggccc

SEQ ID NO: 228458 - RNA, 19 nt, Artificial Sequence
  Description of Artificial Sequence: Synthetic oligonucleotide
  Sense strand starting at position 3151 of SEQ ID NO: 2941
ggccaaagaacuggucuau

SEQ ID NO: 228459 - RNA, 19 nt, Artificial Sequence
  Description of Artificial Sequence: Synthetic oligonucleotide
  Antisense strand to SEQ ID NO: 228458
auagaccaguucuuuggcc

SEQ ID NO: 228460 - RNA, 19 nt, Artificial Sequence
  Description of Artificial Sequence: Synthetic oligonucleotide
  Sense strand starting at position 3197 of SEQ ID NO: 2941
uuuauacuagaacgaucua

SEQ ID NO: 228461 - RNA, 19 nt, Artificial Sequence
  Description of Artificial Sequence: Synthetic oligonucleotide
  Antisense strand to SEQ ID NO: 228460
uagaucguucuaguauaaa

SEQ ID NO: 228462 - RNA, 19 nt, Artificial Sequence
  Description of Artificial Sequence: Synthetic oligonucleotide
  Sense strand starting at position 3206 of SEQ ID NO: 2941
gaacgaucuacagaagcga

SEQ ID NO: 228463 - RNA, 19 nt, Artificial Sequence
  Description of Artificial Sequence: Synthetic oligonucleotide
  Antisense strand to SEQ ID NO: 228462
ucgcuucuguagaucguuc

SEQ ID NO: 228464 - RNA, 19 nt, Artificial Sequence
  Description of Artificial Sequence: Synthetic oligonucleotide
  Sense strand starting at position 3355 of SEQ ID NO: 2941
gacgaagaauugggaaaua

SEQ ID NO: 228465 - RNA, 19 nt, Artificial Sequence
  Description of Artificial Sequence: Synthetic oligonucleotide
  Antisense strand to SEQ ID NO: 228464
uauuucccaauucuucguc

SEQ ID NO: 228466 - RNA, 19 nt, Artificial Sequence
  Description of Artificial Sequence: Synthetic oligonucleotide
  Sense strand starting at position 3463 of SEQ ID NO: 2941
ccgcgauucuuguggcuca

SEQ ID NO: 228467 - RNA, 19 nt, Artificial Sequence
  Description of Artificial Sequence: Synthetic oligonucleotide
  Antisense strand to SEQ ID NO: 228466
ugagccacaagaaucgcgg

SEQ ID NO: 228468 - RNA, 19 nt, Artificial Sequence
  Description of Artificial Sequence: Synthetic oligonucleotide
  Sense strand starting at position 3663 of SEQ ID NO: 2941
ccgggaaguagacguauuu

SEQ ID NO: 228469 - RNA, 19 nt, Artificial Sequence
  Description of Artificial Sequence: Synthetic oligonucleotide
  Antisense strand to SEQ ID NO: 228468
aaauacgucuacuucccgg

SEQ ID NO: 228470 - RNA, 19 nt, Artificial Sequence
  Description of Artificial Sequence: Synthetic oligonucleotide
  Sense strand starting at position 3713 of SEQ ID NO: 2941
accuauacagguugauagu

SEQ ID NO: 228471 - RNA, 19 nt, Artificial Sequence
  Description of Artificial Sequence: Synthetic oligonucleotide
  Antisense strand to SEQ ID NO: 228470
acuaucaaccuguauaggu

SEQ ID NO: 228472 - RNA, 19 nt, Artificial Sequence
  Description of Artificial Sequence: Synthetic oligonucleotide
  Sense strand starting at position 3716 of SEQ ID NO: 2941
uauacagguugauagucaa

SEQ ID NO: 228473 - RNA, 19 nt, Artificial Sequence
  Description of Artificial Sequence: Synthetic oligonucleotide
  Antisense strand to SEQ ID NO: 228472
uugacuaucaaccuguaua

SEQ ID NO: 228474 - RNA, 19 nt, Artificial Sequence
  Description of Artificial Sequence: Synthetic oligonucleotide
  Sense strand starting at position 3719 of SEQ ID NO: 2941
acagguugauagucaacga

SEQ ID NO: 228475 - RNA, 19 nt, Artificial Sequence
  Description of Artificial Sequence: Synthetic oligonucleotide
  Antisense strand to SEQ ID NO: 228474
ucguugacuaucaaccugu

SEQ ID NO: 228476 - RNA, 19 nt, Artificial Sequence
  Description of Artificial Sequence: Synthetic oligonucleotide
  Sense strand starting at position 3723 of SEQ ID NO: 2941
guugauagucaacgaauuc

SEQ ID NO: 228477 - RNA, 19 nt, Artificial Sequence
  Description of Artificial Sequence: Synthetic oligonucleotide
  Antisense strand to SEQ ID NO: 228476
gaauucguugacuaucaac

SEQ ID NO: 228478 - RNA, 19 nt, Artificial Sequence
  Description of Artificial Sequence: Synthetic oligonucleotide
  Sense strand starting at position 3830 of SEQ ID NO: 2941
agccauuucuaguggacac

SEQ ID NO: 228479 - RNA, 19 nt, Artificial Sequence
  Description of Artificial Sequence: Synthetic oligonucleotide
  Antisense strand to SEQ ID NO: 228478
guguccacuagaaauggcu

SEQ ID NO: 228480 - RNA, 19 nt, Artificial Sequence
  Description of Artificial Sequence: Synthetic oligonucleotide
  Sense strand starting at position 3842 of SEQ ID NO: 2941
uggacacauuuauguauuu

SEQ ID NO: 228481 - RNA, 19 nt, Artificial Sequence
  Description of Artificial Sequence: Synthetic oligonucleotide
  Antisense strand to SEQ ID NO: 228480
aaauacauaaaugugucca

SEQ ID NO: 228482 - RNA, 19 nt, Artificial Sequence
  Description of Artificial Sequence: Synthetic oligonucleotide
  Sense strand starting at position 3876 of SEQ ID NO: 2941
gguagauaguucucccuua

SEQ ID NO: 228483 - RNA, 19 nt, Artificial Sequence
  Description of Artificial Sequence: Synthetic oligonucleotide
  Antisense strand to SEQ ID NO: 228482
uaagggagaacuaucuacc

SEQ ID NO: 228484 - RNA, 19 nt, Artificial Sequence
  Description of Artificial Sequence: Synthetic oligonucleotide
  Sense strand starting at position 3877 of SEQ ID NO: 2941
guagauaguucucccuuaa

SEQ ID NO: 228485 - RNA, 19 nt, Artificial Sequence
  Description of Artificial Sequence: Synthetic oligonucleotide
  Antisense strand to SEQ ID NO: 228484
uuaagggagaacuaucuac

SEQ ID NO: 228486 - RNA, 19 nt, Artificial Sequence
  Description of Artificial Sequence: Synthetic oligonucleotide
  Sense strand starting at position 397 of SEQ ID NO: 2942
ucagacuuauaguugaaau

SEQ ID NO: 228487 - RNA, 19 nt, Artificial Sequence
  Description of Artificial Sequence: Synthetic oligonucleotide
  Antisense strand to SEQ ID NO: 228486
auuucaacuauaagucuga

SEQ ID NO: 228488 - RNA, 19 nt, Artificial Sequence
  Description of Artificial Sequence: Synthetic oligonucleotide
  Sense strand starting at position 410 of SEQ ID NO: 2942
ugaaaugucuuauucucag

SEQ ID NO: 228489 - RNA, 19 nt, Artificial Sequence
  Description of Artificial Sequence: Synthetic oligonucleotide
  Antisense strand to SEQ ID NO: 228488
cugagaauaagacauuuca

SEQ ID NO: 228490 - RNA, 19 nt, Artificial Sequence
  Description of Artificial Sequence: Synthetic oligonucleotide
  Sense strand starting at position 451 of SEQ ID NO: 2942
gucuaaauucgacaucucu

SEQ ID NO: 228491 - RNA, 19 nt, Artificial Sequence
  Description of Artificial Sequence: Synthetic oligonucleotide
  Antisense strand to SEQ ID NO: 228490
agagaugucgaauuuagac

SEQ ID NO: 228492 - RNA, 19 nt, Artificial Sequence
  Description of Artificial Sequence: Synthetic oligonucleotide
  Sense strand starting at position 709 of SEQ ID NO: 2942
ucuaguuccuaacuagaag

SEQ ID NO: 228493 - RNA, 19 nt, Artificial Sequence
  Description of Artificial Sequence: Synthetic oligonucleotide
  Antisense strand to SEQ ID NO: 228492
cuucuaguuaggaacuaga

SEQ ID NO: 228494 - RNA, 19 nt, Artificial Sequence
  Description of Artificial Sequence: Synthetic oligonucleotide
  Sense strand starting at position 727 of SEQ ID NO: 2942
ggauuuccuuuagaaucau

SEQ ID NO: 228495 - RNA, 19 nt, Artificial Sequence
  Description of Artificial Sequence: Synthetic oligonucleotide
  Antisense strand to SEQ ID NO: 228494
augauucuaaaggaaaucc

SEQ ID NO: 228496 - RNA, 19 nt, Artificial Sequence
  Description of Artificial Sequence: Synthetic oligonucleotide
  Sense strand starting at position 767 of SEQ ID NO: 2942
cuaucagaaguugguuaaa

SEQ ID NO: 228497 - RNA, 19 nt, Artificial Sequence
  Description of Artificial Sequence: Synthetic oligonucleotide
  Antisense strand to SEQ ID NO: 228496
uuuaaccaacuucugauag

SEQ ID NO: 228498 - RNA, 19 nt, Artificial Sequence
  Description of Artificial Sequence: Synthetic oligonucleotide
  Sense strand starting at position 835 of SEQ ID NO: 2942
augacugguggccacaaua

SEQ ID NO: 228499 - RNA, 19 nt, Artificial Sequence
  Description of Artificial Sequence: Synthetic oligonucleotide
  Antisense strand to SEQ ID NO: 228498
uauuguggccaccagucau

SEQ ID NO: 228500 - RNA, 19 nt, Artificial Sequence
  Description of Artificial Sequence: Synthetic oligonucleotide
  Sense strand starting at position 845 of SEQ ID NO: 2942
gccacaauaugguugguua

SEQ ID NO: 228501 - RNA, 19 nt, Artificial Sequence
  Description of Artificial Sequence: Synthetic oligonucleotide
  Antisense strand to SEQ ID NO: 228500
uaaccaaccauauuguggc

SEQ ID NO: 228502 - RNA, 19 nt, Artificial Sequence
  Description of Artificial Sequence: Synthetic oligonucleotide
  Sense strand starting at position 846 of SEQ ID NO: 2942
ccacaauaugguugguuaa

SEQ ID NO: 228503 - RNA, 19 nt, Artificial Sequence
  Description of Artificial Sequence: Synthetic oligonucleotide
  Antisense strand to SEQ ID NO: 228502
uuaaccaaccauauugugg

SEQ ID NO: 228504 - RNA, 19 nt, Artificial Sequence
  Description of Artificial Sequence: Synthetic oligonucleotide
  Sense strand starting at position 847 of SEQ ID NO: 2942
cacaauaugguugguuaau

SEQ ID NO: 228505 - RNA, 19 nt, Artificial Sequence
  Description of Artificial Sequence: Synthetic oligonucleotide
  Antisense strand to SEQ ID NO: 228504
auuaaccaaccauauugug

SEQ ID NO: 228506 - RNA, 19 nt, Artificial Sequence
  Description of Artificial Sequence: Synthetic oligonucleotide
  Sense strand starting at position 848 of SEQ ID NO: 2942
acaauaugguugguuaauu

SEQ ID NO: 228507 - RNA, 19 nt, Artificial Sequence
  Description of Artificial Sequence: Synthetic oligonucleotide
  Antisense strand to SEQ ID NO: 228506
aauuaaccaaccauauugu

SEQ ID NO: 228508 - RNA, 19 nt, Artificial Sequence
  Description of Artificial Sequence: Synthetic oligonucleotide
  Sense strand starting at position 926 of SEQ ID NO: 2942
gucccaguauucccaauaa

SEQ ID NO: 228509 - RNA, 19 nt, Artificial Sequence
  Description of Artificial Sequence: Synthetic oligonucleotide
  Antisense strand to SEQ ID NO: 228508
uuauugggaauacugggac

SEQ ID NO: 228510 - RNA, 19 nt, Artificial Sequence
  Description of Artificial Sequence: Synthetic oligonucleotide
  Sense strand starting at position 1052 of SEQ ID NO: 2942
caagguuaacuagagcuca

SEQ ID NO: 228511 - RNA, 19 nt, Artificial Sequence
  Description of Artificial Sequence: Synthetic oligonucleotide
  Antisense strand to SEQ ID NO: 228510
ugagcucuaguuaaccuug

SEQ ID NO: 228512 - RNA, 19 nt, Artificial Sequence
  Description of Artificial Sequence: Synthetic oligonucleotide
  Sense strand starting at position 1068 of SEQ ID NO: 2942
ucagcaacggguuauguua

SEQ ID NO: 228513 - RNA, 19 nt, Artificial Sequence
  Description of Artificial Sequence: Synthetic oligonucleotide
  Antisense strand to SEQ ID NO: 228512
uaacauaacccguugcuga

SEQ ID NO: 228514 - RNA, 19 nt, Artificial Sequence
  Description of Artificial Sequence: Synthetic oligonucleotide
  Sense strand starting at position 1083 of SEQ ID NO: 2942
guuagaaacugaguuaaug

SEQ ID NO: 228515 - RNA, 19 nt, Artificial Sequence
  Description of Artificial Sequence: Synthetic oligonucleotide
  Antisense strand to SEQ ID NO: 228514
cauuaacucaguuucuaac

SEQ ID NO: 228516 - RNA, 19 nt, Artificial Sequence
  Description of Artificial Sequence: Synthetic oligonucleotide
  Sense strand starting at position 1101 of SEQ ID NO: 2942
gcaguuguggguuacauua

SEQ ID NO: 228517 - RNA, 19 nt, Artificial Sequence
  Description of Artificial Sequence: Synthetic oligonucleotide
  Antisense strand to SEQ ID NO: 228516
uaauguaacccacaacugc

SEQ ID NO: 228518 - RNA, 19 nt, Artificial Sequence
  Description of Artificial Sequence: Synthetic oligonucleotide
  Sense strand starting at position 1212 of SEQ ID NO: 2942
cucgcucuuagguagaauu

SEQ ID NO: 228519 - RNA, 19 nt, Artificial Sequence
  Description of Artificial Sequence: Synthetic oligonucleotide
  Antisense strand to SEQ ID NO: 228518
aauucuaccuaagagcgag

SEQ ID NO: 228520 - RNA, 19 nt, Artificial Sequence
  Description of Artificial Sequence: Synthetic oligonucleotide
  Sense strand starting at position 1219 of SEQ ID NO: 2942
uuagguagaauucgaguaa

SEQ ID NO: 228521 - RNA, 19 nt, Artificial Sequence
  Description of Artificial Sequence: Synthetic oligonucleotide
  Antisense strand to SEQ ID NO: 228520
uuacucgaauucuaccuaa

SEQ ID NO: 228522 - RNA, 19 nt, Artificial Sequence
  Description of Artificial Sequence: Synthetic oligonucleotide
  Sense strand starting at position 1223 of SEQ ID NO: 2942
guagaauucgaguaaccac

SEQ ID NO: 228523 - RNA, 19 nt, Artificial Sequence
  Description of Artificial Sequence: Synthetic oligonucleotide
  Antisense strand to SEQ ID NO: 228522
gugguuacucgaauucuac

SEQ ID NO: 228524 - RNA, 19 nt, Artificial Sequence
  Description of Artificial Sequence: Synthetic oligonucleotide
  Sense strand starting at position 1273 of SEQ ID NO: 2942
ccaucauuagcacgacaac

SEQ ID NO: 228525 - RNA, 19 nt, Artificial Sequence
  Description of Artificial Sequence: Synthetic oligonucleotide
  Antisense strand to SEQ ID NO: 228524
guugucgugcuaaugaugg

SEQ ID NO: 228526 - RNA, 19 nt, Artificial Sequence
  Description of Artificial Sequence: Synthetic oligonucleotide
  Sense strand starting at position 2299 of SEQ ID NO: 2942
cgcaaauacuuauugagag

SEQ ID NO: 228527 - RNA, 19 nt, Artificial Sequence
  Description of Artificial Sequence: Synthetic oligonucleotide
  Antisense strand to SEQ ID NO: 228526
cucucaauaaguauuugcg

SEQ ID NO: 228528 - RNA, 19 nt, Artificial Sequence
  Description of Artificial Sequence: Synthetic oligonucleotide
  Sense strand starting at position 2322 of SEQ ID NO: 2942
ucacguauuuccucccuuu

SEQ ID NO: 228529 - RNA, 19 nt, Artificial Sequence
  Description of Artificial Sequence: Synthetic oligonucleotide
  Antisense strand to SEQ ID NO: 228528
aaagggaggaaauacguga

SEQ ID NO: 228530 - RNA, 19 nt, Artificial Sequence
  Description of Artificial Sequence: Synthetic oligonucleotide
  Sense strand starting at position 2341 of SEQ ID NO: 2942
uucuccuuuguagggauua

SEQ ID NO: 228531 - RNA, 19 nt, Artificial Sequence
  Description of Artificial Sequence: Synthetic oligonucleotide
  Antisense strand to SEQ ID NO: 228530
uaaucccuacaaaggagaa

SEQ ID NO: 228532 - RNA, 19 nt, Artificial Sequence
  Description of Artificial Sequence: Synthetic oligonucleotide
  Sense strand starting at position 2424 of SEQ ID NO: 2942
ggugucacaaggugauuaa

SEQ ID NO: 228533 - RNA, 19 nt, Artificial Sequence
  Description of Artificial Sequence: Synthetic oligonucleotide
  Antisense strand to SEQ ID NO: 228532
uuaaucaccuugugacacc

SEQ ID NO: 228534 - RNA, 19 nt, Artificial Sequence
  Description of Artificial Sequence: Synthetic oligonucleotide
  Sense strand starting at position 2431 of SEQ ID NO: 2942
caaggugauuaaguguaaa

SEQ ID NO: 228535 - RNA, 19 nt, Artificial Sequence
  Description of Artificial Sequence: Synthetic oligonucleotide
  Antisense strand to SEQ ID NO: 228534
uuuacacuuaaucaccuug

SEQ ID NO: 228536 - RNA, 19 nt, Artificial Sequence
  Description of Artificial Sequence: Synthetic oligonucleotide
  Sense strand starting at position 2484 of SEQ ID NO: 2942
gauuacugcuuagcagagu

SEQ ID NO: 228537 - RNA, 19 nt, Artificial Sequence
  Description of Artificial Sequence: Synthetic oligonucleotide
  Antisense strand to SEQ ID NO: 228536
acucugcuaagcaguaauc

SEQ ID NO: 228538 - RNA, 19 nt, Artificial Sequence
  Description of Artificial Sequence: Synthetic oligonucleotide
  Sense strand starting at position 2499 of SEQ ID NO: 2942
gaguguggucaggagggua

SEQ ID NO: 228539 - RNA, 19 nt, Artificial Sequence
  Description of Artificial Sequence: Synthetic oligonucleotide
  Antisense strand to SEQ ID NO: 228538
uacccuccugaccacacuc

SEQ ID NO: 228540 - RNA, 19 nt, Artificial Sequence
  Description of Artificial Sequence: Synthetic oligonucleotide
  Sense strand starting at position 2507 of SEQ ID NO: 2942
ucaggaggguacucuaaca

SEQ ID NO: 228541 - RNA, 19 nt, Artificial Sequence
  Description of Artificial Sequence: Synthetic oligonucleotide
  Antisense strand to SEQ ID NO: 228540
uguuagaguacccuccuga

SEQ ID NO: 228542 - RNA, 19 nt, Artificial Sequence
  Description of Artificial Sequence: Synthetic oligonucleotide
  Sense strand starting at position 2551 of SEQ ID NO: 2942
acagguaauugauugaagu

SEQ ID NO: 228543 - RNA, 19 nt, Artificial Sequence
  Description of Artificial Sequence: Synthetic oligonucleotide
  Antisense strand to SEQ ID NO: 228542
acuucaaucaauuaccugu

SEQ ID NO: 228544 - RNA, 19 nt, Artificial Sequence
  Description of Artificial Sequence: Synthetic oligonucleotide
  Sense strand starting at position 2552 of SEQ ID NO: 2942
cagguaauugauugaagug

SEQ ID NO: 228545 - RNA, 19 nt, Artificial Sequence
  Description of Artificial Sequence: Synthetic oligonucleotide
  Antisense strand to SEQ ID NO: 228544
cacuucaaucaauuaccug

SEQ ID NO: 228546 - RNA, 19 nt, Artificial Sequence
  Description of Artificial Sequence: Synthetic oligonucleotide
  Sense strand starting at position 2561 of SEQ ID NO: 2942
gauugaagugccuacuuac

SEQ ID NO: 228547 - RNA, 19 nt, Artificial Sequence
  Description of Artificial Sequence: Synthetic oligonucleotide
  Antisense strand to SEQ ID NO: 228546
guaaguaggcacuucaauc

SEQ ID NO: 228548 - RNA, 19 nt, Artificial Sequence
  Description of Artificial Sequence: Synthetic oligonucleotide
  Sense strand starting at position 2632 of SEQ ID NO: 2942
aaauccuucccggaguuua

SEQ ID NO: 228549 - RNA, 19 nt, Artificial Sequence
  Description of Artificial Sequence: Synthetic oligonucleotide
  Antisense strand to SEQ ID NO: 228548
uaaacuccgggaaggauuu

SEQ ID NO: 228550 - RNA, 19 nt, Artificial Sequence
  Description of Artificial Sequence: Synthetic oligonucleotide
  Sense strand starting at position 2649 of SEQ ID NO: 2942
uacguuauagcaggaauau

SEQ ID NO: 228551 - RNA, 19 nt, Artificial Sequence
  Description of Artificial Sequence: Synthetic oligonucleotide
  Antisense strand to SEQ ID NO: 228550
auauuccugcuauaacgua

SEQ ID NO: 228552 - RNA, 19 nt, Artificial Sequence
  Description of Artificial Sequence: Synthetic oligonucleotide
  Sense strand starting at position 2650 of SEQ ID NO: 2942
acguuauagcaggaauaua

SEQ ID NO: 228553 - RNA, 19 nt, Artificial Sequence
  Description of Artificial Sequence: Synthetic oligonucleotide
  Antisense strand to SEQ ID NO: 228552
uauauuccugcuauaacgu

SEQ ID NO: 228554 - RNA, 19 nt, Artificial Sequence
  Description of Artificial Sequence: Synthetic oligonucleotide
  Sense strand starting at position 2711 of SEQ ID NO: 2942
acugucagacauugguaaa

SEQ ID NO: 228555 - RNA, 19 nt, Artificial Sequence
  Description of Artificial Sequence: Synthetic oligonucleotide
  Antisense strand to SEQ ID NO: 228554
uuuaccaaugucugacagu

SEQ ID NO: 228556 - RNA, 19 nt, Artificial Sequence
  Description of Artificial Sequence: Synthetic oligonucleotide
  Sense strand starting at position 2768 of SEQ ID NO: 2942
cagugaggguuugcgauuu

SEQ ID NO: 228557 - RNA, 19 nt, Artificial Sequence
  Description of Artificial Sequence: Synthetic oligonucleotide
  Antisense strand to SEQ ID NO: 228556
aaaucgcaaacccucacug

SEQ ID NO: 228558 - RNA, 19 nt, Artificial Sequence
  Description of Artificial Sequence: Synthetic oligonucleotide
  Sense strand starting at position 3325 of SEQ ID NO: 2942
uggcuagagcucugagaga

SEQ ID NO: 228559 - RNA, 19 nt, Artificial Sequence
  Description of Artificial Sequence: Synthetic oligonucleotide
  Antisense strand to SEQ ID NO: 228558
ucucucagagcucuagcca

SEQ ID NO: 228560 - RNA, 19 nt, Artificial Sequence
  Description of Artificial Sequence: Synthetic oligonucleotide
  Sense strand starting at position 3418 of SEQ ID NO: 2942
gagcuucuucucgggauuu

SEQ ID NO: 228561 - RNA, 19 nt, Artificial Sequence
  Description of Artificial Sequence: Synthetic oligonucleotide
  Antisense strand to SEQ ID NO: 228560
aaaucccgagaagaagcuc

SEQ ID NO: 228562 - RNA, 19 nt, Artificial Sequence
  Description of Artificial Sequence: Synthetic oligonucleotide
  Sense strand starting at position 3718 of SEQ ID NO: 2942
cuguuaaugguuuaagcaa

SEQ ID NO: 228563 - RNA, 19 nt, Artificial Sequence
  Description of Artificial Sequence: Synthetic oligonucleotide
  Antisense strand to SEQ ID NO: 228562
uugcuuaaaccauuaacag

SEQ ID NO: 228564 - RNA, 19 nt, Artificial Sequence
  Description of Artificial Sequence: Synthetic oligonucleotide
  Sense strand starting at position 3926 of SEQ ID NO: 2942
accacaaucuaauugugga

SEQ ID NO: 228565 - RNA, 19 nt, Artificial Sequence
  Description of Artificial Sequence: Synthetic oligonucleotide
  Antisense strand to SEQ ID NO: 228564
uccacaauuagauuguggu

SEQ ID NO: 228566 - RNA, 19 nt, Artificial Sequence
  Description of Artificial Sequence: Synthetic oligonucleotide
  Sense strand starting at position 578 of SEQ ID NO: 2943
ucagacuuauaguugaaau

SEQ ID NO: 228567 - RNA, 19 nt, Artificial Sequence
  Description of Artificial Sequence: Synthetic oligonucleotide
  Antisense strand to SEQ ID NO: 228566
auuucaacuauaagucuga

SEQ ID NO: 228568 - RNA, 19 nt, Artificial Sequence
  Description of Artificial Sequence: Synthetic oligonucleotide
  Sense strand starting at position 591 of SEQ ID NO: 2943
ugaaaugucuuauucucag

SEQ ID NO: 228569 - RNA, 19 nt, Artificial Sequence
  Description of Artificial Sequence: Synthetic oligonucleotide
  Antisense strand to SEQ ID NO: 228568
cugagaauaagacauuuca

SEQ ID NO: 228570 - RNA, 19 nt, Artificial Sequence
  Description of Artificial Sequence: Synthetic oligonucleotide
  Sense strand starting at position 632 of SEQ ID NO: 2943
gucuaaauucgacaucucu

SEQ ID NO: 228571 - RNA, 19 nt, Artificial Sequence
  Description of Artificial Sequence: Synthetic oligonucleotide
  Antisense strand to SEQ ID NO: 228570
agagaugucgaauuuagac

SEQ ID NO: 228572 - RNA, 19 nt, Artificial Sequence
  Description of Artificial Sequence: Synthetic oligonucleotide
  Sense strand starting at position 854 of SEQ ID NO: 2943
agguuuauguggcuuccaa

SEQ ID NO: 228573 - RNA, 19 nt, Artificial Sequence
  Description of Artificial Sequence: Synthetic oligonucleotide
  Antisense strand to SEQ ID NO: 228572
uuggaagccacauaaaccu

SEQ ID NO: 228574 - RNA, 19 nt, Artificial Sequence
  Description of Artificial Sequence: Synthetic oligonucleotide
  Sense strand starting at position 890 of SEQ ID NO: 2943
ucuaguuccuaacuagaag

SEQ ID NO: 228575 - RNA, 19 nt, Artificial Sequence
  Description of Artificial Sequence: Synthetic oligonucleotide
  Antisense strand to SEQ ID NO: 228574
cuucuaguuaggaacuaga

SEQ ID NO: 228576 - RNA, 19 nt, Artificial Sequence
  Description of Artificial Sequence: Synthetic oligonucleotide
  Sense strand starting at position 908 of SEQ ID NO: 2943
ggauuuccuuuagaaucau

SEQ ID NO: 228577 - RNA, 19 nt, Artificial Sequence
  Description of Artificial Sequence: Synthetic oligonucleotide
  Antisense strand to SEQ ID NO: 228576
augauucuaaaggaaaucc

SEQ ID NO: 228578 - RNA, 19 nt, Artificial Sequence
  Description of Artificial Sequence: Synthetic oligonucleotide
  Sense strand starting at position 948 of SEQ ID NO: 2943
cuaucagaaguugguuaaa

SEQ ID NO: 228579 - RNA, 19 nt, Artificial Sequence
  Description of Artificial Sequence: Synthetic oligonucleotide
  Antisense strand to SEQ ID NO: 228578
uuuaaccaacuucugauag

SEQ ID NO: 228580 - RNA, 19 nt, Artificial Sequence
  Description of Artificial Sequence: Synthetic oligonucleotide
  Sense strand starting at position 1016 of SEQ ID NO: 2943
augacugguggccacaaua

SEQ ID NO: 228581 - RNA, 19 nt, Artificial Sequence
  Description of Artificial Sequence: Synthetic oligonucleotide
  Antisense strand to SEQ ID NO: 228580
uauuguggccaccagucau

SEQ ID NO: 228582 - RNA, 19 nt, Artificial Sequence
  Description of Artificial Sequence: Synthetic oligonucleotide
  Sense strand starting at position 1026 of SEQ ID NO: 2943
gccacaauaugguugguua

SEQ ID NO: 228583 - RNA, 19 nt, Artificial Sequence
  Description of Artificial Sequence: Synthetic oligonucleotide
  Antisense strand to SEQ ID NO: 228582
uaaccaaccauauuguggc

SEQ ID NO: 228584 - RNA, 19 nt, Artificial Sequence
  Description of Artificial Sequence: Synthetic oligonucleotide
  Sense strand starting at position 1027 of SEQ ID NO: 2943
ccacaauaugguugguuaa

SEQ ID NO: 228585 - RNA, 19 nt, Artificial Sequence
  Description of Artificial Sequence: Synthetic oligonucleotide
  Antisense strand to SEQ ID NO: 228584
uuaaccaaccauauugugg

SEQ ID NO: 228586 - RNA, 19 nt, Artificial Sequence
  Description of Artificial Sequence: Synthetic oligonucleotide
  Sense strand starting at position 1028 of SEQ ID NO: 2943
cacaauaugguugguuaau

SEQ ID NO: 228587 - RNA, 19 nt, Artificial Sequence
  Description of Artificial Sequence: Synthetic oligonucleotide
  Antisense strand to SEQ ID NO: 228586
auuaaccaaccauauugug

SEQ ID NO: 228588 - RNA, 19 nt, Artificial Sequence
  Description of Artificial Sequence: Synthetic oligonucleotide
  Sense strand starting at position 1029 of SEQ ID NO: 2943
acaauaugguugguuaauu

SEQ ID NO: 228589 - RNA, 19 nt, Artificial Sequence
  Description of Artificial Sequence: Synthetic oligonucleotide
  Antisense strand to SEQ ID NO: 228588
aauuaaccaaccauauugu

SEQ ID NO: 228590 - RNA, 19 nt, Artificial Sequence
  Description of Artificial Sequence: Synthetic oligonucleotide
  Sense strand starting at position 1107 of SEQ ID NO: 2943
gucccaguauucccaauaa

SEQ ID NO: 228591 - RNA, 19 nt, Artificial Sequence
  Description of Artificial Sequence: Synthetic oligonucleotide
  Antisense strand to SEQ ID NO: 228590
uuauugggaauacugggac

SEQ ID NO: 228592 - RNA, 19 nt, Artificial Sequence
  Description of Artificial Sequence: Synthetic oligonucleotide
  Sense strand starting at position 1233 of SEQ ID NO: 2943
caagguuaacuagagcuca

SEQ ID NO: 228593 - RNA, 19 nt, Artificial Sequence
  Description of Artificial Sequence: Synthetic oligonucleotide
  Antisense strand to SEQ ID NO: 228592
ugagcucuaguuaaccuug

SEQ ID NO: 228594 - RNA, 19 nt, Artificial Sequence
  Description of Artificial Sequence: Synthetic oligonucleotide
  Sense strand starting at position 1249 of SEQ ID NO: 2943
ucagcaacggguuauguua

SEQ ID NO: 228595 - RNA, 19 nt, Artificial Sequence
  Description of Artificial Sequence: Synthetic oligonucleotide
  Antisense strand to SEQ ID NO: 228594
uaacauaacccguugcuga

SEQ ID NO: 228596 - RNA, 19 nt, Artificial Sequence
  Description of Artificial Sequence: Synthetic oligonucleotide
  Sense strand starting at position 1264 of SEQ ID NO: 2943
guuagaaacugaguuaaug

SEQ ID NO: 228597 - RNA, 19 nt, Artificial Sequence
  Description of Artificial Sequence: Synthetic oligonucleotide
  Antisense strand to SEQ ID NO: 228596
cauuaacucaguuucuaac

SEQ ID NO: 228598 - RNA, 19 nt, Artificial Sequence
  Description of Artificial Sequence: Synthetic oligonucleotide
  Sense strand starting at position 1282 of SEQ ID NO: 2943
gcaguuguggguuacauua

SEQ ID NO: 228599 - RNA, 19 nt, Artificial Sequence
  Description of Artificial Sequence: Synthetic oligonucleotide
  Antisense strand to SEQ ID NO: 228598
uaauguaacccacaacugc

SEQ ID NO: 228600 - RNA, 19 nt, Artificial Sequence
  Description of Artificial Sequence: Synthetic oligonucleotide
  Sense strand starting at position 1393 of SEQ ID NO: 2943
cucgcucuuagguagaauu

SEQ ID NO: 228601 - RNA, 19 nt, Artificial Sequence
  Description of Artificial Sequence: Synthetic oligonucleotide
  Antisense strand to SEQ ID NO: 228600
aauucuaccuaagagcgag

SEQ ID NO: 228602 - RNA, 19 nt, Artificial Sequence
  Description of Artificial Sequence: Synthetic oligonucleotide
  Sense strand starting at position 1400 of SEQ ID NO: 2943
uuagguagaauucgaguaa

SEQ ID NO: 228603 - RNA, 19 nt, Artificial Sequence
  Description of Artificial Sequence: Synthetic oligonucleotide
  Antisense strand to SEQ ID NO: 228602
uuacucgaauucuaccuaa

SEQ ID NO: 228604 - RNA, 19 nt, Artificial Sequence
  Description of Artificial Sequence: Synthetic oligonucleotide
  Sense strand starting at position 1404 of SEQ ID NO: 2943
guagaauucgaguaaccac

SEQ ID NO: 228605 - RNA, 19 nt, Artificial Sequence
  Description of Artificial Sequence: Synthetic oligonucleotide
  Antisense strand to SEQ ID NO: 228604
gugguuacucgaauucuac

SEQ ID NO: 228606 - RNA, 19 nt, Artificial Sequence
  Description of Artificial Sequence: Synthetic oligonucleotide
  Sense strand starting at position 1454 of SEQ ID NO: 2943
ccaucauuagcacgacaac

SEQ ID NO: 228607 - RNA, 19 nt, Artificial Sequence
  Description of Artificial Sequence: Synthetic oligonucleotide
  Antisense strand to SEQ ID NO: 228606
guugucgugcuaaugaugg

SEQ ID NO: 228608 - RNA, 19 nt, Artificial Sequence
  Description of Artificial Sequence: Synthetic oligonucleotide
  Sense strand starting at position 2480 of SEQ ID NO: 2943
cgcaaauacuuauugagag

SEQ ID NO: 228609 - RNA, 19 nt, Artificial Sequence
  Description of Artificial Sequence: Synthetic oligonucleotide
  Antisense strand to SEQ ID NO: 228608
cucucaauaaguauuugcg

SEQ ID NO: 228610 - RNA, 19 nt, Artificial Sequence
  Description of Artificial Sequence: Synthetic oligonucleotide
  Sense strand starting at position 2503 of SEQ ID NO: 2943
ucacguauuuccucccuuu

SEQ ID NO: 228611 - RNA, 19 nt, Artificial Sequence
  Description of Artificial Sequence: Synthetic oligonucleotide
  Antisense strand to SEQ ID NO: 228610
aaagggaggaaauacguga

SEQ ID NO: 228612 - RNA, 19 nt, Artificial Sequence
  Description of Artificial Sequence: Synthetic oligonucleotide
  Sense strand starting at position 2522 of SEQ ID NO: 2943
uucuccuuuguagggauua

SEQ ID NO: 228613 - RNA, 19 nt, Artificial Sequence
  Description of Artificial Sequence: Synthetic oligonucleotide
  Antisense strand to SEQ ID NO: 228612
uaaucccuacaaaggagaa

SEQ ID NO: 228614 - RNA, 19 nt, Artificial Sequence
  Description of Artificial Sequence: Synthetic oligonucleotide
  Sense strand starting at position 2605 of SEQ ID NO: 2943
ggugucacaaggugauuaa

SEQ ID NO: 228615 - RNA, 19 nt, Artificial Sequence
  Description of Artificial Sequence: Synthetic oligonucleotide
  Antisense strand to SEQ ID NO: 228614
uuaaucaccuugugacacc

SEQ ID NO: 228616 - RNA, 19 nt, Artificial Sequence
  Description of Artificial Sequence: Synthetic oligonucleotide
  Sense strand starting at position 2612 of SEQ ID NO: 2943
caaggugauuaaguguaaa

SEQ ID NO: 228617 - RNA, 19 nt, Artificial Sequence
  Description of Artificial Sequence: Synthetic oligonucleotide
  Antisense strand to SEQ ID NO: 228616
uuuacacuuaaucaccuug

SEQ ID NO: 228618 - RNA, 19 nt, Artificial Sequence
  Description of Artificial Sequence: Synthetic oligonucleotide
  Sense strand starting at position 2665 of SEQ ID NO: 2943
gauuacugcuuagcagagu

SEQ ID NO: 228619 - RNA, 19 nt, Artificial Sequence
  Description of Artificial Sequence: Synthetic oligonucleotide
  Antisense strand to SEQ ID NO: 228618
acucugcuaagcaguaauc

SEQ ID NO: 228620 - RNA, 19 nt, Artificial Sequence
  Description of Artificial Sequence: Synthetic oligonucleotide
  Sense strand starting at position 2680 of SEQ ID NO: 2943
gaguguggucaggagggua

SEQ ID NO: 228621 - RNA, 19 nt, Artificial Sequence
  Description of Artificial Sequence: Synthetic oligonucleotide
  Antisense strand to SEQ ID NO: 228620
uacccuccugaccacacuc

SEQ ID NO: 228622 - RNA, 19 nt, Artificial Sequence
  Description of Artificial Sequence: Synthetic oligonucleotide
  Sense strand starting at position 2688 of SEQ ID NO: 2943
ucaggaggguacucuaaca

SEQ ID NO: 228623 - RNA, 19 nt, Artificial Sequence
  Description of Artificial Sequence: Synthetic oligonucleotide
  Antisense strand to SEQ ID NO: 228622
uguuagaguacccuccuga

SEQ ID NO: 228624 - RNA, 19 nt, Artificial Sequence
  Description of Artificial Sequence: Synthetic oligonucleotide
  Sense strand starting at position 2732 of SEQ ID NO: 2943
acagguaauugauugaagu

SEQ ID NO: 228625 - RNA, 19 nt, Artificial Sequence
  Description of Artificial Sequence: Synthetic oligonucleotide
  Antisense strand to SEQ ID NO: 228624
acuucaaucaauuaccugu

SEQ ID NO: 228626 - RNA, 19 nt, Artificial Sequence
  Description of Artificial Sequence: Synthetic oligonucleotide
  Sense strand starting at position 2733 of SEQ ID NO: 2943
cagguaauugauugaagug

SEQ ID NO: 228627 - RNA, 19 nt, Artificial Sequence
  Description of Artificial Sequence: Synthetic oligonucleotide
  Antisense strand to SEQ ID NO: 228626
cacuucaaucaauuaccug

SEQ ID NO: 228628 - RNA, 19 nt, Artificial Sequence
  Description of Artificial Sequence: Synthetic oligonucleotide
  Sense strand starting at position 2742 of SEQ ID NO: 2943
gauugaagugccuacuuac

SEQ ID NO: 228629 - RNA, 19 nt, Artificial Sequence
  Description of Artificial Sequence: Synthetic oligonucleotide
  Antisense strand to SEQ ID NO: 228628
guaaguaggcacuucaauc

SEQ ID NO: 228630 - RNA, 19 nt, Artificial Sequence
  Description of Artificial Sequence: Synthetic oligonucleotide
  Sense strand starting at position 2813 of SEQ ID NO: 2943
aaauccuucccggaguuua

SEQ ID NO: 228631 - RNA, 19 nt, Artificial Sequence
  Description of Artificial Sequence: Synthetic oligonucleotide
  Antisense strand to SEQ ID NO: 228630
uaaacuccgggaaggauuu

SEQ ID NO: 228632 - RNA, 19 nt, Artificial Sequence
  Description of Artificial Sequence: Synthetic oligonucleotide
  Sense strand starting at position 2830 of SEQ ID NO: 2943
uacguuauagcaggaauau

SEQ ID NO: 228633 - RNA, 19 nt, Artificial Sequence
  Description of Artificial Sequence: Synthetic oligonucleotide
  Antisense strand to SEQ ID NO: 228632
auauuccugcuauaacgua

SEQ ID NO: 228634 - RNA, 19 nt, Artificial Sequence
  Description of Artificial Sequence: Synthetic oligonucleotide
  Sense strand starting at position 2831 of SEQ ID NO: 2943
acguuauagcaggaauaua

SEQ ID NO: 228635 - RNA, 19 nt, Artificial Sequence
  Description of Artificial Sequence: Synthetic oligonucleotide
  Antisense strand to SEQ ID NO: 228634
uauauuccugcuauaacgu

SEQ ID NO: 228636 - RNA, 19 nt, Artificial Sequence
  Description of Artificial Sequence: Synthetic oligonucleotide
  Sense strand starting at position 2892 of SEQ ID NO: 2943
acugucagacauugguaaa

SEQ ID NO: 228637 - RNA, 19 nt, Artificial Sequence
  Description of Artificial Sequence: Synthetic oligonucleotide
  Antisense strand to SEQ ID NO: 228636
uuuaccaaugucugacagu

SEQ ID NO: 228638 - RNA, 19 nt, Artificial Sequence
  Description of Artificial Sequence: Synthetic oligonucleotide
  Sense strand starting at position 2949 of SEQ ID NO: 2943
cagugaggguuugcgauuu

SEQ ID NO: 228639 - RNA, 19 nt, Artificial Sequence
  Description of Artificial Sequence: Synthetic oligonucleotide
  Antisense strand to SEQ ID NO: 228638
aaaucgcaaacccucacug

SEQ ID NO: 228640 - RNA, 19 nt, Artificial Sequence
  Description of Artificial Sequence: Synthetic oligonucleotide
  Sense strand starting at position 3506 of SEQ ID NO: 2943
uggcuagagcucugagaga

SEQ ID NO: 228641 - RNA, 19 nt, Artificial Sequence
  Description of Artificial Sequence: Synthetic oligonucleotide
  Antisense strand to SEQ ID NO: 228640
ucucucagagcucuagcca

SEQ ID NO: 228642 - RNA, 19 nt, Artificial Sequence
  Description of Artificial Sequence: Synthetic oligonucleotide
  Sense strand starting at position 3599 of SEQ ID NO: 2943
gagcuucuucucgggauuu

SEQ ID NO: 228643 - RNA, 19 nt, Artificial Sequence
  Description of Artificial Sequence: Synthetic oligonucleotide
  Antisense strand to SEQ ID NO: 228642
aaaucccgagaagaagcuc

SEQ ID NO: 228644 - RNA, 19 nt, Artificial Sequence
  Description of Artificial Sequence: Synthetic oligonucleotide
  Sense strand starting at position 3899 of SEQ ID NO: 2943
cuguuaaugguuuaagcaa

SEQ ID NO: 228645 - RNA, 19 nt, Artificial Sequence
  Description of Artificial Sequence: Synthetic oligonucleotide
  Antisense strand to SEQ ID NO: 228644
uugcuuaaaccauuaacag

SEQ ID NO: 228646 - RNA, 19 nt, Artificial Sequence
  Description of Artificial Sequence: Synthetic oligonucleotide
  Sense strand starting at position 232 of SEQ ID NO: 2944
aggccaucuuucuuuggau

SEQ ID NO: 228647 - RNA, 19 nt, Artificial Sequence
  Description of Artificial Sequence: Synthetic oligonucleotide
  Antisense strand to SEQ ID NO: 228646
auccaaagaaagauggccu

SEQ ID NO: 228648 - RNA, 19 nt, Artificial Sequence
  Description of Artificial Sequence: Synthetic oligonucleotide
  Sense strand starting at position 234 of SEQ ID NO: 2944
gccaucuuucuuuggauca

SEQ ID NO: 228649 - RNA, 19 nt, Artificial Sequence
  Description of Artificial Sequence: Synthetic oligonucleotide
  Antisense strand to SEQ ID NO: 228648
ugauccaaagaaagauggc

SEQ ID NO: 228650 - RNA, 19 nt, Artificial Sequence
  Description of Artificial Sequence: Synthetic oligonucleotide
  Sense strand starting at position 275 of SEQ ID NO: 2944
auccaaaguugugcuuauu

SEQ ID NO: 228651 - RNA, 19 nt, Artificial Sequence
  Description of Artificial Sequence: Synthetic oligonucleotide
  Antisense strand to SEQ ID NO: 228650
aauaagcacaacuuuggau

SEQ ID NO: 228652 - RNA, 19 nt, Artificial Sequence
  Description of Artificial Sequence: Synthetic oligonucleotide
  Sense strand starting at position 423 of SEQ ID NO: 2944
cucuaaaccuuagggauaa

SEQ ID NO: 228653 - RNA, 19 nt, Artificial Sequence
  Description of Artificial Sequence: Synthetic oligonucleotide
  Antisense strand to SEQ ID NO: 228652
uuaucccuaagguuuagag

SEQ ID NO: 228654 - RNA, 19 nt, Artificial Sequence
  Description of Artificial Sequence: Synthetic oligonucleotide
  Sense strand starting at position 424 of SEQ ID NO: 2944
ucuaaaccuuagggauaaa

SEQ ID NO: 228655 - RNA, 19 nt, Artificial Sequence
  Description of Artificial Sequence: Synthetic oligonucleotide
  Antisense strand to SEQ ID NO: 228654
uuuaucccuaagguuuaga

SEQ ID NO: 228656 - RNA, 19 nt, Artificial Sequence
  Description of Artificial Sequence: Synthetic oligonucleotide
  Sense strand starting at position 632 of SEQ ID NO: 2944
gugauuaaauaagagcaaa

SEQ ID NO: 228657 - RNA, 19 nt, Artificial Sequence
  Description of Artificial Sequence: Synthetic oligonucleotide
  Antisense strand to SEQ ID NO: 228656
uuugcucuuauuuaaucac

SEQ ID NO: 228658 - RNA, 19 nt, Artificial Sequence
  Description of Artificial Sequence: Synthetic oligonucleotide
  Sense strand starting at position 651 of SEQ ID NO: 2944
guaguauuaacaggguaac

SEQ ID NO: 228659 - RNA, 19 nt, Artificial Sequence
  Description of Artificial Sequence: Synthetic oligonucleotide
  Antisense strand to SEQ ID NO: 228658
guuacccuguuaauacuac

SEQ ID NO: 228660 - RNA, 19 nt, Artificial Sequence
  Description of Artificial Sequence: Synthetic oligonucleotide
  Sense strand starting at position 652 of SEQ ID NO: 2944
uaguauuaacaggguaaca

SEQ ID NO: 228661 - RNA, 19 nt, Artificial Sequence
  Description of Artificial Sequence: Synthetic oligonucleotide
  Antisense strand to SEQ ID NO: 228660
uguuacccuguuaauacua

SEQ ID NO: 228662 - RNA, 19 nt, Artificial Sequence
  Description of Artificial Sequence: Synthetic oligonucleotide
  Sense strand starting at position 830 of SEQ ID NO: 2944
gcgggacuguagguucauu

SEQ ID NO: 228663 - RNA, 19 nt, Artificial Sequence
  Description of Artificial Sequence: Synthetic oligonucleotide
  Antisense strand to SEQ ID NO: 228662
aaugaaccuacagucccgc

SEQ ID NO: 228664 - RNA, 19 nt, Artificial Sequence
  Description of Artificial Sequence: Synthetic oligonucleotide
  Sense strand starting at position 1031 of SEQ ID NO: 2944
ugcacuagguccucaacuu

SEQ ID NO: 228665 - RNA, 19 nt, Artificial Sequence
  Description of Artificial Sequence: Synthetic oligonucleotide
  Antisense strand to SEQ ID NO: 228664
aaguugaggaccuagugca

SEQ ID NO: 228666 - RNA, 19 nt, Artificial Sequence
  Description of Artificial Sequence: Synthetic oligonucleotide
  Sense strand starting at position 1065 of SEQ ID NO: 2944
caaugacaauucucgagga

SEQ ID NO: 228667 - RNA, 19 nt, Artificial Sequence
  Description of Artificial Sequence: Synthetic oligonucleotide
  Antisense strand to SEQ ID NO: 228666
uccucgagaauugucauug

SEQ ID NO: 228668 - RNA, 19 nt, Artificial Sequence
  Description of Artificial Sequence: Synthetic oligonucleotide
  Sense strand starting at position 1069 of SEQ ID NO: 2944
gacaauucucgaggacaac

SEQ ID NO: 228669 - RNA, 19 nt, Artificial Sequence
  Description of Artificial Sequence: Synthetic oligonucleotide
  Antisense strand to SEQ ID NO: 228668
guuguccucgagaauuguc

SEQ ID NO: 228670 - RNA, 19 nt, Artificial Sequence
  Description of Artificial Sequence: Synthetic oligonucleotide
  Sense strand starting at position 1321 of SEQ ID NO: 2944
gagccaggaugauuacauu

SEQ ID NO: 228671 - RNA, 19 nt, Artificial Sequence
  Description of Artificial Sequence: Synthetic oligonucleotide
  Antisense strand to SEQ ID NO: 228670
aauguaaucauccuggcuc

SEQ ID NO: 228672 - RNA, 19 nt, Artificial Sequence
  Description of Artificial Sequence: Synthetic oligonucleotide
  Sense strand starting at position 1332 of SEQ ID NO: 2944
auuacauugcugggaggaa

SEQ ID NO: 228673 - RNA, 19 nt, Artificial Sequence
  Description of Artificial Sequence: Synthetic oligonucleotide
  Antisense strand to SEQ ID NO: 228672
uuccucccagcaauguaau

SEQ ID NO: 228674 - RNA, 19 nt, Artificial Sequence
  Description of Artificial Sequence: Synthetic oligonucleotide
  Sense strand starting at position 1732 of SEQ ID NO: 2944
agcguaaagcgcucuguga

SEQ ID NO: 228675 - RNA, 19 nt, Artificial Sequence
  Description of Artificial Sequence: Synthetic oligonucleotide
  Antisense strand to SEQ ID NO: 228674
ucacagagcgcuuuacgcu

SEQ ID NO: 228676 - RNA, 19 nt, Artificial Sequence
  Description of Artificial Sequence: Synthetic oligonucleotide
  Sense strand starting at position 1733 of SEQ ID NO: 2944
gcguaaagcgcucugugaa

SEQ ID NO: 228677 - RNA, 19 nt, Artificial Sequence
  Description of Artificial Sequence: Synthetic oligonucleotide
  Antisense strand to SEQ ID NO: 228676
uucacagagcgcuuuacgc

SEQ ID NO: 228678 - RNA, 19 nt, Artificial Sequence
  Description of Artificial Sequence: Synthetic oligonucleotide
  Sense strand starting at position 2550 of SEQ ID NO: 2944
gcugggugucccggaggaa

SEQ ID NO: 228679 - RNA, 19 nt, Artificial Sequence
  Description of Artificial Sequence: Synthetic oligonucleotide
  Antisense strand to SEQ ID NO: 228678
uuccuccgggacacccagc

SEQ ID NO: 228680 - RNA, 19 nt, Artificial Sequence
  Description of Artificial Sequence: Synthetic oligonucleotide
  Sense strand starting at position 2838 of SEQ ID NO: 2944
uccguaccuguccgaaaga

SEQ ID NO: 228681 - RNA, 19 nt, Artificial Sequence
  Description of Artificial Sequence: Synthetic oligonucleotide
  Antisense strand to SEQ ID NO: 228680
ucuuucggacagguacgga

SEQ ID NO: 228682 - RNA, 19 nt, Artificial Sequence
  Description of Artificial Sequence: Synthetic oligonucleotide
  Sense strand starting at position 2936 of SEQ ID NO: 2944
gaacuuagguucccuguca

SEQ ID NO: 228683 - RNA, 19 nt, Artificial Sequence
  Description of Artificial Sequence: Synthetic oligonucleotide
  Antisense strand to SEQ ID NO: 228682
ugacagggaaccuaaguuc

SEQ ID NO: 228684 - RNA, 19 nt, Artificial Sequence
  Description of Artificial Sequence: Synthetic oligonucleotide
  Sense strand starting at position 2970 of SEQ ID NO: 2944
agcuguuuaguggauggua

SEQ ID NO: 228685 - RNA, 19 nt, Artificial Sequence
  Description of Artificial Sequence: Synthetic oligonucleotide
  Antisense strand to SEQ ID NO: 228684
uaccauccacuaaacagcu

SEQ ID NO: 228686 - RNA, 19 nt, Artificial Sequence
  Description of Artificial Sequence: Synthetic oligonucleotide
  Sense strand starting at position 3072 of SEQ ID NO: 2944
guagcagaugugugucaaa

SEQ ID NO: 228687 - RNA, 19 nt, Artificial Sequence
  Description of Artificial Sequence: Synthetic oligonucleotide
  Antisense strand to SEQ ID NO: 228686
uuugacacacaucugcuac

SEQ ID NO: 228688 - RNA, 19 nt, Artificial Sequence
  Description of Artificial Sequence: Synthetic oligonucleotide
  Sense strand starting at position 3195 of SEQ ID NO: 2944
agacguaaauaguugaaga

SEQ ID NO: 228689 - RNA, 19 nt, Artificial Sequence
  Description of Artificial Sequence: Synthetic oligonucleotide
  Antisense strand to SEQ ID NO: 228688
ucuucaacuauuuacgucu

SEQ ID NO: 228690 - RNA, 19 nt, Artificial Sequence
  Description of Artificial Sequence: Synthetic oligonucleotide
  Sense strand starting at position 3294 of SEQ ID NO: 2944
caguaaguagcacaugauu

SEQ ID NO: 228691 - RNA, 19 nt, Artificial Sequence
  Description of Artificial Sequence: Synthetic oligonucleotide
  Antisense strand to SEQ ID NO: 228690
aaucaugugcuacuuacug

SEQ ID NO: 228692 - RNA, 19 nt, Artificial Sequence
  Description of Artificial Sequence: Synthetic oligonucleotide
  Sense strand starting at position 3299 of SEQ ID NO: 2944
aguagcacaugauuaauua

SEQ ID NO: 228693 - RNA, 19 nt, Artificial Sequence
  Description of Artificial Sequence: Synthetic oligonucleotide
  Antisense strand to SEQ ID NO: 228692
uaauuaaucaugugcuacu

SEQ ID NO: 228694 - RNA, 19 nt, Artificial Sequence
  Description of Artificial Sequence: Synthetic oligonucleotide
  Sense strand starting at position 3307 of SEQ ID NO: 2944
augauuaauuaccaaacga

SEQ ID NO: 228695 - RNA, 19 nt, Artificial Sequence
  Description of Artificial Sequence: Synthetic oligonucleotide
  Antisense strand to SEQ ID NO: 228694
ucguuugguaauuaaucau

SEQ ID NO: 228696 - RNA, 19 nt, Artificial Sequence
  Description of Artificial Sequence: Synthetic oligonucleotide
  Sense strand starting at position 3320 of SEQ ID NO: 2944
aaacgagaucuaggcaaua

SEQ ID NO: 228697 - RNA, 19 nt, Artificial Sequence
  Description of Artificial Sequence: Synthetic oligonucleotide
  Antisense strand to SEQ ID NO: 228696
uauugccuagaucucguuu

SEQ ID NO: 228698 - RNA, 19 nt, Artificial Sequence
  Description of Artificial Sequence: Synthetic oligonucleotide
  Sense strand starting at position 3325 of SEQ ID NO: 2944
agaucuaggcaauaauugu

SEQ ID NO: 228699 - RNA, 19 nt, Artificial Sequence
  Description of Artificial Sequence: Synthetic oligonucleotide
  Antisense strand to SEQ ID NO: 228698
acaauuauugccuagaucu

SEQ ID NO: 228700 - RNA, 19 nt, Artificial Sequence
  Description of Artificial Sequence: Synthetic oligonucleotide
  Sense strand starting at position 3329 of SEQ ID NO: 2944
cuaggcaauaauugugaga

SEQ ID NO: 228701 - RNA, 19 nt, Artificial Sequence
  Description of Artificial Sequence: Synthetic oligonucleotide
  Antisense strand to SEQ ID NO: 228700
ucucacaauuauugccuag

SEQ ID NO: 228702 - RNA, 19 nt, Artificial Sequence
  Description of Artificial Sequence: Synthetic oligonucleotide
  Sense strand starting at position 3376 of SEQ ID NO: 2944
gcagccuaaacugguuaga

SEQ ID NO: 228703 - RNA, 19 nt, Artificial Sequence
  Description of Artificial Sequence: Synthetic oligonucleotide
  Antisense strand to SEQ ID NO: 228702
ucuaaccaguuuaggcugc

SEQ ID NO: 228704 - RNA, 19 nt, Artificial Sequence
  Description of Artificial Sequence: Synthetic oligonucleotide
  Sense strand starting at position 3378 of SEQ ID NO: 2944
agccuaaacugguuagaga

SEQ ID NO: 228705 - RNA, 19 nt, Artificial Sequence
  Description of Artificial Sequence: Synthetic oligonucleotide
  Antisense strand to SEQ ID NO: 228704
ucucuaaccaguuuaggcu

SEQ ID NO: 228706 - RNA, 19 nt, Artificial Sequence
  Description of Artificial Sequence: Synthetic oligonucleotide
  Sense strand starting at position 3392 of SEQ ID NO: 2944
agagaaaguucucaagagg

SEQ ID NO: 228707 - RNA, 19 nt, Artificial Sequence
  Description of Artificial Sequence: Synthetic oligonucleotide
  Antisense strand to SEQ ID NO: 228706
ccucuugagaacuuucucu

SEQ ID NO: 228708 - RNA, 19 nt, Artificial Sequence
  Description of Artificial Sequence: Synthetic oligonucleotide
  Sense strand starting at position 3440 of SEQ ID NO: 2944
cuagcuauuguugacauca

SEQ ID NO: 228709 - RNA, 19 nt, Artificial Sequence
  Description of Artificial Sequence: Synthetic oligonucleotide
  Antisense strand to SEQ ID NO: 228708
ugaugucaacaauagcuag

SEQ ID NO: 228710 - RNA, 19 nt, Artificial Sequence
  Description of Artificial Sequence: Synthetic oligonucleotide
  Sense strand starting at position 3476 of SEQ ID NO: 2944
ggcucuugguuagucuuua

SEQ ID NO: 228711 - RNA, 19 nt, Artificial Sequence
  Description of Artificial Sequence: Synthetic oligonucleotide
  Antisense strand to SEQ ID NO: 228710
uaaagacuaaccaagagcc

SEQ ID NO: 228712 - RNA, 19 nt, Artificial Sequence
  Description of Artificial Sequence: Synthetic oligonucleotide
  Sense strand starting at position 3477 of SEQ ID NO: 2944
gcucuugguuagucuuuaa

SEQ ID NO: 228713 - RNA, 19 nt, Artificial Sequence
  Description of Artificial Sequence: Synthetic oligonucleotide
  Antisense strand to SEQ ID NO: 228712
uuaaagacuaaccaagagc

SEQ ID NO: 228714 - RNA, 19 nt, Artificial Sequence
  Description of Artificial Sequence: Synthetic oligonucleotide
  Sense strand starting at position 3480 of SEQ ID NO: 2944
cuugguuagucuuuaagca

SEQ ID NO: 228715 - RNA, 19 nt, Artificial Sequence
  Description of Artificial Sequence: Synthetic oligonucleotide
  Antisense strand to SEQ ID NO: 228714
ugcuuaaagacuaaccaag

SEQ ID NO: 228716 - RNA, 19 nt, Artificial Sequence
  Description of Artificial Sequence: Synthetic oligonucleotide
  Sense strand starting at position 3481 of SEQ ID NO: 2944
uugguuagucuuuaagcau

SEQ ID NO: 228717 - RNA, 19 nt, Artificial Sequence
  Description of Artificial Sequence: Synthetic oligonucleotide
  Antisense strand to SEQ ID NO: 228716
augcuuaaagacuaaccaa

SEQ ID NO: 228718 - RNA, 19 nt, Artificial Sequence
  Description of Artificial Sequence: Synthetic oligonucleotide
  Sense strand starting at position 3579 of SEQ ID NO: 2944
cagagaaagucagaugauu

SEQ ID NO: 228719 - RNA, 19 nt, Artificial Sequence
  Description of Artificial Sequence: Synthetic oligonucleotide
  Antisense strand to SEQ ID NO: 228718
aaucaucugacuuucucug

SEQ ID NO: 228720 - RNA, 19 nt, Artificial Sequence
  Description of Artificial Sequence: Synthetic oligonucleotide
  Sense strand starting at position 3748 of SEQ ID NO: 2944
gcagucuccuccuuugaag

SEQ ID NO: 228721 - RNA, 19 nt, Artificial Sequence
  Description of Artificial Sequence: Synthetic oligonucleotide
  Antisense strand to SEQ ID NO: 228720
cuucaaaggaggagacugc

SEQ ID NO: 228722 - RNA, 19 nt, Artificial Sequence
  Description of Artificial Sequence: Synthetic oligonucleotide
  Sense strand starting at position 3789 of SEQ ID NO: 2944
caugguaguguccaaauag

SEQ ID NO: 228723 - RNA, 19 nt, Artificial Sequence
  Description of Artificial Sequence: Synthetic oligonucleotide
  Antisense strand to SEQ ID NO: 228722
cuauuuggacacuaccaug

SEQ ID NO: 228724 - RNA, 19 nt, Artificial Sequence
  Description of Artificial Sequence: Synthetic oligonucleotide
  Sense strand starting at position 3904 of SEQ ID NO: 2944
acucauuucuuguaagcag

SEQ ID NO: 228725 - RNA, 19 nt, Artificial Sequence
  Description of Artificial Sequence: Synthetic oligonucleotide
  Antisense strand to SEQ ID NO: 228724
cugcuuacaagaaaugagu

SEQ ID NO: 228726 - RNA, 19 nt, Artificial Sequence
  Description of Artificial Sequence: Synthetic oligonucleotide
  Sense strand starting at position 109 of SEQ ID NO: 2945
agaugucgucucuacaaau

SEQ ID NO: 228727 - RNA, 19 nt, Artificial Sequence
  Description of Artificial Sequence: Synthetic oligonucleotide
  Antisense strand to SEQ ID NO: 228726
auuuguagagacgacaucu

SEQ ID NO: 228728 - RNA, 19 nt, Artificial Sequence
  Description of Artificial Sequence: Synthetic oligonucleotide
  Sense strand starting at position 129 of SEQ ID NO: 2945
caaauauucggcuggcacu

SEQ ID NO: 228729 - RNA, 19 nt, Artificial Sequence
  Description of Artificial Sequence: Synthetic oligonucleotide
  Antisense strand to SEQ ID NO: 228728
agugccagccgaauauuug

SEQ ID NO: 228730 - RNA, 19 nt, Artificial Sequence
  Description of Artificial Sequence: Synthetic oligonucleotide
  Sense strand starting at position 332 of SEQ ID NO: 2945
ccugaauugcagugagaug

SEQ ID NO: 228731 - RNA, 19 nt, Artificial Sequence
  Description of Artificial Sequence: Synthetic oligonucleotide
  Antisense strand to SEQ ID NO: 228730
caucucacugcaauucagg

SEQ ID NO: 228732 - RNA, 19 nt, Artificial Sequence
  Description of Artificial Sequence: Synthetic oligonucleotide
  Sense strand starting at position 348 of SEQ ID NO: 2945
augagaucgcgccguugua

SEQ ID NO: 228733 - RNA, 19 nt, Artificial Sequence
  Description of Artificial Sequence: Synthetic oligonucleotide
  Antisense strand to SEQ ID NO: 228732
uacaacggcgcgaucucau

SEQ ID NO: 228734 - RNA, 19 nt, Artificial Sequence
  Description of Artificial Sequence: Synthetic oligonucleotide
  Sense strand starting at position 490 of SEQ ID NO: 2945
cguagucuacaaugaguca

SEQ ID NO: 228735 - RNA, 19 nt, Artificial Sequence
  Description of Artificial Sequence: Synthetic oligonucleotide
  Antisense strand to SEQ ID NO: 228734
ugacucauuguagacuacg

SEQ ID NO: 228736 - RNA, 19 nt, Artificial Sequence
  Description of Artificial Sequence: Synthetic oligonucleotide
  Sense strand starting at position 493 of SEQ ID NO: 2945
agucuacaaugagucaaga

SEQ ID NO: 228737 - RNA, 19 nt, Artificial Sequence
  Description of Artificial Sequence: Synthetic oligonucleotide
  Antisense strand to SEQ ID NO: 228736
ucuugacucauuguagacu

SEQ ID NO: 228738 - RNA, 19 nt, Artificial Sequence
  Description of Artificial Sequence: Synthetic oligonucleotide
  Sense strand starting at position 948 of SEQ ID NO: 2945
acucuuuacgguuauuauu

SEQ ID NO: 228739 - RNA, 19 nt, Artificial Sequence
  Description of Artificial Sequence: Synthetic oligonucleotide
  Antisense strand to SEQ ID NO: 228738
aauaauaaccguaaagagu

SEQ ID NO: 228740 - RNA, 19 nt, Artificial Sequence
  Description of Artificial Sequence: Synthetic oligonucleotide
  Sense strand starting at position 956 of SEQ ID NO: 2945
cgguuauuauuucugcguu

SEQ ID NO: 228741 - RNA, 19 nt, Artificial Sequence
  Description of Artificial Sequence: Synthetic oligonucleotide
  Antisense strand to SEQ ID NO: 228740
aacgcagaaauaauaaccg

SEQ ID NO: 228742 - RNA, 19 nt, Artificial Sequence
  Description of Artificial Sequence: Synthetic oligonucleotide
  Sense strand starting at position 957 of SEQ ID NO: 2945
gguuauuauuucugcguuc

SEQ ID NO: 228743 - RNA, 19 nt, Artificial Sequence
  Description of Artificial Sequence: Synthetic oligonucleotide
  Antisense strand to SEQ ID NO: 228742
gaacgcagaaauaauaacc

SEQ ID NO: 228744 - RNA, 19 nt, Artificial Sequence
  Description of Artificial Sequence: Synthetic oligonucleotide
  Sense strand starting at position 964 of SEQ ID NO: 2945
auuucugcguucccuacaa

SEQ ID NO: 228745 - RNA, 19 nt, Artificial Sequence
  Description of Artificial Sequence: Synthetic oligonucleotide
  Antisense strand to SEQ ID NO: 228744
uuguagggaacgcagaaau

SEQ ID NO: 228746 - RNA, 19 nt, Artificial Sequence
  Description of Artificial Sequence: Synthetic oligonucleotide
  Sense strand starting at position 966 of SEQ ID NO: 2945
uucugcguucccuacaaua

SEQ ID NO: 228747 - RNA, 19 nt, Artificial Sequence
  Description of Artificial Sequence: Synthetic oligonucleotide
  Antisense strand to SEQ ID NO: 228746
uauuguagggaacgcagaa

SEQ ID NO: 228748 - RNA, 19 nt, Artificial Sequence
  Description of Artificial Sequence: Synthetic oligonucleotide
  Sense strand starting at position 968 of SEQ ID NO: 2945
cugcguucccuacaauaag

SEQ ID NO: 228749 - RNA, 19 nt, Artificial Sequence
  Description of Artificial Sequence: Synthetic oligonucleotide
  Antisense strand to SEQ ID NO: 228748
cuuauuguagggaacgcag

SEQ ID NO: 228750 - RNA, 19 nt, Artificial Sequence
  Description of Artificial Sequence: Synthetic oligonucleotide
  Sense strand starting at position 977 of SEQ ID NO: 2945
cuacaauaagccuggcauu

SEQ ID NO: 228751 - RNA, 19 nt, Artificial Sequence
  Description of Artificial Sequence: Synthetic oligonucleotide
  Antisense strand to SEQ ID NO: 228750
aaugccaggcuuauuguag

SEQ ID NO: 228752 - RNA, 19 nt, Artificial Sequence
  Description of Artificial Sequence: Synthetic oligonucleotide
  Sense strand starting at position 989 of SEQ ID NO: 2945
uggcauuacucauaugauc

SEQ ID NO: 228753 - RNA, 19 nt, Artificial Sequence
  Description of Artificial Sequence: Synthetic oligonucleotide
  Antisense strand to SEQ ID NO: 228752
gaucauaugaguaaugcca

SEQ ID NO: 228754 - RNA, 19 nt, Artificial Sequence
  Description of Artificial Sequence: Synthetic oligonucleotide
  Sense strand starting at position 2112 of SEQ ID NO: 2945
ugaagauucugugcugaga

SEQ ID NO: 228755 - RNA, 19 nt, Artificial Sequence
  Description of Artificial Sequence: Synthetic oligonucleotide
  Antisense strand to SEQ ID NO: 228754
ucucagcacagaaucuuca

SEQ ID NO: 228756 - RNA, 19 nt, Artificial Sequence
  Description of Artificial Sequence: Synthetic oligonucleotide
  Sense strand starting at position 2114 of SEQ ID NO: 2945
aagauucugugcugagacu

SEQ ID NO: 228757 - RNA, 19 nt, Artificial Sequence
  Description of Artificial Sequence: Synthetic oligonucleotide
  Antisense strand to SEQ ID NO: 228756
agucucagcacagaaucuu

SEQ ID NO: 228758 - RNA, 19 nt, Artificial Sequence
  Description of Artificial Sequence: Synthetic oligonucleotide
  Sense strand starting at position 2115 of SEQ ID NO: 2945
agauucugugcugagacuu

SEQ ID NO: 228759 - RNA, 19 nt, Artificial Sequence
  Description of Artificial Sequence: Synthetic oligonucleotide
  Antisense strand to SEQ ID NO: 228758
aagucucagcacagaaucu

SEQ ID NO: 228760 - RNA, 19 nt, Artificial Sequence
  Description of Artificial Sequence: Synthetic oligonucleotide
  Sense strand starting at position 2359 of SEQ ID NO: 2945
uuggcucucuugggaagaa

SEQ ID NO: 228761 - RNA, 19 nt, Artificial Sequence
  Description of Artificial Sequence: Synthetic oligonucleotide
  Antisense strand to SEQ ID NO: 228760
uucuucccaagagagccaa

SEQ ID NO: 228762 - RNA, 19 nt, Artificial Sequence
  Description of Artificial Sequence: Synthetic oligonucleotide
  Sense strand starting at position 2360 of SEQ ID NO: 2945
uggcucucuugggaagaaa

SEQ ID NO: 228763 - RNA, 19 nt, Artificial Sequence
  Description of Artificial Sequence: Synthetic oligonucleotide
  Antisense strand to SEQ ID NO: 228762
uuucuucccaagagagcca

SEQ ID NO: 228764 - RNA, 19 nt, Artificial Sequence
  Description of Artificial Sequence: Synthetic oligonucleotide
  Sense strand starting at position 2436 of SEQ ID NO: 2945
cuagcacuugaagauguaa

SEQ ID NO: 228765 - RNA, 19 nt, Artificial Sequence
  Description of Artificial Sequence: Synthetic oligonucleotide
  Antisense strand to SEQ ID NO: 228764
uuacaucuucaagugcuag

SEQ ID NO: 228766 - RNA, 19 nt, Artificial Sequence
  Description of Artificial Sequence: Synthetic oligonucleotide
  Sense strand starting at position 2438 of SEQ ID NO: 2945
agcacuugaagauguaaga

SEQ ID NO: 228767 - RNA, 19 nt, Artificial Sequence
  Description of Artificial Sequence: Synthetic oligonucleotide
  Antisense strand to SEQ ID NO: 228766
ucuuacaucuucaagugcu

SEQ ID NO: 228768 - RNA, 19 nt, Artificial Sequence
  Description of Artificial Sequence: Synthetic oligonucleotide
  Sense strand starting at position 2530 of SEQ ID NO: 2945
ucaccugagguuugaaguu

SEQ ID NO: 228769 - RNA, 19 nt, Artificial Sequence
  Description of Artificial Sequence: Synthetic oligonucleotide
  Antisense strand to SEQ ID NO: 228768
aacuucaaaccucagguga

SEQ ID NO: 228770 - RNA, 19 nt, Artificial Sequence
  Description of Artificial Sequence: Synthetic oligonucleotide
  Sense strand starting at position 2764 of SEQ ID NO: 2945
gccaaauacugagaaccga

SEQ ID NO: 228771 - RNA, 19 nt, Artificial Sequence
  Description of Artificial Sequence: Synthetic oligonucleotide
  Antisense strand to SEQ ID NO: 228770
ucgguucucaguauuuggc

SEQ ID NO: 228772 - RNA, 19 nt, Artificial Sequence
  Description of Artificial Sequence: Synthetic oligonucleotide
  Sense strand starting at position 2779 of SEQ ID NO: 2945
ccgagaugauuucggguuu

SEQ ID NO: 228773 - RNA, 19 nt, Artificial Sequence
  Description of Artificial Sequence: Synthetic oligonucleotide
  Antisense strand to SEQ ID NO: 228772
aaacccgaaaucaucucgg

SEQ ID NO: 228774 - RNA, 19 nt, Artificial Sequence
  Description of Artificial Sequence: Synthetic oligonucleotide
  Sense strand starting at position 2825 of SEQ ID NO: 2945
gaugacgccuucggaaaga

SEQ ID NO: 228775 - RNA, 19 nt, Artificial Sequence
  Description of Artificial Sequence: Synthetic oligonucleotide
  Antisense strand to SEQ ID NO: 228774
ucuuuccgaaggcgucauc

SEQ ID NO: 228776 - RNA, 19 nt, Artificial Sequence
  Description of Artificial Sequence: Synthetic oligonucleotide
  Sense strand starting at position 2874 of SEQ ID NO: 2945
aaucgauuuccgugcagau

SEQ ID NO: 228777 - RNA, 19 nt, Artificial Sequence
  Description of Artificial Sequence: Synthetic oligonucleotide
  Antisense strand to SEQ ID NO: 228776
aucugcacggaaaucgauu

SEQ ID NO: 228778 - RNA, 19 nt, Artificial Sequence
  Description of Artificial Sequence: Synthetic oligonucleotide
  Sense strand starting at position 2992 of SEQ ID NO: 2945
gcuguaauaucauuguaac

SEQ ID NO: 228779 - RNA, 19 nt, Artificial Sequence
  Description of Artificial Sequence: Synthetic oligonucleotide
  Antisense strand to SEQ ID NO: 228778
guuacaaugauauuacagc

SEQ ID NO: 228780 - RNA, 19 nt, Artificial Sequence
  Description of Artificial Sequence: Synthetic oligonucleotide
  Sense strand starting at position 2993 of SEQ ID NO: 2945
cuguaauaucauuguaacc

SEQ ID NO: 228781 - RNA, 19 nt, Artificial Sequence
  Description of Artificial Sequence: Synthetic oligonucleotide
  Antisense strand to SEQ ID NO: 228780
gguuacaaugauauuacag

SEQ ID NO: 228782 - RNA, 19 nt, Artificial Sequence
  Description of Artificial Sequence: Synthetic oligonucleotide
  Sense strand starting at position 2995 of SEQ ID NO: 2945
guaauaucauuguaaccua

SEQ ID NO: 228783 - RNA, 19 nt, Artificial Sequence
  Description of Artificial Sequence: Synthetic oligonucleotide
  Antisense strand to SEQ ID NO: 228782
uagguuacaaugauauuac

SEQ ID NO: 228784 - RNA, 19 nt, Artificial Sequence
  Description of Artificial Sequence: Synthetic oligonucleotide
  Sense strand starting at position 3410 of SEQ ID NO: 2945
ucagcuaaguuugauuaau

SEQ ID NO: 228785 - RNA, 19 nt, Artificial Sequence
  Description of Artificial Sequence: Synthetic oligonucleotide
  Antisense strand to SEQ ID NO: 228784
auuaaucaaacuuagcuga

SEQ ID NO: 228786 - RNA, 19 nt, Artificial Sequence
  Description of Artificial Sequence: Synthetic oligonucleotide
  Sense strand starting at position 3431 of SEQ ID NO: 2945
cuacaaguauaugucaaau

SEQ ID NO: 228787 - RNA, 19 nt, Artificial Sequence
  Description of Artificial Sequence: Synthetic oligonucleotide
  Antisense strand to SEQ ID NO: 228786
auuugacauauacuuguag

SEQ ID NO: 228788 - RNA, 19 nt, Artificial Sequence
  Description of Artificial Sequence: Synthetic oligonucleotide
  Sense strand starting at position 3483 of SEQ ID NO: 2945
uauguuguauucuguugaa

SEQ ID NO: 228789 - RNA, 19 nt, Artificial Sequence
  Description of Artificial Sequence: Synthetic oligonucleotide
  Antisense strand to SEQ ID NO: 228788
uucaacagaauacaacaua

SEQ ID NO: 228790 - RNA, 19 nt, Artificial Sequence
  Description of Artificial Sequence: Synthetic oligonucleotide
  Sense strand starting at position 3496 of SEQ ID NO: 2945
guugaagugccggcaaguu

SEQ ID NO: 228791 - RNA, 19 nt, Artificial Sequence
  Description of Artificial Sequence: Synthetic oligonucleotide
  Antisense strand to SEQ ID NO: 228790
aacuugccggcacuucaac

SEQ ID NO: 228792 - RNA, 19 nt, Artificial Sequence
  Description of Artificial Sequence: Synthetic oligonucleotide
  Sense strand starting at position 3505 of SEQ ID NO: 2945
ccggcaaguugauuaaugu

SEQ ID NO: 228793 - RNA, 19 nt, Artificial Sequence
  Description of Artificial Sequence: Synthetic oligonucleotide
  Antisense strand to SEQ ID NO: 228792
acauuaaucaacuugccgg

SEQ ID NO: 228794 - RNA, 19 nt, Artificial Sequence
  Description of Artificial Sequence: Synthetic oligonucleotide
  Sense strand starting at position 3506 of SEQ ID NO: 2945
cggcaaguugauuaaugua

SEQ ID NO: 228795 - RNA, 19 nt, Artificial Sequence
  Description of Artificial Sequence: Synthetic oligonucleotide
  Antisense strand to SEQ ID NO: 228794
uacauuaaucaacuugccg

SEQ ID NO: 228796 - RNA, 19 nt, Artificial Sequence
  Description of Artificial Sequence: Synthetic oligonucleotide
  Sense strand starting at position 3527 of SEQ ID NO: 2945
uagucaugcuguucuaagu

SEQ ID NO: 228797 - RNA, 19 nt, Artificial Sequence
  Description of Artificial Sequence: Synthetic oligonucleotide
  Antisense strand to SEQ ID NO: 228796
acuuagaacagcaugacua

SEQ ID NO: 228798 - RNA, 19 nt, Artificial Sequence
  Description of Artificial Sequence: Synthetic oligonucleotide
  Sense strand starting at position 3536 of SEQ ID NO: 2945
uguucuaaguaccucuaua

SEQ ID NO: 228799 - RNA, 19 nt, Artificial Sequence
  Description of Artificial Sequence: Synthetic oligonucleotide
  Antisense strand to SEQ ID NO: 228798
uauagagguacuuagaaca

SEQ ID NO: 228800 - RNA, 19 nt, Artificial Sequence
  Description of Artificial Sequence: Synthetic oligonucleotide
  Sense strand starting at position 3578 of SEQ ID NO: 2945
ucacgugguauaugaaaua

SEQ ID NO: 228801 - RNA, 19 nt, Artificial Sequence
  Description of Artificial Sequence: Synthetic oligonucleotide
  Antisense strand to SEQ ID NO: 228800
uauuucauauaccacguga

SEQ ID NO: 228802 - RNA, 19 nt, Artificial Sequence
  Description of Artificial Sequence: Synthetic oligonucleotide
  Sense strand starting at position 3836 of SEQ ID NO: 2945
ccaacauuucgccauugca

SEQ ID NO: 228803 - RNA, 19 nt, Artificial Sequence
  Description of Artificial Sequence: Synthetic oligonucleotide
  Antisense strand to SEQ ID NO: 228802
ugcaauggcgaaauguugg

SEQ ID NO: 228804 - RNA, 19 nt, Artificial Sequence
  Description of Artificial Sequence: Synthetic oligonucleotide
  Sense strand starting at position 3959 of SEQ ID NO: 2945
uuuguugucugcugaauuu

SEQ ID NO: 228805 - RNA, 19 nt, Artificial Sequence
  Description of Artificial Sequence: Synthetic oligonucleotide
  Antisense strand to SEQ ID NO: 228804
aaauucagcagacaacaaa

SEQ ID NO: 228806 - RNA, 19 nt, Artificial Sequence
  Description of Artificial Sequence: Synthetic oligonucleotide
  Sense strand starting at position 108 of SEQ ID NO: 2946
cguccuaacaaguguguga

SEQ ID NO: 228807 - RNA, 19 nt, Artificial Sequence
  Description of Artificial Sequence: Synthetic oligonucleotide
  Antisense strand to SEQ ID NO: 228806
ucacacacuuguuaggacg

SEQ ID NO: 228808 - RNA, 19 nt, Artificial Sequence
  Description of Artificial Sequence: Synthetic oligonucleotide
  Sense strand starting at position 304 of SEQ ID NO: 2946
guguauaaaucucucagag

SEQ ID NO: 228809 - RNA, 19 nt, Artificial Sequence
  Description of Artificial Sequence: Synthetic oligonucleotide
  Antisense strand to SEQ ID NO: 228808
cucugagagauuuauacac

SEQ ID NO: 228810 - RNA, 19 nt, Artificial Sequence
  Description of Artificial Sequence: Synthetic oligonucleotide
  Sense strand starting at position 428 of SEQ ID NO: 2946
ggacggaugucuggagaga

SEQ ID NO: 228811 - RNA, 19 nt, Artificial Sequence
  Description of Artificial Sequence: Synthetic oligonucleotide
  Antisense strand to SEQ ID NO: 228810
ucucuccagacauccgucc

SEQ ID NO: 228812 - RNA, 19 nt, Artificial Sequence
  Description of Artificial Sequence: Synthetic oligonucleotide
  Sense strand starting at position 430 of SEQ ID NO: 2946
acggaugucuggagagaug

SEQ ID NO: 228813 - RNA, 19 nt, Artificial Sequence
  Description of Artificial Sequence: Synthetic oligonucleotide
  Antisense strand to SEQ ID NO: 228812
caucucuccagacauccgu

SEQ ID NO: 228814 - RNA, 19 nt, Artificial Sequence
  Description of Artificial Sequence: Synthetic oligonucleotide
  Sense strand starting at position 552 of SEQ ID NO: 2946
gcauuauggauggaugcau

SEQ ID NO: 228815 - RNA, 19 nt, Artificial Sequence
  Description of Artificial Sequence: Synthetic oligonucleotide
  Antisense strand to SEQ ID NO: 228814
augcauccauccauaaugc

SEQ ID NO: 228816 - RNA, 19 nt, Artificial Sequence
  Description of Artificial Sequence: Synthetic oligonucleotide
  Sense strand starting at position 580 of SEQ ID NO: 2946
gacggaugcacggagagau

SEQ ID NO: 228817 - RNA, 19 nt, Artificial Sequence
  Description of Artificial Sequence: Synthetic oligonucleotide
  Antisense strand to SEQ ID NO: 228816
aucucuccgugcauccguc

SEQ ID NO: 228818 - RNA, 19 nt, Artificial Sequence
  Description of Artificial Sequence: Synthetic oligonucleotide
  Sense strand starting at position 771 of SEQ ID NO: 2946
gacaucugcgcacagacau

SEQ ID NO: 228819 - RNA, 19 nt, Artificial Sequence
  Description of Artificial Sequence: Synthetic oligonucleotide
  Antisense strand to SEQ ID NO: 228818
augucugugcgcagauguc

SEQ ID NO: 228820 - RNA, 19 nt, Artificial Sequence
  Description of Artificial Sequence: Synthetic oligonucleotide
  Sense strand starting at position 997 of SEQ ID NO: 2946
cuggguuucucagaaacua

SEQ ID NO: 228821 - RNA, 19 nt, Artificial Sequence
  Description of Artificial Sequence: Synthetic oligonucleotide
  Antisense strand to SEQ ID NO: 228820
uaguuucugagaaacccag

SEQ ID NO: 228822 - RNA, 19 nt, Artificial Sequence
  Description of Artificial Sequence: Synthetic oligonucleotide
  Sense strand starting at position 1140 of SEQ ID NO: 2946
gcacguuagcucuaaacug

SEQ ID NO: 228823 - RNA, 19 nt, Artificial Sequence
  Description of Artificial Sequence: Synthetic oligonucleotide
  Antisense strand to SEQ ID NO: 228822
caguuuagagcuaacgugc

SEQ ID NO: 228824 - RNA, 19 nt, Artificial Sequence
  Description of Artificial Sequence: Synthetic oligonucleotide
  Sense strand starting at position 1147 of SEQ ID NO: 2946
agcucuaaacugugugcaa

SEQ ID NO: 228825 - RNA, 19 nt, Artificial Sequence
  Description of Artificial Sequence: Synthetic oligonucleotide
  Antisense strand to SEQ ID NO: 228824
uugcacacaguuuagagcu

SEQ ID NO: 228826 - RNA, 19 nt, Artificial Sequence
  Description of Artificial Sequence: Synthetic oligonucleotide
  Sense strand starting at position 1148 of SEQ ID NO: 2946
gcucuaaacugugugcaau

SEQ ID NO: 228827 - RNA, 19 nt, Artificial Sequence
  Description of Artificial Sequence: Synthetic oligonucleotide
  Antisense strand to SEQ ID NO: 228826
auugcacacaguuuagagc

SEQ ID NO: 228828 - RNA, 19 nt, Artificial Sequence
  Description of Artificial Sequence: Synthetic oligonucleotide
  Sense strand starting at position 1149 of SEQ ID NO: 2946
cucuaaacugugugcaauu

SEQ ID NO: 228829 - RNA, 19 nt, Artificial Sequence
  Description of Artificial Sequence: Synthetic oligonucleotide
  Antisense strand to SEQ ID NO: 228828
aauugcacacaguuuagag

SEQ ID NO: 228830 - RNA, 19 nt, Artificial Sequence
  Description of Artificial Sequence: Synthetic oligonucleotide
  Sense strand starting at position 1290 of SEQ ID NO: 2946
ggagaaaggugucugacuc

SEQ ID NO: 228831 - RNA, 19 nt, Artificial Sequence
  Description of Artificial Sequence: Synthetic oligonucleotide
  Antisense strand to SEQ ID NO: 228830
gagucagacaccuuucucc

SEQ ID NO: 228832 - RNA, 19 nt, Artificial Sequence
  Description of Artificial Sequence: Synthetic oligonucleotide
  Sense strand starting at position 1304 of SEQ ID NO: 2946
gacuccgggugcuagaaau

SEQ ID NO: 228833 - RNA, 19 nt, Artificial Sequence
  Description of Artificial Sequence: Synthetic oligonucleotide
  Antisense strand to SEQ ID NO: 228832
auuucuagcacccggaguc

SEQ ID NO: 228834 - RNA, 19 nt, Artificial Sequence
  Description of Artificial Sequence: Synthetic oligonucleotide
  Sense strand starting at position 1407 of SEQ ID NO: 2946
ucgggaaacuuugcagaaa

SEQ ID NO: 228835 - RNA, 19 nt, Artificial Sequence
  Description of Artificial Sequence: Synthetic oligonucleotide
  Antisense strand to SEQ ID NO: 228834
uuucugcaaaguuucccga

SEQ ID NO: 228836 - RNA, 19 nt, Artificial Sequence
  Description of Artificial Sequence: Synthetic oligonucleotide
  Sense strand starting at position 1431 of SEQ ID NO: 2946
gcucgaaaggcuuucgcua

SEQ ID NO: 228837 - RNA, 19 nt, Artificial Sequence
  Description of Artificial Sequence: Synthetic oligonucleotide
  Antisense strand to SEQ ID NO: 228836
uagcgaaagccuuucgagc

SEQ ID NO: 228838 - RNA, 19 nt, Artificial Sequence
  Description of Artificial Sequence: Synthetic oligonucleotide
  Sense strand starting at position 1436 of SEQ ID NO: 2946
aaaggcuuucgcuagaauc

SEQ ID NO: 228839 - RNA, 19 nt, Artificial Sequence
  Description of Artificial Sequence: Synthetic oligonucleotide
  Antisense strand to SEQ ID NO: 228838
gauucuagcgaaagccuuu

SEQ ID NO: 228840 - RNA, 19 nt, Artificial Sequence
  Description of Artificial Sequence: Synthetic oligonucleotide
  Sense strand starting at position 1613 of SEQ ID NO: 2946
cugauaaacuuuggccuuu

SEQ ID NO: 228841 - RNA, 19 nt, Artificial Sequence
  Description of Artificial Sequence: Synthetic oligonucleotide
  Antisense strand to SEQ ID NO: 228840
aaaggccaaaguuuaucag

SEQ ID NO: 228842 - RNA, 19 nt, Artificial Sequence
  Description of Artificial Sequence: Synthetic oligonucleotide
  Sense strand starting at position 1622 of SEQ ID NO: 2946
uuuggccuuugguuacaaa

SEQ ID NO: 228843 - RNA, 19 nt, Artificial Sequence
  Description of Artificial Sequence: Synthetic oligonucleotide
  Antisense strand to SEQ ID NO: 228842
uuuguaaccaaaggccaaa

SEQ ID NO: 228844 - RNA, 19 nt, Artificial Sequence
  Description of Artificial Sequence: Synthetic oligonucleotide
  Sense strand starting at position 1905 of SEQ ID NO: 2946
gucgcaaaucccgaagaga

SEQ ID NO: 228845 - RNA, 19 nt, Artificial Sequence
  Description of Artificial Sequence: Synthetic oligonucleotide
  Antisense strand to SEQ ID NO: 228844
ucucuucgggauuugcgac

SEQ ID NO: 228846 - RNA, 19 nt, Artificial Sequence
  Description of Artificial Sequence: Synthetic oligonucleotide
  Sense strand starting at position 1989 of SEQ ID NO: 2946
cuucuaucccaguggaaua

SEQ ID NO: 228847 - RNA, 19 nt, Artificial Sequence
  Description of Artificial Sequence: Synthetic oligonucleotide
  Antisense strand to SEQ ID NO: 228846
uauuccacugggauagaag

SEQ ID NO: 228848 - RNA, 19 nt, Artificial Sequence
  Description of Artificial Sequence: Synthetic oligonucleotide
  Sense strand starting at position 2001 of SEQ ID NO: 2946
uggaauaaaugcuuaaguu

SEQ ID NO: 228849 - RNA, 19 nt, Artificial Sequence
  Description of Artificial Sequence: Synthetic oligonucleotide
  Antisense strand to SEQ ID NO: 228848
aacuuaagcauuuauucca

SEQ ID NO: 228850 - RNA, 19 nt, Artificial Sequence
  Description of Artificial Sequence: Synthetic oligonucleotide
  Sense strand starting at position 2375 of SEQ ID NO: 2946
ggcgguuuaagauggagga

SEQ ID NO: 228851 - RNA, 19 nt, Artificial Sequence
  Description of Artificial Sequence: Synthetic oligonucleotide
  Antisense strand to SEQ ID NO: 228850
uccuccaucuuaaaccgcc

SEQ ID NO: 228852 - RNA, 19 nt, Artificial Sequence
  Description of Artificial Sequence: Synthetic oligonucleotide
  Sense strand starting at position 2376 of SEQ ID NO: 2946
gcgguuuaagauggaggaa

SEQ ID NO: 228853 - RNA, 19 nt, Artificial Sequence
  Description of Artificial Sequence: Synthetic oligonucleotide
  Antisense strand to SEQ ID NO: 228852
uuccuccaucuuaaaccgc

SEQ ID NO: 228854 - RNA, 19 nt, Artificial Sequence
  Description of Artificial Sequence: Synthetic oligonucleotide
  Sense strand starting at position 2434 of SEQ ID NO: 2946
ugcgguugcuucuuuagga

SEQ ID NO: 228855 - RNA, 19 nt, Artificial Sequence
  Description of Artificial Sequence: Synthetic oligonucleotide
  Antisense strand to SEQ ID NO: 228854
uccuaaagaagcaaccgca

SEQ ID NO: 228856 - RNA, 19 nt, Artificial Sequence
  Description of Artificial Sequence: Synthetic oligonucleotide
  Sense strand starting at position 2438 of SEQ ID NO: 2946
guugcuucuuuaggagagu

SEQ ID NO: 228857 - RNA, 19 nt, Artificial Sequence
  Description of Artificial Sequence: Synthetic oligonucleotide
  Antisense strand to SEQ ID NO: 228856
acucuccuaaagaagcaac

SEQ ID NO: 228858 - RNA, 19 nt, Artificial Sequence
  Description of Artificial Sequence: Synthetic oligonucleotide
  Sense strand starting at position 2441 of SEQ ID NO: 2946
gcuucuuuaggagagucga

SEQ ID NO: 228859 - RNA, 19 nt, Artificial Sequence
  Description of Artificial Sequence: Synthetic oligonucleotide
  Antisense strand to SEQ ID NO: 228858
ucgacucuccuaaagaagc

SEQ ID NO: 228860 - RNA, 19 nt, Artificial Sequence
  Description of Artificial Sequence: Synthetic oligonucleotide
  Sense strand starting at position 2678 of SEQ ID NO: 2946
ccgucacugucuccagaga

SEQ ID NO: 228861 - RNA, 19 nt, Artificial Sequence
  Description of Artificial Sequence: Synthetic oligonucleotide
  Antisense strand to SEQ ID NO: 228860
ucucuggagacagugacgg

SEQ ID NO: 228862 - RNA, 19 nt, Artificial Sequence
  Description of Artificial Sequence: Synthetic oligonucleotide
  Sense strand starting at position 2705 of SEQ ID NO: 2946
augacuuucuagcaguaag

SEQ ID NO: 228863 - RNA, 19 nt, Artificial Sequence
  Description of Artificial Sequence: Synthetic oligonucleotide
  Antisense strand to SEQ ID NO: 228862
cuuacugcuagaaagucau

SEQ ID NO: 228864 - RNA, 19 nt, Artificial Sequence
  Description of Artificial Sequence: Synthetic oligonucleotide
  Sense strand starting at position 2708 of SEQ ID NO: 2946
acuuucuagcaguaaggaa

SEQ ID NO: 228865 - RNA, 19 nt, Artificial Sequence
  Description of Artificial Sequence: Synthetic oligonucleotide
  Antisense strand to SEQ ID NO: 228864
uuccuuacugcuagaaagu

SEQ ID NO: 228866 - RNA, 19 nt, Artificial Sequence
  Description of Artificial Sequence: Synthetic oligonucleotide
  Sense strand starting at position 2803 of SEQ ID NO: 2946
cagggaaccaguuguggau

SEQ ID NO: 228867 - RNA, 19 nt, Artificial Sequence
  Description of Artificial Sequence: Synthetic oligonucleotide
  Antisense strand to SEQ ID NO: 228866
auccacaacugguucccug

SEQ ID NO: 228868 - RNA, 19 nt, Artificial Sequence
  Description of Artificial Sequence: Synthetic oligonucleotide
  Sense strand starting at position 2805 of SEQ ID NO: 2946
gggaaccaguuguggauuu

SEQ ID NO: 228869 - RNA, 19 nt, Artificial Sequence
  Description of Artificial Sequence: Synthetic oligonucleotide
  Antisense strand to SEQ ID NO: 228868
aaauccacaacugguuccc

SEQ ID NO: 228870 - RNA, 19 nt, Artificial Sequence
  Description of Artificial Sequence: Synthetic oligonucleotide
  Sense strand starting at position 2889 of SEQ ID NO: 2946
aagugaaaggcuuaagugu

SEQ ID NO: 228871 - RNA, 19 nt, Artificial Sequence
  Description of Artificial Sequence: Synthetic oligonucleotide
  Antisense strand to SEQ ID NO: 228870
acacuuaagccuuucacuu

SEQ ID NO: 228872 - RNA, 19 nt, Artificial Sequence
  Description of Artificial Sequence: Synthetic oligonucleotide
  Sense strand starting at position 3226 of SEQ ID NO: 2946
gggcacugauuccuagcaa

SEQ ID NO: 228873 - RNA, 19 nt, Artificial Sequence
  Description of Artificial Sequence: Synthetic oligonucleotide
  Antisense strand to SEQ ID NO: 228872
uugcuaggaaucagugccc

SEQ ID NO: 228874 - RNA, 19 nt, Artificial Sequence
  Description of Artificial Sequence: Synthetic oligonucleotide
  Sense strand starting at position 3227 of SEQ ID NO: 2946
ggcacugauuccuagcaau

SEQ ID NO: 228875 - RNA, 19 nt, Artificial Sequence
  Description of Artificial Sequence: Synthetic oligonucleotide
  Antisense strand to SEQ ID NO: 228874
auugcuaggaaucagugcc

SEQ ID NO: 228876 - RNA, 19 nt, Artificial Sequence
  Description of Artificial Sequence: Synthetic oligonucleotide
  Sense strand starting at position 3230 of SEQ ID NO: 2946
acugauuccuagcaaugag

SEQ ID NO: 228877 - RNA, 19 nt, Artificial Sequence
  Description of Artificial Sequence: Synthetic oligonucleotide
  Antisense strand to SEQ ID NO: 228876
cucauugcuaggaaucagu

SEQ ID NO: 228878 - RNA, 19 nt, Artificial Sequence
  Description of Artificial Sequence: Synthetic oligonucleotide
  Sense strand starting at position 3580 of SEQ ID NO: 2946
ucaagagguccuggagucu

SEQ ID NO: 228879 - RNA, 19 nt, Artificial Sequence
  Description of Artificial Sequence: Synthetic oligonucleotide
  Antisense strand to SEQ ID NO: 228878
agacuccaggaccucuuga

SEQ ID NO: 228880 - RNA, 19 nt, Artificial Sequence
  Description of Artificial Sequence: Synthetic oligonucleotide
  Sense strand starting at position 3763 of SEQ ID NO: 2946
ucgagucacugcuacaguu

SEQ ID NO: 228881 - RNA, 19 nt, Artificial Sequence
  Description of Artificial Sequence: Synthetic oligonucleotide
  Antisense strand to SEQ ID NO: 228880
aacuguagcagugacucga

SEQ ID NO: 228882 - RNA, 19 nt, Artificial Sequence
  Description of Artificial Sequence: Synthetic oligonucleotide
  Sense strand starting at position 3975 of SEQ ID NO: 2946
cugggcauuucgguuucua

SEQ ID NO: 228883 - RNA, 19 nt, Artificial Sequence
  Description of Artificial Sequence: Synthetic oligonucleotide
  Antisense strand to SEQ ID NO: 228882
uagaaaccgaaaugcccag

SEQ ID NO: 228884 - RNA, 19 nt, Artificial Sequence
  Description of Artificial Sequence: Synthetic oligonucleotide
  Sense strand starting at position 3979 of SEQ ID NO: 2946
gcauuucgguuucuagaua

SEQ ID NO: 228885 - RNA, 19 nt, Artificial Sequence
  Description of Artificial Sequence: Synthetic oligonucleotide
  Antisense strand to SEQ ID NO: 228884
uaucuagaaaccgaaaugc

SEQ ID NO: 228886 - RNA, 19 nt, Artificial Sequence
  Description of Artificial Sequence: Synthetic oligonucleotide
  Sense strand starting at position 427 of SEQ ID NO: 2947
gggaguagagcuuaaggca

SEQ ID NO: 228887 - RNA, 19 nt, Artificial Sequence
  Description of Artificial Sequence: Synthetic oligonucleotide
  Antisense strand to SEQ ID NO: 228886
ugccuuaagcucuacuccc

SEQ ID NO: 228888 - RNA, 19 nt, Artificial Sequence
  Description of Artificial Sequence: Synthetic oligonucleotide
  Sense strand starting at position 448 of SEQ ID NO: 2947
acaggagguaucuggguua

SEQ ID NO: 228889 - RNA, 19 nt, Artificial Sequence
  Description of Artificial Sequence: Synthetic oligonucleotide
  Antisense strand to SEQ ID NO: 228888
uaacccagauaccuccugu

SEQ ID NO: 228890 - RNA, 19 nt, Artificial Sequence
  Description of Artificial Sequence: Synthetic oligonucleotide
  Sense strand starting at position 451 of SEQ ID NO: 2947
ggagguaucuggguuaaca

SEQ ID NO: 228891 - RNA, 19 nt, Artificial Sequence
  Description of Artificial Sequence: Synthetic oligonucleotide
  Antisense strand to SEQ ID NO: 228890
uguuaacccagauaccucc

SEQ ID NO: 228892 - RNA, 19 nt, Artificial Sequence
  Description of Artificial Sequence: Synthetic oligonucleotide
  Sense strand starting at position 502 of SEQ ID NO: 2947
ccgaguuaccaagaaggcu

SEQ ID NO: 228893 - RNA, 19 nt, Artificial Sequence
  Description of Artificial Sequence: Synthetic oligonucleotide
  Antisense strand to SEQ ID NO: 228892
agccuucuugguaacucgg

SEQ ID NO: 228894 - RNA, 19 nt, Artificial Sequence
  Description of Artificial Sequence: Synthetic oligonucleotide
  Sense strand starting at position 605 of SEQ ID NO: 2947
gaaacaugcuaugugaccu

SEQ ID NO: 228895 - RNA, 19 nt, Artificial Sequence
  Description of Artificial Sequence: Synthetic oligonucleotide
  Antisense strand to SEQ ID NO: 228894
aggucacauagcauguuuc

SEQ ID NO: 228896 - RNA, 19 nt, Artificial Sequence
  Description of Artificial Sequence: Synthetic oligonucleotide
  Sense strand starting at position 771 of SEQ ID NO: 2947
acucuaaugaguugggcau

SEQ ID NO: 228897 - RNA, 19 nt, Artificial Sequence
  Description of Artificial Sequence: Synthetic oligonucleotide
  Antisense strand to SEQ ID NO: 228896
augcccaacucauuagagu

SEQ ID NO: 228898 - RNA, 19 nt, Artificial Sequence
  Description of Artificial Sequence: Synthetic oligonucleotide
  Sense strand starting at position 772 of SEQ ID NO: 2947
cucuaaugaguugggcauu

SEQ ID NO: 228899 - RNA, 19 nt, Artificial Sequence
  Description of Artificial Sequence: Synthetic oligonucleotide
  Antisense strand to SEQ ID NO: 228898
aaugcccaacucauuagag

SEQ ID NO: 228900 - RNA, 19 nt, Artificial Sequence
  Description of Artificial Sequence: Synthetic oligonucleotide
  Sense strand starting at position 775 of SEQ ID NO: 2947
uaaugaguugggcauuaua

SEQ ID NO: 228901 - RNA, 19 nt, Artificial Sequence
  Description of Artificial Sequence: Synthetic oligonucleotide
  Antisense strand to SEQ ID NO: 228900
uauaaugcccaacucauua

SEQ ID NO: 228902 - RNA, 19 nt, Artificial Sequence
  Description of Artificial Sequence: Synthetic oligonucleotide
  Sense strand starting at position 783 of SEQ ID NO: 2947
ugggcauuauauucuaaug

SEQ ID NO: 228903 - RNA, 19 nt, Artificial Sequence
  Description of Artificial Sequence: Synthetic oligonucleotide
  Antisense strand to SEQ ID NO: 228902
cauuagaauauaaugccca

SEQ ID NO: 228904 - RNA, 19 nt, Artificial Sequence
  Description of Artificial Sequence: Synthetic oligonucleotide
  Sense strand starting at position 789 of SEQ ID NO: 2947
uuauauucuaauggcgaga

SEQ ID NO: 228905 - RNA, 19 nt, Artificial Sequence
  Description of Artificial Sequence: Synthetic oligonucleotide
  Antisense strand to SEQ ID NO: 228904
ucucgccauuagaauauaa

SEQ ID NO: 228906 - RNA, 19 nt, Artificial Sequence
  Description of Artificial Sequence: Synthetic oligonucleotide
  Sense strand starting at position 817 of SEQ ID NO: 2947
gcagcaauuccauaaacga

SEQ ID NO: 228907 - RNA, 19 nt, Artificial Sequence
  Description of Artificial Sequence: Synthetic oligonucleotide
  Antisense strand to SEQ ID NO: 228906
ucguuuauggaauugcugc

SEQ ID NO: 228908 - RNA, 19 nt, Artificial Sequence
  Description of Artificial Sequence: Synthetic oligonucleotide
  Sense strand starting at position 876 of SEQ ID NO: 2947
ggcuucuuugaggaagcaa

SEQ ID NO: 228909 - RNA, 19 nt, Artificial Sequence
  Description of Artificial Sequence: Synthetic oligonucleotide
  Antisense strand to SEQ ID NO: 228908
uugcuuccucaaagaagcc

SEQ ID NO: 228910 - RNA, 19 nt, Artificial Sequence
  Description of Artificial Sequence: Synthetic oligonucleotide
  Sense strand starting at position 895 of SEQ ID NO: 2947
uauuuaagcuaagauguga

SEQ ID NO: 228911 - RNA, 19 nt, Artificial Sequence
  Description of Artificial Sequence: Synthetic oligonucleotide
  Antisense strand to SEQ ID NO: 228910
ucacaucuuagcuuaaaua

SEQ ID NO: 228912 - RNA, 19 nt, Artificial Sequence
  Description of Artificial Sequence: Synthetic oligonucleotide
  Sense strand starting at position 1413 of SEQ ID NO: 2947
cgaaguuguaugcaugaca

SEQ ID NO: 228913 - RNA, 19 nt, Artificial Sequence
  Description of Artificial Sequence: Synthetic oligonucleotide
  Antisense strand to SEQ ID NO: 228912
ugucaugcauacaacuucg

SEQ ID NO: 228914 - RNA, 19 nt, Artificial Sequence
  Description of Artificial Sequence: Synthetic oligonucleotide
  Sense strand starting at position 1532 of SEQ ID NO: 2947
agggaauucccucgcucca

SEQ ID NO: 228915 - RNA, 19 nt, Artificial Sequence
  Description of Artificial Sequence: Synthetic oligonucleotide
  Antisense strand to SEQ ID NO: 228914
uggagcgagggaauucccu

SEQ ID NO: 228916 - RNA, 19 nt, Artificial Sequence
  Description of Artificial Sequence: Synthetic oligonucleotide
  Sense strand starting at position 1793 of SEQ ID NO: 2947
gguaccuuguacuuaucaa

SEQ ID NO: 228917 - RNA, 19 nt, Artificial Sequence
  Description of Artificial Sequence: Synthetic oligonucleotide
  Antisense strand to SEQ ID NO: 228916
uugauaaguacaagguacc

SEQ ID NO: 228918 - RNA, 19 nt, Artificial Sequence
  Description of Artificial Sequence: Synthetic oligonucleotide
  Sense strand starting at position 2274 of SEQ ID NO: 2947
gugggauuucugugguauc

SEQ ID NO: 228919 - RNA, 19 nt, Artificial Sequence
  Description of Artificial Sequence: Synthetic oligonucleotide
  Antisense strand to SEQ ID NO: 228918
gauaccacagaaaucccac

SEQ ID NO: 228920 - RNA, 19 nt, Artificial Sequence
  Description of Artificial Sequence: Synthetic oligonucleotide
  Sense strand starting at position 2465 of SEQ ID NO: 2947
cugcgugccguagaaauuu

SEQ ID NO: 228921 - RNA, 19 nt, Artificial Sequence
  Description of Artificial Sequence: Synthetic oligonucleotide
  Antisense strand to SEQ ID NO: 228920
aaauuucuacggcacgcag

SEQ ID NO: 228922 - RNA, 19 nt, Artificial Sequence
  Description of Artificial Sequence: Synthetic oligonucleotide
  Sense strand starting at position 2483 of SEQ ID NO: 2947
uaguaaacgugguuagaug

SEQ ID NO: 228923 - RNA, 19 nt, Artificial Sequence
  Description of Artificial Sequence: Synthetic oligonucleotide
  Antisense strand to SEQ ID NO: 228922
caucuaaccacguuuacua

SEQ ID NO: 228924 - RNA, 19 nt, Artificial Sequence
  Description of Artificial Sequence: Synthetic oligonucleotide
  Sense strand starting at position 2484 of SEQ ID NO: 2947
aguaaacgugguuagaugu

SEQ ID NO: 228925 - RNA, 19 nt, Artificial Sequence
  Description of Artificial Sequence: Synthetic oligonucleotide
  Antisense strand to SEQ ID NO: 228924
acaucuaaccacguuuacu

SEQ ID NO: 228926 - RNA, 19 nt, Artificial Sequence
  Description of Artificial Sequence: Synthetic oligonucleotide
  Sense strand starting at position 2490 of SEQ ID NO: 2947
cgugguuagauguagagaa

SEQ ID NO: 228927 - RNA, 19 nt, Artificial Sequence
  Description of Artificial Sequence: Synthetic oligonucleotide
  Antisense strand to SEQ ID NO: 228926
uucucuacaucuaaccacg

SEQ ID NO: 228928 - RNA, 19 nt, Artificial Sequence
  Description of Artificial Sequence: Synthetic oligonucleotide
  Sense strand starting at position 2491 of SEQ ID NO: 2947
gugguuagauguagagaag

SEQ ID NO: 228929 - RNA, 19 nt, Artificial Sequence
  Description of Artificial Sequence: Synthetic oligonucleotide
  Antisense strand to SEQ ID NO: 228928
cuucucuacaucuaaccac

SEQ ID NO: 228930 - RNA, 19 nt, Artificial Sequence
  Description of Artificial Sequence: Synthetic oligonucleotide
  Sense strand starting at position 2535 of SEQ ID NO: 2947
agucuuugugcggucagca

SEQ ID NO: 228931 - RNA, 19 nt, Artificial Sequence
  Description of Artificial Sequence: Synthetic oligonucleotide
  Antisense strand to SEQ ID NO: 228930
ugcugaccgcacaaagacu

SEQ ID NO: 228932 - RNA, 19 nt, Artificial Sequence
  Description of Artificial Sequence: Synthetic oligonucleotide
  Sense strand starting at position 2602 of SEQ ID NO: 2947
gucuauguugcuuaggaac

SEQ ID NO: 228933 - RNA, 19 nt, Artificial Sequence
  Description of Artificial Sequence: Synthetic oligonucleotide
  Antisense strand to SEQ ID NO: 228932
guuccuaagcaacauagac

SEQ ID NO: 228934 - RNA, 19 nt, Artificial Sequence
  Description of Artificial Sequence: Synthetic oligonucleotide
  Sense strand starting at position 2677 of SEQ ID NO: 2947
gugucucccgaccagauaa

SEQ ID NO: 228935 - RNA, 19 nt, Artificial Sequence
  Description of Artificial Sequence: Synthetic oligonucleotide
  Antisense strand to SEQ ID NO: 228934
uuaucuggucgggagacac

SEQ ID NO: 228936 - RNA, 19 nt, Artificial Sequence
  Description of Artificial Sequence: Synthetic oligonucleotide
  Sense strand starting at position 2714 of SEQ ID NO: 2947
cucgacgaguccuuaaaug

SEQ ID NO: 228937 - RNA, 19 nt, Artificial Sequence
  Description of Artificial Sequence: Synthetic oligonucleotide
  Antisense strand to SEQ ID NO: 228936
cauuuaaggacucgucgag

SEQ ID NO: 228938 - RNA, 19 nt, Artificial Sequence
  Description of Artificial Sequence: Synthetic oligonucleotide
  Sense strand starting at position 2761 of SEQ ID NO: 2947
gagcccaguuaauuguaaa

SEQ ID NO: 228939 - RNA, 19 nt, Artificial Sequence
  Description of Artificial Sequence: Synthetic oligonucleotide
  Antisense strand to SEQ ID NO: 228938
uuuacaauuaacugggcuc

SEQ ID NO: 228940 - RNA, 19 nt, Artificial Sequence
  Description of Artificial Sequence: Synthetic oligonucleotide
  Sense strand starting at position 2813 of SEQ ID NO: 2947
gcuagugaguaucuacuaa

SEQ ID NO: 228941 - RNA, 19 nt, Artificial Sequence
  Description of Artificial Sequence: Synthetic oligonucleotide
  Antisense strand to SEQ ID NO: 228940
uuaguagauacucacuagc

SEQ ID NO: 228942 - RNA, 19 nt, Artificial Sequence
  Description of Artificial Sequence: Synthetic oligonucleotide
  Sense strand starting at position 2961 of SEQ ID NO: 2947
cagagucacuuaguuacga

SEQ ID NO: 228943 - RNA, 19 nt, Artificial Sequence
  Description of Artificial Sequence: Synthetic oligonucleotide
  Antisense strand to SEQ ID NO: 228942
ucguaacuaagugacucug

SEQ ID NO: 228944 - RNA, 19 nt, Artificial Sequence
  Description of Artificial Sequence: Synthetic oligonucleotide
  Sense strand starting at position 2962 of SEQ ID NO: 2947
agagucacuuaguuacgaa

SEQ ID NO: 228945 - RNA, 19 nt, Artificial Sequence
  Description of Artificial Sequence: Synthetic oligonucleotide
  Antisense strand to SEQ ID NO: 228944
uucguaacuaagugacucu

SEQ ID NO: 228946 - RNA, 19 nt, Artificial Sequence
  Description of Artificial Sequence: Synthetic oligonucleotide
  Sense strand starting at position 2963 of SEQ ID NO: 2947
gagucacuuaguuacgaag

SEQ ID NO: 228947 - RNA, 19 nt, Artificial Sequence
  Description of Artificial Sequence: Synthetic oligonucleotide
  Antisense strand to SEQ ID NO: 228946
cuucguaacuaagugacuc

SEQ ID NO: 228948 - RNA, 19 nt, Artificial Sequence
  Description of Artificial Sequence: Synthetic oligonucleotide
  Sense strand starting at position 3006 of SEQ ID NO: 2947
aaaugaguucuguguuaug

SEQ ID NO: 228949 - RNA, 19 nt, Artificial Sequence
  Description of Artificial Sequence: Synthetic oligonucleotide
  Antisense strand to SEQ ID NO: 228948
cauaacacagaacucauuu

SEQ ID NO: 228950 - RNA, 19 nt, Artificial Sequence
  Description of Artificial Sequence: Synthetic oligonucleotide
  Sense strand starting at position 3055 of SEQ ID NO: 2947
cucucugggucucugaaau

SEQ ID NO: 228951 - RNA, 19 nt, Artificial Sequence
  Description of Artificial Sequence: Synthetic oligonucleotide
  Antisense strand to SEQ ID NO: 228950
auuucagagacccagagag

SEQ ID NO: 228952 - RNA, 19 nt, Artificial Sequence
  Description of Artificial Sequence: Synthetic oligonucleotide
  Sense strand starting at position 3065 of SEQ ID NO: 2947
cucugaaauaagggcgauu

SEQ ID NO: 228953 - RNA, 19 nt, Artificial Sequence
  Description of Artificial Sequence: Synthetic oligonucleotide
  Antisense strand to SEQ ID NO: 228952
aaucgcccuuauuucagag

SEQ ID NO: 228954 - RNA, 19 nt, Artificial Sequence
  Description of Artificial Sequence: Synthetic oligonucleotide
  Sense strand starting at position 3067 of SEQ ID NO: 2947
cugaaauaagggcgauuau

SEQ ID NO: 228955 - RNA, 19 nt, Artificial Sequence
  Description of Artificial Sequence: Synthetic oligonucleotide
  Antisense strand to SEQ ID NO: 228954
auaaucgcccuuauuucag

SEQ ID NO: 228956 - RNA, 19 nt, Artificial Sequence
  Description of Artificial Sequence: Synthetic oligonucleotide
  Sense strand starting at position 3150 of SEQ ID NO: 2947
acaguauuauuacuacaug

SEQ ID NO: 228957 - RNA, 19 nt, Artificial Sequence
  Description of Artificial Sequence: Synthetic oligonucleotide
  Antisense strand to SEQ ID NO: 228956
cauguaguaauaauacugu

SEQ ID NO: 228958 - RNA, 19 nt, Artificial Sequence
  Description of Artificial Sequence: Synthetic oligonucleotide
  Sense strand starting at position 3153 of SEQ ID NO: 2947
guauuauuacuacaugucu

SEQ ID NO: 228959 - RNA, 19 nt, Artificial Sequence
  Description of Artificial Sequence: Synthetic oligonucleotide
  Antisense strand to SEQ ID NO: 228958
agacauguaguaauaauac

SEQ ID NO: 228960 - RNA, 19 nt, Artificial Sequence
  Description of Artificial Sequence: Synthetic oligonucleotide
  Sense strand starting at position 3618 of SEQ ID NO: 2947
agaagaacauuagaaauga

SEQ ID NO: 228961 - RNA, 19 nt, Artificial Sequence
  Description of Artificial Sequence: Synthetic oligonucleotide
  Antisense strand to SEQ ID NO: 228960
ucauuucuaauguucuucu

SEQ ID NO: 228962 - RNA, 19 nt, Artificial Sequence
  Description of Artificial Sequence: Synthetic oligonucleotide
  Sense strand starting at position 3688 of SEQ ID NO: 2947
gccugagguggagggauua

SEQ ID NO: 228963 - RNA, 19 nt, Artificial Sequence
  Description of Artificial Sequence: Synthetic oligonucleotide
  Antisense strand to SEQ ID NO: 228962
uaaucccuccaccucaggc

SEQ ID NO: 228964 - RNA, 19 nt, Artificial Sequence
  Description of Artificial Sequence: Synthetic oligonucleotide
  Sense strand starting at position 3821 of SEQ ID NO: 2947
guuauugaggcaggagaau

SEQ ID NO: 228965 - RNA, 19 nt, Artificial Sequence
  Description of Artificial Sequence: Synthetic oligonucleotide
  Antisense strand to SEQ ID NO: 228964
auucuccugccucaauaac

SEQ ID NO: 228966 - RNA, 19 nt, Artificial Sequence
  Description of Artificial Sequence: Synthetic oligonucleotide
  Sense strand starting at position 20 of SEQ ID NO: 2948
agaacuaauuuggauuaca

SEQ ID NO: 228967 - RNA, 19 nt, Artificial Sequence
  Description of Artificial Sequence: Synthetic oligonucleotide
  Antisense strand to SEQ ID NO: 228966
uguaauccaaauuaguucu

SEQ ID NO: 228968 - RNA, 19 nt, Artificial Sequence
  Description of Artificial Sequence: Synthetic oligonucleotide
  Sense strand starting at position 31 of SEQ ID NO: 2948
ggauuacauuccuugcaga

SEQ ID NO: 228969 - RNA, 19 nt, Artificial Sequence
  Description of Artificial Sequence: Synthetic oligonucleotide
  Antisense strand to SEQ ID NO: 228968
ucugcaaggaauguaaucc

SEQ ID NO: 228970 - RNA, 19 nt, Artificial Sequence
  Description of Artificial Sequence: Synthetic oligonucleotide
  Sense strand starting at position 181 of SEQ ID NO: 2948
gaaauuccucucggcuaag

SEQ ID NO: 228971 - RNA, 19 nt, Artificial Sequence
  Description of Artificial Sequence: Synthetic oligonucleotide
  Antisense strand to SEQ ID NO: 228970
cuuagccgagaggaauuuc

SEQ ID NO: 228972 - RNA, 19 nt, Artificial Sequence
  Description of Artificial Sequence: Synthetic oligonucleotide
  Sense strand starting at position 218 of SEQ ID NO: 2948
augccuuugaaugggucaa

SEQ ID NO: 228973 - RNA, 19 nt, Artificial Sequence
  Description of Artificial Sequence: Synthetic oligonucleotide
  Antisense strand to SEQ ID NO: 228972
uugacccauucaaaggcau

SEQ ID NO: 228974 - RNA, 19 nt, Artificial Sequence
  Description of Artificial Sequence: Synthetic oligonucleotide
  Sense strand starting at position 219 of SEQ ID NO: 2948
ugccuuugaaugggucaau

SEQ ID NO: 228975 - RNA, 19 nt, Artificial Sequence
  Description of Artificial Sequence: Synthetic oligonucleotide
  Antisense strand to SEQ ID NO: 228974
auugacccauucaaaggca

SEQ ID NO: 228976 - RNA, 19 nt, Artificial Sequence
  Description of Artificial Sequence: Synthetic oligonucleotide
  Sense strand starting at position 228 of SEQ ID NO: 2948
augggucaaugugcauaau

SEQ ID NO: 228977 - RNA, 19 nt, Artificial Sequence
  Description of Artificial Sequence: Synthetic oligonucleotide
  Antisense strand to SEQ ID NO: 228976
auuaugcacauugacccau

SEQ ID NO: 228978 - RNA, 19 nt, Artificial Sequence
  Description of Artificial Sequence: Synthetic oligonucleotide
  Sense strand starting at position 231 of SEQ ID NO: 2948
ggucaaugugcauaaucaa

SEQ ID NO: 228979 - RNA, 19 nt, Artificial Sequence
  Description of Artificial Sequence: Synthetic oligonucleotide
  Antisense strand to SEQ ID NO: 228978
uugauuaugcacauugacc

SEQ ID NO: 228980 - RNA, 19 nt, Artificial Sequence
  Description of Artificial Sequence: Synthetic oligonucleotide
  Sense strand starting at position 374 of SEQ ID NO: 2948
ccugguaugcgugaagaau

SEQ ID NO: 228981 - RNA, 19 nt, Artificial Sequence
  Description of Artificial Sequence: Synthetic oligonucleotide
  Antisense strand to SEQ ID NO: 228980
auucuucacgcauaccagg

SEQ ID NO: 228982 - RNA, 19 nt, Artificial Sequence
  Description of Artificial Sequence: Synthetic oligonucleotide
  Sense strand starting at position 385 of SEQ ID NO: 2948
ugaagaauuucggaguaau

SEQ ID NO: 228983 - RNA, 19 nt, Artificial Sequence
  Description of Artificial Sequence: Synthetic oligonucleotide
  Antisense strand to SEQ ID NO: 228982
auuacuccgaaauucuuca

SEQ ID NO: 228984 - RNA, 19 nt, Artificial Sequence
  Description of Artificial Sequence: Synthetic oligonucleotide
  Sense strand starting at position 397 of SEQ ID NO: 2948
gaguaauugggagggugca

SEQ ID NO: 228985 - RNA, 19 nt, Artificial Sequence
  Description of Artificial Sequence: Synthetic oligonucleotide
  Antisense strand to SEQ ID NO: 228984
ugcacccucccaauuacuc

SEQ ID NO: 228986 - RNA, 19 nt, Artificial Sequence
  Description of Artificial Sequence: Synthetic oligonucleotide
  Sense strand starting at position 441 of SEQ ID NO: 2948
gugccauucgaaggucauu

SEQ ID NO: 228987 - RNA, 19 nt, Artificial Sequence
  Description of Artificial Sequence: Synthetic oligonucleotide
  Antisense strand to SEQ ID NO: 228986
aaugaccuucgaauggcac

SEQ ID NO: 228988 - RNA, 19 nt, Artificial Sequence
  Description of Artificial Sequence: Synthetic oligonucleotide
  Sense strand starting at position 470 of SEQ ID NO: 2948
cgauaauuguaacuuguua

SEQ ID NO: 228989 - RNA, 19 nt, Artificial Sequence
  Description of Artificial Sequence: Synthetic oligonucleotide
  Antisense strand to SEQ ID NO: 228988
uaacaaguuacaauuaucg

SEQ ID NO: 228990 - RNA, 19 nt, Artificial Sequence
  Description of Artificial Sequence: Synthetic oligonucleotide
  Sense strand starting at position 482 of SEQ ID NO: 2948
cuuguuauuuacuaggcaa

SEQ ID NO: 228991 - RNA, 19 nt, Artificial Sequence
  Description of Artificial Sequence: Synthetic oligonucleotide
  Antisense strand to SEQ ID NO: 228990
uugccuaguaaauaacaag

SEQ ID NO: 228992 - RNA, 19 nt, Artificial Sequence
  Description of Artificial Sequence: Synthetic oligonucleotide
  Sense strand starting at position 672 of SEQ ID NO: 2948
cggaaaucucucuggcucu

SEQ ID NO: 228993 - RNA, 19 nt, Artificial Sequence
  Description of Artificial Sequence: Synthetic oligonucleotide
  Antisense strand to SEQ ID NO: 228992
agagccagagagauuuccg

SEQ ID NO: 228994 - RNA, 19 nt, Artificial Sequence
  Description of Artificial Sequence: Synthetic oligonucleotide
  Sense strand starting at position 1052 of SEQ ID NO: 2948
gaacucuucccggagccaa

SEQ ID NO: 228995 - RNA, 19 nt, Artificial Sequence
  Description of Artificial Sequence: Synthetic oligonucleotide
  Antisense strand to SEQ ID NO: 228994
uuggcuccgggaagaguuc

SEQ ID NO: 228996 - RNA, 19 nt, Artificial Sequence
  Description of Artificial Sequence: Synthetic oligonucleotide
  Sense strand starting at position 1471 of SEQ ID NO: 2948
acagaagagucuccucuga

SEQ ID NO: 228997 - RNA, 19 nt, Artificial Sequence
  Description of Artificial Sequence: Synthetic oligonucleotide
  Antisense strand to SEQ ID NO: 228996
ucagaggagacucuucugu

SEQ ID NO: 228998 - RNA, 19 nt, Artificial Sequence
  Description of Artificial Sequence: Synthetic oligonucleotide
  Sense strand starting at position 2233 of SEQ ID NO: 2948
cucacugguuggucaacaa

SEQ ID NO: 228999 - RNA, 19 nt, Artificial Sequence
  Description of Artificial Sequence: Synthetic oligonucleotide
  Antisense strand to SEQ ID NO: 228998
uuguugaccaaccagugag

SEQ ID NO: 229000 - RNA, 19 nt, Artificial Sequence
  Description of Artificial Sequence: Synthetic oligonucleotide
  Sense strand starting at position 2468 of SEQ ID NO: 2948
ggcggcugcgguaauuaaa

SEQ ID NO: 229001 - RNA, 19 nt, Artificial Sequence
  Description of Artificial Sequence: Synthetic oligonucleotide
  Antisense strand to SEQ ID NO: 229000
uuuaauuaccgcagccgcc

SEQ ID NO: 229002 - RNA, 19 nt, Artificial Sequence
  Description of Artificial Sequence: Synthetic oligonucleotide
  Sense strand starting at position 2692 of SEQ ID NO: 2948
agggaaaucuuauuggcuc

SEQ ID NO: 229003 - RNA, 19 nt, Artificial Sequence
  Description of Artificial Sequence: Synthetic oligonucleotide
  Antisense strand to SEQ ID NO: 229002
gagccaauaagauuucccu

SEQ ID NO: 229004 - RNA, 19 nt, Artificial Sequence
  Description of Artificial Sequence: Synthetic oligonucleotide
  Sense strand starting at position 2961 of SEQ ID NO: 2948
ggugcucaucuacagacaa

SEQ ID NO: 229005 - RNA, 19 nt, Artificial Sequence
  Description of Artificial Sequence: Synthetic oligonucleotide
  Antisense strand to SEQ ID NO: 229004
uugucuguagaugagcacc

SEQ ID NO: 229006 - RNA, 19 nt, Artificial Sequence
  Description of Artificial Sequence: Synthetic oligonucleotide
  Sense strand starting at position 3052 of SEQ ID NO: 2948
gguccacaauuagaaagua

SEQ ID NO: 229007 - RNA, 19 nt, Artificial Sequence
  Description of Artificial Sequence: Synthetic oligonucleotide
  Antisense strand to SEQ ID NO: 229006
uacuuucuaauuguggacc

SEQ ID NO: 229008 - RNA, 19 nt, Artificial Sequence
  Description of Artificial Sequence: Synthetic oligonucleotide
  Sense strand starting at position 3077 of SEQ ID NO: 2948
aaguguguacagcaaguaa

SEQ ID NO: 229009 - RNA, 19 nt, Artificial Sequence
  Description of Artificial Sequence: Synthetic oligonucleotide
  Antisense strand to SEQ ID NO: 229008
uuacuugcuguacacacuu

SEQ ID NO: 229010 - RNA, 19 nt, Artificial Sequence
  Description of Artificial Sequence: Synthetic oligonucleotide
  Sense strand starting at position 3299 of SEQ ID NO: 2948
agcagauucuaguccaaag

SEQ ID NO: 229011 - RNA, 19 nt, Artificial Sequence
  Description of Artificial Sequence: Synthetic oligonucleotide
  Antisense strand to SEQ ID NO: 229010
cuuuggacuagaaucugcu

SEQ ID NO: 229012 - RNA, 19 nt, Artificial Sequence
  Description of Artificial Sequence: Synthetic oligonucleotide
  Sense strand starting at position 3316 of SEQ ID NO: 2948
agccacugauuugaucuua

SEQ ID NO: 229013 - RNA, 19 nt, Artificial Sequence
  Description of Artificial Sequence: Synthetic oligonucleotide
  Antisense strand to SEQ ID NO: 229012
uaagaucaaaucaguggcu

SEQ ID NO: 229014 - RNA, 19 nt, Artificial Sequence
  Description of Artificial Sequence: Synthetic oligonucleotide
  Sense strand starting at position 3404 of SEQ ID NO: 2948
ugauucuguuuauucuaca

SEQ ID NO: 229015 - RNA, 19 nt, Artificial Sequence
  Description of Artificial Sequence: Synthetic oligonucleotide
  Antisense strand to SEQ ID NO: 229014
uguagaauaaacagaauca

SEQ ID NO: 229016 - RNA, 19 nt, Artificial Sequence
  Description of Artificial Sequence: Synthetic oligonucleotide
  Sense strand starting at position 3409 of SEQ ID NO: 2948
cuguuuauucuacaguaga

SEQ ID NO: 229017 - RNA, 19 nt, Artificial Sequence
  Description of Artificial Sequence: Synthetic oligonucleotide
  Antisense strand to SEQ ID NO: 229016
ucuacuguagaauaaacag

SEQ ID NO: 229018 - RNA, 19 nt, Artificial Sequence
  Description of Artificial Sequence: Synthetic oligonucleotide
  Sense strand starting at position 3472 of SEQ ID NO: 2948
gucccuaaucuggagguca

SEQ ID NO: 229019 - RNA, 19 nt, Artificial Sequence
  Description of Artificial Sequence: Synthetic oligonucleotide
  Antisense strand to SEQ ID NO: 229018
ugaccuccagauuagggac

SEQ ID NO: 229020 - RNA, 19 nt, Artificial Sequence
  Description of Artificial Sequence: Synthetic oligonucleotide
  Sense strand starting at position 3474 of SEQ ID NO: 2948
cccuaaucuggaggucauu

SEQ ID NO: 229021 - RNA, 19 nt, Artificial Sequence
  Description of Artificial Sequence: Synthetic oligonucleotide
  Antisense strand to SEQ ID NO: 229020
aaugaccuccagauuaggg

SEQ ID NO: 229022 - RNA, 19 nt, Artificial Sequence
  Description of Artificial Sequence: Synthetic oligonucleotide
  Sense strand starting at position 3480 of SEQ ID NO: 2948
ucuggaggucauugcuagu

SEQ ID NO: 229023 - RNA, 19 nt, Artificial Sequence
  Description of Artificial Sequence: Synthetic oligonucleotide
  Antisense strand to SEQ ID NO: 229022
acuagcaaugaccuccaga

SEQ ID NO: 229024 - RNA, 19 nt, Artificial Sequence
  Description of Artificial Sequence: Synthetic oligonucleotide
  Sense strand starting at position 3486 of SEQ ID NO: 2948
ggucauugcuaguuacgaa

SEQ ID NO: 229025 - RNA, 19 nt, Artificial Sequence
  Description of Artificial Sequence: Synthetic oligonucleotide
  Antisense strand to SEQ ID NO: 229024
uucguaacuagcaaugacc

SEQ ID NO: 229026 - RNA, 19 nt, Artificial Sequence
  Description of Artificial Sequence: Synthetic oligonucleotide
  Sense strand starting at position 3487 of SEQ ID NO: 2948
gucauugcuaguuacgaaa

SEQ ID NO: 229027 - RNA, 19 nt, Artificial Sequence
  Description of Artificial Sequence: Synthetic oligonucleotide
  Antisense strand to SEQ ID NO: 229026
uuucguaacuagcaaugac

SEQ ID NO: 229028 - RNA, 19 nt, Artificial Sequence
  Description of Artificial Sequence: Synthetic oligonucleotide
  Sense strand starting at position 3498 of SEQ ID NO: 2948
uuacgaaagucucugaccu

SEQ ID NO: 229029 - RNA, 19 nt, Artificial Sequence
  Description of Artificial Sequence: Synthetic oligonucleotide
  Antisense strand to SEQ ID NO: 229028
aggucagagacuuucguaa

SEQ ID NO: 229030 - RNA, 19 nt, Artificial Sequence
  Description of Artificial Sequence: Synthetic oligonucleotide
  Sense strand starting at position 3499 of SEQ ID NO: 2948
uacgaaagucucugaccuu

SEQ ID NO: 229031 - RNA, 19 nt, Artificial Sequence
  Description of Artificial Sequence: Synthetic oligonucleotide
  Antisense strand to SEQ ID NO: 229030
aaggucagagacuuucgua

SEQ ID NO: 229032 - RNA, 19 nt, Artificial Sequence
  Description of Artificial Sequence: Synthetic oligonucleotide
  Sense strand starting at position 3557 of SEQ ID NO: 2948
guacauaucccuugccuuu

SEQ ID NO: 229033 - RNA, 19 nt, Artificial Sequence
  Description of Artificial Sequence: Synthetic oligonucleotide
  Antisense strand to SEQ ID NO: 229032
aaaggcaagggauauguac

SEQ ID NO: 229034 - RNA, 19 nt, Artificial Sequence
  Description of Artificial Sequence: Synthetic oligonucleotide
  Sense strand starting at position 3621 of SEQ ID NO: 2948
gguaguuauugguuugcua

SEQ ID NO: 229035 - RNA, 19 nt, Artificial Sequence
  Description of Artificial Sequence: Synthetic oligonucleotide
  Antisense strand to SEQ ID NO: 229034
uagcaaaccaauaacuacc

SEQ ID NO: 229036 - RNA, 19 nt, Artificial Sequence
  Description of Artificial Sequence: Synthetic oligonucleotide
  Sense strand starting at position 3629 of SEQ ID NO: 2948
uugguuugcuauuuguaca

SEQ ID NO: 229037 - RNA, 19 nt, Artificial Sequence
  Description of Artificial Sequence: Synthetic oligonucleotide
  Antisense strand to SEQ ID NO: 229036
uguacaaauagcaaaccaa

SEQ ID NO: 229038 - RNA, 19 nt, Artificial Sequence
  Description of Artificial Sequence: Synthetic oligonucleotide
  Sense strand starting at position 3645 of SEQ ID NO: 2948
acaggcauucuauguauga

SEQ ID NO: 229039 - RNA, 19 nt, Artificial Sequence
  Description of Artificial Sequence: Synthetic oligonucleotide
  Antisense strand to SEQ ID NO: 229038
ucauacauagaaugccugu

SEQ ID NO: 229040 - RNA, 19 nt, Artificial Sequence
  Description of Artificial Sequence: Synthetic oligonucleotide
  Sense strand starting at position 3646 of SEQ ID NO: 2948
caggcauucuauguaugaa

SEQ ID NO: 229041 - RNA, 19 nt, Artificial Sequence
  Description of Artificial Sequence: Synthetic oligonucleotide
  Antisense strand to SEQ ID NO: 229040
uucauacauagaaugccug

SEQ ID NO: 229042 - RNA, 19 nt, Artificial Sequence
  Description of Artificial Sequence: Synthetic oligonucleotide
  Sense strand starting at position 3649 of SEQ ID NO: 2948
gcauucuauguaugaauca

SEQ ID NO: 229043 - RNA, 19 nt, Artificial Sequence
  Description of Artificial Sequence: Synthetic oligonucleotide
  Antisense strand to SEQ ID NO: 229042
ugauucauacauagaaugc

SEQ ID NO: 229044 - RNA, 19 nt, Artificial Sequence
  Description of Artificial Sequence: Synthetic oligonucleotide
  Sense strand starting at position 3756 of SEQ ID NO: 2948
uugagaccuugaucuccau

SEQ ID NO: 229045 - RNA, 19 nt, Artificial Sequence
  Description of Artificial Sequence: Synthetic oligonucleotide
  Antisense strand to SEQ ID NO: 229044
auggagaucaaggucucaa

SEQ ID NO: 229046 - RNA, 19 nt, Artificial Sequence
  Description of Artificial Sequence: Synthetic oligonucleotide
  Sense strand starting at position 98 of SEQ ID NO: 2949
ugggcugcauuuccaaauu

SEQ ID NO: 229047 - RNA, 19 nt, Artificial Sequence
  Description of Artificial Sequence: Synthetic oligonucleotide
  Antisense strand to SEQ ID NO: 229046
aauuuggaaaugcagccca

SEQ ID NO: 229048 - RNA, 19 nt, Artificial Sequence
  Description of Artificial Sequence: Synthetic oligonucleotide
  Sense strand starting at position 125 of SEQ ID NO: 2949
cuacaaugggccugaauua

SEQ ID NO: 229049 - RNA, 19 nt, Artificial Sequence
  Description of Artificial Sequence: Synthetic oligonucleotide
  Antisense strand to SEQ ID NO: 229048
uaauucaggcccauuguag

SEQ ID NO: 229050 - RNA, 19 nt, Artificial Sequence
  Description of Artificial Sequence: Synthetic oligonucleotide
  Sense strand starting at position 481 of SEQ ID NO: 2949
uccugagguacucggugau

SEQ ID NO: 229051 - RNA, 19 nt, Artificial Sequence
  Description of Artificial Sequence: Synthetic oligonucleotide
  Antisense strand to SEQ ID NO: 229050
aucaccgaguaccucagga

SEQ ID NO: 229052 - RNA, 19 nt, Artificial Sequence
  Description of Artificial Sequence: Synthetic oligonucleotide
  Sense strand starting at position 485 of SEQ ID NO: 2949
gagguacucggugauguca

SEQ ID NO: 229053 - RNA, 19 nt, Artificial Sequence
  Description of Artificial Sequence: Synthetic oligonucleotide
  Antisense strand to SEQ ID NO: 229052
ugacaucaccgaguaccuc

SEQ ID NO: 229054 - RNA, 19 nt, Artificial Sequence
  Description of Artificial Sequence: Synthetic oligonucleotide
  Sense strand starting at position 604 of SEQ ID NO: 2949
ccaagaagucuugggcaua

SEQ ID NO: 229055 - RNA, 19 nt, Artificial Sequence
  Description of Artificial Sequence: Synthetic oligonucleotide
  Antisense strand to SEQ ID NO: 229054
uaugcccaagacuucuugg

SEQ ID NO: 229056 - RNA, 19 nt, Artificial Sequence
  Description of Artificial Sequence: Synthetic oligonucleotide
  Sense strand starting at position 728 of SEQ ID NO: 2949
ggcucuugcccauaucauu

SEQ ID NO: 229057 - RNA, 19 nt, Artificial Sequence
  Description of Artificial Sequence: Synthetic oligonucleotide
  Antisense strand to SEQ ID NO: 229056
aaugauaugggcaagagcc

SEQ ID NO: 229058 - RNA, 19 nt, Artificial Sequence
  Description of Artificial Sequence: Synthetic oligonucleotide
  Sense strand starting at position 856 of SEQ ID NO: 2949
aagaaaguguuuccaaagu

SEQ ID NO: 229059 - RNA, 19 nt, Artificial Sequence
  Description of Artificial Sequence: Synthetic oligonucleotide
  Antisense strand to SEQ ID NO: 229058
acuuuggaaacacuuucuu

SEQ ID NO: 229060 - RNA, 19 nt, Artificial Sequence
  Description of Artificial Sequence: Synthetic oligonucleotide
  Sense strand starting at position 918 of SEQ ID NO: 2949
acuggcuauccucaaguua

SEQ ID NO: 229061 - RNA, 19 nt, Artificial Sequence
  Description of Artificial Sequence: Synthetic oligonucleotide
  Antisense strand to SEQ ID NO: 229060
uaacuugaggauagccagu

SEQ ID NO: 229062 - RNA, 19 nt, Artificial Sequence
  Description of Artificial Sequence: Synthetic oligonucleotide
  Sense strand starting at position 1002 of SEQ ID NO: 2949
ccgaacaugucuuccauua

SEQ ID NO: 229063 - RNA, 19 nt, Artificial Sequence
  Description of Artificial Sequence: Synthetic oligonucleotide
  Antisense strand to SEQ ID NO: 229062
uaauggaagacauguucgg

SEQ ID NO: 229064 - RNA, 19 nt, Artificial Sequence
  Description of Artificial Sequence: Synthetic oligonucleotide
  Sense strand starting at position 1012 of SEQ ID NO: 2949
cuuccauuauuugaggaaa

SEQ ID NO: 229065 - RNA, 19 nt, Artificial Sequence
  Description of Artificial Sequence: Synthetic oligonucleotide
  Antisense strand to SEQ ID NO: 229064
uuuccucaaauaauggaag

SEQ ID NO: 229066 - RNA, 19 nt, Artificial Sequence
  Description of Artificial Sequence: Synthetic oligonucleotide
  Sense strand starting at position 1014 of SEQ ID NO: 2949
uccauuauuugaggaaaca

SEQ ID NO: 229067 - RNA, 19 nt, Artificial Sequence
  Description of Artificial Sequence: Synthetic oligonucleotide
  Antisense strand to SEQ ID NO: 229066
uguuuccucaaauaaugga

SEQ ID NO: 229068 - RNA, 19 nt, Artificial Sequence
  Description of Artificial Sequence: Synthetic oligonucleotide
  Sense strand starting at position 1049 of SEQ ID NO: 2949
augcuauuuauucggcaga

SEQ ID NO: 229069 - RNA, 19 nt, Artificial Sequence
  Description of Artificial Sequence: Synthetic oligonucleotide
  Antisense strand to SEQ ID NO: 229068
ucugccgaauaaauagcau

SEQ ID NO: 229070 - RNA, 19 nt, Artificial Sequence
  Description of Artificial Sequence: Synthetic oligonucleotide
  Sense strand starting at position 1051 of SEQ ID NO: 2949
gcuauuuauucggcagaua

SEQ ID NO: 229071 - RNA, 19 nt, Artificial Sequence
  Description of Artificial Sequence: Synthetic oligonucleotide
  Antisense strand to SEQ ID NO: 229070
uaucugccgaauaaauagc

SEQ ID NO: 229072 - RNA, 19 nt, Artificial Sequence
  Description of Artificial Sequence: Synthetic oligonucleotide
  Sense strand starting at position 1240 of SEQ ID NO: 2949
caguauccugaaugucagu

SEQ ID NO: 229073 - RNA, 19 nt, Artificial Sequence
  Description of Artificial Sequence: Synthetic oligonucleotide
  Antisense strand to SEQ ID NO: 229072
acugacauucaggauacug

SEQ ID NO: 229074 - RNA, 19 nt, Artificial Sequence
  Description of Artificial Sequence: Synthetic oligonucleotide
  Sense strand starting at position 1534 of SEQ ID NO: 2949
ucuucuugucugcaagaua

SEQ ID NO: 229075 - RNA, 19 nt, Artificial Sequence
  Description of Artificial Sequence: Synthetic oligonucleotide
  Antisense strand to SEQ ID NO: 229074
uaucuugcagacaagaaga

SEQ ID NO: 229076 - RNA, 19 nt, Artificial Sequence
  Description of Artificial Sequence: Synthetic oligonucleotide
  Sense strand starting at position 1537 of SEQ ID NO: 2949
ucuugucugcaagauacca

SEQ ID NO: 229077 - RNA, 19 nt, Artificial Sequence
  Description of Artificial Sequence: Synthetic oligonucleotide
  Antisense strand to SEQ ID NO: 229076
ugguaucuugcagacaaga

SEQ ID NO: 229078 - RNA, 19 nt, Artificial Sequence
  Description of Artificial Sequence: Synthetic oligonucleotide
  Sense strand starting at position 2216 of SEQ ID NO: 2949
aagccaugugggcaauaaa

SEQ ID NO: 229079 - RNA, 19 nt, Artificial Sequence
  Description of Artificial Sequence: Synthetic oligonucleotide
  Antisense strand to SEQ ID NO: 229078
uuuauugcccacauggcuu

SEQ ID NO: 229080 - RNA, 19 nt, Artificial Sequence
  Description of Artificial Sequence: Synthetic oligonucleotide
  Sense strand starting at position 2219 of SEQ ID NO: 2949
ccaugugggcaauaaaugu

SEQ ID NO: 229081 - RNA, 19 nt, Artificial Sequence
  Description of Artificial Sequence: Synthetic oligonucleotide
  Antisense strand to SEQ ID NO: 229080
acauuuauugcccacaugg

SEQ ID NO: 229082 - RNA, 19 nt, Artificial Sequence
  Description of Artificial Sequence: Synthetic oligonucleotide
  Sense strand starting at position 2256 of SEQ ID NO: 2949
gagagaaugugaccugagu

SEQ ID NO: 229083 - RNA, 19 nt, Artificial Sequence
  Description of Artificial Sequence: Synthetic oligonucleotide
  Antisense strand to SEQ ID NO: 229082
acucaggucacauucucuc

SEQ ID NO: 229084 - RNA, 19 nt, Artificial Sequence
  Description of Artificial Sequence: Synthetic oligonucleotide
  Sense strand starting at position 2267 of SEQ ID NO: 2949
accugaguccauggguaag

SEQ ID NO: 229085 - RNA, 19 nt, Artificial Sequence
  Description of Artificial Sequence: Synthetic oligonucleotide
  Antisense strand to SEQ ID NO: 229084
cuuacccauggacucaggu

SEQ ID NO: 229086 - RNA, 19 nt, Artificial Sequence
  Description of Artificial Sequence: Synthetic oligonucleotide
  Sense strand starting at position 3011 of SEQ ID NO: 2949
uguuucucuggagaacgua

SEQ ID NO: 229087 - RNA, 19 nt, Artificial Sequence
  Description of Artificial Sequence: Synthetic oligonucleotide
  Antisense strand to SEQ ID NO: 229086
uacguucuccagagaaaca

SEQ ID NO: 229088 - RNA, 19 nt, Artificial Sequence
  Description of Artificial Sequence: Synthetic oligonucleotide
  Sense strand starting at position 3162 of SEQ ID NO: 2949
cuugaagagccuugguaga

SEQ ID NO: 229089 - RNA, 19 nt, Artificial Sequence
  Description of Artificial Sequence: Synthetic oligonucleotide
  Antisense strand to SEQ ID NO: 229088
ucuaccaaggcucuucaag

SEQ ID NO: 229090 - RNA, 19 nt, Artificial Sequence
  Description of Artificial Sequence: Synthetic oligonucleotide
  Sense strand starting at position 3167 of SEQ ID NO: 2949
agagccuugguagaaguau

SEQ ID NO: 229091 - RNA, 19 nt, Artificial Sequence
  Description of Artificial Sequence: Synthetic oligonucleotide
  Antisense strand to SEQ ID NO: 229090
auacuucuaccaaggcucu

SEQ ID NO: 229092 - RNA, 19 nt, Artificial Sequence
  Description of Artificial Sequence: Synthetic oligonucleotide
  Sense strand starting at position 3175 of SEQ ID NO: 2949
gguagaaguaugggcauua

SEQ ID NO: 229093 - RNA, 19 nt, Artificial Sequence
  Description of Artificial Sequence: Synthetic oligonucleotide
  Antisense strand to SEQ ID NO: 229092
uaaugcccauacuucuacc

SEQ ID NO: 229094 - RNA, 19 nt, Artificial Sequence
  Description of Artificial Sequence: Synthetic oligonucleotide
  Sense strand starting at position 3176 of SEQ ID NO: 2949
guagaaguaugggcauuaa

SEQ ID NO: 229095 - RNA, 19 nt, Artificial Sequence
  Description of Artificial Sequence: Synthetic oligonucleotide
  Antisense strand to SEQ ID NO: 229094
uuaaugcccauacuucuac

SEQ ID NO: 229096 - RNA, 19 nt, Artificial Sequence
  Description of Artificial Sequence: Synthetic oligonucleotide
  Sense strand starting at position 3259 of SEQ ID NO: 2949
uagagagcuugccugaauu

SEQ ID NO: 229097 - RNA, 19 nt, Artificial Sequence
  Description of Artificial Sequence: Synthetic oligonucleotide
  Antisense strand to SEQ ID NO: 229096
aauucaggcaagcucucua

SEQ ID NO: 229098 - RNA, 19 nt, Artificial Sequence
  Description of Artificial Sequence: Synthetic oligonucleotide
  Sense strand starting at position 3261 of SEQ ID NO: 2949
gagagcuugccugaauugu

SEQ ID NO: 229099 - RNA, 19 nt, Artificial Sequence
  Description of Artificial Sequence: Synthetic oligonucleotide
  Antisense strand to SEQ ID NO: 229098
acaauucaggcaagcucuc

SEQ ID NO: 229100 - RNA, 19 nt, Artificial Sequence
  Description of Artificial Sequence: Synthetic oligonucleotide
  Sense strand starting at position 3278 of SEQ ID NO: 2949
guauucuguuggguggaaa

SEQ ID NO: 229101 - RNA, 19 nt, Artificial Sequence
  Description of Artificial Sequence: Synthetic oligonucleotide
  Antisense strand to SEQ ID NO: 229100
uuuccacccaacagaauac

SEQ ID NO: 229102 - RNA, 19 nt, Artificial Sequence
  Description of Artificial Sequence: Synthetic oligonucleotide
  Sense strand starting at position 3279 of SEQ ID NO: 2949
uauucuguuggguggaaag

SEQ ID NO: 229103 - RNA, 19 nt, Artificial Sequence
  Description of Artificial Sequence: Synthetic oligonucleotide
  Antisense strand to SEQ ID NO: 229102
cuuuccacccaacagaaua

SEQ ID NO: 229104 - RNA, 19 nt, Artificial Sequence
  Description of Artificial Sequence: Synthetic oligonucleotide
  Sense strand starting at position 3281 of SEQ ID NO: 2949
uucuguuggguggaaagua

SEQ ID NO: 229105 - RNA, 19 nt, Artificial Sequence
  Description of Artificial Sequence: Synthetic oligonucleotide
  Antisense strand to SEQ ID NO: 229104
uacuuuccacccaacagaa

SEQ ID NO: 229106 - RNA, 19 nt, Artificial Sequence
  Description of Artificial Sequence: Synthetic oligonucleotide
  Sense strand starting at position 3308 of SEQ ID NO: 2949
aagugauaagcuuggacau

SEQ ID NO: 229107 - RNA, 19 nt, Artificial Sequence
  Description of Artificial Sequence: Synthetic oligonucleotide
  Antisense strand to SEQ ID NO: 229106
auguccaagcuuaucacuu

SEQ ID NO: 229108 - RNA, 19 nt, Artificial Sequence
  Description of Artificial Sequence: Synthetic oligonucleotide
  Sense strand starting at position 3309 of SEQ ID NO: 2949
agugauaagcuuggacauu

SEQ ID NO: 229109 - RNA, 19 nt, Artificial Sequence
  Description of Artificial Sequence: Synthetic oligonucleotide
  Antisense strand to SEQ ID NO: 229108
aauguccaagcuuaucacu

SEQ ID NO: 229110 - RNA, 19 nt, Artificial Sequence
  Description of Artificial Sequence: Synthetic oligonucleotide
  Sense strand starting at position 3310 of SEQ ID NO: 2949
gugauaagcuuggacauuu

SEQ ID NO: 229111 - RNA, 19 nt, Artificial Sequence
  Description of Artificial Sequence: Synthetic oligonucleotide
  Antisense strand to SEQ ID NO: 229110
aaauguccaagcuuaucac

SEQ ID NO: 229112 - RNA, 19 nt, Artificial Sequence
  Description of Artificial Sequence: Synthetic oligonucleotide
  Sense strand starting at position 3332 of SEQ ID NO: 2949
ugaggaaauuucuacauga

SEQ ID NO: 229113 - RNA, 19 nt, Artificial Sequence
  Description of Artificial Sequence: Synthetic oligonucleotide
  Antisense strand to SEQ ID NO: 229112
ucauguagaaauuuccuca

SEQ ID NO: 229114 - RNA, 19 nt, Artificial Sequence
  Description of Artificial Sequence: Synthetic oligonucleotide
  Sense strand starting at position 3756 of SEQ ID NO: 2949
acuugaagauuuggaucau

SEQ ID NO: 229115 - RNA, 19 nt, Artificial Sequence
  Description of Artificial Sequence: Synthetic oligonucleotide
  Antisense strand to SEQ ID NO: 229114
augauccaaaucuucaagu

SEQ ID NO: 229116 - RNA, 19 nt, Artificial Sequence
  Description of Artificial Sequence: Synthetic oligonucleotide
  Sense strand starting at position 3757 of SEQ ID NO: 2949
cuugaagauuuggaucauu

SEQ ID NO: 229117 - RNA, 19 nt, Artificial Sequence
  Description of Artificial Sequence: Synthetic oligonucleotide
  Antisense strand to SEQ ID NO: 229116
aaugauccaaaucuucaag

SEQ ID NO: 229118 - RNA, 19 nt, Artificial Sequence
  Description of Artificial Sequence: Synthetic oligonucleotide
  Sense strand starting at position 3834 of SEQ ID NO: 2949
gagaaaguaugcucuggag

SEQ ID NO: 229119 - RNA, 19 nt, Artificial Sequence
  Description of Artificial Sequence: Synthetic oligonucleotide
  Antisense strand to SEQ ID NO: 229118
cuccagagcauacuuucuc

SEQ ID NO: 229120 - RNA, 19 nt, Artificial Sequence
  Description of Artificial Sequence: Synthetic oligonucleotide
  Sense strand starting at position 3836 of SEQ ID NO: 2949
gaaaguaugcucuggagaa

SEQ ID NO: 229121 - RNA, 19 nt, Artificial Sequence
  Description of Artificial Sequence: Synthetic oligonucleotide
  Antisense strand to SEQ ID NO: 229120
uucuccagagcauacuuuc

SEQ ID NO: 229122 - RNA, 19 nt, Artificial Sequence
  Description of Artificial Sequence: Synthetic oligonucleotide
  Sense strand starting at position 3894 of SEQ ID NO: 2949
agguguguggcuuauagac

SEQ ID NO: 229123 - RNA, 19 nt, Artificial Sequence
  Description of Artificial Sequence: Synthetic oligonucleotide
  Antisense strand to SEQ ID NO: 229122
gucuauaagccacacaccu

SEQ ID NO: 229124 - RNA, 19 nt, Artificial Sequence
  Description of Artificial Sequence: Synthetic oligonucleotide
  Sense strand starting at position 3956 of SEQ ID NO: 2949
guacauagaugggaugaaa

SEQ ID NO: 229125 - RNA, 19 nt, Artificial Sequence
  Description of Artificial Sequence: Synthetic oligonucleotide
  Antisense strand to SEQ ID NO: 229124
uuucaucccaucuauguac

SEQ ID NO: 229126 - RNA, 19 nt, Artificial Sequence
  Description of Artificial Sequence: Synthetic oligonucleotide
  Sense strand starting at position 91 of SEQ ID NO: 2951
uccuuuacaguguaauaua

SEQ ID NO: 229127 - RNA, 19 nt, Artificial Sequence
  Description of Artificial Sequence: Synthetic oligonucleotide
  Antisense strand to SEQ ID NO: 229126
uauauuacacuguaaagga

SEQ ID NO: 229128 - RNA, 19 nt, Artificial Sequence
  Description of Artificial Sequence: Synthetic oligonucleotide
  Sense strand starting at position 213 of SEQ ID NO: 2951
aacuguaaaguguggauaa

SEQ ID NO: 229129 - RNA, 19 nt, Artificial Sequence
  Description of Artificial Sequence: Synthetic oligonucleotide
  Antisense strand to SEQ ID NO: 229128
uuauccacacuuuacaguu

SEQ ID NO: 229130 - RNA, 19 nt, Artificial Sequence
  Description of Artificial Sequence: Synthetic oligonucleotide
  Sense strand starting at position 489 of SEQ ID NO: 2951
gguagaaagcucuggaauu

SEQ ID NO: 229131 - RNA, 19 nt, Artificial Sequence
  Description of Artificial Sequence: Synthetic oligonucleotide
  Antisense strand to SEQ ID NO: 229130
aauuccagagcuuucuacc

SEQ ID NO: 229132 - RNA, 19 nt, Artificial Sequence
  Description of Artificial Sequence: Synthetic oligonucleotide
  Sense strand starting at position 509 of SEQ ID NO: 2951
uggagugggugcaaugaaa

SEQ ID NO: 229133 - RNA, 19 nt, Artificial Sequence
  Description of Artificial Sequence: Synthetic oligonucleotide
  Antisense strand to SEQ ID NO: 229132
uuucauugcacccacucca

SEQ ID NO: 229134 - RNA, 19 nt, Artificial Sequence
  Description of Artificial Sequence: Synthetic oligonucleotide
  Sense strand starting at position 571 of SEQ ID NO: 2951
cguaaagagaaauguuauu

SEQ ID NO: 229135 - RNA, 19 nt, Artificial Sequence
  Description of Artificial Sequence: Synthetic oligonucleotide
  Antisense strand to SEQ ID NO: 229134
aauaacauuucucuuuacg

SEQ ID NO: 229136 - RNA, 19 nt, Artificial Sequence
  Description of Artificial Sequence: Synthetic oligonucleotide
  Sense strand starting at position 591 of SEQ ID NO: 2951
uuauuauuguucuccagag

SEQ ID NO: 229137 - RNA, 19 nt, Artificial Sequence
  Description of Artificial Sequence: Synthetic oligonucleotide
  Antisense strand to SEQ ID NO: 229136
cucuggagaacaauaauaa

SEQ ID NO: 229138 - RNA, 19 nt, Artificial Sequence
  Description of Artificial Sequence: Synthetic oligonucleotide
  Sense strand starting at position 593 of SEQ ID NO: 2951
auuauuguucuccagagau

SEQ ID NO: 229139 - RNA, 19 nt, Artificial Sequence
  Description of Artificial Sequence: Synthetic oligonucleotide
  Antisense strand to SEQ ID NO: 229138
aucucuggagaacaauaau

SEQ ID NO: 229140 - RNA, 19 nt, Artificial Sequence
  Description of Artificial Sequence: Synthetic oligonucleotide
  Sense strand starting at position 826 of SEQ ID NO: 2951
aucauuauaccauguguua

SEQ ID NO: 229141 - RNA, 19 nt, Artificial Sequence
  Description of Artificial Sequence: Synthetic oligonucleotide
  Antisense strand to SEQ ID NO: 229140
uaacacaugguauaaugau

SEQ ID NO: 229142 - RNA, 19 nt, Artificial Sequence
  Description of Artificial Sequence: Synthetic oligonucleotide
  Sense strand starting at position 946 of SEQ ID NO: 2951
gagaauaaggcccgggaau

SEQ ID NO: 229143 - RNA, 19 nt, Artificial Sequence
  Description of Artificial Sequence: Synthetic oligonucleotide
  Antisense strand to SEQ ID NO: 229142
auucccgggccuuauucuc

SEQ ID NO: 229144 - RNA, 19 nt, Artificial Sequence
  Description of Artificial Sequence: Synthetic oligonucleotide
  Sense strand starting at position 947 of SEQ ID NO: 2951
agaauaaggcccgggaaua

SEQ ID NO: 229145 - RNA, 19 nt, Artificial Sequence
  Description of Artificial Sequence: Synthetic oligonucleotide
  Antisense strand to SEQ ID NO: 229144
uauucccgggccuuauucu

SEQ ID NO: 229146 - RNA, 19 nt, Artificial Sequence
  Description of Artificial Sequence: Synthetic oligonucleotide
  Sense strand starting at position 948 of SEQ ID NO: 2951
gaauaaggcccgggaauau

SEQ ID NO: 229147 - RNA, 19 nt, Artificial Sequence
  Description of Artificial Sequence: Synthetic oligonucleotide
  Antisense strand to SEQ ID NO: 229146
auauucccgggccuuauuc

SEQ ID NO: 229148 - RNA, 19 nt, Artificial Sequence
  Description of Artificial Sequence: Synthetic oligonucleotide
  Sense strand starting at position 1120 of SEQ ID NO: 2951
ugggccaucuucguuauuu

SEQ ID NO: 229149 - RNA, 19 nt, Artificial Sequence
  Description of Artificial Sequence: Synthetic oligonucleotide
  Antisense strand to SEQ ID NO: 229148
aaauaacgaagauggccca

SEQ ID NO: 229150 - RNA, 19 nt, Artificial Sequence
  Description of Artificial Sequence: Synthetic oligonucleotide
  Sense strand starting at position 1121 of SEQ ID NO: 2951
gggccaucuucguuauuug

SEQ ID NO: 229151 - RNA, 19 nt, Artificial Sequence
  Description of Artificial Sequence: Synthetic oligonucleotide
  Antisense strand to SEQ ID NO: 229150
caaauaacgaagauggccc

SEQ ID NO: 229152 - RNA, 19 nt, Artificial Sequence
  Description of Artificial Sequence: Synthetic oligonucleotide
  Sense strand starting at position 1994 of SEQ ID NO: 2951
guguccauaccugauucua

SEQ ID NO: 229153 - RNA, 19 nt, Artificial Sequence
  Description of Artificial Sequence: Synthetic oligonucleotide
  Antisense strand to SEQ ID NO: 229152
uagaaucagguauggacac

SEQ ID NO: 229154 - RNA, 19 nt, Artificial Sequence
  Description of Artificial Sequence: Synthetic oligonucleotide
  Sense strand starting at position 1996 of SEQ ID NO: 2951
guccauaccugauucuaag

SEQ ID NO: 229155 - RNA, 19 nt, Artificial Sequence
  Description of Artificial Sequence: Synthetic oligonucleotide
  Antisense strand to SEQ ID NO: 229154
cuuagaaucagguauggac

SEQ ID NO: 229156 - RNA, 19 nt, Artificial Sequence
  Description of Artificial Sequence: Synthetic oligonucleotide
  Sense strand starting at position 2003 of SEQ ID NO: 2951
ccugauucuaagcgaggga

SEQ ID NO: 229157 - RNA, 19 nt, Artificial Sequence
  Description of Artificial Sequence: Synthetic oligonucleotide
  Antisense strand to SEQ ID NO: 229156
ucccucgcuuagaaucagg

SEQ ID NO: 229158 - RNA, 19 nt, Artificial Sequence
  Description of Artificial Sequence: Synthetic oligonucleotide
  Sense strand starting at position 2072 of SEQ ID NO: 2951
gaagucuugaguugggaga

SEQ ID NO: 229159 - RNA, 19 nt, Artificial Sequence
  Description of Artificial Sequence: Synthetic oligonucleotide
  Antisense strand to SEQ ID NO: 229158
ucucccaacucaagacuuc

SEQ ID NO: 229160 - RNA, 19 nt, Artificial Sequence
  Description of Artificial Sequence: Synthetic oligonucleotide
  Sense strand starting at position 2101 of SEQ ID NO: 2951
ccugguaguggaugaacaa

SEQ ID NO: 229161 - RNA, 19 nt, Artificial Sequence
  Description of Artificial Sequence: Synthetic oligonucleotide
  Antisense strand to SEQ ID NO: 229160
uuguucauccacuaccagg

SEQ ID NO: 229162 - RNA, 19 nt, Artificial Sequence
  Description of Artificial Sequence: Synthetic oligonucleotide
  Sense strand starting at position 2310 of SEQ ID NO: 2951
gccaaugggagguauuagu

SEQ ID NO: 229163 - RNA, 19 nt, Artificial Sequence
  Description of Artificial Sequence: Synthetic oligonucleotide
  Antisense strand to SEQ ID NO: 229162
acuaauaccucccauuggc

SEQ ID NO: 229164 - RNA, 19 nt, Artificial Sequence
  Description of Artificial Sequence: Synthetic oligonucleotide
  Sense strand starting at position 2320 of SEQ ID NO: 2951
gguauuaguguuuaaguaa

SEQ ID NO: 229165 - RNA, 19 nt, Artificial Sequence
  Description of Artificial Sequence: Synthetic oligonucleotide
  Antisense strand to SEQ ID NO: 229164
uuacuuaaacacuaauacc

SEQ ID NO: 229166 - RNA, 19 nt, Artificial Sequence
  Description of Artificial Sequence: Synthetic oligonucleotide
  Sense strand starting at position 2594 of SEQ ID NO: 2951
gaggauauguaccuuggua

SEQ ID NO: 229167 - RNA, 19 nt, Artificial Sequence
  Description of Artificial Sequence: Synthetic oligonucleotide
  Antisense strand to SEQ ID NO: 229166
uaccaagguacauauccuc

SEQ ID NO: 229168 - RNA, 19 nt, Artificial Sequence
  Description of Artificial Sequence: Synthetic oligonucleotide
  Sense strand starting at position 2596 of SEQ ID NO: 2951
ggauauguaccuugguaga

SEQ ID NO: 229169 - RNA, 19 nt, Artificial Sequence
  Description of Artificial Sequence: Synthetic oligonucleotide
  Antisense strand to SEQ ID NO: 229168
ucuaccaagguacauaucc

SEQ ID NO: 229170 - RNA, 19 nt, Artificial Sequence
  Description of Artificial Sequence: Synthetic oligonucleotide
  Sense strand starting at position 2598 of SEQ ID NO: 2951
auauguaccuugguagaug

SEQ ID NO: 229171 - RNA, 19 nt, Artificial Sequence
  Description of Artificial Sequence: Synthetic oligonucleotide
  Antisense strand to SEQ ID NO: 229170
caucuaccaagguacauau

SEQ ID NO: 229172 - RNA, 19 nt, Artificial Sequence
  Description of Artificial Sequence: Synthetic oligonucleotide
  Sense strand starting at position 2606 of SEQ ID NO: 2951
cuugguagaugguugugaa

SEQ ID NO: 229173 - RNA, 19 nt, Artificial Sequence
  Description of Artificial Sequence: Synthetic oligonucleotide
  Antisense strand to SEQ ID NO: 229172
uucacaaccaucuaccaag

SEQ ID NO: 229174 - RNA, 19 nt, Artificial Sequence
  Description of Artificial Sequence: Synthetic oligonucleotide
  Sense strand starting at position 2607 of SEQ ID NO: 2951
uugguagaugguugugaag

SEQ ID NO: 229175 - RNA, 19 nt, Artificial Sequence
  Description of Artificial Sequence: Synthetic oligonucleotide
  Antisense strand to SEQ ID NO: 229174
cuucacaaccaucuaccaa

SEQ ID NO: 229176 - RNA, 19 nt, Artificial Sequence
  Description of Artificial Sequence: Synthetic oligonucleotide
  Sense strand starting at position 2643 of SEQ ID NO: 2951
uguauaaagcucugacaug

SEQ ID NO: 229177 - RNA, 19 nt, Artificial Sequence
  Description of Artificial Sequence: Synthetic oligonucleotide
  Antisense strand to SEQ ID NO: 229176
caugucagagcuuuauaca

SEQ ID NO: 229178 - RNA, 19 nt, Artificial Sequence
  Description of Artificial Sequence: Synthetic oligonucleotide
  Sense strand starting at position 2650 of SEQ ID NO: 2951
agcucugacauguggaaga

SEQ ID NO: 229179 - RNA, 19 nt, Artificial Sequence
  Description of Artificial Sequence: Synthetic oligonucleotide
  Antisense strand to SEQ ID NO: 229178
ucuuccacaugucagagcu

SEQ ID NO: 229180 - RNA, 19 nt, Artificial Sequence
  Description of Artificial Sequence: Synthetic oligonucleotide
  Sense strand starting at position 2660 of SEQ ID NO: 2951
uguggaagaugcuuaauaa

SEQ ID NO: 229181 - RNA, 19 nt, Artificial Sequence
  Description of Artificial Sequence: Synthetic oligonucleotide
  Antisense strand to SEQ ID NO: 229180
uuauuaagcaucuuccaca

SEQ ID NO: 229182 - RNA, 19 nt, Artificial Sequence
  Description of Artificial Sequence: Synthetic oligonucleotide
  Sense strand starting at position 2808 of SEQ ID NO: 2951
cugugagcccuugaugaua

SEQ ID NO: 229183 - RNA, 19 nt, Artificial Sequence
  Description of Artificial Sequence: Synthetic oligonucleotide
  Antisense strand to SEQ ID NO: 229182
uaucaucaagggcucacag

SEQ ID NO: 229184 - RNA, 19 nt, Artificial Sequence
  Description of Artificial Sequence: Synthetic oligonucleotide
  Sense strand starting at position 2894 of SEQ ID NO: 2951
auacaucccuaguuugaua

SEQ ID NO: 229185 - RNA, 19 nt, Artificial Sequence
  Description of Artificial Sequence: Synthetic oligonucleotide
  Antisense strand to SEQ ID NO: 229184
uaucaaacuagggauguau

SEQ ID NO: 229186 - RNA, 19 nt, Artificial Sequence
  Description of Artificial Sequence: Synthetic oligonucleotide
  Sense strand starting at position 2964 of SEQ ID NO: 2951
aaaugucuuguuugauuga

SEQ ID NO: 229187 - RNA, 19 nt, Artificial Sequence
  Description of Artificial Sequence: Synthetic oligonucleotide
  Antisense strand to SEQ ID NO: 229186
ucaaucaaacaagacauuu

SEQ ID NO: 229188 - RNA, 19 nt, Artificial Sequence
  Description of Artificial Sequence: Synthetic oligonucleotide
  Sense strand starting at position 2967 of SEQ ID NO: 2951
ugucuuguuugauugagga

SEQ ID NO: 229189 - RNA, 19 nt, Artificial Sequence
  Description of Artificial Sequence: Synthetic oligonucleotide
  Antisense strand to SEQ ID NO: 229188
uccucaaucaaacaagaca

SEQ ID NO: 229190 - RNA, 19 nt, Artificial Sequence
  Description of Artificial Sequence: Synthetic oligonucleotide
  Sense strand starting at position 3007 of SEQ ID NO: 2951
aggguaugucuugaucaac

SEQ ID NO: 229191 - RNA, 19 nt, Artificial Sequence
  Description of Artificial Sequence: Synthetic oligonucleotide
  Antisense strand to SEQ ID NO: 229190
guugaucaagacauacccu

SEQ ID NO: 229192 - RNA, 19 nt, Artificial Sequence
  Description of Artificial Sequence: Synthetic oligonucleotide
  Sense strand starting at position 3010 of SEQ ID NO: 2951
guaugucuugaucaacaca

SEQ ID NO: 229193 - RNA, 19 nt, Artificial Sequence
  Description of Artificial Sequence: Synthetic oligonucleotide
  Antisense strand to SEQ ID NO: 229192
uguguugaucaagacauac

SEQ ID NO: 229194 - RNA, 19 nt, Artificial Sequence
  Description of Artificial Sequence: Synthetic oligonucleotide
  Sense strand starting at position 3046 of SEQ ID NO: 2951
uguugaauuugcuuaguac

SEQ ID NO: 229195 - RNA, 19 nt, Artificial Sequence
  Description of Artificial Sequence: Synthetic oligonucleotide
  Antisense strand to SEQ ID NO: 229194
guacuaagcaaauucaaca

SEQ ID NO: 229196 - RNA, 19 nt, Artificial Sequence
  Description of Artificial Sequence: Synthetic oligonucleotide
  Sense strand starting at position 3074 of SEQ ID NO: 2951
gauaauggcugacugguua

SEQ ID NO: 229197 - RNA, 19 nt, Artificial Sequence
  Description of Artificial Sequence: Synthetic oligonucleotide
  Antisense strand to SEQ ID NO: 229196
uaaccagucagccauuauc

SEQ ID NO: 229198 - RNA, 19 nt, Artificial Sequence
  Description of Artificial Sequence: Synthetic oligonucleotide
  Sense strand starting at position 3088 of SEQ ID NO: 2951
gguuauucccauugaucca

SEQ ID NO: 229199 - RNA, 19 nt, Artificial Sequence
  Description of Artificial Sequence: Synthetic oligonucleotide
  Antisense strand to SEQ ID NO: 229198
uggaucaaugggaauaacc

SEQ ID NO: 229200 - RNA, 19 nt, Artificial Sequence
  Description of Artificial Sequence: Synthetic oligonucleotide
  Sense strand starting at position 3218 of SEQ ID NO: 2951
cuuacugcuccugaaggga

SEQ ID NO: 229201 - RNA, 19 nt, Artificial Sequence
  Description of Artificial Sequence: Synthetic oligonucleotide
  Antisense strand to SEQ ID NO: 229200
ucccuucaggagcaguaag

SEQ ID NO: 229202 - RNA, 19 nt, Artificial Sequence
  Description of Artificial Sequence: Synthetic oligonucleotide
  Sense strand starting at position 3840 of SEQ ID NO: 2951
guauguucuccacaucgag

SEQ ID NO: 229203 - RNA, 19 nt, Artificial Sequence
  Description of Artificial Sequence: Synthetic oligonucleotide
  Antisense strand to SEQ ID NO: 229202
cucgauguggagaacauac

SEQ ID NO: 229204 - RNA, 19 nt, Artificial Sequence
  Description of Artificial Sequence: Synthetic oligonucleotide
  Sense strand starting at position 3903 of SEQ ID NO: 2951
ucaagugccaaguggaaau

SEQ ID NO: 229205 - RNA, 19 nt, Artificial Sequence
  Description of Artificial Sequence: Synthetic oligonucleotide
  Antisense strand to SEQ ID NO: 229204
auuuccacuuggcacuuga

SEQ ID NO: 229206 - RNA, 19 nt, Artificial Sequence
  Description of Artificial Sequence: Synthetic oligonucleotide
  Sense strand starting at position 71 of SEQ ID NO: 2950
ucagguuuccaagauucua

SEQ ID NO: 229207 - RNA, 19 nt, Artificial Sequence
  Description of Artificial Sequence: Synthetic oligonucleotide
  Antisense strand to SEQ ID NO: 229206
uagaaucuuggaaaccuga

SEQ ID NO: 229208 - RNA, 19 nt, Artificial Sequence
  Description of Artificial Sequence: Synthetic oligonucleotide
  Sense strand starting at position 89 of SEQ ID NO: 2950
auuugugucucuuccucua

SEQ ID NO: 229209 - RNA, 19 nt, Artificial Sequence
  Description of Artificial Sequence: Synthetic oligonucleotide
  Antisense strand to SEQ ID NO: 229208
uagaggaagagacacaaau

SEQ ID NO: 229210 - RNA, 19 nt, Artificial Sequence
  Description of Artificial Sequence: Synthetic oligonucleotide
  Sense strand starting at position 261 of SEQ ID NO: 2950
agagacaugucucucuuau

SEQ ID NO: 229211 - RNA, 19 nt, Artificial Sequence
  Description of Artificial Sequence: Synthetic oligonucleotide
  Antisense strand to SEQ ID NO: 229210
auaagagagacaugucucu

SEQ ID NO: 229212 - RNA, 19 nt, Artificial Sequence
  Description of Artificial Sequence: Synthetic oligonucleotide
  Sense strand starting at position 335 of SEQ ID NO: 2950
uaaagcaguccuugaagag

SEQ ID NO: 229213 - RNA, 19 nt, Artificial Sequence
  Description of Artificial Sequence: Synthetic oligonucleotide
  Antisense strand to SEQ ID NO: 229212
cucuucaaggacugcuuua

SEQ ID NO: 229214 - RNA, 19 nt, Artificial Sequence
  Description of Artificial Sequence: Synthetic oligonucleotide
  Sense strand starting at position 431 of SEQ ID NO: 2950
cucuaaccuggugaaagua

SEQ ID NO: 229215 - RNA, 19 nt, Artificial Sequence
  Description of Artificial Sequence: Synthetic oligonucleotide
  Antisense strand to SEQ ID NO: 229214
uacuuucaccagguuagag

SEQ ID NO: 229216 - RNA, 19 nt, Artificial Sequence
  Description of Artificial Sequence: Synthetic oligonucleotide
  Sense strand starting at position 455 of SEQ ID NO: 2950
agagaugaguagccaggua

SEQ ID NO: 229217 - RNA, 19 nt, Artificial Sequence
  Description of Artificial Sequence: Synthetic oligonucleotide
  Antisense strand to SEQ ID NO: 229216
uaccuggcuacucaucucu

SEQ ID NO: 229218 - RNA, 19 nt, Artificial Sequence
  Description of Artificial Sequence: Synthetic oligonucleotide
  Sense strand starting at position 460 of SEQ ID NO: 2950
ugaguagccagguaagcau

SEQ ID NO: 229219 - RNA, 19 nt, Artificial Sequence
  Description of Artificial Sequence: Synthetic oligonucleotide
  Antisense strand to SEQ ID NO: 229218
augcuuaccuggcuacuca

SEQ ID NO: 229220 - RNA, 19 nt, Artificial Sequence
  Description of Artificial Sequence: Synthetic oligonucleotide
  Sense strand starting at position 606 of SEQ ID NO: 2950
gcaauuggauuauccauca

SEQ ID NO: 229221 - RNA, 19 nt, Artificial Sequence
  Description of Artificial Sequence: Synthetic oligonucleotide
  Antisense strand to SEQ ID NO: 229220
ugauggauaauccaauugc

SEQ ID NO: 229222 - RNA, 19 nt, Artificial Sequence
  Description of Artificial Sequence: Synthetic oligonucleotide
  Sense strand starting at position 669 of SEQ ID NO: 2950
uucucuucuggcuaaagua

SEQ ID NO: 229223 - RNA, 19 nt, Artificial Sequence
  Description of Artificial Sequence: Synthetic oligonucleotide
  Antisense strand to SEQ ID NO: 229222
uacuuuagccagaagagaa

SEQ ID NO: 229224 - RNA, 19 nt, Artificial Sequence
  Description of Artificial Sequence: Synthetic oligonucleotide
  Sense strand starting at position 676 of SEQ ID NO: 2950
cuggcuaaaguauacaaua

SEQ ID NO: 229225 - RNA, 19 nt, Artificial Sequence
  Description of Artificial Sequence: Synthetic oligonucleotide
  Antisense strand to SEQ ID NO: 229224
uauuguauacuuuagccag

SEQ ID NO: 229226 - RNA, 19 nt, Artificial Sequence
  Description of Artificial Sequence: Synthetic oligonucleotide
  Sense strand starting at position 835 of SEQ ID NO: 2950
auguucugccuccaugaga

SEQ ID NO: 229227 - RNA, 19 nt, Artificial Sequence
  Description of Artificial Sequence: Synthetic oligonucleotide
  Antisense strand to SEQ ID NO: 229226
ucucauggaggcagaacau

SEQ ID NO: 229228 - RNA, 19 nt, Artificial Sequence
  Description of Artificial Sequence: Synthetic oligonucleotide
  Sense strand starting at position 864 of SEQ ID NO: 2950
uaguucucacaguagugau

SEQ ID NO: 229229 - RNA, 19 nt, Artificial Sequence
  Description of Artificial Sequence: Synthetic oligonucleotide
  Antisense strand to SEQ ID NO: 229228
aucacuacugugagaacua

SEQ ID NO: 229230 - RNA, 19 nt, Artificial Sequence
  Description of Artificial Sequence: Synthetic oligonucleotide
  Sense strand starting at position 1414 of SEQ ID NO: 2950
gguagaucugugagucggu

SEQ ID NO: 229231 - RNA, 19 nt, Artificial Sequence
  Description of Artificial Sequence: Synthetic oligonucleotide
  Antisense strand to SEQ ID NO: 229230
accgacucacagaucuacc

SEQ ID NO: 229232 - RNA, 19 nt, Artificial Sequence
  Description of Artificial Sequence: Synthetic oligonucleotide
  Sense strand starting at position 1645 of SEQ ID NO: 2950
cugggaagucucugagaug

SEQ ID NO: 229233 - RNA, 19 nt, Artificial Sequence
  Description of Artificial Sequence: Synthetic oligonucleotide
  Antisense strand to SEQ ID NO: 229232
caucucagagacuucccag

SEQ ID NO: 229234 - RNA, 19 nt, Artificial Sequence
  Description of Artificial Sequence: Synthetic oligonucleotide
  Sense strand starting at position 1657 of SEQ ID NO: 2950
ugagaugccuucuuugaug

SEQ ID NO: 229235 - RNA, 19 nt, Artificial Sequence
  Description of Artificial Sequence: Synthetic oligonucleotide
  Antisense strand to SEQ ID NO: 229234
caucaaagaaggcaucuca

SEQ ID NO: 229236 - RNA, 19 nt, Artificial Sequence
  Description of Artificial Sequence: Synthetic oligonucleotide
  Sense strand starting at position 1664 of SEQ ID NO: 2950
ccuucuuugaugggaaggu

SEQ ID NO: 229237 - RNA, 19 nt, Artificial Sequence
  Description of Artificial Sequence: Synthetic oligonucleotide
  Antisense strand to SEQ ID NO: 229236
accuucccaucaaagaagg

SEQ ID NO: 229238 - RNA, 19 nt, Artificial Sequence
  Description of Artificial Sequence: Synthetic oligonucleotide
  Sense strand starting at position 1872 of SEQ ID NO: 2950
aaguucuuccaagaguaug

SEQ ID NO: 229239 - RNA, 19 nt, Artificial Sequence
  Description of Artificial Sequence: Synthetic oligonucleotide
  Antisense strand to SEQ ID NO: 229238
cauacucuuggaagaacuu

SEQ ID NO: 229240 - RNA, 19 nt, Artificial Sequence
  Description of Artificial Sequence: Synthetic oligonucleotide
  Sense strand starting at position 2087 of SEQ ID NO: 2950
aacaguuagcagcaugaga

SEQ ID NO: 229241 - RNA, 19 nt, Artificial Sequence
  Description of Artificial Sequence: Synthetic oligonucleotide
  Antisense strand to SEQ ID NO: 229240
ucucaugcugcuaacuguu

SEQ ID NO: 229242 - RNA, 19 nt, Artificial Sequence
  Description of Artificial Sequence: Synthetic oligonucleotide
  Sense strand starting at position 2089 of SEQ ID NO: 2950
caguuagcagcaugagaga

SEQ ID NO: 229243 - RNA, 19 nt, Artificial Sequence
  Description of Artificial Sequence: Synthetic oligonucleotide
  Antisense strand to SEQ ID NO: 229242
ucucucaugcugcuaacug

SEQ ID NO: 229244 - RNA, 19 nt, Artificial Sequence
  Description of Artificial Sequence: Synthetic oligonucleotide
  Sense strand starting at position 2106 of SEQ ID NO: 2950
gaaguuuccugaucccuag

SEQ ID NO: 229245 - RNA, 19 nt, Artificial Sequence
  Description of Artificial Sequence: Synthetic oligonucleotide
  Antisense strand to SEQ ID NO: 229244
cuagggaucaggaaacuuc

SEQ ID NO: 229246 - RNA, 19 nt, Artificial Sequence
  Description of Artificial Sequence: Synthetic oligonucleotide
  Sense strand starting at position 2534 of SEQ ID NO: 2950
aguagugagaaggguagaa

SEQ ID NO: 229247 - RNA, 19 nt, Artificial Sequence
  Description of Artificial Sequence: Synthetic oligonucleotide
  Antisense strand to SEQ ID NO: 229246
uucuacccuucucacuacu

SEQ ID NO: 229248 - RNA, 19 nt, Artificial Sequence
  Description of Artificial Sequence: Synthetic oligonucleotide
  Sense strand starting at position 2566 of SEQ ID NO: 2950
gaguuaauucuguagcuau

SEQ ID NO: 229249 - RNA, 19 nt, Artificial Sequence
  Description of Artificial Sequence: Synthetic oligonucleotide
  Antisense strand to SEQ ID NO: 229248
auagcuacagaauuaacuc

SEQ ID NO: 229250 - RNA, 19 nt, Artificial Sequence
  Description of Artificial Sequence: Synthetic oligonucleotide
  Sense strand starting at position 2569 of SEQ ID NO: 2950
uuaauucuguagcuaugaa

SEQ ID NO: 229251 - RNA, 19 nt, Artificial Sequence
  Description of Artificial Sequence: Synthetic oligonucleotide
  Antisense strand to SEQ ID NO: 229250
uucauagcuacagaauuaa

SEQ ID NO: 229252 - RNA, 19 nt, Artificial Sequence
  Description of Artificial Sequence: Synthetic oligonucleotide
  Sense strand starting at position 2576 of SEQ ID NO: 2950
uguagcuaugaacaaucaa

SEQ ID NO: 229253 - RNA, 19 nt, Artificial Sequence
  Description of Artificial Sequence: Synthetic oligonucleotide
  Antisense strand to SEQ ID NO: 229252
uugauuguucauagcuaca

SEQ ID NO: 229254 - RNA, 19 nt, Artificial Sequence
  Description of Artificial Sequence: Synthetic oligonucleotide
  Sense strand starting at position 2596 of SEQ ID NO: 2950
uuggauaacuaucuuugca

SEQ ID NO: 229255 - RNA, 19 nt, Artificial Sequence
  Description of Artificial Sequence: Synthetic oligonucleotide
  Antisense strand to SEQ ID NO: 229254
ugcaaagauaguuauccaa

SEQ ID NO: 229256 - RNA, 19 nt, Artificial Sequence
  Description of Artificial Sequence: Synthetic oligonucleotide
  Sense strand starting at position 2955 of SEQ ID NO: 2950
cugagaguuacaggcauga

SEQ ID NO: 229257 - RNA, 19 nt, Artificial Sequence
  Description of Artificial Sequence: Synthetic oligonucleotide
  Antisense strand to SEQ ID NO: 229256
ucaugccuguaacucucag

SEQ ID NO: 229258 - RNA, 19 nt, Artificial Sequence
  Description of Artificial Sequence: Synthetic oligonucleotide
  Sense strand starting at position 3133 of SEQ ID NO: 2950
aaaugaauggaacguguua

SEQ ID NO: 229259 - RNA, 19 nt, Artificial Sequence
  Description of Artificial Sequence: Synthetic oligonucleotide
  Antisense strand to SEQ ID NO: 229258
uaacacguuccauucauuu

SEQ ID NO: 229260 - RNA, 19 nt, Artificial Sequence
  Description of Artificial Sequence: Synthetic oligonucleotide
  Sense strand starting at position 3135 of SEQ ID NO: 2950
augaauggaacguguuaau

SEQ ID NO: 229261 - RNA, 19 nt, Artificial Sequence
  Description of Artificial Sequence: Synthetic oligonucleotide
  Antisense strand to SEQ ID NO: 229260
auuaacacguuccauucau

SEQ ID NO: 229262 - RNA, 19 nt, Artificial Sequence
  Description of Artificial Sequence: Synthetic oligonucleotide
  Sense strand starting at position 3227 of SEQ ID NO: 2950
ggaucucauaccuggcuga

SEQ ID NO: 229263 - RNA, 19 nt, Artificial Sequence
  Description of Artificial Sequence: Synthetic oligonucleotide
  Antisense strand to SEQ ID NO: 229262
ucagccagguaugagaucc

SEQ ID NO: 229264 - RNA, 19 nt, Artificial Sequence
  Description of Artificial Sequence: Synthetic oligonucleotide
  Sense strand starting at position 3230 of SEQ ID NO: 2950
ucucauaccuggcugaaua

SEQ ID NO: 229265 - RNA, 19 nt, Artificial Sequence
  Description of Artificial Sequence: Synthetic oligonucleotide
  Antisense strand to SEQ ID NO: 229264
uauucagccagguaugaga

SEQ ID NO: 229266 - RNA, 19 nt, Artificial Sequence
  Description of Artificial Sequence: Synthetic oligonucleotide
  Sense strand starting at position 3231 of SEQ ID NO: 2950
cucauaccuggcugaauau

SEQ ID NO: 229267 - RNA, 19 nt, Artificial Sequence
  Description of Artificial Sequence: Synthetic oligonucleotide
  Antisense strand to SEQ ID NO: 229266
auauucagccagguaugag

SEQ ID NO: 229268 - RNA, 19 nt, Artificial Sequence
  Description of Artificial Sequence: Synthetic oligonucleotide
  Sense strand starting at position 3232 of SEQ ID NO: 2950
ucauaccuggcugaauaua

SEQ ID NO: 229269 - RNA, 19 nt, Artificial Sequence
  Description of Artificial Sequence: Synthetic oligonucleotide
  Antisense strand to SEQ ID NO: 229268
uauauucagccagguauga

SEQ ID NO: 229270 - RNA, 19 nt, Artificial Sequence
  Description of Artificial Sequence: Synthetic oligonucleotide
  Sense strand starting at position 3535 of SEQ ID NO: 2950
gggacuuccuuccuauaug

SEQ ID NO: 229271 - RNA, 19 nt, Artificial Sequence
  Description of Artificial Sequence: Synthetic oligonucleotide
  Antisense strand to SEQ ID NO: 229270
cauauaggaaggaaguccc

SEQ ID NO: 229272 - RNA, 19 nt, Artificial Sequence
  Description of Artificial Sequence: Synthetic oligonucleotide
  Sense strand starting at position 3675 of SEQ ID NO: 2950
aguaucuucuuuguggaaa

SEQ ID NO: 229273 - RNA, 19 nt, Artificial Sequence
  Description of Artificial Sequence: Synthetic oligonucleotide
  Antisense strand to SEQ ID NO: 229272
uuuccacaaagaagauacu

SEQ ID NO: 229274 - RNA, 19 nt, Artificial Sequence
  Description of Artificial Sequence: Synthetic oligonucleotide
  Sense strand starting at position 3738 of SEQ ID NO: 2950
uggcauuuguuaucguaua

SEQ ID NO: 229275 - RNA, 19 nt, Artificial Sequence
  Description of Artificial Sequence: Synthetic oligonucleotide
  Antisense strand to SEQ ID NO: 229274
uauacgauaacaaaugcca

SEQ ID NO: 229276 - RNA, 19 nt, Artificial Sequence
  Description of Artificial Sequence: Synthetic oligonucleotide
  Sense strand starting at position 3813 of SEQ ID NO: 2950
auauaaaugucucugguac

SEQ ID NO: 229277 - RNA, 19 nt, Artificial Sequence
  Description of Artificial Sequence: Synthetic oligonucleotide
  Antisense strand to SEQ ID NO: 229276
guaccagagacauuuauau

SEQ ID NO: 229278 - RNA, 19 nt, Artificial Sequence
  Description of Artificial Sequence: Synthetic oligonucleotide
  Sense strand starting at position 3827 of SEQ ID NO: 2950
gguacaucacagugauaug

SEQ ID NO: 229279 - RNA, 19 nt, Artificial Sequence
  Description of Artificial Sequence: Synthetic oligonucleotide
  Antisense strand to SEQ ID NO: 229278
cauaucacugugauguacc

SEQ ID NO: 229280 - RNA, 19 nt, Artificial Sequence
  Description of Artificial Sequence: Synthetic oligonucleotide
  Sense strand starting at position 3925 of SEQ ID NO: 2950
ugcagaguccaacacuaau

SEQ ID NO: 229281 - RNA, 19 nt, Artificial Sequence
  Description of Artificial Sequence: Synthetic oligonucleotide
  Antisense strand to SEQ ID NO: 229280
auuaguguuggacucugca

SEQ ID NO: 229282 - RNA, 19 nt, Artificial Sequence
  Description of Artificial Sequence: Synthetic oligonucleotide
  Sense strand starting at position 3942 of SEQ ID NO: 2950
auauuagcccuuggacaua

SEQ ID NO: 229283 - RNA, 19 nt, Artificial Sequence
  Description of Artificial Sequence: Synthetic oligonucleotide
  Antisense strand to SEQ ID NO: 229282
uauguccaagggcuaauau

SEQ ID NO: 229284 - RNA, 19 nt, Artificial Sequence
  Description of Artificial Sequence: Synthetic oligonucleotide
  Sense strand starting at position 3945 of SEQ ID NO: 2950
uuagcccuuggacauaaua

SEQ ID NO: 229285 - RNA, 19 nt, Artificial Sequence
  Description of Artificial Sequence: Synthetic oligonucleotide
  Antisense strand to SEQ ID NO: 229284
uauuauguccaagggcuaa

SEQ ID NO: 229286 - RNA, 19 nt, Artificial Sequence
  Description of Artificial Sequence: Synthetic oligonucleotide
  Sense strand starting at position 69 of SEQ ID NO: 2952
gugcucuuuggauacaaca

SEQ ID NO: 229287 - RNA, 19 nt, Artificial Sequence
  Description of Artificial Sequence: Synthetic oligonucleotide
  Antisense strand to SEQ ID NO: 229286
uguuguauccaaagagcac

SEQ ID NO: 229288 - RNA, 19 nt, Artificial Sequence
  Description of Artificial Sequence: Synthetic oligonucleotide
  Sense strand starting at position 257 of SEQ ID NO: 2952
auguaaucccaguauucug

SEQ ID NO: 229289 - RNA, 19 nt, Artificial Sequence
  Description of Artificial Sequence: Synthetic oligonucleotide
  Antisense strand to SEQ ID NO: 229288
cagaauacugggauuacau

SEQ ID NO: 229290 - RNA, 19 nt, Artificial Sequence
  Description of Artificial Sequence: Synthetic oligonucleotide
  Sense strand starting at position 695 of SEQ ID NO: 2952
aguugaaugcuugaaggua

SEQ ID NO: 229291 - RNA, 19 nt, Artificial Sequence
  Description of Artificial Sequence: Synthetic oligonucleotide
  Antisense strand to SEQ ID NO: 229290
uaccuucaagcauucaacu

SEQ ID NO: 229292 - RNA, 19 nt, Artificial Sequence
  Description of Artificial Sequence: Synthetic oligonucleotide
  Sense strand starting at position 771 of SEQ ID NO: 2952
augaguuaauuacuacaug

SEQ ID NO: 229293 - RNA, 19 nt, Artificial Sequence
  Description of Artificial Sequence: Synthetic oligonucleotide
  Antisense strand to SEQ ID NO: 229292
cauguaguaauuaacucau

SEQ ID NO: 229294 - RNA, 19 nt, Artificial Sequence
  Description of Artificial Sequence: Synthetic oligonucleotide
  Sense strand starting at position 774 of SEQ ID NO: 2952
aguuaauuacuacauggua

SEQ ID NO: 229295 - RNA, 19 nt, Artificial Sequence
  Description of Artificial Sequence: Synthetic oligonucleotide
  Antisense strand to SEQ ID NO: 229294
uaccauguaguaauuaacu

SEQ ID NO: 229296 - RNA, 19 nt, Artificial Sequence
  Description of Artificial Sequence: Synthetic oligonucleotide
  Sense strand starting at position 794 of SEQ ID NO: 2952
gugucauaagaguacaaua

SEQ ID NO: 229297 - RNA, 19 nt, Artificial Sequence
  Description of Artificial Sequence: Synthetic oligonucleotide
  Antisense strand to SEQ ID NO: 229296
uauuguacucuuaugacac

SEQ ID NO: 229298 - RNA, 19 nt, Artificial Sequence
  Description of Artificial Sequence: Synthetic oligonucleotide
  Sense strand starting at position 882 of SEQ ID NO: 2952
uuucauuuccgcgagguua

SEQ ID NO: 229299 - RNA, 19 nt, Artificial Sequence
  Description of Artificial Sequence: Synthetic oligonucleotide
  Antisense strand to SEQ ID NO: 229298
uaaccucgcggaaaugaaa

SEQ ID NO: 229300 - RNA, 19 nt, Artificial Sequence
  Description of Artificial Sequence: Synthetic oligonucleotide
  Sense strand starting at position 884 of SEQ ID NO: 2952
ucauuuccgcgagguuaca

SEQ ID NO: 229301 - RNA, 19 nt, Artificial Sequence
  Description of Artificial Sequence: Synthetic oligonucleotide
  Antisense strand to SEQ ID NO: 229300
uguaaccucgcggaaauga

SEQ ID NO: 229302 - RNA, 19 nt, Artificial Sequence
  Description of Artificial Sequence: Synthetic oligonucleotide
  Sense strand starting at position 982 of SEQ ID NO: 2952
uguaaaggauauucugcau

SEQ ID NO: 229303 - RNA, 19 nt, Artificial Sequence
  Description of Artificial Sequence: Synthetic oligonucleotide
  Antisense strand to SEQ ID NO: 229302
augcagaauauccuuuaca

SEQ ID NO: 229304 - RNA, 19 nt, Artificial Sequence
  Description of Artificial Sequence: Synthetic oligonucleotide
  Sense strand starting at position 998 of SEQ ID NO: 2952
cauaaagggucguuaacau

SEQ ID NO: 229305 - RNA, 19 nt, Artificial Sequence
  Description of Artificial Sequence: Synthetic oligonucleotide
  Antisense strand to SEQ ID NO: 229304
auguuaacgacccuuuaug

SEQ ID NO: 229306 - RNA, 19 nt, Artificial Sequence
  Description of Artificial Sequence: Synthetic oligonucleotide
  Sense strand starting at position 1098 of SEQ ID NO: 2952
uguguauacaacugaggga

SEQ ID NO: 229307 - RNA, 19 nt, Artificial Sequence
  Description of Artificial Sequence: Synthetic oligonucleotide
  Antisense strand to SEQ ID NO: 229306
ucccucaguuguauacaca

SEQ ID NO: 229308 - RNA, 19 nt, Artificial Sequence
  Description of Artificial Sequence: Synthetic oligonucleotide
  Sense strand starting at position 1134 of SEQ ID NO: 2952
ggaacucgagucugaagua

SEQ ID NO: 229309 - RNA, 19 nt, Artificial Sequence
  Description of Artificial Sequence: Synthetic oligonucleotide
  Antisense strand to SEQ ID NO: 229308
uacuucagacucgaguucc

SEQ ID NO: 229310 - RNA, 19 nt, Artificial Sequence
  Description of Artificial Sequence: Synthetic oligonucleotide
  Sense strand starting at position 1193 of SEQ ID NO: 2952
aagucugcuggugaaguaa

SEQ ID NO: 229311 - RNA, 19 nt, Artificial Sequence
  Description of Artificial Sequence: Synthetic oligonucleotide
  Antisense strand to SEQ ID NO: 229310
uuacuucaccagcagacuu

SEQ ID NO: 229312 - RNA, 19 nt, Artificial Sequence
  Description of Artificial Sequence: Synthetic oligonucleotide
  Sense strand starting at position 1204 of SEQ ID NO: 2952
ugaaguaagagccacaguu

SEQ ID NO: 229313 - RNA, 19 nt, Artificial Sequence
  Description of Artificial Sequence: Synthetic oligonucleotide
  Antisense strand to SEQ ID NO: 229312
aacuguggcucuuacuuca

SEQ ID NO: 229314 - RNA, 19 nt, Artificial Sequence
  Description of Artificial Sequence: Synthetic oligonucleotide
  Sense strand starting at position 1206 of SEQ ID NO: 2952
aaguaagagccacaguuaa

SEQ ID NO: 229315 - RNA, 19 nt, Artificial Sequence
  Description of Artificial Sequence: Synthetic oligonucleotide
  Antisense strand to SEQ ID NO: 229314
uuaacuguggcucuuacuu

SEQ ID NO: 229316 - RNA, 19 nt, Artificial Sequence
  Description of Artificial Sequence: Synthetic oligonucleotide
  Sense strand starting at position 1309 of SEQ ID NO: 2952
ucuagugcgacagaauuga

SEQ ID NO: 229317 - RNA, 19 nt, Artificial Sequence
  Description of Artificial Sequence: Synthetic oligonucleotide
  Antisense strand to SEQ ID NO: 229316
ucaauucugucgcacuaga

SEQ ID NO: 229318 - RNA, 19 nt, Artificial Sequence
  Description of Artificial Sequence: Synthetic oligonucleotide
  Sense strand starting at position 1445 of SEQ ID NO: 2952
agguaagagucugcagaga

SEQ ID NO: 229319 - RNA, 19 nt, Artificial Sequence
  Description of Artificial Sequence: Synthetic oligonucleotide
  Antisense strand to SEQ ID NO: 229318
ucucugcagacucuuaccu

SEQ ID NO: 229320 - RNA, 19 nt, Artificial Sequence
  Description of Artificial Sequence: Synthetic oligonucleotide
  Sense strand starting at position 2077 of SEQ ID NO: 2952
ccagccauuucgguguaga

SEQ ID NO: 229321 - RNA, 19 nt, Artificial Sequence
  Description of Artificial Sequence: Synthetic oligonucleotide
  Antisense strand to SEQ ID NO: 229320
ucuacaccgaaauggcugg

SEQ ID NO: 229322 - RNA, 19 nt, Artificial Sequence
  Description of Artificial Sequence: Synthetic oligonucleotide
  Sense strand starting at position 2078 of SEQ ID NO: 2952
cagccauuucgguguagaa

SEQ ID NO: 229323 - RNA, 19 nt, Artificial Sequence
  Description of Artificial Sequence: Synthetic oligonucleotide
  Antisense strand to SEQ ID NO: 229322
uucuacaccgaaauggcug

SEQ ID NO: 229324 - RNA, 19 nt, Artificial Sequence
  Description of Artificial Sequence: Synthetic oligonucleotide
  Sense strand starting at position 2080 of SEQ ID NO: 2952
gccauuucgguguagaagu

SEQ ID NO: 229325 - RNA, 19 nt, Artificial Sequence
  Description of Artificial Sequence: Synthetic oligonucleotide
  Antisense strand to SEQ ID NO: 229324
acuucuacaccgaaauggc

SEQ ID NO: 229326 - RNA, 19 nt, Artificial Sequence
  Description of Artificial Sequence: Synthetic oligonucleotide
  Sense strand starting at position 2195 of SEQ ID NO: 2952
ggagugauagcgggaagaa

SEQ ID NO: 229327 - RNA, 19 nt, Artificial Sequence
  Description of Artificial Sequence: Synthetic oligonucleotide
  Antisense strand to SEQ ID NO: 229326
uucuucccgcuaucacucc

SEQ ID NO: 229328 - RNA, 19 nt, Artificial Sequence
  Description of Artificial Sequence: Synthetic oligonucleotide
  Sense strand starting at position 2236 of SEQ ID NO: 2952
cggguccuuagaugagaaa

SEQ ID NO: 229329 - RNA, 19 nt, Artificial Sequence
  Description of Artificial Sequence: Synthetic oligonucleotide
  Antisense strand to SEQ ID NO: 229328
uuucucaucuaaggacccg

SEQ ID NO: 229330 - RNA, 19 nt, Artificial Sequence
  Description of Artificial Sequence: Synthetic oligonucleotide
  Sense strand starting at position 2255 of SEQ ID NO: 2952
auucgaaguagcgaugaga

SEQ ID NO: 229331 - RNA, 19 nt, Artificial Sequence
  Description of Artificial Sequence: Synthetic oligonucleotide
  Antisense strand to SEQ ID NO: 229330
ucucaucgcuacuucgaau

SEQ ID NO: 229332 - RNA, 19 nt, Artificial Sequence
  Description of Artificial Sequence: Synthetic oligonucleotide
  Sense strand starting at position 2264 of SEQ ID NO: 2952
agcgaugagaugugagaaa

SEQ ID NO: 229333 - RNA, 19 nt, Artificial Sequence
  Description of Artificial Sequence: Synthetic oligonucleotide
  Antisense strand to SEQ ID NO: 229332
uuucucacaucucaucgcu

SEQ ID NO: 229334 - RNA, 19 nt, Artificial Sequence
  Description of Artificial Sequence: Synthetic oligonucleotide
  Sense strand starting at position 2520 of SEQ ID NO: 2952
accgcaagccuccgaauuu

SEQ ID NO: 229335 - RNA, 19 nt, Artificial Sequence
  Description of Artificial Sequence: Synthetic oligonucleotide
  Antisense strand to SEQ ID NO: 229334
aaauucggaggcuugcggu

SEQ ID NO: 229336 - RNA, 19 nt, Artificial Sequence
  Description of Artificial Sequence: Synthetic oligonucleotide
  Sense strand starting at position 2810 of SEQ ID NO: 2952
gaguguuggcuuuagagaa

SEQ ID NO: 229337 - RNA, 19 nt, Artificial Sequence
  Description of Artificial Sequence: Synthetic oligonucleotide
  Antisense strand to SEQ ID NO: 229336
uucucuaaagccaacacuc

SEQ ID NO: 229338 - RNA, 19 nt, Artificial Sequence
  Description of Artificial Sequence: Synthetic oligonucleotide
  Sense strand starting at position 2814 of SEQ ID NO: 2952
guuggcuuuagagaaauua

SEQ ID NO: 229339 - RNA, 19 nt, Artificial Sequence
  Description of Artificial Sequence: Synthetic oligonucleotide
  Antisense strand to SEQ ID NO: 229338
uaauuucucuaaagccaac

SEQ ID NO: 229340 - RNA, 19 nt, Artificial Sequence
  Description of Artificial Sequence: Synthetic oligonucleotide
  Sense strand starting at position 3499 of SEQ ID NO: 2952
agcauuuauucugugcuaa

SEQ ID NO: 229341 - RNA, 19 nt, Artificial Sequence
  Description of Artificial Sequence: Synthetic oligonucleotide
  Antisense strand to SEQ ID NO: 229340
uuagcacagaauaaaugcu

SEQ ID NO: 229342 - RNA, 19 nt, Artificial Sequence
  Description of Artificial Sequence: Synthetic oligonucleotide
  Sense strand starting at position 3500 of SEQ ID NO: 2952
gcauuuauucugugcuaag

SEQ ID NO: 229343 - RNA, 19 nt, Artificial Sequence
  Description of Artificial Sequence: Synthetic oligonucleotide
  Antisense strand to SEQ ID NO: 229342
cuuagcacagaauaaaugc

SEQ ID NO: 229344 - RNA, 19 nt, Artificial Sequence
  Description of Artificial Sequence: Synthetic oligonucleotide
  Sense strand starting at position 3544 of SEQ ID NO: 2952
agagauguauuugacggaa

SEQ ID NO: 229345 - RNA, 19 nt, Artificial Sequence
  Description of Artificial Sequence: Synthetic oligonucleotide
  Antisense strand to SEQ ID NO: 229344
uuccgucaaauacaucucu

SEQ ID NO: 229346 - RNA, 19 nt, Artificial Sequence
  Description of Artificial Sequence: Synthetic oligonucleotide
  Sense strand starting at position 3604 of SEQ ID NO: 2952
gggcuauagugauugaauc

SEQ ID NO: 229347 - RNA, 19 nt, Artificial Sequence
  Description of Artificial Sequence: Synthetic oligonucleotide
  Antisense strand to SEQ ID NO: 229346
gauucaaucacuauagccc

SEQ ID NO: 229348 - RNA, 19 nt, Artificial Sequence
  Description of Artificial Sequence: Synthetic oligonucleotide
  Sense strand starting at position 3605 of SEQ ID NO: 2952
ggcuauagugauugaaucu

SEQ ID NO: 229349 - RNA, 19 nt, Artificial Sequence
  Description of Artificial Sequence: Synthetic oligonucleotide
  Antisense strand to SEQ ID NO: 229348
agauucaaucacuauagcc

SEQ ID NO: 229350 - RNA, 19 nt, Artificial Sequence
  Description of Artificial Sequence: Synthetic oligonucleotide
  Sense strand starting at position 3606 of SEQ ID NO: 2952
gcuauagugauugaaucug

SEQ ID NO: 229351 - RNA, 19 nt, Artificial Sequence
  Description of Artificial Sequence: Synthetic oligonucleotide
  Antisense strand to SEQ ID NO: 229350
cagauucaaucacuauagc

SEQ ID NO: 229352 - RNA, 19 nt, Artificial Sequence
  Description of Artificial Sequence: Synthetic oligonucleotide
  Sense strand starting at position 3755 of SEQ ID NO: 2952
acguaagucagaggagacu

SEQ ID NO: 229353 - RNA, 19 nt, Artificial Sequence
  Description of Artificial Sequence: Synthetic oligonucleotide
  Antisense strand to SEQ ID NO: 229352
agucuccucugacuuacgu

SEQ ID NO: 229354 - RNA, 19 nt, Artificial Sequence
  Description of Artificial Sequence: Synthetic oligonucleotide
  Sense strand starting at position 3791 of SEQ ID NO: 2952
uuugaauugugacuugaau

SEQ ID NO: 229355 - RNA, 19 nt, Artificial Sequence
  Description of Artificial Sequence: Synthetic oligonucleotide
  Antisense strand to SEQ ID NO: 229354
auucaagucacaauucaaa

SEQ ID NO: 229356 - RNA, 19 nt, Artificial Sequence
  Description of Artificial Sequence: Synthetic oligonucleotide
  Sense strand starting at position 3793 of SEQ ID NO: 2952
ugaauugugacuugaauga

SEQ ID NO: 229357 - RNA, 19 nt, Artificial Sequence
  Description of Artificial Sequence: Synthetic oligonucleotide
  Antisense strand to SEQ ID NO: 229356
ucauucaagucacaauuca

SEQ ID NO: 229358 - RNA, 19 nt, Artificial Sequence
  Description of Artificial Sequence: Synthetic oligonucleotide
  Sense strand starting at position 3797 of SEQ ID NO: 2952
uugugacuugaaugaugaa

SEQ ID NO: 229359 - RNA, 19 nt, Artificial Sequence
  Description of Artificial Sequence: Synthetic oligonucleotide
  Antisense strand to SEQ ID NO: 229358
uucaucauucaagucacaa

SEQ ID NO: 229360 - RNA, 19 nt, Artificial Sequence
  Description of Artificial Sequence: Synthetic oligonucleotide
  Sense strand starting at position 3857 of SEQ ID NO: 2952
caggaaugagcuugaugug

SEQ ID NO: 229361 - RNA, 19 nt, Artificial Sequence
  Description of Artificial Sequence: Synthetic oligonucleotide
  Antisense strand to SEQ ID NO: 229360
cacaucaagcucauuccug

SEQ ID NO: 229362 - RNA, 19 nt, Artificial Sequence
  Description of Artificial Sequence: Synthetic oligonucleotide
  Sense strand starting at position 3858 of SEQ ID NO: 2952
aggaaugagcuugaugugu

SEQ ID NO: 229363 - RNA, 19 nt, Artificial Sequence
  Description of Artificial Sequence: Synthetic oligonucleotide
  Antisense strand to SEQ ID NO: 229362
acacaucaagcucauuccu

SEQ ID NO: 229364 - RNA, 19 nt, Artificial Sequence
  Description of Artificial Sequence: Synthetic oligonucleotide
  Sense strand starting at position 3871 of SEQ ID NO: 2952
auguguuggagugauagaa

SEQ ID NO: 229365 - RNA, 19 nt, Artificial Sequence
  Description of Artificial Sequence: Synthetic oligonucleotide
  Antisense strand to SEQ ID NO: 229364
uucuaucacuccaacacau

SEQ ID NO: 229366 - RNA, 19 nt, Artificial Sequence
  Description of Artificial Sequence: Synthetic oligonucleotide
  Sense strand starting at position 37 of SEQ ID NO: 2954
ucgugagauuacuuuaaac

SEQ ID NO: 229367 - RNA, 19 nt, Artificial Sequence
  Description of Artificial Sequence: Synthetic oligonucleotide
  Antisense strand to SEQ ID NO: 229366
guuuaaaguaaucucacga

SEQ ID NO: 229368 - RNA, 19 nt, Artificial Sequence
  Description of Artificial Sequence: Synthetic oligonucleotide
  Sense strand starting at position 486 of SEQ ID NO: 2954
gguugacucaguggacuaa

SEQ ID NO: 229369 - RNA, 19 nt, Artificial Sequence
  Description of Artificial Sequence: Synthetic oligonucleotide
  Antisense strand to SEQ ID NO: 229368
uuaguccacugagucaacc

SEQ ID NO: 229370 - RNA, 19 nt, Artificial Sequence
  Description of Artificial Sequence: Synthetic oligonucleotide
  Sense strand starting at position 565 of SEQ ID NO: 2954
ccuugaacagucuggaaug

SEQ ID NO: 229371 - RNA, 19 nt, Artificial Sequence
  Description of Artificial Sequence: Synthetic oligonucleotide
  Antisense strand to SEQ ID NO: 229370
cauuccagacuguucaagg

SEQ ID NO: 229372 - RNA, 19 nt, Artificial Sequence
  Description of Artificial Sequence: Synthetic oligonucleotide
  Sense strand starting at position 570 of SEQ ID NO: 2954
aacagucuggaaugcuuua

SEQ ID NO: 229373 - RNA, 19 nt, Artificial Sequence
  Description of Artificial Sequence: Synthetic oligonucleotide
  Antisense strand to SEQ ID NO: 229372
uaaagcauuccagacuguu

SEQ ID NO: 229374 - RNA, 19 nt, Artificial Sequence
  Description of Artificial Sequence: Synthetic oligonucleotide
  Sense strand starting at position 651 of SEQ ID NO: 2954
gaagucauugccuggauug

SEQ ID NO: 229375 - RNA, 19 nt, Artificial Sequence
  Description of Artificial Sequence: Synthetic oligonucleotide
  Antisense strand to SEQ ID NO: 229374
caauccaggcaaugacuuc

SEQ ID NO: 229376 - RNA, 19 nt, Artificial Sequence
  Description of Artificial Sequence: Synthetic oligonucleotide
  Sense strand starting at position 759 of SEQ ID NO: 2954
uuguuaccuucucugaaug

SEQ ID NO: 229377 - RNA, 19 nt, Artificial Sequence
  Description of Artificial Sequence: Synthetic oligonucleotide
  Antisense strand to SEQ ID NO: 229376
cauucagagaagguaacaa

SEQ ID NO: 229378 - RNA, 19 nt, Artificial Sequence
  Description of Artificial Sequence: Synthetic oligonucleotide
  Sense strand starting at position 788 of SEQ ID NO: 2954
agcacuaguuucuuggaga

SEQ ID NO: 229379 - RNA, 19 nt, Artificial Sequence
  Description of Artificial Sequence: Synthetic oligonucleotide
  Antisense strand to SEQ ID NO: 229378
ucuccaagaaacuagugcu

SEQ ID NO: 229380 - RNA, 19 nt, Artificial Sequence
  Description of Artificial Sequence: Synthetic oligonucleotide
  Sense strand starting at position 805 of SEQ ID NO: 2954
gagaaagaucugugauagc

SEQ ID NO: 229381 - RNA, 19 nt, Artificial Sequence
  Description of Artificial Sequence: Synthetic oligonucleotide
  Antisense strand to SEQ ID NO: 229380
gcuaucacagaucuuucuc

SEQ ID NO: 229382 - RNA, 19 nt, Artificial Sequence
  Description of Artificial Sequence: Synthetic oligonucleotide
  Sense strand starting at position 814 of SEQ ID NO: 2954
cugugauagccuuaugaac

SEQ ID NO: 229383 - RNA, 19 nt, Artificial Sequence
  Description of Artificial Sequence: Synthetic oligonucleotide
  Antisense strand to SEQ ID NO: 229382
guucauaaggcuaucacag

SEQ ID NO: 229384 - RNA, 19 nt, Artificial Sequence
  Description of Artificial Sequence: Synthetic oligonucleotide
  Sense strand starting at position 931 of SEQ ID NO: 2954
uuuaaacucuagguagaag

SEQ ID NO: 229385 - RNA, 19 nt, Artificial Sequence
  Description of Artificial Sequence: Synthetic oligonucleotide
  Antisense strand to SEQ ID NO: 229384
cuucuaccuagaguuuaaa

SEQ ID NO: 229386 - RNA, 19 nt, Artificial Sequence
  Description of Artificial Sequence: Synthetic oligonucleotide
  Sense strand starting at position 1117 of SEQ ID NO: 2954
caguuauauuuagaaggaa

SEQ ID NO: 229387 - RNA, 19 nt, Artificial Sequence
  Description of Artificial Sequence: Synthetic oligonucleotide
  Antisense strand to SEQ ID NO: 229386
uuccuucuaaauauaacug

SEQ ID NO: 229388 - RNA, 19 nt, Artificial Sequence
  Description of Artificial Sequence: Synthetic oligonucleotide
  Sense strand starting at position 1175 of SEQ ID NO: 2954
ggcuguccauaaucauaau

SEQ ID NO: 229389 - RNA, 19 nt, Artificial Sequence
  Description of Artificial Sequence: Synthetic oligonucleotide
  Antisense strand to SEQ ID NO: 229388
auuaugauuauggacagcc

SEQ ID NO: 229390 - RNA, 19 nt, Artificial Sequence
  Description of Artificial Sequence: Synthetic oligonucleotide
  Sense strand starting at position 1228 of SEQ ID NO: 2954
cuagacuuguaguuauuau

SEQ ID NO: 229391 - RNA, 19 nt, Artificial Sequence
  Description of Artificial Sequence: Synthetic oligonucleotide
  Antisense strand to SEQ ID NO: 229390
auaauaacuacaagucuag

SEQ ID NO: 229392 - RNA, 19 nt, Artificial Sequence
  Description of Artificial Sequence: Synthetic oligonucleotide
  Sense strand starting at position 1353 of SEQ ID NO: 2954
agguuuaguccuuauacua

SEQ ID NO: 229393 - RNA, 19 nt, Artificial Sequence
  Description of Artificial Sequence: Synthetic oligonucleotide
  Antisense strand to SEQ ID NO: 229392
uaguauaaggacuaaaccu

SEQ ID NO: 229394 - RNA, 19 nt, Artificial Sequence
  Description of Artificial Sequence: Synthetic oligonucleotide
  Sense strand starting at position 1369 of SEQ ID NO: 2954
cuaugcguaguagaauaaa

SEQ ID NO: 229395 - RNA, 19 nt, Artificial Sequence
  Description of Artificial Sequence: Synthetic oligonucleotide
  Antisense strand to SEQ ID NO: 229394
uuuauucuacuacgcauag

SEQ ID NO: 229396 - RNA, 19 nt, Artificial Sequence
  Description of Artificial Sequence: Synthetic oligonucleotide
  Sense strand starting at position 1404 of SEQ ID NO: 2954
guguccagcucauuucgau

SEQ ID NO: 229397 - RNA, 19 nt, Artificial Sequence
  Description of Artificial Sequence: Synthetic oligonucleotide
  Antisense strand to SEQ ID NO: 229396
aucgaaaugagcuggacac

SEQ ID NO: 229398 - RNA, 19 nt, Artificial Sequence
  Description of Artificial Sequence: Synthetic oligonucleotide
  Sense strand starting at position 1444 of SEQ ID NO: 2954
aggguaaauuuauaaguca

SEQ ID NO: 229399 - RNA, 19 nt, Artificial Sequence
  Description of Artificial Sequence: Synthetic oligonucleotide
  Antisense strand to SEQ ID NO: 229398
ugacuuauaaauuuacccu

SEQ ID NO: 229400 - RNA, 19 nt, Artificial Sequence
  Description of Artificial Sequence: Synthetic oligonucleotide
  Sense strand starting at position 1699 of SEQ ID NO: 2954
uacacucagccuggguaaa

SEQ ID NO: 229401 - RNA, 19 nt, Artificial Sequence
  Description of Artificial Sequence: Synthetic oligonucleotide
  Antisense strand to SEQ ID NO: 229400
uuuacccaggcugagugua

SEQ ID NO: 229402 - RNA, 19 nt, Artificial Sequence
  Description of Artificial Sequence: Synthetic oligonucleotide
  Sense strand starting at position 1700 of SEQ ID NO: 2954
acacucagccuggguaaau

SEQ ID NO: 229403 - RNA, 19 nt, Artificial Sequence
  Description of Artificial Sequence: Synthetic oligonucleotide
  Antisense strand to SEQ ID NO: 229402
auuuacccaggcugagugu

SEQ ID NO: 229404 - RNA, 19 nt, Artificial Sequence
  Description of Artificial Sequence: Synthetic oligonucleotide
  Sense strand starting at position 1786 of SEQ ID NO: 2954
gugaguagauccuugauaa

SEQ ID NO: 229405 - RNA, 19 nt, Artificial Sequence
  Description of Artificial Sequence: Synthetic oligonucleotide
  Antisense strand to SEQ ID NO: 229404
uuaucaaggaucuacucac

SEQ ID NO: 229406 - RNA, 19 nt, Artificial Sequence
  Description of Artificial Sequence: Synthetic oligonucleotide
  Sense strand starting at position 1787 of SEQ ID NO: 2954
ugaguagauccuugauaag

SEQ ID NO: 229407 - RNA, 19 nt, Artificial Sequence
  Description of Artificial Sequence: Synthetic oligonucleotide
  Antisense strand to SEQ ID NO: 229406
cuuaucaaggaucuacuca

SEQ ID NO: 229408 - RNA, 19 nt, Artificial Sequence
  Description of Artificial Sequence: Synthetic oligonucleotide
  Sense strand starting at position 2219 of SEQ ID NO: 2954
caccuugaggcauauuagu

SEQ ID NO: 229409 - RNA, 19 nt, Artificial Sequence
  Description of Artificial Sequence: Synthetic oligonucleotide
  Antisense strand to SEQ ID NO: 229408
acuaauaugccucaaggug

SEQ ID NO: 229410 - RNA, 19 nt, Artificial Sequence
  Description of Artificial Sequence: Synthetic oligonucleotide
  Sense strand starting at position 2241 of SEQ ID NO: 2954
guguaaccagcuuaacauu

SEQ ID NO: 229411 - RNA, 19 nt, Artificial Sequence
  Description of Artificial Sequence: Synthetic oligonucleotide
  Antisense strand to SEQ ID NO: 229410
aauguuaagcugguuacac

SEQ ID NO: 229412 - RNA, 19 nt, Artificial Sequence
  Description of Artificial Sequence: Synthetic oligonucleotide
  Sense strand starting at position 2309 of SEQ ID NO: 2954
auggcauuguuucuuauuu

SEQ ID NO: 229413 - RNA, 19 nt, Artificial Sequence
  Description of Artificial Sequence: Synthetic oligonucleotide
  Antisense strand to SEQ ID NO: 229412
aaauaagaaacaaugccau

SEQ ID NO: 229414 - RNA, 19 nt, Artificial Sequence
  Description of Artificial Sequence: Synthetic oligonucleotide
  Sense strand starting at position 2310 of SEQ ID NO: 2954
uggcauuguuucuuauuua

SEQ ID NO: 229415 - RNA, 19 nt, Artificial Sequence
  Description of Artificial Sequence: Synthetic oligonucleotide
  Antisense strand to SEQ ID NO: 229414
uaaauaagaaacaaugcca

SEQ ID NO: 229416 - RNA, 19 nt, Artificial Sequence
  Description of Artificial Sequence: Synthetic oligonucleotide
  Sense strand starting at position 2574 of SEQ ID NO: 2954
aauuaucgccaugaagguu

SEQ ID NO: 229417 - RNA, 19 nt, Artificial Sequence
  Description of Artificial Sequence: Synthetic oligonucleotide
  Antisense strand to SEQ ID NO: 229416
aaccuucauggcgauaauu

SEQ ID NO: 229418 - RNA, 19 nt, Artificial Sequence
  Description of Artificial Sequence: Synthetic oligonucleotide
  Sense strand starting at position 2674 of SEQ ID NO: 2954
caaucugcccuugggagaa

SEQ ID NO: 229419 - RNA, 19 nt, Artificial Sequence
  Description of Artificial Sequence: Synthetic oligonucleotide
  Antisense strand to SEQ ID NO: 229418
uucucccaagggcagauug

SEQ ID NO: 229420 - RNA, 19 nt, Artificial Sequence
  Description of Artificial Sequence: Synthetic oligonucleotide
  Sense strand starting at position 2689 of SEQ ID NO: 2954
agaaacaggugauuauguu

SEQ ID NO: 229421 - RNA, 19 nt, Artificial Sequence
  Description of Artificial Sequence: Synthetic oligonucleotide
  Antisense strand to SEQ ID NO: 229420
aacauaaucaccuguuucu

SEQ ID NO: 229422 - RNA, 19 nt, Artificial Sequence
  Description of Artificial Sequence: Synthetic oligonucleotide
  Sense strand starting at position 2693 of SEQ ID NO: 2954
acaggugauuauguuaaau

SEQ ID NO: 229423 - RNA, 19 nt, Artificial Sequence
  Description of Artificial Sequence: Synthetic oligonucleotide
  Antisense strand to SEQ ID NO: 229422
auuuaacauaaucaccugu

SEQ ID NO: 229424 - RNA, 19 nt, Artificial Sequence
  Description of Artificial Sequence: Synthetic oligonucleotide
  Sense strand starting at position 2703 of SEQ ID NO: 2954
auguuaaaugacugcuacu

SEQ ID NO: 229425 - RNA, 19 nt, Artificial Sequence
  Description of Artificial Sequence: Synthetic oligonucleotide
  Antisense strand to SEQ ID NO: 229424
aguagcagucauuuaacau

SEQ ID NO: 229426 - RNA, 19 nt, Artificial Sequence
  Description of Artificial Sequence: Synthetic oligonucleotide
  Sense strand starting at position 2909 of SEQ ID NO: 2954
aucucuaaccgccaggauu

SEQ ID NO: 229427 - RNA, 19 nt, Artificial Sequence
  Description of Artificial Sequence: Synthetic oligonucleotide
  Antisense strand to SEQ ID NO: 229426
aauccuggcgguuagagau

SEQ ID NO: 229428 - RNA, 19 nt, Artificial Sequence
  Description of Artificial Sequence: Synthetic oligonucleotide
  Sense strand starting at position 2928 of SEQ ID NO: 2954
aggacaggacucuguuaca

SEQ ID NO: 229429 - RNA, 19 nt, Artificial Sequence
  Description of Artificial Sequence: Synthetic oligonucleotide
  Antisense strand to SEQ ID NO: 229428
uguaacagaguccuguccu

SEQ ID NO: 229430 - RNA, 19 nt, Artificial Sequence
  Description of Artificial Sequence: Synthetic oligonucleotide
  Sense strand starting at position 3285 of SEQ ID NO: 2954
aguuguaguaagcauauca

SEQ ID NO: 229431 - RNA, 19 nt, Artificial Sequence
  Description of Artificial Sequence: Synthetic oligonucleotide
  Antisense strand to SEQ ID NO: 229430
ugauaugcuuacuacaacu

SEQ ID NO: 229432 - RNA, 19 nt, Artificial Sequence
  Description of Artificial Sequence: Synthetic oligonucleotide
  Sense strand starting at position 3338 of SEQ ID NO: 2954
ggucuauaucagggacaac

SEQ ID NO: 229433 - RNA, 19 nt, Artificial Sequence
  Description of Artificial Sequence: Synthetic oligonucleotide
  Antisense strand to SEQ ID NO: 229432
guugucccugauauagacc

SEQ ID NO: 229434 - RNA, 19 nt, Artificial Sequence
  Description of Artificial Sequence: Synthetic oligonucleotide
  Sense strand starting at position 3380 of SEQ ID NO: 2954
cucccuuguccuuggaaga

SEQ ID NO: 229435 - RNA, 19 nt, Artificial Sequence
  Description of Artificial Sequence: Synthetic oligonucleotide
  Antisense strand to SEQ ID NO: 229434
ucuuccaaggacaagggag

SEQ ID NO: 229436 - RNA, 19 nt, Artificial Sequence
  Description of Artificial Sequence: Synthetic oligonucleotide
  Sense strand starting at position 3514 of SEQ ID NO: 2954
acuuauuaugugcaagcua

SEQ ID NO: 229437 - RNA, 19 nt, Artificial Sequence
  Description of Artificial Sequence: Synthetic oligonucleotide
  Antisense strand to SEQ ID NO: 229436
uagcuugcacauaauaagu

SEQ ID NO: 229438 - RNA, 19 nt, Artificial Sequence
  Description of Artificial Sequence: Synthetic oligonucleotide
  Sense strand starting at position 3680 of SEQ ID NO: 2954
aagccuacugaugagaguu

SEQ ID NO: 229439 - RNA, 19 nt, Artificial Sequence
  Description of Artificial Sequence: Synthetic oligonucleotide
  Antisense strand to SEQ ID NO: 229438
aacucucaucaguaggcuu

SEQ ID NO: 229440 - RNA, 19 nt, Artificial Sequence
  Description of Artificial Sequence: Synthetic oligonucleotide
  Sense strand starting at position 3741 of SEQ ID NO: 2954
agauguuuccuuggaccag

SEQ ID NO: 229441 - RNA, 19 nt, Artificial Sequence
  Description of Artificial Sequence: Synthetic oligonucleotide
  Antisense strand to SEQ ID NO: 229440
cugguccaaggaaacaucu

SEQ ID NO: 229442 - RNA, 19 nt, Artificial Sequence
  Description of Artificial Sequence: Synthetic oligonucleotide
  Sense strand starting at position 3800 of SEQ ID NO: 2954
gacaguuguggccaggaga

SEQ ID NO: 229443 - RNA, 19 nt, Artificial Sequence
  Description of Artificial Sequence: Synthetic oligonucleotide
  Antisense strand to SEQ ID NO: 229442
ucuccuggccacaacuguc

SEQ ID NO: 229444 - RNA, 19 nt, Artificial Sequence
  Description of Artificial Sequence: Synthetic oligonucleotide
  Sense strand starting at position 3877 of SEQ ID NO: 2954
ugaggaugauguucuggga

SEQ ID NO: 229445 - RNA, 19 nt, Artificial Sequence
  Description of Artificial Sequence: Synthetic oligonucleotide
  Antisense strand to SEQ ID NO: 229444
ucccagaacaucauccuca

SEQ ID NO: 229446 - RNA, 19 nt, Artificial Sequence
  Description of Artificial Sequence: Synthetic oligonucleotide
  Sense strand starting at position 56 of SEQ ID NO: 2953
gugaguagauccuugauaa

SEQ ID NO: 229447 - RNA, 19 nt, Artificial Sequence
  Description of Artificial Sequence: Synthetic oligonucleotide
  Antisense strand to SEQ ID NO: 229446
uuaucaaggaucuacucac

SEQ ID NO: 229448 - RNA, 19 nt, Artificial Sequence
  Description of Artificial Sequence: Synthetic oligonucleotide
  Sense strand starting at position 57 of SEQ ID NO: 2953
ugaguagauccuugauaag

SEQ ID NO: 229449 - RNA, 19 nt, Artificial Sequence
  Description of Artificial Sequence: Synthetic oligonucleotide
  Antisense strand to SEQ ID NO: 229448
cuuaucaaggaucuacuca

SEQ ID NO: 229450 - RNA, 19 nt, Artificial Sequence
  Description of Artificial Sequence: Synthetic oligonucleotide
  Sense strand starting at position 489 of SEQ ID NO: 2953
caccuugaggcauauuagu

SEQ ID NO: 229451 - RNA, 19 nt, Artificial Sequence
  Description of Artificial Sequence: Synthetic oligonucleotide
  Antisense strand to SEQ ID NO: 229450
acuaauaugccucaaggug

SEQ ID NO: 229452 - RNA, 19 nt, Artificial Sequence
  Description of Artificial Sequence: Synthetic oligonucleotide
  Sense strand starting at position 511 of SEQ ID NO: 2953
guguaaccagcuuaacauu

SEQ ID NO: 229453 - RNA, 19 nt, Artificial Sequence
  Description of Artificial Sequence: Synthetic oligonucleotide
  Antisense strand to SEQ ID NO: 229452
aauguuaagcugguuacac

SEQ ID NO: 229454 - RNA, 19 nt, Artificial Sequence
  Description of Artificial Sequence: Synthetic oligonucleotide
  Sense strand starting at position 579 of SEQ ID NO: 2953
auggcauuguuucuuauuu

SEQ ID NO: 229455 - RNA, 19 nt, Artificial Sequence
  Description of Artificial Sequence: Synthetic oligonucleotide
  Antisense strand to SEQ ID NO: 229454
aaauaagaaacaaugccau

SEQ ID NO: 229456 - RNA, 19 nt, Artificial Sequence
  Description of Artificial Sequence: Synthetic oligonucleotide
  Sense strand starting at position 580 of SEQ ID NO: 2953
uggcauuguuucuuauuua

SEQ ID NO: 229457 - RNA, 19 nt, Artificial Sequence
  Description of Artificial Sequence: Synthetic oligonucleotide
  Antisense strand to SEQ ID NO: 229456
uaaauaagaaacaaugcca

SEQ ID NO: 229458 - RNA, 19 nt, Artificial Sequence
  Description of Artificial Sequence: Synthetic oligonucleotide
  Sense strand starting at position 843 of SEQ ID NO: 2953
aaauuaucgccaugaaggu

SEQ ID NO: 229459 - RNA, 19 nt, Artificial Sequence
  Description of Artificial Sequence: Synthetic oligonucleotide
  Antisense strand to SEQ ID NO: 229458
accuucauggcgauaauuu

SEQ ID NO: 229460 - RNA, 19 nt, Artificial Sequence
  Description of Artificial Sequence: Synthetic oligonucleotide
  Sense strand starting at position 844 of SEQ ID NO: 2953
aauuaucgccaugaagguu

SEQ ID NO: 229461 - RNA, 19 nt, Artificial Sequence
  Description of Artificial Sequence: Synthetic oligonucleotide
  Antisense strand to SEQ ID NO: 229460
aaccuucauggcgauaauu

SEQ ID NO: 229462 - RNA, 19 nt, Artificial Sequence
  Description of Artificial Sequence: Synthetic oligonucleotide
  Sense strand starting at position 944 of SEQ ID NO: 2953
caaucugcccuugggagaa

SEQ ID NO: 229463 - RNA, 19 nt, Artificial Sequence
  Description of Artificial Sequence: Synthetic oligonucleotide
  Antisense strand to SEQ ID NO: 229462
uucucccaagggcagauug

SEQ ID NO: 229464 - RNA, 19 nt, Artificial Sequence
  Description of Artificial Sequence: Synthetic oligonucleotide
  Sense strand starting at position 959 of SEQ ID NO: 2953
agaaacaggugauuauguu

SEQ ID NO: 229465 - RNA, 19 nt, Artificial Sequence
  Description of Artificial Sequence: Synthetic oligonucleotide
  Antisense strand to SEQ ID NO: 229464
aacauaaucaccuguuucu

SEQ ID NO: 229466 - RNA, 19 nt, Artificial Sequence
  Description of Artificial Sequence: Synthetic oligonucleotide
  Sense strand starting at position 963 of SEQ ID NO: 2953
acaggugauuauguuaaau

SEQ ID NO: 229467 - RNA, 19 nt, Artificial Sequence
  Description of Artificial Sequence: Synthetic oligonucleotide
  Antisense strand to SEQ ID NO: 229466
auuuaacauaaucaccugu

SEQ ID NO: 229468 - RNA, 19 nt, Artificial Sequence
  Description of Artificial Sequence: Synthetic oligonucleotide
  Sense strand starting at position 973 of SEQ ID NO: 2953
auguuaaaugacugcuacu

SEQ ID NO: 229469 - RNA, 19 nt, Artificial Sequence
  Description of Artificial Sequence: Synthetic oligonucleotide
  Antisense strand to SEQ ID NO: 229468
aguagcagucauuuaacau

SEQ ID NO: 229470 - RNA, 19 nt, Artificial Sequence
  Description of Artificial Sequence: Synthetic oligonucleotide
  Sense strand starting at position 1179 of SEQ ID NO: 2953
aucucuaaccgccaggauu

SEQ ID NO: 229471 - RNA, 19 nt, Artificial Sequence
  Description of Artificial Sequence: Synthetic oligonucleotide
  Antisense strand to SEQ ID NO: 229470
aauccuggcgguuagagau

SEQ ID NO: 229472 - RNA, 19 nt, Artificial Sequence
  Description of Artificial Sequence: Synthetic oligonucleotide
  Sense strand starting at position 1198 of SEQ ID NO: 2953
aggacaggacucuguuaca

SEQ ID NO: 229473 - RNA, 19 nt, Artificial Sequence
  Description of Artificial Sequence: Synthetic oligonucleotide
  Antisense strand to SEQ ID NO: 229472
uguaacagaguccuguccu

SEQ ID NO: 229474 - RNA, 19 nt, Artificial Sequence
  Description of Artificial Sequence: Synthetic oligonucleotide
  Sense strand starting at position 1555 of SEQ ID NO: 2953
aguuguaguaagcauauca

SEQ ID NO: 229475 - RNA, 19 nt, Artificial Sequence
  Description of Artificial Sequence: Synthetic oligonucleotide
  Antisense strand to SEQ ID NO: 229474
ugauaugcuuacuacaacu

SEQ ID NO: 229476 - RNA, 19 nt, Artificial Sequence
  Description of Artificial Sequence: Synthetic oligonucleotide
  Sense strand starting at position 1608 of SEQ ID NO: 2953
ggucuauaucagggacaac

SEQ ID NO: 229477 - RNA, 19 nt, Artificial Sequence
  Description of Artificial Sequence: Synthetic oligonucleotide
  Antisense strand to SEQ ID NO: 229476
guugucccugauauagacc

SEQ ID NO: 229478 - RNA, 19 nt, Artificial Sequence
  Description of Artificial Sequence: Synthetic oligonucleotide
  Sense strand starting at position 1650 of SEQ ID NO: 2953
cucccuuguccuuggaaga

SEQ ID NO: 229479 - RNA, 19 nt, Artificial Sequence
  Description of Artificial Sequence: Synthetic oligonucleotide
  Antisense strand to SEQ ID NO: 229478
ucuuccaaggacaagggag

SEQ ID NO: 229480 - RNA, 19 nt, Artificial Sequence
  Description of Artificial Sequence: Synthetic oligonucleotide
  Sense strand starting at position 1784 of SEQ ID NO: 2953
acuuauuaugugcaagcua

SEQ ID NO: 229481 - RNA, 19 nt, Artificial Sequence
  Description of Artificial Sequence: Synthetic oligonucleotide
  Antisense strand to SEQ ID NO: 229480
uagcuugcacauaauaagu

SEQ ID NO: 229482 - RNA, 19 nt, Artificial Sequence
  Description of Artificial Sequence: Synthetic oligonucleotide
  Sense strand starting at position 1950 of SEQ ID NO: 2953
aagccuacugaugagaguu

SEQ ID NO: 229483 - RNA, 19 nt, Artificial Sequence
  Description of Artificial Sequence: Synthetic oligonucleotide
  Antisense strand to SEQ ID NO: 229482
aacucucaucaguaggcuu

SEQ ID NO: 229484 - RNA, 19 nt, Artificial Sequence
  Description of Artificial Sequence: Synthetic oligonucleotide
  Sense strand starting at position 2011 of SEQ ID NO: 2953
agauguuuccuuggaccag

SEQ ID NO: 229485 - RNA, 19 nt, Artificial Sequence
  Description of Artificial Sequence: Synthetic oligonucleotide
  Antisense strand to SEQ ID NO: 229484
cugguccaaggaaacaucu

SEQ ID NO: 229486 - RNA, 19 nt, Artificial Sequence
  Description of Artificial Sequence: Synthetic oligonucleotide
  Sense strand starting at position 2070 of SEQ ID NO: 2953
gacaguuguggccaggaga

SEQ ID NO: 229487 - RNA, 19 nt, Artificial Sequence
  Description of Artificial Sequence: Synthetic oligonucleotide
  Antisense strand to SEQ ID NO: 229486
ucuccuggccacaacuguc

SEQ ID NO: 229488 - RNA, 19 nt, Artificial Sequence
  Description of Artificial Sequence: Synthetic oligonucleotide
  Sense strand starting at position 2147 of SEQ ID NO: 2953
ugaggaugauguucuggga

SEQ ID NO: 229489 - RNA, 19 nt, Artificial Sequence
  Description of Artificial Sequence: Synthetic oligonucleotide
  Antisense strand to SEQ ID NO: 229488
ucccagaacaucauccuca

SEQ ID NO: 229490 - RNA, 19 nt, Artificial Sequence
  Description of Artificial Sequence: Synthetic oligonucleotide
  Sense strand starting at position 2166 of SEQ ID NO: 2953
gcguccucccaagaaauuc

SEQ ID NO: 229491 - RNA, 19 nt, Artificial Sequence
  Description of Artificial Sequence: Synthetic oligonucleotide
  Antisense strand to SEQ ID NO: 229490
gaauuucuugggaggacgc

SEQ ID NO: 229492 - RNA, 19 nt, Artificial Sequence
  Description of Artificial Sequence: Synthetic oligonucleotide
  Sense strand starting at position 2218 of SEQ ID NO: 2953
ggaaucauaugggagaaug

SEQ ID NO: 229493 - RNA, 19 nt, Artificial Sequence
  Description of Artificial Sequence: Synthetic oligonucleotide
  Antisense strand to SEQ ID NO: 229492
cauucucccauaugauucc

SEQ ID NO: 229494 - RNA, 19 nt, Artificial Sequence
  Description of Artificial Sequence: Synthetic oligonucleotide
  Sense strand starting at position 2281 of SEQ ID NO: 2953
uugugagauccuuagggca

SEQ ID NO: 229495 - RNA, 19 nt, Artificial Sequence
  Description of Artificial Sequence: Synthetic oligonucleotide
  Antisense strand to SEQ ID NO: 229494
ugcccuaaggaucucacaa

SEQ ID NO: 229496 - RNA, 19 nt, Artificial Sequence
  Description of Artificial Sequence: Synthetic oligonucleotide
  Sense strand starting at position 2353 of SEQ ID NO: 2953
auacauuagcuccaaaggu

SEQ ID NO: 229497 - RNA, 19 nt, Artificial Sequence
  Description of Artificial Sequence: Synthetic oligonucleotide
  Antisense strand to SEQ ID NO: 229496
accuuuggagcuaauguau

SEQ ID NO: 229498 - RNA, 19 nt, Artificial Sequence
  Description of Artificial Sequence: Synthetic oligonucleotide
  Sense strand starting at position 2789 of SEQ ID NO: 2953
agaugagucuauccaacua

SEQ ID NO: 229499 - RNA, 19 nt, Artificial Sequence
  Description of Artificial Sequence: Synthetic oligonucleotide
  Antisense strand to SEQ ID NO: 229498
uaguuggauagacucaucu

SEQ ID NO: 229500 - RNA, 19 nt, Artificial Sequence
  Description of Artificial Sequence: Synthetic oligonucleotide
  Sense strand starting at position 2847 of SEQ ID NO: 2953
guugucucccauuauuugu

SEQ ID NO: 229501 - RNA, 19 nt, Artificial Sequence
  Description of Artificial Sequence: Synthetic oligonucleotide
  Antisense strand to SEQ ID NO: 229500
acaaauaaugggagacaac

SEQ ID NO: 229502 - RNA, 19 nt, Artificial Sequence
  Description of Artificial Sequence: Synthetic oligonucleotide
  Sense strand starting at position 2878 of SEQ ID NO: 2953
cuuagaaaguauguuagaa

SEQ ID NO: 229503 - RNA, 19 nt, Artificial Sequence
  Description of Artificial Sequence: Synthetic oligonucleotide
  Antisense strand to SEQ ID NO: 229502
uucuaacauacuuucuaag

SEQ ID NO: 229504 - RNA, 19 nt, Artificial Sequence
  Description of Artificial Sequence: Synthetic oligonucleotide
  Sense strand starting at position 2882 of SEQ ID NO: 2953
gaaaguauguuagaauuug

SEQ ID NO: 229505 - RNA, 19 nt, Artificial Sequence
  Description of Artificial Sequence: Synthetic oligonucleotide
  Antisense strand to SEQ ID NO: 229504
caaauucuaacauacuuuc

SEQ ID NO: 229506 - RNA, 19 nt, Artificial Sequence
  Description of Artificial Sequence: Synthetic oligonucleotide
  Sense strand starting at position 3302 of SEQ ID NO: 2953
gcuaaaggacauuguacaa

SEQ ID NO: 229507 - RNA, 19 nt, Artificial Sequence
  Description of Artificial Sequence: Synthetic oligonucleotide
  Antisense strand to SEQ ID NO: 229506
uuguacaauguccuuuagc

SEQ ID NO: 229508 - RNA, 19 nt, Artificial Sequence
  Description of Artificial Sequence: Synthetic oligonucleotide
  Sense strand starting at position 3315 of SEQ ID NO: 2953
guacaaauguaaccauuau

SEQ ID NO: 229509 - RNA, 19 nt, Artificial Sequence
  Description of Artificial Sequence: Synthetic oligonucleotide
  Antisense strand to SEQ ID NO: 229508
auaaugguuacauuuguac

SEQ ID NO: 229510 - RNA, 19 nt, Artificial Sequence
  Description of Artificial Sequence: Synthetic oligonucleotide
  Sense strand starting at position 3452 of SEQ ID NO: 2953
aggcuaucuuagguccaga

SEQ ID NO: 229511 - RNA, 19 nt, Artificial Sequence
  Description of Artificial Sequence: Synthetic oligonucleotide
  Antisense strand to SEQ ID NO: 229510
ucuggaccuaagauagccu

SEQ ID NO: 229512 - RNA, 19 nt, Artificial Sequence
  Description of Artificial Sequence: Synthetic oligonucleotide
  Sense strand starting at position 3455 of SEQ ID NO: 2953
cuaucuuagguccagaauc

SEQ ID NO: 229513 - RNA, 19 nt, Artificial Sequence
  Description of Artificial Sequence: Synthetic oligonucleotide
  Antisense strand to SEQ ID NO: 229512
gauucuggaccuaagauag

SEQ ID NO: 229514 - RNA, 19 nt, Artificial Sequence
  Description of Artificial Sequence: Synthetic oligonucleotide
  Sense strand starting at position 3552 of SEQ ID NO: 2953
uggcuaagagauggucaca

SEQ ID NO: 229515 - RNA, 19 nt, Artificial Sequence
  Description of Artificial Sequence: Synthetic oligonucleotide
  Antisense strand to SEQ ID NO: 229514
ugugaccaucucuuagcca

SEQ ID NO: 229516 - RNA, 19 nt, Artificial Sequence
  Description of Artificial Sequence: Synthetic oligonucleotide
  Sense strand starting at position 3565 of SEQ ID NO: 2953
gucacagagcacugaauaa

SEQ ID NO: 229517 - RNA, 19 nt, Artificial Sequence
  Description of Artificial Sequence: Synthetic oligonucleotide
  Antisense strand to SEQ ID NO: 229516
uuauucagugcucugugac

SEQ ID NO: 229518 - RNA, 19 nt, Artificial Sequence
  Description of Artificial Sequence: Synthetic oligonucleotide
  Sense strand starting at position 3742 of SEQ ID NO: 2953
ucgaucaauugauugauca

SEQ ID NO: 229519 - RNA, 19 nt, Artificial Sequence
  Description of Artificial Sequence: Synthetic oligonucleotide
  Antisense strand to SEQ ID NO: 229518
ugaucaaucaauugaucga

SEQ ID NO: 229520 - RNA, 19 nt, Artificial Sequence
  Description of Artificial Sequence: Synthetic oligonucleotide
  Sense strand starting at position 3743 of SEQ ID NO: 2953
cgaucaauugauugaucaa

SEQ ID NO: 229521 - RNA, 19 nt, Artificial Sequence
  Description of Artificial Sequence: Synthetic oligonucleotide
  Antisense strand to SEQ ID NO: 229520
uugaucaaucaauugaucg

SEQ ID NO: 229522 - RNA, 19 nt, Artificial Sequence
  Description of Artificial Sequence: Synthetic oligonucleotide
  Sense strand starting at position 3813 of SEQ ID NO: 2953
auaugucugcuguugcauu

SEQ ID NO: 229523 - RNA, 19 nt, Artificial Sequence
  Description of Artificial Sequence: Synthetic oligonucleotide
  Antisense strand to SEQ ID NO: 229522
aaugcaacagcagacauau

SEQ ID NO: 229524 - RNA, 19 nt, Artificial Sequence
  Description of Artificial Sequence: Synthetic oligonucleotide
  Sense strand starting at position 3924 of SEQ ID NO: 2953
cagguauaagcuggacaca

SEQ ID NO: 229525 - RNA, 19 nt, Artificial Sequence
  Description of Artificial Sequence: Synthetic oligonucleotide
  Antisense strand to SEQ ID NO: 229524
uguguccagcuuauaccug

SEQ ID NO: 229526 - RNA, 19 nt, Artificial Sequence
  Description of Artificial Sequence: Synthetic oligonucleotide
  Sense strand starting at position 506 of SEQ ID NO: 2955
uccguuucugccugcaaca

SEQ ID NO: 229527 - RNA, 19 nt, Artificial Sequence
  Description of Artificial Sequence: Synthetic oligonucleotide
  Antisense strand to SEQ ID NO: 229526
uguugcaggcagaaacgga

SEQ ID NO: 229528 - RNA, 19 nt, Artificial Sequence
  Description of Artificial Sequence: Synthetic oligonucleotide
  Sense strand starting at position 507 of SEQ ID NO: 2955
ccguuucugccugcaacau

SEQ ID NO: 229529 - RNA, 19 nt, Artificial Sequence
  Description of Artificial Sequence: Synthetic oligonucleotide
  Antisense strand to SEQ ID NO: 229528
auguugcaggcagaaacgg

SEQ ID NO: 229530 - RNA, 19 nt, Artificial Sequence
  Description of Artificial Sequence: Synthetic oligonucleotide
  Sense strand starting at position 687 of SEQ ID NO: 2955
cucugcucauggucagaaa

SEQ ID NO: 229531 - RNA, 19 nt, Artificial Sequence
  Description of Artificial Sequence: Synthetic oligonucleotide
  Antisense strand to SEQ ID NO: 229530
uuucugaccaugagcagag

SEQ ID NO: 229532 - RNA, 19 nt, Artificial Sequence
  Description of Artificial Sequence: Synthetic oligonucleotide
  Sense strand starting at position 1158 of SEQ ID NO: 2955
guagaaacgauccggacaa

SEQ ID NO: 229533 - RNA, 19 nt, Artificial Sequence
  Description of Artificial Sequence: Synthetic oligonucleotide
  Antisense strand to SEQ ID NO: 229532
uuguccggaucguuucuac

SEQ ID NO: 229534 - RNA, 19 nt, Artificial Sequence
  Description of Artificial Sequence: Synthetic oligonucleotide
  Sense strand starting at position 1247 of SEQ ID NO: 2955
cacagugcuucuguaagga

SEQ ID NO: 229535 - RNA, 19 nt, Artificial Sequence
  Description of Artificial Sequence: Synthetic oligonucleotide
  Antisense strand to SEQ ID NO: 229534
uccuuacagaagcacugug

SEQ ID NO: 229536 - RNA, 19 nt, Artificial Sequence
  Description of Artificial Sequence: Synthetic oligonucleotide
  Sense strand starting at position 1257 of SEQ ID NO: 2955
cuguaaggaucccuuucua

SEQ ID NO: 229537 - RNA, 19 nt, Artificial Sequence
  Description of Artificial Sequence: Synthetic oligonucleotide
  Antisense strand to SEQ ID NO: 229536
uagaaagggauccuuacag

SEQ ID NO: 229538 - RNA, 19 nt, Artificial Sequence
  Description of Artificial Sequence: Synthetic oligonucleotide
  Sense strand starting at position 1324 of SEQ ID NO: 2955
gguccugauaucuggcaag

SEQ ID NO: 229539 - RNA, 19 nt, Artificial Sequence
  Description of Artificial Sequence: Synthetic oligonucleotide
  Antisense strand to SEQ ID NO: 229538
cuugccagauaucaggacc

SEQ ID NO: 229540 - RNA, 19 nt, Artificial Sequence
  Description of Artificial Sequence: Synthetic oligonucleotide
  Sense strand starting at position 1372 of SEQ ID NO: 2955
cagggaaggugauaagaaa

SEQ ID NO: 229541 - RNA, 19 nt, Artificial Sequence
  Description of Artificial Sequence: Synthetic oligonucleotide
  Antisense strand to SEQ ID NO: 229540
uuucuuaucaccuucccug

SEQ ID NO: 229542 - RNA, 19 nt, Artificial Sequence
  Description of Artificial Sequence: Synthetic oligonucleotide
  Sense strand starting at position 1398 of SEQ ID NO: 2955
agguguucuuggcucucaa

SEQ ID NO: 229543 - RNA, 19 nt, Artificial Sequence
  Description of Artificial Sequence: Synthetic oligonucleotide
  Antisense strand to SEQ ID NO: 229542
uugagagccaagaacaccu

SEQ ID NO: 229544 - RNA, 19 nt, Artificial Sequence
  Description of Artificial Sequence: Synthetic oligonucleotide
  Sense strand starting at position 1415 of SEQ ID NO: 2955
aagccuuugugcucugaga

SEQ ID NO: 229545 - RNA, 19 nt, Artificial Sequence
  Description of Artificial Sequence: Synthetic oligonucleotide
  Antisense strand to SEQ ID NO: 229544
ucucagagcacaaaggcuu

SEQ ID NO: 229546 - RNA, 19 nt, Artificial Sequence
  Description of Artificial Sequence: Synthetic oligonucleotide
  Sense strand starting at position 1447 of SEQ ID NO: 2955
gacgguaaccacugacuga

SEQ ID NO: 229547 - RNA, 19 nt, Artificial Sequence
  Description of Artificial Sequence: Synthetic oligonucleotide
  Antisense strand to SEQ ID NO: 229546
ucagucagugguuaccguc

SEQ ID NO: 229548 - RNA, 19 nt, Artificial Sequence
  Description of Artificial Sequence: Synthetic oligonucleotide
  Sense strand starting at position 2150 of SEQ ID NO: 2955
ggguauggccagcagagaa

SEQ ID NO: 229549 - RNA, 19 nt, Artificial Sequence
  Description of Artificial Sequence: Synthetic oligonucleotide
  Antisense strand to SEQ ID NO: 229548
uucucugcuggccauaccc

SEQ ID NO: 229550 - RNA, 19 nt, Artificial Sequence
  Description of Artificial Sequence: Synthetic oligonucleotide
  Sense strand starting at position 2332 of SEQ ID NO: 2955
cacagugugucugaaguaa

SEQ ID NO: 229551 - RNA, 19 nt, Artificial Sequence
  Description of Artificial Sequence: Synthetic oligonucleotide
  Antisense strand to SEQ ID NO: 229550
uuacuucagacacacugug

SEQ ID NO: 229552 - RNA, 19 nt, Artificial Sequence
  Description of Artificial Sequence: Synthetic oligonucleotide
  Sense strand starting at position 2358 of SEQ ID NO: 2955
ccaguaggucuacauguuu

SEQ ID NO: 229553 - RNA, 19 nt, Artificial Sequence
  Description of Artificial Sequence: Synthetic oligonucleotide
  Antisense strand to SEQ ID NO: 229552
aaacauguagaccuacugg

SEQ ID NO: 229554 - RNA, 19 nt, Artificial Sequence
  Description of Artificial Sequence: Synthetic oligonucleotide
  Sense strand starting at position 2371 of SEQ ID NO: 2955
auguuuggcuguguugaca

SEQ ID NO: 229555 - RNA, 19 nt, Artificial Sequence
  Description of Artificial Sequence: Synthetic oligonucleotide
  Antisense strand to SEQ ID NO: 229554
ugucaacacagccaaacau

SEQ ID NO: 229556 - RNA, 19 nt, Artificial Sequence
  Description of Artificial Sequence: Synthetic oligonucleotide
  Sense strand starting at position 2433 of SEQ ID NO: 2955
ccuggaggcuccuaggaau

SEQ ID NO: 229557 - RNA, 19 nt, Artificial Sequence
  Description of Artificial Sequence: Synthetic oligonucleotide
  Antisense strand to SEQ ID NO: 229556
auuccuaggagccuccagg

SEQ ID NO: 229558 - RNA, 19 nt, Artificial Sequence
  Description of Artificial Sequence: Synthetic oligonucleotide
  Sense strand starting at position 2624 of SEQ ID NO: 2955
uccagauuguucuggacaa

SEQ ID NO: 229559 - RNA, 19 nt, Artificial Sequence
  Description of Artificial Sequence: Synthetic oligonucleotide
  Antisense strand to SEQ ID NO: 229558
uuguccagaacaaucugga

SEQ ID NO: 229560 - RNA, 19 nt, Artificial Sequence
  Description of Artificial Sequence: Synthetic oligonucleotide
  Sense strand starting at position 2625 of SEQ ID NO: 2955
ccagauuguucuggacaau

SEQ ID NO: 229561 - RNA, 19 nt, Artificial Sequence
  Description of Artificial Sequence: Synthetic oligonucleotide
  Antisense strand to SEQ ID NO: 229560
auuguccagaacaaucugg

SEQ ID NO: 229562 - RNA, 19 nt, Artificial Sequence
  Description of Artificial Sequence: Synthetic oligonucleotide
  Sense strand starting at position 2645 of SEQ ID NO: 2955
cauaguucuucuuuaggga

SEQ ID NO: 229563 - RNA, 19 nt, Artificial Sequence
  Description of Artificial Sequence: Synthetic oligonucleotide
  Antisense strand to SEQ ID NO: 229562
ucccuaaagaagaacuaug

SEQ ID NO: 229564 - RNA, 19 nt, Artificial Sequence
  Description of Artificial Sequence: Synthetic oligonucleotide
  Sense strand starting at position 2648 of SEQ ID NO: 2955
aguucuucuuuagggaagu

SEQ ID NO: 229565 - RNA, 19 nt, Artificial Sequence
  Description of Artificial Sequence: Synthetic oligonucleotide
  Antisense strand to SEQ ID NO: 229564
acuucccuaaagaagaacu

SEQ ID NO: 229566 - RNA, 19 nt, Artificial Sequence
  Description of Artificial Sequence: Synthetic oligonucleotide
  Sense strand starting at position 2680 of SEQ ID NO: 2955
gccucuuccuggcagcaau

SEQ ID NO: 229567 - RNA, 19 nt, Artificial Sequence
  Description of Artificial Sequence: Synthetic oligonucleotide
  Antisense strand to SEQ ID NO: 229566
auugcugccaggaagaggc

SEQ ID NO: 229568 - RNA, 19 nt, Artificial Sequence
  Description of Artificial Sequence: Synthetic oligonucleotide
  Sense strand starting at position 2759 of SEQ ID NO: 2955
gcuggauuucugggcuaac

SEQ ID NO: 229569 - RNA, 19 nt, Artificial Sequence
  Description of Artificial Sequence: Synthetic oligonucleotide
  Antisense strand to SEQ ID NO: 229568
guuagcccagaaauccagc

SEQ ID NO: 229570 - RNA, 19 nt, Artificial Sequence
  Description of Artificial Sequence: Synthetic oligonucleotide
  Sense strand starting at position 2770 of SEQ ID NO: 2955
gggcuaacgcaucaucaca

SEQ ID NO: 229571 - RNA, 19 nt, Artificial Sequence
  Description of Artificial Sequence: Synthetic oligonucleotide
  Antisense strand to SEQ ID NO: 229570
ugugaugaugcguuagccc

SEQ ID NO: 229572 - RNA, 19 nt, Artificial Sequence
  Description of Artificial Sequence: Synthetic oligonucleotide
  Sense strand starting at position 2828 of SEQ ID NO: 2955
ccgacaggcucugucagau

SEQ ID NO: 229573 - RNA, 19 nt, Artificial Sequence
  Description of Artificial Sequence: Synthetic oligonucleotide
  Antisense strand to SEQ ID NO: 229572
aucugacagagccugucgg

SEQ ID NO: 229574 - RNA, 19 nt, Artificial Sequence
  Description of Artificial Sequence: Synthetic oligonucleotide
  Sense strand starting at position 2832 of SEQ ID NO: 2955
caggcucugucagaugacu

SEQ ID NO: 229575 - RNA, 19 nt, Artificial Sequence
  Description of Artificial Sequence: Synthetic oligonucleotide
  Antisense strand to SEQ ID NO: 229574
agucaucugacagagccug

SEQ ID NO: 229576 - RNA, 19 nt, Artificial Sequence
  Description of Artificial Sequence: Synthetic oligonucleotide
  Sense strand starting at position 2834 of SEQ ID NO: 2955
ggcucugucagaugacuuu

SEQ ID NO: 229577 - RNA, 19 nt, Artificial Sequence
  Description of Artificial Sequence: Synthetic oligonucleotide
  Antisense strand to SEQ ID NO: 229576
aaagucaucugacagagcc

SEQ ID NO: 229578 - RNA, 19 nt, Artificial Sequence
  Description of Artificial Sequence: Synthetic oligonucleotide
  Sense strand starting at position 2862 of SEQ ID NO: 2955
cgcagugcccacuagagaa

SEQ ID NO: 229579 - RNA, 19 nt, Artificial Sequence
  Description of Artificial Sequence: Synthetic oligonucleotide
  Antisense strand to SEQ ID NO: 229578
uucucuagugggcacugcg

SEQ ID NO: 229580 - RNA, 19 nt, Artificial Sequence
  Description of Artificial Sequence: Synthetic oligonucleotide
  Sense strand starting at position 187 of SEQ ID NO: 2956
auuaccuuacuucguaaga

SEQ ID NO: 229581 - RNA, 19 nt, Artificial Sequence
  Description of Artificial Sequence: Synthetic oligonucleotide
  Antisense strand to SEQ ID NO: 229580
ucuuacgaaguaagguaau

SEQ ID NO: 229582 - RNA, 19 nt, Artificial Sequence
  Description of Artificial Sequence: Synthetic oligonucleotide
  Sense strand starting at position 211 of SEQ ID NO: 2956
aggucaaauagcugagacu

SEQ ID NO: 229583 - RNA, 19 nt, Artificial Sequence
  Description of Artificial Sequence: Synthetic oligonucleotide
  Antisense strand to SEQ ID NO: 229582
agucucagcuauuugaccu

SEQ ID NO: 229584 - RNA, 19 nt, Artificial Sequence
  Description of Artificial Sequence: Synthetic oligonucleotide
  Sense strand starting at position 264 of SEQ ID NO: 2956
agauaauuaccugaaccgu

SEQ ID NO: 229585 - RNA, 19 nt, Artificial Sequence
  Description of Artificial Sequence: Synthetic oligonucleotide
  Antisense strand to SEQ ID NO: 229584
acgguucagguaauuaucu

SEQ ID NO: 229586 - RNA, 19 nt, Artificial Sequence
  Description of Artificial Sequence: Synthetic oligonucleotide
  Sense strand starting at position 270 of SEQ ID NO: 2956
uuaccugaaccguaacaga

SEQ ID NO: 229587 - RNA, 19 nt, Artificial Sequence
  Description of Artificial Sequence: Synthetic oligonucleotide
  Antisense strand to SEQ ID NO: 229586
ucuguuacgguucagguaa

SEQ ID NO: 229588 - RNA, 19 nt, Artificial Sequence
  Description of Artificial Sequence: Synthetic oligonucleotide
  Sense strand starting at position 396 of SEQ ID NO: 2956
uguauaaccuaagucauuc

SEQ ID NO: 229589 - RNA, 19 nt, Artificial Sequence
  Description of Artificial Sequence: Synthetic oligonucleotide
  Antisense strand to SEQ ID NO: 229588
gaaugacuuagguuauaca

SEQ ID NO: 229590 - RNA, 19 nt, Artificial Sequence
  Description of Artificial Sequence: Synthetic oligonucleotide
  Sense strand starting at position 575 of SEQ ID NO: 2956
ugauccaaugcuugggaau

SEQ ID NO: 229591 - RNA, 19 nt, Artificial Sequence
  Description of Artificial Sequence: Synthetic oligonucleotide
  Antisense strand to SEQ ID NO: 229590
auucccaagcauuggauca

SEQ ID NO: 229592 - RNA, 19 nt, Artificial Sequence
  Description of Artificial Sequence: Synthetic oligonucleotide
  Sense strand starting at position 576 of SEQ ID NO: 2956
gauccaaugcuugggaauu

SEQ ID NO: 229593 - RNA, 19 nt, Artificial Sequence
  Description of Artificial Sequence: Synthetic oligonucleotide
  Antisense strand to SEQ ID NO: 229592
aauucccaagcauuggauc

SEQ ID NO: 229594 - RNA, 19 nt, Artificial Sequence
  Description of Artificial Sequence: Synthetic oligonucleotide
  Sense strand starting at position 641 of SEQ ID NO: 2956
cccaaauugcuuuauagga

SEQ ID NO: 229595 - RNA, 19 nt, Artificial Sequence
  Description of Artificial Sequence: Synthetic oligonucleotide
  Antisense strand to SEQ ID NO: 229594
uccuauaaagcaauuuggg

SEQ ID NO: 229596 - RNA, 19 nt, Artificial Sequence
  Description of Artificial Sequence: Synthetic oligonucleotide
  Sense strand starting at position 649 of SEQ ID NO: 2956
gcuuuauaggaguauuauu

SEQ ID NO: 229597 - RNA, 19 nt, Artificial Sequence
  Description of Artificial Sequence: Synthetic oligonucleotide
  Antisense strand to SEQ ID NO: 229596
aauaauacuccuauaaagc

SEQ ID NO: 229598 - RNA, 19 nt, Artificial Sequence
  Description of Artificial Sequence: Synthetic oligonucleotide
  Sense strand starting at position 941 of SEQ ID NO: 2956
gggcgagauucuuucccaa

SEQ ID NO: 229599 - RNA, 19 nt, Artificial Sequence
  Description of Artificial Sequence: Synthetic oligonucleotide
  Antisense strand to SEQ ID NO: 229598
uugggaaagaaucucgccc

SEQ ID NO: 229600 - RNA, 19 nt, Artificial Sequence
  Description of Artificial Sequence: Synthetic oligonucleotide
  Sense strand starting at position 1128 of SEQ ID NO: 2956
guaucuuauuuggagggau

SEQ ID NO: 229601 - RNA, 19 nt, Artificial Sequence
  Description of Artificial Sequence: Synthetic oligonucleotide
  Antisense strand to SEQ ID NO: 229600
aucccuccaaauaagauac

SEQ ID NO: 229602 - RNA, 19 nt, Artificial Sequence
  Description of Artificial Sequence: Synthetic oligonucleotide
  Sense strand starting at position 1274 of SEQ ID NO: 2956
gaaauaacuucuccgggca

SEQ ID NO: 229603 - RNA, 19 nt, Artificial Sequence
  Description of Artificial Sequence: Synthetic oligonucleotide
  Antisense strand to SEQ ID NO: 229602
ugcccggagaaguuauuuc

SEQ ID NO: 229604 - RNA, 19 nt, Artificial Sequence
  Description of Artificial Sequence: Synthetic oligonucleotide
  Sense strand starting at position 1420 of SEQ ID NO: 2956
gaggcaaauggauggucaa

SEQ ID NO: 229605 - RNA, 19 nt, Artificial Sequence
  Description of Artificial Sequence: Synthetic oligonucleotide
  Antisense strand to SEQ ID NO: 229604
uugaccauccauuugccuc

SEQ ID NO: 229606 - RNA, 19 nt, Artificial Sequence
  Description of Artificial Sequence: Synthetic oligonucleotide
  Sense strand starting at position 1421 of SEQ ID NO: 2956
aggcaaauggauggucaaa

SEQ ID NO: 229607 - RNA, 19 nt, Artificial Sequence
  Description of Artificial Sequence: Synthetic oligonucleotide
  Antisense strand to SEQ ID NO: 229606
uuugaccauccauuugccu

SEQ ID NO: 229608 - RNA, 19 nt, Artificial Sequence
  Description of Artificial Sequence: Synthetic oligonucleotide
  Sense strand starting at position 1482 of SEQ ID NO: 2956
gggagugguauaggauuau

SEQ ID NO: 229609 - RNA, 19 nt, Artificial Sequence
  Description of Artificial Sequence: Synthetic oligonucleotide
  Antisense strand to SEQ ID NO: 229608
auaauccuauaccacuccc

SEQ ID NO: 229610 - RNA, 19 nt, Artificial Sequence
  Description of Artificial Sequence: Synthetic oligonucleotide
  Sense strand starting at position 1562 of SEQ ID NO: 2956
cccagauuucccuguugca

SEQ ID NO: 229611 - RNA, 19 nt, Artificial Sequence
  Description of Artificial Sequence: Synthetic oligonucleotide
  Antisense strand to SEQ ID NO: 229610
ugcaacagggaaaucuggg

SEQ ID NO: 229612 - RNA, 19 nt, Artificial Sequence
  Description of Artificial Sequence: Synthetic oligonucleotide
  Sense strand starting at position 2090 of SEQ ID NO: 2956
aggagugucuaggcucaaa

SEQ ID NO: 229613 - RNA, 19 nt, Artificial Sequence
  Description of Artificial Sequence: Synthetic oligonucleotide
  Antisense strand to SEQ ID NO: 229612
uuugagccuagacacuccu

SEQ ID NO: 229614 - RNA, 19 nt, Artificial Sequence
  Description of Artificial Sequence: Synthetic oligonucleotide
  Sense strand starting at position 2167 of SEQ ID NO: 2956
gggagcuugugaguuggaa

SEQ ID NO: 229615 - RNA, 19 nt, Artificial Sequence
  Description of Artificial Sequence: Synthetic oligonucleotide
  Antisense strand to SEQ ID NO: 229614
uuccaacucacaagcuccc

SEQ ID NO: 229616 - RNA, 19 nt, Artificial Sequence
  Description of Artificial Sequence: Synthetic oligonucleotide
  Sense strand starting at position 2169 of SEQ ID NO: 2956
gagcuugugaguuggaaag

SEQ ID NO: 229617 - RNA, 19 nt, Artificial Sequence
  Description of Artificial Sequence: Synthetic oligonucleotide
  Antisense strand to SEQ ID NO: 229616
cuuuccaacucacaagcuc

SEQ ID NO: 229618 - RNA, 19 nt, Artificial Sequence
  Description of Artificial Sequence: Synthetic oligonucleotide
  Sense strand starting at position 2253 of SEQ ID NO: 2956
uauugagagucuucgaauu

SEQ ID NO: 229619 - RNA, 19 nt, Artificial Sequence
  Description of Artificial Sequence: Synthetic oligonucleotide
  Antisense strand to SEQ ID NO: 229618
aauucgaagacucucaaua

SEQ ID NO: 229620 - RNA, 19 nt, Artificial Sequence
  Description of Artificial Sequence: Synthetic oligonucleotide
  Sense strand starting at position 2263 of SEQ ID NO: 2956
cuucgaauuucucaagaag

SEQ ID NO: 229621 - RNA, 19 nt, Artificial Sequence
  Description of Artificial Sequence: Synthetic oligonucleotide
  Antisense strand to SEQ ID NO: 229620
cuucuugagaaauucgaag

SEQ ID NO: 229622 - RNA, 19 nt, Artificial Sequence
  Description of Artificial Sequence: Synthetic oligonucleotide
  Sense strand starting at position 2305 of SEQ ID NO: 2956
agaugcuaugugcauagaa

SEQ ID NO: 229623 - RNA, 19 nt, Artificial Sequence
  Description of Artificial Sequence: Synthetic oligonucleotide
  Antisense strand to SEQ ID NO: 229622
uucuaugcacauagcaucu

SEQ ID NO: 229624 - RNA, 19 nt, Artificial Sequence
  Description of Artificial Sequence: Synthetic oligonucleotide
  Sense strand starting at position 2361 of SEQ ID NO: 2956
uuaagaguugcuggauaca

SEQ ID NO: 229625 - RNA, 19 nt, Artificial Sequence
  Description of Artificial Sequence: Synthetic oligonucleotide
  Antisense strand to SEQ ID NO: 229624
uguauccagcaacucuuaa

SEQ ID NO: 229626 - RNA, 19 nt, Artificial Sequence
  Description of Artificial Sequence: Synthetic oligonucleotide
  Sense strand starting at position 2455 of SEQ ID NO: 2956
uuuauaauagugcaugaga

SEQ ID NO: 229627 - RNA, 19 nt, Artificial Sequence
  Description of Artificial Sequence: Synthetic oligonucleotide
  Antisense strand to SEQ ID NO: 229626
ucucaugcacuauuauaaa

SEQ ID NO: 229628 - RNA, 19 nt, Artificial Sequence
  Description of Artificial Sequence: Synthetic oligonucleotide
  Sense strand starting at position 2457 of SEQ ID NO: 2956
uauaauagugcaugagaua

SEQ ID NO: 229629 - RNA, 19 nt, Artificial Sequence
  Description of Artificial Sequence: Synthetic oligonucleotide
  Antisense strand to SEQ ID NO: 229628
uaucucaugcacuauuaua

SEQ ID NO: 229630 - RNA, 19 nt, Artificial Sequence
  Description of Artificial Sequence: Synthetic oligonucleotide
  Sense strand starting at position 2494 of SEQ ID NO: 2956
guuaaagauuguccuuccu

SEQ ID NO: 229631 - RNA, 19 nt, Artificial Sequence
  Description of Artificial Sequence: Synthetic oligonucleotide
  Antisense strand to SEQ ID NO: 229630
aggaaggacaaucuuuaac

SEQ ID NO: 229632 - RNA, 19 nt, Artificial Sequence
  Description of Artificial Sequence: Synthetic oligonucleotide
  Sense strand starting at position 3096 of SEQ ID NO: 2956
auguucauggguugugaga

SEQ ID NO: 229633 - RNA, 19 nt, Artificial Sequence
  Description of Artificial Sequence: Synthetic oligonucleotide
  Antisense strand to SEQ ID NO: 229632
ucucacaacccaugaacau

SEQ ID NO: 229634 - RNA, 19 nt, Artificial Sequence
  Description of Artificial Sequence: Synthetic oligonucleotide
  Sense strand starting at position 3269 of SEQ ID NO: 2956
ucuugaagaucucucgaag

SEQ ID NO: 229635 - RNA, 19 nt, Artificial Sequence
  Description of Artificial Sequence: Synthetic oligonucleotide
  Antisense strand to SEQ ID NO: 229634
cuucgagagaucuucaaga

SEQ ID NO: 229636 - RNA, 19 nt, Artificial Sequence
  Description of Artificial Sequence: Synthetic oligonucleotide
  Sense strand starting at position 3300 of SEQ ID NO: 2956
ugauaucuaccagguauca

SEQ ID NO: 229637 - RNA, 19 nt, Artificial Sequence
  Description of Artificial Sequence: Synthetic oligonucleotide
  Antisense strand to SEQ ID NO: 229636
ugauaccugguagauauca

SEQ ID NO: 229638 - RNA, 19 nt, Artificial Sequence
  Description of Artificial Sequence: Synthetic oligonucleotide
  Sense strand starting at position 3322 of SEQ ID NO: 2956
cuuauaugguaauuaagac

SEQ ID NO: 229639 - RNA, 19 nt, Artificial Sequence
  Description of Artificial Sequence: Synthetic oligonucleotide
  Antisense strand to SEQ ID NO: 229638
gucuuaauuaccauauaag

SEQ ID NO: 229640 - RNA, 19 nt, Artificial Sequence
  Description of Artificial Sequence: Synthetic oligonucleotide
  Sense strand starting at position 3328 of SEQ ID NO: 2956
ugguaauuaagacaguguu

SEQ ID NO: 229641 - RNA, 19 nt, Artificial Sequence
  Description of Artificial Sequence: Synthetic oligonucleotide
  Antisense strand to SEQ ID NO: 229640
aacacugucuuaauuacca

SEQ ID NO: 229642 - RNA, 19 nt, Artificial Sequence
  Description of Artificial Sequence: Synthetic oligonucleotide
  Sense strand starting at position 3439 of SEQ ID NO: 2956
ccuucugagcaaugguaaa

SEQ ID NO: 229643 - RNA, 19 nt, Artificial Sequence
  Description of Artificial Sequence: Synthetic oligonucleotide
  Antisense strand to SEQ ID NO: 229642
uuuaccauugcucagaagg

SEQ ID NO: 229644 - RNA, 19 nt, Artificial Sequence
  Description of Artificial Sequence: Synthetic oligonucleotide
  Sense strand starting at position 3474 of SEQ ID NO: 2956
aauagugcuuggucuauuu

SEQ ID NO: 229645 - RNA, 19 nt, Artificial Sequence
  Description of Artificial Sequence: Synthetic oligonucleotide
  Antisense strand to SEQ ID NO: 229644
aaauagaccaagcacuauu

SEQ ID NO: 229646 - RNA, 19 nt, Artificial Sequence
  Description of Artificial Sequence: Synthetic oligonucleotide
  Sense strand starting at position 3545 of SEQ ID NO: 2956
ccaaaucaggugcauauau

SEQ ID NO: 229647 - RNA, 19 nt, Artificial Sequence
  Description of Artificial Sequence: Synthetic oligonucleotide
  Antisense strand to SEQ ID NO: 229646
auauaugcaccugauuugg

SEQ ID NO: 229648 - RNA, 19 nt, Artificial Sequence
  Description of Artificial Sequence: Synthetic oligonucleotide
  Sense strand starting at position 3654 of SEQ ID NO: 2956
ggucaccaggcauaauuau

SEQ ID NO: 229649 - RNA, 19 nt, Artificial Sequence
  Description of Artificial Sequence: Synthetic oligonucleotide
  Antisense strand to SEQ ID NO: 229648
auaauuaugccuggugacc

SEQ ID NO: 229650 - RNA, 19 nt, Artificial Sequence
  Description of Artificial Sequence: Synthetic oligonucleotide
  Sense strand starting at position 3691 of SEQ ID NO: 2956
uugauaauuugagaacuuc

SEQ ID NO: 229651 - RNA, 19 nt, Artificial Sequence
  Description of Artificial Sequence: Synthetic oligonucleotide
  Antisense strand to SEQ ID NO: 229650
gaaguucucaaauuaucaa

SEQ ID NO: 229652 - RNA, 19 nt, Artificial Sequence
  Description of Artificial Sequence: Synthetic oligonucleotide
  Sense strand starting at position 3699 of SEQ ID NO: 2956
uugagaacuucuguccauu

SEQ ID NO: 229653 - RNA, 19 nt, Artificial Sequence
  Description of Artificial Sequence: Synthetic oligonucleotide
  Antisense strand to SEQ ID NO: 229652
aauggacagaaguucucaa

SEQ ID NO: 229654 - RNA, 19 nt, Artificial Sequence
  Description of Artificial Sequence: Synthetic oligonucleotide
  Sense strand starting at position 3861 of SEQ ID NO: 2956
ggaugagacccuugagcag

SEQ ID NO: 229655 - RNA, 19 nt, Artificial Sequence
  Description of Artificial Sequence: Synthetic oligonucleotide
  Antisense strand to SEQ ID NO: 229654
cugcucaagggucucaucc

SEQ ID NO: 229656 - RNA, 19 nt, Artificial Sequence
  Description of Artificial Sequence: Synthetic oligonucleotide
  Sense strand starting at position 3959 of SEQ ID NO: 2956
accauaucagaauggcuaa

SEQ ID NO: 229657 - RNA, 19 nt, Artificial Sequence
  Description of Artificial Sequence: Synthetic oligonucleotide
  Antisense strand to SEQ ID NO: 229656
uuagccauucugauauggu

SEQ ID NO: 229658 - RNA, 19 nt, Artificial Sequence
  Description of Artificial Sequence: Synthetic oligonucleotide
  Sense strand starting at position 3962 of SEQ ID NO: 2956
auaucagaauggcuaaagu

SEQ ID NO: 229659 - RNA, 19 nt, Artificial Sequence
  Description of Artificial Sequence: Synthetic oligonucleotide
  Antisense strand to SEQ ID NO: 229658
acuuuagccauucugauau

SEQ ID NO: 229660 - RNA, 19 nt, Artificial Sequence
  Description of Artificial Sequence: Synthetic oligonucleotide
  Sense strand starting at position 53 of SEQ ID NO: 2957
cugguauaaucagccaaac

SEQ ID NO: 229661 - RNA, 19 nt, Artificial Sequence
  Description of Artificial Sequence: Synthetic oligonucleotide
  Antisense strand to SEQ ID NO: 229660
guuuggcugauuauaccag

SEQ ID NO: 229662 - RNA, 19 nt, Artificial Sequence
  Description of Artificial Sequence: Synthetic oligonucleotide
  Sense strand starting at position 215 of SEQ ID NO: 2957
agaugucuugugcaauaca

SEQ ID NO: 229663 - RNA, 19 nt, Artificial Sequence
  Description of Artificial Sequence: Synthetic oligonucleotide
  Antisense strand to SEQ ID NO: 229662
uguauugcacaagacaucu

SEQ ID NO: 229664 - RNA, 19 nt, Artificial Sequence
  Description of Artificial Sequence: Synthetic oligonucleotide
  Sense strand starting at position 218 of SEQ ID NO: 2957
ugucuugugcaauacagga

SEQ ID NO: 229665 - RNA, 19 nt, Artificial Sequence
  Description of Artificial Sequence: Synthetic oligonucleotide
  Antisense strand to SEQ ID NO: 229664
uccuguauugcacaagaca

SEQ ID NO: 229666 - RNA, 19 nt, Artificial Sequence
  Description of Artificial Sequence: Synthetic oligonucleotide
  Sense strand starting at position 316 of SEQ ID NO: 2957
cagacauugcuggauguca

SEQ ID NO: 229667 - RNA, 19 nt, Artificial Sequence
  Description of Artificial Sequence: Synthetic oligonucleotide
  Antisense strand to SEQ ID NO: 229666
ugacauccagcaaugucug

SEQ ID NO: 229668 - RNA, 19 nt, Artificial Sequence
  Description of Artificial Sequence: Synthetic oligonucleotide
  Sense strand starting at position 318 of SEQ ID NO: 2957
gacauugcuggaugucacu

SEQ ID NO: 229669 - RNA, 19 nt, Artificial Sequence
  Description of Artificial Sequence: Synthetic oligonucleotide
  Antisense strand to SEQ ID NO: 229668
agugacauccagcaauguc

SEQ ID NO: 229670 - RNA, 19 nt, Artificial Sequence
  Description of Artificial Sequence: Synthetic oligonucleotide
  Sense strand starting at position 325 of SEQ ID NO: 2957
cuggaugucacuugggaag

SEQ ID NO: 229671 - RNA, 19 nt, Artificial Sequence
  Description of Artificial Sequence: Synthetic oligonucleotide
  Antisense strand to SEQ ID NO: 229670
cuucccaagugacauccag

SEQ ID NO: 229672 - RNA, 19 nt, Artificial Sequence
  Description of Artificial Sequence: Synthetic oligonucleotide
  Sense strand starting at position 385 of SEQ ID NO: 2957
gcaucccugcuuuacagau

SEQ ID NO: 229673 - RNA, 19 nt, Artificial Sequence
  Description of Artificial Sequence: Synthetic oligonucleotide
  Antisense strand to SEQ ID NO: 229672
aucuguaaagcagggaugc

SEQ ID NO: 229674 - RNA, 19 nt, Artificial Sequence
  Description of Artificial Sequence: Synthetic oligonucleotide
  Sense strand starting at position 496 of SEQ ID NO: 2957
cuugacugccuuuauggaa

SEQ ID NO: 229675 - RNA, 19 nt, Artificial Sequence
  Description of Artificial Sequence: Synthetic oligonucleotide
  Antisense strand to SEQ ID NO: 229674
uuccauaaaggcagucaag

SEQ ID NO: 229676 - RNA, 19 nt, Artificial Sequence
  Description of Artificial Sequence: Synthetic oligonucleotide
  Sense strand starting at position 602 of SEQ ID NO: 2957
ggugaaaccucagugcuug

SEQ ID NO: 229677 - RNA, 19 nt, Artificial Sequence
  Description of Artificial Sequence: Synthetic oligonucleotide
  Antisense strand to SEQ ID NO: 229676
caagcacugagguuucacc

SEQ ID NO: 229678 - RNA, 19 nt, Artificial Sequence
  Description of Artificial Sequence: Synthetic oligonucleotide
  Sense strand starting at position 645 of SEQ ID NO: 2957
uaauaaguaguuuggguuu

SEQ ID NO: 229679 - RNA, 19 nt, Artificial Sequence
  Description of Artificial Sequence: Synthetic oligonucleotide
  Antisense strand to SEQ ID NO: 229678
aaacccaaacuacuuauua

SEQ ID NO: 229680 - RNA, 19 nt, Artificial Sequence
  Description of Artificial Sequence: Synthetic oligonucleotide
  Sense strand starting at position 648 of SEQ ID NO: 2957
uaaguaguuuggguuugaa

SEQ ID NO: 229681 - RNA, 19 nt, Artificial Sequence
  Description of Artificial Sequence: Synthetic oligonucleotide
  Antisense strand to SEQ ID NO: 229680
uucaaacccaaacuacuua

SEQ ID NO: 229682 - RNA, 19 nt, Artificial Sequence
  Description of Artificial Sequence: Synthetic oligonucleotide
  Sense strand starting at position 651 of SEQ ID NO: 2957
guaguuuggguuugaauau

SEQ ID NO: 229683 - RNA, 19 nt, Artificial Sequence
  Description of Artificial Sequence: Synthetic oligonucleotide
  Antisense strand to SEQ ID NO: 229682
auauucaaacccaaacuac

SEQ ID NO: 229684 - RNA, 19 nt, Artificial Sequence
  Description of Artificial Sequence: Synthetic oligonucleotide
  Sense strand starting at position 660 of SEQ ID NO: 2957
guuugaauauaaucaaggu

SEQ ID NO: 229685 - RNA, 19 nt, Artificial Sequence
  Description of Artificial Sequence: Synthetic oligonucleotide
  Antisense strand to SEQ ID NO: 229684
accuugauuauauucaaac

SEQ ID NO: 229686 - RNA, 19 nt, Artificial Sequence
  Description of Artificial Sequence: Synthetic oligonucleotide
  Sense strand starting at position 707 of SEQ ID NO: 2957
ucccuuguacuaugagaaa

SEQ ID NO: 229687 - RNA, 19 nt, Artificial Sequence
  Description of Artificial Sequence: Synthetic oligonucleotide
  Antisense strand to SEQ ID NO: 229686
uuucucauaguacaaggga

SEQ ID NO: 229688 - RNA, 19 nt, Artificial Sequence
  Description of Artificial Sequence: Synthetic oligonucleotide
  Sense strand starting at position 758 of SEQ ID NO: 2957
acgguucuugcucagacua

SEQ ID NO: 229689 - RNA, 19 nt, Artificial Sequence
  Description of Artificial Sequence: Synthetic oligonucleotide
  Antisense strand to SEQ ID NO: 229688
uagucugagcaagaaccgu

SEQ ID NO: 229690 - RNA, 19 nt, Artificial Sequence
  Description of Artificial Sequence: Synthetic oligonucleotide
  Sense strand starting at position 812 of SEQ ID NO: 2957
guaugugugguauagacca

SEQ ID NO: 229691 - RNA, 19 nt, Artificial Sequence
  Description of Artificial Sequence: Synthetic oligonucleotide
  Antisense strand to SEQ ID NO: 229690
uggucuauaccacacauac

SEQ ID NO: 229692 - RNA, 19 nt, Artificial Sequence
  Description of Artificial Sequence: Synthetic oligonucleotide
  Sense strand starting at position 909 of SEQ ID NO: 2957
ggguaagagucccuacaca

SEQ ID NO: 229693 - RNA, 19 nt, Artificial Sequence
  Description of Artificial Sequence: Synthetic oligonucleotide
  Antisense strand to SEQ ID NO: 229692
uguguagggacucuuaccc

SEQ ID NO: 229694 - RNA, 19 nt, Artificial Sequence
  Description of Artificial Sequence: Synthetic oligonucleotide
  Sense strand starting at position 1437 of SEQ ID NO: 2957
ggaguugagaguuguucua

SEQ ID NO: 229695 - RNA, 19 nt, Artificial Sequence
  Description of Artificial Sequence: Synthetic oligonucleotide
  Antisense strand to SEQ ID NO: 229694
uagaacaacucucaacucc

SEQ ID NO: 229696 - RNA, 19 nt, Artificial Sequence
  Description of Artificial Sequence: Synthetic oligonucleotide
  Sense strand starting at position 1439 of SEQ ID NO: 2957
aguugagaguuguucuauc

SEQ ID NO: 229697 - RNA, 19 nt, Artificial Sequence
  Description of Artificial Sequence: Synthetic oligonucleotide
  Antisense strand to SEQ ID NO: 229696
gauagaacaacucucaacu

SEQ ID NO: 229698 - RNA, 19 nt, Artificial Sequence
  Description of Artificial Sequence: Synthetic oligonucleotide
  Sense strand starting at position 1533 of SEQ ID NO: 2957
agcagaguucccuguggga

SEQ ID NO: 229699 - RNA, 19 nt, Artificial Sequence
  Description of Artificial Sequence: Synthetic oligonucleotide
  Antisense strand to SEQ ID NO: 229698
ucccacagggaacucugcu

SEQ ID NO: 229700 - RNA, 19 nt, Artificial Sequence
  Description of Artificial Sequence: Synthetic oligonucleotide
  Sense strand starting at position 1593 of SEQ ID NO: 2957
gcugcuucaggucagaagu

SEQ ID NO: 229701 - RNA, 19 nt, Artificial Sequence
  Description of Artificial Sequence: Synthetic oligonucleotide
  Antisense strand to SEQ ID NO: 229700
acuucugaccugaagcagc

SEQ ID NO: 229702 - RNA, 19 nt, Artificial Sequence
  Description of Artificial Sequence: Synthetic oligonucleotide
  Sense strand starting at position 2435 of SEQ ID NO: 2957
gaaguuaaagccugaugca

SEQ ID NO: 229703 - RNA, 19 nt, Artificial Sequence
  Description of Artificial Sequence: Synthetic oligonucleotide
  Antisense strand to SEQ ID NO: 229702
ugcaucaggcuuuaacuuc

SEQ ID NO: 229704 - RNA, 19 nt, Artificial Sequence
  Description of Artificial Sequence: Synthetic oligonucleotide
  Sense strand starting at position 2436 of SEQ ID NO: 2957
aaguuaaagccugaugcau

SEQ ID NO: 229705 - RNA, 19 nt, Artificial Sequence
  Description of Artificial Sequence: Synthetic oligonucleotide
  Antisense strand to SEQ ID NO: 229704
augcaucaggcuuuaacuu

SEQ ID NO: 229706 - RNA, 19 nt, Artificial Sequence
  Description of Artificial Sequence: Synthetic oligonucleotide
  Sense strand starting at position 2445 of SEQ ID NO: 2957
ccugaugcauaaucucgaa

SEQ ID NO: 229707 - RNA, 19 nt, Artificial Sequence
  Description of Artificial Sequence: Synthetic oligonucleotide
  Antisense strand to SEQ ID NO: 229706
uucgagauuaugcaucagg

SEQ ID NO: 229708 - RNA, 19 nt, Artificial Sequence
  Description of Artificial Sequence: Synthetic oligonucleotide
  Sense strand starting at position 2452 of SEQ ID NO: 2957
cauaaucucgaaggaaugu

SEQ ID NO: 229709 - RNA, 19 nt, Artificial Sequence
  Description of Artificial Sequence: Synthetic oligonucleotide
  Antisense strand to SEQ ID NO: 229708
acauuccuucgagauuaug

SEQ ID NO: 229710 - RNA, 19 nt, Artificial Sequence
  Description of Artificial Sequence: Synthetic oligonucleotide
  Sense strand starting at position 2615 of SEQ ID NO: 2957
gggacacccuguuccuaua

SEQ ID NO: 229711 - RNA, 19 nt, Artificial Sequence
  Description of Artificial Sequence: Synthetic oligonucleotide
  Antisense strand to SEQ ID NO: 229710
uauaggaacaggguguccc

SEQ ID NO: 229712 - RNA, 19 nt, Artificial Sequence
  Description of Artificial Sequence: Synthetic oligonucleotide
  Sense strand starting at position 2687 of SEQ ID NO: 2957
ucucuuaagagauggguca

SEQ ID NO: 229713 - RNA, 19 nt, Artificial Sequence
  Description of Artificial Sequence: Synthetic oligonucleotide
  Antisense strand to SEQ ID NO: 229712
ugacccaucucuuaagaga

SEQ ID NO: 229714 - RNA, 19 nt, Artificial Sequence
  Description of Artificial Sequence: Synthetic oligonucleotide
  Sense strand starting at position 2846 of SEQ ID NO: 2957
gugccaguccguuaggaaa

SEQ ID NO: 229715 - RNA, 19 nt, Artificial Sequence
  Description of Artificial Sequence: Synthetic oligonucleotide
  Antisense strand to SEQ ID NO: 229714
uuuccuaacggacuggcac

SEQ ID NO: 229716 - RNA, 19 nt, Artificial Sequence
  Description of Artificial Sequence: Synthetic oligonucleotide
  Sense strand starting at position 2886 of SEQ ID NO: 2957
gugugauggaacugacaag

SEQ ID NO: 229717 - RNA, 19 nt, Artificial Sequence
  Description of Artificial Sequence: Synthetic oligonucleotide
  Antisense strand to SEQ ID NO: 229716
cuugucaguuccaucacac

SEQ ID NO: 229718 - RNA, 19 nt, Artificial Sequence
  Description of Artificial Sequence: Synthetic oligonucleotide
  Sense strand starting at position 2995 of SEQ ID NO: 2957
ccacguggaugacuagaau

SEQ ID NO: 229719 - RNA, 19 nt, Artificial Sequence
  Description of Artificial Sequence: Synthetic oligonucleotide
  Antisense strand to SEQ ID NO: 229718
auucuagucauccacgugg

SEQ ID NO: 229720 - RNA, 19 nt, Artificial Sequence
  Description of Artificial Sequence: Synthetic oligonucleotide
  Sense strand starting at position 3164 of SEQ ID NO: 2957
ucaaaugugcauuagaauu

SEQ ID NO: 229721 - RNA, 19 nt, Artificial Sequence
  Description of Artificial Sequence: Synthetic oligonucleotide
  Antisense strand to SEQ ID NO: 229720
aauucuaaugcacauuuga

SEQ ID NO: 229722 - RNA, 19 nt, Artificial Sequence
  Description of Artificial Sequence: Synthetic oligonucleotide
  Sense strand starting at position 3209 of SEQ ID NO: 2957
acuguauauuaugcuguau

SEQ ID NO: 229723 - RNA, 19 nt, Artificial Sequence
  Description of Artificial Sequence: Synthetic oligonucleotide
  Antisense strand to SEQ ID NO: 229722
auacagcauaauauacagu

SEQ ID NO: 229724 - RNA, 19 nt, Artificial Sequence
  Description of Artificial Sequence: Synthetic oligonucleotide
  Sense strand starting at position 3223 of SEQ ID NO: 2957
uguauauuggacugauugu

SEQ ID NO: 229725 - RNA, 19 nt, Artificial Sequence
  Description of Artificial Sequence: Synthetic oligonucleotide
  Antisense strand to SEQ ID NO: 229724
acaaucaguccaauauaca

SEQ ID NO: 229726 - RNA, 19 nt, Artificial Sequence
  Description of Artificial Sequence: Synthetic oligonucleotide
  Sense strand starting at position 3224 of SEQ ID NO: 2957
guauauuggacugauugua

SEQ ID NO: 229727 - RNA, 19 nt, Artificial Sequence
  Description of Artificial Sequence: Synthetic oligonucleotide
  Antisense strand to SEQ ID NO: 229726
uacaaucaguccaauauac

SEQ ID NO: 229728 - RNA, 19 nt, Artificial Sequence
  Description of Artificial Sequence: Synthetic oligonucleotide
  Sense strand starting at position 3538 of SEQ ID NO: 2957
aggcaacuggucugguaga

SEQ ID NO: 229729 - RNA, 19 nt, Artificial Sequence
  Description of Artificial Sequence: Synthetic oligonucleotide
  Antisense strand to SEQ ID NO: 229728
ucuaccagaccaguugccu

SEQ ID NO: 229730 - RNA, 19 nt, Artificial Sequence
  Description of Artificial Sequence: Synthetic oligonucleotide
  Sense strand starting at position 3831 of SEQ ID NO: 2957
ggcacagcccuguacgaau

SEQ ID NO: 229731 - RNA, 19 nt, Artificial Sequence
  Description of Artificial Sequence: Synthetic oligonucleotide
  Antisense strand to SEQ ID NO: 229730
auucguacagggcugugcc

SEQ ID NO: 229732 - RNA, 19 nt, Artificial Sequence
  Description of Artificial Sequence: Synthetic oligonucleotide
  Sense strand starting at position 3861 of SEQ ID NO: 2957
gagguuugugugccgagua

SEQ ID NO: 229733 - RNA, 19 nt, Artificial Sequence
  Description of Artificial Sequence: Synthetic oligonucleotide
  Antisense strand to SEQ ID NO: 229732
uacucggcacacaaaccuc

SEQ ID NO: 229734 - RNA, 19 nt, Artificial Sequence
  Description of Artificial Sequence: Synthetic oligonucleotide
  Sense strand starting at position 3864 of SEQ ID NO: 2957
guuugugugccgaguacag

SEQ ID NO: 229735 - RNA, 19 nt, Artificial Sequence
  Description of Artificial Sequence: Synthetic oligonucleotide
  Antisense strand to SEQ ID NO: 229734
cuguacucggcacacaaac

SEQ ID NO: 229736 - RNA, 19 nt, Artificial Sequence
  Description of Artificial Sequence: Synthetic oligonucleotide
  Sense strand starting at position 3893 of SEQ ID NO: 2957
acaaucagugcucaguaaa

SEQ ID NO: 229737 - RNA, 19 nt, Artificial Sequence
  Description of Artificial Sequence: Synthetic oligonucleotide
  Antisense strand to SEQ ID NO: 229736
uuuacugagcacugauugu

SEQ ID NO: 229738 - RNA, 19 nt, Artificial Sequence
  Description of Artificial Sequence: Synthetic oligonucleotide
  Sense strand starting at position 3974 of SEQ ID NO: 2957
agcacagacuuucuauaga

SEQ ID NO: 229739 - RNA, 19 nt, Artificial Sequence
  Description of Artificial Sequence: Synthetic oligonucleotide
  Antisense strand to SEQ ID NO: 229738
ucuauagaaagucugugcu

SEQ ID NO: 229740 - RNA, 19 nt, Artificial Sequence
  Description of Artificial Sequence: Synthetic oligonucleotide
  Sense strand starting at position 103 of SEQ ID NO: 2958
aacacaucugauggaguuu

SEQ ID NO: 229741 - RNA, 19 nt, Artificial Sequence
  Description of Artificial Sequence: Synthetic oligonucleotide
  Antisense strand to SEQ ID NO: 229740
aaacuccaucagauguguu

SEQ ID NO: 229742 - RNA, 19 nt, Artificial Sequence
  Description of Artificial Sequence: Synthetic oligonucleotide
  Sense strand starting at position 116 of SEQ ID NO: 2958
gaguuugggaucuacugua

SEQ ID NO: 229743 - RNA, 19 nt, Artificial Sequence
  Description of Artificial Sequence: Synthetic oligonucleotide
  Antisense strand to SEQ ID NO: 229742
uacaguagaucccaaacuc

SEQ ID NO: 229744 - RNA, 19 nt, Artificial Sequence
  Description of Artificial Sequence: Synthetic oligonucleotide
  Sense strand starting at position 121 of SEQ ID NO: 2958
ugggaucuacuguagaugu

SEQ ID NO: 229745 - RNA, 19 nt, Artificial Sequence
  Description of Artificial Sequence: Synthetic oligonucleotide
  Antisense strand to SEQ ID NO: 229744
acaucuacaguagauccca

SEQ ID NO: 229746 - RNA, 19 nt, Artificial Sequence
  Description of Artificial Sequence: Synthetic oligonucleotide
  Sense strand starting at position 235 of SEQ ID NO: 2958
guuaaauuagcagguuuga

SEQ ID NO: 229747 - RNA, 19 nt, Artificial Sequence
  Description of Artificial Sequence: Synthetic oligonucleotide
  Antisense strand to SEQ ID NO: 229746
ucaaaccugcuaauuuaac

SEQ ID NO: 229748 - RNA, 19 nt, Artificial Sequence
  Description of Artificial Sequence: Synthetic oligonucleotide
  Sense strand starting at position 289 of SEQ ID NO: 2958
uuaaauggcuugcuauacu

SEQ ID NO: 229749 - RNA, 19 nt, Artificial Sequence
  Description of Artificial Sequence: Synthetic oligonucleotide
  Antisense strand to SEQ ID NO: 229748
aguauagcaagccauuuaa

SEQ ID NO: 229750 - RNA, 19 nt, Artificial Sequence
  Description of Artificial Sequence: Synthetic oligonucleotide
  Sense strand starting at position 298 of SEQ ID NO: 2958
uugcuauacuucccagaag

SEQ ID NO: 229751 - RNA, 19 nt, Artificial Sequence
  Description of Artificial Sequence: Synthetic oligonucleotide
  Antisense strand to SEQ ID NO: 229750
cuucugggaaguauagcaa

SEQ ID NO: 229752 - RNA, 19 nt, Artificial Sequence
  Description of Artificial Sequence: Synthetic oligonucleotide
  Sense strand starting at position 316 of SEQ ID NO: 2958
gcauaagguuuacuuguaa

SEQ ID NO: 229753 - RNA, 19 nt, Artificial Sequence
  Description of Artificial Sequence: Synthetic oligonucleotide
  Antisense strand to SEQ ID NO: 229752
uuacaaguaaaccuuaugc

SEQ ID NO: 229754 - RNA, 19 nt, Artificial Sequence
  Description of Artificial Sequence: Synthetic oligonucleotide
  Sense strand starting at position 328 of SEQ ID NO: 2958
cuuguaaugagaugugcag

SEQ ID NO: 229755 - RNA, 19 nt, Artificial Sequence
  Description of Artificial Sequence: Synthetic oligonucleotide
  Antisense strand to SEQ ID NO: 229754
cugcacaucucauuacaag

SEQ ID NO: 229756 - RNA, 19 nt, Artificial Sequence
  Description of Artificial Sequence: Synthetic oligonucleotide
  Sense strand starting at position 708 of SEQ ID NO: 2958
uggacccauuucuagauau

SEQ ID NO: 229757 - RNA, 19 nt, Artificial Sequence
  Description of Artificial Sequence: Synthetic oligonucleotide
  Antisense strand to SEQ ID NO: 229756
auaucuagaaaugggucca

SEQ ID NO: 229758 - RNA, 19 nt, Artificial Sequence
  Description of Artificial Sequence: Synthetic oligonucleotide
  Sense strand starting at position 807 of SEQ ID NO: 2958
agugauuucugagauguua

SEQ ID NO: 229759 - RNA, 19 nt, Artificial Sequence
  Description of Artificial Sequence: Synthetic oligonucleotide
  Antisense strand to SEQ ID NO: 229758
uaacaucucagaaaucacu

SEQ ID NO: 229760 - RNA, 19 nt, Artificial Sequence
  Description of Artificial Sequence: Synthetic oligonucleotide
  Sense strand starting at position 1134 of SEQ ID NO: 2958
uugguugaugagcacuuaa

SEQ ID NO: 229761 - RNA, 19 nt, Artificial Sequence
  Description of Artificial Sequence: Synthetic oligonucleotide
  Antisense strand to SEQ ID NO: 229760
uuaagugcucaucaaccaa

SEQ ID NO: 229762 - RNA, 19 nt, Artificial Sequence
  Description of Artificial Sequence: Synthetic oligonucleotide
  Sense strand starting at position 1145 of SEQ ID NO: 2958
gcacuuaaauaugcaaaga

SEQ ID NO: 229763 - RNA, 19 nt, Artificial Sequence
  Description of Artificial Sequence: Synthetic oligonucleotide
  Antisense strand to SEQ ID NO: 229762
ucuuugcauauuuaagugc

SEQ ID NO: 229764 - RNA, 19 nt, Artificial Sequence
  Description of Artificial Sequence: Synthetic oligonucleotide
  Sense strand starting at position 1208 of SEQ ID NO: 2958
cuauaaacauguguugcau

SEQ ID NO: 229765 - RNA, 19 nt, Artificial Sequence
  Description of Artificial Sequence: Synthetic oligonucleotide
  Antisense strand to SEQ ID NO: 229764
augcaacacauguuuauag

SEQ ID NO: 229766 - RNA, 19 nt, Artificial Sequence
  Description of Artificial Sequence: Synthetic oligonucleotide
  Sense strand starting at position 1316 of SEQ ID NO: 2958
uuuaaagaaucuccguacu

SEQ ID NO: 229767 - RNA, 19 nt, Artificial Sequence
  Description of Artificial Sequence: Synthetic oligonucleotide
  Antisense strand to SEQ ID NO: 229766
aguacggagauucuuuaaa

SEQ ID NO: 229768 - RNA, 19 nt, Artificial Sequence
  Description of Artificial Sequence: Synthetic oligonucleotide
  Sense strand starting at position 1318 of SEQ ID NO: 2958
uaaagaaucuccguacugu

SEQ ID NO: 229769 - RNA, 19 nt, Artificial Sequence
  Description of Artificial Sequence: Synthetic oligonucleotide
  Antisense strand to SEQ ID NO: 229768
acaguacggagauucuuua

SEQ ID NO: 229770 - RNA, 19 nt, Artificial Sequence
  Description of Artificial Sequence: Synthetic oligonucleotide
  Sense strand starting at position 1319 of SEQ ID NO: 2958
aaagaaucuccguacuguu

SEQ ID NO: 229771 - RNA, 19 nt, Artificial Sequence
  Description of Artificial Sequence: Synthetic oligonucleotide
  Antisense strand to SEQ ID NO: 229770
aacaguacggagauucuuu

SEQ ID NO: 229772 - RNA, 19 nt, Artificial Sequence
  Description of Artificial Sequence: Synthetic oligonucleotide
  Sense strand starting at position 1388 of SEQ ID NO: 2958
cguccaugccaacauauau

SEQ ID NO: 229773 - RNA, 19 nt, Artificial Sequence
  Description of Artificial Sequence: Synthetic oligonucleotide
  Antisense strand to SEQ ID NO: 229772
auauauguuggcauggacg

SEQ ID NO: 229774 - RNA, 19 nt, Artificial Sequence
  Description of Artificial Sequence: Synthetic oligonucleotide
  Sense strand starting at position 1746 of SEQ ID NO: 2958
ccuccuaccuuugugauca

SEQ ID NO: 229775 - RNA, 19 nt, Artificial Sequence
  Description of Artificial Sequence: Synthetic oligonucleotide
  Antisense strand to SEQ ID NO: 229774
ugaucacaaagguaggagg

SEQ ID NO: 229776 - RNA, 19 nt, Artificial Sequence
  Description of Artificial Sequence: Synthetic oligonucleotide
  Sense strand starting at position 1813 of SEQ ID NO: 2958
aucuguucgcaucacuaaa

SEQ ID NO: 229777 - RNA, 19 nt, Artificial Sequence
  Description of Artificial Sequence: Synthetic oligonucleotide
  Antisense strand to SEQ ID NO: 229776
uuuagugaugcgaacagau

SEQ ID NO: 229778 - RNA, 19 nt, Artificial Sequence
  Description of Artificial Sequence: Synthetic oligonucleotide
  Sense strand starting at position 1902 of SEQ ID NO: 2958
agggucagccgcuacauau

SEQ ID NO: 229779 - RNA, 19 nt, Artificial Sequence
  Description of Artificial Sequence: Synthetic oligonucleotide
  Antisense strand to SEQ ID NO: 229778
auauguagcggcugacccu

SEQ ID NO: 229780 - RNA, 19 nt, Artificial Sequence
  Description of Artificial Sequence: Synthetic oligonucleotide
  Sense strand starting at position 2010 of SEQ ID NO: 2958
uccuguaccuuuguacaga

SEQ ID NO: 229781 - RNA, 19 nt, Artificial Sequence
  Description of Artificial Sequence: Synthetic oligonucleotide
  Antisense strand to SEQ ID NO: 229780
ucuguacaaagguacagga

SEQ ID NO: 229782 - RNA, 19 nt, Artificial Sequence
  Description of Artificial Sequence: Synthetic oligonucleotide
  Sense strand starting at position 2098 of SEQ ID NO: 2958
ugagcaauucugggaagcu

SEQ ID NO: 229783 - RNA, 19 nt, Artificial Sequence
  Description of Artificial Sequence: Synthetic oligonucleotide
  Antisense strand to SEQ ID NO: 229782
agcuucccagaauugcuca

SEQ ID NO: 229784 - RNA, 19 nt, Artificial Sequence
  Description of Artificial Sequence: Synthetic oligonucleotide
  Sense strand starting at position 2283 of SEQ ID NO: 2958
acaugauuagggugcaaga

SEQ ID NO: 229785 - RNA, 19 nt, Artificial Sequence
  Description of Artificial Sequence: Synthetic oligonucleotide
  Antisense strand to SEQ ID NO: 229784
ucuugcacccuaaucaugu

SEQ ID NO: 229786 - RNA, 19 nt, Artificial Sequence
  Description of Artificial Sequence: Synthetic oligonucleotide
  Sense strand starting at position 2792 of SEQ ID NO: 2958
aucacagagcagcaugauu

SEQ ID NO: 229787 - RNA, 19 nt, Artificial Sequence
  Description of Artificial Sequence: Synthetic oligonucleotide
  Antisense strand to SEQ ID NO: 229786
aaucaugcugcucugugau

SEQ ID NO: 229788 - RNA, 19 nt, Artificial Sequence
  Description of Artificial Sequence: Synthetic oligonucleotide
  Sense strand starting at position 2800 of SEQ ID NO: 2958
gcagcaugauucuccucaa

SEQ ID NO: 229789 - RNA, 19 nt, Artificial Sequence
  Description of Artificial Sequence: Synthetic oligonucleotide
  Antisense strand to SEQ ID NO: 229788
uugaggagaaucaugcugc

SEQ ID NO: 229790 - RNA, 19 nt, Artificial Sequence
  Description of Artificial Sequence: Synthetic oligonucleotide
  Sense strand starting at position 2803 of SEQ ID NO: 2958
gcaugauucuccucaaggu

SEQ ID NO: 229791 - RNA, 19 nt, Artificial Sequence
  Description of Artificial Sequence: Synthetic oligonucleotide
  Antisense strand to SEQ ID NO: 229790
accuugaggagaaucaugc

SEQ ID NO: 229792 - RNA, 19 nt, Artificial Sequence
  Description of Artificial Sequence: Synthetic oligonucleotide
  Sense strand starting at position 2948 of SEQ ID NO: 2958
agaguacccucagugaaga

SEQ ID NO: 229793 - RNA, 19 nt, Artificial Sequence
  Description of Artificial Sequence: Synthetic oligonucleotide
  Antisense strand to SEQ ID NO: 229792
ucuucacugaggguacucu

SEQ ID NO: 229794 - RNA, 19 nt, Artificial Sequence
  Description of Artificial Sequence: Synthetic oligonucleotide
  Sense strand starting at position 2949 of SEQ ID NO: 2958
gaguacccucagugaagaa

SEQ ID NO: 229795 - RNA, 19 nt, Artificial Sequence
  Description of Artificial Sequence: Synthetic oligonucleotide
  Antisense strand to SEQ ID NO: 229794
uucuucacugaggguacuc

SEQ ID NO: 229796 - RNA, 19 nt, Artificial Sequence
  Description of Artificial Sequence: Synthetic oligonucleotide
  Sense strand starting at position 2976 of SEQ ID NO: 2958
auagguaaauaucucgaua

SEQ ID NO: 229797 - RNA, 19 nt, Artificial Sequence
  Description of Artificial Sequence: Synthetic oligonucleotide
  Antisense strand to SEQ ID NO: 229796
uaucgagauauuuaccuau

SEQ ID NO: 229798 - RNA, 19 nt, Artificial Sequence
  Description of Artificial Sequence: Synthetic oligonucleotide
  Sense strand starting at position 3082 of SEQ ID NO: 2958
uggaauugcucucccaaag

SEQ ID NO: 229799 - RNA, 19 nt, Artificial Sequence
  Description of Artificial Sequence: Synthetic oligonucleotide
  Antisense strand to SEQ ID NO: 229798
cuuugggagagcaauucca

SEQ ID NO: 229800 - RNA, 19 nt, Artificial Sequence
  Description of Artificial Sequence: Synthetic oligonucleotide
  Sense strand starting at position 3390 of SEQ ID NO: 2958
auagaaguuacaggucaug

SEQ ID NO: 229801 - RNA, 19 nt, Artificial Sequence
  Description of Artificial Sequence: Synthetic oligonucleotide
  Antisense strand to SEQ ID NO: 229800
caugaccuguaacuucuau

SEQ ID NO: 229802 - RNA, 19 nt, Artificial Sequence
  Description of Artificial Sequence: Synthetic oligonucleotide
  Sense strand starting at position 3501 of SEQ ID NO: 2958
auguaacuuuguuccaaga

SEQ ID NO: 229803 - RNA, 19 nt, Artificial Sequence
  Description of Artificial Sequence: Synthetic oligonucleotide
  Antisense strand to SEQ ID NO: 229802
ucuuggaacaaaguuacau

SEQ ID NO: 229804 - RNA, 19 nt, Artificial Sequence
  Description of Artificial Sequence: Synthetic oligonucleotide
  Sense strand starting at position 3568 of SEQ ID NO: 2958
cuugaagcccucuggaaau

SEQ ID NO: 229805 - RNA, 19 nt, Artificial Sequence
  Description of Artificial Sequence: Synthetic oligonucleotide
  Antisense strand to SEQ ID NO: 229804
auuuccagagggcuucaag

SEQ ID NO: 229806 - RNA, 19 nt, Artificial Sequence
  Description of Artificial Sequence: Synthetic oligonucleotide
  Sense strand starting at position 3695 of SEQ ID NO: 2958
gagcaugaggccuguggaa

SEQ ID NO: 229807 - RNA, 19 nt, Artificial Sequence
  Description of Artificial Sequence: Synthetic oligonucleotide
  Antisense strand to SEQ ID NO: 229806
uuccacaggccucaugcuc

SEQ ID NO: 229808 - RNA, 19 nt, Artificial Sequence
  Description of Artificial Sequence: Synthetic oligonucleotide
  Sense strand starting at position 3726 of SEQ ID NO: 2958
gacgucggugugaaguuua

SEQ ID NO: 229809 - RNA, 19 nt, Artificial Sequence
  Description of Artificial Sequence: Synthetic oligonucleotide
  Antisense strand to SEQ ID NO: 229808
uaaacuucacaccgacguc

SEQ ID NO: 229810 - RNA, 19 nt, Artificial Sequence
  Description of Artificial Sequence: Synthetic oligonucleotide
  Sense strand starting at position 3731 of SEQ ID NO: 2958
cggugugaaguuuaauuac

SEQ ID NO: 229811 - RNA, 19 nt, Artificial Sequence
  Description of Artificial Sequence: Synthetic oligonucleotide
  Antisense strand to SEQ ID NO: 229810
guaauuaaacuucacaccg

SEQ ID NO: 229812 - RNA, 19 nt, Artificial Sequence
  Description of Artificial Sequence: Synthetic oligonucleotide
  Sense strand starting at position 3886 of SEQ ID NO: 2958
aaagcucaaguggguuaau

SEQ ID NO: 229813 - RNA, 19 nt, Artificial Sequence
  Description of Artificial Sequence: Synthetic oligonucleotide
  Antisense strand to SEQ ID NO: 229812
auuaacccacuugagcuuu

SEQ ID NO: 229814 - RNA, 19 nt, Artificial Sequence
  Description of Artificial Sequence: Synthetic oligonucleotide
  Sense strand starting at position 3889 of SEQ ID NO: 2958
gcucaaguggguuaauguu

SEQ ID NO: 229815 - RNA, 19 nt, Artificial Sequence
  Description of Artificial Sequence: Synthetic oligonucleotide
  Antisense strand to SEQ ID NO: 229814
aacauuaacccacuugagc

SEQ ID NO: 229816 - RNA, 19 nt, Artificial Sequence
  Description of Artificial Sequence: Synthetic oligonucleotide
  Sense strand starting at position 3896 of SEQ ID NO: 2958
uggguuaauguuuagcuuu

SEQ ID NO: 229817 - RNA, 19 nt, Artificial Sequence
  Description of Artificial Sequence: Synthetic oligonucleotide
  Antisense strand to SEQ ID NO: 229816
aaagcuaaacauuaaccca

SEQ ID NO: 229818 - RNA, 19 nt, Artificial Sequence
  Description of Artificial Sequence: Synthetic oligonucleotide
  Sense strand starting at position 3976 of SEQ ID NO: 2958
gggaguuuauggcucaagu

SEQ ID NO: 229819 - RNA, 19 nt, Artificial Sequence
  Description of Artificial Sequence: Synthetic oligonucleotide
  Antisense strand to SEQ ID NO: 229818
acuugagccauaaacuccc

SEQ ID NO: 229820 - RNA, 19 nt, Artificial Sequence
  Description of Artificial Sequence: Synthetic oligonucleotide
  Sense strand starting at position 50 of SEQ ID NO: 2959
uucgguggccgggaaauaa

SEQ ID NO: 229821 - RNA, 19 nt, Artificial Sequence
  Description of Artificial Sequence: Synthetic oligonucleotide
  Antisense strand to SEQ ID NO: 229820
uuauuucccggccaccgaa

SEQ ID NO: 229822 - RNA, 19 nt, Artificial Sequence
  Description of Artificial Sequence: Synthetic oligonucleotide
  Sense strand starting at position 74 of SEQ ID NO: 2959
ccaauuccuuuggugacua

SEQ ID NO: 229823 - RNA, 19 nt, Artificial Sequence
  Description of Artificial Sequence: Synthetic oligonucleotide
  Antisense strand to SEQ ID NO: 229822
uagucaccaaaggaauugg

SEQ ID NO: 229824 - RNA, 19 nt, Artificial Sequence
  Description of Artificial Sequence: Synthetic oligonucleotide
  Sense strand starting at position 275 of SEQ ID NO: 2959
acacauaguucucccggua

SEQ ID NO: 229825 - RNA, 19 nt, Artificial Sequence
  Description of Artificial Sequence: Synthetic oligonucleotide
  Antisense strand to SEQ ID NO: 229824
uaccgggagaacuaugugu

SEQ ID NO: 229826 - RNA, 19 nt, Artificial Sequence
  Description of Artificial Sequence: Synthetic oligonucleotide
  Sense strand starting at position 278 of SEQ ID NO: 2959
cauaguucucccgguagaa

SEQ ID NO: 229827 - RNA, 19 nt, Artificial Sequence
  Description of Artificial Sequence: Synthetic oligonucleotide
  Antisense strand to SEQ ID NO: 229826
uucuaccgggagaacuaug

SEQ ID NO: 229828 - RNA, 19 nt, Artificial Sequence
  Description of Artificial Sequence: Synthetic oligonucleotide
  Sense strand starting at position 280 of SEQ ID NO: 2959
uaguucucccgguagaacu

SEQ ID NO: 229829 - RNA, 19 nt, Artificial Sequence
  Description of Artificial Sequence: Synthetic oligonucleotide
  Antisense strand to SEQ ID NO: 229828
aguucuaccgggagaacua

SEQ ID NO: 229830 - RNA, 19 nt, Artificial Sequence
  Description of Artificial Sequence: Synthetic oligonucleotide
  Sense strand starting at position 585 of SEQ ID NO: 2959
agucgcugccggaauugau

SEQ ID NO: 229831 - RNA, 19 nt, Artificial Sequence
  Description of Artificial Sequence: Synthetic oligonucleotide
  Antisense strand to SEQ ID NO: 229830
aucaauuccggcagcgacu

SEQ ID NO: 229832 - RNA, 19 nt, Artificial Sequence
  Description of Artificial Sequence: Synthetic oligonucleotide
  Sense strand starting at position 607 of SEQ ID NO: 2959
gucugucaugcuuacaaau

SEQ ID NO: 229833 - RNA, 19 nt, Artificial Sequence
  Description of Artificial Sequence: Synthetic oligonucleotide
  Antisense strand to SEQ ID NO: 229832
auuuguaagcaugacagac

SEQ ID NO: 229834 - RNA, 19 nt, Artificial Sequence
  Description of Artificial Sequence: Synthetic oligonucleotide
  Sense strand starting at position 623 of SEQ ID NO: 2959
aauugcugccguuaaugga

SEQ ID NO: 229835 - RNA, 19 nt, Artificial Sequence
  Description of Artificial Sequence: Synthetic oligonucleotide
  Antisense strand to SEQ ID NO: 229834
uccauuaacggcagcaauu

SEQ ID NO: 229836 - RNA, 19 nt, Artificial Sequence
  Description of Artificial Sequence: Synthetic oligonucleotide
  Sense strand starting at position 1037 of SEQ ID NO: 2959
agaguaguugcccagggua

SEQ ID NO: 229837 - RNA, 19 nt, Artificial Sequence
  Description of Artificial Sequence: Synthetic oligonucleotide
  Antisense strand to SEQ ID NO: 229836
uacccugggcaacuacucu

SEQ ID NO: 229838 - RNA, 19 nt, Artificial Sequence
  Description of Artificial Sequence: Synthetic oligonucleotide
  Sense strand starting at position 1580 of SEQ ID NO: 2959
gguugaacaaagugucuau

SEQ ID NO: 229839 - RNA, 19 nt, Artificial Sequence
  Description of Artificial Sequence: Synthetic oligonucleotide
  Antisense strand to SEQ ID NO: 229838
auagacacuuuguucaacc

SEQ ID NO: 229840 - RNA, 19 nt, Artificial Sequence
  Description of Artificial Sequence: Synthetic oligonucleotide
  Sense strand starting at position 1589 of SEQ ID NO: 2959
aagugucuauuucgaauuu

SEQ ID NO: 229841 - RNA, 19 nt, Artificial Sequence
  Description of Artificial Sequence: Synthetic oligonucleotide
  Antisense strand to SEQ ID NO: 229840
aaauucgaaauagacacuu

SEQ ID NO: 229842 - RNA, 19 nt, Artificial Sequence
  Description of Artificial Sequence: Synthetic oligonucleotide
  Sense strand starting at position 1844 of SEQ ID NO: 2959
ccugcugucccguccuaau

SEQ ID NO: 229843 - RNA, 19 nt, Artificial Sequence
  Description of Artificial Sequence: Synthetic oligonucleotide
  Antisense strand to SEQ ID NO: 229842
auuaggacgggacagcagg

SEQ ID NO: 229844 - RNA, 19 nt, Artificial Sequence
  Description of Artificial Sequence: Synthetic oligonucleotide
  Sense strand starting at position 1900 of SEQ ID NO: 2959
agcgaacgccucuaaauau

SEQ ID NO: 229845 - RNA, 19 nt, Artificial Sequence
  Description of Artificial Sequence: Synthetic oligonucleotide
  Antisense strand to SEQ ID NO: 229844
auauuuagaggcguucgcu

SEQ ID NO: 229846 - RNA, 19 nt, Artificial Sequence
  Description of Artificial Sequence: Synthetic oligonucleotide
  Sense strand starting at position 2000 of SEQ ID NO: 2959
uuccgaucccgagauguca

SEQ ID NO: 229847 - RNA, 19 nt, Artificial Sequence
  Description of Artificial Sequence: Synthetic oligonucleotide
  Antisense strand to SEQ ID NO: 229846
ugacaucucgggaucggaa

SEQ ID NO: 229848 - RNA, 19 nt, Artificial Sequence
  Description of Artificial Sequence: Synthetic oligonucleotide
  Sense strand starting at position 2041 of SEQ ID NO: 2959
ucgucauuaagguacgaau

SEQ ID NO: 229849 - RNA, 19 nt, Artificial Sequence
  Description of Artificial Sequence: Synthetic oligonucleotide
  Antisense strand to SEQ ID NO: 229848
auucguaccuuaaugacga

SEQ ID NO: 229850 - RNA, 19 nt, Artificial Sequence
  Description of Artificial Sequence: Synthetic oligonucleotide
  Sense strand starting at position 2043 of SEQ ID NO: 2959
gucauuaagguacgaauga

SEQ ID NO: 229851 - RNA, 19 nt, Artificial Sequence
  Description of Artificial Sequence: Synthetic oligonucleotide
  Antisense strand to SEQ ID NO: 229850
ucauucguaccuuaaugac

SEQ ID NO: 229852 - RNA, 19 nt, Artificial Sequence
  Description of Artificial Sequence: Synthetic oligonucleotide
  Sense strand starting at position 2088 of SEQ ID NO: 2959
acagguuuauaagcaaaua

SEQ ID NO: 229853 - RNA, 19 nt, Artificial Sequence
  Description of Artificial Sequence: Synthetic oligonucleotide
  Antisense strand to SEQ ID NO: 229852
uauuugcuuauaaaccugu

SEQ ID NO: 229854 - RNA, 19 nt, Artificial Sequence
  Description of Artificial Sequence: Synthetic oligonucleotide
  Sense strand starting at position 2116 of SEQ ID NO: 2959
uccugucaguggguaauga

SEQ ID NO: 229855 - RNA, 19 nt, Artificial Sequence
  Description of Artificial Sequence: Synthetic oligonucleotide
  Antisense strand to SEQ ID NO: 229854
ucauuacccacugacagga

SEQ ID NO: 229856 - RNA, 19 nt, Artificial Sequence
  Description of Artificial Sequence: Synthetic oligonucleotide
  Sense strand starting at position 2117 of SEQ ID NO: 2959
ccugucaguggguaaugaa

SEQ ID NO: 229857 - RNA, 19 nt, Artificial Sequence
  Description of Artificial Sequence: Synthetic oligonucleotide
  Antisense strand to SEQ ID NO: 229856
uucauuacccacugacagg

SEQ ID NO: 229858 - RNA, 19 nt, Artificial Sequence
  Description of Artificial Sequence: Synthetic oligonucleotide
  Sense strand starting at position 2264 of SEQ ID NO: 2959
uugacagucugauuaauag

SEQ ID NO: 229859 - RNA, 19 nt, Artificial Sequence
  Description of Artificial Sequence: Synthetic oligonucleotide
  Antisense strand to SEQ ID NO: 229858
cuauuaaucagacugucaa

SEQ ID NO: 229860 - RNA, 19 nt, Artificial Sequence
  Description of Artificial Sequence: Synthetic oligonucleotide
  Sense strand starting at position 2324 of SEQ ID NO: 2959
uuacgcucucaguuugcua

SEQ ID NO: 229861 - RNA, 19 nt, Artificial Sequence
  Description of Artificial Sequence: Synthetic oligonucleotide
  Antisense strand to SEQ ID NO: 229860
uagcaaacugagagcguaa

SEQ ID NO: 229862 - RNA, 19 nt, Artificial Sequence
  Description of Artificial Sequence: Synthetic oligonucleotide
  Sense strand starting at position 2390 of SEQ ID NO: 2959
uggacacagauacguauua

SEQ ID NO: 229863 - RNA, 19 nt, Artificial Sequence
  Description of Artificial Sequence: Synthetic oligonucleotide
  Antisense strand to SEQ ID NO: 229862
uaauacguaucugugucca

SEQ ID NO: 229864 - RNA, 19 nt, Artificial Sequence
  Description of Artificial Sequence: Synthetic oligonucleotide
  Sense strand starting at position 2391 of SEQ ID NO: 2959
ggacacagauacguauuaa

SEQ ID NO: 229865 - RNA, 19 nt, Artificial Sequence
  Description of Artificial Sequence: Synthetic oligonucleotide
  Antisense strand to SEQ ID NO: 229864
uuaauacguaucugugucc

SEQ ID NO: 229866 - RNA, 19 nt, Artificial Sequence
  Description of Artificial Sequence: Synthetic oligonucleotide
  Sense strand starting at position 2412 of SEQ ID NO: 2959
aauagauaaugguuugacu

SEQ ID NO: 229867 - RNA, 19 nt, Artificial Sequence
  Description of Artificial Sequence: Synthetic oligonucleotide
  Antisense strand to SEQ ID NO: 229866
agucaaaccauuaucuauu

SEQ ID NO: 229868 - RNA, 19 nt, Artificial Sequence
  Description of Artificial Sequence: Synthetic oligonucleotide
  Sense strand starting at position 2414 of SEQ ID NO: 2959
uagauaaugguuugacuuu

SEQ ID NO: 229869 - RNA, 19 nt, Artificial Sequence
  Description of Artificial Sequence: Synthetic oligonucleotide
  Antisense strand to SEQ ID NO: 229868
aaagucaaaccauuaucua

SEQ ID NO: 229870 - RNA, 19 nt, Artificial Sequence
  Description of Artificial Sequence: Synthetic oligonucleotide
  Sense strand starting at position 2421 of SEQ ID NO: 2959
ugguuugacuuuccagagu

SEQ ID NO: 229871 - RNA, 19 nt, Artificial Sequence
  Description of Artificial Sequence: Synthetic oligonucleotide
  Antisense strand to SEQ ID NO: 229870
acucuggaaagucaaacca

SEQ ID NO: 229872 - RNA, 19 nt, Artificial Sequence
  Description of Artificial Sequence: Synthetic oligonucleotide
  Sense strand starting at position 2434 of SEQ ID NO: 2959
cagaguagguccucgggaa

SEQ ID NO: 229873 - RNA, 19 nt, Artificial Sequence
  Description of Artificial Sequence: Synthetic oligonucleotide
  Antisense strand to SEQ ID NO: 229872
uucccgaggaccuacucug

SEQ ID NO: 229874 - RNA, 19 nt, Artificial Sequence
  Description of Artificial Sequence: Synthetic oligonucleotide
  Sense strand starting at position 2438 of SEQ ID NO: 2959
guagguccucgggaagguu

SEQ ID NO: 229875 - RNA, 19 nt, Artificial Sequence
  Description of Artificial Sequence: Synthetic oligonucleotide
  Antisense strand to SEQ ID NO: 229874
aaccuucccgaggaccuac

SEQ ID NO: 229876 - RNA, 19 nt, Artificial Sequence
  Description of Artificial Sequence: Synthetic oligonucleotide
  Sense strand starting at position 2540 of SEQ ID NO: 2959
ggaagaguugcguaaggag

SEQ ID NO: 229877 - RNA, 19 nt, Artificial Sequence
  Description of Artificial Sequence: Synthetic oligonucleotide
  Antisense strand to SEQ ID NO: 229876
cuccuuacgcaacucuucc

SEQ ID NO: 229878 - RNA, 19 nt, Artificial Sequence
  Description of Artificial Sequence: Synthetic oligonucleotide
  Sense strand starting at position 2583 of SEQ ID NO: 2959
gauuacuuaucuuucggau

SEQ ID NO: 229879 - RNA, 19 nt, Artificial Sequence
  Description of Artificial Sequence: Synthetic oligonucleotide
  Antisense strand to SEQ ID NO: 229878
auccgaaagauaaguaauc

SEQ ID NO: 229880 - RNA, 19 nt, Artificial Sequence
  Description of Artificial Sequence: Synthetic oligonucleotide
  Sense strand starting at position 2643 of SEQ ID NO: 2959
ggaguucuuucccucccua

SEQ ID NO: 229881 - RNA, 19 nt, Artificial Sequence
  Description of Artificial Sequence: Synthetic oligonucleotide
  Antisense strand to SEQ ID NO: 229880
uagggagggaaagaacucc

SEQ ID NO: 229882 - RNA, 19 nt, Artificial Sequence
  Description of Artificial Sequence: Synthetic oligonucleotide
  Sense strand starting at position 2877 of SEQ ID NO: 2959
aucauuagguccucucuga

SEQ ID NO: 229883 - RNA, 19 nt, Artificial Sequence
  Description of Artificial Sequence: Synthetic oligonucleotide
  Antisense strand to SEQ ID NO: 229882
ucagagaggaccuaaugau

SEQ ID NO: 229884 - RNA, 19 nt, Artificial Sequence
  Description of Artificial Sequence: Synthetic oligonucleotide
  Sense strand starting at position 3020 of SEQ ID NO: 2959
acgauuugauagcagaauu

SEQ ID NO: 229885 - RNA, 19 nt, Artificial Sequence
  Description of Artificial Sequence: Synthetic oligonucleotide
  Antisense strand to SEQ ID NO: 229884
aauucugcuaucaaaucgu

SEQ ID NO: 229886 - RNA, 19 nt, Artificial Sequence
  Description of Artificial Sequence: Synthetic oligonucleotide
  Sense strand starting at position 3030 of SEQ ID NO: 2959
agcagaauucgacagcuaa

SEQ ID NO: 229887 - RNA, 19 nt, Artificial Sequence
  Description of Artificial Sequence: Synthetic oligonucleotide
  Antisense strand to SEQ ID NO: 229886
uuagcugucgaauucugcu

SEQ ID NO: 229888 - RNA, 19 nt, Artificial Sequence
  Description of Artificial Sequence: Synthetic oligonucleotide
  Sense strand starting at position 3037 of SEQ ID NO: 2959
uucgacagcuaacuuuaaa

SEQ ID NO: 229889 - RNA, 19 nt, Artificial Sequence
  Description of Artificial Sequence: Synthetic oligonucleotide
  Antisense strand to SEQ ID NO: 229888
uuuaaaguuagcugucgaa

SEQ ID NO: 229890 - RNA, 19 nt, Artificial Sequence
  Description of Artificial Sequence: Synthetic oligonucleotide
  Sense strand starting at position 3382 of SEQ ID NO: 2959
uggcgacaacuuugauagu

SEQ ID NO: 229891 - RNA, 19 nt, Artificial Sequence
  Description of Artificial Sequence: Synthetic oligonucleotide
  Antisense strand to SEQ ID NO: 229890
acuaucaaaguugucgcca

SEQ ID NO: 229892 - RNA, 19 nt, Artificial Sequence
  Description of Artificial Sequence: Synthetic oligonucleotide
  Sense strand starting at position 3534 of SEQ ID NO: 2959
gagagauucgcggacacag

SEQ ID NO: 229893 - RNA, 19 nt, Artificial Sequence
  Description of Artificial Sequence: Synthetic oligonucleotide
  Antisense strand to SEQ ID NO: 229892
cuguguccgcgaaucucuc

SEQ ID NO: 229894 - RNA, 19 nt, Artificial Sequence
  Description of Artificial Sequence: Synthetic oligonucleotide
  Sense strand starting at position 3741 of SEQ ID NO: 2959
gggcaagcucgagaucuau

SEQ ID NO: 229895 - RNA, 19 nt, Artificial Sequence
  Description of Artificial Sequence: Synthetic oligonucleotide
  Antisense strand to SEQ ID NO: 229894
auagaucucgagcuugccc

SEQ ID NO: 229896 - RNA, 19 nt, Artificial Sequence
  Description of Artificial Sequence: Synthetic oligonucleotide
  Sense strand starting at position 3747 of SEQ ID NO: 2959
gcucgagaucuauucgccu

SEQ ID NO: 229897 - RNA, 19 nt, Artificial Sequence
  Description of Artificial Sequence: Synthetic oligonucleotide
  Antisense strand to SEQ ID NO: 229896
aggcgaauagaucucgagc

SEQ ID NO: 229898 - RNA, 19 nt, Artificial Sequence
  Description of Artificial Sequence: Synthetic oligonucleotide
  Sense strand starting at position 3751 of SEQ ID NO: 2959
gagaucuauucgccuauag

SEQ ID NO: 229899 - RNA, 19 nt, Artificial Sequence
  Description of Artificial Sequence: Synthetic oligonucleotide
  Antisense strand to SEQ ID NO: 229898
cuauaggcgaauagaucuc

SEQ ID NO: 229900 - RNA, 19 nt, Artificial Sequence
  Description of Artificial Sequence: Synthetic oligonucleotide
  Sense strand starting at position 2 of SEQ ID NO: 2960
uguggaagaacugguccaa

SEQ ID NO: 229901 - RNA, 19 nt, Artificial Sequence
  Description of Artificial Sequence: Synthetic oligonucleotide
  Antisense strand to SEQ ID NO: 229900
uuggaccaguucuuccaca

SEQ ID NO: 229902 - RNA, 19 nt, Artificial Sequence
  Description of Artificial Sequence: Synthetic oligonucleotide
  Sense strand starting at position 443 of SEQ ID NO: 2960
gugguacuggcagaaaugu

SEQ ID NO: 229903 - RNA, 19 nt, Artificial Sequence
  Description of Artificial Sequence: Synthetic oligonucleotide
  Antisense strand to SEQ ID NO: 229902
acauuucugccaguaccac

SEQ ID NO: 229904 - RNA, 19 nt, Artificial Sequence
  Description of Artificial Sequence: Synthetic oligonucleotide
  Sense strand starting at position 533 of SEQ ID NO: 2960
uuagucuuuccugagucaa

SEQ ID NO: 229905 - RNA, 19 nt, Artificial Sequence
  Description of Artificial Sequence: Synthetic oligonucleotide
  Antisense strand to SEQ ID NO: 229904
uugacucaggaaagacuaa

SEQ ID NO: 229906 - RNA, 19 nt, Artificial Sequence
  Description of Artificial Sequence: Synthetic oligonucleotide
  Sense strand starting at position 627 of SEQ ID NO: 2960
aggguaggauaguuaucua

SEQ ID NO: 229907 - RNA, 19 nt, Artificial Sequence
  Description of Artificial Sequence: Synthetic oligonucleotide
  Antisense strand to SEQ ID NO: 229906
uagauaacuauccuacccu

SEQ ID NO: 229908 - RNA, 19 nt, Artificial Sequence
  Description of Artificial Sequence: Synthetic oligonucleotide
  Sense strand starting at position 631 of SEQ ID NO: 2960
uaggauaguuaucuaugua

SEQ ID NO: 229909 - RNA, 19 nt, Artificial Sequence
  Description of Artificial Sequence: Synthetic oligonucleotide
  Antisense strand to SEQ ID NO: 229908
uacauagauaacuauccua

SEQ ID NO: 229910 - RNA, 19 nt, Artificial Sequence
  Description of Artificial Sequence: Synthetic oligonucleotide
  Sense strand starting at position 634 of SEQ ID NO: 2960
gauaguuaucuauguauug

SEQ ID NO: 229911 - RNA, 19 nt, Artificial Sequence
  Description of Artificial Sequence: Synthetic oligonucleotide
  Antisense strand to SEQ ID NO: 229910
caauacauagauaacuauc

SEQ ID NO: 229912 - RNA, 19 nt, Artificial Sequence
  Description of Artificial Sequence: Synthetic oligonucleotide
  Sense strand starting at position 656 of SEQ ID NO: 2960
gcaugaucagaaugcauaa

SEQ ID NO: 229913 - RNA, 19 nt, Artificial Sequence
  Description of Artificial Sequence: Synthetic oligonucleotide
  Antisense strand to SEQ ID NO: 229912
uuaugcauucugaucaugc

SEQ ID NO: 229914 - RNA, 19 nt, Artificial Sequence
  Description of Artificial Sequence: Synthetic oligonucleotide
  Sense strand starting at position 682 of SEQ ID NO: 2960
ggauaaggaugaguugguu

SEQ ID NO: 229915 - RNA, 19 nt, Artificial Sequence
  Description of Artificial Sequence: Synthetic oligonucleotide
  Antisense strand to SEQ ID NO: 229914
aaccaacucauccuuaucc

SEQ ID NO: 229916 - RNA, 19 nt, Artificial Sequence
  Description of Artificial Sequence: Synthetic oligonucleotide
  Sense strand starting at position 685 of SEQ ID NO: 2960
uaaggaugaguugguucua

SEQ ID NO: 229917 - RNA, 19 nt, Artificial Sequence
  Description of Artificial Sequence: Synthetic oligonucleotide
  Antisense strand to SEQ ID NO: 229916
uagaaccaacucauccuua

SEQ ID NO: 229918 - RNA, 19 nt, Artificial Sequence
  Description of Artificial Sequence: Synthetic oligonucleotide
  Sense strand starting at position 833 of SEQ ID NO: 2960
aggcuauccgaguaggaau

SEQ ID NO: 229919 - RNA, 19 nt, Artificial Sequence
  Description of Artificial Sequence: Synthetic oligonucleotide
  Antisense strand to SEQ ID NO: 229918
auuccuacucggauagccu

SEQ ID NO: 229920 - RNA, 19 nt, Artificial Sequence
  Description of Artificial Sequence: Synthetic oligonucleotide
  Sense strand starting at position 1002 of SEQ ID NO: 2960
cuuggacuuuauguaacaa

SEQ ID NO: 229921 - RNA, 19 nt, Artificial Sequence
  Description of Artificial Sequence: Synthetic oligonucleotide
  Antisense strand to SEQ ID NO: 229920
uuguuacauaaaguccaag

SEQ ID NO: 229922 - RNA, 19 nt, Artificial Sequence
  Description of Artificial Sequence: Synthetic oligonucleotide
  Sense strand starting at position 1035 of SEQ ID NO: 2960
uguuaaauaaguugaggua

SEQ ID NO: 229923 - RNA, 19 nt, Artificial Sequence
  Description of Artificial Sequence: Synthetic oligonucleotide
  Antisense strand to SEQ ID NO: 229922
uaccucaacuuauuuaaca

SEQ ID NO: 229924 - RNA, 19 nt, Artificial Sequence
  Description of Artificial Sequence: Synthetic oligonucleotide
  Sense strand starting at position 1172 of SEQ ID NO: 2960
gcgagggucguccucguaa

SEQ ID NO: 229925 - RNA, 19 nt, Artificial Sequence
  Description of Artificial Sequence: Synthetic oligonucleotide
  Antisense strand to SEQ ID NO: 229924
uuacgaggacgacccucgc

SEQ ID NO: 229926 - RNA, 19 nt, Artificial Sequence
  Description of Artificial Sequence: Synthetic oligonucleotide
  Sense strand starting at position 1273 of SEQ ID NO: 2960
agggacucguuucugagaa

SEQ ID NO: 229927 - RNA, 19 nt, Artificial Sequence
  Description of Artificial Sequence: Synthetic oligonucleotide
  Antisense strand to SEQ ID NO: 229926
uucucagaaacgagucccu

SEQ ID NO: 229928 - RNA, 19 nt, Artificial Sequence
  Description of Artificial Sequence: Synthetic oligonucleotide
  Sense strand starting at position 1298 of SEQ ID NO: 2960
gugauucugaggcaagacu

SEQ ID NO: 229929 - RNA, 19 nt, Artificial Sequence
  Description of Artificial Sequence: Synthetic oligonucleotide
  Antisense strand to SEQ ID NO: 229928
agucuugccucagaaucac

SEQ ID NO: 229930 - RNA, 19 nt, Artificial Sequence
  Description of Artificial Sequence: Synthetic oligonucleotide
  Sense strand starting at position 1774 of SEQ ID NO: 2960
gugucagugcucucgaucu

SEQ ID NO: 229931 - RNA, 19 nt, Artificial Sequence
  Description of Artificial Sequence: Synthetic oligonucleotide
  Antisense strand to SEQ ID NO: 229930
agaucgagagcacugacac

SEQ ID NO: 229932 - RNA, 19 nt, Artificial Sequence
  Description of Artificial Sequence: Synthetic oligonucleotide
  Sense strand starting at position 2039 of SEQ ID NO: 2960
gcguaauguccgcugggau

SEQ ID NO: 229933 - RNA, 19 nt, Artificial Sequence
  Description of Artificial Sequence: Synthetic oligonucleotide
  Antisense strand to SEQ ID NO: 229932
aucccagcggacauuacgc

SEQ ID NO: 229934 - RNA, 19 nt, Artificial Sequence
  Description of Artificial Sequence: Synthetic oligonucleotide
  Sense strand starting at position 2059 of SEQ ID NO: 2960
uguaguucucugggaaaug

SEQ ID NO: 229935 - RNA, 19 nt, Artificial Sequence
  Description of Artificial Sequence: Synthetic oligonucleotide
  Antisense strand to SEQ ID NO: 229934
cauuucccagagaacuaca

SEQ ID NO: 229936 - RNA, 19 nt, Artificial Sequence
  Description of Artificial Sequence: Synthetic oligonucleotide
  Sense strand starting at position 2069 of SEQ ID NO: 2960
ugggaaaugcuagguugga

SEQ ID NO: 229937 - RNA, 19 nt, Artificial Sequence
  Description of Artificial Sequence: Synthetic oligonucleotide
  Antisense strand to SEQ ID NO: 229936
uccaaccuagcauuuccca

SEQ ID NO: 229938 - RNA, 19 nt, Artificial Sequence
  Description of Artificial Sequence: Synthetic oligonucleotide
  Sense strand starting at position 2070 of SEQ ID NO: 2960
gggaaaugcuagguuggau

SEQ ID NO: 229939 - RNA, 19 nt, Artificial Sequence
  Description of Artificial Sequence: Synthetic oligonucleotide
  Antisense strand to SEQ ID NO: 229938
auccaaccuagcauuuccc

SEQ ID NO: 229940 - RNA, 19 nt, Artificial Sequence
  Description of Artificial Sequence: Synthetic oligonucleotide
  Sense strand starting at position 2244 of SEQ ID NO: 2960
uccgucggcgcgaauaaua

SEQ ID NO: 229941 - RNA, 19 nt, Artificial Sequence
  Description of Artificial Sequence: Synthetic oligonucleotide
  Antisense strand to SEQ ID NO: 229940
uauuauucgcgccgacgga

SEQ ID NO: 229942 - RNA, 19 nt, Artificial Sequence
  Description of Artificial Sequence: Synthetic oligonucleotide
  Sense strand starting at position 2341 of SEQ ID NO: 2960
gcuguaagccaguuccgau

SEQ ID NO: 229943 - RNA, 19 nt, Artificial Sequence
  Description of Artificial Sequence: Synthetic oligonucleotide
  Antisense strand to SEQ ID NO: 229942
aucggaacuggcuuacagc

SEQ ID NO: 229944 - RNA, 19 nt, Artificial Sequence
  Description of Artificial Sequence: Synthetic oligonucleotide
  Sense strand starting at position 2488 of SEQ ID NO: 2960
guguaaagacguaguagua

SEQ ID NO: 229945 - RNA, 19 nt, Artificial Sequence
  Description of Artificial Sequence: Synthetic oligonucleotide
  Antisense strand to SEQ ID NO: 229944
uacuacuacgucuuuacac

SEQ ID NO: 229946 - RNA, 19 nt, Artificial Sequence
  Description of Artificial Sequence: Synthetic oligonucleotide
  Sense strand starting at position 2518 of SEQ ID NO: 2960
uggaaagguucgcuggaga

SEQ ID NO: 229947 - RNA, 19 nt, Artificial Sequence
  Description of Artificial Sequence: Synthetic oligonucleotide
  Antisense strand to SEQ ID NO: 229946
ucuccagcgaaccuuucca

SEQ ID NO: 229948 - RNA, 19 nt, Artificial Sequence
  Description of Artificial Sequence: Synthetic oligonucleotide
  Sense strand starting at position 2521 of SEQ ID NO: 2960
aaagguucgcuggagagaa

SEQ ID NO: 229949 - RNA, 19 nt, Artificial Sequence
  Description of Artificial Sequence: Synthetic oligonucleotide
  Antisense strand to SEQ ID NO: 229948
uucucuccagcgaaccuuu

SEQ ID NO: 229950 - RNA, 19 nt, Artificial Sequence
  Description of Artificial Sequence: Synthetic oligonucleotide
  Sense strand starting at position 2523 of SEQ ID NO: 2960
agguucgcuggagagaaau

SEQ ID NO: 229951 - RNA, 19 nt, Artificial Sequence
  Description of Artificial Sequence: Synthetic oligonucleotide
  Antisense strand to SEQ ID NO: 229950
auuucucuccagcgaaccu

SEQ ID NO: 229952 - RNA, 19 nt, Artificial Sequence
  Description of Artificial Sequence: Synthetic oligonucleotide
  Sense strand starting at position 2525 of SEQ ID NO: 2960
guucgcuggagagaaauua

SEQ ID NO: 229953 - RNA, 19 nt, Artificial Sequence
  Description of Artificial Sequence: Synthetic oligonucleotide
  Antisense strand to SEQ ID NO: 229952
uaauuucucuccagcgaac

SEQ ID NO: 229954 - RNA, 19 nt, Artificial Sequence
  Description of Artificial Sequence: Synthetic oligonucleotide
  Sense strand starting at position 2535 of SEQ ID NO: 2960
gagaaauuacgaggagccu

SEQ ID NO: 229955 - RNA, 19 nt, Artificial Sequence
  Description of Artificial Sequence: Synthetic oligonucleotide
  Antisense strand to SEQ ID NO: 229954
aggcuccucguaauuucuc

SEQ ID NO: 229956 - RNA, 19 nt, Artificial Sequence
  Description of Artificial Sequence: Synthetic oligonucleotide
  Sense strand starting at position 2552 of SEQ ID NO: 2960
cuuaaauacugggcugaua

SEQ ID NO: 229957 - RNA, 19 nt, Artificial Sequence
  Description of Artificial Sequence: Synthetic oligonucleotide
  Antisense strand to SEQ ID NO: 229956
uaucagcccaguauuuaag

SEQ ID NO: 229958 - RNA, 19 nt, Artificial Sequence
  Description of Artificial Sequence: Synthetic oligonucleotide
  Sense strand starting at position 2679 of SEQ ID NO: 2960
gauucugauccaggcaucu

SEQ ID NO: 229959 - RNA, 19 nt, Artificial Sequence
  Description of Artificial Sequence: Synthetic oligonucleotide
  Antisense strand to SEQ ID NO: 229958
agaugccuggaucagaauc

SEQ ID NO: 229960 - RNA, 19 nt, Artificial Sequence
  Description of Artificial Sequence: Synthetic oligonucleotide
  Sense strand starting at position 3252 of SEQ ID NO: 2960
ggauuagaggugcagguuu

SEQ ID NO: 229961 - RNA, 19 nt, Artificial Sequence
  Description of Artificial Sequence: Synthetic oligonucleotide
  Antisense strand to SEQ ID NO: 229960
aaaccugcaccucuaaucc

SEQ ID NO: 229962 - RNA, 19 nt, Artificial Sequence
  Description of Artificial Sequence: Synthetic oligonucleotide
  Sense strand starting at position 3292 of SEQ ID NO: 2960
aaaugugggcguuaggaaa

SEQ ID NO: 229963 - RNA, 19 nt, Artificial Sequence
  Description of Artificial Sequence: Synthetic oligonucleotide
  Antisense strand to SEQ ID NO: 229962
uuuccuaacgcccacauuu

SEQ ID NO: 229964 - RNA, 19 nt, Artificial Sequence
  Description of Artificial Sequence: Synthetic oligonucleotide
  Sense strand starting at position 3487 of SEQ ID NO: 2960
guuagauauuacuccaagg

SEQ ID NO: 229965 - RNA, 19 nt, Artificial Sequence
  Description of Artificial Sequence: Synthetic oligonucleotide
  Antisense strand to SEQ ID NO: 229964
ccuuggaguaauaucuaac

SEQ ID NO: 229966 - RNA, 19 nt, Artificial Sequence
  Description of Artificial Sequence: Synthetic oligonucleotide
  Sense strand starting at position 3492 of SEQ ID NO: 2960
auauuacuccaagguuuag

SEQ ID NO: 229967 - RNA, 19 nt, Artificial Sequence
  Description of Artificial Sequence: Synthetic oligonucleotide
  Antisense strand to SEQ ID NO: 229966
cuaaaccuuggaguaauau

SEQ ID NO: 229968 - RNA, 19 nt, Artificial Sequence
  Description of Artificial Sequence: Synthetic oligonucleotide
  Sense strand starting at position 3504 of SEQ ID NO: 2960
gguuuaguaccagagugac

SEQ ID NO: 229969 - RNA, 19 nt, Artificial Sequence
  Description of Artificial Sequence: Synthetic oligonucleotide
  Antisense strand to SEQ ID NO: 229968
gucacucugguacuaaacc

SEQ ID NO: 229970 - RNA, 19 nt, Artificial Sequence
  Description of Artificial Sequence: Synthetic oligonucleotide
  Sense strand starting at position 3531 of SEQ ID NO: 2960
gagaguuuccacugacaaa

SEQ ID NO: 229971 - RNA, 19 nt, Artificial Sequence
  Description of Artificial Sequence: Synthetic oligonucleotide
  Antisense strand to SEQ ID NO: 229970
uuugucaguggaaacucuc

SEQ ID NO: 229972 - RNA, 19 nt, Artificial Sequence
  Description of Artificial Sequence: Synthetic oligonucleotide
  Sense strand starting at position 3578 of SEQ ID NO: 2960
cuggaaguuuaggcuaaau

SEQ ID NO: 229973 - RNA, 19 nt, Artificial Sequence
  Description of Artificial Sequence: Synthetic oligonucleotide
  Antisense strand to SEQ ID NO: 229972
auuuagccuaaacuuccag

SEQ ID NO: 229974 - RNA, 19 nt, Artificial Sequence
  Description of Artificial Sequence: Synthetic oligonucleotide
  Sense strand starting at position 3669 of SEQ ID NO: 2960
acaugaaacugucuccaag

SEQ ID NO: 229975 - RNA, 19 nt, Artificial Sequence
  Description of Artificial Sequence: Synthetic oligonucleotide
  Antisense strand to SEQ ID NO: 229974
cuuggagacaguuucaugu

SEQ ID NO: 229976 - RNA, 19 nt, Artificial Sequence
  Description of Artificial Sequence: Synthetic oligonucleotide
  Sense strand starting at position 3671 of SEQ ID NO: 2960
augaaacugucuccaaguu

SEQ ID NO: 229977 - RNA, 19 nt, Artificial Sequence
  Description of Artificial Sequence: Synthetic oligonucleotide
  Antisense strand to SEQ ID NO: 229976
aacuuggagacaguuucau

SEQ ID NO: 229978 - RNA, 19 nt, Artificial Sequence
  Description of Artificial Sequence: Synthetic oligonucleotide
  Sense strand starting at position 3827 of SEQ ID NO: 2960
uagauagaaucugucugaa

SEQ ID NO: 229979 - RNA, 19 nt, Artificial Sequence
  Description of Artificial Sequence: Synthetic oligonucleotide
  Antisense strand to SEQ ID NO: 229978
uucagacagauucuaucua

SEQ ID NO: 229980 - RNA, 19 nt, Artificial Sequence
  Description of Artificial Sequence: Synthetic oligonucleotide
  Sense strand starting at position 228 of SEQ ID NO: 2961
ccgucugagguuuagauau

SEQ ID NO: 229981 - RNA, 19 nt, Artificial Sequence
  Description of Artificial Sequence: Synthetic oligonucleotide
  Antisense strand to SEQ ID NO: 229980
auaucuaaaccucagacgg

SEQ ID NO: 229982 - RNA, 19 nt, Artificial Sequence
  Description of Artificial Sequence: Synthetic oligonucleotide
  Sense strand starting at position 453 of SEQ ID NO: 2961
acucuucuggccugaagaa

SEQ ID NO: 229983 - RNA, 19 nt, Artificial Sequence
  Description of Artificial Sequence: Synthetic oligonucleotide
  Antisense strand to SEQ ID NO: 229982
uucuucaggccagaagagu

SEQ ID NO: 229984 - RNA, 19 nt, Artificial Sequence
  Description of Artificial Sequence: Synthetic oligonucleotide
  Sense strand starting at position 532 of SEQ ID NO: 2961
ugaugacuuugcucuugga

SEQ ID NO: 229985 - RNA, 19 nt, Artificial Sequence
  Description of Artificial Sequence: Synthetic oligonucleotide
  Antisense strand to SEQ ID NO: 229984
uccaagagcaaagucauca

SEQ ID NO: 229986 - RNA, 19 nt, Artificial Sequence
  Description of Artificial Sequence: Synthetic oligonucleotide
  Sense strand starting at position 581 of SEQ ID NO: 2961
ugaccagagaguugaucuu

SEQ ID NO: 229987 - RNA, 19 nt, Artificial Sequence
  Description of Artificial Sequence: Synthetic oligonucleotide
  Antisense strand to SEQ ID NO: 229986
aagaucaacucucugguca

SEQ ID NO: 229988 - RNA, 19 nt, Artificial Sequence
  Description of Artificial Sequence: Synthetic oligonucleotide
  Sense strand starting at position 587 of SEQ ID NO: 2961
gagaguugaucuuccaagc

SEQ ID NO: 229989 - RNA, 19 nt, Artificial Sequence
  Description of Artificial Sequence: Synthetic oligonucleotide
  Antisense strand to SEQ ID NO: 229988
gcuuggaagaucaacucuc

SEQ ID NO: 229990 - RNA, 19 nt, Artificial Sequence
  Description of Artificial Sequence: Synthetic oligonucleotide
  Sense strand starting at position 737 of SEQ ID NO: 2961
ucccuugcccugggauaga

SEQ ID NO: 229991 - RNA, 19 nt, Artificial Sequence
  Description of Artificial Sequence: Synthetic oligonucleotide
  Antisense strand to SEQ ID NO: 229990
ucuaucccagggcaaggga

SEQ ID NO: 229992 - RNA, 19 nt, Artificial Sequence
  Description of Artificial Sequence: Synthetic oligonucleotide
  Sense strand starting at position 748 of SEQ ID NO: 2961
gggauagagcuuuaccagu

SEQ ID NO: 229993 - RNA, 19 nt, Artificial Sequence
  Description of Artificial Sequence: Synthetic oligonucleotide
  Antisense strand to SEQ ID NO: 229992
acugguaaagcucuauccc

SEQ ID NO: 229994 - RNA, 19 nt, Artificial Sequence
  Description of Artificial Sequence: Synthetic oligonucleotide
  Sense strand starting at position 750 of SEQ ID NO: 2961
gauagagcuuuaccaguuu

SEQ ID NO: 229995 - RNA, 19 nt, Artificial Sequence
  Description of Artificial Sequence: Synthetic oligonucleotide
  Antisense strand to SEQ ID NO: 229994
aaacugguaaagcucuauc

SEQ ID NO: 229996 - RNA, 19 nt, Artificial Sequence
  Description of Artificial Sequence: Synthetic oligonucleotide
  Sense strand starting at position 881 of SEQ ID NO: 2961
auggcuugccugcagaaga

SEQ ID NO: 229997 - RNA, 19 nt, Artificial Sequence
  Description of Artificial Sequence: Synthetic oligonucleotide
  Antisense strand to SEQ ID NO: 229996
ucuucugcaggcaagccau

SEQ ID NO: 229998 - RNA, 19 nt, Artificial Sequence
  Description of Artificial Sequence: Synthetic oligonucleotide
  Sense strand starting at position 894 of SEQ ID NO: 2961
agaagauccuucucuggca

SEQ ID NO: 229999 - RNA, 19 nt, Artificial Sequence
  Description of Artificial Sequence: Synthetic oligonucleotide
  Antisense strand to SEQ ID NO: 229998
ugccagagaaggaucuucu

SEQ ID NO: 230000 - RNA, 19 nt, Artificial Sequence
  Description of Artificial Sequence: Synthetic oligonucleotide
  Sense strand starting at position 1165 of SEQ ID NO: 2961
aaagcagggucucugagaa

SEQ ID NO: 230001 - RNA, 19 nt, Artificial Sequence
  Description of Artificial Sequence: Synthetic oligonucleotide
  Antisense strand to SEQ ID NO: 230000
uucucagagacccugcuuu

SEQ ID NO: 230002 - RNA, 19 nt, Artificial Sequence
  Description of Artificial Sequence: Synthetic oligonucleotide
  Sense strand starting at position 1232 of SEQ ID NO: 2961
cuugcuugugauuacuaaa

SEQ ID NO: 230003 - RNA, 19 nt, Artificial Sequence
  Description of Artificial Sequence: Synthetic oligonucleotide
  Antisense strand to SEQ ID NO: 230002
uuuaguaaucacaagcaag

SEQ ID NO: 230004 - RNA, 19 nt, Artificial Sequence
  Description of Artificial Sequence: Synthetic oligonucleotide
  Sense strand starting at position 1267 of SEQ ID NO: 2961
uugcauuaacuguaaagug

SEQ ID NO: 230005 - RNA, 19 nt, Artificial Sequence
  Description of Artificial Sequence: Synthetic oligonucleotide
  Antisense strand to SEQ ID NO: 230004
cacuuuacaguuaaugcaa

SEQ ID NO: 230006 - RNA, 19 nt, Artificial Sequence
  Description of Artificial Sequence: Synthetic oligonucleotide
  Sense strand starting at position 1272 of SEQ ID NO: 2961
uuaacuguaaagugggaaa

SEQ ID NO: 230007 - RNA, 19 nt, Artificial Sequence
  Description of Artificial Sequence: Synthetic oligonucleotide
  Antisense strand to SEQ ID NO: 230006
uuucccacuuuacaguuaa

SEQ ID NO: 230008 - RNA, 19 nt, Artificial Sequence
  Description of Artificial Sequence: Synthetic oligonucleotide
  Sense strand starting at position 1513 of SEQ ID NO: 2961
ugaaucacuguuuguuuga

SEQ ID NO: 230009 - RNA, 19 nt, Artificial Sequence
  Description of Artificial Sequence: Synthetic oligonucleotide
  Antisense strand to SEQ ID NO: 230008
ucaaacaaacagugauuca

SEQ ID NO: 230010 - RNA, 19 nt, Artificial Sequence
  Description of Artificial Sequence: Synthetic oligonucleotide
  Sense strand starting at position 1514 of SEQ ID NO: 2961
gaaucacuguuuguuugaa

SEQ ID NO: 230011 - RNA, 19 nt, Artificial Sequence
  Description of Artificial Sequence: Synthetic oligonucleotide
  Antisense strand to SEQ ID NO: 230010
uucaaacaaacagugauuc

SEQ ID NO: 230012 - RNA, 19 nt, Artificial Sequence
  Description of Artificial Sequence: Synthetic oligonucleotide
  Sense strand starting at position 1516 of SEQ ID NO: 2961
aucacuguuuguuugaaga

SEQ ID NO: 230013 - RNA, 19 nt, Artificial Sequence
  Description of Artificial Sequence: Synthetic oligonucleotide
  Antisense strand to SEQ ID NO: 230012
ucuucaaacaaacagugau

SEQ ID NO: 230014 - RNA, 19 nt, Artificial Sequence
  Description of Artificial Sequence: Synthetic oligonucleotide
  Sense strand starting at position 1651 of SEQ ID NO: 2961
gaggacuugcugcaaauaa

SEQ ID NO: 230015 - RNA, 19 nt, Artificial Sequence
  Description of Artificial Sequence: Synthetic oligonucleotide
  Antisense strand to SEQ ID NO: 230014
uuauuugcagcaaguccuc

SEQ ID NO: 230016 - RNA, 19 nt, Artificial Sequence
  Description of Artificial Sequence: Synthetic oligonucleotide
  Sense strand starting at position 1661 of SEQ ID NO: 2961
ugcaaauaacuccagaagu

SEQ ID NO: 230017 - RNA, 19 nt, Artificial Sequence
  Description of Artificial Sequence: Synthetic oligonucleotide
  Antisense strand to SEQ ID NO: 230016
acuucuggaguuauuugca

SEQ ID NO: 230018 - RNA, 19 nt, Artificial Sequence
  Description of Artificial Sequence: Synthetic oligonucleotide
  Sense strand starting at position 1765 of SEQ ID NO: 2961
gagcuagacccucacugau

SEQ ID NO: 230019 - RNA, 19 nt, Artificial Sequence
  Description of Artificial Sequence: Synthetic oligonucleotide
  Antisense strand to SEQ ID NO: 230018
aucagugagggucuagcuc

SEQ ID NO: 230020 - RNA, 19 nt, Artificial Sequence
  Description of Artificial Sequence: Synthetic oligonucleotide
  Sense strand starting at position 1780 of SEQ ID NO: 2961
ugaugugacccacagcuuu

SEQ ID NO: 230021 - RNA, 19 nt, Artificial Sequence
  Description of Artificial Sequence: Synthetic oligonucleotide
  Antisense strand to SEQ ID NO: 230020
aaagcugugggucacauca

SEQ ID NO: 230022 - RNA, 19 nt, Artificial Sequence
  Description of Artificial Sequence: Synthetic oligonucleotide
  Sense strand starting at position 1875 of SEQ ID NO: 2961
ggagaaacucaugguggca

SEQ ID NO: 230023 - RNA, 19 nt, Artificial Sequence
  Description of Artificial Sequence: Synthetic oligonucleotide
  Antisense strand to SEQ ID NO: 230022
ugccaccaugaguuucucc

SEQ ID NO: 230024 - RNA, 19 nt, Artificial Sequence
  Description of Artificial Sequence: Synthetic oligonucleotide
  Sense strand starting at position 1878 of SEQ ID NO: 2961
gaaacucaugguggcaaua

SEQ ID NO: 230025 - RNA, 19 nt, Artificial Sequence
  Description of Artificial Sequence: Synthetic oligonucleotide
  Antisense strand to SEQ ID NO: 230024
uauugccaccaugaguuuc

SEQ ID NO: 230026 - RNA, 19 nt, Artificial Sequence
  Description of Artificial Sequence: Synthetic oligonucleotide
  Sense strand starting at position 2047 of SEQ ID NO: 2961
agcaauggucaaugauaaa

SEQ ID NO: 230027 - RNA, 19 nt, Artificial Sequence
  Description of Artificial Sequence: Synthetic oligonucleotide
  Antisense strand to SEQ ID NO: 230026
uuuaucauugaccauugcu

SEQ ID NO: 230028 - RNA, 19 nt, Artificial Sequence
  Description of Artificial Sequence: Synthetic oligonucleotide
  Sense strand starting at position 2254 of SEQ ID NO: 2961
uacaucgguguuuauauau

SEQ ID NO: 230029 - RNA, 19 nt, Artificial Sequence
  Description of Artificial Sequence: Synthetic oligonucleotide
  Antisense strand to SEQ ID NO: 230028
auauauaaacaccgaugua

SEQ ID NO: 230030 - RNA, 19 nt, Artificial Sequence
  Description of Artificial Sequence: Synthetic oligonucleotide
  Sense strand starting at position 2291 of SEQ ID NO: 2961
cauaaagauguaugaaugu

SEQ ID NO: 230031 - RNA, 19 nt, Artificial Sequence
  Description of Artificial Sequence: Synthetic oligonucleotide
  Antisense strand to SEQ ID NO: 230030
acauucauacaucuuuaug

SEQ ID NO: 230032 - RNA, 19 nt, Artificial Sequence
  Description of Artificial Sequence: Synthetic oligonucleotide
  Sense strand starting at position 2298 of SEQ ID NO: 2961
auguaugaaugugcauaua

SEQ ID NO: 230033 - RNA, 19 nt, Artificial Sequence
  Description of Artificial Sequence: Synthetic oligonucleotide
  Antisense strand to SEQ ID NO: 230032
uauaugcacauucauacau

SEQ ID NO: 230034 - RNA, 19 nt, Artificial Sequence
  Description of Artificial Sequence: Synthetic oligonucleotide
  Sense strand starting at position 2350 of SEQ ID NO: 2961
uuauauaugucuguacaca

SEQ ID NO: 230035 - RNA, 19 nt, Artificial Sequence
  Description of Artificial Sequence: Synthetic oligonucleotide
  Antisense strand to SEQ ID NO: 230034
uguguacagacauauauaa

SEQ ID NO: 230036 - RNA, 19 nt, Artificial Sequence
  Description of Artificial Sequence: Synthetic oligonucleotide
  Sense strand starting at position 2417 of SEQ ID NO: 2961
agagaauuccuuugaacuc

SEQ ID NO: 230037 - RNA, 19 nt, Artificial Sequence
  Description of Artificial Sequence: Synthetic oligonucleotide
  Antisense strand to SEQ ID NO: 230036
gaguucaaaggaauucucu

SEQ ID NO: 230038 - RNA, 19 nt, Artificial Sequence
  Description of Artificial Sequence: Synthetic oligonucleotide
  Sense strand starting at position 2542 of SEQ ID NO: 2961
gggaauuccuccuugauga

SEQ ID NO: 230039 - RNA, 19 nt, Artificial Sequence
  Description of Artificial Sequence: Synthetic oligonucleotide
  Antisense strand to SEQ ID NO: 230038
ucaucaaggaggaauuccc

SEQ ID NO: 230040 - RNA, 19 nt, Artificial Sequence
  Description of Artificial Sequence: Synthetic oligonucleotide
  Sense strand starting at position 2543 of SEQ ID NO: 2961
ggaauuccuccuugaugau

SEQ ID NO: 230041 - RNA, 19 nt, Artificial Sequence
  Description of Artificial Sequence: Synthetic oligonucleotide
  Antisense strand to SEQ ID NO: 230040
aucaucaaggaggaauucc

SEQ ID NO: 230042 - RNA, 19 nt, Artificial Sequence
  Description of Artificial Sequence: Synthetic oligonucleotide
  Sense strand starting at position 2723 of SEQ ID NO: 2961
ggguuauguguaggaaacu

SEQ ID NO: 230043 - RNA, 19 nt, Artificial Sequence
  Description of Artificial Sequence: Synthetic oligonucleotide
  Antisense strand to SEQ ID NO: 230042
aguuuccuacacauaaccc

SEQ ID NO: 230044 - RNA, 19 nt, Artificial Sequence
  Description of Artificial Sequence: Synthetic oligonucleotide
  Sense strand starting at position 2732 of SEQ ID NO: 2961
guaggaaacuggucuugua

SEQ ID NO: 230045 - RNA, 19 nt, Artificial Sequence
  Description of Artificial Sequence: Synthetic oligonucleotide
  Antisense strand to SEQ ID NO: 230044
uacaagaccaguuuccuac

SEQ ID NO: 230046 - RNA, 19 nt, Artificial Sequence
  Description of Artificial Sequence: Synthetic oligonucleotide
  Sense strand starting at position 2749 of SEQ ID NO: 2961
uaggguuauguguaggaaa

SEQ ID NO: 230047 - RNA, 19 nt, Artificial Sequence
  Description of Artificial Sequence: Synthetic oligonucleotide
  Antisense strand to SEQ ID NO: 230046
uuuccuacacauaacccua

SEQ ID NO: 230048 - RNA, 19 nt, Artificial Sequence
  Description of Artificial Sequence: Synthetic oligonucleotide
  Sense strand starting at position 2777 of SEQ ID NO: 2961
uaggguuauguguacagca

SEQ ID NO: 230049 - RNA, 19 nt, Artificial Sequence
  Description of Artificial Sequence: Synthetic oligonucleotide
  Antisense strand to SEQ ID NO: 230048
ugcuguacacauaacccua

SEQ ID NO: 230050 - RNA, 19 nt, Artificial Sequence
  Description of Artificial Sequence: Synthetic oligonucleotide
  Sense strand starting at position 3023 of SEQ ID NO: 2961
ucuacucugugguuagaca

SEQ ID NO: 230051 - RNA, 19 nt, Artificial Sequence
  Description of Artificial Sequence: Synthetic oligonucleotide
  Antisense strand to SEQ ID NO: 230050
ugucuaaccacagaguaga

SEQ ID NO: 230052 - RNA, 19 nt, Artificial Sequence
  Description of Artificial Sequence: Synthetic oligonucleotide
  Sense strand starting at position 3030 of SEQ ID NO: 2961
ugugguuagacagaucauc

SEQ ID NO: 230053 - RNA, 19 nt, Artificial Sequence
  Description of Artificial Sequence: Synthetic oligonucleotide
  Antisense strand to SEQ ID NO: 230052
gaugaucugucuaaccaca

SEQ ID NO: 230054 - RNA, 19 nt, Artificial Sequence
  Description of Artificial Sequence: Synthetic oligonucleotide
  Sense strand starting at position 3508 of SEQ ID NO: 2961
cagggagguccucaccuuu

SEQ ID NO: 230055 - RNA, 19 nt, Artificial Sequence
  Description of Artificial Sequence: Synthetic oligonucleotide
  Antisense strand to SEQ ID NO: 230054
aaaggugaggaccucccug

SEQ ID NO: 230056 - RNA, 19 nt, Artificial Sequence
  Description of Artificial Sequence: Synthetic oligonucleotide
  Sense strand starting at position 3838 of SEQ ID NO: 2961
cugagcuuugauuauacau

SEQ ID NO: 230057 - RNA, 19 nt, Artificial Sequence
  Description of Artificial Sequence: Synthetic oligonucleotide
  Antisense strand to SEQ ID NO: 230056
auguauaaucaaagcucag

SEQ ID NO: 230058 - RNA, 19 nt, Artificial Sequence
  Description of Artificial Sequence: Synthetic oligonucleotide
  Sense strand starting at position 3962 of SEQ ID NO: 2961
gucuuaagaacuggcauga

SEQ ID NO: 230059 - RNA, 19 nt, Artificial Sequence
  Description of Artificial Sequence: Synthetic oligonucleotide
  Antisense strand to SEQ ID NO: 230058
ucaugccaguucuuaagac

SEQ ID NO: 230060 - RNA, 19 nt, Artificial Sequence
  Description of Artificial Sequence: Synthetic oligonucleotide
  Sense strand starting at position 116 of SEQ ID NO: 2962
aguggcucaugcgugauau

SEQ ID NO: 230061 - RNA, 19 nt, Artificial Sequence
  Description of Artificial Sequence: Synthetic oligonucleotide
  Antisense strand to SEQ ID NO: 230060
auaucacgcaugagccacu

SEQ ID NO: 230062 - RNA, 19 nt, Artificial Sequence
  Description of Artificial Sequence: Synthetic oligonucleotide
  Sense strand starting at position 117 of SEQ ID NO: 2962
guggcucaugcgugauauc

SEQ ID NO: 230063 - RNA, 19 nt, Artificial Sequence
  Description of Artificial Sequence: Synthetic oligonucleotide
  Antisense strand to SEQ ID NO: 230062
gauaucacgcaugagccac

SEQ ID NO: 230064 - RNA, 19 nt, Artificial Sequence
  Description of Artificial Sequence: Synthetic oligonucleotide
  Sense strand starting at position 126 of SEQ ID NO: 2962
gcgugauaucccuaacaau

SEQ ID NO: 230065 - RNA, 19 nt, Artificial Sequence
  Description of Artificial Sequence: Synthetic oligonucleotide
  Antisense strand to SEQ ID NO: 230064
auuguuagggauaucacgc

SEQ ID NO: 230066 - RNA, 19 nt, Artificial Sequence
  Description of Artificial Sequence: Synthetic oligonucleotide
  Sense strand starting at position 544 of SEQ ID NO: 2962
caacaaaggcgguauugua

SEQ ID NO: 230067 - RNA, 19 nt, Artificial Sequence
  Description of Artificial Sequence: Synthetic oligonucleotide
  Antisense strand to SEQ ID NO: 230066
uacaauaccgccuuuguug

SEQ ID NO: 230068 - RNA, 19 nt, Artificial Sequence
  Description of Artificial Sequence: Synthetic oligonucleotide
  Sense strand starting at position 610 of SEQ ID NO: 2962
ugguccucaccuggagauu

SEQ ID NO: 230069 - RNA, 19 nt, Artificial Sequence
  Description of Artificial Sequence: Synthetic oligonucleotide
  Antisense strand to SEQ ID NO: 230068
aaucuccaggugaggacca

SEQ ID NO: 230070 - RNA, 19 nt, Artificial Sequence
  Description of Artificial Sequence: Synthetic oligonucleotide
  Sense strand starting at position 870 of SEQ ID NO: 2962
ugauuuaauucucgacaau

SEQ ID NO: 230071 - RNA, 19 nt, Artificial Sequence
  Description of Artificial Sequence: Synthetic oligonucleotide
  Antisense strand to SEQ ID NO: 230070
auugucgagaauuaaauca

SEQ ID NO: 230072 - RNA, 19 nt, Artificial Sequence
  Description of Artificial Sequence: Synthetic oligonucleotide
  Sense strand starting at position 873 of SEQ ID NO: 2962
uuuaauucucgacaauugu

SEQ ID NO: 230073 - RNA, 19 nt, Artificial Sequence
  Description of Artificial Sequence: Synthetic oligonucleotide
  Antisense strand to SEQ ID NO: 230072
acaauugucgagaauuaaa

SEQ ID NO: 230074 - RNA, 19 nt, Artificial Sequence
  Description of Artificial Sequence: Synthetic oligonucleotide
  Sense strand starting at position 877 of SEQ ID NO: 2962
auucucgacaauuguggaa

SEQ ID NO: 230075 - RNA, 19 nt, Artificial Sequence
  Description of Artificial Sequence: Synthetic oligonucleotide
  Antisense strand to SEQ ID NO: 230074
uuccacaauugucgagaau

SEQ ID NO: 230076 - RNA, 19 nt, Artificial Sequence
  Description of Artificial Sequence: Synthetic oligonucleotide
  Sense strand starting at position 881 of SEQ ID NO: 2962
ucgacaauuguggaaggua

SEQ ID NO: 230077 - RNA, 19 nt, Artificial Sequence
  Description of Artificial Sequence: Synthetic oligonucleotide
  Antisense strand to SEQ ID NO: 230076
uaccuuccacaauugucga

SEQ ID NO: 230078 - RNA, 19 nt, Artificial Sequence
  Description of Artificial Sequence: Synthetic oligonucleotide
  Sense strand starting at position 882 of SEQ ID NO: 2962
cgacaauuguggaagguag

SEQ ID NO: 230079 - RNA, 19 nt, Artificial Sequence
  Description of Artificial Sequence: Synthetic oligonucleotide
  Antisense strand to SEQ ID NO: 230078
cuaccuuccacaauugucg

SEQ ID NO: 230080 - RNA, 19 nt, Artificial Sequence
  Description of Artificial Sequence: Synthetic oligonucleotide
  Sense strand starting at position 941 of SEQ ID NO: 2962
uaaagagguuaagagauuu

SEQ ID NO: 230081 - RNA, 19 nt, Artificial Sequence
  Description of Artificial Sequence: Synthetic oligonucleotide
  Antisense strand to SEQ ID NO: 230080
aaaucucuuaaccucuuua

SEQ ID NO: 230082 - RNA, 19 nt, Artificial Sequence
  Description of Artificial Sequence: Synthetic oligonucleotide
  Sense strand starting at position 1214 of SEQ ID NO: 2962
ggccguaacugcuaacaga

SEQ ID NO: 230083 - RNA, 19 nt, Artificial Sequence
  Description of Artificial Sequence: Synthetic oligonucleotide
  Antisense strand to SEQ ID NO: 230082
ucuguuagcaguuacggcc

SEQ ID NO: 230084 - RNA, 19 nt, Artificial Sequence
  Description of Artificial Sequence: Synthetic oligonucleotide
  Sense strand starting at position 1326 of SEQ ID NO: 2962
guucccuucccacaugaca

SEQ ID NO: 230085 - RNA, 19 nt, Artificial Sequence
  Description of Artificial Sequence: Synthetic oligonucleotide
  Antisense strand to SEQ ID NO: 230084
ugucaugugggaagggaac

SEQ ID NO: 230086 - RNA, 19 nt, Artificial Sequence
  Description of Artificial Sequence: Synthetic oligonucleotide
  Sense strand starting at position 1371 of SEQ ID NO: 2962
acagcaaucuccucaggua

SEQ ID NO: 230087 - RNA, 19 nt, Artificial Sequence
  Description of Artificial Sequence: Synthetic oligonucleotide
  Antisense strand to SEQ ID NO: 230086
uaccugaggagauugcugu

SEQ ID NO: 230088 - RNA, 19 nt, Artificial Sequence
  Description of Artificial Sequence: Synthetic oligonucleotide
  Sense strand starting at position 1392 of SEQ ID NO: 2962
gcgcccucacuuuaaagaa

SEQ ID NO: 230089 - RNA, 19 nt, Artificial Sequence
  Description of Artificial Sequence: Synthetic oligonucleotide
  Antisense strand to SEQ ID NO: 230088
uucuuuaaagugagggcgc

SEQ ID NO: 230090 - RNA, 19 nt, Artificial Sequence
  Description of Artificial Sequence: Synthetic oligonucleotide
  Sense strand starting at position 1432 of SEQ ID NO: 2962
gaugaugucaggugcccaa

SEQ ID NO: 230091 - RNA, 19 nt, Artificial Sequence
  Description of Artificial Sequence: Synthetic oligonucleotide
  Antisense strand to SEQ ID NO: 230090
uugggcaccugacaucauc

SEQ ID NO: 230092 - RNA, 19 nt, Artificial Sequence
  Description of Artificial Sequence: Synthetic oligonucleotide
  Sense strand starting at position 1689 of SEQ ID NO: 2962
gacaguuagugagugcuca

SEQ ID NO: 230093 - RNA, 19 nt, Artificial Sequence
  Description of Artificial Sequence: Synthetic oligonucleotide
  Antisense strand to SEQ ID NO: 230092
ugagcacucacuaacuguc

SEQ ID NO: 230094 - RNA, 19 nt, Artificial Sequence
  Description of Artificial Sequence: Synthetic oligonucleotide
  Sense strand starting at position 1693 of SEQ ID NO: 2962
guuagugagugcucacaca

SEQ ID NO: 230095 - RNA, 19 nt, Artificial Sequence
  Description of Artificial Sequence: Synthetic oligonucleotide
  Antisense strand to SEQ ID NO: 230094
ugugugagcacucacuaac

SEQ ID NO: 230096 - RNA, 19 nt, Artificial Sequence
  Description of Artificial Sequence: Synthetic oligonucleotide
  Sense strand starting at position 1720 of SEQ ID NO: 2962
ccgucuguguggucagaag

SEQ ID NO: 230097 - RNA, 19 nt, Artificial Sequence
  Description of Artificial Sequence: Synthetic oligonucleotide
  Antisense strand to SEQ ID NO: 230096
cuucugaccacacagacgg

SEQ ID NO: 230098 - RNA, 19 nt, Artificial Sequence
  Description of Artificial Sequence: Synthetic oligonucleotide
  Sense strand starting at position 1996 of SEQ ID NO: 2962
gcgcgauccugugacguca

SEQ ID NO: 230099 - RNA, 19 nt, Artificial Sequence
  Description of Artificial Sequence: Synthetic oligonucleotide
  Antisense strand to SEQ ID NO: 230098
ugacgucacaggaucgcgc

SEQ ID NO: 230100 - RNA, 19 nt, Artificial Sequence
  Description of Artificial Sequence: Synthetic oligonucleotide
  Sense strand starting at position 2835 of SEQ ID NO: 2962
uggugcgguugagaacaau

SEQ ID NO: 230101 - RNA, 19 nt, Artificial Sequence
  Description of Artificial Sequence: Synthetic oligonucleotide
  Antisense strand to SEQ ID NO: 230100
auuguucucaaccgcacca

SEQ ID NO: 230102 - RNA, 19 nt, Artificial Sequence
  Description of Artificial Sequence: Synthetic oligonucleotide
  Sense strand starting at position 2875 of SEQ ID NO: 2962
gaaggugaguguccagaga

SEQ ID NO: 230103 - RNA, 19 nt, Artificial Sequence
  Description of Artificial Sequence: Synthetic oligonucleotide
  Antisense strand to SEQ ID NO: 230102
ucucuggacacucaccuuc

SEQ ID NO: 230104 - RNA, 19 nt, Artificial Sequence
  Description of Artificial Sequence: Synthetic oligonucleotide
  Sense strand starting at position 2877 of SEQ ID NO: 2962
aggugaguguccagagaug

SEQ ID NO: 230105 - RNA, 19 nt, Artificial Sequence
  Description of Artificial Sequence: Synthetic oligonucleotide
  Antisense strand to SEQ ID NO: 230104
caucucuggacacucaccu

SEQ ID NO: 230106 - RNA, 19 nt, Artificial Sequence
  Description of Artificial Sequence: Synthetic oligonucleotide
  Sense strand starting at position 3195 of SEQ ID NO: 2962
gggauucgcugaggagaac

SEQ ID NO: 230107 - RNA, 19 nt, Artificial Sequence
  Description of Artificial Sequence: Synthetic oligonucleotide
  Antisense strand to SEQ ID NO: 230106
guucuccucagcgaauccc

SEQ ID NO: 230108 - RNA, 19 nt, Artificial Sequence
  Description of Artificial Sequence: Synthetic oligonucleotide
  Sense strand starting at position 3265 of SEQ ID NO: 2962
uaaguuacagccuggaaga

SEQ ID NO: 230109 - RNA, 19 nt, Artificial Sequence
  Description of Artificial Sequence: Synthetic oligonucleotide
  Antisense strand to SEQ ID NO: 230108
ucuuccaggcuguaacuua

SEQ ID NO: 230110 - RNA, 19 nt, Artificial Sequence
  Description of Artificial Sequence: Synthetic oligonucleotide
  Sense strand starting at position 3266 of SEQ ID NO: 2962
aaguuacagccuggaagaa

SEQ ID NO: 230111 - RNA, 19 nt, Artificial Sequence
  Description of Artificial Sequence: Synthetic oligonucleotide
  Antisense strand to SEQ ID NO: 230110
uucuuccaggcuguaacuu

SEQ ID NO: 230112 - RNA, 19 nt, Artificial Sequence
  Description of Artificial Sequence: Synthetic oligonucleotide
  Sense strand starting at position 3892 of SEQ ID NO: 2962
cugggauucuuguacacug

SEQ ID NO: 230113 - RNA, 19 nt, Artificial Sequence
  Description of Artificial Sequence: Synthetic oligonucleotide
  Antisense strand to SEQ ID NO: 230112
caguguacaagaaucccag

SEQ ID NO: 230114 - RNA, 19 nt, Artificial Sequence
  Description of Artificial Sequence: Synthetic oligonucleotide
  Sense strand starting at position 3903 of SEQ ID NO: 2962
guacacugcugaugggauu

SEQ ID NO: 230115 - RNA, 19 nt, Artificial Sequence
  Description of Artificial Sequence: Synthetic oligonucleotide
  Antisense strand to SEQ ID NO: 230114
aaucccaucagcaguguac

SEQ ID NO: 230116 - RNA, 19 nt, Artificial Sequence
  Description of Artificial Sequence: Synthetic oligonucleotide
  Sense strand starting at position 3906 of SEQ ID NO: 2962
cacugcugaugggauuaua

SEQ ID NO: 230117 - RNA, 19 nt, Artificial Sequence
  Description of Artificial Sequence: Synthetic oligonucleotide
  Antisense strand to SEQ ID NO: 230116
uauaaucccaucagcagug

SEQ ID NO: 230118 - RNA, 19 nt, Artificial Sequence
  Description of Artificial Sequence: Synthetic oligonucleotide
  Sense strand starting at position 3953 of SEQ ID NO: 2962
uugucaguguaugaagaga

SEQ ID NO: 230119 - RNA, 19 nt, Artificial Sequence
  Description of Artificial Sequence: Synthetic oligonucleotide
  Antisense strand to SEQ ID NO: 230118
ucucuucauacacugacaa

SEQ ID NO: 230120 - RNA, 19 nt, Artificial Sequence
  Description of Artificial Sequence: Synthetic oligonucleotide
  Sense strand starting at position 254 of SEQ ID NO: 2963
cauggugccuucccugaau

SEQ ID NO: 230121 - RNA, 19 nt, Artificial Sequence
  Description of Artificial Sequence: Synthetic oligonucleotide
  Antisense strand to SEQ ID NO: 230120
auucagggaaggcaccaug

SEQ ID NO: 230122 - RNA, 19 nt, Artificial Sequence
  Description of Artificial Sequence: Synthetic oligonucleotide
  Sense strand starting at position 257 of SEQ ID NO: 2963
ggugccuucccugaauggu

SEQ ID NO: 230123 - RNA, 19 nt, Artificial Sequence
  Description of Artificial Sequence: Synthetic oligonucleotide
  Antisense strand to SEQ ID NO: 230122
accauucagggaaggcacc

SEQ ID NO: 230124 - RNA, 19 nt, Artificial Sequence
  Description of Artificial Sequence: Synthetic oligonucleotide
  Sense strand starting at position 357 of SEQ ID NO: 2963
uugguccucacuuggagau

SEQ ID NO: 230125 - RNA, 19 nt, Artificial Sequence
  Description of Artificial Sequence: Synthetic oligonucleotide
  Antisense strand to SEQ ID NO: 230124
aucuccaagugaggaccaa

SEQ ID NO: 230126 - RNA, 19 nt, Artificial Sequence
  Description of Artificial Sequence: Synthetic oligonucleotide
  Sense strand starting at position 358 of SEQ ID NO: 2963
ugguccucacuuggagauu

SEQ ID NO: 230127 - RNA, 19 nt, Artificial Sequence
  Description of Artificial Sequence: Synthetic oligonucleotide
  Antisense strand to SEQ ID NO: 230126
aaucuccaagugaggacca

SEQ ID NO: 230128 - RNA, 19 nt, Artificial Sequence
  Description of Artificial Sequence: Synthetic oligonucleotide
  Sense strand starting at position 393 of SEQ ID NO: 2963
guuaaagacucauuagacu

SEQ ID NO: 230129 - RNA, 19 nt, Artificial Sequence
  Description of Artificial Sequence: Synthetic oligonucleotide
  Antisense strand to SEQ ID NO: 230128
agucuaaugagucuuuaac

SEQ ID NO: 230130 - RNA, 19 nt, Artificial Sequence
  Description of Artificial Sequence: Synthetic oligonucleotide
  Sense strand starting at position 408 of SEQ ID NO: 2963
gacuuaggucaccacuguu

SEQ ID NO: 230131 - RNA, 19 nt, Artificial Sequence
  Description of Artificial Sequence: Synthetic oligonucleotide
  Antisense strand to SEQ ID NO: 230130
aacaguggugaccuaaguc

SEQ ID NO: 230132 - RNA, 19 nt, Artificial Sequence
  Description of Artificial Sequence: Synthetic oligonucleotide
  Sense strand starting at position 432 of SEQ ID NO: 2963
ccgccaguuugacuagaaa

SEQ ID NO: 230133 - RNA, 19 nt, Artificial Sequence
  Description of Artificial Sequence: Synthetic oligonucleotide
  Antisense strand to SEQ ID NO: 230132
uuucuagucaaacuggcgg

SEQ ID NO: 230134 - RNA, 19 nt, Artificial Sequence
  Description of Artificial Sequence: Synthetic oligonucleotide
  Sense strand starting at position 460 of SEQ ID NO: 2963
ugacuucucugcccugcua

SEQ ID NO: 230135 - RNA, 19 nt, Artificial Sequence
  Description of Artificial Sequence: Synthetic oligonucleotide
  Antisense strand to SEQ ID NO: 230134
uagcagggcagagaaguca

SEQ ID NO: 230136 - RNA, 19 nt, Artificial Sequence
  Description of Artificial Sequence: Synthetic oligonucleotide
  Sense strand starting at position 566 of SEQ ID NO: 2963
guaacugcugccgcugaau

SEQ ID NO: 230137 - RNA, 19 nt, Artificial Sequence
  Description of Artificial Sequence: Synthetic oligonucleotide
  Antisense strand to SEQ ID NO: 230136
auucagcggcagcaguuac

SEQ ID NO: 230138 - RNA, 19 nt, Artificial Sequence
  Description of Artificial Sequence: Synthetic oligonucleotide
  Sense strand starting at position 928 of SEQ ID NO: 2963
ugauuuaauucuugacgcu

SEQ ID NO: 230139 - RNA, 19 nt, Artificial Sequence
  Description of Artificial Sequence: Synthetic oligonucleotide
  Antisense strand to SEQ ID NO: 230138
agcgucaagaauuaaauca

SEQ ID NO: 230140 - RNA, 19 nt, Artificial Sequence
  Description of Artificial Sequence: Synthetic oligonucleotide
  Sense strand starting at position 935 of SEQ ID NO: 2963
auucuugacgcuuguggaa

SEQ ID NO: 230141 - RNA, 19 nt, Artificial Sequence
  Description of Artificial Sequence: Synthetic oligonucleotide
  Antisense strand to SEQ ID NO: 230140
uuccacaagcgucaagaau

SEQ ID NO: 230142 - RNA, 19 nt, Artificial Sequence
  Description of Artificial Sequence: Synthetic oligonucleotide
  Sense strand starting at position 996 of SEQ ID NO: 2963
gcuuaaagcgguuaaggga

SEQ ID NO: 230143 - RNA, 19 nt, Artificial Sequence
  Description of Artificial Sequence: Synthetic oligonucleotide
  Antisense strand to SEQ ID NO: 230142
ucccuuaaccgcuuuaagc

SEQ ID NO: 230144 - RNA, 19 nt, Artificial Sequence
  Description of Artificial Sequence: Synthetic oligonucleotide
  Sense strand starting at position 1098 of SEQ ID NO: 2963
gguucagaagccuguaaug

SEQ ID NO: 230145 - RNA, 19 nt, Artificial Sequence
  Description of Artificial Sequence: Synthetic oligonucleotide
  Antisense strand to SEQ ID NO: 230144
cauuacaggcuucugaacc

SEQ ID NO: 230146 - RNA, 19 nt, Artificial Sequence
  Description of Artificial Sequence: Synthetic oligonucleotide
  Sense strand starting at position 1172 of SEQ ID NO: 2963
gaauguuguggugagaagu

SEQ ID NO: 230147 - RNA, 19 nt, Artificial Sequence
  Description of Artificial Sequence: Synthetic oligonucleotide
  Antisense strand to SEQ ID NO: 230146
acuucucaccacaacauuc

SEQ ID NO: 230148 - RNA, 19 nt, Artificial Sequence
  Description of Artificial Sequence: Synthetic oligonucleotide
  Sense strand starting at position 1224 of SEQ ID NO: 2963
uaaagauuguagugagaag

SEQ ID NO: 230149 - RNA, 19 nt, Artificial Sequence
  Description of Artificial Sequence: Synthetic oligonucleotide
  Antisense strand to SEQ ID NO: 230148
cuucucacuacaaucuuua

SEQ ID NO: 230150 - RNA, 19 nt, Artificial Sequence
  Description of Artificial Sequence: Synthetic oligonucleotide
  Sense strand starting at position 1342 of SEQ ID NO: 2963
uuaccagcucuccaagaga

SEQ ID NO: 230151 - RNA, 19 nt, Artificial Sequence
  Description of Artificial Sequence: Synthetic oligonucleotide
  Antisense strand to SEQ ID NO: 230150
ucucuuggagagcugguaa

SEQ ID NO: 230152 - RNA, 19 nt, Artificial Sequence
  Description of Artificial Sequence: Synthetic oligonucleotide
  Sense strand starting at position 1345 of SEQ ID NO: 2963
ccagcucuccaagagaacu

SEQ ID NO: 230153 - RNA, 19 nt, Artificial Sequence
  Description of Artificial Sequence: Synthetic oligonucleotide
  Antisense strand to SEQ ID NO: 230152
aguucucuuggagagcugg

SEQ ID NO: 230154 - RNA, 19 nt, Artificial Sequence
  Description of Artificial Sequence: Synthetic oligonucleotide
  Sense strand starting at position 1380 of SEQ ID NO: 2963
guucccuucccacaugaca

SEQ ID NO: 230155 - RNA, 19 nt, Artificial Sequence
  Description of Artificial Sequence: Synthetic oligonucleotide
  Antisense strand to SEQ ID NO: 230154
ugucaugugggaagggaac

SEQ ID NO: 230156 - RNA, 19 nt, Artificial Sequence
  Description of Artificial Sequence: Synthetic oligonucleotide
  Sense strand starting at position 1748 of SEQ ID NO: 2963
ccauccguguggucggaaa

SEQ ID NO: 230157 - RNA, 19 nt, Artificial Sequence
  Description of Artificial Sequence: Synthetic oligonucleotide
  Antisense strand to SEQ ID NO: 230156
uuuccgaccacacggaugg

SEQ ID NO: 230158 - RNA, 19 nt, Artificial Sequence
  Description of Artificial Sequence: Synthetic oligonucleotide
  Sense strand starting at position 2207 of SEQ ID NO: 2963
gggcgcugccugaaaguuu

SEQ ID NO: 230159 - RNA, 19 nt, Artificial Sequence
  Description of Artificial Sequence: Synthetic oligonucleotide
  Antisense strand to SEQ ID NO: 230158
aaacuuucaggcagcgccc

SEQ ID NO: 230160 - RNA, 19 nt, Artificial Sequence
  Description of Artificial Sequence: Synthetic oligonucleotide
  Sense strand starting at position 2338 of SEQ ID NO: 2963
gagaaugauuuguggcuuc

SEQ ID NO: 230161 - RNA, 19 nt, Artificial Sequence
  Description of Artificial Sequence: Synthetic oligonucleotide
  Antisense strand to SEQ ID NO: 230160
gaagccacaaaucauucuc

SEQ ID NO: 230162 - RNA, 19 nt, Artificial Sequence
  Description of Artificial Sequence: Synthetic oligonucleotide
  Sense strand starting at position 2352 of SEQ ID NO: 2963
gcuucugauucugacauau

SEQ ID NO: 230163 - RNA, 19 nt, Artificial Sequence
  Description of Artificial Sequence: Synthetic oligonucleotide
  Antisense strand to SEQ ID NO: 230162
auaugucagaaucagaagc

SEQ ID NO: 230164 - RNA, 19 nt, Artificial Sequence
  Description of Artificial Sequence: Synthetic oligonucleotide
  Sense strand starting at position 2354 of SEQ ID NO: 2963
uucugauucugacauaugu

SEQ ID NO: 230165 - RNA, 19 nt, Artificial Sequence
  Description of Artificial Sequence: Synthetic oligonucleotide
  Antisense strand to SEQ ID NO: 230164
acauaugucagaaucagaa

SEQ ID NO: 230166 - RNA, 19 nt, Artificial Sequence
  Description of Artificial Sequence: Synthetic oligonucleotide
  Sense strand starting at position 2363 of SEQ ID NO: 2963
ugacauaugucguuaagga

SEQ ID NO: 230167 - RNA, 19 nt, Artificial Sequence
  Description of Artificial Sequence: Synthetic oligonucleotide
  Antisense strand to SEQ ID NO: 230166
uccuuaacgacauauguca

SEQ ID NO: 230168 - RNA, 19 nt, Artificial Sequence
  Description of Artificial Sequence: Synthetic oligonucleotide
  Sense strand starting at position 2364 of SEQ ID NO: 2963
gacauaugucguuaaggag

SEQ ID NO: 230169 - RNA, 19 nt, Artificial Sequence
  Description of Artificial Sequence: Synthetic oligonucleotide
  Antisense strand to SEQ ID NO: 230168
cuccuuaacgacauauguc

SEQ ID NO: 230170 - RNA, 19 nt, Artificial Sequence
  Description of Artificial Sequence: Synthetic oligonucleotide
  Sense strand starting at position 2706 of SEQ ID NO: 2963
ccagaucaucaagagcuuu

SEQ ID NO: 230171 - RNA, 19 nt, Artificial Sequence
  Description of Artificial Sequence: Synthetic oligonucleotide
  Antisense strand to SEQ ID NO: 230170
aaagcucuugaugaucugg

SEQ ID NO: 230172 - RNA, 19 nt, Artificial Sequence
  Description of Artificial Sequence: Synthetic oligonucleotide
  Sense strand starting at position 2740 of SEQ ID NO: 2963
gagucuggaccucguuuaa

SEQ ID NO: 230173 - RNA, 19 nt, Artificial Sequence
  Description of Artificial Sequence: Synthetic oligonucleotide
  Antisense strand to SEQ ID NO: 230172
uuaaacgagguccagacuc

SEQ ID NO: 230174 - RNA, 19 nt, Artificial Sequence
  Description of Artificial Sequence: Synthetic oligonucleotide
  Sense strand starting at position 2752 of SEQ ID NO: 2963
cguuuaagugcacaggaga

SEQ ID NO: 230175 - RNA, 19 nt, Artificial Sequence
  Description of Artificial Sequence: Synthetic oligonucleotide
  Antisense strand to SEQ ID NO: 230174
ucuccugugcacuuaaacg

SEQ ID NO: 230176 - RNA, 19 nt, Artificial Sequence
  Description of Artificial Sequence: Synthetic oligonucleotide
  Sense strand starting at position 2804 of SEQ ID NO: 2963
cgacuucuauuugagaagu

SEQ ID NO: 230177 - RNA, 19 nt, Artificial Sequence
  Description of Artificial Sequence: Synthetic oligonucleotide
  Antisense strand to SEQ ID NO: 230176
acuucucaaauagaagucg

SEQ ID NO: 230178 - RNA, 19 nt, Artificial Sequence
  Description of Artificial Sequence: Synthetic oligonucleotide
  Sense strand starting at position 2904 of SEQ ID NO: 2963
gaaggugaguguccagaga

SEQ ID NO: 230179 - RNA, 19 nt, Artificial Sequence
  Description of Artificial Sequence: Synthetic oligonucleotide
  Antisense strand to SEQ ID NO: 230178
ucucuggacacucaccuuc

SEQ ID NO: 230180 - RNA, 19 nt, Artificial Sequence
  Description of Artificial Sequence: Synthetic oligonucleotide
  Sense strand starting at position 2906 of SEQ ID NO: 2963
aggugaguguccagagaug

SEQ ID NO: 230181 - RNA, 19 nt, Artificial Sequence
  Description of Artificial Sequence: Synthetic oligonucleotide
  Antisense strand to SEQ ID NO: 230180
caucucuggacacucaccu

SEQ ID NO: 230182 - RNA, 19 nt, Artificial Sequence
  Description of Artificial Sequence: Synthetic oligonucleotide
  Sense strand starting at position 2937 of SEQ ID NO: 2963
aacugacagcucuggauga

SEQ ID NO: 230183 - RNA, 19 nt, Artificial Sequence
  Description of Artificial Sequence: Synthetic oligonucleotide
  Antisense strand to SEQ ID NO: 230182
ucauccagagcugucaguu

SEQ ID NO: 230184 - RNA, 19 nt, Artificial Sequence
  Description of Artificial Sequence: Synthetic oligonucleotide
  Sense strand starting at position 3070 of SEQ ID NO: 2963
agaugauagugagcuccaa

SEQ ID NO: 230185 - RNA, 19 nt, Artificial Sequence
  Description of Artificial Sequence: Synthetic oligonucleotide
  Antisense strand to SEQ ID NO: 230184
uuggagcucacuaucaucu

SEQ ID NO: 230186 - RNA, 19 nt, Artificial Sequence
  Description of Artificial Sequence: Synthetic oligonucleotide
  Sense strand starting at position 3169 of SEQ ID NO: 2963
gcagaaagucaccacugau

SEQ ID NO: 230187 - RNA, 19 nt, Artificial Sequence
  Description of Artificial Sequence: Synthetic oligonucleotide
  Antisense strand to SEQ ID NO: 230186
aucaguggugacuuucugc

SEQ ID NO: 230188 - RNA, 19 nt, Artificial Sequence
  Description of Artificial Sequence: Synthetic oligonucleotide
  Sense strand starting at position 3175 of SEQ ID NO: 2963
agucaccacugauauagaa

SEQ ID NO: 230189 - RNA, 19 nt, Artificial Sequence
  Description of Artificial Sequence: Synthetic oligonucleotide
  Antisense strand to SEQ ID NO: 230188
uucuauaucaguggugacu

SEQ ID NO: 230190 - RNA, 19 nt, Artificial Sequence
  Description of Artificial Sequence: Synthetic oligonucleotide
  Sense strand starting at position 3307 of SEQ ID NO: 2963
cgccgucuccacuaaauau

SEQ ID NO: 230191 - RNA, 19 nt, Artificial Sequence
  Description of Artificial Sequence: Synthetic oligonucleotide
  Antisense strand to SEQ ID NO: 230190
auauuuaguggagacggcg

SEQ ID NO: 230192 - RNA, 19 nt, Artificial Sequence
  Description of Artificial Sequence: Synthetic oligonucleotide
  Sense strand starting at position 3547 of SEQ ID NO: 2963
uggcguaaguguuucauua

SEQ ID NO: 230193 - RNA, 19 nt, Artificial Sequence
  Description of Artificial Sequence: Synthetic oligonucleotide
  Antisense strand to SEQ ID NO: 230192
uaaugaaacacuuacgcca

SEQ ID NO: 230194 - RNA, 19 nt, Artificial Sequence
  Description of Artificial Sequence: Synthetic oligonucleotide
  Sense strand starting at position 3597 of SEQ ID NO: 2963
uaaguuacagccugaaaga

SEQ ID NO: 230195 - RNA, 19 nt, Artificial Sequence
  Description of Artificial Sequence: Synthetic oligonucleotide
  Antisense strand to SEQ ID NO: 230194
ucuuucaggcuguaacuua

SEQ ID NO: 230196 - RNA, 19 nt, Artificial Sequence
  Description of Artificial Sequence: Synthetic oligonucleotide
  Sense strand starting at position 3909 of SEQ ID NO: 2963
cugggauucuuguacacug

SEQ ID NO: 230197 - RNA, 19 nt, Artificial Sequence
  Description of Artificial Sequence: Synthetic oligonucleotide
  Antisense strand to SEQ ID NO: 230196
caguguacaagaaucccag

SEQ ID NO: 230198 - RNA, 19 nt, Artificial Sequence
  Description of Artificial Sequence: Synthetic oligonucleotide
  Sense strand starting at position 3972 of SEQ ID NO: 2963
ggcaguguaugaagagagu

SEQ ID NO: 230199 - RNA, 19 nt, Artificial Sequence
  Description of Artificial Sequence: Synthetic oligonucleotide
  Antisense strand to SEQ ID NO: 230198
acucucuucauacacugcc

SEQ ID NO: 230200 - RNA, 19 nt, Artificial Sequence
  Description of Artificial Sequence: Synthetic oligonucleotide
  Sense strand starting at position 99 of SEQ ID NO: 2964
aggucaauccggcacuacu

SEQ ID NO: 230201 - RNA, 19 nt, Artificial Sequence
  Description of Artificial Sequence: Synthetic oligonucleotide
  Antisense strand to SEQ ID NO: 230200
aguagugccggauugaccu

SEQ ID NO: 230202 - RNA, 19 nt, Artificial Sequence
  Description of Artificial Sequence: Synthetic oligonucleotide
  Sense strand starting at position 109 of SEQ ID NO: 2964
ggcacuacugguuguccaa

SEQ ID NO: 230203 - RNA, 19 nt, Artificial Sequence
  Description of Artificial Sequence: Synthetic oligonucleotide
  Antisense strand to SEQ ID NO: 230202
uuggacaaccaguagugcc

SEQ ID NO: 230204 - RNA, 19 nt, Artificial Sequence
  Description of Artificial Sequence: Synthetic oligonucleotide
  Sense strand starting at position 130 of SEQ ID NO: 2964
ggagguuacuuccuguagu

SEQ ID NO: 230205 - RNA, 19 nt, Artificial Sequence
  Description of Artificial Sequence: Synthetic oligonucleotide
  Antisense strand to SEQ ID NO: 230204
acuacaggaaguaaccucc

SEQ ID NO: 230206 - RNA, 19 nt, Artificial Sequence
  Description of Artificial Sequence: Synthetic oligonucleotide
  Sense strand starting at position 141 of SEQ ID NO: 2964
ccuguagugucaucagagg

SEQ ID NO: 230207 - RNA, 19 nt, Artificial Sequence
  Description of Artificial Sequence: Synthetic oligonucleotide
  Antisense strand to SEQ ID NO: 230206
ccucugaugacacuacagg

SEQ ID NO: 230208 - RNA, 19 nt, Artificial Sequence
  Description of Artificial Sequence: Synthetic oligonucleotide
  Sense strand starting at position 146 of SEQ ID NO: 2964
agugucaucagaggcaaau

SEQ ID NO: 230209 - RNA, 19 nt, Artificial Sequence
  Description of Artificial Sequence: Synthetic oligonucleotide
  Antisense strand to SEQ ID NO: 230208
auuugccucugaugacacu

SEQ ID NO: 230210 - RNA, 19 nt, Artificial Sequence
  Description of Artificial Sequence: Synthetic oligonucleotide
  Sense strand starting at position 180 of SEQ ID NO: 2964
guuacaaucuaguccaauu

SEQ ID NO: 230211 - RNA, 19 nt, Artificial Sequence
  Description of Artificial Sequence: Synthetic oligonucleotide
  Antisense strand to SEQ ID NO: 230210
aauuggacuagauuguaac

SEQ ID NO: 230212 - RNA, 19 nt, Artificial Sequence
  Description of Artificial Sequence: Synthetic oligonucleotide
  Sense strand starting at position 261 of SEQ ID NO: 2964
cuuuguugcuaagugaaug

SEQ ID NO: 230213 - RNA, 19 nt, Artificial Sequence
  Description of Artificial Sequence: Synthetic oligonucleotide
  Antisense strand to SEQ ID NO: 230212
cauucacuuagcaacaaag

SEQ ID NO: 230214 - RNA, 19 nt, Artificial Sequence
  Description of Artificial Sequence: Synthetic oligonucleotide
  Sense strand starting at position 266 of SEQ ID NO: 2964
uugcuaagugaaugccaaa

SEQ ID NO: 230215 - RNA, 19 nt, Artificial Sequence
  Description of Artificial Sequence: Synthetic oligonucleotide
  Antisense strand to SEQ ID NO: 230214
uuuggcauucacuuagcaa

SEQ ID NO: 230216 - RNA, 19 nt, Artificial Sequence
  Description of Artificial Sequence: Synthetic oligonucleotide
  Sense strand starting at position 277 of SEQ ID NO: 2964
augccaaagugcuacaaga

SEQ ID NO: 230217 - RNA, 19 nt, Artificial Sequence
  Description of Artificial Sequence: Synthetic oligonucleotide
  Antisense strand to SEQ ID NO: 230216
ucuuguagcacuuuggcau

SEQ ID NO: 230218 - RNA, 19 nt, Artificial Sequence
  Description of Artificial Sequence: Synthetic oligonucleotide
  Sense strand starting at position 279 of SEQ ID NO: 2964
gccaaagugcuacaagauc

SEQ ID NO: 230219 - RNA, 19 nt, Artificial Sequence
  Description of Artificial Sequence: Synthetic oligonucleotide
  Antisense strand to SEQ ID NO: 230218
gaucuuguagcacuuuggc

SEQ ID NO: 230220 - RNA, 19 nt, Artificial Sequence
  Description of Artificial Sequence: Synthetic oligonucleotide
  Sense strand starting at position 301 of SEQ ID NO: 2964
uggagaaguucucaccacu

SEQ ID NO: 230221 - RNA, 19 nt, Artificial Sequence
  Description of Artificial Sequence: Synthetic oligonucleotide
  Antisense strand to SEQ ID NO: 230220
aguggugagaacuucucca

SEQ ID NO: 230222 - RNA, 19 nt, Artificial Sequence
  Description of Artificial Sequence: Synthetic oligonucleotide
  Sense strand starting at position 403 of SEQ ID NO: 2964
acuggucagcuccaaucaa

SEQ ID NO: 230223 - RNA, 19 nt, Artificial Sequence
  Description of Artificial Sequence: Synthetic oligonucleotide
  Antisense strand to SEQ ID NO: 230222
uugauuggagcugaccagu

SEQ ID NO: 230224 - RNA, 19 nt, Artificial Sequence
  Description of Artificial Sequence: Synthetic oligonucleotide
  Sense strand starting at position 639 of SEQ ID NO: 2964
gcaggugccuggauuggua

SEQ ID NO: 230225 - RNA, 19 nt, Artificial Sequence
  Description of Artificial Sequence: Synthetic oligonucleotide
  Antisense strand to SEQ ID NO: 230224
uaccaauccaggcaccugc

SEQ ID NO: 230226 - RNA, 19 nt, Artificial Sequence
  Description of Artificial Sequence: Synthetic oligonucleotide
  Sense strand starting at position 1137 of SEQ ID NO: 2964
acuggaagaaggugucaga

SEQ ID NO: 230227 - RNA, 19 nt, Artificial Sequence
  Description of Artificial Sequence: Synthetic oligonucleotide
  Antisense strand to SEQ ID NO: 230226
ucugacaccuucuuccagu

SEQ ID NO: 230228 - RNA, 19 nt, Artificial Sequence
  Description of Artificial Sequence: Synthetic oligonucleotide
  Sense strand starting at position 1476 of SEQ ID NO: 2964
cgcauuucugccgguagau

SEQ ID NO: 230229 - RNA, 19 nt, Artificial Sequence
  Description of Artificial Sequence: Synthetic oligonucleotide
  Antisense strand to SEQ ID NO: 230228
aucuaccggcagaaaugcg

SEQ ID NO: 230230 - RNA, 19 nt, Artificial Sequence
  Description of Artificial Sequence: Synthetic oligonucleotide
  Sense strand starting at position 1850 of SEQ ID NO: 2964
agugguagagccagucagu

SEQ ID NO: 230231 - RNA, 19 nt, Artificial Sequence
  Description of Artificial Sequence: Synthetic oligonucleotide
  Antisense strand to SEQ ID NO: 230230
acugacuggcucuaccacu

SEQ ID NO: 230232 - RNA, 19 nt, Artificial Sequence
  Description of Artificial Sequence: Synthetic oligonucleotide
  Sense strand starting at position 2398 of SEQ ID NO: 2964
aagugaccucaucguguuu

SEQ ID NO: 230233 - RNA, 19 nt, Artificial Sequence
  Description of Artificial Sequence: Synthetic oligonucleotide
  Antisense strand to SEQ ID NO: 230232
aaacacgaugaggucacuu

SEQ ID NO: 230234 - RNA, 19 nt, Artificial Sequence
  Description of Artificial Sequence: Synthetic oligonucleotide
  Sense strand starting at position 2403 of SEQ ID NO: 2964
accucaucguguuuggaaa

SEQ ID NO: 230235 - RNA, 19 nt, Artificial Sequence
  Description of Artificial Sequence: Synthetic oligonucleotide
  Antisense strand to SEQ ID NO: 230234
uuuccaaacacgaugaggu

SEQ ID NO: 230236 - RNA, 19 nt, Artificial Sequence
  Description of Artificial Sequence: Synthetic oligonucleotide
  Sense strand starting at position 2404 of SEQ ID NO: 2964
ccucaucguguuuggaaac

SEQ ID NO: 230237 - RNA, 19 nt, Artificial Sequence
  Description of Artificial Sequence: Synthetic oligonucleotide
  Antisense strand to SEQ ID NO: 230236
guuuccaaacacgaugagg

SEQ ID NO: 230238 - RNA, 19 nt, Artificial Sequence
  Description of Artificial Sequence: Synthetic oligonucleotide
  Sense strand starting at position 2415 of SEQ ID NO: 2964
uuggaaacuugacuguuua

SEQ ID NO: 230239 - RNA, 19 nt, Artificial Sequence
  Description of Artificial Sequence: Synthetic oligonucleotide
  Antisense strand to SEQ ID NO: 230238
uaaacagucaaguuuccaa

SEQ ID NO: 230240 - RNA, 19 nt, Artificial Sequence
  Description of Artificial Sequence: Synthetic oligonucleotide
  Sense strand starting at position 2416 of SEQ ID NO: 2964
uggaaacuugacuguuuaa

SEQ ID NO: 230241 - RNA, 19 nt, Artificial Sequence
  Description of Artificial Sequence: Synthetic oligonucleotide
  Antisense strand to SEQ ID NO: 230240
uuaaacagucaaguuucca

SEQ ID NO: 230242 - RNA, 19 nt, Artificial Sequence
  Description of Artificial Sequence: Synthetic oligonucleotide
  Sense strand starting at position 2437 of SEQ ID NO: 2964
uugucuaccugagcucaua

SEQ ID NO: 230243 - RNA, 19 nt, Artificial Sequence
  Description of Artificial Sequence: Synthetic oligonucleotide
  Antisense strand to SEQ ID NO: 230242
uaugagcucagguagacaa

SEQ ID NO: 230244 - RNA, 19 nt, Artificial Sequence
  Description of Artificial Sequence: Synthetic oligonucleotide
  Sense strand starting at position 2651 of SEQ ID NO: 2964
cucaguggauuuggaagaa

SEQ ID NO: 230245 - RNA, 19 nt, Artificial Sequence
  Description of Artificial Sequence: Synthetic oligonucleotide
  Antisense strand to SEQ ID NO: 230244
uucuuccaaauccacugag

SEQ ID NO: 230246 - RNA, 19 nt, Artificial Sequence
  Description of Artificial Sequence: Synthetic oligonucleotide
  Sense strand starting at position 2672 of SEQ ID NO: 2964
ccagccaaguguccagaau

SEQ ID NO: 230247 - RNA, 19 nt, Artificial Sequence
  Description of Artificial Sequence: Synthetic oligonucleotide
  Antisense strand to SEQ ID NO: 230246
auucuggacacuuggcugg

SEQ ID NO: 230248 - RNA, 19 nt, Artificial Sequence
  Description of Artificial Sequence: Synthetic oligonucleotide
  Sense strand starting at position 2681 of SEQ ID NO: 2964
uguccagaaucauugcuau

SEQ ID NO: 230249 - RNA, 19 nt, Artificial Sequence
  Description of Artificial Sequence: Synthetic oligonucleotide
  Antisense strand to SEQ ID NO: 230248
auagcaaugauucuggaca

SEQ ID NO: 230250 - RNA, 19 nt, Artificial Sequence
  Description of Artificial Sequence: Synthetic oligonucleotide
  Sense strand starting at position 2757 of SEQ ID NO: 2964
uaggaaugcuaagagucua

SEQ ID NO: 230251 - RNA, 19 nt, Artificial Sequence
  Description of Artificial Sequence: Synthetic oligonucleotide
  Antisense strand to SEQ ID NO: 230250
uagacucuuagcauuccua

SEQ ID NO: 230252 - RNA, 19 nt, Artificial Sequence
  Description of Artificial Sequence: Synthetic oligonucleotide
  Sense strand starting at position 2829 of SEQ ID NO: 2964
aguuaucucucagacaugu

SEQ ID NO: 230253 - RNA, 19 nt, Artificial Sequence
  Description of Artificial Sequence: Synthetic oligonucleotide
  Antisense strand to SEQ ID NO: 230252
acaugucugagagauaacu

SEQ ID NO: 230254 - RNA, 19 nt, Artificial Sequence
  Description of Artificial Sequence: Synthetic oligonucleotide
  Sense strand starting at position 2855 of SEQ ID NO: 2964
ucacguuaucgcguuguga

SEQ ID NO: 230255 - RNA, 19 nt, Artificial Sequence
  Description of Artificial Sequence: Synthetic oligonucleotide
  Antisense strand to SEQ ID NO: 230254
ucacaacgcgauaacguga

SEQ ID NO: 230256 - RNA, 19 nt, Artificial Sequence
  Description of Artificial Sequence: Synthetic oligonucleotide
  Sense strand starting at position 2856 of SEQ ID NO: 2964
cacguuaucgcguugugaa

SEQ ID NO: 230257 - RNA, 19 nt, Artificial Sequence
  Description of Artificial Sequence: Synthetic oligonucleotide
  Antisense strand to SEQ ID NO: 230256
uucacaacgcgauaacgug

SEQ ID NO: 230258 - RNA, 19 nt, Artificial Sequence
  Description of Artificial Sequence: Synthetic oligonucleotide
  Sense strand starting at position 2857 of SEQ ID NO: 2964
acguuaucgcguugugaag

SEQ ID NO: 230259 - RNA, 19 nt, Artificial Sequence
  Description of Artificial Sequence: Synthetic oligonucleotide
  Antisense strand to SEQ ID NO: 230258
cuucacaacgcgauaacgu

SEQ ID NO: 230260 - RNA, 19 nt, Artificial Sequence
  Description of Artificial Sequence: Synthetic oligonucleotide
  Sense strand starting at position 2858 of SEQ ID NO: 2964
cguuaucgcguugugaaga

SEQ ID NO: 230261 - RNA, 19 nt, Artificial Sequence
  Description of Artificial Sequence: Synthetic oligonucleotide
  Antisense strand to SEQ ID NO: 230260
ucuucacaacgcgauaacg

SEQ ID NO: 230262 - RNA, 19 nt, Artificial Sequence
  Description of Artificial Sequence: Synthetic oligonucleotide
  Sense strand starting at position 2863 of SEQ ID NO: 2964
ucgcguugugaagacaacu

SEQ ID NO: 230263 - RNA, 19 nt, Artificial Sequence
  Description of Artificial Sequence: Synthetic oligonucleotide
  Antisense strand to SEQ ID NO: 230262
aguugucuucacaacgcga

SEQ ID NO: 230264 - RNA, 19 nt, Artificial Sequence
  Description of Artificial Sequence: Synthetic oligonucleotide
  Sense strand starting at position 2871 of SEQ ID NO: 2964
ugaagacaacuccguaaca

SEQ ID NO: 230265 - RNA, 19 nt, Artificial Sequence
  Description of Artificial Sequence: Synthetic oligonucleotide
  Antisense strand to SEQ ID NO: 230264
uguuacggaguugucuuca

SEQ ID NO: 230266 - RNA, 19 nt, Artificial Sequence
  Description of Artificial Sequence: Synthetic oligonucleotide
  Sense strand starting at position 3140 of SEQ ID NO: 2964
cucguuggaacauguaaga

SEQ ID NO: 230267 - RNA, 19 nt, Artificial Sequence
  Description of Artificial Sequence: Synthetic oligonucleotide
  Antisense strand to SEQ ID NO: 230266
ucuuacauguuccaacgag

SEQ ID NO: 230268 - RNA, 19 nt, Artificial Sequence
  Description of Artificial Sequence: Synthetic oligonucleotide
  Sense strand starting at position 3168 of SEQ ID NO: 2964
aaaggagucuaggccaaua

SEQ ID NO: 230269 - RNA, 19 nt, Artificial Sequence
  Description of Artificial Sequence: Synthetic oligonucleotide
  Antisense strand to SEQ ID NO: 230268
uauuggccuagacuccuuu

SEQ ID NO: 230270 - RNA, 19 nt, Artificial Sequence
  Description of Artificial Sequence: Synthetic oligonucleotide
  Sense strand starting at position 3173 of SEQ ID NO: 2964
agucuaggccaauaaagua

SEQ ID NO: 230271 - RNA, 19 nt, Artificial Sequence
  Description of Artificial Sequence: Synthetic oligonucleotide
  Antisense strand to SEQ ID NO: 230270
uacuuuauuggccuagacu

SEQ ID NO: 230272 - RNA, 19 nt, Artificial Sequence
  Description of Artificial Sequence: Synthetic oligonucleotide
  Sense strand starting at position 3312 of SEQ ID NO: 2964
ggccuugaggucuaaaguc

SEQ ID NO: 230273 - RNA, 19 nt, Artificial Sequence
  Description of Artificial Sequence: Synthetic oligonucleotide
  Antisense strand to SEQ ID NO: 230272
gacuuuagaccucaaggcc

SEQ ID NO: 230274 - RNA, 19 nt, Artificial Sequence
  Description of Artificial Sequence: Synthetic oligonucleotide
  Sense strand starting at position 3358 of SEQ ID NO: 2964
uucccuaagucagaggaaa

SEQ ID NO: 230275 - RNA, 19 nt, Artificial Sequence
  Description of Artificial Sequence: Synthetic oligonucleotide
  Antisense strand to SEQ ID NO: 230274
uuuccucugacuuagggaa

SEQ ID NO: 230276 - RNA, 19 nt, Artificial Sequence
  Description of Artificial Sequence: Synthetic oligonucleotide
  Sense strand starting at position 3395 of SEQ ID NO: 2964
agcccaaagugucuucuuu

SEQ ID NO: 230277 - RNA, 19 nt, Artificial Sequence
  Description of Artificial Sequence: Synthetic oligonucleotide
  Antisense strand to SEQ ID NO: 230276
aaagaagacacuuugggcu

SEQ ID NO: 230278 - RNA, 19 nt, Artificial Sequence
  Description of Artificial Sequence: Synthetic oligonucleotide
  Sense strand starting at position 3682 of SEQ ID NO: 2964
cauagaucauuagagagau

SEQ ID NO: 230279 - RNA, 19 nt, Artificial Sequence
  Description of Artificial Sequence: Synthetic oligonucleotide
  Antisense strand to SEQ ID NO: 230278
aucucucuaaugaucuaug

SEQ ID NO: 230280 - RNA, 19 nt, Artificial Sequence
  Description of Artificial Sequence: Synthetic oligonucleotide
  Sense strand starting at position 289 of SEQ ID NO: 2965
gggcaauucucucuaaaua

SEQ ID NO: 230281 - RNA, 19 nt, Artificial Sequence
  Description of Artificial Sequence: Synthetic oligonucleotide
  Antisense strand to SEQ ID NO: 230280
uauuuagagagaauugccc

SEQ ID NO: 230282 - RNA, 19 nt, Artificial Sequence
  Description of Artificial Sequence: Synthetic oligonucleotide
  Sense strand starting at position 360 of SEQ ID NO: 2965
ccuuccauuucggaaacua

SEQ ID NO: 230283 - RNA, 19 nt, Artificial Sequence
  Description of Artificial Sequence: Synthetic oligonucleotide
  Antisense strand to SEQ ID NO: 230282
uaguuuccgaaauggaagg

SEQ ID NO: 230284 - RNA, 19 nt, Artificial Sequence
  Description of Artificial Sequence: Synthetic oligonucleotide
  Sense strand starting at position 578 of SEQ ID NO: 2965
aguuacucuuuaugaauga

SEQ ID NO: 230285 - RNA, 19 nt, Artificial Sequence
  Description of Artificial Sequence: Synthetic oligonucleotide
  Antisense strand to SEQ ID NO: 230284
ucauucauaaagaguaacu

SEQ ID NO: 230286 - RNA, 19 nt, Artificial Sequence
  Description of Artificial Sequence: Synthetic oligonucleotide
  Sense strand starting at position 664 of SEQ ID NO: 2965
aacgaauguuagcucccua

SEQ ID NO: 230287 - RNA, 19 nt, Artificial Sequence
  Description of Artificial Sequence: Synthetic oligonucleotide
  Antisense strand to SEQ ID NO: 230286
uagggagcuaacauucguu

SEQ ID NO: 230288 - RNA, 19 nt, Artificial Sequence
  Description of Artificial Sequence: Synthetic oligonucleotide
  Sense strand starting at position 838 of SEQ ID NO: 2965
uuuaucaagucuuaggaaa

SEQ ID NO: 230289 - RNA, 19 nt, Artificial Sequence
  Description of Artificial Sequence: Synthetic oligonucleotide
  Antisense strand to SEQ ID NO: 230288
uuuccuaagacuugauaaa

SEQ ID NO: 230290 - RNA, 19 nt, Artificial Sequence
  Description of Artificial Sequence: Synthetic oligonucleotide
  Sense strand starting at position 840 of SEQ ID NO: 2965
uaucaagucuuaggaaaug

SEQ ID NO: 230291 - RNA, 19 nt, Artificial Sequence
  Description of Artificial Sequence: Synthetic oligonucleotide
  Antisense strand to SEQ ID NO: 230290
cauuuccuaagacuugaua

SEQ ID NO: 230292 - RNA, 19 nt, Artificial Sequence
  Description of Artificial Sequence: Synthetic oligonucleotide
  Sense strand starting at position 969 of SEQ ID NO: 2965
gcagauaugggcuaugcca

SEQ ID NO: 230293 - RNA, 19 nt, Artificial Sequence
  Description of Artificial Sequence: Synthetic oligonucleotide
  Antisense strand to SEQ ID NO: 230292
uggcauagcccauaucugc

SEQ ID NO: 230294 - RNA, 19 nt, Artificial Sequence
  Description of Artificial Sequence: Synthetic oligonucleotide
  Sense strand starting at position 977 of SEQ ID NO: 2965
gggcuaugccaacauuaac

SEQ ID NO: 230295 - RNA, 19 nt, Artificial Sequence
  Description of Artificial Sequence: Synthetic oligonucleotide
  Antisense strand to SEQ ID NO: 230294
guuaauguuggcauagccc

SEQ ID NO: 230296 - RNA, 19 nt, Artificial Sequence
  Description of Artificial Sequence: Synthetic oligonucleotide
  Sense strand starting at position 1057 of SEQ ID NO: 2965
uaacgacuccuccaggagu

SEQ ID NO: 230297 - RNA, 19 nt, Artificial Sequence
  Description of Artificial Sequence: Synthetic oligonucleotide
  Antisense strand to SEQ ID NO: 230296
acuccuggaggagucguua

SEQ ID NO: 230298 - RNA, 19 nt, Artificial Sequence
  Description of Artificial Sequence: Synthetic oligonucleotide
  Sense strand starting at position 1059 of SEQ ID NO: 2965
acgacuccuccaggaguaa

SEQ ID NO: 230299 - RNA, 19 nt, Artificial Sequence
  Description of Artificial Sequence: Synthetic oligonucleotide
  Antisense strand to SEQ ID NO: 230298
uuacuccuggaggagucgu

SEQ ID NO: 230300 - RNA, 19 nt, Artificial Sequence
  Description of Artificial Sequence: Synthetic oligonucleotide
  Sense strand starting at position 1083 of SEQ ID NO: 2965
ggaagccagguuuaucauu

SEQ ID NO: 230301 - RNA, 19 nt, Artificial Sequence
  Description of Artificial Sequence: Synthetic oligonucleotide
  Antisense strand to SEQ ID NO: 230300
aaugauaaaccuggcuucc

SEQ ID NO: 230302 - RNA, 19 nt, Artificial Sequence
  Description of Artificial Sequence: Synthetic oligonucleotide
  Sense strand starting at position 1383 of SEQ ID NO: 2965
gcacuuaccugcuuugcaa

SEQ ID NO: 230303 - RNA, 19 nt, Artificial Sequence
  Description of Artificial Sequence: Synthetic oligonucleotide
  Antisense strand to SEQ ID NO: 230302
uugcaaagcagguaagugc

SEQ ID NO: 230304 - RNA, 19 nt, Artificial Sequence
  Description of Artificial Sequence: Synthetic oligonucleotide
  Sense strand starting at position 2055 of SEQ ID NO: 2965
gaggauucucgaggccgga

SEQ ID NO: 230305 - RNA, 19 nt, Artificial Sequence
  Description of Artificial Sequence: Synthetic oligonucleotide
  Antisense strand to SEQ ID NO: 230304
uccggccucgagaauccuc

SEQ ID NO: 230306 - RNA, 19 nt, Artificial Sequence
  Description of Artificial Sequence: Synthetic oligonucleotide
  Sense strand starting at position 2180 of SEQ ID NO: 2965
gccgcuccucaucaacaau

SEQ ID NO: 230307 - RNA, 19 nt, Artificial Sequence
  Description of Artificial Sequence: Synthetic oligonucleotide
  Antisense strand to SEQ ID NO: 230306
auuguugaugaggagcggc

SEQ ID NO: 230308 - RNA, 19 nt, Artificial Sequence
  Description of Artificial Sequence: Synthetic oligonucleotide
  Sense strand starting at position 2340 of SEQ ID NO: 2965
gagaccgucugcucuuuaa

SEQ ID NO: 230309 - RNA, 19 nt, Artificial Sequence
  Description of Artificial Sequence: Synthetic oligonucleotide
  Antisense strand to SEQ ID NO: 230308
uuaaagagcagacggucuc

SEQ ID NO: 230310 - RNA, 19 nt, Artificial Sequence
  Description of Artificial Sequence: Synthetic oligonucleotide
  Sense strand starting at position 2343 of SEQ ID NO: 2965
accgucugcucuuuaaaga

SEQ ID NO: 230311 - RNA, 19 nt, Artificial Sequence
  Description of Artificial Sequence: Synthetic oligonucleotide
  Antisense strand to SEQ ID NO: 230310
ucuuuaaagagcagacggu

SEQ ID NO: 230312 - RNA, 19 nt, Artificial Sequence
  Description of Artificial Sequence: Synthetic oligonucleotide
  Sense strand starting at position 2344 of SEQ ID NO: 2965
ccgucugcucuuuaaagag

SEQ ID NO: 230313 - RNA, 19 nt, Artificial Sequence
  Description of Artificial Sequence: Synthetic oligonucleotide
  Antisense strand to SEQ ID NO: 230312
cucuuuaaagagcagacgg

SEQ ID NO: 230314 - RNA, 19 nt, Artificial Sequence
  Description of Artificial Sequence: Synthetic oligonucleotide
  Sense strand starting at position 2786 of SEQ ID NO: 2965
aggcaaaucucagaaagau

SEQ ID NO: 230315 - RNA, 19 nt, Artificial Sequence
  Description of Artificial Sequence: Synthetic oligonucleotide
  Antisense strand to SEQ ID NO: 230314
aucuuucugagauuugccu

SEQ ID NO: 230316 - RNA, 19 nt, Artificial Sequence
  Description of Artificial Sequence: Synthetic oligonucleotide
  Sense strand starting at position 2801 of SEQ ID NO: 2965
agauuaaacuugccuguua

SEQ ID NO: 230317 - RNA, 19 nt, Artificial Sequence
  Description of Artificial Sequence: Synthetic oligonucleotide
  Antisense strand to SEQ ID NO: 230316
uaacaggcaaguuuaaucu

SEQ ID NO: 230318 - RNA, 19 nt, Artificial Sequence
  Description of Artificial Sequence: Synthetic oligonucleotide
  Sense strand starting at position 2802 of SEQ ID NO: 2965
gauuaaacuugccuguuag

SEQ ID NO: 230319 - RNA, 19 nt, Artificial Sequence
  Description of Artificial Sequence: Synthetic oligonucleotide
  Antisense strand to SEQ ID NO: 230318
cuaacaggcaaguuuaauc

SEQ ID NO: 230320 - RNA, 19 nt, Artificial Sequence
  Description of Artificial Sequence: Synthetic oligonucleotide
  Sense strand starting at position 2806 of SEQ ID NO: 2965
aaacuugccuguuagaaug

SEQ ID NO: 230321 - RNA, 19 nt, Artificial Sequence
  Description of Artificial Sequence: Synthetic oligonucleotide
  Antisense strand to SEQ ID NO: 230320
cauucuaacaggcaaguuu

SEQ ID NO: 230322 - RNA, 19 nt, Artificial Sequence
  Description of Artificial Sequence: Synthetic oligonucleotide
  Sense strand starting at position 2874 of SEQ ID NO: 2965
ccuccuguaucucaaguaa

SEQ ID NO: 230323 - RNA, 19 nt, Artificial Sequence
  Description of Artificial Sequence: Synthetic oligonucleotide
  Antisense strand to SEQ ID NO: 230322
uuacuugagauacaggagg

SEQ ID NO: 230324 - RNA, 19 nt, Artificial Sequence
  Description of Artificial Sequence: Synthetic oligonucleotide
  Sense strand starting at position 2952 of SEQ ID NO: 2965
accuuaccaguuuguaaag

SEQ ID NO: 230325 - RNA, 19 nt, Artificial Sequence
  Description of Artificial Sequence: Synthetic oligonucleotide
  Antisense strand to SEQ ID NO: 230324
cuuuacaaacugguaaggu

SEQ ID NO: 230326 - RNA, 19 nt, Artificial Sequence
  Description of Artificial Sequence: Synthetic oligonucleotide
  Sense strand starting at position 2964 of SEQ ID NO: 2965
uguaaagugcuauaguuua

SEQ ID NO: 230327 - RNA, 19 nt, Artificial Sequence
  Description of Artificial Sequence: Synthetic oligonucleotide
  Antisense strand to SEQ ID NO: 230326
uaaacuauagcacuuuaca

SEQ ID NO: 230328 - RNA, 19 nt, Artificial Sequence
  Description of Artificial Sequence: Synthetic oligonucleotide
  Sense strand starting at position 2991 of SEQ ID NO: 2965
cuuauuugauucuacacga

SEQ ID NO: 230329 - RNA, 19 nt, Artificial Sequence
  Description of Artificial Sequence: Synthetic oligonucleotide
  Antisense strand to SEQ ID NO: 230328
ucguguagaaucaaauaag

SEQ ID NO: 230330 - RNA, 19 nt, Artificial Sequence
  Description of Artificial Sequence: Synthetic oligonucleotide
  Sense strand starting at position 2996 of SEQ ID NO: 2965
uugauucuacacgaucauu

SEQ ID NO: 230331 - RNA, 19 nt, Artificial Sequence
  Description of Artificial Sequence: Synthetic oligonucleotide
  Antisense strand to SEQ ID NO: 230330
aaugaucguguagaaucaa

SEQ ID NO: 230332 - RNA, 19 nt, Artificial Sequence
  Description of Artificial Sequence: Synthetic oligonucleotide
  Sense strand starting at position 3002 of SEQ ID NO: 2965
cuacacgaucauuguuuga

SEQ ID NO: 230333 - RNA, 19 nt, Artificial Sequence
  Description of Artificial Sequence: Synthetic oligonucleotide
  Antisense strand to SEQ ID NO: 230332
ucaaacaaugaucguguag

SEQ ID NO: 230334 - RNA, 19 nt, Artificial Sequence
  Description of Artificial Sequence: Synthetic oligonucleotide
  Sense strand starting at position 3004 of SEQ ID NO: 2965
acacgaucauuguuugaga

SEQ ID NO: 230335 - RNA, 19 nt, Artificial Sequence
  Description of Artificial Sequence: Synthetic oligonucleotide
  Antisense strand to SEQ ID NO: 230334
ucucaaacaaugaucgugu

SEQ ID NO: 230336 - RNA, 19 nt, Artificial Sequence
  Description of Artificial Sequence: Synthetic oligonucleotide
  Sense strand starting at position 3005 of SEQ ID NO: 2965
cacgaucauuguuugagac

SEQ ID NO: 230337 - RNA, 19 nt, Artificial Sequence
  Description of Artificial Sequence: Synthetic oligonucleotide
  Antisense strand to SEQ ID NO: 230336
gucucaaacaaugaucgug

SEQ ID NO: 230338 - RNA, 19 nt, Artificial Sequence
  Description of Artificial Sequence: Synthetic oligonucleotide
  Sense strand starting at position 3006 of SEQ ID NO: 2965
acgaucauuguuugagaca

SEQ ID NO: 230339 - RNA, 19 nt, Artificial Sequence
  Description of Artificial Sequence: Synthetic oligonucleotide
  Antisense strand to SEQ ID NO: 230338
ugucucaaacaaugaucgu

SEQ ID NO: 230340 - RNA, 19 nt, Artificial Sequence
  Description of Artificial Sequence: Synthetic oligonucleotide
  Sense strand starting at position 3007 of SEQ ID NO: 2965
cgaucauuguuugagacag

SEQ ID NO: 230341 - RNA, 19 nt, Artificial Sequence
  Description of Artificial Sequence: Synthetic oligonucleotide
  Antisense strand to SEQ ID NO: 230340
cugucucaaacaaugaucg

SEQ ID NO: 230342 - RNA, 19 nt, Artificial Sequence
  Description of Artificial Sequence: Synthetic oligonucleotide
  Sense strand starting at position 3009 of SEQ ID NO: 2965
aucauuguuugagacagaa

SEQ ID NO: 230343 - RNA, 19 nt, Artificial Sequence
  Description of Artificial Sequence: Synthetic oligonucleotide
  Antisense strand to SEQ ID NO: 230342
uucugucucaaacaaugau

SEQ ID NO: 230344 - RNA, 19 nt, Artificial Sequence
  Description of Artificial Sequence: Synthetic oligonucleotide
  Sense strand starting at position 3061 of SEQ ID NO: 2965
ggaaacaagucuuuggugu

SEQ ID NO: 230345 - RNA, 19 nt, Artificial Sequence
  Description of Artificial Sequence: Synthetic oligonucleotide
  Antisense strand to SEQ ID NO: 230344
acaccaaagacuuguuucc

SEQ ID NO: 230346 - RNA, 19 nt, Artificial Sequence
  Description of Artificial Sequence: Synthetic oligonucleotide
  Sense strand starting at position 3067 of SEQ ID NO: 2965
aagucuuugguguggcaaa

SEQ ID NO: 230347 - RNA, 19 nt, Artificial Sequence
  Description of Artificial Sequence: Synthetic oligonucleotide
  Antisense strand to SEQ ID NO: 230346
uuugccacaccaaagacuu

SEQ ID NO: 230348 - RNA, 19 nt, Artificial Sequence
  Description of Artificial Sequence: Synthetic oligonucleotide
  Sense strand starting at position 3180 of SEQ ID NO: 2965
ccaccugucuggcuauaaa

SEQ ID NO: 230349 - RNA, 19 nt, Artificial Sequence
  Description of Artificial Sequence: Synthetic oligonucleotide
  Antisense strand to SEQ ID NO: 230348
uuuauagccagacaggugg

SEQ ID NO: 230350 - RNA, 19 nt, Artificial Sequence
  Description of Artificial Sequence: Synthetic oligonucleotide
  Sense strand starting at position 3234 of SEQ ID NO: 2965
uuauuaguuguacaugcua

SEQ ID NO: 230351 - RNA, 19 nt, Artificial Sequence
  Description of Artificial Sequence: Synthetic oligonucleotide
  Antisense strand to SEQ ID NO: 230350
uagcauguacaacuaauaa

SEQ ID NO: 230352 - RNA, 19 nt, Artificial Sequence
  Description of Artificial Sequence: Synthetic oligonucleotide
  Sense strand starting at position 3241 of SEQ ID NO: 2965
uuguacaugcuagacagau

SEQ ID NO: 230353 - RNA, 19 nt, Artificial Sequence
  Description of Artificial Sequence: Synthetic oligonucleotide
  Antisense strand to SEQ ID NO: 230352
aucugucuagcauguacaa

SEQ ID NO: 230354 - RNA, 19 nt, Artificial Sequence
  Description of Artificial Sequence: Synthetic oligonucleotide
  Sense strand starting at position 3253 of SEQ ID NO: 2965
gacagauuucgucguguaa

SEQ ID NO: 230355 - RNA, 19 nt, Artificial Sequence
  Description of Artificial Sequence: Synthetic oligonucleotide
  Antisense strand to SEQ ID NO: 230354
uuacacgacgaaaucuguc

SEQ ID NO: 230356 - RNA, 19 nt, Artificial Sequence
  Description of Artificial Sequence: Synthetic oligonucleotide
  Sense strand starting at position 3423 of SEQ ID NO: 2965
gcucgaaucucggcucagu

SEQ ID NO: 230357 - RNA, 19 nt, Artificial Sequence
  Description of Artificial Sequence: Synthetic oligonucleotide
  Antisense strand to SEQ ID NO: 230356
acugagccgagauucgagc

SEQ ID NO: 230358 - RNA, 19 nt, Artificial Sequence
  Description of Artificial Sequence: Synthetic oligonucleotide
  Sense strand starting at position 3897 of SEQ ID NO: 2965
ggaaggagccgagaucguu

SEQ ID NO: 230359 - RNA, 19 nt, Artificial Sequence
  Description of Artificial Sequence: Synthetic oligonucleotide
  Antisense strand to SEQ ID NO: 230358
aacgaucucggcuccuucc

SEQ ID NO: 230360 - RNA, 19 nt, Artificial Sequence
  Description of Artificial Sequence: Synthetic oligonucleotide
  Sense strand starting at position 10 of SEQ ID NO: 2966
ggcagcuaucaugacuaaa

SEQ ID NO: 230361 - RNA, 19 nt, Artificial Sequence
  Description of Artificial Sequence: Synthetic oligonucleotide
  Antisense strand to SEQ ID NO: 230360
uuuagucaugauagcugcc

SEQ ID NO: 230362 - RNA, 19 nt, Artificial Sequence
  Description of Artificial Sequence: Synthetic oligonucleotide
  Sense strand starting at position 50 of SEQ ID NO: 2966
uuucgaggaugguuacaaa

SEQ ID NO: 230363 - RNA, 19 nt, Artificial Sequence
  Description of Artificial Sequence: Synthetic oligonucleotide
  Antisense strand to SEQ ID NO: 230362
uuuguaaccauccucgaaa

SEQ ID NO: 230364 - RNA, 19 nt, Artificial Sequence
  Description of Artificial Sequence: Synthetic oligonucleotide
  Sense strand starting at position 110 of SEQ ID NO: 2966
cuaacuugguaugugguaa

SEQ ID NO: 230365 - RNA, 19 nt, Artificial Sequence
  Description of Artificial Sequence: Synthetic oligonucleotide
  Antisense strand to SEQ ID NO: 230364
uuaccacauaccaaguuag

SEQ ID NO: 230366 - RNA, 19 nt, Artificial Sequence
  Description of Artificial Sequence: Synthetic oligonucleotide
  Sense strand starting at position 137 of SEQ ID NO: 2966
agugaugcaagaugcuuaa

SEQ ID NO: 230367 - RNA, 19 nt, Artificial Sequence
  Description of Artificial Sequence: Synthetic oligonucleotide
  Antisense strand to SEQ ID NO: 230366
uuaagcaucuugcaucacu

SEQ ID NO: 230368 - RNA, 19 nt, Artificial Sequence
  Description of Artificial Sequence: Synthetic oligonucleotide
  Sense strand starting at position 156 of SEQ ID NO: 2966
aaauuaagucaauacgagu

SEQ ID NO: 230369 - RNA, 19 nt, Artificial Sequence
  Description of Artificial Sequence: Synthetic oligonucleotide
  Antisense strand to SEQ ID NO: 230368
acucguauugacuuaauuu

SEQ ID NO: 230370 - RNA, 19 nt, Artificial Sequence
  Description of Artificial Sequence: Synthetic oligonucleotide
  Sense strand starting at position 586 of SEQ ID NO: 2966
auuagaagagcuugugaca

SEQ ID NO: 230371 - RNA, 19 nt, Artificial Sequence
  Description of Artificial Sequence: Synthetic oligonucleotide
  Antisense strand to SEQ ID NO: 230370
ugucacaagcucuucuaau

SEQ ID NO: 230372 - RNA, 19 nt, Artificial Sequence
  Description of Artificial Sequence: Synthetic oligonucleotide
  Sense strand starting at position 600 of SEQ ID NO: 2966
ugacauuccugagcccaaa

SEQ ID NO: 230373 - RNA, 19 nt, Artificial Sequence
  Description of Artificial Sequence: Synthetic oligonucleotide
  Antisense strand to SEQ ID NO: 230372
uuugggcucaggaauguca

SEQ ID NO: 230374 - RNA, 19 nt, Artificial Sequence
  Description of Artificial Sequence: Synthetic oligonucleotide
  Sense strand starting at position 637 of SEQ ID NO: 2966
gguauaguugaugggcauu

SEQ ID NO: 230375 - RNA, 19 nt, Artificial Sequence
  Description of Artificial Sequence: Synthetic oligonucleotide
  Antisense strand to SEQ ID NO: 230374
aaugcccaucaacuauacc

SEQ ID NO: 230376 - RNA, 19 nt, Artificial Sequence
  Description of Artificial Sequence: Synthetic oligonucleotide
  Sense strand starting at position 676 of SEQ ID NO: 2966
ggaggccgauucuuuaaua

SEQ ID NO: 230377 - RNA, 19 nt, Artificial Sequence
  Description of Artificial Sequence: Synthetic oligonucleotide
  Antisense strand to SEQ ID NO: 230376
uauuaaagaaucggccucc

SEQ ID NO: 230378 - RNA, 19 nt, Artificial Sequence
  Description of Artificial Sequence: Synthetic oligonucleotide
  Sense strand starting at position 677 of SEQ ID NO: 2966
gaggccgauucuuuaauag

SEQ ID NO: 230379 - RNA, 19 nt, Artificial Sequence
  Description of Artificial Sequence: Synthetic oligonucleotide
  Antisense strand to SEQ ID NO: 230378
cuauuaaagaaucggccuc

SEQ ID NO: 230380 - RNA, 19 nt, Artificial Sequence
  Description of Artificial Sequence: Synthetic oligonucleotide
  Sense strand starting at position 692 of SEQ ID NO: 2966
auaggauucugaucuuuau

SEQ ID NO: 230381 - RNA, 19 nt, Artificial Sequence
  Description of Artificial Sequence: Synthetic oligonucleotide
  Antisense strand to SEQ ID NO: 230380
auaaagaucagaauccuau

SEQ ID NO: 230382 - RNA, 19 nt, Artificial Sequence
  Description of Artificial Sequence: Synthetic oligonucleotide
  Sense strand starting at position 695 of SEQ ID NO: 2966
ggauucugaucuuuauagu

SEQ ID NO: 230383 - RNA, 19 nt, Artificial Sequence
  Description of Artificial Sequence: Synthetic oligonucleotide
  Antisense strand to SEQ ID NO: 230382
acuauaaagaucagaaucc

SEQ ID NO: 230384 - RNA, 19 nt, Artificial Sequence
  Description of Artificial Sequence: Synthetic oligonucleotide
  Sense strand starting at position 712 of SEQ ID NO: 2966
guagaauccugucugauuc

SEQ ID NO: 230385 - RNA, 19 nt, Artificial Sequence
  Description of Artificial Sequence: Synthetic oligonucleotide
  Antisense strand to SEQ ID NO: 230384
gaaucagacaggauucuac

SEQ ID NO: 230386 - RNA, 19 nt, Artificial Sequence
  Description of Artificial Sequence: Synthetic oligonucleotide
  Sense strand starting at position 774 of SEQ ID NO: 2966
acuuucuuaucugucagau

SEQ ID NO: 230387 - RNA, 19 nt, Artificial Sequence
  Description of Artificial Sequence: Synthetic oligonucleotide
  Antisense strand to SEQ ID NO: 230386
aucugacagauaagaaagu

SEQ ID NO: 230388 - RNA, 19 nt, Artificial Sequence
  Description of Artificial Sequence: Synthetic oligonucleotide
  Sense strand starting at position 799 of SEQ ID NO: 2966
uuaugagaucagugauucu

SEQ ID NO: 230389 - RNA, 19 nt, Artificial Sequence
  Description of Artificial Sequence: Synthetic oligonucleotide
  Antisense strand to SEQ ID NO: 230388
agaaucacugaucucauaa

SEQ ID NO: 230390 - RNA, 19 nt, Artificial Sequence
  Description of Artificial Sequence: Synthetic oligonucleotide
  Sense strand starting at position 910 of SEQ ID NO: 2966
gugggaauuuaugaaagac

SEQ ID NO: 230391 - RNA, 19 nt, Artificial Sequence
  Description of Artificial Sequence: Synthetic oligonucleotide
  Antisense strand to SEQ ID NO: 230390
gucuuucauaaauucccac

SEQ ID NO: 230392 - RNA, 19 nt, Artificial Sequence
  Description of Artificial Sequence: Synthetic oligonucleotide
  Sense strand starting at position 1135 of SEQ ID NO: 2966
ggccgaucucuugaaccuu

SEQ ID NO: 230393 - RNA, 19 nt, Artificial Sequence
  Description of Artificial Sequence: Synthetic oligonucleotide
  Antisense strand to SEQ ID NO: 230392
aagguucaagagaucggcc

SEQ ID NO: 230394 - RNA, 19 nt, Artificial Sequence
  Description of Artificial Sequence: Synthetic oligonucleotide
  Sense strand starting at position 1426 of SEQ ID NO: 2966
agaacuccugauuggcaaa

SEQ ID NO: 230395 - RNA, 19 nt, Artificial Sequence
  Description of Artificial Sequence: Synthetic oligonucleotide
  Antisense strand to SEQ ID NO: 230394
uuugccaaucaggaguucu

SEQ ID NO: 230396 - RNA, 19 nt, Artificial Sequence
  Description of Artificial Sequence: Synthetic oligonucleotide
  Sense strand starting at position 1689 of SEQ ID NO: 2966
uccagaguccucugcagaa

SEQ ID NO: 230397 - RNA, 19 nt, Artificial Sequence
  Description of Artificial Sequence: Synthetic oligonucleotide
  Antisense strand to SEQ ID NO: 230396
uucugcagaggacucugga

SEQ ID NO: 230398 - RNA, 19 nt, Artificial Sequence
  Description of Artificial Sequence: Synthetic oligonucleotide
  Sense strand starting at position 1693 of SEQ ID NO: 2966
gaguccucugcagaaggga

SEQ ID NO: 230399 - RNA, 19 nt, Artificial Sequence
  Description of Artificial Sequence: Synthetic oligonucleotide
  Antisense strand to SEQ ID NO: 230398
ucccuucugcagaggacuc

SEQ ID NO: 230400 - RNA, 19 nt, Artificial Sequence
  Description of Artificial Sequence: Synthetic oligonucleotide
  Sense strand starting at position 1762 of SEQ ID NO: 2966
gugucucauccauggagga

SEQ ID NO: 230401 - RNA, 19 nt, Artificial Sequence
  Description of Artificial Sequence: Synthetic oligonucleotide
  Antisense strand to SEQ ID NO: 230400
uccuccauggaugagacac

SEQ ID NO: 230402 - RNA, 19 nt, Artificial Sequence
  Description of Artificial Sequence: Synthetic oligonucleotide
  Sense strand starting at position 1763 of SEQ ID NO: 2966
ugucucauccauggaggaa

SEQ ID NO: 230403 - RNA, 19 nt, Artificial Sequence
  Description of Artificial Sequence: Synthetic oligonucleotide
  Antisense strand to SEQ ID NO: 230402
uuccuccauggaugagaca

SEQ ID NO: 230404 - RNA, 19 nt, Artificial Sequence
  Description of Artificial Sequence: Synthetic oligonucleotide
  Sense strand starting at position 1946 of SEQ ID NO: 2966
guggacuuacggcaagaga

SEQ ID NO: 230405 - RNA, 19 nt, Artificial Sequence
  Description of Artificial Sequence: Synthetic oligonucleotide
  Antisense strand to SEQ ID NO: 230404
ucucuugccguaaguccac

SEQ ID NO: 230406 - RNA, 19 nt, Artificial Sequence
  Description of Artificial Sequence: Synthetic oligonucleotide
  Sense strand starting at position 2189 of SEQ ID NO: 2966
cucuguuaggcugauagca

SEQ ID NO: 230407 - RNA, 19 nt, Artificial Sequence
  Description of Artificial Sequence: Synthetic oligonucleotide
  Antisense strand to SEQ ID NO: 230406
ugcuaucagccuaacagag

SEQ ID NO: 230408 - RNA, 19 nt, Artificial Sequence
  Description of Artificial Sequence: Synthetic oligonucleotide
  Sense strand starting at position 2203 of SEQ ID NO: 2966
uagcaaucuguuuaguuga

SEQ ID NO: 230409 - RNA, 19 nt, Artificial Sequence
  Description of Artificial Sequence: Synthetic oligonucleotide
  Antisense strand to SEQ ID NO: 230408
ucaacuaaacagauugcua

SEQ ID NO: 230410 - RNA, 19 nt, Artificial Sequence
  Description of Artificial Sequence: Synthetic oligonucleotide
  Sense strand starting at position 2205 of SEQ ID NO: 2966
gcaaucuguuuaguugaaa

SEQ ID NO: 230411 - RNA, 19 nt, Artificial Sequence
  Description of Artificial Sequence: Synthetic oligonucleotide
  Antisense strand to SEQ ID NO: 230410
uuucaacuaaacagauugc

SEQ ID NO: 230412 - RNA, 19 nt, Artificial Sequence
  Description of Artificial Sequence: Synthetic oligonucleotide
  Sense strand starting at position 2263 of SEQ ID NO: 2966
cuacuuacgguuuacagua

SEQ ID NO: 230413 - RNA, 19 nt, Artificial Sequence
  Description of Artificial Sequence: Synthetic oligonucleotide
  Antisense strand to SEQ ID NO: 230412
uacuguaaaccguaaguag

SEQ ID NO: 230414 - RNA, 19 nt, Artificial Sequence
  Description of Artificial Sequence: Synthetic oligonucleotide
  Sense strand starting at position 2516 of SEQ ID NO: 2966
ucacgcaaauucuuuagaa

SEQ ID NO: 230415 - RNA, 19 nt, Artificial Sequence
  Description of Artificial Sequence: Synthetic oligonucleotide
  Antisense strand to SEQ ID NO: 230414
uucuaaagaauuugcguga

SEQ ID NO: 230416 - RNA, 19 nt, Artificial Sequence
  Description of Artificial Sequence: Synthetic oligonucleotide
  Sense strand starting at position 2518 of SEQ ID NO: 2966
acgcaaauucuuuagaaag

SEQ ID NO: 230417 - RNA, 19 nt, Artificial Sequence
  Description of Artificial Sequence: Synthetic oligonucleotide
  Antisense strand to SEQ ID NO: 230416
cuuucuaaagaauuugcgu

SEQ ID NO: 230418 - RNA, 19 nt, Artificial Sequence
  Description of Artificial Sequence: Synthetic oligonucleotide
  Sense strand starting at position 2541 of SEQ ID NO: 2966
agagcuuuccuauaauugc

SEQ ID NO: 230419 - RNA, 19 nt, Artificial Sequence
  Description of Artificial Sequence: Synthetic oligonucleotide
  Antisense strand to SEQ ID NO: 230418
gcaauuauaggaaagcucu

SEQ ID NO: 230420 - RNA, 19 nt, Artificial Sequence
  Description of Artificial Sequence: Synthetic oligonucleotide
  Sense strand starting at position 2643 of SEQ ID NO: 2966
gucauaaacuguucuaauu

SEQ ID NO: 230421 - RNA, 19 nt, Artificial Sequence
  Description of Artificial Sequence: Synthetic oligonucleotide
  Antisense strand to SEQ ID NO: 230420
aauuagaacaguuuaugac

SEQ ID NO: 230422 - RNA, 19 nt, Artificial Sequence
  Description of Artificial Sequence: Synthetic oligonucleotide
  Sense strand starting at position 2651 of SEQ ID NO: 2966
cuguucuaauucuuaaagu

SEQ ID NO: 230423 - RNA, 19 nt, Artificial Sequence
  Description of Artificial Sequence: Synthetic oligonucleotide
  Antisense strand to SEQ ID NO: 230422
acuuuaagaauuagaacag

SEQ ID NO: 230424 - RNA, 19 nt, Artificial Sequence
  Description of Artificial Sequence: Synthetic oligonucleotide
  Sense strand starting at position 2963 of SEQ ID NO: 2966
acaccuggcccuuaaugua

SEQ ID NO: 230425 - RNA, 19 nt, Artificial Sequence
  Description of Artificial Sequence: Synthetic oligonucleotide
  Antisense strand to SEQ ID NO: 230424
uacauuaagggccaggugu

SEQ ID NO: 230426 - RNA, 19 nt, Artificial Sequence
  Description of Artificial Sequence: Synthetic oligonucleotide
  Sense strand starting at position 3167 of SEQ ID NO: 2966
uggguauucuucuuguaag

SEQ ID NO: 230427 - RNA, 19 nt, Artificial Sequence
  Description of Artificial Sequence: Synthetic oligonucleotide
  Antisense strand to SEQ ID NO: 230426
cuuacaagaagaauaccca

SEQ ID NO: 230428 - RNA, 19 nt, Artificial Sequence
  Description of Artificial Sequence: Synthetic oligonucleotide
  Sense strand starting at position 3200 of SEQ ID NO: 2966
gcaaguucugguuaaggau

SEQ ID NO: 230429 - RNA, 19 nt, Artificial Sequence
  Description of Artificial Sequence: Synthetic oligonucleotide
  Antisense strand to SEQ ID NO: 230428
auccuuaaccagaacuugc

SEQ ID NO: 230430 - RNA, 19 nt, Artificial Sequence
  Description of Artificial Sequence: Synthetic oligonucleotide
  Sense strand starting at position 3229 of SEQ ID NO: 2966
agacucuugagcuguugaa

SEQ ID NO: 230431 - RNA, 19 nt, Artificial Sequence
  Description of Artificial Sequence: Synthetic oligonucleotide
  Antisense strand to SEQ ID NO: 230430
uucaacagcucaagagucu

SEQ ID NO: 230432 - RNA, 19 nt, Artificial Sequence
  Description of Artificial Sequence: Synthetic oligonucleotide
  Sense strand starting at position 3233 of SEQ ID NO: 2966
ucuugagcuguugaaucuu

SEQ ID NO: 230433 - RNA, 19 nt, Artificial Sequence
  Description of Artificial Sequence: Synthetic oligonucleotide
  Antisense strand to SEQ ID NO: 230432
aagauucaacagcucaaga

SEQ ID NO: 230434 - RNA, 19 nt, Artificial Sequence
  Description of Artificial Sequence: Synthetic oligonucleotide
  Sense strand starting at position 3269 of SEQ ID NO: 2966
augagaaaguugucaagcu

SEQ ID NO: 230435 - RNA, 19 nt, Artificial Sequence
  Description of Artificial Sequence: Synthetic oligonucleotide
  Antisense strand to SEQ ID NO: 230434
agcuugacaacuuucucau

SEQ ID NO: 230436 - RNA, 19 nt, Artificial Sequence
  Description of Artificial Sequence: Synthetic oligonucleotide
  Sense strand starting at position 3299 of SEQ ID NO: 2966
cccuaaauguguucuaaau

SEQ ID NO: 230437 - RNA, 19 nt, Artificial Sequence
  Description of Artificial Sequence: Synthetic oligonucleotide
  Antisense strand to SEQ ID NO: 230436
auuuagaacacauuuaggg

SEQ ID NO: 230438 - RNA, 19 nt, Artificial Sequence
  Description of Artificial Sequence: Synthetic oligonucleotide
  Sense strand starting at position 3347 of SEQ ID NO: 2966
auagucgucacgccuugau

SEQ ID NO: 230439 - RNA, 19 nt, Artificial Sequence
  Description of Artificial Sequence: Synthetic oligonucleotide
  Antisense strand to SEQ ID NO: 230438
aucaaggcgugacgacuau

SEQ ID NO: 230440 - RNA, 19 nt, Artificial Sequence
  Description of Artificial Sequence: Synthetic oligonucleotide
  Sense strand starting at position 16 of SEQ ID NO: 2967
uuucuuugugacugagauu

SEQ ID NO: 230441 - RNA, 19 nt, Artificial Sequence
  Description of Artificial Sequence: Synthetic oligonucleotide
  Antisense strand to SEQ ID NO: 230440
aaucucagucacaaagaaa

SEQ ID NO: 230442 - RNA, 19 nt, Artificial Sequence
  Description of Artificial Sequence: Synthetic oligonucleotide
  Sense strand starting at position 17 of SEQ ID NO: 2967
uucuuugugacugagauug

SEQ ID NO: 230443 - RNA, 19 nt, Artificial Sequence
  Description of Artificial Sequence: Synthetic oligonucleotide
  Antisense strand to SEQ ID NO: 230442
caaucucagucacaaagaa

SEQ ID NO: 230444 - RNA, 19 nt, Artificial Sequence
  Description of Artificial Sequence: Synthetic oligonucleotide
  Sense strand starting at position 22 of SEQ ID NO: 2967
ugugacugagauugcauua

SEQ ID NO: 230445 - RNA, 19 nt, Artificial Sequence
  Description of Artificial Sequence: Synthetic oligonucleotide
  Antisense strand to SEQ ID NO: 230444
uaaugcaaucucagucaca

SEQ ID NO: 230446 - RNA, 19 nt, Artificial Sequence
  Description of Artificial Sequence: Synthetic oligonucleotide
  Sense strand starting at position 27 of SEQ ID NO: 2967
cugagauugcauuauucuu

SEQ ID NO: 230447 - RNA, 19 nt, Artificial Sequence
  Description of Artificial Sequence: Synthetic oligonucleotide
  Antisense strand to SEQ ID NO: 230446
aagaauaaugcaaucucag

SEQ ID NO: 230448 - RNA, 19 nt, Artificial Sequence
  Description of Artificial Sequence: Synthetic oligonucleotide
  Sense strand starting at position 32 of SEQ ID NO: 2967
auugcauuauucuuggaaa

SEQ ID NO: 230449 - RNA, 19 nt, Artificial Sequence
  Description of Artificial Sequence: Synthetic oligonucleotide
  Antisense strand to SEQ ID NO: 230448
uuuccaagaauaaugcaau

SEQ ID NO: 230450 - RNA, 19 nt, Artificial Sequence
  Description of Artificial Sequence: Synthetic oligonucleotide
  Sense strand starting at position 107 of SEQ ID NO: 2967
acugacaaaugucucagua

SEQ ID NO: 230451 - RNA, 19 nt, Artificial Sequence
  Description of Artificial Sequence: Synthetic oligonucleotide
  Antisense strand to SEQ ID NO: 230450
uacugagacauuugucagu

SEQ ID NO: 230452 - RNA, 19 nt, Artificial Sequence
  Description of Artificial Sequence: Synthetic oligonucleotide
  Sense strand starting at position 128 of SEQ ID NO: 2967
gagaacaucugggaacaaa

SEQ ID NO: 230453 - RNA, 19 nt, Artificial Sequence
  Description of Artificial Sequence: Synthetic oligonucleotide
  Antisense strand to SEQ ID NO: 230452
uuuguucccagauguucuc

SEQ ID NO: 230454 - RNA, 19 nt, Artificial Sequence
  Description of Artificial Sequence: Synthetic oligonucleotide
  Sense strand starting at position 305 of SEQ ID NO: 2967
uguagaguugcugacacua

SEQ ID NO: 230455 - RNA, 19 nt, Artificial Sequence
  Description of Artificial Sequence: Synthetic oligonucleotide
  Antisense strand to SEQ ID NO: 230454
uagugucagcaacucuaca

SEQ ID NO: 230456 - RNA, 19 nt, Artificial Sequence
  Description of Artificial Sequence: Synthetic oligonucleotide
  Sense strand starting at position 462 of SEQ ID NO: 2967
ugucguuugcccuuccaua

SEQ ID NO: 230457 - RNA, 19 nt, Artificial Sequence
  Description of Artificial Sequence: Synthetic oligonucleotide
  Antisense strand to SEQ ID NO: 230456
uauggaagggcaaacgaca

SEQ ID NO: 230458 - RNA, 19 nt, Artificial Sequence
  Description of Artificial Sequence: Synthetic oligonucleotide
  Sense strand starting at position 645 of SEQ ID NO: 2967
auaaguagcuucucagacu

SEQ ID NO: 230459 - RNA, 19 nt, Artificial Sequence
  Description of Artificial Sequence: Synthetic oligonucleotide
  Antisense strand to SEQ ID NO: 230458
agucugagaagcuacuuau

SEQ ID NO: 230460 - RNA, 19 nt, Artificial Sequence
  Description of Artificial Sequence: Synthetic oligonucleotide
  Sense strand starting at position 656 of SEQ ID NO: 2967
cucagacuugcuuacagaa

SEQ ID NO: 230461 - RNA, 19 nt, Artificial Sequence
  Description of Artificial Sequence: Synthetic oligonucleotide
  Antisense strand to SEQ ID NO: 230460
uucuguaagcaagucugag

SEQ ID NO: 230462 - RNA, 19 nt, Artificial Sequence
  Description of Artificial Sequence: Synthetic oligonucleotide
  Sense strand starting at position 1240 of SEQ ID NO: 2967
gcaaacuaguaucugucaa

SEQ ID NO: 230463 - RNA, 19 nt, Artificial Sequence
  Description of Artificial Sequence: Synthetic oligonucleotide
  Antisense strand to SEQ ID NO: 230462
uugacagauacuaguuugc

SEQ ID NO: 230464 - RNA, 19 nt, Artificial Sequence
  Description of Artificial Sequence: Synthetic oligonucleotide
  Sense strand starting at position 1250 of SEQ ID NO: 2967
aucugucaaguccauaauu

SEQ ID NO: 230465 - RNA, 19 nt, Artificial Sequence
  Description of Artificial Sequence: Synthetic oligonucleotide
  Antisense strand to SEQ ID NO: 230464
aauuauggacuugacagau

SEQ ID NO: 230466 - RNA, 19 nt, Artificial Sequence
  Description of Artificial Sequence: Synthetic oligonucleotide
  Sense strand starting at position 1307 of SEQ ID NO: 2967
ccacccuucgccuagagaa

SEQ ID NO: 230467 - RNA, 19 nt, Artificial Sequence
  Description of Artificial Sequence: Synthetic oligonucleotide
  Antisense strand to SEQ ID NO: 230466
uucucuaggcgaagggugg

SEQ ID NO: 230468 - RNA, 19 nt, Artificial Sequence
  Description of Artificial Sequence: Synthetic oligonucleotide
  Sense strand starting at position 1322 of SEQ ID NO: 2967
agaaccugccaauguaaau

SEQ ID NO: 230469 - RNA, 19 nt, Artificial Sequence
  Description of Artificial Sequence: Synthetic oligonucleotide
  Antisense strand to SEQ ID NO: 230468
auuuacauuggcagguucu

SEQ ID NO: 230470 - RNA, 19 nt, Artificial Sequence
  Description of Artificial Sequence: Synthetic oligonucleotide
  Sense strand starting at position 1373 of SEQ ID NO: 2967
acauuaauagguugcaaga

SEQ ID NO: 230471 - RNA, 19 nt, Artificial Sequence
  Description of Artificial Sequence: Synthetic oligonucleotide
  Antisense strand to SEQ ID NO: 230470
ucuugcaaccuauuaaugu

SEQ ID NO: 230472 - RNA, 19 nt, Artificial Sequence
  Description of Artificial Sequence: Synthetic oligonucleotide
  Sense strand starting at position 1415 of SEQ ID NO: 2967
cuaguuguuuggguaaaua

SEQ ID NO: 230473 - RNA, 19 nt, Artificial Sequence
  Description of Artificial Sequence: Synthetic oligonucleotide
  Antisense strand to SEQ ID NO: 230472
uauuuacccaaacaacuag

SEQ ID NO: 230474 - RNA, 19 nt, Artificial Sequence
  Description of Artificial Sequence: Synthetic oligonucleotide
  Sense strand starting at position 1476 of SEQ ID NO: 2967
gaaucugaccgccaguaaa

SEQ ID NO: 230475 - RNA, 19 nt, Artificial Sequence
  Description of Artificial Sequence: Synthetic oligonucleotide
  Antisense strand to SEQ ID NO: 230474
uuuacuggcggucagauuc

SEQ ID NO: 230476 - RNA, 19 nt, Artificial Sequence
  Description of Artificial Sequence: Synthetic oligonucleotide
  Sense strand starting at position 1479 of SEQ ID NO: 2967
ucugaccgccaguaaauau

SEQ ID NO: 230477 - RNA, 19 nt, Artificial Sequence
  Description of Artificial Sequence: Synthetic oligonucleotide
  Antisense strand to SEQ ID NO: 230476
auauuuacuggcggucaga

SEQ ID NO: 230478 - RNA, 19 nt, Artificial Sequence
  Description of Artificial Sequence: Synthetic oligonucleotide
  Sense strand starting at position 1542 of SEQ ID NO: 2967
agaagcaaucacugggauu

SEQ ID NO: 230479 - RNA, 19 nt, Artificial Sequence
  Description of Artificial Sequence: Synthetic oligonucleotide
  Antisense strand to SEQ ID NO: 230478
aaucccagugauugcuucu

SEQ ID NO: 230480 - RNA, 19 nt, Artificial Sequence
  Description of Artificial Sequence: Synthetic oligonucleotide
  Sense strand starting at position 2017 of SEQ ID NO: 2967
cccucucauugggugagaa

SEQ ID NO: 230481 - RNA, 19 nt, Artificial Sequence
  Description of Artificial Sequence: Synthetic oligonucleotide
  Antisense strand to SEQ ID NO: 230480
uucucacccaaugagaggg

SEQ ID NO: 230482 - RNA, 19 nt, Artificial Sequence
  Description of Artificial Sequence: Synthetic oligonucleotide
  Sense strand starting at position 2018 of SEQ ID NO: 2967
ccucucauugggugagaac

SEQ ID NO: 230483 - RNA, 19 nt, Artificial Sequence
  Description of Artificial Sequence: Synthetic oligonucleotide
  Antisense strand to SEQ ID NO: 230482
guucucacccaaugagagg

SEQ ID NO: 230484 - RNA, 19 nt, Artificial Sequence
  Description of Artificial Sequence: Synthetic oligonucleotide
  Sense strand starting at position 2517 of SEQ ID NO: 2967
gcaggcgagaacuaaugaa

SEQ ID NO: 230485 - RNA, 19 nt, Artificial Sequence
  Description of Artificial Sequence: Synthetic oligonucleotide
  Antisense strand to SEQ ID NO: 230484
uucauuaguucucgccugc

SEQ ID NO: 230486 - RNA, 19 nt, Artificial Sequence
  Description of Artificial Sequence: Synthetic oligonucleotide
  Sense strand starting at position 2533 of SEQ ID NO: 2967
gaaguccuaguuuagaguu

SEQ ID NO: 230487 - RNA, 19 nt, Artificial Sequence
  Description of Artificial Sequence: Synthetic oligonucleotide
  Antisense strand to SEQ ID NO: 230486
aacucuaaacuaggacuuc

SEQ ID NO: 230488 - RNA, 19 nt, Artificial Sequence
  Description of Artificial Sequence: Synthetic oligonucleotide
  Sense strand starting at position 2582 of SEQ ID NO: 2967
ugaucauuacuguaguugu

SEQ ID NO: 230489 - RNA, 19 nt, Artificial Sequence
  Description of Artificial Sequence: Synthetic oligonucleotide
  Antisense strand to SEQ ID NO: 230488
acaacuacaguaaugauca

SEQ ID NO: 230490 - RNA, 19 nt, Artificial Sequence
  Description of Artificial Sequence: Synthetic oligonucleotide
  Sense strand starting at position 2775 of SEQ ID NO: 2967
gauagucuucgguaaacua

SEQ ID NO: 230491 - RNA, 19 nt, Artificial Sequence
  Description of Artificial Sequence: Synthetic oligonucleotide
  Antisense strand to SEQ ID NO: 230490
uaguuuaccgaagacuauc

SEQ ID NO: 230492 - RNA, 19 nt, Artificial Sequence
  Description of Artificial Sequence: Synthetic oligonucleotide
  Sense strand starting at position 2826 of SEQ ID NO: 2967
uuauuucuuucuuagggaa

SEQ ID NO: 230493 - RNA, 19 nt, Artificial Sequence
  Description of Artificial Sequence: Synthetic oligonucleotide
  Antisense strand to SEQ ID NO: 230492
uucccuaagaaagaaauaa

SEQ ID NO: 230494 - RNA, 19 nt, Artificial Sequence
  Description of Artificial Sequence: Synthetic oligonucleotide
  Sense strand starting at position 2828 of SEQ ID NO: 2967
auuucuuucuuagggaaag

SEQ ID NO: 230495 - RNA, 19 nt, Artificial Sequence
  Description of Artificial Sequence: Synthetic oligonucleotide
  Antisense strand to SEQ ID NO: 230494
cuuucccuaagaaagaaau

SEQ ID NO: 230496 - RNA, 19 nt, Artificial Sequence
  Description of Artificial Sequence: Synthetic oligonucleotide
  Sense strand starting at position 2876 of SEQ ID NO: 2967
uccuuuaguggagguugau

SEQ ID NO: 230497 - RNA, 19 nt, Artificial Sequence
  Description of Artificial Sequence: Synthetic oligonucleotide
  Antisense strand to SEQ ID NO: 230496
aucaaccuccacuaaagga

SEQ ID NO: 230498 - RNA, 19 nt, Artificial Sequence
  Description of Artificial Sequence: Synthetic oligonucleotide
  Sense strand starting at position 2882 of SEQ ID NO: 2967
aguggagguugaucuucau

SEQ ID NO: 230499 - RNA, 19 nt, Artificial Sequence
  Description of Artificial Sequence: Synthetic oligonucleotide
  Antisense strand to SEQ ID NO: 230498
augaagaucaaccuccacu

SEQ ID NO: 230500 - RNA, 19 nt, Artificial Sequence
  Description of Artificial Sequence: Synthetic oligonucleotide
  Sense strand starting at position 2885 of SEQ ID NO: 2967
ggagguugaucuucaugag

SEQ ID NO: 230501 - RNA, 19 nt, Artificial Sequence
  Description of Artificial Sequence: Synthetic oligonucleotide
  Antisense strand to SEQ ID NO: 230500
cucaugaagaucaaccucc

SEQ ID NO: 230502 - RNA, 19 nt, Artificial Sequence
  Description of Artificial Sequence: Synthetic oligonucleotide
  Sense strand starting at position 3088 of SEQ ID NO: 2967
uauacagaaggguguauaa

SEQ ID NO: 230503 - RNA, 19 nt, Artificial Sequence
  Description of Artificial Sequence: Synthetic oligonucleotide
  Antisense strand to SEQ ID NO: 230502
uuauacacccuucuguaua

SEQ ID NO: 230504 - RNA, 19 nt, Artificial Sequence
  Description of Artificial Sequence: Synthetic oligonucleotide
  Sense strand starting at position 3261 of SEQ ID NO: 2967
ucggaaucuuaguuacuac

SEQ ID NO: 230505 - RNA, 19 nt, Artificial Sequence
  Description of Artificial Sequence: Synthetic oligonucleotide
  Antisense strand to SEQ ID NO: 230504
guaguaacuaagauuccga

SEQ ID NO: 230506 - RNA, 19 nt, Artificial Sequence
  Description of Artificial Sequence: Synthetic oligonucleotide
  Sense strand starting at position 3325 of SEQ ID NO: 2967
acaguauauauguaguguu

SEQ ID NO: 230507 - RNA, 19 nt, Artificial Sequence
  Description of Artificial Sequence: Synthetic oligonucleotide
  Antisense strand to SEQ ID NO: 230506
aacacuacauauauacugu

SEQ ID NO: 230508 - RNA, 19 nt, Artificial Sequence
  Description of Artificial Sequence: Synthetic oligonucleotide
  Sense strand starting at position 3383 of SEQ ID NO: 2967
cuagaaagguuccuuacag

SEQ ID NO: 230509 - RNA, 19 nt, Artificial Sequence
  Description of Artificial Sequence: Synthetic oligonucleotide
  Antisense strand to SEQ ID NO: 230508
cuguaaggaaccuuucuag

SEQ ID NO: 230510 - RNA, 19 nt, Artificial Sequence
  Description of Artificial Sequence: Synthetic oligonucleotide
  Sense strand starting at position 3434 of SEQ ID NO: 2967
gccuuagaaucucccagua

SEQ ID NO: 230511 - RNA, 19 nt, Artificial Sequence
  Description of Artificial Sequence: Synthetic oligonucleotide
  Antisense strand to SEQ ID NO: 230510
uacugggagauucuaaggc

SEQ ID NO: 230512 - RNA, 19 nt, Artificial Sequence
  Description of Artificial Sequence: Synthetic oligonucleotide
  Sense strand starting at position 3439 of SEQ ID NO: 2967
agaaucucccaguauguuu

SEQ ID NO: 230513 - RNA, 19 nt, Artificial Sequence
  Description of Artificial Sequence: Synthetic oligonucleotide
  Antisense strand to SEQ ID NO: 230512
aaacauacugggagauucu

SEQ ID NO: 230514 - RNA, 19 nt, Artificial Sequence
  Description of Artificial Sequence: Synthetic oligonucleotide
  Sense strand starting at position 3688 of SEQ ID NO: 2967
guuguauaauauucuacag

SEQ ID NO: 230515 - RNA, 19 nt, Artificial Sequence
  Description of Artificial Sequence: Synthetic oligonucleotide
  Antisense strand to SEQ ID NO: 230514
cuguagaauauuauacaac

SEQ ID NO: 230516 - RNA, 19 nt, Artificial Sequence
  Description of Artificial Sequence: Synthetic oligonucleotide
  Sense strand starting at position 3726 of SEQ ID NO: 2967
cuucuauuguuauuggaca

SEQ ID NO: 230517 - RNA, 19 nt, Artificial Sequence
  Description of Artificial Sequence: Synthetic oligonucleotide
  Antisense strand to SEQ ID NO: 230516
uguccaauaacaauagaag

SEQ ID NO: 230518 - RNA, 19 nt, Artificial Sequence
  Description of Artificial Sequence: Synthetic oligonucleotide
  Sense strand starting at position 3750 of SEQ ID NO: 2967
guuguuuacaguugggaga

SEQ ID NO: 230519 - RNA, 19 nt, Artificial Sequence
  Description of Artificial Sequence: Synthetic oligonucleotide
  Antisense strand to SEQ ID NO: 230518
ucucccaacuguaaacaac

SEQ ID NO: 230520 - RNA, 19 nt, Artificial Sequence
  Description of Artificial Sequence: Synthetic oligonucleotide
  Sense strand starting at position 40 of SEQ ID NO: 2968
agugaugcuuccggaaguu

SEQ ID NO: 230521 - RNA, 19 nt, Artificial Sequence
  Description of Artificial Sequence: Synthetic oligonucleotide
  Antisense strand to SEQ ID NO: 230520
aacuuccggaagcaucacu

SEQ ID NO: 230522 - RNA, 19 nt, Artificial Sequence
  Description of Artificial Sequence: Synthetic oligonucleotide
  Sense strand starting at position 114 of SEQ ID NO: 2968
gagggaccuuccugggaga

SEQ ID NO: 230523 - RNA, 19 nt, Artificial Sequence
  Description of Artificial Sequence: Synthetic oligonucleotide
  Antisense strand to SEQ ID NO: 230522
ucucccaggaaggucccuc

SEQ ID NO: 230524 - RNA, 19 nt, Artificial Sequence
  Description of Artificial Sequence: Synthetic oligonucleotide
  Sense strand starting at position 127 of SEQ ID NO: 2968
gggagaggccuugggcuau

SEQ ID NO: 230525 - RNA, 19 nt, Artificial Sequence
  Description of Artificial Sequence: Synthetic oligonucleotide
  Antisense strand to SEQ ID NO: 230524
auagcccaaggccucuccc

SEQ ID NO: 230526 - RNA, 19 nt, Artificial Sequence
  Description of Artificial Sequence: Synthetic oligonucleotide
  Sense strand starting at position 232 of SEQ ID NO: 2968
acggaaggacccugggauu

SEQ ID NO: 230527 - RNA, 19 nt, Artificial Sequence
  Description of Artificial Sequence: Synthetic oligonucleotide
  Antisense strand to SEQ ID NO: 230526
aaucccaggguccuuccgu

SEQ ID NO: 230528 - RNA, 19 nt, Artificial Sequence
  Description of Artificial Sequence: Synthetic oligonucleotide
  Sense strand starting at position 376 of SEQ ID NO: 2968
ggguguuguggugggaaga

SEQ ID NO: 230529 - RNA, 19 nt, Artificial Sequence
  Description of Artificial Sequence: Synthetic oligonucleotide
  Antisense strand to SEQ ID NO: 230528
ucuucccaccacaacaccc

SEQ ID NO: 230530 - RNA, 19 nt, Artificial Sequence
  Description of Artificial Sequence: Synthetic oligonucleotide
  Sense strand starting at position 377 of SEQ ID NO: 2968
gguguuguggugggaagau

SEQ ID NO: 230531 - RNA, 19 nt, Artificial Sequence
  Description of Artificial Sequence: Synthetic oligonucleotide
  Antisense strand to SEQ ID NO: 230530
aucuucccaccacaacacc

SEQ ID NO: 230532 - RNA, 19 nt, Artificial Sequence
  Description of Artificial Sequence: Synthetic oligonucleotide
  Sense strand starting at position 418 of SEQ ID NO: 2968
cugugguugggcggagaaa

SEQ ID NO: 230533 - RNA, 19 nt, Artificial Sequence
  Description of Artificial Sequence: Synthetic oligonucleotide
  Antisense strand to SEQ ID NO: 230532
uuucuccgcccaaccacag

SEQ ID NO: 230534 - RNA, 19 nt, Artificial Sequence
  Description of Artificial Sequence: Synthetic oligonucleotide
  Sense strand starting at position 470 of SEQ ID NO: 2968
agugcuuccuugugccuua

SEQ ID NO: 230535 - RNA, 19 nt, Artificial Sequence
  Description of Artificial Sequence: Synthetic oligonucleotide
  Antisense strand to SEQ ID NO: 230534
uaaggcacaaggaagcacu

SEQ ID NO: 230536 - RNA, 19 nt, Artificial Sequence
  Description of Artificial Sequence: Synthetic oligonucleotide
  Sense strand starting at position 560 of SEQ ID NO: 2968
gugcccuccguggaaacau

SEQ ID NO: 230537 - RNA, 19 nt, Artificial Sequence
  Description of Artificial Sequence: Synthetic oligonucleotide
  Antisense strand to SEQ ID NO: 230536
auguuuccacggagggcac

SEQ ID NO: 230538 - RNA, 19 nt, Artificial Sequence
  Description of Artificial Sequence: Synthetic oligonucleotide
  Sense strand starting at position 893 of SEQ ID NO: 2968
cugacagugcccugacauu

SEQ ID NO: 230539 - RNA, 19 nt, Artificial Sequence
  Description of Artificial Sequence: Synthetic oligonucleotide
  Antisense strand to SEQ ID NO: 230538
aaugucagggcacugucag

SEQ ID NO: 230540 - RNA, 19 nt, Artificial Sequence
  Description of Artificial Sequence: Synthetic oligonucleotide
  Sense strand starting at position 1040 of SEQ ID NO: 2968
cccuguccucucuaguaga

SEQ ID NO: 230541 - RNA, 19 nt, Artificial Sequence
  Description of Artificial Sequence: Synthetic oligonucleotide
  Antisense strand to SEQ ID NO: 230540
ucuacuagagaggacaggg

SEQ ID NO: 230542 - RNA, 19 nt, Artificial Sequence
  Description of Artificial Sequence: Synthetic oligonucleotide
  Sense strand starting at position 1444 of SEQ ID NO: 2968
ggcaguaauucgcuuacac

SEQ ID NO: 230543 - RNA, 19 nt, Artificial Sequence
  Description of Artificial Sequence: Synthetic oligonucleotide
  Antisense strand to SEQ ID NO: 230542
guguaagcgaauuacugcc

SEQ ID NO: 230544 - RNA, 19 nt, Artificial Sequence
  Description of Artificial Sequence: Synthetic oligonucleotide
  Sense strand starting at position 1468 of SEQ ID NO: 2968
acaaaugcguucuucccaa

SEQ ID NO: 230545 - RNA, 19 nt, Artificial Sequence
  Description of Artificial Sequence: Synthetic oligonucleotide
  Antisense strand to SEQ ID NO: 230544
uugggaagaacgcauuugu

SEQ ID NO: 230546 - RNA, 19 nt, Artificial Sequence
  Description of Artificial Sequence: Synthetic oligonucleotide
  Sense strand starting at position 1567 of SEQ ID NO: 2968
cuaguagaaccuugcuuua

SEQ ID NO: 230547 - RNA, 19 nt, Artificial Sequence
  Description of Artificial Sequence: Synthetic oligonucleotide
  Antisense strand to SEQ ID NO: 230546
uaaagcaagguucuacuag

SEQ ID NO: 230548 - RNA, 19 nt, Artificial Sequence
  Description of Artificial Sequence: Synthetic oligonucleotide
  Sense strand starting at position 1569 of SEQ ID NO: 2968
aguagaaccuugcuuuaag

SEQ ID NO: 230549 - RNA, 19 nt, Artificial Sequence
  Description of Artificial Sequence: Synthetic oligonucleotide
  Antisense strand to SEQ ID NO: 230548
cuuaaagcaagguucuacu

SEQ ID NO: 230550 - RNA, 19 nt, Artificial Sequence
  Description of Artificial Sequence: Synthetic oligonucleotide
  Sense strand starting at position 1570 of SEQ ID NO: 2968
guagaaccuugcuuuaagu

SEQ ID NO: 230551 - RNA, 19 nt, Artificial Sequence
  Description of Artificial Sequence: Synthetic oligonucleotide
  Antisense strand to SEQ ID NO: 230550
acuuaaagcaagguucuac

SEQ ID NO: 230552 - RNA, 19 nt, Artificial Sequence
  Description of Artificial Sequence: Synthetic oligonucleotide
  Sense strand starting at position 1572 of SEQ ID NO: 2968
agaaccuugcuuuaaguca

SEQ ID NO: 230553 - RNA, 19 nt, Artificial Sequence
  Description of Artificial Sequence: Synthetic oligonucleotide
  Antisense strand to SEQ ID NO: 230552
ugacuuaaagcaagguucu

SEQ ID NO: 230554 - RNA, 19 nt, Artificial Sequence
  Description of Artificial Sequence: Synthetic oligonucleotide
  Sense strand starting at position 2049 of SEQ ID NO: 2968
ccgggcuccucgccuuaua

SEQ ID NO: 230555 - RNA, 19 nt, Artificial Sequence
  Description of Artificial Sequence: Synthetic oligonucleotide
  Antisense strand to SEQ ID NO: 230554
uauaaggcgaggagcccgg

SEQ ID NO: 230556 - RNA, 19 nt, Artificial Sequence
  Description of Artificial Sequence: Synthetic oligonucleotide
  Sense strand starting at position 2050 of SEQ ID NO: 2968
cgggcuccucgccuuauaa

SEQ ID NO: 230557 - RNA, 19 nt, Artificial Sequence
  Description of Artificial Sequence: Synthetic oligonucleotide
  Antisense strand to SEQ ID NO: 230556
uuauaaggcgaggagcccg

SEQ ID NO: 230558 - RNA, 19 nt, Artificial Sequence
  Description of Artificial Sequence: Synthetic oligonucleotide
  Sense strand starting at position 2060 of SEQ ID NO: 2968
gccuuauaacgcgcuugaa

SEQ ID NO: 230559 - RNA, 19 nt, Artificial Sequence
  Description of Artificial Sequence: Synthetic oligonucleotide
  Antisense strand to SEQ ID NO: 230558
uucaagcgcguuauaaggc

SEQ ID NO: 230560 - RNA, 19 nt, Artificial Sequence
  Description of Artificial Sequence: Synthetic oligonucleotide
  Sense strand starting at position 2496 of SEQ ID NO: 2968
ggcccaggccucuaugaca

SEQ ID NO: 230561 - RNA, 19 nt, Artificial Sequence
  Description of Artificial Sequence: Synthetic oligonucleotide
  Antisense strand to SEQ ID NO: 230560
ugucauagaggccugggcc

SEQ ID NO: 230562 - RNA, 19 nt, Artificial Sequence
  Description of Artificial Sequence: Synthetic oligonucleotide
  Sense strand starting at position 2523 of SEQ ID NO: 2968
gcaaaucugagccgggaga

SEQ ID NO: 230563 - RNA, 19 nt, Artificial Sequence
  Description of Artificial Sequence: Synthetic oligonucleotide
  Antisense strand to SEQ ID NO: 230562
ucucccggcucagauuugc

SEQ ID NO: 230564 - RNA, 19 nt, Artificial Sequence
  Description of Artificial Sequence: Synthetic oligonucleotide
  Sense strand starting at position 2946 of SEQ ID NO: 2968
uguuauaucgcaugcccuu

SEQ ID NO: 230565 - RNA, 19 nt, Artificial Sequence
  Description of Artificial Sequence: Synthetic oligonucleotide
  Antisense strand to SEQ ID NO: 230564
aagggcaugcgauauaaca

SEQ ID NO: 230566 - RNA, 19 nt, Artificial Sequence
  Description of Artificial Sequence: Synthetic oligonucleotide
  Sense strand starting at position 3083 of SEQ ID NO: 2968
ggagaaggcuccgcuggaa

SEQ ID NO: 230567 - RNA, 19 nt, Artificial Sequence
  Description of Artificial Sequence: Synthetic oligonucleotide
  Antisense strand to SEQ ID NO: 230566
uuccagcggagccuucucc

SEQ ID NO: 230568 - RNA, 19 nt, Artificial Sequence
  Description of Artificial Sequence: Synthetic oligonucleotide
  Sense strand starting at position 3269 of SEQ ID NO: 2968
caaguuccguccucagaug

SEQ ID NO: 230569 - RNA, 19 nt, Artificial Sequence
  Description of Artificial Sequence: Synthetic oligonucleotide
  Antisense strand to SEQ ID NO: 230568
caucugaggacggaacuug

SEQ ID NO: 230570 - RNA, 19 nt, Artificial Sequence
  Description of Artificial Sequence: Synthetic oligonucleotide
  Sense strand starting at position 3316 of SEQ ID NO: 2968
uggccacucaugcgauguu

SEQ ID NO: 230571 - RNA, 19 nt, Artificial Sequence
  Description of Artificial Sequence: Synthetic oligonucleotide
  Antisense strand to SEQ ID NO: 230570
aacaucgcaugaguggcca

SEQ ID NO: 230572 - RNA, 19 nt, Artificial Sequence
  Description of Artificial Sequence: Synthetic oligonucleotide
  Sense strand starting at position 3319 of SEQ ID NO: 2968
ccacucaugcgauguucca

SEQ ID NO: 230573 - RNA, 19 nt, Artificial Sequence
  Description of Artificial Sequence: Synthetic oligonucleotide
  Antisense strand to SEQ ID NO: 230572
uggaacaucgcaugagugg

SEQ ID NO: 230574 - RNA, 19 nt, Artificial Sequence
  Description of Artificial Sequence: Synthetic oligonucleotide
  Sense strand starting at position 3412 of SEQ ID NO: 2968
agguaauuauucccuguga

SEQ ID NO: 230575 - RNA, 19 nt, Artificial Sequence
  Description of Artificial Sequence: Synthetic oligonucleotide
  Antisense strand to SEQ ID NO: 230574
ucacagggaauaauuaccu

SEQ ID NO: 230576 - RNA, 19 nt, Artificial Sequence
  Description of Artificial Sequence: Synthetic oligonucleotide
  Sense strand starting at position 3413 of SEQ ID NO: 2968
gguaauuauucccugugau

SEQ ID NO: 230577 - RNA, 19 nt, Artificial Sequence
  Description of Artificial Sequence: Synthetic oligonucleotide
  Antisense strand to SEQ ID NO: 230576
aucacagggaauaauuacc

SEQ ID NO: 230578 - RNA, 19 nt, Artificial Sequence
  Description of Artificial Sequence: Synthetic oligonucleotide
  Sense strand starting at position 3414 of SEQ ID NO: 2968
guaauuauucccugugauu

SEQ ID NO: 230579 - RNA, 19 nt, Artificial Sequence
  Description of Artificial Sequence: Synthetic oligonucleotide
  Antisense strand to SEQ ID NO: 230578
aaucacagggaauaauuac

SEQ ID NO: 230580 - RNA, 19 nt, Artificial Sequence
  Description of Artificial Sequence: Synthetic oligonucleotide
  Sense strand starting at position 3449 of SEQ ID NO: 2968
aggauaugggaauggugua

SEQ ID NO: 230581 - RNA, 19 nt, Artificial Sequence
  Description of Artificial Sequence: Synthetic oligonucleotide
  Antisense strand to SEQ ID NO: 230580
uacaccauucccauauccu

SEQ ID NO: 230582 - RNA, 19 nt, Artificial Sequence
  Description of Artificial Sequence: Synthetic oligonucleotide
  Sense strand starting at position 3454 of SEQ ID NO: 2968
augggaaugguguagaguu

SEQ ID NO: 230583 - RNA, 19 nt, Artificial Sequence
  Description of Artificial Sequence: Synthetic oligonucleotide
  Antisense strand to SEQ ID NO: 230582
aacucuacaccauucccau

SEQ ID NO: 230584 - RNA, 19 nt, Artificial Sequence
  Description of Artificial Sequence: Synthetic oligonucleotide
  Sense strand starting at position 3533 of SEQ ID NO: 2968
ggguaagucccauggacuu

SEQ ID NO: 230585 - RNA, 19 nt, Artificial Sequence
  Description of Artificial Sequence: Synthetic oligonucleotide
  Antisense strand to SEQ ID NO: 230584
aaguccaugggacuuaccc

SEQ ID NO: 230586 - RNA, 19 nt, Artificial Sequence
  Description of Artificial Sequence: Synthetic oligonucleotide
  Sense strand starting at position 3544 of SEQ ID NO: 2968
auggacuuacucugugaag

SEQ ID NO: 230587 - RNA, 19 nt, Artificial Sequence
  Description of Artificial Sequence: Synthetic oligonucleotide
  Antisense strand to SEQ ID NO: 230586
cuucacagaguaaguccau

SEQ ID NO: 230588 - RNA, 19 nt, Artificial Sequence
  Description of Artificial Sequence: Synthetic oligonucleotide
  Sense strand starting at position 3545 of SEQ ID NO: 2968
uggacuuacucugugaaga

SEQ ID NO: 230589 - RNA, 19 nt, Artificial Sequence
  Description of Artificial Sequence: Synthetic oligonucleotide
  Antisense strand to SEQ ID NO: 230588
ucuucacagaguaagucca

SEQ ID NO: 230590 - RNA, 19 nt, Artificial Sequence
  Description of Artificial Sequence: Synthetic oligonucleotide
  Sense strand starting at position 3546 of SEQ ID NO: 2968
ggacuuacucugugaagau

SEQ ID NO: 230591 - RNA, 19 nt, Artificial Sequence
  Description of Artificial Sequence: Synthetic oligonucleotide
  Antisense strand to SEQ ID NO: 230590
aucuucacagaguaagucc

SEQ ID NO: 230592 - RNA, 19 nt, Artificial Sequence
  Description of Artificial Sequence: Synthetic oligonucleotide
  Sense strand starting at position 3547 of SEQ ID NO: 2968
gacuuacucugugaagaug

SEQ ID NO: 230593 - RNA, 19 nt, Artificial Sequence
  Description of Artificial Sequence: Synthetic oligonucleotide
  Antisense strand to SEQ ID NO: 230592
caucuucacagaguaaguc

SEQ ID NO: 230594 - RNA, 19 nt, Artificial Sequence
  Description of Artificial Sequence: Synthetic oligonucleotide
  Sense strand starting at position 3976 of SEQ ID NO: 2968
acaugcaagucuuuaagac

SEQ ID NO: 230595 - RNA, 19 nt, Artificial Sequence
  Description of Artificial Sequence: Synthetic oligonucleotide
  Antisense strand to SEQ ID NO: 230594
gucuuaaagacuugcaugu

SEQ ID NO: 230596 - RNA, 19 nt, Artificial Sequence
  Description of Artificial Sequence: Synthetic oligonucleotide
  Sense strand starting at position 3980 of SEQ ID NO: 2968
gcaagucuuuaagacacau

SEQ ID NO: 230597 - RNA, 19 nt, Artificial Sequence
  Description of Artificial Sequence: Synthetic oligonucleotide
  Antisense strand to SEQ ID NO: 230596
augugucuuaaagacuugc

SEQ ID NO: 230598 - RNA, 19 nt, Artificial Sequence
  Description of Artificial Sequence: Synthetic oligonucleotide
  Sense strand starting at position 171 of SEQ ID NO: 2969
cucugagaaugccaaagau

SEQ ID NO: 230599 - RNA, 19 nt, Artificial Sequence
  Description of Artificial Sequence: Synthetic oligonucleotide
  Antisense strand to SEQ ID NO: 230598
aucuuuggcauucucagag

SEQ ID NO: 230600 - RNA, 19 nt, Artificial Sequence
  Description of Artificial Sequence: Synthetic oligonucleotide
  Sense strand starting at position 180 of SEQ ID NO: 2969
ugccaaagauaucuuuagu

SEQ ID NO: 230601 - RNA, 19 nt, Artificial Sequence
  Description of Artificial Sequence: Synthetic oligonucleotide
  Antisense strand to SEQ ID NO: 230600
acuaaagauaucuuuggca

SEQ ID NO: 230602 - RNA, 19 nt, Artificial Sequence
  Description of Artificial Sequence: Synthetic oligonucleotide
  Sense strand starting at position 230 of SEQ ID NO: 2969
ggaggcuguccuggucuua

SEQ ID NO: 230603 - RNA, 19 nt, Artificial Sequence
  Description of Artificial Sequence: Synthetic oligonucleotide
  Antisense strand to SEQ ID NO: 230602
uaagaccaggacagccucc

SEQ ID NO: 230604 - RNA, 19 nt, Artificial Sequence
  Description of Artificial Sequence: Synthetic oligonucleotide
  Sense strand starting at position 503 of SEQ ID NO: 2969
gggcaaauuauugaguggu

SEQ ID NO: 230605 - RNA, 19 nt, Artificial Sequence
  Description of Artificial Sequence: Synthetic oligonucleotide
  Antisense strand to SEQ ID NO: 230604
accacucaauaauuugccc

SEQ ID NO: 230606 - RNA, 19 nt, Artificial Sequence
  Description of Artificial Sequence: Synthetic oligonucleotide
  Sense strand starting at position 505 of SEQ ID NO: 2969
gcaaauuauugagugguag

SEQ ID NO: 230607 - RNA, 19 nt, Artificial Sequence
  Description of Artificial Sequence: Synthetic oligonucleotide
  Antisense strand to SEQ ID NO: 230606
cuaccacucaauaauuugc

SEQ ID NO: 230608 - RNA, 19 nt, Artificial Sequence
  Description of Artificial Sequence: Synthetic oligonucleotide
  Sense strand starting at position 547 of SEQ ID NO: 2969
ggcagaaauaguugucccu

SEQ ID NO: 230609 - RNA, 19 nt, Artificial Sequence
  Description of Artificial Sequence: Synthetic oligonucleotide
  Antisense strand to SEQ ID NO: 230608
agggacaacuauuucugcc

SEQ ID NO: 230610 - RNA, 19 nt, Artificial Sequence
  Description of Artificial Sequence: Synthetic oligonucleotide
  Sense strand starting at position 628 of SEQ ID NO: 2969
ugcgucugucuccuuuaga

SEQ ID NO: 230611 - RNA, 19 nt, Artificial Sequence
  Description of Artificial Sequence: Synthetic oligonucleotide
  Antisense strand to SEQ ID NO: 230610
ucuaaaggagacagacgca

SEQ ID NO: 230612 - RNA, 19 nt, Artificial Sequence
  Description of Artificial Sequence: Synthetic oligonucleotide
  Sense strand starting at position 629 of SEQ ID NO: 2969
gcgucugucuccuuuagac

SEQ ID NO: 230613 - RNA, 19 nt, Artificial Sequence
  Description of Artificial Sequence: Synthetic oligonucleotide
  Antisense strand to SEQ ID NO: 230612
gucuaaaggagacagacgc

SEQ ID NO: 230614 - RNA, 19 nt, Artificial Sequence
  Description of Artificial Sequence: Synthetic oligonucleotide
  Sense strand starting at position 631 of SEQ ID NO: 2969
gucugucuccuuuagacau

SEQ ID NO: 230615 - RNA, 19 nt, Artificial Sequence
  Description of Artificial Sequence: Synthetic oligonucleotide
  Antisense strand to SEQ ID NO: 230614
augucuaaaggagacagac

SEQ ID NO: 230616 - RNA, 19 nt, Artificial Sequence
  Description of Artificial Sequence: Synthetic oligonucleotide
  Sense strand starting at position 714 of SEQ ID NO: 2969
ccugucaccuacuaaguaa

SEQ ID NO: 230617 - RNA, 19 nt, Artificial Sequence
  Description of Artificial Sequence: Synthetic oligonucleotide
  Antisense strand to SEQ ID NO: 230616
uuacuuaguaggugacagg

SEQ ID NO: 230618 - RNA, 19 nt, Artificial Sequence
  Description of Artificial Sequence: Synthetic oligonucleotide
  Sense strand starting at position 717 of SEQ ID NO: 2969
gucaccuacuaaguaaauu

SEQ ID NO: 230619 - RNA, 19 nt, Artificial Sequence
  Description of Artificial Sequence: Synthetic oligonucleotide
  Antisense strand to SEQ ID NO: 230618
aauuuacuuaguaggugac

SEQ ID NO: 230620 - RNA, 19 nt, Artificial Sequence
  Description of Artificial Sequence: Synthetic oligonucleotide
  Sense strand starting at position 772 of SEQ ID NO: 2969
uuauaaggcuuauauguga

SEQ ID NO: 230621 - RNA, 19 nt, Artificial Sequence
  Description of Artificial Sequence: Synthetic oligonucleotide
  Antisense strand to SEQ ID NO: 230620
ucacauauaagccuuauaa

SEQ ID NO: 230622 - RNA, 19 nt, Artificial Sequence
  Description of Artificial Sequence: Synthetic oligonucleotide
  Sense strand starting at position 777 of SEQ ID NO: 2969
aggcuuauaugugaaacac

SEQ ID NO: 230623 - RNA, 19 nt, Artificial Sequence
  Description of Artificial Sequence: Synthetic oligonucleotide
  Antisense strand to SEQ ID NO: 230622
guguuucacauauaagccu

SEQ ID NO: 230624 - RNA, 19 nt, Artificial Sequence
  Description of Artificial Sequence: Synthetic oligonucleotide
  Sense strand starting at position 787 of SEQ ID NO: 2969
gugaaacacuaucauaagu

SEQ ID NO: 230625 - RNA, 19 nt, Artificial Sequence
  Description of Artificial Sequence: Synthetic oligonucleotide
  Antisense strand to SEQ ID NO: 230624
acuuaugauaguguuucac

SEQ ID NO: 230626 - RNA, 19 nt, Artificial Sequence
  Description of Artificial Sequence: Synthetic oligonucleotide
  Sense strand starting at position 800 of SEQ ID NO: 2969
auaaguauagcauguguau

SEQ ID NO: 230627 - RNA, 19 nt, Artificial Sequence
  Description of Artificial Sequence: Synthetic oligonucleotide
  Antisense strand to SEQ ID NO: 230626
auacacaugcuauacuuau

SEQ ID NO: 230628 - RNA, 19 nt, Artificial Sequence
  Description of Artificial Sequence: Synthetic oligonucleotide
  Sense strand starting at position 803 of SEQ ID NO: 2969
aguauagcauguguauuaa

SEQ ID NO: 230629 - RNA, 19 nt, Artificial Sequence
  Description of Artificial Sequence: Synthetic oligonucleotide
  Antisense strand to SEQ ID NO: 230628
uuaauacacaugcuauacu

SEQ ID NO: 230630 - RNA, 19 nt, Artificial Sequence
  Description of Artificial Sequence: Synthetic oligonucleotide
  Sense strand starting at position 849 of SEQ ID NO: 2969
ugaaguaaguucuaucauc

SEQ ID NO: 230631 - RNA, 19 nt, Artificial Sequence
  Description of Artificial Sequence: Synthetic oligonucleotide
  Antisense strand to SEQ ID NO: 230630
gaugauagaacuuacuuca

SEQ ID NO: 230632 - RNA, 19 nt, Artificial Sequence
  Description of Artificial Sequence: Synthetic oligonucleotide
  Sense strand starting at position 965 of SEQ ID NO: 2969
guaauauggcugcagacuu

SEQ ID NO: 230633 - RNA, 19 nt, Artificial Sequence
  Description of Artificial Sequence: Synthetic oligonucleotide
  Antisense strand to SEQ ID NO: 230632
aagucugcagccauauuac

SEQ ID NO: 230634 - RNA, 19 nt, Artificial Sequence
  Description of Artificial Sequence: Synthetic oligonucleotide
  Sense strand starting at position 1009 of SEQ ID NO: 2969
guaguauuaguuugggaaa

SEQ ID NO: 230635 - RNA, 19 nt, Artificial Sequence
  Description of Artificial Sequence: Synthetic oligonucleotide
  Antisense strand to SEQ ID NO: 230634
uuucccaaacuaauacuac

SEQ ID NO: 230636 - RNA, 19 nt, Artificial Sequence
  Description of Artificial Sequence: Synthetic oligonucleotide
  Sense strand starting at position 1010 of SEQ ID NO: 2969
uaguauuaguuugggaaag

SEQ ID NO: 230637 - RNA, 19 nt, Artificial Sequence
  Description of Artificial Sequence: Synthetic oligonucleotide
  Antisense strand to SEQ ID NO: 230636
cuuucccaaacuaauacua

SEQ ID NO: 230638 - RNA, 19 nt, Artificial Sequence
  Description of Artificial Sequence: Synthetic oligonucleotide
  Sense strand starting at position 1163 of SEQ ID NO: 2969
gugcuuacugaaugaagaa

SEQ ID NO: 230639 - RNA, 19 nt, Artificial Sequence
  Description of Artificial Sequence: Synthetic oligonucleotide
  Antisense strand to SEQ ID NO: 230638
uucuucauucaguaagcac

SEQ ID NO: 230640 - RNA, 19 nt, Artificial Sequence
  Description of Artificial Sequence: Synthetic oligonucleotide
  Sense strand starting at position 1363 of SEQ ID NO: 2969
uggaaaggcgccuacugau

SEQ ID NO: 230641 - RNA, 19 nt, Artificial Sequence
  Description of Artificial Sequence: Synthetic oligonucleotide
  Antisense strand to SEQ ID NO: 230640
aucaguaggcgccuuucca

SEQ ID NO: 230642 - RNA, 19 nt, Artificial Sequence
  Description of Artificial Sequence: Synthetic oligonucleotide
  Sense strand starting at position 1411 of SEQ ID NO: 2969
cgacucacgacucagagau

SEQ ID NO: 230643 - RNA, 19 nt, Artificial Sequence
  Description of Artificial Sequence: Synthetic oligonucleotide
  Antisense strand to SEQ ID NO: 230642
aucucugagucgugagucg

SEQ ID NO: 230644 - RNA, 19 nt, Artificial Sequence
  Description of Artificial Sequence: Synthetic oligonucleotide
  Sense strand starting at position 2276 of SEQ ID NO: 2969
gcuucugcucgcucgggaa

SEQ ID NO: 230645 - RNA, 19 nt, Artificial Sequence
  Description of Artificial Sequence: Synthetic oligonucleotide
  Antisense strand to SEQ ID NO: 230644
uucccgagcgagcagaagc

SEQ ID NO: 230646 - RNA, 19 nt, Artificial Sequence
  Description of Artificial Sequence: Synthetic oligonucleotide
  Sense strand starting at position 2381 of SEQ ID NO: 2969
cagcgcuugacucgacaga

SEQ ID NO: 230647 - RNA, 19 nt, Artificial Sequence
  Description of Artificial Sequence: Synthetic oligonucleotide
  Antisense strand to SEQ ID NO: 230646
ucugucgagucaagcgcug

SEQ ID NO: 230648 - RNA, 19 nt, Artificial Sequence
  Description of Artificial Sequence: Synthetic oligonucleotide
  Sense strand starting at position 2489 of SEQ ID NO: 2969
ggccuacucaagcaugaga

SEQ ID NO: 230649 - RNA, 19 nt, Artificial Sequence
  Description of Artificial Sequence: Synthetic oligonucleotide
  Antisense strand to SEQ ID NO: 230648
ucucaugcuugaguaggcc

SEQ ID NO: 230650 - RNA, 19 nt, Artificial Sequence
  Description of Artificial Sequence: Synthetic oligonucleotide
  Sense strand starting at position 2517 of SEQ ID NO: 2969
ggagguggguuucaacaca

SEQ ID NO: 230651 - RNA, 19 nt, Artificial Sequence
  Description of Artificial Sequence: Synthetic oligonucleotide
  Antisense strand to SEQ ID NO: 230650
uguguugaaacccaccucc

SEQ ID NO: 230652 - RNA, 19 nt, Artificial Sequence
  Description of Artificial Sequence: Synthetic oligonucleotide
  Sense strand starting at position 2590 of SEQ ID NO: 2969
gccuuacauucgcuuaaga

SEQ ID NO: 230653 - RNA, 19 nt, Artificial Sequence
  Description of Artificial Sequence: Synthetic oligonucleotide
  Antisense strand to SEQ ID NO: 230652
ucuuaagcgaauguaaggc

SEQ ID NO: 230654 - RNA, 19 nt, Artificial Sequence
  Description of Artificial Sequence: Synthetic oligonucleotide
  Sense strand starting at position 2592 of SEQ ID NO: 2969
cuuacauucgcuuaagauc

SEQ ID NO: 230655 - RNA, 19 nt, Artificial Sequence
  Description of Artificial Sequence: Synthetic oligonucleotide
  Antisense strand to SEQ ID NO: 230654
gaucuuaagcgaauguaag

SEQ ID NO: 230656 - RNA, 19 nt, Artificial Sequence
  Description of Artificial Sequence: Synthetic oligonucleotide
  Sense strand starting at position 2598 of SEQ ID NO: 2969
uucgcuuaagaucacagaa

SEQ ID NO: 230657 - RNA, 19 nt, Artificial Sequence
  Description of Artificial Sequence: Synthetic oligonucleotide
  Antisense strand to SEQ ID NO: 230656
uucugugaucuuaagcgaa

SEQ ID NO: 230658 - RNA, 19 nt, Artificial Sequence
  Description of Artificial Sequence: Synthetic oligonucleotide
  Sense strand starting at position 2600 of SEQ ID NO: 2969
cgcuuaagaucacagaauu

SEQ ID NO: 230659 - RNA, 19 nt, Artificial Sequence
  Description of Artificial Sequence: Synthetic oligonucleotide
  Antisense strand to SEQ ID NO: 230658
aauucugugaucuuaagcg

SEQ ID NO: 230660 - RNA, 19 nt, Artificial Sequence
  Description of Artificial Sequence: Synthetic oligonucleotide
  Sense strand starting at position 2671 of SEQ ID NO: 2969
cccugaguuucucuuccuu

SEQ ID NO: 230661 - RNA, 19 nt, Artificial Sequence
  Description of Artificial Sequence: Synthetic oligonucleotide
  Antisense strand to SEQ ID NO: 230660
aaggaagagaaacucaggg

SEQ ID NO: 230662 - RNA, 19 nt, Artificial Sequence
  Description of Artificial Sequence: Synthetic oligonucleotide
  Sense strand starting at position 2740 of SEQ ID NO: 2969
ucauaugcauugcugagua

SEQ ID NO: 230663 - RNA, 19 nt, Artificial Sequence
  Description of Artificial Sequence: Synthetic oligonucleotide
  Antisense strand to SEQ ID NO: 230662
uacucagcaaugcauauga

SEQ ID NO: 230664 - RNA, 19 nt, Artificial Sequence
  Description of Artificial Sequence: Synthetic oligonucleotide
  Sense strand starting at position 2744 of SEQ ID NO: 2969
augcauugcugaguaugua

SEQ ID NO: 230665 - RNA, 19 nt, Artificial Sequence
  Description of Artificial Sequence: Synthetic oligonucleotide
  Antisense strand to SEQ ID NO: 230664
uacauacucagcaaugcau

SEQ ID NO: 230666 - RNA, 19 nt, Artificial Sequence
  Description of Artificial Sequence: Synthetic oligonucleotide
  Sense strand starting at position 2745 of SEQ ID NO: 2969
ugcauugcugaguauguau

SEQ ID NO: 230667 - RNA, 19 nt, Artificial Sequence
  Description of Artificial Sequence: Synthetic oligonucleotide
  Antisense strand to SEQ ID NO: 230666
auacauacucagcaaugca

SEQ ID NO: 230668 - RNA, 19 nt, Artificial Sequence
  Description of Artificial Sequence: Synthetic oligonucleotide
  Sense strand starting at position 2747 of SEQ ID NO: 2969
cauugcugaguauguauaa

SEQ ID NO: 230669 - RNA, 19 nt, Artificial Sequence
  Description of Artificial Sequence: Synthetic oligonucleotide
  Antisense strand to SEQ ID NO: 230668
uuauacauacucagcaaug

SEQ ID NO: 230670 - RNA, 19 nt, Artificial Sequence
  Description of Artificial Sequence: Synthetic oligonucleotide
  Sense strand starting at position 2748 of SEQ ID NO: 2969
auugcugaguauguauaau

SEQ ID NO: 230671 - RNA, 19 nt, Artificial Sequence
  Description of Artificial Sequence: Synthetic oligonucleotide
  Antisense strand to SEQ ID NO: 230670
auuauacauacucagcaau

SEQ ID NO: 230672 - RNA, 19 nt, Artificial Sequence
  Description of Artificial Sequence: Synthetic oligonucleotide
  Sense strand starting at position 2804 of SEQ ID NO: 2969
gugcguuucgucuuauuca

SEQ ID NO: 230673 - RNA, 19 nt, Artificial Sequence
  Description of Artificial Sequence: Synthetic oligonucleotide
  Antisense strand to SEQ ID NO: 230672
ugaauaagacgaaacgcac

SEQ ID NO: 230674 - RNA, 19 nt, Artificial Sequence
  Description of Artificial Sequence: Synthetic oligonucleotide
  Sense strand starting at position 3728 of SEQ ID NO: 2969
gccauuggcaagcgauuua

SEQ ID NO: 230675 - RNA, 19 nt, Artificial Sequence
  Description of Artificial Sequence: Synthetic oligonucleotide
  Antisense strand to SEQ ID NO: 230674
uaaaucgcuugccaauggc

SEQ ID NO: 230676 - RNA, 19 nt, Artificial Sequence
  Description of Artificial Sequence: Synthetic oligonucleotide
  Sense strand starting at position 3823 of SEQ ID NO: 2969
gagccaggaucugcaucau

SEQ ID NO: 230677 - RNA, 19 nt, Artificial Sequence
  Description of Artificial Sequence: Synthetic oligonucleotide
  Antisense strand to SEQ ID NO: 230676
augaugcagauccuggcuc

SEQ ID NO: 230678 - RNA, 19 nt, Artificial Sequence
  Description of Artificial Sequence: Synthetic oligonucleotide
  Sense strand starting at position 139 of SEQ ID NO: 2970
ucuguauuuggugguuaug

SEQ ID NO: 230679 - RNA, 19 nt, Artificial Sequence
  Description of Artificial Sequence: Synthetic oligonucleotide
  Antisense strand to SEQ ID NO: 230678
cauaaccaccaaauacaga

SEQ ID NO: 230680 - RNA, 19 nt, Artificial Sequence
  Description of Artificial Sequence: Synthetic oligonucleotide
  Sense strand starting at position 200 of SEQ ID NO: 2970
aagggcucuuggucaugaa

SEQ ID NO: 230681 - RNA, 19 nt, Artificial Sequence
  Description of Artificial Sequence: Synthetic oligonucleotide
  Antisense strand to SEQ ID NO: 230680
uucaugaccaagagcccuu

SEQ ID NO: 230682 - RNA, 19 nt, Artificial Sequence
  Description of Artificial Sequence: Synthetic oligonucleotide
  Sense strand starting at position 532 of SEQ ID NO: 2970
cggccuacaucauuucuau

SEQ ID NO: 230683 - RNA, 19 nt, Artificial Sequence
  Description of Artificial Sequence: Synthetic oligonucleotide
  Antisense strand to SEQ ID NO: 230682
auagaaaugauguaggccg

SEQ ID NO: 230684 - RNA, 19 nt, Artificial Sequence
  Description of Artificial Sequence: Synthetic oligonucleotide
  Sense strand starting at position 541 of SEQ ID NO: 2970
ucauuucuauaggaaauga

SEQ ID NO: 230685 - RNA, 19 nt, Artificial Sequence
  Description of Artificial Sequence: Synthetic oligonucleotide
  Antisense strand to SEQ ID NO: 230684
ucauuuccuauagaaauga

SEQ ID NO: 230686 - RNA, 19 nt, Artificial Sequence
  Description of Artificial Sequence: Synthetic oligonucleotide
  Sense strand starting at position 679 of SEQ ID NO: 2970
ugaacaaaugcuugucauc

SEQ ID NO: 230687 - RNA, 19 nt, Artificial Sequence
  Description of Artificial Sequence: Synthetic oligonucleotide
  Antisense strand to SEQ ID NO: 230686
gaugacaagcauuuguuca

SEQ ID NO: 230688 - RNA, 19 nt, Artificial Sequence
  Description of Artificial Sequence: Synthetic oligonucleotide
  Sense strand starting at position 725 of SEQ ID NO: 2970
cagugcucugucuaggaua

SEQ ID NO: 230689 - RNA, 19 nt, Artificial Sequence
  Description of Artificial Sequence: Synthetic oligonucleotide
  Antisense strand to SEQ ID NO: 230688
uauccuagacagagcacug

SEQ ID NO: 230690 - RNA, 19 nt, Artificial Sequence
  Description of Artificial Sequence: Synthetic oligonucleotide
  Sense strand starting at position 727 of SEQ ID NO: 2970
gugcucugucuaggauauu

SEQ ID NO: 230691 - RNA, 19 nt, Artificial Sequence
  Description of Artificial Sequence: Synthetic oligonucleotide
  Antisense strand to SEQ ID NO: 230690
aauauccuagacagagcac

SEQ ID NO: 230692 - RNA, 19 nt, Artificial Sequence
  Description of Artificial Sequence: Synthetic oligonucleotide
  Sense strand starting at position 728 of SEQ ID NO: 2970
ugcucugucuaggauauuu

SEQ ID NO: 230693 - RNA, 19 nt, Artificial Sequence
  Description of Artificial Sequence: Synthetic oligonucleotide
  Antisense strand to SEQ ID NO: 230692
aaauauccuagacagagca

SEQ ID NO: 230694 - RNA, 19 nt, Artificial Sequence
  Description of Artificial Sequence: Synthetic oligonucleotide
  Sense strand starting at position 910 of SEQ ID NO: 2970
agagguuagguaggaaagu

SEQ ID NO: 230695 - RNA, 19 nt, Artificial Sequence
  Description of Artificial Sequence: Synthetic oligonucleotide
  Antisense strand to SEQ ID NO: 230694
acuuuccuaccuaaccucu

SEQ ID NO: 230696 - RNA, 19 nt, Artificial Sequence
  Description of Artificial Sequence: Synthetic oligonucleotide
  Sense strand starting at position 1067 of SEQ ID NO: 2970
auccucaaugucuagugua

SEQ ID NO: 230697 - RNA, 19 nt, Artificial Sequence
  Description of Artificial Sequence: Synthetic oligonucleotide
  Antisense strand to SEQ ID NO: 230696
uacacuagacauugaggau

SEQ ID NO: 230698 - RNA, 19 nt, Artificial Sequence
  Description of Artificial Sequence: Synthetic oligonucleotide
  Sense strand starting at position 1132 of SEQ ID NO: 2970
cgaugguugggugaacaga

SEQ ID NO: 230699 - RNA, 19 nt, Artificial Sequence
  Description of Artificial Sequence: Synthetic oligonucleotide
  Antisense strand to SEQ ID NO: 230698
ucuguucacccaaccaucg

SEQ ID NO: 230700 - RNA, 19 nt, Artificial Sequence
  Description of Artificial Sequence: Synthetic oligonucleotide
  Sense strand starting at position 1171 of SEQ ID NO: 2970
gguaggguggucugacgaa

SEQ ID NO: 230701 - RNA, 19 nt, Artificial Sequence
  Description of Artificial Sequence: Synthetic oligonucleotide
  Antisense strand to SEQ ID NO: 230700
uucgucagaccacccuacc

SEQ ID NO: 230702 - RNA, 19 nt, Artificial Sequence
  Description of Artificial Sequence: Synthetic oligonucleotide
  Sense strand starting at position 1310 of SEQ ID NO: 2970
aaacgcauacuccgugaga

SEQ ID NO: 230703 - RNA, 19 nt, Artificial Sequence
  Description of Artificial Sequence: Synthetic oligonucleotide
  Antisense strand to SEQ ID NO: 230702
ucucacggaguaugcguuu

SEQ ID NO: 230704 - RNA, 19 nt, Artificial Sequence
  Description of Artificial Sequence: Synthetic oligonucleotide
  Sense strand starting at position 1312 of SEQ ID NO: 2970
acgcauacuccgugagaga

SEQ ID NO: 230705 - RNA, 19 nt, Artificial Sequence
  Description of Artificial Sequence: Synthetic oligonucleotide
  Antisense strand to SEQ ID NO: 230704
ucucucacggaguaugcgu

SEQ ID NO: 230706 - RNA, 19 nt, Artificial Sequence
  Description of Artificial Sequence: Synthetic oligonucleotide
  Sense strand starting at position 1313 of SEQ ID NO: 2970
cgcauacuccgugagagaa

SEQ ID NO: 230707 - RNA, 19 nt, Artificial Sequence
  Description of Artificial Sequence: Synthetic oligonucleotide
  Antisense strand to SEQ ID NO: 230706
uucucucacggaguaugcg

SEQ ID NO: 230708 - RNA, 19 nt, Artificial Sequence
  Description of Artificial Sequence: Synthetic oligonucleotide
  Sense strand starting at position 1403 of SEQ ID NO: 2970
cgagguugggcgcaagaga

SEQ ID NO: 230709 - RNA, 19 nt, Artificial Sequence
  Description of Artificial Sequence: Synthetic oligonucleotide
  Antisense strand to SEQ ID NO: 230708
ucucuugcgcccaaccucg

SEQ ID NO: 230710 - RNA, 19 nt, Artificial Sequence
  Description of Artificial Sequence: Synthetic oligonucleotide
  Sense strand starting at position 2240 of SEQ ID NO: 2970
gcgugcugcuugaugaguu

SEQ ID NO: 230711 - RNA, 19 nt, Artificial Sequence
  Description of Artificial Sequence: Synthetic oligonucleotide
  Antisense strand to SEQ ID NO: 230710
aacucaucaagcagcacgc

SEQ ID NO: 230712 - RNA, 19 nt, Artificial Sequence
  Description of Artificial Sequence: Synthetic oligonucleotide
  Sense strand starting at position 2640 of SEQ ID NO: 2970
cugcuucugucacuguaga

SEQ ID NO: 230713 - RNA, 19 nt, Artificial Sequence
  Description of Artificial Sequence: Synthetic oligonucleotide
  Antisense strand to SEQ ID NO: 230712
ucuacagugacagaagcag

SEQ ID NO: 230714 - RNA, 19 nt, Artificial Sequence
  Description of Artificial Sequence: Synthetic oligonucleotide
  Sense strand starting at position 2641 of SEQ ID NO: 2970
ugcuucugucacuguagau

SEQ ID NO: 230715 - RNA, 19 nt, Artificial Sequence
  Description of Artificial Sequence: Synthetic oligonucleotide
  Antisense strand to SEQ ID NO: 230714
aucuacagugacagaagca

SEQ ID NO: 230716 - RNA, 19 nt, Artificial Sequence
  Description of Artificial Sequence: Synthetic oligonucleotide
  Sense strand starting at position 2692 of SEQ ID NO: 2970
guuauuauccaauaaguac

SEQ ID NO: 230717 - RNA, 19 nt, Artificial Sequence
  Description of Artificial Sequence: Synthetic oligonucleotide
  Antisense strand to SEQ ID NO: 230716
guacuuauuggauaauaac

SEQ ID NO: 230718 - RNA, 19 nt, Artificial Sequence
  Description of Artificial Sequence: Synthetic oligonucleotide
  Sense strand starting at position 2759 of SEQ ID NO: 2970
uaaugcuuucgagauugag

SEQ ID NO: 230719 - RNA, 19 nt, Artificial Sequence
  Description of Artificial Sequence: Synthetic oligonucleotide
  Antisense strand to SEQ ID NO: 230718
cucaaucucgaaagcauua

SEQ ID NO: 230720 - RNA, 19 nt, Artificial Sequence
  Description of Artificial Sequence: Synthetic oligonucleotide
  Sense strand starting at position 2767 of SEQ ID NO: 2970
ucgagauugagcuguguug

SEQ ID NO: 230721 - RNA, 19 nt, Artificial Sequence
  Description of Artificial Sequence: Synthetic oligonucleotide
  Antisense strand to SEQ ID NO: 230720
caacacagcucaaucucga

SEQ ID NO: 230722 - RNA, 19 nt, Artificial Sequence
  Description of Artificial Sequence: Synthetic oligonucleotide
  Sense strand starting at position 2769 of SEQ ID NO: 2970
gagauugagcuguguuguu

SEQ ID NO: 230723 - RNA, 19 nt, Artificial Sequence
  Description of Artificial Sequence: Synthetic oligonucleotide
  Antisense strand to SEQ ID NO: 230722
aacaacacagcucaaucuc

SEQ ID NO: 230724 - RNA, 19 nt, Artificial Sequence
  Description of Artificial Sequence: Synthetic oligonucleotide
  Sense strand starting at position 2831 of SEQ ID NO: 2970
ccacauuugucguuguugu

SEQ ID NO: 230725 - RNA, 19 nt, Artificial Sequence
  Description of Artificial Sequence: Synthetic oligonucleotide
  Antisense strand to SEQ ID NO: 230724
acaacaacgacaaaugugg

SEQ ID NO: 230726 - RNA, 19 nt, Artificial Sequence
  Description of Artificial Sequence: Synthetic oligonucleotide
  Sense strand starting at position 2894 of SEQ ID NO: 2970
ugauguggucucggcucau

SEQ ID NO: 230727 - RNA, 19 nt, Artificial Sequence
  Description of Artificial Sequence: Synthetic oligonucleotide
  Antisense strand to SEQ ID NO: 230726
augagccgagaccacauca

SEQ ID NO: 230728 - RNA, 19 nt, Artificial Sequence
  Description of Artificial Sequence: Synthetic oligonucleotide
  Sense strand starting at position 3183 of SEQ ID NO: 2970
uccacuuaguagcuauuau

SEQ ID NO: 230729 - RNA, 19 nt, Artificial Sequence
  Description of Artificial Sequence: Synthetic oligonucleotide
  Antisense strand to SEQ ID NO: 230728
auaauagcuacuaagugga

SEQ ID NO: 230730 - RNA, 19 nt, Artificial Sequence
  Description of Artificial Sequence: Synthetic oligonucleotide
  Sense strand starting at position 3417 of SEQ ID NO: 2970
augggauuguuggaucaca

SEQ ID NO: 230731 - RNA, 19 nt, Artificial Sequence
  Description of Artificial Sequence: Synthetic oligonucleotide
  Antisense strand to SEQ ID NO: 230730
ugugauccaacaaucccau

SEQ ID NO: 230732 - RNA, 19 nt, Artificial Sequence
  Description of Artificial Sequence: Synthetic oligonucleotide
  Sense strand starting at position 3425 of SEQ ID NO: 2970
guuggaucacaggguagau

SEQ ID NO: 230733 - RNA, 19 nt, Artificial Sequence
  Description of Artificial Sequence: Synthetic oligonucleotide
  Antisense strand to SEQ ID NO: 230732
aucuacccugugauccaac

SEQ ID NO: 230734 - RNA, 19 nt, Artificial Sequence
  Description of Artificial Sequence: Synthetic oligonucleotide
  Sense strand starting at position 3438 of SEQ ID NO: 2970
guagauguauguuuaugca

SEQ ID NO: 230735 - RNA, 19 nt, Artificial Sequence
  Description of Artificial Sequence: Synthetic oligonucleotide
  Antisense strand to SEQ ID NO: 230734
ugcauaaacauacaucuac

SEQ ID NO: 230736 - RNA, 19 nt, Artificial Sequence
  Description of Artificial Sequence: Synthetic oligonucleotide
  Sense strand starting at position 3497 of SEQ ID NO: 2970
ggcuacagaucaucaauga

SEQ ID NO: 230737 - RNA, 19 nt, Artificial Sequence
  Description of Artificial Sequence: Synthetic oligonucleotide
  Antisense strand to SEQ ID NO: 230736
ucauugaugaucuguagcc

SEQ ID NO: 230738 - RNA, 19 nt, Artificial Sequence
  Description of Artificial Sequence: Synthetic oligonucleotide
  Sense strand starting at position 3516 of SEQ ID NO: 2970
agcagucaucaaugaagca

SEQ ID NO: 230739 - RNA, 19 nt, Artificial Sequence
  Description of Artificial Sequence: Synthetic oligonucleotide
  Antisense strand to SEQ ID NO: 230738
ugcuucauugaugacugcu

SEQ ID NO: 230740 - RNA, 19 nt, Artificial Sequence
  Description of Artificial Sequence: Synthetic oligonucleotide
  Sense strand starting at position 3551 of SEQ ID NO: 2970
augaaacuguuucugaauu

SEQ ID NO: 230741 - RNA, 19 nt, Artificial Sequence
  Description of Artificial Sequence: Synthetic oligonucleotide
  Antisense strand to SEQ ID NO: 230740
aauucagaaacaguuucau

SEQ ID NO: 230742 - RNA, 19 nt, Artificial Sequence
  Description of Artificial Sequence: Synthetic oligonucleotide
  Sense strand starting at position 3616 of SEQ ID NO: 2970
caguacugucgugugcauu

SEQ ID NO: 230743 - RNA, 19 nt, Artificial Sequence
  Description of Artificial Sequence: Synthetic oligonucleotide
  Antisense strand to SEQ ID NO: 230742
aaugcacacgacaguacug

SEQ ID NO: 230744 - RNA, 19 nt, Artificial Sequence
  Description of Artificial Sequence: Synthetic oligonucleotide
  Sense strand starting at position 3786 of SEQ ID NO: 2970
cggguuccucaggaaaguu

SEQ ID NO: 230745 - RNA, 19 nt, Artificial Sequence
  Description of Artificial Sequence: Synthetic oligonucleotide
  Antisense strand to SEQ ID NO: 230744
aacuuuccugaggaacccg

SEQ ID NO: 230746 - RNA, 19 nt, Artificial Sequence
  Description of Artificial Sequence: Synthetic oligonucleotide
  Sense strand starting at position 3813 of SEQ ID NO: 2970
ggagauaaggcuugaauug

SEQ ID NO: 230747 - RNA, 19 nt, Artificial Sequence
  Description of Artificial Sequence: Synthetic oligonucleotide
  Antisense strand to SEQ ID NO: 230746
caauucaagccuuaucucc

SEQ ID NO: 230748 - RNA, 19 nt, Artificial Sequence
  Description of Artificial Sequence: Synthetic oligonucleotide
  Sense strand starting at position 3827 of SEQ ID NO: 2970
aauugaggcuuugaauuga

SEQ ID NO: 230749 - RNA, 19 nt, Artificial Sequence
  Description of Artificial Sequence: Synthetic oligonucleotide
  Antisense strand to SEQ ID NO: 230748
ucaauucaaagccucaauu

SEQ ID NO: 230750 - RNA, 19 nt, Artificial Sequence
  Description of Artificial Sequence: Synthetic oligonucleotide
  Sense strand starting at position 3846 of SEQ ID NO: 2970
auugaaaugaguggguguu

SEQ ID NO: 230751 - RNA, 19 nt, Artificial Sequence
  Description of Artificial Sequence: Synthetic oligonucleotide
  Antisense strand to SEQ ID NO: 230750
aacacccacucauuucaau

SEQ ID NO: 230752 - RNA, 19 nt, Artificial Sequence
  Description of Artificial Sequence: Synthetic oligonucleotide
  Sense strand starting at position 3847 of SEQ ID NO: 2970
uugaaaugaguggguguuu

SEQ ID NO: 230753 - RNA, 19 nt, Artificial Sequence
  Description of Artificial Sequence: Synthetic oligonucleotide
  Antisense strand to SEQ ID NO: 230752
aaacacccacucauuucaa

SEQ ID NO: 230754 - RNA, 19 nt, Artificial Sequence
  Description of Artificial Sequence: Synthetic oligonucleotide
  Sense strand starting at position 3858 of SEQ ID NO: 2970
ggguguuugcuuggcauau

SEQ ID NO: 230755 - RNA, 19 nt, Artificial Sequence
  Description of Artificial Sequence: Synthetic oligonucleotide
  Antisense strand to SEQ ID NO: 230754
auaugccaagcaaacaccc

SEQ ID NO: 230756 - RNA, 19 nt, Artificial Sequence
  Description of Artificial Sequence: Synthetic oligonucleotide
  Sense strand starting at position 3859 of SEQ ID NO: 2970
gguguuugcuuggcauaug

SEQ ID NO: 230757 - RNA, 19 nt, Artificial Sequence
  Description of Artificial Sequence: Synthetic oligonucleotide
  Antisense strand to SEQ ID NO: 230756
cauaugccaagcaaacacc

SEQ ID NO: 230758 - RNA, 19 nt, Artificial Sequence
  Description of Artificial Sequence: Synthetic oligonucleotide
  Sense strand starting at position 14 of SEQ ID NO: 2971
cucagaucucgaggaacaa

SEQ ID NO: 230759 - RNA, 19 nt, Artificial Sequence
  Description of Artificial Sequence: Synthetic oligonucleotide
  Antisense strand to SEQ ID NO: 230758
uuguuccucgagaucugag

SEQ ID NO: 230760 - RNA, 19 nt, Artificial Sequence
  Description of Artificial Sequence: Synthetic oligonucleotide
  Sense strand starting at position 54 of SEQ ID NO: 2971
aguauuauauuaccugaag

SEQ ID NO: 230761 - RNA, 19 nt, Artificial Sequence
  Description of Artificial Sequence: Synthetic oligonucleotide
  Antisense strand to SEQ ID NO: 230760
cuucagguaauauaauacu

SEQ ID NO: 230762 - RNA, 19 nt, Artificial Sequence
  Description of Artificial Sequence: Synthetic oligonucleotide
  Sense strand starting at position 55 of SEQ ID NO: 2971
guauuauauuaccugaagg

SEQ ID NO: 230763 - RNA, 19 nt, Artificial Sequence
  Description of Artificial Sequence: Synthetic oligonucleotide
  Antisense strand to SEQ ID NO: 230762
ccuucagguaauauaauac

SEQ ID NO: 230764 - RNA, 19 nt, Artificial Sequence
  Description of Artificial Sequence: Synthetic oligonucleotide
  Sense strand starting at position 89 of SEQ ID NO: 2971
augugaucuuaagugaaug

SEQ ID NO: 230765 - RNA, 19 nt, Artificial Sequence
  Description of Artificial Sequence: Synthetic oligonucleotide
  Antisense strand to SEQ ID NO: 230764
cauucacuuaagaucacau

SEQ ID NO: 230766 - RNA, 19 nt, Artificial Sequence
  Description of Artificial Sequence: Synthetic oligonucleotide
  Sense strand starting at position 135 of SEQ ID NO: 2971
ccaaguugcuuugcacaaa

SEQ ID NO: 230767 - RNA, 19 nt, Artificial Sequence
  Description of Artificial Sequence: Synthetic oligonucleotide
  Antisense strand to SEQ ID NO: 230766
uuugugcaaagcaacuugg

SEQ ID NO: 230768 - RNA, 19 nt, Artificial Sequence
  Description of Artificial Sequence: Synthetic oligonucleotide
  Sense strand starting at position 248 of SEQ ID NO: 2971
ccugaagcuccaggauuau

SEQ ID NO: 230769 - RNA, 19 nt, Artificial Sequence
  Description of Artificial Sequence: Synthetic oligonucleotide
  Antisense strand to SEQ ID NO: 230768
auaauccuggagcuucagg

SEQ ID NO: 230770 - RNA, 19 nt, Artificial Sequence
  Description of Artificial Sequence: Synthetic oligonucleotide
  Sense strand starting at position 304 of SEQ ID NO: 2971
cgaaguuacagagguaaga

SEQ ID NO: 230771 - RNA, 19 nt, Artificial Sequence
  Description of Artificial Sequence: Synthetic oligonucleotide
  Antisense strand to SEQ ID NO: 230770
ucuuaccucuguaacuucg

SEQ ID NO: 230772 - RNA, 19 nt, Artificial Sequence
  Description of Artificial Sequence: Synthetic oligonucleotide
  Sense strand starting at position 490 of SEQ ID NO: 2971
gauacauauuuagaguaag

SEQ ID NO: 230773 - RNA, 19 nt, Artificial Sequence
  Description of Artificial Sequence: Synthetic oligonucleotide
  Antisense strand to SEQ ID NO: 230772
cuuacucuaaauauguauc

SEQ ID NO: 230774 - RNA, 19 nt, Artificial Sequence
  Description of Artificial Sequence: Synthetic oligonucleotide
  Sense strand starting at position 532 of SEQ ID NO: 2971
agguguaaauuagugggaa

SEQ ID NO: 230775 - RNA, 19 nt, Artificial Sequence
  Description of Artificial Sequence: Synthetic oligonucleotide
  Antisense strand to SEQ ID NO: 230774
uucccacuaauuuacaccu

SEQ ID NO: 230776 - RNA, 19 nt, Artificial Sequence
  Description of Artificial Sequence: Synthetic oligonucleotide
  Sense strand starting at position 534 of SEQ ID NO: 2971
guguaaauuagugggaaua

SEQ ID NO: 230777 - RNA, 19 nt, Artificial Sequence
  Description of Artificial Sequence: Synthetic oligonucleotide
  Antisense strand to SEQ ID NO: 230776
uauucccacuaauuuacac

SEQ ID NO: 230778 - RNA, 19 nt, Artificial Sequence
  Description of Artificial Sequence: Synthetic oligonucleotide
  Sense strand starting at position 535 of SEQ ID NO: 2971
uguaaauuagugggaauau

SEQ ID NO: 230779 - RNA, 19 nt, Artificial Sequence
  Description of Artificial Sequence: Synthetic oligonucleotide
  Antisense strand to SEQ ID NO: 230778
auauucccacuaauuuaca

SEQ ID NO: 230780 - RNA, 19 nt, Artificial Sequence
  Description of Artificial Sequence: Synthetic oligonucleotide
  Sense strand starting at position 545 of SEQ ID NO: 2971
ugggaauaugcaugaaccu

SEQ ID NO: 230781 - RNA, 19 nt, Artificial Sequence
  Description of Artificial Sequence: Synthetic oligonucleotide
  Antisense strand to SEQ ID NO: 230780
agguucaugcauauuccca

SEQ ID NO: 230782 - RNA, 19 nt, Artificial Sequence
  Description of Artificial Sequence: Synthetic oligonucleotide
  Sense strand starting at position 554 of SEQ ID NO: 2971
gcaugaaccugguuuguag

SEQ ID NO: 230783 - RNA, 19 nt, Artificial Sequence
  Description of Artificial Sequence: Synthetic oligonucleotide
  Antisense strand to SEQ ID NO: 230782
cuacaaaccagguucaugc

SEQ ID NO: 230784 - RNA, 19 nt, Artificial Sequence
  Description of Artificial Sequence: Synthetic oligonucleotide
  Sense strand starting at position 563 of SEQ ID NO: 2971
ugguuuguaggguaagaau

SEQ ID NO: 230785 - RNA, 19 nt, Artificial Sequence
  Description of Artificial Sequence: Synthetic oligonucleotide
  Antisense strand to SEQ ID NO: 230784
auucuuacccuacaaacca

SEQ ID NO: 230786 - RNA, 19 nt, Artificial Sequence
  Description of Artificial Sequence: Synthetic oligonucleotide
  Sense strand starting at position 572 of SEQ ID NO: 2971
ggguaagaaucccagggaa

SEQ ID NO: 230787 - RNA, 19 nt, Artificial Sequence
  Description of Artificial Sequence: Synthetic oligonucleotide
  Antisense strand to SEQ ID NO: 230786
uucccugggauucuuaccc

SEQ ID NO: 230788 - RNA, 19 nt, Artificial Sequence
  Description of Artificial Sequence: Synthetic oligonucleotide
  Sense strand starting at position 866 of SEQ ID NO: 2971
ugaccugauugugucacaa

SEQ ID NO: 230789 - RNA, 19 nt, Artificial Sequence
  Description of Artificial Sequence: Synthetic oligonucleotide
  Antisense strand to SEQ ID NO: 230788
uugugacacaaucagguca

SEQ ID NO: 230790 - RNA, 19 nt, Artificial Sequence
  Description of Artificial Sequence: Synthetic oligonucleotide
  Sense strand starting at position 900 of SEQ ID NO: 2971
ucaugcuuuccugggaaau

SEQ ID NO: 230791 - RNA, 19 nt, Artificial Sequence
  Description of Artificial Sequence: Synthetic oligonucleotide
  Antisense strand to SEQ ID NO: 230790
auuucccaggaaagcauga

SEQ ID NO: 230792 - RNA, 19 nt, Artificial Sequence
  Description of Artificial Sequence: Synthetic oligonucleotide
  Sense strand starting at position 978 of SEQ ID NO: 2971
uugggaaagcuuugcugga

SEQ ID NO: 230793 - RNA, 19 nt, Artificial Sequence
  Description of Artificial Sequence: Synthetic oligonucleotide
  Antisense strand to SEQ ID NO: 230792
uccagcaaagcuuucccaa

SEQ ID NO: 230794 - RNA, 19 nt, Artificial Sequence
  Description of Artificial Sequence: Synthetic oligonucleotide
  Sense strand starting at position 979 of SEQ ID NO: 2971
ugggaaagcuuugcuggaa

SEQ ID NO: 230795 - RNA, 19 nt, Artificial Sequence
  Description of Artificial Sequence: Synthetic oligonucleotide
  Antisense strand to SEQ ID NO: 230794
uuccagcaaagcuuuccca

SEQ ID NO: 230796 - RNA, 19 nt, Artificial Sequence
  Description of Artificial Sequence: Synthetic oligonucleotide
  Sense strand starting at position 980 of SEQ ID NO: 2971
gggaaagcuuugcuggaaa

SEQ ID NO: 230797 - RNA, 19 nt, Artificial Sequence
  Description of Artificial Sequence: Synthetic oligonucleotide
  Antisense strand to SEQ ID NO: 230796
uuuccagcaaagcuuuccc

SEQ ID NO: 230798 - RNA, 19 nt, Artificial Sequence
  Description of Artificial Sequence: Synthetic oligonucleotide
  Sense strand starting at position 982 of SEQ ID NO: 2971
gaaagcuuugcuggaaaug

SEQ ID NO: 230799 - RNA, 19 nt, Artificial Sequence
  Description of Artificial Sequence: Synthetic oligonucleotide
  Antisense strand to SEQ ID NO: 230798
cauuuccagcaaagcuuuc

SEQ ID NO: 230800 - RNA, 19 nt, Artificial Sequence
  Description of Artificial Sequence: Synthetic oligonucleotide
  Sense strand starting at position 1011 of SEQ ID NO: 2971
caaagugacgguugacagu

SEQ ID NO: 230801 - RNA, 19 nt, Artificial Sequence
  Description of Artificial Sequence: Synthetic oligonucleotide
  Antisense strand to SEQ ID NO: 230800
acugucaaccgucacuuug

SEQ ID NO: 230802 - RNA, 19 nt, Artificial Sequence
  Description of Artificial Sequence: Synthetic oligonucleotide
  Sense strand starting at position 1024 of SEQ ID NO: 2971
gacaguuuaguguggaaac

SEQ ID NO: 230803 - RNA, 19 nt, Artificial Sequence
  Description of Artificial Sequence: Synthetic oligonucleotide
  Antisense strand to SEQ ID NO: 230802
guuuccacacuaaacuguc

SEQ ID NO: 230804 - RNA, 19 nt, Artificial Sequence
  Description of Artificial Sequence: Synthetic oligonucleotide
  Sense strand starting at position 1026 of SEQ ID NO: 2971
caguuuaguguggaaacca

SEQ ID NO: 230805 - RNA, 19 nt, Artificial Sequence
  Description of Artificial Sequence: Synthetic oligonucleotide
  Antisense strand to SEQ ID NO: 230804
ugguuuccacacuaaacug

SEQ ID NO: 230806 - RNA, 19 nt, Artificial Sequence
  Description of Artificial Sequence: Synthetic oligonucleotide
  Sense strand starting at position 1201 of SEQ ID NO: 2971
uuugaaacguguuucucaa

SEQ ID NO: 230807 - RNA, 19 nt, Artificial Sequence
  Description of Artificial Sequence: Synthetic oligonucleotide
  Antisense strand to SEQ ID NO: 230806
uugagaaacacguuucaaa

SEQ ID NO: 230808 - RNA, 19 nt, Artificial Sequence
  Description of Artificial Sequence: Synthetic oligonucleotide
  Sense strand starting at position 1203 of SEQ ID NO: 2971
ugaaacguguuucucaaag

SEQ ID NO: 230809 - RNA, 19 nt, Artificial Sequence
  Description of Artificial Sequence: Synthetic oligonucleotide
  Antisense strand to SEQ ID NO: 230808
cuuugagaaacacguuuca

SEQ ID NO: 230810 - RNA, 19 nt, Artificial Sequence
  Description of Artificial Sequence: Synthetic oligonucleotide
  Sense strand starting at position 2857 of SEQ ID NO: 2971
aauguagaucuugggcuau

SEQ ID NO: 230811 - RNA, 19 nt, Artificial Sequence
  Description of Artificial Sequence: Synthetic oligonucleotide
  Antisense strand to SEQ ID NO: 230810
auagcccaagaucuacauu

SEQ ID NO: 230812 - RNA, 19 nt, Artificial Sequence
  Description of Artificial Sequence: Synthetic oligonucleotide
  Sense strand starting at position 2859 of SEQ ID NO: 2971
uguagaucuugggcuauua

SEQ ID NO: 230813 - RNA, 19 nt, Artificial Sequence
  Description of Artificial Sequence: Synthetic oligonucleotide
  Antisense strand to SEQ ID NO: 230812
uaauagcccaagaucuaca

SEQ ID NO: 230814 - RNA, 19 nt, Artificial Sequence
  Description of Artificial Sequence: Synthetic oligonucleotide
  Sense strand starting at position 2899 of SEQ ID NO: 2971
uucgacauuuaauaaguca

SEQ ID NO: 230815 - RNA, 19 nt, Artificial Sequence
  Description of Artificial Sequence: Synthetic oligonucleotide
  Antisense strand to SEQ ID NO: 230814
ugacuuauuaaaugucgaa

SEQ ID NO: 230816 - RNA, 19 nt, Artificial Sequence
  Description of Artificial Sequence: Synthetic oligonucleotide
  Sense strand starting at position 3266 of SEQ ID NO: 2971
ccggacucgucuuuaagaa

SEQ ID NO: 230817 - RNA, 19 nt, Artificial Sequence
  Description of Artificial Sequence: Synthetic oligonucleotide
  Antisense strand to SEQ ID NO: 230816
uucuuaaagacgaguccgg

SEQ ID NO: 230818 - RNA, 19 nt, Artificial Sequence
  Description of Artificial Sequence: Synthetic oligonucleotide
  Sense strand starting at position 3267 of SEQ ID NO: 2971
cggacucgucuuuaagaaa

SEQ ID NO: 230819 - RNA, 19 nt, Artificial Sequence
  Description of Artificial Sequence: Synthetic oligonucleotide
  Antisense strand to SEQ ID NO: 230818
uuucuuaaagacgaguccg

SEQ ID NO: 230820 - RNA, 19 nt, Artificial Sequence
  Description of Artificial Sequence: Synthetic oligonucleotide
  Sense strand starting at position 3399 of SEQ ID NO: 2971
ggugcuuucugggcaagag

SEQ ID NO: 230821 - RNA, 19 nt, Artificial Sequence
  Description of Artificial Sequence: Synthetic oligonucleotide
  Antisense strand to SEQ ID NO: 230820
cucuugcccagaaagcacc

SEQ ID NO: 230822 - RNA, 19 nt, Artificial Sequence
  Description of Artificial Sequence: Synthetic oligonucleotide
  Sense strand starting at position 3429 of SEQ ID NO: 2971
ccaaguccgcgaucuguuu

SEQ ID NO: 230823 - RNA, 19 nt, Artificial Sequence
  Description of Artificial Sequence: Synthetic oligonucleotide
  Antisense strand to SEQ ID NO: 230822
aaacagaucgcggacuugg

SEQ ID NO: 230824 - RNA, 19 nt, Artificial Sequence
  Description of Artificial Sequence: Synthetic oligonucleotide
  Sense strand starting at position 3433 of SEQ ID NO: 2971
guccgcgaucuguuuggga

SEQ ID NO: 230825 - RNA, 19 nt, Artificial Sequence
  Description of Artificial Sequence: Synthetic oligonucleotide
  Antisense strand to SEQ ID NO: 230824
ucccaaacagaucgcggac

SEQ ID NO: 230826 - RNA, 19 nt, Artificial Sequence
  Description of Artificial Sequence: Synthetic oligonucleotide
  Sense strand starting at position 3447 of SEQ ID NO: 2971
ugggaaagguguucugagu

SEQ ID NO: 230827 - RNA, 19 nt, Artificial Sequence
  Description of Artificial Sequence: Synthetic oligonucleotide
  Antisense strand to SEQ ID NO: 230826
acucagaacaccuuuccca

SEQ ID NO: 230828 - RNA, 19 nt, Artificial Sequence
  Description of Artificial Sequence: Synthetic oligonucleotide
  Sense strand starting at position 3477 of SEQ ID NO: 2971
ggcggagugggcgagaauu

SEQ ID NO: 230829 - RNA, 19 nt, Artificial Sequence
  Description of Artificial Sequence: Synthetic oligonucleotide
  Antisense strand to SEQ ID NO: 230828
aauucucgcccacuccgcc

SEQ ID NO: 230830 - RNA, 19 nt, Artificial Sequence
  Description of Artificial Sequence: Synthetic oligonucleotide
  Sense strand starting at position 3479 of SEQ ID NO: 2971
cggagugggcgagaauuaa

SEQ ID NO: 230831 - RNA, 19 nt, Artificial Sequence
  Description of Artificial Sequence: Synthetic oligonucleotide
  Antisense strand to SEQ ID NO: 230830
uuaauucucgcccacuccg

SEQ ID NO: 230832 - RNA, 19 nt, Artificial Sequence
  Description of Artificial Sequence: Synthetic oligonucleotide
  Sense strand starting at position 3683 of SEQ ID NO: 2971
ggagaaaguguccggcaga

SEQ ID NO: 230833 - RNA, 19 nt, Artificial Sequence
  Description of Artificial Sequence: Synthetic oligonucleotide
  Antisense strand to SEQ ID NO: 230832
ucugccggacacuuucucc

SEQ ID NO: 230834 - RNA, 19 nt, Artificial Sequence
  Description of Artificial Sequence: Synthetic oligonucleotide
  Sense strand starting at position 3686 of SEQ ID NO: 2971
gaaaguguccggcagagcu

SEQ ID NO: 230835 - RNA, 19 nt, Artificial Sequence
  Description of Artificial Sequence: Synthetic oligonucleotide
  Antisense strand to SEQ ID NO: 230834
agcucugccggacacuuuc

SEQ ID NO: 230836 - RNA, 19 nt, Artificial Sequence
  Description of Artificial Sequence: Synthetic oligonucleotide
  Sense strand starting at position 3725 of SEQ ID NO: 2971
gagagaagauaugaaaugu

SEQ ID NO: 230837 - RNA, 19 nt, Artificial Sequence
  Description of Artificial Sequence: Synthetic oligonucleotide
  Antisense strand to SEQ ID NO: 230836
acauuucauaucuucucuc

SEQ ID NO: 230838 - RNA, 19 nt, Artificial Sequence
  Description of Artificial Sequence: Synthetic oligonucleotide
  Sense strand starting at position 157 of SEQ ID NO: 2972
gcaacuuagaagugacuga

SEQ ID NO: 230839 - RNA, 19 nt, Artificial Sequence
  Description of Artificial Sequence: Synthetic oligonucleotide
  Antisense strand to SEQ ID NO: 230838
ucagucacuucuaaguugc

SEQ ID NO: 230840 - RNA, 19 nt, Artificial Sequence
  Description of Artificial Sequence: Synthetic oligonucleotide
  Sense strand starting at position 168 of SEQ ID NO: 2972
gugacugacuccuuuacca

SEQ ID NO: 230841 - RNA, 19 nt, Artificial Sequence
  Description of Artificial Sequence: Synthetic oligonucleotide
  Antisense strand to SEQ ID NO: 230840
ugguaaaggagucagucac

SEQ ID NO: 230842 - RNA, 19 nt, Artificial Sequence
  Description of Artificial Sequence: Synthetic oligonucleotide
  Sense strand starting at position 201 of SEQ ID NO: 2972
ugaguuuaaucuuugggaa

SEQ ID NO: 230843 - RNA, 19 nt, Artificial Sequence
  Description of Artificial Sequence: Synthetic oligonucleotide
  Antisense strand to SEQ ID NO: 230842
uucccaaagauuaaacuca

SEQ ID NO: 230844 - RNA, 19 nt, Artificial Sequence
  Description of Artificial Sequence: Synthetic oligonucleotide
  Sense strand starting at position 202 of SEQ ID NO: 2972
gaguuuaaucuuugggaag

SEQ ID NO: 230845 - RNA, 19 nt, Artificial Sequence
  Description of Artificial Sequence: Synthetic oligonucleotide
  Antisense strand to SEQ ID NO: 230844
cuucccaaagauuaaacuc

SEQ ID NO: 230846 - RNA, 19 nt, Artificial Sequence
  Description of Artificial Sequence: Synthetic oligonucleotide
  Sense strand starting at position 257 of SEQ ID NO: 2972
auagauugcucuuuagagg

SEQ ID NO: 230847 - RNA, 19 nt, Artificial Sequence
  Description of Artificial Sequence: Synthetic oligonucleotide
  Antisense strand to SEQ ID NO: 230846
ccucuaaagagcaaucuau

SEQ ID NO: 230848 - RNA, 19 nt, Artificial Sequence
  Description of Artificial Sequence: Synthetic oligonucleotide
  Sense strand starting at position 262 of SEQ ID NO: 2972
uugcucuuuagaggagaca

SEQ ID NO: 230849 - RNA, 19 nt, Artificial Sequence
  Description of Artificial Sequence: Synthetic oligonucleotide
  Antisense strand to SEQ ID NO: 230848
ugucuccucuaaagagcaa

SEQ ID NO: 230850 - RNA, 19 nt, Artificial Sequence
  Description of Artificial Sequence: Synthetic oligonucleotide
  Sense strand starting at position 298 of SEQ ID NO: 2972
uucucauagagcugagaug

SEQ ID NO: 230851 - RNA, 19 nt, Artificial Sequence
  Description of Artificial Sequence: Synthetic oligonucleotide
  Antisense strand to SEQ ID NO: 230850
caucucagcucuaugagaa

SEQ ID NO: 230852 - RNA, 19 nt, Artificial Sequence
  Description of Artificial Sequence: Synthetic oligonucleotide
  Sense strand starting at position 555 of SEQ ID NO: 2972
ugccuuacucuggauaacu

SEQ ID NO: 230853 - RNA, 19 nt, Artificial Sequence
  Description of Artificial Sequence: Synthetic oligonucleotide
  Antisense strand to SEQ ID NO: 230852
aguuauccagaguaaggca

SEQ ID NO: 230854 - RNA, 19 nt, Artificial Sequence
  Description of Artificial Sequence: Synthetic oligonucleotide
  Sense strand starting at position 578 of SEQ ID NO: 2972
guuguuugucuguugguga

SEQ ID NO: 230855 - RNA, 19 nt, Artificial Sequence
  Description of Artificial Sequence: Synthetic oligonucleotide
  Antisense strand to SEQ ID NO: 230854
ucaccaacagacaaacaac

SEQ ID NO: 230856 - RNA, 19 nt, Artificial Sequence
  Description of Artificial Sequence: Synthetic oligonucleotide
  Sense strand starting at position 583 of SEQ ID NO: 2972
uugucuguuggugaaagau

SEQ ID NO: 230857 - RNA, 19 nt, Artificial Sequence
  Description of Artificial Sequence: Synthetic oligonucleotide
  Antisense strand to SEQ ID NO: 230856
aucuuucaccaacagacaa

SEQ ID NO: 230858 - RNA, 19 nt, Artificial Sequence
  Description of Artificial Sequence: Synthetic oligonucleotide
  Sense strand starting at position 591 of SEQ ID NO: 2972
uggugaaagauuggucaca

SEQ ID NO: 230859 - RNA, 19 nt, Artificial Sequence
  Description of Artificial Sequence: Synthetic oligonucleotide
  Antisense strand to SEQ ID NO: 230858
ugugaccaaucuuucacca

SEQ ID NO: 230860 - RNA, 19 nt, Artificial Sequence
  Description of Artificial Sequence: Synthetic oligonucleotide
  Sense strand starting at position 592 of SEQ ID NO: 2972
ggugaaagauuggucacaa

SEQ ID NO: 230861 - RNA, 19 nt, Artificial Sequence
  Description of Artificial Sequence: Synthetic oligonucleotide
  Antisense strand to SEQ ID NO: 230860
uugugaccaaucuuucacc

SEQ ID NO: 230862 - RNA, 19 nt, Artificial Sequence
  Description of Artificial Sequence: Synthetic oligonucleotide
  Sense strand starting at position 593 of SEQ ID NO: 2972
gugaaagauuggucacaaa

SEQ ID NO: 230863 - RNA, 19 nt, Artificial Sequence
  Description of Artificial Sequence: Synthetic oligonucleotide
  Antisense strand to SEQ ID NO: 230862
uuugugaccaaucuuucac

SEQ ID NO: 230864 - RNA, 19 nt, Artificial Sequence
  Description of Artificial Sequence: Synthetic oligonucleotide
  Sense strand starting at position 689 of SEQ ID NO: 2972
ucaguuaguccucaaucau

SEQ ID NO: 230865 - RNA, 19 nt, Artificial Sequence
  Description of Artificial Sequence: Synthetic oligonucleotide
  Antisense strand to SEQ ID NO: 230864
augauugaggacuaacuga

SEQ ID NO: 230866 - RNA, 19 nt, Artificial Sequence
  Description of Artificial Sequence: Synthetic oligonucleotide
  Sense strand starting at position 708 of SEQ ID NO: 2972
aaguuuggugucugagaag

SEQ ID NO: 230867 - RNA, 19 nt, Artificial Sequence
  Description of Artificial Sequence: Synthetic oligonucleotide
  Antisense strand to SEQ ID NO: 230866
cuucucagacaccaaacuu

SEQ ID NO: 230868 - RNA, 19 nt, Artificial Sequence
  Description of Artificial Sequence: Synthetic oligonucleotide
  Sense strand starting at position 1085 of SEQ ID NO: 2972
gugaauugagcagauggca

SEQ ID NO: 230869 - RNA, 19 nt, Artificial Sequence
  Description of Artificial Sequence: Synthetic oligonucleotide
  Antisense strand to SEQ ID NO: 230868
ugccaucugcucaauucac

SEQ ID NO: 230870 - RNA, 19 nt, Artificial Sequence
  Description of Artificial Sequence: Synthetic oligonucleotide
  Sense strand starting at position 1123 of SEQ ID NO: 2972
uggacugguguccacaaca

SEQ ID NO: 230871 - RNA, 19 nt, Artificial Sequence
  Description of Artificial Sequence: Synthetic oligonucleotide
  Antisense strand to SEQ ID NO: 230870
uguuguggacaccagucca

SEQ ID NO: 230872 - RNA, 19 nt, Artificial Sequence
  Description of Artificial Sequence: Synthetic oligonucleotide
  Sense strand starting at position 1218 of SEQ ID NO: 2972
cucagugauuugcuuaucu

SEQ ID NO: 230873 - RNA, 19 nt, Artificial Sequence
  Description of Artificial Sequence: Synthetic oligonucleotide
  Antisense strand to SEQ ID NO: 230872
agauaagcaaaucacugag

SEQ ID NO: 230874 - RNA, 19 nt, Artificial Sequence
  Description of Artificial Sequence: Synthetic oligonucleotide
  Sense strand starting at position 1222 of SEQ ID NO: 2972
gugauuugcuuaucuguau

SEQ ID NO: 230875 - RNA, 19 nt, Artificial Sequence
  Description of Artificial Sequence: Synthetic oligonucleotide
  Antisense strand to SEQ ID NO: 230874
auacagauaagcaaaucac

SEQ ID NO: 230876 - RNA, 19 nt, Artificial Sequence
  Description of Artificial Sequence: Synthetic oligonucleotide
  Sense strand starting at position 1236 of SEQ ID NO: 2972
uguauccgugucugauuua

SEQ ID NO: 230877 - RNA, 19 nt, Artificial Sequence
  Description of Artificial Sequence: Synthetic oligonucleotide
  Antisense strand to SEQ ID NO: 230876
uaaaucagacacggauaca

SEQ ID NO: 230878 - RNA, 19 nt, Artificial Sequence
  Description of Artificial Sequence: Synthetic oligonucleotide
  Sense strand starting at position 1257 of SEQ ID NO: 2972
cagugaacacgugaugguu

SEQ ID NO: 230879 - RNA, 19 nt, Artificial Sequence
  Description of Artificial Sequence: Synthetic oligonucleotide
  Antisense strand to SEQ ID NO: 230878
aaccaucacguguucacug

SEQ ID NO: 230880 - RNA, 19 nt, Artificial Sequence
  Description of Artificial Sequence: Synthetic oligonucleotide
  Sense strand starting at position 1303 of SEQ ID NO: 2972
uugagauccgcuuauaacc

SEQ ID NO: 230881 - RNA, 19 nt, Artificial Sequence
  Description of Artificial Sequence: Synthetic oligonucleotide
  Antisense strand to SEQ ID NO: 230880
gguuauaagcggaucucaa

SEQ ID NO: 230882 - RNA, 19 nt, Artificial Sequence
  Description of Artificial Sequence: Synthetic oligonucleotide
  Sense strand starting at position 1400 of SEQ ID NO: 2972
auauauccauucccgagau

SEQ ID NO: 230883 - RNA, 19 nt, Artificial Sequence
  Description of Artificial Sequence: Synthetic oligonucleotide
  Antisense strand to SEQ ID NO: 230882
aucucgggaauggauauau

SEQ ID NO: 230884 - RNA, 19 nt, Artificial Sequence
  Description of Artificial Sequence: Synthetic oligonucleotide
  Sense strand starting at position 1472 of SEQ ID NO: 2972
acauaaauguugucuagga

SEQ ID NO: 230885 - RNA, 19 nt, Artificial Sequence
  Description of Artificial Sequence: Synthetic oligonucleotide
  Antisense strand to SEQ ID NO: 230884
uccuagacaacauuuaugu

SEQ ID NO: 230886 - RNA, 19 nt, Artificial Sequence
  Description of Artificial Sequence: Synthetic oligonucleotide
  Sense strand starting at position 1473 of SEQ ID NO: 2972
cauaaauguugucuaggaa

SEQ ID NO: 230887 - RNA, 19 nt, Artificial Sequence
  Description of Artificial Sequence: Synthetic oligonucleotide
  Antisense strand to SEQ ID NO: 230886
uuccuagacaacauuuaug

SEQ ID NO: 230888 - RNA, 19 nt, Artificial Sequence
  Description of Artificial Sequence: Synthetic oligonucleotide
  Sense strand starting at position 2415 of SEQ ID NO: 2972
gguacauucuacucugauu

SEQ ID NO: 230889 - RNA, 19 nt, Artificial Sequence
  Description of Artificial Sequence: Synthetic oligonucleotide
  Antisense strand to SEQ ID NO: 230888
aaucagaguagaauguacc

SEQ ID NO: 230890 - RNA, 19 nt, Artificial Sequence
  Description of Artificial Sequence: Synthetic oligonucleotide
  Sense strand starting at position 2545 of SEQ ID NO: 2972
cccacuaaugagugauagu

SEQ ID NO: 230891 - RNA, 19 nt, Artificial Sequence
  Description of Artificial Sequence: Synthetic oligonucleotide
  Antisense strand to SEQ ID NO: 230890
acuaucacucauuaguggg

SEQ ID NO: 230892 - RNA, 19 nt, Artificial Sequence
  Description of Artificial Sequence: Synthetic oligonucleotide
  Sense strand starting at position 2691 of SEQ ID NO: 2972
ucgggauuuggacgcauca

SEQ ID NO: 230893 - RNA, 19 nt, Artificial Sequence
  Description of Artificial Sequence: Synthetic oligonucleotide
  Antisense strand to SEQ ID NO: 230892
ugaugcguccaaaucccga

SEQ ID NO: 230894 - RNA, 19 nt, Artificial Sequence
  Description of Artificial Sequence: Synthetic oligonucleotide
  Sense strand starting at position 3464 of SEQ ID NO: 2972
gcuguacuccuguauuugu

SEQ ID NO: 230895 - RNA, 19 nt, Artificial Sequence
  Description of Artificial Sequence: Synthetic oligonucleotide
  Antisense strand to SEQ ID NO: 230894
acaaauacaggaguacagc

SEQ ID NO: 230896 - RNA, 19 nt, Artificial Sequence
  Description of Artificial Sequence: Synthetic oligonucleotide
  Sense strand starting at position 3473 of SEQ ID NO: 2972
cuguauuuguggccaacuu

SEQ ID NO: 230897 - RNA, 19 nt, Artificial Sequence
  Description of Artificial Sequence: Synthetic oligonucleotide
  Antisense strand to SEQ ID NO: 230896
aaguuggccacaaauacag

SEQ ID NO: 230898 - RNA, 19 nt, Artificial Sequence
  Description of Artificial Sequence: Synthetic oligonucleotide
  Sense strand starting at position 3495 of SEQ ID NO: 2972
guugcaauuguuuaacaac

SEQ ID NO: 230899 - RNA, 19 nt, Artificial Sequence
  Description of Artificial Sequence: Synthetic oligonucleotide
  Antisense strand to SEQ ID NO: 230898
guuguuaaacaauugcaac

SEQ ID NO: 230900 - RNA, 19 nt, Artificial Sequence
  Description of Artificial Sequence: Synthetic oligonucleotide
  Sense strand starting at position 3523 of SEQ ID NO: 2972
acaugaauguugguuaaua

SEQ ID NO: 230901 - RNA, 19 nt, Artificial Sequence
  Description of Artificial Sequence: Synthetic oligonucleotide
  Antisense strand to SEQ ID NO: 230900
uauuaaccaacauucaugu

SEQ ID NO: 230902 - RNA, 19 nt, Artificial Sequence
  Description of Artificial Sequence: Synthetic oligonucleotide
  Sense strand starting at position 3553 of SEQ ID NO: 2972
auuugugauuaagaugaga

SEQ ID NO: 230903 - RNA, 19 nt, Artificial Sequence
  Description of Artificial Sequence: Synthetic oligonucleotide
  Antisense strand to SEQ ID NO: 230902
ucucaucuuaaucacaaau

SEQ ID NO: 230904 - RNA, 19 nt, Artificial Sequence
  Description of Artificial Sequence: Synthetic oligonucleotide
  Sense strand starting at position 3555 of SEQ ID NO: 2972
uugugauuaagaugagagu

SEQ ID NO: 230905 - RNA, 19 nt, Artificial Sequence
  Description of Artificial Sequence: Synthetic oligonucleotide
  Antisense strand to SEQ ID NO: 230904
acucucaucuuaaucacaa

SEQ ID NO: 230906 - RNA, 19 nt, Artificial Sequence
  Description of Artificial Sequence: Synthetic oligonucleotide
  Sense strand starting at position 3579 of SEQ ID NO: 2972
auccaagaucuaugucaga

SEQ ID NO: 230907 - RNA, 19 nt, Artificial Sequence
  Description of Artificial Sequence: Synthetic oligonucleotide
  Antisense strand to SEQ ID NO: 230906
ucugacauagaucuuggau

SEQ ID NO: 230908 - RNA, 19 nt, Artificial Sequence
  Description of Artificial Sequence: Synthetic oligonucleotide
  Sense strand starting at position 3584 of SEQ ID NO: 2972
agaucuaugucagaauuuc

SEQ ID NO: 230909 - RNA, 19 nt, Artificial Sequence
  Description of Artificial Sequence: Synthetic oligonucleotide
  Antisense strand to SEQ ID NO: 230908
gaaauucugacauagaucu

SEQ ID NO: 230910 - RNA, 19 nt, Artificial Sequence
  Description of Artificial Sequence: Synthetic oligonucleotide
  Sense strand starting at position 3765 of SEQ ID NO: 2972
aguuuaaauguccaauguu

SEQ ID NO: 230911 - RNA, 19 nt, Artificial Sequence
  Description of Artificial Sequence: Synthetic oligonucleotide
  Antisense strand to SEQ ID NO: 230910
aacauuggacauuuaaacu

SEQ ID NO: 230912 - RNA, 19 nt, Artificial Sequence
  Description of Artificial Sequence: Synthetic oligonucleotide
  Sense strand starting at position 3768 of SEQ ID NO: 2972
uuaaauguccaauguuuag

SEQ ID NO: 230913 - RNA, 19 nt, Artificial Sequence
  Description of Artificial Sequence: Synthetic oligonucleotide
  Antisense strand to SEQ ID NO: 230912
cuaaacauuggacauuuaa

SEQ ID NO: 230914 - RNA, 19 nt, Artificial Sequence
  Description of Artificial Sequence: Synthetic oligonucleotide
  Sense strand starting at position 3791 of SEQ ID NO: 2972
ugcugauuuccaugauguc

SEQ ID NO: 230915 - RNA, 19 nt, Artificial Sequence
  Description of Artificial Sequence: Synthetic oligonucleotide
  Antisense strand to SEQ ID NO: 230914
gacaucauggaaaucagca

SEQ ID NO: 230916 - RNA, 19 nt, Artificial Sequence
  Description of Artificial Sequence: Synthetic oligonucleotide
  Sense strand starting at position 3880 of SEQ ID NO: 2972
cuaguagcacaccauuaua

SEQ ID NO: 230917 - RNA, 19 nt, Artificial Sequence
  Description of Artificial Sequence: Synthetic oligonucleotide
  Antisense strand to SEQ ID NO: 230916
uauaauggugugcuacuag

SEQ ID NO: 230918 - RNA, 19 nt, Artificial Sequence
  Description of Artificial Sequence: Synthetic oligonucleotide
  Sense strand starting at position 308 of SEQ ID NO: 2973
ucauguauuucugcacagu

SEQ ID NO: 230919 - RNA, 19 nt, Artificial Sequence
  Description of Artificial Sequence: Synthetic oligonucleotide
  Antisense strand to SEQ ID NO: 230918
acugugcagaaauacauga

SEQ ID NO: 230920 - RNA, 19 nt, Artificial Sequence
  Description of Artificial Sequence: Synthetic oligonucleotide
  Sense strand starting at position 729 of SEQ ID NO: 2973
gugcucaauugauccagga

SEQ ID NO: 230921 - RNA, 19 nt, Artificial Sequence
  Description of Artificial Sequence: Synthetic oligonucleotide
  Antisense strand to SEQ ID NO: 230920
uccuggaucaauugagcac

SEQ ID NO: 230922 - RNA, 19 nt, Artificial Sequence
  Description of Artificial Sequence: Synthetic oligonucleotide
  Sense strand starting at position 759 of SEQ ID NO: 2973
cuaagacaacuuggguaua

SEQ ID NO: 230923 - RNA, 19 nt, Artificial Sequence
  Description of Artificial Sequence: Synthetic oligonucleotide
  Antisense strand to SEQ ID NO: 230922
uauacccaaguugucuuag

SEQ ID NO: 230924 - RNA, 19 nt, Artificial Sequence
  Description of Artificial Sequence: Synthetic oligonucleotide
  Sense strand starting at position 810 of SEQ ID NO: 2973
uaagccugcuuuguaaaga

SEQ ID NO: 230925 - RNA, 19 nt, Artificial Sequence
  Description of Artificial Sequence: Synthetic oligonucleotide
  Antisense strand to SEQ ID NO: 230924
ucuuuacaaagcaggcuua

SEQ ID NO: 230926 - RNA, 19 nt, Artificial Sequence
  Description of Artificial Sequence: Synthetic oligonucleotide
  Sense strand starting at position 876 of SEQ ID NO: 2973
uuagaauagccuuacacug

SEQ ID NO: 230927 - RNA, 19 nt, Artificial Sequence
  Description of Artificial Sequence: Synthetic oligonucleotide
  Antisense strand to SEQ ID NO: 230926
caguguaaggcuauucuaa

SEQ ID NO: 230928 - RNA, 19 nt, Artificial Sequence
  Description of Artificial Sequence: Synthetic oligonucleotide
  Sense strand starting at position 895 of SEQ ID NO: 2973
cucaaaucuuggcugucaa

SEQ ID NO: 230929 - RNA, 19 nt, Artificial Sequence
  Description of Artificial Sequence: Synthetic oligonucleotide
  Antisense strand to SEQ ID NO: 230928
uugacagccaagauuugag

SEQ ID NO: 230930 - RNA, 19 nt, Artificial Sequence
  Description of Artificial Sequence: Synthetic oligonucleotide
  Sense strand starting at position 896 of SEQ ID NO: 2973
ucaaaucuuggcugucaaa

SEQ ID NO: 230931 - RNA, 19 nt, Artificial Sequence
  Description of Artificial Sequence: Synthetic oligonucleotide
  Antisense strand to SEQ ID NO: 230930
uuugacagccaagauuuga

SEQ ID NO: 230932 - RNA, 19 nt, Artificial Sequence
  Description of Artificial Sequence: Synthetic oligonucleotide
  Sense strand starting at position 1058 of SEQ ID NO: 2973
aguuuaaggaguggaaacu

SEQ ID NO: 230933 - RNA, 19 nt, Artificial Sequence
  Description of Artificial Sequence: Synthetic oligonucleotide
  Antisense strand to SEQ ID NO: 230932
aguuuccacuccuuaaacu

SEQ ID NO: 230934 - RNA, 19 nt, Artificial Sequence
  Description of Artificial Sequence: Synthetic oligonucleotide
  Sense strand starting at position 1133 of SEQ ID NO: 2973
cuuguuugacuuuaaugau

SEQ ID NO: 230935 - RNA, 19 nt, Artificial Sequence
  Description of Artificial Sequence: Synthetic oligonucleotide
  Antisense strand to SEQ ID NO: 230934
aucauuaaagucaaacaag

SEQ ID NO: 230936 - RNA, 19 nt, Artificial Sequence
  Description of Artificial Sequence: Synthetic oligonucleotide
  Sense strand starting at position 1221 of SEQ ID NO: 2973
cuuauuuguggacgucgua

SEQ ID NO: 230937 - RNA, 19 nt, Artificial Sequence
  Description of Artificial Sequence: Synthetic oligonucleotide
  Antisense strand to SEQ ID NO: 230936
uacgacguccacaaauaag

SEQ ID NO: 230938 - RNA, 19 nt, Artificial Sequence
  Description of Artificial Sequence: Synthetic oligonucleotide
  Sense strand starting at position 1283 of SEQ ID NO: 2973
cacgaaacguccuuucuga

SEQ ID NO: 230939 - RNA, 19 nt, Artificial Sequence
  Description of Artificial Sequence: Synthetic oligonucleotide
  Antisense strand to SEQ ID NO: 230938
ucagaaaggacguuucgug

SEQ ID NO: 230940 - RNA, 19 nt, Artificial Sequence
  Description of Artificial Sequence: Synthetic oligonucleotide
  Sense strand starting at position 1291 of SEQ ID NO: 2973
guccuuucugaaggaaauc

SEQ ID NO: 230941 - RNA, 19 nt, Artificial Sequence
  Description of Artificial Sequence: Synthetic oligonucleotide
  Antisense strand to SEQ ID NO: 230940
gauuuccuucagaaaggac

SEQ ID NO: 230942 - RNA, 19 nt, Artificial Sequence
  Description of Artificial Sequence: Synthetic oligonucleotide
  Sense strand starting at position 1359 of SEQ ID NO: 2973
cucagauuccgccaagcaa

SEQ ID NO: 230943 - RNA, 19 nt, Artificial Sequence
  Description of Artificial Sequence: Synthetic oligonucleotide
  Antisense strand to SEQ ID NO: 230942
uugcuuggcggaaucugag

SEQ ID NO: 230944 - RNA, 19 nt, Artificial Sequence
  Description of Artificial Sequence: Synthetic oligonucleotide
  Sense strand starting at position 1396 of SEQ ID NO: 2973
uaucuuuacuucgugggua

SEQ ID NO: 230945 - RNA, 19 nt, Artificial Sequence
  Description of Artificial Sequence: Synthetic oligonucleotide
  Antisense strand to SEQ ID NO: 230944
uacccacgaaguaaagaua

SEQ ID NO: 230946 - RNA, 19 nt, Artificial Sequence
  Description of Artificial Sequence: Synthetic oligonucleotide
  Sense strand starting at position 1398 of SEQ ID NO: 2973
ucuuuacuucguggguaga

SEQ ID NO: 230947 - RNA, 19 nt, Artificial Sequence
  Description of Artificial Sequence: Synthetic oligonucleotide
  Antisense strand to SEQ ID NO: 230946
ucuacccacgaaguaaaga

SEQ ID NO: 230948 - RNA, 19 nt, Artificial Sequence
  Description of Artificial Sequence: Synthetic oligonucleotide
  Sense strand starting at position 1400 of SEQ ID NO: 2973
uuuacuucguggguagaca

SEQ ID NO: 230949 - RNA, 19 nt, Artificial Sequence
  Description of Artificial Sequence: Synthetic oligonucleotide
  Antisense strand to SEQ ID NO: 230948
ugucuacccacgaaguaaa

SEQ ID NO: 230950 - RNA, 19 nt, Artificial Sequence
  Description of Artificial Sequence: Synthetic oligonucleotide
  Sense strand starting at position 1401 of SEQ ID NO: 2973
uuacuucguggguagacaa

SEQ ID NO: 230951 - RNA, 19 nt, Artificial Sequence
  Description of Artificial Sequence: Synthetic oligonucleotide
  Antisense strand to SEQ ID NO: 230950
uugucuacccacgaaguaa

SEQ ID NO: 230952 - RNA, 19 nt, Artificial Sequence
  Description of Artificial Sequence: Synthetic oligonucleotide
  Sense strand starting at position 1425 of SEQ ID NO: 2973
gcaguuacacauuggaaau

SEQ ID NO: 230953 - RNA, 19 nt, Artificial Sequence
  Description of Artificial Sequence: Synthetic oligonucleotide
  Antisense strand to SEQ ID NO: 230952
auuuccaauguguaacugc

SEQ ID NO: 230954 - RNA, 19 nt, Artificial Sequence
  Description of Artificial Sequence: Synthetic oligonucleotide
  Sense strand starting at position 2196 of SEQ ID NO: 2973
uuuauuaacugucugugaa

SEQ ID NO: 230955 - RNA, 19 nt, Artificial Sequence
  Description of Artificial Sequence: Synthetic oligonucleotide
  Antisense strand to SEQ ID NO: 230954
uucacagacaguuaauaaa

SEQ ID NO: 230956 - RNA, 19 nt, Artificial Sequence
  Description of Artificial Sequence: Synthetic oligonucleotide
  Sense strand starting at position 2197 of SEQ ID NO: 2973
uuauuaacugucugugaaa

SEQ ID NO: 230957 - RNA, 19 nt, Artificial Sequence
  Description of Artificial Sequence: Synthetic oligonucleotide
  Antisense strand to SEQ ID NO: 230956
uuucacagacaguuaauaa

SEQ ID NO: 230958 - RNA, 19 nt, Artificial Sequence
  Description of Artificial Sequence: Synthetic oligonucleotide
  Sense strand starting at position 2432 of SEQ ID NO: 2973
gcaagucagcguuucaagu

SEQ ID NO: 230959 - RNA, 19 nt, Artificial Sequence
  Description of Artificial Sequence: Synthetic oligonucleotide
  Antisense strand to SEQ ID NO: 230958
acuugaaacgcugacuugc

SEQ ID NO: 230960 - RNA, 19 nt, Artificial Sequence
  Description of Artificial Sequence: Synthetic oligonucleotide
  Sense strand starting at position 2450 of SEQ ID NO: 2973
uguagaagugcgggaucau

SEQ ID NO: 230961 - RNA, 19 nt, Artificial Sequence
  Description of Artificial Sequence: Synthetic oligonucleotide
  Antisense strand to SEQ ID NO: 230960
augaucccgcacuucuaca

SEQ ID NO: 230962 - RNA, 19 nt, Artificial Sequence
  Description of Artificial Sequence: Synthetic oligonucleotide
  Sense strand starting at position 2451 of SEQ ID NO: 2973
guagaagugcgggaucauu

SEQ ID NO: 230963 - RNA, 19 nt, Artificial Sequence
  Description of Artificial Sequence: Synthetic oligonucleotide
  Antisense strand to SEQ ID NO: 230962
aaugaucccgcacuucuac

SEQ ID NO: 230964 - RNA, 19 nt, Artificial Sequence
  Description of Artificial Sequence: Synthetic oligonucleotide
  Sense strand starting at position 2460 of SEQ ID NO: 2973
cgggaucauuucuauagac

SEQ ID NO: 230965 - RNA, 19 nt, Artificial Sequence
  Description of Artificial Sequence: Synthetic oligonucleotide
  Antisense strand to SEQ ID NO: 230964
gucuauagaaaugaucccg

SEQ ID NO: 230966 - RNA, 19 nt, Artificial Sequence
  Description of Artificial Sequence: Synthetic oligonucleotide
  Sense strand starting at position 2477 of SEQ ID NO: 2973
acaagaguucagggaagug

SEQ ID NO: 230967 - RNA, 19 nt, Artificial Sequence
  Description of Artificial Sequence: Synthetic oligonucleotide
  Antisense strand to SEQ ID NO: 230966
cacuucccugaacucuugu

SEQ ID NO: 230968 - RNA, 19 nt, Artificial Sequence
  Description of Artificial Sequence: Synthetic oligonucleotide
  Sense strand starting at position 2489 of SEQ ID NO: 2973
ggaaguguacuagaauguu

SEQ ID NO: 230969 - RNA, 19 nt, Artificial Sequence
  Description of Artificial Sequence: Synthetic oligonucleotide
  Antisense strand to SEQ ID NO: 230968
aacauucuaguacacuucc

SEQ ID NO: 230970 - RNA, 19 nt, Artificial Sequence
  Description of Artificial Sequence: Synthetic oligonucleotide
  Sense strand starting at position 2826 of SEQ ID NO: 2973
uuauguaaggcuuagugua

SEQ ID NO: 230971 - RNA, 19 nt, Artificial Sequence
  Description of Artificial Sequence: Synthetic oligonucleotide
  Antisense strand to SEQ ID NO: 230970
uacacuaagccuuacauaa

SEQ ID NO: 230972 - RNA, 19 nt, Artificial Sequence
  Description of Artificial Sequence: Synthetic oligonucleotide
  Sense strand starting at position 2828 of SEQ ID NO: 2973
auguaaggcuuaguguaua

SEQ ID NO: 230973 - RNA, 19 nt, Artificial Sequence
  Description of Artificial Sequence: Synthetic oligonucleotide
  Antisense strand to SEQ ID NO: 230972
uauacacuaagccuuacau

SEQ ID NO: 230974 - RNA, 19 nt, Artificial Sequence
  Description of Artificial Sequence: Synthetic oligonucleotide
  Sense strand starting at position 2831 of SEQ ID NO: 2973
uaaggcuuaguguauaguu

SEQ ID NO: 230975 - RNA, 19 nt, Artificial Sequence
  Description of Artificial Sequence: Synthetic oligonucleotide
  Antisense strand to SEQ ID NO: 230974
aacuauacacuaagccuua

SEQ ID NO: 230976 - RNA, 19 nt, Artificial Sequence
  Description of Artificial Sequence: Synthetic oligonucleotide
  Sense strand starting at position 2836 of SEQ ID NO: 2973
cuuaguguauaguuacaau

SEQ ID NO: 230977 - RNA, 19 nt, Artificial Sequence
  Description of Artificial Sequence: Synthetic oligonucleotide
  Antisense strand to SEQ ID NO: 230976
auuguaacuauacacuaag

SEQ ID NO: 230978 - RNA, 19 nt, Artificial Sequence
  Description of Artificial Sequence: Synthetic oligonucleotide
  Sense strand starting at position 3086 of SEQ ID NO: 2973
cuuuaaucccggcacuuau

SEQ ID NO: 230979 - RNA, 19 nt, Artificial Sequence
  Description of Artificial Sequence: Synthetic oligonucleotide
  Antisense strand to SEQ ID NO: 230978
auaagugccgggauuaaag

SEQ ID NO: 230980 - RNA, 19 nt, Artificial Sequence
  Description of Artificial Sequence: Synthetic oligonucleotide
  Sense strand starting at position 3657 of SEQ ID NO: 2973
gacuaagucuggcuguuag

SEQ ID NO: 230981 - RNA, 19 nt, Artificial Sequence
  Description of Artificial Sequence: Synthetic oligonucleotide
  Antisense strand to SEQ ID NO: 230980
cuaacagccagacuuaguc

SEQ ID NO: 230982 - RNA, 19 nt, Artificial Sequence
  Description of Artificial Sequence: Synthetic oligonucleotide
  Sense strand starting at position 3665 of SEQ ID NO: 2973
cuggcuguuagucauauga

SEQ ID NO: 230983 - RNA, 19 nt, Artificial Sequence
  Description of Artificial Sequence: Synthetic oligonucleotide
  Antisense strand to SEQ ID NO: 230982
ucauaugacuaacagccag

SEQ ID NO: 230984 - RNA, 19 nt, Artificial Sequence
  Description of Artificial Sequence: Synthetic oligonucleotide
  Sense strand starting at position 3819 of SEQ ID NO: 2973
gacauugcuggaugggaaa

SEQ ID NO: 230985 - RNA, 19 nt, Artificial Sequence
  Description of Artificial Sequence: Synthetic oligonucleotide
  Antisense strand to SEQ ID NO: 230984
uuucccauccagcaauguc

SEQ ID NO: 230986 - RNA, 19 nt, Artificial Sequence
  Description of Artificial Sequence: Synthetic oligonucleotide
  Sense strand starting at position 3845 of SEQ ID NO: 2973
gucugaugaugugugucaa

SEQ ID NO: 230987 - RNA, 19 nt, Artificial Sequence
  Description of Artificial Sequence: Synthetic oligonucleotide
  Antisense strand to SEQ ID NO: 230986
uugacacacaucaucagac

SEQ ID NO: 230988 - RNA, 19 nt, Artificial Sequence
  Description of Artificial Sequence: Synthetic oligonucleotide
  Sense strand starting at position 3846 of SEQ ID NO: 2973
ucugaugaugugugucaaa

SEQ ID NO: 230989 - RNA, 19 nt, Artificial Sequence
  Description of Artificial Sequence: Synthetic oligonucleotide
  Antisense strand to SEQ ID NO: 230988
uuugacacacaucaucaga

SEQ ID NO: 230990 - RNA, 19 nt, Artificial Sequence
  Description of Artificial Sequence: Synthetic oligonucleotide
  Sense strand starting at position 3904 of SEQ ID NO: 2973
cugggaguuugccuacaga

SEQ ID NO: 230991 - RNA, 19 nt, Artificial Sequence
  Description of Artificial Sequence: Synthetic oligonucleotide
  Antisense strand to SEQ ID NO: 230990
ucuguaggcaaacucccag

SEQ ID NO: 230992 - RNA, 19 nt, Artificial Sequence
  Description of Artificial Sequence: Synthetic oligonucleotide
  Sense strand starting at position 3907 of SEQ ID NO: 2973
ggaguuugccuacagagau

SEQ ID NO: 230993 - RNA, 19 nt, Artificial Sequence
  Description of Artificial Sequence: Synthetic oligonucleotide
  Antisense strand to SEQ ID NO: 230992
aucucuguaggcaaacucc

SEQ ID NO: 230994 - RNA, 19 nt, Artificial Sequence
  Description of Artificial Sequence: Synthetic oligonucleotide
  Sense strand starting at position 3926 of SEQ ID NO: 2973
acuuauagaugugugaaau

SEQ ID NO: 230995 - RNA, 19 nt, Artificial Sequence
  Description of Artificial Sequence: Synthetic oligonucleotide
  Antisense strand to SEQ ID NO: 230994
auuucacacaucuauaagu

SEQ ID NO: 230996 - RNA, 19 nt, Artificial Sequence
  Description of Artificial Sequence: Synthetic oligonucleotide
  Sense strand starting at position 3927 of SEQ ID NO: 2973
cuuauagaugugugaaaua

SEQ ID NO: 230997 - RNA, 19 nt, Artificial Sequence
  Description of Artificial Sequence: Synthetic oligonucleotide
  Antisense strand to SEQ ID NO: 230996
uauuucacacaucuauaag

SEQ ID NO: 230998 - RNA, 19 nt, Artificial Sequence
  Description of Artificial Sequence: Synthetic oligonucleotide
  Sense strand starting at position 85 of SEQ ID NO: 2974
auuuaauauuccugaaagg

SEQ ID NO: 230999 - RNA, 19 nt, Artificial Sequence
  Description of Artificial Sequence: Synthetic oligonucleotide
  Antisense strand to SEQ ID NO: 230998
ccuuucaggaauauuaaau

SEQ ID NO: 231000 - RNA, 19 nt, Artificial Sequence
  Description of Artificial Sequence: Synthetic oligonucleotide
  Sense strand starting at position 225 of SEQ ID NO: 2974
uuuccuuaacuuuagcgaa

SEQ ID NO: 231001 - RNA, 19 nt, Artificial Sequence
  Description of Artificial Sequence: Synthetic oligonucleotide
  Antisense strand to SEQ ID NO: 231000
uucgcuaaaguuaaggaaa

SEQ ID NO: 231002 - RNA, 19 nt, Artificial Sequence
  Description of Artificial Sequence: Synthetic oligonucleotide
  Sense strand starting at position 227 of SEQ ID NO: 2974
uccuuaacuuuagcgaaca

SEQ ID NO: 231003 - RNA, 19 nt, Artificial Sequence
  Description of Artificial Sequence: Synthetic oligonucleotide
  Antisense strand to SEQ ID NO: 231002
uguucgcuaaaguuaagga

SEQ ID NO: 231004 - RNA, 19 nt, Artificial Sequence
  Description of Artificial Sequence: Synthetic oligonucleotide
  Sense strand starting at position 237 of SEQ ID NO: 2974
uagcgaacaguaugucuaa

SEQ ID NO: 231005 - RNA, 19 nt, Artificial Sequence
  Description of Artificial Sequence: Synthetic oligonucleotide
  Antisense strand to SEQ ID NO: 231004
uuagacauacuguucgcua

SEQ ID NO: 231006 - RNA, 19 nt, Artificial Sequence
  Description of Artificial Sequence: Synthetic oligonucleotide
  Sense strand starting at position 352 of SEQ ID NO: 2974
acuugaguguuauuaauug

SEQ ID NO: 231007 - RNA, 19 nt, Artificial Sequence
  Description of Artificial Sequence: Synthetic oligonucleotide
  Antisense strand to SEQ ID NO: 231006
caauuaauaacacucaagu

SEQ ID NO: 231008 - RNA, 19 nt, Artificial Sequence
  Description of Artificial Sequence: Synthetic oligonucleotide
  Sense strand starting at position 356 of SEQ ID NO: 2974
gaguguuauuaauugguuu

SEQ ID NO: 231009 - RNA, 19 nt, Artificial Sequence
  Description of Artificial Sequence: Synthetic oligonucleotide
  Antisense strand to SEQ ID NO: 231008
aaaccaauuaauaacacuc

SEQ ID NO: 231010 - RNA, 19 nt, Artificial Sequence
  Description of Artificial Sequence: Synthetic oligonucleotide
  Sense strand starting at position 370 of SEQ ID NO: 2974
gguuuaagagggugucaga

SEQ ID NO: 231011 - RNA, 19 nt, Artificial Sequence
  Description of Artificial Sequence: Synthetic oligonucleotide
  Antisense strand to SEQ ID NO: 231010
ucugacacccucuuaaacc

SEQ ID NO: 231012 - RNA, 19 nt, Artificial Sequence
  Description of Artificial Sequence: Synthetic oligonucleotide
  Sense strand starting at position 430 of SEQ ID NO: 2974
cucagagcacucugauaaa

SEQ ID NO: 231013 - RNA, 19 nt, Artificial Sequence
  Description of Artificial Sequence: Synthetic oligonucleotide
  Antisense strand to SEQ ID NO: 231012
uuuaucagagugcucugag

SEQ ID NO: 231014 - RNA, 19 nt, Artificial Sequence
  Description of Artificial Sequence: Synthetic oligonucleotide
  Sense strand starting at position 526 of SEQ ID NO: 2974
aaaugugaugcugauucca

SEQ ID NO: 231015 - RNA, 19 nt, Artificial Sequence
  Description of Artificial Sequence: Synthetic oligonucleotide
  Antisense strand to SEQ ID NO: 231014
uggaaucagcaucacauuu

SEQ ID NO: 231016 - RNA, 19 nt, Artificial Sequence
  Description of Artificial Sequence: Synthetic oligonucleotide
  Sense strand starting at position 528 of SEQ ID NO: 2974
augugaugcugauuccacu

SEQ ID NO: 231017 - RNA, 19 nt, Artificial Sequence
  Description of Artificial Sequence: Synthetic oligonucleotide
  Antisense strand to SEQ ID NO: 231016
aguggaaucagcaucacau

SEQ ID NO: 231018 - RNA, 19 nt, Artificial Sequence
  Description of Artificial Sequence: Synthetic oligonucleotide
  Sense strand starting at position 576 of SEQ ID NO: 2974
aguguuaccaggcaggauu

SEQ ID NO: 231019 - RNA, 19 nt, Artificial Sequence
  Description of Artificial Sequence: Synthetic oligonucleotide
  Antisense strand to SEQ ID NO: 231018
aauccugccugguaacacu

SEQ ID NO: 231020 - RNA, 19 nt, Artificial Sequence
  Description of Artificial Sequence: Synthetic oligonucleotide
  Sense strand starting at position 762 of SEQ ID NO: 2974
cuagcuauuugcuuaccga

SEQ ID NO: 231021 - RNA, 19 nt, Artificial Sequence
  Description of Artificial Sequence: Synthetic oligonucleotide
  Antisense strand to SEQ ID NO: 231020
ucgguaagcaaauagcuag

SEQ ID NO: 231022 - RNA, 19 nt, Artificial Sequence
  Description of Artificial Sequence: Synthetic oligonucleotide
  Sense strand starting at position 763 of SEQ ID NO: 2974
uagcuauuugcuuaccgau

SEQ ID NO: 231023 - RNA, 19 nt, Artificial Sequence
  Description of Artificial Sequence: Synthetic oligonucleotide
  Antisense strand to SEQ ID NO: 231022
aucgguaagcaaauagcua

SEQ ID NO: 231024 - RNA, 19 nt, Artificial Sequence
  Description of Artificial Sequence: Synthetic oligonucleotide
  Sense strand starting at position 871 of SEQ ID NO: 2974
ugucaagaaucugccucau

SEQ ID NO: 231025 - RNA, 19 nt, Artificial Sequence
  Description of Artificial Sequence: Synthetic oligonucleotide
  Antisense strand to SEQ ID NO: 231024
augaggcagauucuugaca

SEQ ID NO: 231026 - RNA, 19 nt, Artificial Sequence
  Description of Artificial Sequence: Synthetic oligonucleotide
  Sense strand starting at position 1050 of SEQ ID NO: 2974
aguucuuugcaauaagaug

SEQ ID NO: 231027 - RNA, 19 nt, Artificial Sequence
  Description of Artificial Sequence: Synthetic oligonucleotide
  Antisense strand to SEQ ID NO: 231026
caucuuauugcaaagaacu

SEQ ID NO: 231028 - RNA, 19 nt, Artificial Sequence
  Description of Artificial Sequence: Synthetic oligonucleotide
  Sense strand starting at position 1467 of SEQ ID NO: 2974
gcagauucccgacaccaga

SEQ ID NO: 231029 - RNA, 19 nt, Artificial Sequence
  Description of Artificial Sequence: Synthetic oligonucleotide
  Antisense strand to SEQ ID NO: 231028
ucuggugucgggaaucugc

SEQ ID NO: 231030 - RNA, 19 nt, Artificial Sequence
  Description of Artificial Sequence: Synthetic oligonucleotide
  Sense strand starting at position 2329 of SEQ ID NO: 2974
agcagagaaggugguauau

SEQ ID NO: 231031 - RNA, 19 nt, Artificial Sequence
  Description of Artificial Sequence: Synthetic oligonucleotide
  Antisense strand to SEQ ID NO: 231030
auauaccaccuucucugcu

SEQ ID NO: 231032 - RNA, 19 nt, Artificial Sequence
  Description of Artificial Sequence: Synthetic oligonucleotide
  Sense strand starting at position 2438 of SEQ ID NO: 2974
aucauugcuuagcuagaag

SEQ ID NO: 231033 - RNA, 19 nt, Artificial Sequence
  Description of Artificial Sequence: Synthetic oligonucleotide
  Antisense strand to SEQ ID NO: 231032
cuucuagcuaagcaaugau

SEQ ID NO: 231034 - RNA, 19 nt, Artificial Sequence
  Description of Artificial Sequence: Synthetic oligonucleotide
  Sense strand starting at position 2441 of SEQ ID NO: 2974
auugcuuagcuagaaguua

SEQ ID NO: 231035 - RNA, 19 nt, Artificial Sequence
  Description of Artificial Sequence: Synthetic oligonucleotide
  Antisense strand to SEQ ID NO: 231034
uaacuucuagcuaagcaau

SEQ ID NO: 231036 - RNA, 19 nt, Artificial Sequence
  Description of Artificial Sequence: Synthetic oligonucleotide
  Sense strand starting at position 2633 of SEQ ID NO: 2974
aggugcuuggaauaaguaa

SEQ ID NO: 231037 - RNA, 19 nt, Artificial Sequence
  Description of Artificial Sequence: Synthetic oligonucleotide
  Antisense strand to SEQ ID NO: 231036
uuacuuauuccaagcaccu

SEQ ID NO: 231038 - RNA, 19 nt, Artificial Sequence
  Description of Artificial Sequence: Synthetic oligonucleotide
  Sense strand starting at position 2669 of SEQ ID NO: 2974
ccaggagcucaacaucuau

SEQ ID NO: 231039 - RNA, 19 nt, Artificial Sequence
  Description of Artificial Sequence: Synthetic oligonucleotide
  Antisense strand to SEQ ID NO: 231038
auagauguugagcuccugg

SEQ ID NO: 231040 - RNA, 19 nt, Artificial Sequence
  Description of Artificial Sequence: Synthetic oligonucleotide
  Sense strand starting at position 2957 of SEQ ID NO: 2974
gugagcaauuauucuaaug

SEQ ID NO: 231041 - RNA, 19 nt, Artificial Sequence
  Description of Artificial Sequence: Synthetic oligonucleotide
  Antisense strand to SEQ ID NO: 231040
cauuagaauaauugcucac

SEQ ID NO: 231042 - RNA, 19 nt, Artificial Sequence
  Description of Artificial Sequence: Synthetic oligonucleotide
  Sense strand starting at position 3107 of SEQ ID NO: 2974
uuagaugcuguauacagaa

SEQ ID NO: 231043 - RNA, 19 nt, Artificial Sequence
  Description of Artificial Sequence: Synthetic oligonucleotide
  Antisense strand to SEQ ID NO: 231042
uucuguauacagcaucuaa

SEQ ID NO: 231044 - RNA, 19 nt, Artificial Sequence
  Description of Artificial Sequence: Synthetic oligonucleotide
  Sense strand starting at position 3137 of SEQ ID NO: 2974
cacaguagaugauaaugaa

SEQ ID NO: 231045 - RNA, 19 nt, Artificial Sequence
  Description of Artificial Sequence: Synthetic oligonucleotide
  Antisense strand to SEQ ID NO: 231044
uucauuaucaucuacugug

SEQ ID NO: 231046 - RNA, 19 nt, Artificial Sequence
  Description of Artificial Sequence: Synthetic oligonucleotide
  Sense strand starting at position 3156 of SEQ ID NO: 2974
agaaauuaaucagggaaga

SEQ ID NO: 231047 - RNA, 19 nt, Artificial Sequence
  Description of Artificial Sequence: Synthetic oligonucleotide
  Antisense strand to SEQ ID NO: 231046
ucuucccugauuaauuucu

SEQ ID NO: 231048 - RNA, 19 nt, Artificial Sequence
  Description of Artificial Sequence: Synthetic oligonucleotide
  Sense strand starting at position 3203 of SEQ ID NO: 2974
ggaucacuuugcucucagu

SEQ ID NO: 231049 - RNA, 19 nt, Artificial Sequence
  Description of Artificial Sequence: Synthetic oligonucleotide
  Antisense strand to SEQ ID NO: 231048
acugagagcaaagugaucc

SEQ ID NO: 231050 - RNA, 19 nt, Artificial Sequence
  Description of Artificial Sequence: Synthetic oligonucleotide
  Sense strand starting at position 3216 of SEQ ID NO: 2974
cucaguauggcagauggau

SEQ ID NO: 231051 - RNA, 19 nt, Artificial Sequence
  Description of Artificial Sequence: Synthetic oligonucleotide
  Antisense strand to SEQ ID NO: 231050
auccaucugccauacugag

SEQ ID NO: 231052 - RNA, 19 nt, Artificial Sequence
  Description of Artificial Sequence: Synthetic oligonucleotide
  Sense strand starting at position 3268 of SEQ ID NO: 2974
uuuagagguguuugccaaa

SEQ ID NO: 231053 - RNA, 19 nt, Artificial Sequence
  Description of Artificial Sequence: Synthetic oligonucleotide
  Antisense strand to SEQ ID NO: 231052
uuuggcaaacaccucuaaa

SEQ ID NO: 231054 - RNA, 19 nt, Artificial Sequence
  Description of Artificial Sequence: Synthetic oligonucleotide
  Sense strand starting at position 3294 of SEQ ID NO: 2974
ggagaugccaaaggucauu

SEQ ID NO: 231055 - RNA, 19 nt, Artificial Sequence
  Description of Artificial Sequence: Synthetic oligonucleotide
  Antisense strand to SEQ ID NO: 231054
aaugaccuuuggcaucucc

SEQ ID NO: 231056 - RNA, 19 nt, Artificial Sequence
  Description of Artificial Sequence: Synthetic oligonucleotide
  Sense strand starting at position 3299 of SEQ ID NO: 2974
ugccaaaggucauugaaac

SEQ ID NO: 231057 - RNA, 19 nt, Artificial Sequence
  Description of Artificial Sequence: Synthetic oligonucleotide
  Antisense strand to SEQ ID NO: 231056
guuucaaugaccuuuggca

SEQ ID NO: 231058 - RNA, 19 nt, Artificial Sequence
  Description of Artificial Sequence: Synthetic oligonucleotide
  Sense strand starting at position 3300 of SEQ ID NO: 2974
gccaaaggucauugaaacu

SEQ ID NO: 231059 - RNA, 19 nt, Artificial Sequence
  Description of Artificial Sequence: Synthetic oligonucleotide
  Antisense strand to SEQ ID NO: 231058
aguuucaaugaccuuuggc

SEQ ID NO: 231060 - RNA, 19 nt, Artificial Sequence
  Description of Artificial Sequence: Synthetic oligonucleotide
  Sense strand starting at position 3392 of SEQ ID NO: 2974
aggagauaugccuagugug

SEQ ID NO: 231061 - RNA, 19 nt, Artificial Sequence
  Description of Artificial Sequence: Synthetic oligonucleotide
  Antisense strand to SEQ ID NO: 231060
cacacuaggcauaucuccu

SEQ ID NO: 231062 - RNA, 19 nt, Artificial Sequence
  Description of Artificial Sequence: Synthetic oligonucleotide
  Sense strand starting at position 3463 of SEQ ID NO: 2974
cauuaacuggccuagagua

SEQ ID NO: 231063 - RNA, 19 nt, Artificial Sequence
  Description of Artificial Sequence: Synthetic oligonucleotide
  Antisense strand to SEQ ID NO: 231062
uacucuaggccaguuaaug

SEQ ID NO: 231064 - RNA, 19 nt, Artificial Sequence
  Description of Artificial Sequence: Synthetic oligonucleotide
  Sense strand starting at position 3465 of SEQ ID NO: 2974
uuaacuggccuagaguaau

SEQ ID NO: 231065 - RNA, 19 nt, Artificial Sequence
  Description of Artificial Sequence: Synthetic oligonucleotide
  Antisense strand to SEQ ID NO: 231064
auuacucuaggccaguuaa

SEQ ID NO: 231066 - RNA, 19 nt, Artificial Sequence
  Description of Artificial Sequence: Synthetic oligonucleotide
  Sense strand starting at position 3507 of SEQ ID NO: 2974
gucucuuuguauuuggagu

SEQ ID NO: 231067 - RNA, 19 nt, Artificial Sequence
  Description of Artificial Sequence: Synthetic oligonucleotide
  Antisense strand to SEQ ID NO: 231066
acuccaaauacaaagagac

SEQ ID NO: 231068 - RNA, 19 nt, Artificial Sequence
  Description of Artificial Sequence: Synthetic oligonucleotide
  Sense strand starting at position 3521 of SEQ ID NO: 2974
ggaguaacugugggacauc

SEQ ID NO: 231069 - RNA, 19 nt, Artificial Sequence
  Description of Artificial Sequence: Synthetic oligonucleotide
  Antisense strand to SEQ ID NO: 231068
gaugucccacaguuacucc

SEQ ID NO: 231070 - RNA, 19 nt, Artificial Sequence
  Description of Artificial Sequence: Synthetic oligonucleotide
  Sense strand starting at position 3578 of SEQ ID NO: 2974
cccauuuaccauuguaguu

SEQ ID NO: 231071 - RNA, 19 nt, Artificial Sequence
  Description of Artificial Sequence: Synthetic oligonucleotide
  Antisense strand to SEQ ID NO: 231070
aacuacaaugguaaauggg

SEQ ID NO: 231072 - RNA, 19 nt, Artificial Sequence
  Description of Artificial Sequence: Synthetic oligonucleotide
  Sense strand starting at position 3725 of SEQ ID NO: 2974
uaacuaaugguuuagaugu

SEQ ID NO: 231073 - RNA, 19 nt, Artificial Sequence
  Description of Artificial Sequence: Synthetic oligonucleotide
  Antisense strand to SEQ ID NO: 231072
acaucuaaaccauuaguua

SEQ ID NO: 231074 - RNA, 19 nt, Artificial Sequence
  Description of Artificial Sequence: Synthetic oligonucleotide
  Sense strand starting at position 3802 of SEQ ID NO: 2974
guggaaggucuuugguuca

SEQ ID NO: 231075 - RNA, 19 nt, Artificial Sequence
  Description of Artificial Sequence: Synthetic oligonucleotide
  Antisense strand to SEQ ID NO: 231074
ugaaccaaagaccuuccac

SEQ ID NO: 231076 - RNA, 19 nt, Artificial Sequence
  Description of Artificial Sequence: Synthetic oligonucleotide
  Sense strand starting at position 3859 of SEQ ID NO: 2974
caugguaaugacugaauuc

SEQ ID NO: 231077 - RNA, 19 nt, Artificial Sequence
  Description of Artificial Sequence: Synthetic oligonucleotide
  Antisense strand to SEQ ID NO: 231076
gaauucagucauuaccaug

SEQ ID NO: 231078 - RNA, 19 nt, Artificial Sequence
  Description of Artificial Sequence: Synthetic oligonucleotide
  Sense strand starting at position 45 of SEQ ID NO: 2976
agcagaguacaucgagguu

SEQ ID NO: 231079 - RNA, 19 nt, Artificial Sequence
  Description of Artificial Sequence: Synthetic oligonucleotide
  Antisense strand to SEQ ID NO: 231078
aaccucgauguacucugcu

SEQ ID NO: 231080 - RNA, 19 nt, Artificial Sequence
  Description of Artificial Sequence: Synthetic oligonucleotide
  Sense strand starting at position 48 of SEQ ID NO: 2976
agaguacaucgagguuuaa

SEQ ID NO: 231081 - RNA, 19 nt, Artificial Sequence
  Description of Artificial Sequence: Synthetic oligonucleotide
  Antisense strand to SEQ ID NO: 231080
uuaaaccucgauguacucu

SEQ ID NO: 231082 - RNA, 19 nt, Artificial Sequence
  Description of Artificial Sequence: Synthetic oligonucleotide
  Sense strand starting at position 248 of SEQ ID NO: 2976
ugggcaaugucuggaaagu

SEQ ID NO: 231083 - RNA, 19 nt, Artificial Sequence
  Description of Artificial Sequence: Synthetic oligonucleotide
  Antisense strand to SEQ ID NO: 231082
acuuuccagacauugccca

SEQ ID NO: 231084 - RNA, 19 nt, Artificial Sequence
  Description of Artificial Sequence: Synthetic oligonucleotide
  Sense strand starting at position 249 of SEQ ID NO: 2976
gggcaaugucuggaaaguc

SEQ ID NO: 231085 - RNA, 19 nt, Artificial Sequence
  Description of Artificial Sequence: Synthetic oligonucleotide
  Antisense strand to SEQ ID NO: 231084
gacuuuccagacauugccc

SEQ ID NO: 231086 - RNA, 19 nt, Artificial Sequence
  Description of Artificial Sequence: Synthetic oligonucleotide
  Sense strand starting at position 261 of SEQ ID NO: 2976
gaaagucaauuaggaagaa

SEQ ID NO: 231087 - RNA, 19 nt, Artificial Sequence
  Description of Artificial Sequence: Synthetic oligonucleotide
  Antisense strand to SEQ ID NO: 231086
uucuuccuaauugacuuuc

SEQ ID NO: 231088 - RNA, 19 nt, Artificial Sequence
  Description of Artificial Sequence: Synthetic oligonucleotide
  Sense strand starting at position 296 of SEQ ID NO: 2976
gacucagacucagugacaa

SEQ ID NO: 231089 - RNA, 19 nt, Artificial Sequence
  Description of Artificial Sequence: Synthetic oligonucleotide
  Antisense strand to SEQ ID NO: 231088
uugucacugagucugaguc

SEQ ID NO: 231090 - RNA, 19 nt, Artificial Sequence
  Description of Artificial Sequence: Synthetic oligonucleotide
  Sense strand starting at position 344 of SEQ ID NO: 2976
cccagcucugccuacagaa

SEQ ID NO: 231091 - RNA, 19 nt, Artificial Sequence
  Description of Artificial Sequence: Synthetic oligonucleotide
  Antisense strand to SEQ ID NO: 231090
uucuguaggcagagcuggg

SEQ ID NO: 231092 - RNA, 19 nt, Artificial Sequence
  Description of Artificial Sequence: Synthetic oligonucleotide
  Sense strand starting at position 383 of SEQ ID NO: 2976
gagacaacccugcgcuuau

SEQ ID NO: 231093 - RNA, 19 nt, Artificial Sequence
  Description of Artificial Sequence: Synthetic oligonucleotide
  Antisense strand to SEQ ID NO: 231092
auaagcgcaggguugucuc

SEQ ID NO: 231094 - RNA, 19 nt, Artificial Sequence
  Description of Artificial Sequence: Synthetic oligonucleotide
  Sense strand starting at position 572 of SEQ ID NO: 2976
gcacuaauuacaggugaga

SEQ ID NO: 231095 - RNA, 19 nt, Artificial Sequence
  Description of Artificial Sequence: Synthetic oligonucleotide
  Antisense strand to SEQ ID NO: 231094
ucucaccuguaauuagugc

SEQ ID NO: 231096 - RNA, 19 nt, Artificial Sequence
  Description of Artificial Sequence: Synthetic oligonucleotide
  Sense strand starting at position 829 of SEQ ID NO: 2976
ccagguauugccugagaga

SEQ ID NO: 231097 - RNA, 19 nt, Artificial Sequence
  Description of Artificial Sequence: Synthetic oligonucleotide
  Antisense strand to SEQ ID NO: 231096
ucucucaggcaauaccugg

SEQ ID NO: 231098 - RNA, 19 nt, Artificial Sequence
  Description of Artificial Sequence: Synthetic oligonucleotide
  Sense strand starting at position 830 of SEQ ID NO: 2976
cagguauugccugagagau

SEQ ID NO: 231099 - RNA, 19 nt, Artificial Sequence
  Description of Artificial Sequence: Synthetic oligonucleotide
  Antisense strand to SEQ ID NO: 231098
aucucucaggcaauaccug

SEQ ID NO: 231100 - RNA, 19 nt, Artificial Sequence
  Description of Artificial Sequence: Synthetic oligonucleotide
  Sense strand starting at position 832 of SEQ ID NO: 2976
gguauugccugagagauga

SEQ ID NO: 231101 - RNA, 19 nt, Artificial Sequence
  Description of Artificial Sequence: Synthetic oligonucleotide
  Antisense strand to SEQ ID NO: 231100
ucaucucucaggcaauacc

SEQ ID NO: 231102 - RNA, 19 nt, Artificial Sequence
  Description of Artificial Sequence: Synthetic oligonucleotide
  Sense strand starting at position 994 of SEQ ID NO: 2976
ggcacuggcuucugagaca

SEQ ID NO: 231103 - RNA, 19 nt, Artificial Sequence
  Description of Artificial Sequence: Synthetic oligonucleotide
  Antisense strand to SEQ ID NO: 231102
ugucucagaagccagugcc

SEQ ID NO: 231104 - RNA, 19 nt, Artificial Sequence
  Description of Artificial Sequence: Synthetic oligonucleotide
  Sense strand starting at position 1049 of SEQ ID NO: 2976
gauccugaguguucucauc

SEQ ID NO: 231105 - RNA, 19 nt, Artificial Sequence
  Description of Artificial Sequence: Synthetic oligonucleotide
  Antisense strand to SEQ ID NO: 231104
gaugagaacacucaggauc

SEQ ID NO: 231106 - RNA, 19 nt, Artificial Sequence
  Description of Artificial Sequence: Synthetic oligonucleotide
  Sense strand starting at position 1051 of SEQ ID NO: 2976
uccugaguguucucaucug

SEQ ID NO: 231107 - RNA, 19 nt, Artificial Sequence
  Description of Artificial Sequence: Synthetic oligonucleotide
  Antisense strand to SEQ ID NO: 231106
cagaugagaacacucagga

SEQ ID NO: 231108 - RNA, 19 nt, Artificial Sequence
  Description of Artificial Sequence: Synthetic oligonucleotide
  Sense strand starting at position 1081 of SEQ ID NO: 2976
acacauacuucccaggaga

SEQ ID NO: 231109 - RNA, 19 nt, Artificial Sequence
  Description of Artificial Sequence: Synthetic oligonucleotide
  Antisense strand to SEQ ID NO: 231108
ucuccugggaaguaugugu

SEQ ID NO: 231110 - RNA, 19 nt, Artificial Sequence
  Description of Artificial Sequence: Synthetic oligonucleotide
  Sense strand starting at position 1823 of SEQ ID NO: 2976
ugguuuaacucuucucugu

SEQ ID NO: 231111 - RNA, 19 nt, Artificial Sequence
  Description of Artificial Sequence: Synthetic oligonucleotide
  Antisense strand to SEQ ID NO: 231110
acagagaagaguuaaacca

SEQ ID NO: 231112 - RNA, 19 nt, Artificial Sequence
  Description of Artificial Sequence: Synthetic oligonucleotide
  Sense strand starting at position 1889 of SEQ ID NO: 2976
aguccaucaccaugagcaa

SEQ ID NO: 231113 - RNA, 19 nt, Artificial Sequence
  Description of Artificial Sequence: Synthetic oligonucleotide
  Antisense strand to SEQ ID NO: 231112
uugcucauggugauggacu

SEQ ID NO: 231114 - RNA, 19 nt, Artificial Sequence
  Description of Artificial Sequence: Synthetic oligonucleotide
  Sense strand starting at position 1999 of SEQ ID NO: 2976
gcaaauacaucguaucguu

SEQ ID NO: 231115 - RNA, 19 nt, Artificial Sequence
  Description of Artificial Sequence: Synthetic oligonucleotide
  Antisense strand to SEQ ID NO: 231114
aacgauacgauguauuugc

SEQ ID NO: 231116 - RNA, 19 nt, Artificial Sequence
  Description of Artificial Sequence: Synthetic oligonucleotide
  Sense strand starting at position 2100 of SEQ ID NO: 2976
acgagacuuccuuaucauc

SEQ ID NO: 231117 - RNA, 19 nt, Artificial Sequence
  Description of Artificial Sequence: Synthetic oligonucleotide
  Antisense strand to SEQ ID NO: 231116
gaugauaaggaagucucgu

SEQ ID NO: 231118 - RNA, 19 nt, Artificial Sequence
  Description of Artificial Sequence: Synthetic oligonucleotide
  Sense strand starting at position 2168 of SEQ ID NO: 2976
guuggucuguuugaaggga

SEQ ID NO: 231119 - RNA, 19 nt, Artificial Sequence
  Description of Artificial Sequence: Synthetic oligonucleotide
  Antisense strand to SEQ ID NO: 231118
ucccuucaaacagaccaac

SEQ ID NO: 231120 - RNA, 19 nt, Artificial Sequence
  Description of Artificial Sequence: Synthetic oligonucleotide
  Sense strand starting at position 2170 of SEQ ID NO: 2976
uggucuguuugaagggaga

SEQ ID NO: 231121 - RNA, 19 nt, Artificial Sequence
  Description of Artificial Sequence: Synthetic oligonucleotide
  Antisense strand to SEQ ID NO: 231120
ucucccuucaaacagacca

SEQ ID NO: 231122 - RNA, 19 nt, Artificial Sequence
  Description of Artificial Sequence: Synthetic oligonucleotide
  Sense strand starting at position 2172 of SEQ ID NO: 2976
gucuguuugaagggagauu

SEQ ID NO: 231123 - RNA, 19 nt, Artificial Sequence
  Description of Artificial Sequence: Synthetic oligonucleotide
  Antisense strand to SEQ ID NO: 231122
aaucucccuucaaacagac

SEQ ID NO: 231124 - RNA, 19 nt, Artificial Sequence
  Description of Artificial Sequence: Synthetic oligonucleotide
  Sense strand starting at position 2304 of SEQ ID NO: 2976
gggaaugugaccugcguaa

SEQ ID NO: 231125 - RNA, 19 nt, Artificial Sequence
  Description of Artificial Sequence: Synthetic oligonucleotide
  Antisense strand to SEQ ID NO: 231124
uuacgcaggucacauuccc

SEQ ID NO: 231126 - RNA, 19 nt, Artificial Sequence
  Description of Artificial Sequence: Synthetic oligonucleotide
  Sense strand starting at position 2306 of SEQ ID NO: 2976
gaaugugaccugcguaagu

SEQ ID NO: 231127 - RNA, 19 nt, Artificial Sequence
  Description of Artificial Sequence: Synthetic oligonucleotide
  Antisense strand to SEQ ID NO: 231126
acuuacgcaggucacauuc

SEQ ID NO: 231128 - RNA, 19 nt, Artificial Sequence
  Description of Artificial Sequence: Synthetic oligonucleotide
  Sense strand starting at position 2317 of SEQ ID NO: 2976
gcguaaguccaggugucua

SEQ ID NO: 231129 - RNA, 19 nt, Artificial Sequence
  Description of Artificial Sequence: Synthetic oligonucleotide
  Antisense strand to SEQ ID NO: 231128
uagacaccuggacuuacgc

SEQ ID NO: 231130 - RNA, 19 nt, Artificial Sequence
  Description of Artificial Sequence: Synthetic oligonucleotide
  Sense strand starting at position 2551 of SEQ ID NO: 2976
cucuuuagauggcacagaa

SEQ ID NO: 231131 - RNA, 19 nt, Artificial Sequence
  Description of Artificial Sequence: Synthetic oligonucleotide
  Antisense strand to SEQ ID NO: 231130
uucugugccaucuaaagag

SEQ ID NO: 231132 - RNA, 19 nt, Artificial Sequence
  Description of Artificial Sequence: Synthetic oligonucleotide
  Sense strand starting at position 2689 of SEQ ID NO: 2976
ccgguuaugggcugagaca

SEQ ID NO: 231133 - RNA, 19 nt, Artificial Sequence
  Description of Artificial Sequence: Synthetic oligonucleotide
  Antisense strand to SEQ ID NO: 231132
ugucucagcccauaaccgg

SEQ ID NO: 231134 - RNA, 19 nt, Artificial Sequence
  Description of Artificial Sequence: Synthetic oligonucleotide
  Sense strand starting at position 2785 of SEQ ID NO: 2976
agccuaguuucugauccuu

SEQ ID NO: 231135 - RNA, 19 nt, Artificial Sequence
  Description of Artificial Sequence: Synthetic oligonucleotide
  Antisense strand to SEQ ID NO: 231134
aaggaucagaaacuaggcu

SEQ ID NO: 231136 - RNA, 19 nt, Artificial Sequence
  Description of Artificial Sequence: Synthetic oligonucleotide
  Sense strand starting at position 2815 of SEQ ID NO: 2976
gaggaagguucugggcgaa

SEQ ID NO: 231137 - RNA, 19 nt, Artificial Sequence
  Description of Artificial Sequence: Synthetic oligonucleotide
  Antisense strand to SEQ ID NO: 231136
uucgcccagaaccuuccuc

SEQ ID NO: 231138 - RNA, 19 nt, Artificial Sequence
  Description of Artificial Sequence: Synthetic oligonucleotide
  Sense strand starting at position 2897 of SEQ ID NO: 2976
ucaagauaguuuccagaac

SEQ ID NO: 231139 - RNA, 19 nt, Artificial Sequence
  Description of Artificial Sequence: Synthetic oligonucleotide
  Antisense strand to SEQ ID NO: 231138
guucuggaaacuaucuuga

SEQ ID NO: 231140 - RNA, 19 nt, Artificial Sequence
  Description of Artificial Sequence: Synthetic oligonucleotide
  Sense strand starting at position 3077 of SEQ ID NO: 2976
cgaugcuugcucuuguguu

SEQ ID NO: 231141 - RNA, 19 nt, Artificial Sequence
  Description of Artificial Sequence: Synthetic oligonucleotide
  Antisense strand to SEQ ID NO: 231140
aacacaagagcaagcaucg

SEQ ID NO: 231142 - RNA, 19 nt, Artificial Sequence
  Description of Artificial Sequence: Synthetic oligonucleotide
  Sense strand starting at position 3167 of SEQ ID NO: 2976
gccguugugccuuccgauu

SEQ ID NO: 231143 - RNA, 19 nt, Artificial Sequence
  Description of Artificial Sequence: Synthetic oligonucleotide
  Antisense strand to SEQ ID NO: 231142
aaucggaaggcacaacggc

SEQ ID NO: 231144 - RNA, 19 nt, Artificial Sequence
  Description of Artificial Sequence: Synthetic oligonucleotide
  Sense strand starting at position 3172 of SEQ ID NO: 2976
ugugccuuccgauuguuua

SEQ ID NO: 231145 - RNA, 19 nt, Artificial Sequence
  Description of Artificial Sequence: Synthetic oligonucleotide
  Antisense strand to SEQ ID NO: 231144
uaaacaaucggaaggcaca

SEQ ID NO: 231146 - RNA, 19 nt, Artificial Sequence
  Description of Artificial Sequence: Synthetic oligonucleotide
  Sense strand starting at position 3173 of SEQ ID NO: 2976
gugccuuccgauuguuuau

SEQ ID NO: 231147 - RNA, 19 nt, Artificial Sequence
  Description of Artificial Sequence: Synthetic oligonucleotide
  Antisense strand to SEQ ID NO: 231146
auaaacaaucggaaggcac

SEQ ID NO: 231148 - RNA, 19 nt, Artificial Sequence
  Description of Artificial Sequence: Synthetic oligonucleotide
  Sense strand starting at position 3452 of SEQ ID NO: 2976
gaggcugauuuccagagaa

SEQ ID NO: 231149 - RNA, 19 nt, Artificial Sequence
  Description of Artificial Sequence: Synthetic oligonucleotide
  Antisense strand to SEQ ID NO: 231148
uucucuggaaaucagccuc

SEQ ID NO: 231150 - RNA, 19 nt, Artificial Sequence
  Description of Artificial Sequence: Synthetic oligonucleotide
  Sense strand starting at position 3490 of SEQ ID NO: 2976
guugcuccugggugcaaau

SEQ ID NO: 231151 - RNA, 19 nt, Artificial Sequence
  Description of Artificial Sequence: Synthetic oligonucleotide
  Antisense strand to SEQ ID NO: 231150
auuugcacccaggagcaac

SEQ ID NO: 231152 - RNA, 19 nt, Artificial Sequence
  Description of Artificial Sequence: Synthetic oligonucleotide
  Sense strand starting at position 3536 of SEQ ID NO: 2976
aagccaagaucuuaagugu

SEQ ID NO: 231153 - RNA, 19 nt, Artificial Sequence
  Description of Artificial Sequence: Synthetic oligonucleotide
  Antisense strand to SEQ ID NO: 231152
acacuuaagaucuuggcuu

SEQ ID NO: 231154 - RNA, 19 nt, Artificial Sequence
  Description of Artificial Sequence: Synthetic oligonucleotide
  Sense strand starting at position 3543 of SEQ ID NO: 2976
gaucuuaagugucugcaaa

SEQ ID NO: 231155 - RNA, 19 nt, Artificial Sequence
  Description of Artificial Sequence: Synthetic oligonucleotide
  Antisense strand to SEQ ID NO: 231154
uuugcagacacuuaagauc

SEQ ID NO: 231156 - RNA, 19 nt, Artificial Sequence
  Description of Artificial Sequence: Synthetic oligonucleotide
  Sense strand starting at position 3545 of SEQ ID NO: 2976
ucuuaagugucugcaaaga

SEQ ID NO: 231157 - RNA, 19 nt, Artificial Sequence
  Description of Artificial Sequence: Synthetic oligonucleotide
  Antisense strand to SEQ ID NO: 231156
ucuuugcagacacuuaaga

SEQ ID NO: 231158 - RNA, 19 nt, Artificial Sequence
  Description of Artificial Sequence: Synthetic oligonucleotide
  Sense strand starting at position 106 of SEQ ID NO: 2977
cgaugcuugcucuuguguu

SEQ ID NO: 231159 - RNA, 19 nt, Artificial Sequence
  Description of Artificial Sequence: Synthetic oligonucleotide
  Antisense strand to SEQ ID NO: 231158
aacacaagagcaagcaucg

SEQ ID NO: 231160 - RNA, 19 nt, Artificial Sequence
  Description of Artificial Sequence: Synthetic oligonucleotide
  Sense strand starting at position 196 of SEQ ID NO: 2977
gccguugugccuuccgauu

SEQ ID NO: 231161 - RNA, 19 nt, Artificial Sequence
  Description of Artificial Sequence: Synthetic oligonucleotide
  Antisense strand to SEQ ID NO: 231160
aaucggaaggcacaacggc

SEQ ID NO: 231162 - RNA, 19 nt, Artificial Sequence
  Description of Artificial Sequence: Synthetic oligonucleotide
  Sense strand starting at position 201 of SEQ ID NO: 2977
ugugccuuccgauuguuua

SEQ ID NO: 231163 - RNA, 19 nt, Artificial Sequence
  Description of Artificial Sequence: Synthetic oligonucleotide
  Antisense strand to SEQ ID NO: 231162
uaaacaaucggaaggcaca

SEQ ID NO: 231164 - RNA, 19 nt, Artificial Sequence
  Description of Artificial Sequence: Synthetic oligonucleotide
  Sense strand starting at position 202 of SEQ ID NO: 2977
gugccuuccgauuguuuau

SEQ ID NO: 231165 - RNA, 19 nt, Artificial Sequence
  Description of Artificial Sequence: Synthetic oligonucleotide
  Antisense strand to SEQ ID NO: 231164
auaaacaaucggaaggcac

SEQ ID NO: 231166 - RNA, 19 nt, Artificial Sequence
  Description of Artificial Sequence: Synthetic oligonucleotide
  Sense strand starting at position 481 of SEQ ID NO: 2977
gaggcugauuuccagagaa

SEQ ID NO: 231167 - RNA, 19 nt, Artificial Sequence
  Description of Artificial Sequence: Synthetic oligonucleotide
  Antisense strand to SEQ ID NO: 231166
uucucuggaaaucagccuc

SEQ ID NO: 231168 - RNA, 19 nt, Artificial Sequence
  Description of Artificial Sequence: Synthetic oligonucleotide
  Sense strand starting at position 519 of SEQ ID NO: 2977
guugcuccugggugcaaau

SEQ ID NO: 231169 - RNA, 19 nt, Artificial Sequence
  Description of Artificial Sequence: Synthetic oligonucleotide
  Antisense strand to SEQ ID NO: 231168
auuugcacccaggagcaac

SEQ ID NO: 231170 - RNA, 19 nt, Artificial Sequence
  Description of Artificial Sequence: Synthetic oligonucleotide
  Sense strand starting at position 572 of SEQ ID NO: 2977
gaucuuaagugucugcaaa

SEQ ID NO: 231171 - RNA, 19 nt, Artificial Sequence
  Description of Artificial Sequence: Synthetic oligonucleotide
  Antisense strand to SEQ ID NO: 231170
uuugcagacacuuaagauc

SEQ ID NO: 231172 - RNA, 19 nt, Artificial Sequence
  Description of Artificial Sequence: Synthetic oligonucleotide
  Sense strand starting at position 574 of SEQ ID NO: 2977
ucuuaagugucugcaaaga

SEQ ID NO: 231173 - RNA, 19 nt, Artificial Sequence
  Description of Artificial Sequence: Synthetic oligonucleotide
  Antisense strand to SEQ ID NO: 231172
ucuuugcagacacuuaaga

SEQ ID NO: 231174 - RNA, 19 nt, Artificial Sequence
  Description of Artificial Sequence: Synthetic oligonucleotide
  Sense strand starting at position 1150 of SEQ ID NO: 2977
augguacaugucuaguaag

SEQ ID NO: 231175 - RNA, 19 nt, Artificial Sequence
  Description of Artificial Sequence: Synthetic oligonucleotide
  Antisense strand to SEQ ID NO: 231174
cuuacuagacauguaccau

SEQ ID NO: 231176 - RNA, 19 nt, Artificial Sequence
  Description of Artificial Sequence: Synthetic oligonucleotide
  Sense strand starting at position 1160 of SEQ ID NO: 2977
ucuaguaaguaucugucaa

SEQ ID NO: 231177 - RNA, 19 nt, Artificial Sequence
  Description of Artificial Sequence: Synthetic oligonucleotide
  Antisense strand to SEQ ID NO: 231176
uugacagauacuuacuaga

SEQ ID NO: 231178 - RNA, 19 nt, Artificial Sequence
  Description of Artificial Sequence: Synthetic oligonucleotide
  Sense strand starting at position 1316 of SEQ ID NO: 2977
acaagagguuuacuguguu

SEQ ID NO: 231179 - RNA, 19 nt, Artificial Sequence
  Description of Artificial Sequence: Synthetic oligonucleotide
  Antisense strand to SEQ ID NO: 231178
aacacaguaaaccucuugu

SEQ ID NO: 231180 - RNA, 19 nt, Artificial Sequence
  Description of Artificial Sequence: Synthetic oligonucleotide
  Sense strand starting at position 1319 of SEQ ID NO: 2977
agagguuuacuguguugca

SEQ ID NO: 231181 - RNA, 19 nt, Artificial Sequence
  Description of Artificial Sequence: Synthetic oligonucleotide
  Antisense strand to SEQ ID NO: 231180
ugcaacacaguaaaccucu

SEQ ID NO: 231182 - RNA, 19 nt, Artificial Sequence
  Description of Artificial Sequence: Synthetic oligonucleotide
  Sense strand starting at position 1320 of SEQ ID NO: 2977
gagguuuacuguguugcaa

SEQ ID NO: 231183 - RNA, 19 nt, Artificial Sequence
  Description of Artificial Sequence: Synthetic oligonucleotide
  Antisense strand to SEQ ID NO: 231182
uugcaacacaguaaaccuc

SEQ ID NO: 231184 - RNA, 19 nt, Artificial Sequence
  Description of Artificial Sequence: Synthetic oligonucleotide
  Sense strand starting at position 1394 of SEQ ID NO: 2977
cugcgucuugccuagggua

SEQ ID NO: 231185 - RNA, 19 nt, Artificial Sequence
  Description of Artificial Sequence: Synthetic oligonucleotide
  Antisense strand to SEQ ID NO: 231184
uacccuaggcaagacgcag

SEQ ID NO: 231186 - RNA, 19 nt, Artificial Sequence
  Description of Artificial Sequence: Synthetic oligonucleotide
  Sense strand starting at position 1487 of SEQ ID NO: 2977
cacugucuguacuugggaa

SEQ ID NO: 231187 - RNA, 19 nt, Artificial Sequence
  Description of Artificial Sequence: Synthetic oligonucleotide
  Antisense strand to SEQ ID NO: 231186
uucccaaguacagacagug

SEQ ID NO: 231188 - RNA, 19 nt, Artificial Sequence
  Description of Artificial Sequence: Synthetic oligonucleotide
  Sense strand starting at position 1488 of SEQ ID NO: 2977
acugucuguacuugggaaa

SEQ ID NO: 231189 - RNA, 19 nt, Artificial Sequence
  Description of Artificial Sequence: Synthetic oligonucleotide
  Antisense strand to SEQ ID NO: 231188
uuucccaaguacagacagu

SEQ ID NO: 231190 - RNA, 19 nt, Artificial Sequence
  Description of Artificial Sequence: Synthetic oligonucleotide
  Sense strand starting at position 1489 of SEQ ID NO: 2977
cugucuguacuugggaaau

SEQ ID NO: 231191 - RNA, 19 nt, Artificial Sequence
  Description of Artificial Sequence: Synthetic oligonucleotide
  Antisense strand to SEQ ID NO: 231190
auuucccaaguacagacag

SEQ ID NO: 231192 - RNA, 19 nt, Artificial Sequence
  Description of Artificial Sequence: Synthetic oligonucleotide
  Sense strand starting at position 1544 of SEQ ID NO: 2977
gcuguuucuccaggccaaa

SEQ ID NO: 231193 - RNA, 19 nt, Artificial Sequence
  Description of Artificial Sequence: Synthetic oligonucleotide
  Antisense strand to SEQ ID NO: 231192
uuuggccuggagaaacagc

SEQ ID NO: 231194 - RNA, 19 nt, Artificial Sequence
  Description of Artificial Sequence: Synthetic oligonucleotide
  Sense strand starting at position 1567 of SEQ ID NO: 2977
ugucaucucuugccaggau

SEQ ID NO: 231195 - RNA, 19 nt, Artificial Sequence
  Description of Artificial Sequence: Synthetic oligonucleotide
  Antisense strand to SEQ ID NO: 231194
auccuggcaagagaugaca

SEQ ID NO: 231196 - RNA, 19 nt, Artificial Sequence
  Description of Artificial Sequence: Synthetic oligonucleotide
  Sense strand starting at position 1571 of SEQ ID NO: 2977
aucucuugccaggauuacu

SEQ ID NO: 231197 - RNA, 19 nt, Artificial Sequence
  Description of Artificial Sequence: Synthetic oligonucleotide
  Antisense strand to SEQ ID NO: 231196
aguaauccuggcaagagau

SEQ ID NO: 231198 - RNA, 19 nt, Artificial Sequence
  Description of Artificial Sequence: Synthetic oligonucleotide
  Sense strand starting at position 1579 of SEQ ID NO: 2977
ccaggauuacugcaaucac

SEQ ID NO: 231199 - RNA, 19 nt, Artificial Sequence
  Description of Artificial Sequence: Synthetic oligonucleotide
  Antisense strand to SEQ ID NO: 231198
gugauugcaguaauccugg

SEQ ID NO: 231200 - RNA, 19 nt, Artificial Sequence
  Description of Artificial Sequence: Synthetic oligonucleotide
  Sense strand starting at position 1711 of SEQ ID NO: 2977
cccacuucugcgcagaagu

SEQ ID NO: 231201 - RNA, 19 nt, Artificial Sequence
  Description of Artificial Sequence: Synthetic oligonucleotide
  Antisense strand to SEQ ID NO: 231200
acuucugcgcagaaguggg

SEQ ID NO: 231202 - RNA, 19 nt, Artificial Sequence
  Description of Artificial Sequence: Synthetic oligonucleotide
  Sense strand starting at position 1777 of SEQ ID NO: 2977
uugccugugugaccucaau

SEQ ID NO: 231203 - RNA, 19 nt, Artificial Sequence
  Description of Artificial Sequence: Synthetic oligonucleotide
  Antisense strand to SEQ ID NO: 231202
auugaggucacacaggcaa

SEQ ID NO: 231204 - RNA, 19 nt, Artificial Sequence
  Description of Artificial Sequence: Synthetic oligonucleotide
  Sense strand starting at position 1783 of SEQ ID NO: 2977
gugugaccucaaugcugua

SEQ ID NO: 231205 - RNA, 19 nt, Artificial Sequence
  Description of Artificial Sequence: Synthetic oligonucleotide
  Antisense strand to SEQ ID NO: 231204
uacagcauugaggucacac

SEQ ID NO: 231206 - RNA, 19 nt, Artificial Sequence
  Description of Artificial Sequence: Synthetic oligonucleotide
  Sense strand starting at position 1919 of SEQ ID NO: 2977
ccagcagugcccugcaaau

SEQ ID NO: 231207 - RNA, 19 nt, Artificial Sequence
  Description of Artificial Sequence: Synthetic oligonucleotide
  Antisense strand to SEQ ID NO: 231206
auuugcagggcacugcugg

SEQ ID NO: 231208 - RNA, 19 nt, Artificial Sequence
  Description of Artificial Sequence: Synthetic oligonucleotide
  Sense strand starting at position 1932 of SEQ ID NO: 2977
gcaaauugcugugcccaga

SEQ ID NO: 231209 - RNA, 19 nt, Artificial Sequence
  Description of Artificial Sequence: Synthetic oligonucleotide
  Antisense strand to SEQ ID NO: 231208
ucugggcacagcaauuugc

SEQ ID NO: 231210 - RNA, 19 nt, Artificial Sequence
  Description of Artificial Sequence: Synthetic oligonucleotide
  Sense strand starting at position 2007 of SEQ ID NO: 2977
uuuacagugaaucgauuga

SEQ ID NO: 231211 - RNA, 19 nt, Artificial Sequence
  Description of Artificial Sequence: Synthetic oligonucleotide
  Antisense strand to SEQ ID NO: 231210
ucaaucgauucacuguaaa

SEQ ID NO: 231212 - RNA, 19 nt, Artificial Sequence
  Description of Artificial Sequence: Synthetic oligonucleotide
  Sense strand starting at position 2011 of SEQ ID NO: 2977
cagugaaucgauugauagg

SEQ ID NO: 231213 - RNA, 19 nt, Artificial Sequence
  Description of Artificial Sequence: Synthetic oligonucleotide
  Antisense strand to SEQ ID NO: 231212
ccuaucaaucgauucacug

SEQ ID NO: 231214 - RNA, 19 nt, Artificial Sequence
  Description of Artificial Sequence: Synthetic oligonucleotide
  Sense strand starting at position 2014 of SEQ ID NO: 2977
ugaaucgauugauaggauu

SEQ ID NO: 231215 - RNA, 19 nt, Artificial Sequence
  Description of Artificial Sequence: Synthetic oligonucleotide
  Antisense strand to SEQ ID NO: 231214
aauccuaucaaucgauuca

SEQ ID NO: 231216 - RNA, 19 nt, Artificial Sequence
  Description of Artificial Sequence: Synthetic oligonucleotide
  Sense strand starting at position 2039 of SEQ ID NO: 2977
gcacuugugcacugaugag

SEQ ID NO: 231217 - RNA, 19 nt, Artificial Sequence
  Description of Artificial Sequence: Synthetic oligonucleotide
  Antisense strand to SEQ ID NO: 231216
cucaucagugcacaagugc

SEQ ID NO: 231218 - RNA, 19 nt, Artificial Sequence
  Description of Artificial Sequence: Synthetic oligonucleotide
  Sense strand starting at position 2086 of SEQ ID NO: 2977
gucugugaaccgggacuaa

SEQ ID NO: 231219 - RNA, 19 nt, Artificial Sequence
  Description of Artificial Sequence: Synthetic oligonucleotide
  Antisense strand to SEQ ID NO: 231218
uuagucccgguucacagac

SEQ ID NO: 231220 - RNA, 19 nt, Artificial Sequence
  Description of Artificial Sequence: Synthetic oligonucleotide
  Sense strand starting at position 2552 of SEQ ID NO: 2977
uugggugacccuggaaagu

SEQ ID NO: 231221 - RNA, 19 nt, Artificial Sequence
  Description of Artificial Sequence: Synthetic oligonucleotide
  Antisense strand to SEQ ID NO: 231220
acuuuccagggucacccaa

SEQ ID NO: 231222 - RNA, 19 nt, Artificial Sequence
  Description of Artificial Sequence: Synthetic oligonucleotide
  Sense strand starting at position 2880 of SEQ ID NO: 2977
gaaggaguguuucaggaag

SEQ ID NO: 231223 - RNA, 19 nt, Artificial Sequence
  Description of Artificial Sequence: Synthetic oligonucleotide
  Antisense strand to SEQ ID NO: 231222
cuuccugaaacacuccuuc

SEQ ID NO: 231224 - RNA, 19 nt, Artificial Sequence
  Description of Artificial Sequence: Synthetic oligonucleotide
  Sense strand starting at position 3040 of SEQ ID NO: 2977
cccuccagucgccaugaau

SEQ ID NO: 231225 - RNA, 19 nt, Artificial Sequence
  Description of Artificial Sequence: Synthetic oligonucleotide
  Antisense strand to SEQ ID NO: 231224
auucauggcgacuggaggg

SEQ ID NO: 231226 - RNA, 19 nt, Artificial Sequence
  Description of Artificial Sequence: Synthetic oligonucleotide
  Sense strand starting at position 3154 of SEQ ID NO: 2977
uggacagaguuagucacua

SEQ ID NO: 231227 - RNA, 19 nt, Artificial Sequence
  Description of Artificial Sequence: Synthetic oligonucleotide
  Antisense strand to SEQ ID NO: 231226
uagugacuaacucugucca

SEQ ID NO: 231228 - RNA, 19 nt, Artificial Sequence
  Description of Artificial Sequence: Synthetic oligonucleotide
  Sense strand starting at position 3268 of SEQ ID NO: 2977
cucagcuagugucuaauaa

SEQ ID NO: 231229 - RNA, 19 nt, Artificial Sequence
  Description of Artificial Sequence: Synthetic oligonucleotide
  Antisense strand to SEQ ID NO: 231228
uuauuagacacuagcugag

SEQ ID NO: 231230 - RNA, 19 nt, Artificial Sequence
  Description of Artificial Sequence: Synthetic oligonucleotide
  Sense strand starting at position 3269 of SEQ ID NO: 2977
ucagcuagugucuaauaaa

SEQ ID NO: 231231 - RNA, 19 nt, Artificial Sequence
  Description of Artificial Sequence: Synthetic oligonucleotide
  Antisense strand to SEQ ID NO: 231230
uuuauuagacacuagcuga

SEQ ID NO: 231232 - RNA, 19 nt, Artificial Sequence
  Description of Artificial Sequence: Synthetic oligonucleotide
  Sense strand starting at position 3512 of SEQ ID NO: 2977
ccuugaccuccagagcuua

SEQ ID NO: 231233 - RNA, 19 nt, Artificial Sequence
  Description of Artificial Sequence: Synthetic oligonucleotide
  Antisense strand to SEQ ID NO: 231232
uaagcucuggaggucaagg

SEQ ID NO: 231234 - RNA, 19 nt, Artificial Sequence
  Description of Artificial Sequence: Synthetic oligonucleotide
  Sense strand starting at position 3747 of SEQ ID NO: 2977
gaaggugucuggcucuguu

SEQ ID NO: 231235 - RNA, 19 nt, Artificial Sequence
  Description of Artificial Sequence: Synthetic oligonucleotide
  Antisense strand to SEQ ID NO: 231234
aacagagccagacaccuuc

SEQ ID NO: 231236 - RNA, 19 nt, Artificial Sequence
  Description of Artificial Sequence: Synthetic oligonucleotide
  Sense strand starting at position 3787 of SEQ ID NO: 2977
ugugauuauagcucgcugu

SEQ ID NO: 231237 - RNA, 19 nt, Artificial Sequence
  Description of Artificial Sequence: Synthetic oligonucleotide
  Antisense strand to SEQ ID NO: 231236
acagcgagcuauaaucaca

SEQ ID NO: 231238 - RNA, 19 nt, Artificial Sequence
  Description of Artificial Sequence: Synthetic oligonucleotide
  Sense strand starting at position 61 of SEQ ID NO: 2975
gcuaucuaccagugauuau

SEQ ID NO: 231239 - RNA, 19 nt, Artificial Sequence
  Description of Artificial Sequence: Synthetic oligonucleotide
  Antisense strand to SEQ ID NO: 231238
auaaucacugguagauagc

SEQ ID NO: 231240 - RNA, 19 nt, Artificial Sequence
  Description of Artificial Sequence: Synthetic oligonucleotide
  Sense strand starting at position 374 of SEQ ID NO: 2975
gguuuaaggcacugugacu

SEQ ID NO: 231241 - RNA, 19 nt, Artificial Sequence
  Description of Artificial Sequence: Synthetic oligonucleotide
  Antisense strand to SEQ ID NO: 231240
agucacagugccuuaaacc

SEQ ID NO: 231242 - RNA, 19 nt, Artificial Sequence
  Description of Artificial Sequence: Synthetic oligonucleotide
  Sense strand starting at position 423 of SEQ ID NO: 2975
ccaagugaacgaugacaca

SEQ ID NO: 231243 - RNA, 19 nt, Artificial Sequence
  Description of Artificial Sequence: Synthetic oligonucleotide
  Antisense strand to SEQ ID NO: 231242
ugugucaucguucacuugg

SEQ ID NO: 231244 - RNA, 19 nt, Artificial Sequence
  Description of Artificial Sequence: Synthetic oligonucleotide
  Sense strand starting at position 622 of SEQ ID NO: 2975
agcguuagucuccaaacuu

SEQ ID NO: 231245 - RNA, 19 nt, Artificial Sequence
  Description of Artificial Sequence: Synthetic oligonucleotide
  Antisense strand to SEQ ID NO: 231244
aaguuuggagacuaacgcu

SEQ ID NO: 231246 - RNA, 19 nt, Artificial Sequence
  Description of Artificial Sequence: Synthetic oligonucleotide
  Sense strand starting at position 687 of SEQ ID NO: 2975
ggaccuguuucuccuccau

SEQ ID NO: 231247 - RNA, 19 nt, Artificial Sequence
  Description of Artificial Sequence: Synthetic oligonucleotide
  Antisense strand to SEQ ID NO: 231246
auggaggagaaacaggucc

SEQ ID NO: 231248 - RNA, 19 nt, Artificial Sequence
  Description of Artificial Sequence: Synthetic oligonucleotide
  Sense strand starting at position 706 of SEQ ID NO: 2975
cucacauucuuuccagguu

SEQ ID NO: 231249 - RNA, 19 nt, Artificial Sequence
  Description of Artificial Sequence: Synthetic oligonucleotide
  Antisense strand to SEQ ID NO: 231248
aaccuggaaagaaugugag

SEQ ID NO: 231250 - RNA, 19 nt, Artificial Sequence
  Description of Artificial Sequence: Synthetic oligonucleotide
  Sense strand starting at position 909 of SEQ ID NO: 2975
cgcguccucgcagugagau

SEQ ID NO: 231251 - RNA, 19 nt, Artificial Sequence
  Description of Artificial Sequence: Synthetic oligonucleotide
  Antisense strand to SEQ ID NO: 231250
aucucacugcgaggacgcg

SEQ ID NO: 231252 - RNA, 19 nt, Artificial Sequence
  Description of Artificial Sequence: Synthetic oligonucleotide
  Sense strand starting at position 911 of SEQ ID NO: 2975
cguccucgcagugagauuu

SEQ ID NO: 231253 - RNA, 19 nt, Artificial Sequence
  Description of Artificial Sequence: Synthetic oligonucleotide
  Antisense strand to SEQ ID NO: 231252
aaaucucacugcgaggacg

SEQ ID NO: 231254 - RNA, 19 nt, Artificial Sequence
  Description of Artificial Sequence: Synthetic oligonucleotide
  Sense strand starting at position 1004 of SEQ ID NO: 2975
guagcaugaggccaaauaa

SEQ ID NO: 231255 - RNA, 19 nt, Artificial Sequence
  Description of Artificial Sequence: Synthetic oligonucleotide
  Antisense strand to SEQ ID NO: 231254
uuauuuggccucaugcuac

SEQ ID NO: 231256 - RNA, 19 nt, Artificial Sequence
  Description of Artificial Sequence: Synthetic oligonucleotide
  Sense strand starting at position 1224 of SEQ ID NO: 2975
agcucacaauuugaaagau

SEQ ID NO: 231257 - RNA, 19 nt, Artificial Sequence
  Description of Artificial Sequence: Synthetic oligonucleotide
  Antisense strand to SEQ ID NO: 231256
aucuuucaaauugugagcu

SEQ ID NO: 231258 - RNA, 19 nt, Artificial Sequence
  Description of Artificial Sequence: Synthetic oligonucleotide
  Sense strand starting at position 1253 of SEQ ID NO: 2975
gcguucuacccacaaagaa

SEQ ID NO: 231259 - RNA, 19 nt, Artificial Sequence
  Description of Artificial Sequence: Synthetic oligonucleotide
  Antisense strand to SEQ ID NO: 231258
uucuuuguggguagaacgc

SEQ ID NO: 231260 - RNA, 19 nt, Artificial Sequence
  Description of Artificial Sequence: Synthetic oligonucleotide
  Sense strand starting at position 1272 of SEQ ID NO: 2975
aacggucuccagcaucaua

SEQ ID NO: 231261 - RNA, 19 nt, Artificial Sequence
  Description of Artificial Sequence: Synthetic oligonucleotide
  Antisense strand to SEQ ID NO: 231260
uaugaugcuggagaccguu

SEQ ID NO: 231262 - RNA, 19 nt, Artificial Sequence
  Description of Artificial Sequence: Synthetic oligonucleotide
  Sense strand starting at position 1598 of SEQ ID NO: 2975
ccaggagucccagggaagu

SEQ ID NO: 231263 - RNA, 19 nt, Artificial Sequence
  Description of Artificial Sequence: Synthetic oligonucleotide
  Antisense strand to SEQ ID NO: 231262
acuucccugggacuccugg

SEQ ID NO: 231264 - RNA, 19 nt, Artificial Sequence
  Description of Artificial Sequence: Synthetic oligonucleotide
  Sense strand starting at position 2871 of SEQ ID NO: 2975
ugaugagcuucccuuuaug

SEQ ID NO: 231265 - RNA, 19 nt, Artificial Sequence
  Description of Artificial Sequence: Synthetic oligonucleotide
  Antisense strand to SEQ ID NO: 231264
cauaaagggaagcucauca

SEQ ID NO: 231266 - RNA, 19 nt, Artificial Sequence
  Description of Artificial Sequence: Synthetic oligonucleotide
  Sense strand starting at position 2874 of SEQ ID NO: 2975
ugagcuucccuuuauggga

SEQ ID NO: 231267 - RNA, 19 nt, Artificial Sequence
  Description of Artificial Sequence: Synthetic oligonucleotide
  Antisense strand to SEQ ID NO: 231266
ucccauaaagggaagcuca

SEQ ID NO: 231268 - RNA, 19 nt, Artificial Sequence
  Description of Artificial Sequence: Synthetic oligonucleotide
  Sense strand starting at position 2879 of SEQ ID NO: 2975
uucccuuuaugggagauuu

SEQ ID NO: 231269 - RNA, 19 nt, Artificial Sequence
  Description of Artificial Sequence: Synthetic oligonucleotide
  Antisense strand to SEQ ID NO: 231268
aaaucucccauaaagggaa

SEQ ID NO: 231270 - RNA, 19 nt, Artificial Sequence
  Description of Artificial Sequence: Synthetic oligonucleotide
  Sense strand starting at position 2887 of SEQ ID NO: 2975
augggagauuuacauaauu

SEQ ID NO: 231271 - RNA, 19 nt, Artificial Sequence
  Description of Artificial Sequence: Synthetic oligonucleotide
  Antisense strand to SEQ ID NO: 231270
aauuauguaaaucucccau

SEQ ID NO: 231272 - RNA, 19 nt, Artificial Sequence
  Description of Artificial Sequence: Synthetic oligonucleotide
  Sense strand starting at position 2920 of SEQ ID NO: 2975
gggaaugggcauuacuguu

SEQ ID NO: 231273 - RNA, 19 nt, Artificial Sequence
  Description of Artificial Sequence: Synthetic oligonucleotide
  Antisense strand to SEQ ID NO: 231272
aacaguaaugcccauuccc

SEQ ID NO: 231274 - RNA, 19 nt, Artificial Sequence
  Description of Artificial Sequence: Synthetic oligonucleotide
  Sense strand starting at position 2964 of SEQ ID NO: 2975
gugcaugugcgugcuagua

SEQ ID NO: 231275 - RNA, 19 nt, Artificial Sequence
  Description of Artificial Sequence: Synthetic oligonucleotide
  Antisense strand to SEQ ID NO: 231274
uacuagcacgcacaugcac

SEQ ID NO: 231276 - RNA, 19 nt, Artificial Sequence
  Description of Artificial Sequence: Synthetic oligonucleotide
  Sense strand starting at position 3050 of SEQ ID NO: 2975
gagcauaggucauuccaag

SEQ ID NO: 231277 - RNA, 19 nt, Artificial Sequence
  Description of Artificial Sequence: Synthetic oligonucleotide
  Antisense strand to SEQ ID NO: 231276
cuuggaaugaccuaugcuc

SEQ ID NO: 231278 - RNA, 19 nt, Artificial Sequence
  Description of Artificial Sequence: Synthetic oligonucleotide
  Sense strand starting at position 3056 of SEQ ID NO: 2975
aggucauuccaaggacacu

SEQ ID NO: 231279 - RNA, 19 nt, Artificial Sequence
  Description of Artificial Sequence: Synthetic oligonucleotide
  Antisense strand to SEQ ID NO: 231278
aguguccuuggaaugaccu

SEQ ID NO: 231280 - RNA, 19 nt, Artificial Sequence
  Description of Artificial Sequence: Synthetic oligonucleotide
  Sense strand starting at position 3088 of SEQ ID NO: 2975
ucugcacuugugugaauuu

SEQ ID NO: 231281 - RNA, 19 nt, Artificial Sequence
  Description of Artificial Sequence: Synthetic oligonucleotide
  Antisense strand to SEQ ID NO: 231280
aaauucacacaagugcaga

SEQ ID NO: 231282 - RNA, 19 nt, Artificial Sequence
  Description of Artificial Sequence: Synthetic oligonucleotide
  Sense strand starting at position 3189 of SEQ ID NO: 2975
cgguuuguucucuacauca

SEQ ID NO: 231283 - RNA, 19 nt, Artificial Sequence
  Description of Artificial Sequence: Synthetic oligonucleotide
  Antisense strand to SEQ ID NO: 231282
ugauguagagaacaaaccg

SEQ ID NO: 231284 - RNA, 19 nt, Artificial Sequence
  Description of Artificial Sequence: Synthetic oligonucleotide
  Sense strand starting at position 3191 of SEQ ID NO: 2975
guuuguucucuacaucaau

SEQ ID NO: 231285 - RNA, 19 nt, Artificial Sequence
  Description of Artificial Sequence: Synthetic oligonucleotide
  Antisense strand to SEQ ID NO: 231284
auugauguagagaacaaac

SEQ ID NO: 231286 - RNA, 19 nt, Artificial Sequence
  Description of Artificial Sequence: Synthetic oligonucleotide
  Sense strand starting at position 3237 of SEQ ID NO: 2975
ggcuaugaccacuguaucu

SEQ ID NO: 231287 - RNA, 19 nt, Artificial Sequence
  Description of Artificial Sequence: Synthetic oligonucleotide
  Antisense strand to SEQ ID NO: 231286
agauacaguggucauagcc

SEQ ID NO: 231288 - RNA, 19 nt, Artificial Sequence
  Description of Artificial Sequence: Synthetic oligonucleotide
  Sense strand starting at position 3287 of SEQ ID NO: 2975
ggguccauguucuuaugaa

SEQ ID NO: 231289 - RNA, 19 nt, Artificial Sequence
  Description of Artificial Sequence: Synthetic oligonucleotide
  Antisense strand to SEQ ID NO: 231288
uucauaagaacauggaccc

SEQ ID NO: 231290 - RNA, 19 nt, Artificial Sequence
  Description of Artificial Sequence: Synthetic oligonucleotide
  Sense strand starting at position 3295 of SEQ ID NO: 2975
guucuuaugaaauguggag

SEQ ID NO: 231291 - RNA, 19 nt, Artificial Sequence
  Description of Artificial Sequence: Synthetic oligonucleotide
  Antisense strand to SEQ ID NO: 231290
cuccacauuucauaagaac

SEQ ID NO: 231292 - RNA, 19 nt, Artificial Sequence
  Description of Artificial Sequence: Synthetic oligonucleotide
  Sense strand starting at position 3370 of SEQ ID NO: 2975
gucucuucuugccugauuu

SEQ ID NO: 231293 - RNA, 19 nt, Artificial Sequence
  Description of Artificial Sequence: Synthetic oligonucleotide
  Antisense strand to SEQ ID NO: 231292
aaaucaggcaagaagagac

SEQ ID NO: 231294 - RNA, 19 nt, Artificial Sequence
  Description of Artificial Sequence: Synthetic oligonucleotide
  Sense strand starting at position 3422 of SEQ ID NO: 2975
aguugaaauccuugcauaa

SEQ ID NO: 231295 - RNA, 19 nt, Artificial Sequence
  Description of Artificial Sequence: Synthetic oligonucleotide
  Antisense strand to SEQ ID NO: 231294
uuaugcaaggauuucaacu

SEQ ID NO: 231296 - RNA, 19 nt, Artificial Sequence
  Description of Artificial Sequence: Synthetic oligonucleotide
  Sense strand starting at position 3505 of SEQ ID NO: 2975
gaccaaaggucaguaguaa

SEQ ID NO: 231297 - RNA, 19 nt, Artificial Sequence
  Description of Artificial Sequence: Synthetic oligonucleotide
  Antisense strand to SEQ ID NO: 231296
uuacuacugaccuuugguc

SEQ ID NO: 231298 - RNA, 19 nt, Artificial Sequence
  Description of Artificial Sequence: Synthetic oligonucleotide
  Sense strand starting at position 3506 of SEQ ID NO: 2975
accaaaggucaguaguaau

SEQ ID NO: 231299 - RNA, 19 nt, Artificial Sequence
  Description of Artificial Sequence: Synthetic oligonucleotide
  Antisense strand to SEQ ID NO: 231298
auuacuacugaccuuuggu

SEQ ID NO: 231300 - RNA, 19 nt, Artificial Sequence
  Description of Artificial Sequence: Synthetic oligonucleotide
  Sense strand starting at position 3517 of SEQ ID NO: 2975
guaguaauaagauggcuau

SEQ ID NO: 231301 - RNA, 19 nt, Artificial Sequence
  Description of Artificial Sequence: Synthetic oligonucleotide
  Antisense strand to SEQ ID NO: 231300
auagccaucuuauuacuac

SEQ ID NO: 231302 - RNA, 19 nt, Artificial Sequence
  Description of Artificial Sequence: Synthetic oligonucleotide
  Sense strand starting at position 3518 of SEQ ID NO: 2975
uaguaauaagauggcuauu

SEQ ID NO: 231303 - RNA, 19 nt, Artificial Sequence
  Description of Artificial Sequence: Synthetic oligonucleotide
  Antisense strand to SEQ ID NO: 231302
aauagccaucuuauuacua

SEQ ID NO: 231304 - RNA, 19 nt, Artificial Sequence
  Description of Artificial Sequence: Synthetic oligonucleotide
  Sense strand starting at position 3520 of SEQ ID NO: 2975
guaauaagauggcuauugu

SEQ ID NO: 231305 - RNA, 19 nt, Artificial Sequence
  Description of Artificial Sequence: Synthetic oligonucleotide
  Antisense strand to SEQ ID NO: 231304
acaauagccaucuuauuac

SEQ ID NO: 231306 - RNA, 19 nt, Artificial Sequence
  Description of Artificial Sequence: Synthetic oligonucleotide
  Sense strand starting at position 3521 of SEQ ID NO: 2975
uaauaagauggcuauugua

SEQ ID NO: 231307 - RNA, 19 nt, Artificial Sequence
  Description of Artificial Sequence: Synthetic oligonucleotide
  Antisense strand to SEQ ID NO: 231306
uacaauagccaucuuauua

SEQ ID NO: 231308 - RNA, 19 nt, Artificial Sequence
  Description of Artificial Sequence: Synthetic oligonucleotide
  Sense strand starting at position 3632 of SEQ ID NO: 2975
ggacuaccuuauguuaaag

SEQ ID NO: 231309 - RNA, 19 nt, Artificial Sequence
  Description of Artificial Sequence: Synthetic oligonucleotide
  Antisense strand to SEQ ID NO: 231308
cuuuaacauaagguagucc

SEQ ID NO: 231310 - RNA, 19 nt, Artificial Sequence
  Description of Artificial Sequence: Synthetic oligonucleotide
  Sense strand starting at position 3699 of SEQ ID NO: 2975
aauguuaggucuucuauag

SEQ ID NO: 231311 - RNA, 19 nt, Artificial Sequence
  Description of Artificial Sequence: Synthetic oligonucleotide
  Antisense strand to SEQ ID NO: 231310
cuauagaagaccuaacauu

SEQ ID NO: 231312 - RNA, 19 nt, Artificial Sequence
  Description of Artificial Sequence: Synthetic oligonucleotide
  Sense strand starting at position 3706 of SEQ ID NO: 2975
ggucuucuauaggcuuaca

SEQ ID NO: 231313 - RNA, 19 nt, Artificial Sequence
  Description of Artificial Sequence: Synthetic oligonucleotide
  Antisense strand to SEQ ID NO: 231312
uguaagccuauagaagacc

SEQ ID NO: 231314 - RNA, 19 nt, Artificial Sequence
  Description of Artificial Sequence: Synthetic oligonucleotide
  Sense strand starting at position 3752 of SEQ ID NO: 2975
uguagaguccuguggaaac

SEQ ID NO: 231315 - RNA, 19 nt, Artificial Sequence
  Description of Artificial Sequence: Synthetic oligonucleotide
  Antisense strand to SEQ ID NO: 231314
guuuccacaggacucuaca

SEQ ID NO: 231316 - RNA, 19 nt, Artificial Sequence
  Description of Artificial Sequence: Synthetic oligonucleotide
  Sense strand starting at position 3811 of SEQ ID NO: 2975
uggcaauguccuggauucu

SEQ ID NO: 231317 - RNA, 19 nt, Artificial Sequence
  Description of Artificial Sequence: Synthetic oligonucleotide
  Antisense strand to SEQ ID NO: 231316
agaauccaggacauugcca

SEQ ID NO: 231318 - RNA, 19 nt, Artificial Sequence
  Description of Artificial Sequence: Synthetic oligonucleotide
  Sense strand starting at position 395 of SEQ ID NO: 2978
aagggaggcagcugugaua

SEQ ID NO: 231319 - RNA, 19 nt, Artificial Sequence
  Description of Artificial Sequence: Synthetic oligonucleotide
  Antisense strand to SEQ ID NO: 231318
uaucacagcugccucccuu

SEQ ID NO: 231320 - RNA, 19 nt, Artificial Sequence
  Description of Artificial Sequence: Synthetic oligonucleotide
  Sense strand starting at position 532 of SEQ ID NO: 2978
gcauucuucugucugcaau

SEQ ID NO: 231321 - RNA, 19 nt, Artificial Sequence
  Description of Artificial Sequence: Synthetic oligonucleotide
  Antisense strand to SEQ ID NO: 231320
auugcagacagaagaaugc

SEQ ID NO: 231322 - RNA, 19 nt, Artificial Sequence
  Description of Artificial Sequence: Synthetic oligonucleotide
  Sense strand starting at position 832 of SEQ ID NO: 2978
ucaggauagaagcgauuau

SEQ ID NO: 231323 - RNA, 19 nt, Artificial Sequence
  Description of Artificial Sequence: Synthetic oligonucleotide
  Antisense strand to SEQ ID NO: 231322
auaaucgcuucuauccuga

SEQ ID NO: 231324 - RNA, 19 nt, Artificial Sequence
  Description of Artificial Sequence: Synthetic oligonucleotide
  Sense strand starting at position 904 of SEQ ID NO: 2978
cagugaugcuccgacagag

SEQ ID NO: 231325 - RNA, 19 nt, Artificial Sequence
  Description of Artificial Sequence: Synthetic oligonucleotide
  Antisense strand to SEQ ID NO: 231324
cucugucggagcaucacug

SEQ ID NO: 231326 - RNA, 19 nt, Artificial Sequence
  Description of Artificial Sequence: Synthetic oligonucleotide
  Sense strand starting at position 945 of SEQ ID NO: 2978
cccagcgcuccugaggaaa

SEQ ID NO: 231327 - RNA, 19 nt, Artificial Sequence
  Description of Artificial Sequence: Synthetic oligonucleotide
  Antisense strand to SEQ ID NO: 231326
uuuccucaggagcgcuggg

SEQ ID NO: 231328 - RNA, 19 nt, Artificial Sequence
  Description of Artificial Sequence: Synthetic oligonucleotide
  Sense strand starting at position 995 SEQ ID NO: 2978
agcccuuguccuggagaag

SEQ ID NO: 231329 - RNA, 19 nt, Artificial Sequence
  Description of Artificial Sequence: Synthetic oligonucleotide
  Antisense strand to SEQ ID NO: 231328
cuucuccaggacaagggcu

SEQ ID NO: 231330 - RNA, 19 nt, Artificial Sequence
  Description of Artificial Sequence: Synthetic oligonucleotide
  Sense strand starting at position 996 SEQ ID NO: 2978
gcccuuguccuggagaagu

SEQ ID NO: 231331 - RNA, 19 nt, Artificial Sequence
  Description of Artificial Sequence: Synthetic oligonucleotide
  Antisense strand to SEQ ID NO: 231330
acuucuccaggacaagggc

SEQ ID NO: 231332 - RNA, 19 nt, Artificial Sequence
  Description of Artificial Sequence: Synthetic oligonucleotide
  Sense strand starting at position 998 SEQ ID NO: 2978
ccuuguccuggagaaguga

SEQ ID NO: 231333 - RNA, 19 nt, Artificial Sequence
  Description of Artificial Sequence: Synthetic oligonucleotide
  Antisense strand to SEQ ID NO: 231332
ucacuucuccaggacaagg

SEQ ID NO: 231334 - RNA, 19 nt, Artificial Sequence
  Description of Artificial Sequence: Synthetic oligonucleotide
  Sense strand starting at position 1006 SEQ ID NO: 2978
uggagaagugacuggcaaa

SEQ ID NO: 231335 - RNA, 19 nt, Artificial Sequence
  Description of Artificial Sequence: Synthetic oligonucleotide
  Antisense strand to SEQ ID NO: 231334
uuugccagucacuucucca

SEQ ID NO: 231336 - RNA, 19 nt, Artificial Sequence
  Description of Artificial Sequence: Synthetic oligonucleotide
  Sense strand starting at position 1041 SEQ ID NO: 2978
acugaaaugugcuccagaa

SEQ ID NO: 231337 - RNA, 19 nt, Artificial Sequence
  Description of Artificial Sequence: Synthetic oligonucleotide
  Antisense strand to SEQ ID NO: 231336
uucuggagcacauuucagu

SEQ ID NO: 231338 - RNA, 19 nt, Artificial Sequence
  Description of Artificial Sequence: Synthetic oligonucleotide
  Sense strand starting at position 1404 SEQ ID NO: 2978
gggagcuguugcccuguga

SEQ ID NO: 231339 - RNA, 19 nt, Artificial Sequence
  Description of Artificial Sequence: Synthetic oligonucleotide
  Antisense strand to SEQ ID NO: 231338
ucacagggcaacagcuccc

SEQ ID NO: 231340 - RNA, 19 nt, Artificial Sequence
  Description of Artificial Sequence: Synthetic oligonucleotide
  Sense strand starting at position 1508 SEQ ID NO: 2978
gcucccagugcucagagaa

SEQ ID NO: 231341 - RNA, 19 nt, Artificial Sequence
  Description of Artificial Sequence: Synthetic oligonucleotide
  Antisense strand to SEQ ID NO: 231340
uucucugagcacugggagc

SEQ ID NO: 231342 - RNA, 19 nt, Artificial Sequence
  Description of Artificial Sequence: Synthetic oligonucleotide
  Sense strand starting at position 1570 SEQ ID NO: 2978
cagaaagggucagagacau

SEQ ID NO: 231343 - RNA, 19 nt, Artificial Sequence
  Description of Artificial Sequence: Synthetic oligonucleotide
  Antisense strand to SEQ ID NO: 231342
augucucugacccuuucug

SEQ ID NO: 231344 - RNA, 19 nt, Artificial Sequence
  Description of Artificial Sequence: Synthetic oligonucleotide
  Sense strand starting at position 1644 SEQ ID NO: 2978
guuugugcuugcuccaguu

SEQ ID NO: 231345 - RNA, 19 nt, Artificial Sequence
  Description of Artificial Sequence: Synthetic oligonucleotide
  Antisense strand to SEQ ID NO: 231344
aacuggagcaagcacaaac

SEQ ID NO: 231346 - RNA, 19 nt, Artificial Sequence
  Description of Artificial Sequence: Synthetic oligonucleotide
  Sense strand starting at position 2230 SEQ ID NO: 2978
agggauguuguugguagaa

SEQ ID NO: 231347 - RNA, 19 nt, Artificial Sequence
  Description of Artificial Sequence: Synthetic oligonucleotide
  Antisense strand to SEQ ID NO: 231346
uucuaccaacaacaucccu

SEQ ID NO: 231348 - RNA, 19 nt, Artificial Sequence
  Description of Artificial Sequence: Synthetic oligonucleotide
  Sense strand starting at position 2276 SEQ ID NO: 2978
ggcucaaucugcuucuguu

SEQ ID NO: 231349 - RNA, 19 nt, Artificial Sequence
  Description of Artificial Sequence: Synthetic oligonucleotide
  Antisense strand to SEQ ID NO: 231348
aacagaagcagauugagcc

SEQ ID NO: 231350 - RNA, 19 nt, Artificial Sequence
  Description of Artificial Sequence: Synthetic oligonucleotide
  Sense strand starting at position 2392 SEQ ID NO: 2978
gcccucuggucagaacuuu

SEQ ID NO: 231351 - RNA, 19 nt, Artificial Sequence
  Description of Artificial Sequence: Synthetic oligonucleotide
  Antisense strand to SEQ ID NO: 231350
aaaguucugaccagagggc

SEQ ID NO: 231352 - RNA, 19 nt, Artificial Sequence
  Description of Artificial Sequence: Synthetic oligonucleotide
  Sense strand starting at position 2398 SEQ ID NO: 2978
uggucagaacuuuaccuuu

SEQ ID NO: 231353 - RNA, 19 nt, Artificial Sequence
  Description of Artificial Sequence: Synthetic oligonucleotide
  Antisense strand to SEQ ID NO: 231352
aaagguaaaguucugacca

SEQ ID NO: 231354 - RNA, 19 nt, Artificial Sequence
  Description of Artificial Sequence: Synthetic oligonucleotide
  Sense strand starting at position 2551 SEQ ID NO: 2978
cccagaaauccuugcagag

SEQ ID NO: 231355 - RNA, 19 nt, Artificial Sequence
  Description of Artificial Sequence: Synthetic oligonucleotide
  Antisense strand to SEQ ID NO: 231354
cucugcaaggauuucuggg

SEQ ID NO: 231356 - RNA, 19 nt, Artificial Sequence
  Description of Artificial Sequence: Synthetic oligonucleotide
  Sense strand starting at position 2569 SEQ ID NO: 2978
gcagaaagccuguggccuu

SEQ ID NO: 231357 - RNA, 19 nt, Artificial Sequence
  Description of Artificial Sequence: Synthetic oligonucleotide
  Antisense strand to SEQ ID NO: 231356
aaggccacaggcuuucugc

SEQ ID NO: 231358 - RNA, 19 nt, Artificial Sequence
  Description of Artificial Sequence: Synthetic oligonucleotide
  Sense strand starting at position 2640 SEQ ID NO: 2978
gcccauguguacuuucuca

SEQ ID NO: 231359 - RNA, 19 nt, Artificial Sequence
  Description of Artificial Sequence: Synthetic oligonucleotide
  Antisense strand to SEQ ID NO: 231358
ugagaaaguacacaugggc

SEQ ID NO: 231360 - RNA, 19 nt, Artificial Sequence
  Description of Artificial Sequence: Synthetic oligonucleotide
  Sense strand starting at position 2644 SEQ ID NO: 2978
auguguacuuucucacuga

SEQ ID NO: 231361 - RNA, 19 nt, Artificial Sequence
  Description of Artificial Sequence: Synthetic oligonucleotide
  Antisense strand to SEQ ID NO: 231360
ucagugagaaaguacacau

SEQ ID NO: 231362 - RNA, 19 nt, Artificial Sequence
  Description of Artificial Sequence: Synthetic oligonucleotide
  Sense strand starting at position 2645 SEQ ID NO: 2978
uguguacuuucucacugaa

SEQ ID NO: 231363 - RNA, 19 nt, Artificial Sequence
  Description of Artificial Sequence: Synthetic oligonucleotide
  Antisense strand to SEQ ID NO: 231362
uucagugagaaaguacaca

SEQ ID NO: 231364 - RNA, 19 nt, Artificial Sequence
  Description of Artificial Sequence: Synthetic oligonucleotide
  Sense strand starting at position 2666 SEQ ID NO: 2978
caggcucuugggcggaaau

SEQ ID NO: 231365 - RNA, 19 nt, Artificial Sequence
  Description of Artificial Sequence: Synthetic oligonucleotide
  Antisense strand to SEQ ID NO: 231364
auuuccgcccaagagccug

SEQ ID NO: 231366 - RNA, 19 nt, Artificial Sequence
  Description of Artificial Sequence: Synthetic oligonucleotide
  Sense strand starting at position 2821 SEQ ID NO: 2978
gcccaaagauacuaugaau

SEQ ID NO: 231367 - RNA, 19 nt, Artificial Sequence
  Description of Artificial Sequence: Synthetic oligonucleotide
  Antisense strand to SEQ ID NO: 231366
auucauaguaucuuugggc

SEQ ID NO: 231368 - RNA, 19 nt, Artificial Sequence
  Description of Artificial Sequence: Synthetic oligonucleotide
  Sense strand starting at position 2988 SEQ ID NO: 2978
ucuccucuucccugagaug

SEQ ID NO: 231369 - RNA, 19 nt, Artificial Sequence
  Description of Artificial Sequence: Synthetic oligonucleotide
  Antisense strand to SEQ ID NO: 231368
caucucagggaagaggaga

SEQ ID NO: 231370 - RNA, 19 nt, Artificial Sequence
  Description of Artificial Sequence: Synthetic oligonucleotide
  Sense strand starting at position 3036 SEQ ID NO: 2978
gcugucauuuaccaagauc

SEQ ID NO: 231371 - RNA, 19 nt, Artificial Sequence
  Description of Artificial Sequence: Synthetic oligonucleotide
  Antisense strand to SEQ ID NO: 231370
gaucuugguaaaugacagc

SEQ ID NO: 231372 - RNA, 19 nt, Artificial Sequence
  Description of Artificial Sequence: Synthetic oligonucleotide
  Sense strand starting at position 3077 SEQ ID NO: 2978
gccaauuaugacugagaac

SEQ ID NO: 231373 - RNA, 19 nt, Artificial Sequence
  Description of Artificial Sequence: Synthetic oligonucleotide
  Antisense strand to SEQ ID NO: 231372
guucucagucauaauuggc

SEQ ID NO: 231374 - RNA, 19 nt, Artificial Sequence
  Description of Artificial Sequence: Synthetic oligonucleotide
  Sense strand starting at position 3160 SEQ ID NO: 2978
uccugaacucccuguagca

SEQ ID NO: 231375 - RNA, 19 nt, Artificial Sequence
  Description of Artificial Sequence: Synthetic oligonucleotide
  Antisense strand to SEQ ID NO: 231374
ugcuacagggaguucagga

SEQ ID NO: 231376 - RNA, 19 nt, Artificial Sequence
  Description of Artificial Sequence: Synthetic oligonucleotide
  Sense strand starting at position 3191 SEQ ID NO: 2978
ggagacucuuccuccaaac

SEQ ID NO: 231377 - RNA, 19 nt, Artificial Sequence
  Description of Artificial Sequence: Synthetic oligonucleotide
  Antisense strand to SEQ ID NO: 231376
guuuggaggaagagucucc

SEQ ID NO: 231378 - RNA, 19 nt, Artificial Sequence
  Description of Artificial Sequence: Synthetic oligonucleotide
  Sense strand starting at position 3321 SEQ ID NO: 2978
gugagagcgacucaaccau

SEQ ID NO: 231379 - RNA, 19 nt, Artificial Sequence
  Description of Artificial Sequence: Synthetic oligonucleotide
  Antisense strand to SEQ ID NO: 231378
augguugagucgcucucac

SEQ ID NO: 231380 - RNA, 19 nt, Artificial Sequence
  Description of Artificial Sequence: Synthetic oligonucleotide
  Sense strand starting at position 3509 SEQ ID NO: 2978
ccugcuguccuugguguaa

SEQ ID NO: 231381 - RNA, 19 nt, Artificial Sequence
  Description of Artificial Sequence: Synthetic oligonucleotide
  Antisense strand to SEQ ID NO: 231380
uuacaccaaggacagcagg

SEQ ID NO: 231382 - RNA, 19 nt, Artificial Sequence
  Description of Artificial Sequence: Synthetic oligonucleotide
  Sense strand starting at position 3629 SEQ ID NO: 2978
cgagcauuauguguuccca

SEQ ID NO: 231383 - RNA, 19 nt, Artificial Sequence
  Description of Artificial Sequence: Synthetic oligonucleotide
  Antisense strand to SEQ ID NO: 231382
ugggaacacauaaugcucg

SEQ ID NO: 231384 - RNA, 19 nt, Artificial Sequence
  Description of Artificial Sequence: Synthetic oligonucleotide
  Sense strand starting at position 3631 SEQ ID NO: 2978
agcauuauguguucccaag

SEQ ID NO: 231385 - RNA, 19 nt, Artificial Sequence
  Description of Artificial Sequence: Synthetic oligonucleotide
  Antisense strand to SEQ ID NO: 231384
cuugggaacacauaaugcu

SEQ ID NO: 231386 - RNA, 19 nt, Artificial Sequence
  Description of Artificial Sequence: Synthetic oligonucleotide
  Sense strand starting at position 3633 SEQ ID NO: 2978
cauuauguguucccaaggu

SEQ ID NO: 231387 - RNA, 19 nt, Artificial Sequence
  Description of Artificial Sequence: Synthetic oligonucleotide
  Antisense strand to SEQ ID NO: 231386
accuugggaacacauaaug

SEQ ID NO: 231388 - RNA, 19 nt, Artificial Sequence
  Description of Artificial Sequence: Synthetic oligonucleotide
  Sense strand starting at position 3657 SEQ ID NO: 2978
ggccaugcucugugccaaa

SEQ ID NO: 231389 - RNA, 19 nt, Artificial Sequence
  Description of Artificial Sequence: Synthetic oligonucleotide
  Antisense strand to SEQ ID NO: 231388
uuuggcacagagcauggcc

SEQ ID NO: 231390 - RNA, 19 nt, Artificial Sequence
  Description of Artificial Sequence: Synthetic oligonucleotide
  Sense strand starting at position 3753 SEQ ID NO: 2978
gcuuguuccuguguuaccu

SEQ ID NO: 231391 - RNA, 19 nt, Artificial Sequence
  Description of Artificial Sequence: Synthetic oligonucleotide
  Antisense strand to SEQ ID NO: 231390
agguaacacaggaacaagc

SEQ ID NO: 231392 - RNA, 19 nt, Artificial Sequence
  Description of Artificial Sequence: Synthetic oligonucleotide
  Sense strand starting at position 3757 SEQ ID NO: 2978
guuccuguguuaccugcaa

SEQ ID NO: 231393 - RNA, 19 nt, Artificial Sequence
  Description of Artificial Sequence: Synthetic oligonucleotide
  Antisense strand to SEQ ID NO: 231392
uugcagguaacacaggaac

SEQ ID NO: 231394 - RNA, 19 nt, Artificial Sequence
  Description of Artificial Sequence: Synthetic oligonucleotide
  Sense strand starting at position 3761 SEQ ID NO: 2978
cuguguuaccugcaauaag

SEQ ID NO: 231395 - RNA, 19 nt, Artificial Sequence
  Description of Artificial Sequence: Synthetic oligonucleotide
  Antisense strand to SEQ ID NO: 231394
cuuauugcagguaacacag

SEQ ID NO: 231396 - RNA, 19 nt, Artificial Sequence
  Description of Artificial Sequence: Synthetic oligonucleotide
  Sense strand starting at position 3844 SEQ ID NO: 2978
ggauucugaucccagcaau

SEQ ID NO: 231397 - RNA, 19 nt, Artificial Sequence
  Description of Artificial Sequence: Synthetic oligonucleotide
  Antisense strand to SEQ ID NO: 231396
auugcugggaucagaaucc

SEQ ID NO: 231398 - RNA, 19 nt, Artificial Sequence
  Description of Artificial Sequence: Synthetic oligonucleotide
  Sense strand starting at position 16 SEQ ID NO: 2979
acagaaaguucccuuuagu

SEQ ID NO: 231399 - RNA, 19 nt, Artificial Sequence
  Description of Artificial Sequence: Synthetic oligonucleotide
  Antisense strand to SEQ ID NO: 231398
acuaaagggaacuuucugu

SEQ ID NO: 231400 - RNA, 19 nt, Artificial Sequence
  Description of Artificial Sequence: Synthetic oligonucleotide
  Sense strand starting at position 71 SEQ ID NO: 2979
gcucauggccuccaaacaa

SEQ ID NO: 231401 - RNA, 19 nt, Artificial Sequence
  Description of Artificial Sequence: Synthetic oligonucleotide
  Antisense strand to SEQ ID NO: 231400
uuguuuggaggccaugagc

SEQ ID NO: 231402 - RNA, 19 nt, Artificial Sequence
  Description of Artificial Sequence: Synthetic oligonucleotide
  Sense strand starting at position 119 SEQ ID NO: 2979
ccauuaugaguuuggguaa

SEQ ID NO: 231403 - RNA, 19 nt, Artificial Sequence
  Description of Artificial Sequence: Synthetic oligonucleotide
  Antisense strand to SEQ ID NO: 231402
uuacccaaacucauaaugg

SEQ ID NO: 231404 - RNA, 19 nt, Artificial Sequence
  Description of Artificial Sequence: Synthetic oligonucleotide
  Sense strand starting at position 176 SEQ ID NO: 2979
guuggaucacuaugcacua

SEQ ID NO: 231405 - RNA, 19 nt, Artificial Sequence
  Description of Artificial Sequence: Synthetic oligonucleotide
  Antisense strand to SEQ ID NO: 231404
uagugcauagugauccaac

SEQ ID NO: 231406 - RNA, 19 nt, Artificial Sequence
  Description of Artificial Sequence: Synthetic oligonucleotide
  Sense strand starting at position 209 SEQ ID NO: 2979
uucuuauaggacuaagugu

SEQ ID NO: 231407 - RNA, 19 nt, Artificial Sequence
  Description of Artificial Sequence: Synthetic oligonucleotide
  Antisense strand to SEQ ID NO: 231406
acacuuaguccuauaagaa

SEQ ID NO: 231408 - RNA, 19 nt, Artificial Sequence
  Description of Artificial Sequence: Synthetic oligonucleotide
  Sense strand starting at position 215 SEQ ID NO: 2979
uaggacuaagugugaacaa

SEQ ID NO: 231409 - RNA, 19 nt, Artificial Sequence
  Description of Artificial Sequence: Synthetic oligonucleotide
  Antisense strand to SEQ ID NO: 231408
uuguucacacuuaguccua

SEQ ID NO: 231410 - RNA, 19 nt, Artificial Sequence
  Description of Artificial Sequence: Synthetic oligonucleotide
  Sense strand starting at position 407 SEQ ID NO: 2979
aucugugaauaagagaaau

SEQ ID NO: 231411 - RNA, 19 nt, Artificial Sequence
  Description of Artificial Sequence: Synthetic oligonucleotide
  Antisense strand to SEQ ID NO: 231410
auuucucuuauucacagau

SEQ ID NO: 231412 - RNA, 19 nt, Artificial Sequence
  Description of Artificial Sequence: Synthetic oligonucleotide
  Sense strand starting at position 502 SEQ ID NO: 2979
cugcccaggucuuccuaaa

SEQ ID NO: 231413 - RNA, 19 nt, Artificial Sequence
  Description of Artificial Sequence: Synthetic oligonucleotide
  Antisense strand to SEQ ID NO: 231412
uuuaggaagaccugggcag

SEQ ID NO: 231414 - RNA, 19 nt, Artificial Sequence
  Description of Artificial Sequence: Synthetic oligonucleotide
  Sense strand starting at position 901 SEQ ID NO: 2979
cuaguaagauuguuaacaa

SEQ ID NO: 231415 - RNA, 19 nt, Artificial Sequence
  Description of Artificial Sequence: Synthetic oligonucleotide
  Antisense strand to SEQ ID NO: 231414
uuguuaacaaucuuacuag

SEQ ID NO: 231416 - RNA, 19 nt, Artificial Sequence
  Description of Artificial Sequence: Synthetic oligonucleotide
  Sense strand starting at position 927 SEQ ID NO: 2979
guacauucuugagucagau

SEQ ID NO: 231417 - RNA, 19 nt, Artificial Sequence
  Description of Artificial Sequence: Synthetic oligonucleotide
  Antisense strand to SEQ ID NO: 231416
aucugacucaagaauguac

SEQ ID NO: 231418 - RNA, 19 nt, Artificial Sequence
  Description of Artificial Sequence: Synthetic oligonucleotide
  Sense strand starting at position 993 SEQ ID NO: 2979
uggcucuucuuugugauuu

SEQ ID NO: 231419 - RNA, 19 nt, Artificial Sequence
  Description of Artificial Sequence: Synthetic oligonucleotide
  Antisense strand to SEQ ID NO: 231418
aaaucacaaagaagagcca

SEQ ID NO: 231420 - RNA, 19 nt, Artificial Sequence
  Description of Artificial Sequence: Synthetic oligonucleotide
  Sense strand starting at position 1055 SEQ ID NO: 2979
uuucgaaauccacagcuuu

SEQ ID NO: 231421 - RNA, 19 nt, Artificial Sequence
  Description of Artificial Sequence: Synthetic oligonucleotide
  Antisense strand to SEQ ID NO: 231420
aaagcuguggauuucgaaa

SEQ ID NO: 231422 - RNA, 19 nt, Artificial Sequence
  Description of Artificial Sequence: Synthetic oligonucleotide
  Sense strand starting at position 1222 SEQ ID NO: 2979
uuaccagacgcugaaguau

SEQ ID NO: 231423 - RNA, 19 nt, Artificial Sequence
  Description of Artificial Sequence: Synthetic oligonucleotide
  Antisense strand to SEQ ID NO: 231422
auacuucagcgucugguaa

SEQ ID NO: 231424 - RNA, 19 nt, Artificial Sequence
  Description of Artificial Sequence: Synthetic oligonucleotide
  Sense strand starting at position 1230 SEQ ID NO: 2979
cgcugaaguaugcagaauu

SEQ ID NO: 231425 - RNA, 19 nt, Artificial Sequence
  Description of Artificial Sequence: Synthetic oligonucleotide
  Antisense strand to SEQ ID NO: 231424
aauucugcauacuucagcg

SEQ ID NO: 231426 - RNA, 19 nt, Artificial Sequence
  Description of Artificial Sequence: Synthetic oligonucleotide
  Sense strand starting at position 1377 SEQ ID NO: 2979
ggccaaaucugagcccgaa

SEQ ID NO: 231427 - RNA, 19 nt, Artificial Sequence
  Description of Artificial Sequence: Synthetic oligonucleotide
  Antisense strand to SEQ ID NO: 231426
uucgggcucagauuuggcc

SEQ ID NO: 231428 - RNA, 19 nt, Artificial Sequence
  Description of Artificial Sequence: Synthetic oligonucleotide
  Sense strand starting at position 1432 SEQ ID NO: 2979
ucacaauccugagaacaga

SEQ ID NO: 231429 - RNA, 19 nt, Artificial Sequence
  Description of Artificial Sequence: Synthetic oligonucleotide
  Antisense strand to SEQ ID NO: 231428
ucuguucucaggauuguga

SEQ ID NO: 231430 - RNA, 19 nt, Artificial Sequence
  Description of Artificial Sequence: Synthetic oligonucleotide
  Sense strand starting at position 1700 SEQ ID NO: 2979
gggcucagggaguguucaa

SEQ ID NO: 231431 - RNA, 19 nt, Artificial Sequence
  Description of Artificial Sequence: Synthetic oligonucleotide
  Antisense strand to SEQ ID NO: 231430
uugaacacucccugagccc

SEQ ID NO: 231432 - RNA, 19 nt, Artificial Sequence
  Description of Artificial Sequence: Synthetic oligonucleotide
  Sense strand starting at position 2206 SEQ ID NO: 2979
acggaaacgcagugaugaa

SEQ ID NO: 231433 - RNA, 19 nt, Artificial Sequence
  Description of Artificial Sequence: Synthetic oligonucleotide
  Antisense strand to SEQ ID NO: 231432
uucaucacugcguuuccgu

SEQ ID NO: 231434 - RNA, 19 nt, Artificial Sequence
  Description of Artificial Sequence: Synthetic oligonucleotide
  Sense strand starting at position 2588 SEQ ID NO: 2979
uaguuuaagguaugguaca

SEQ ID NO: 231435 - RNA, 19 nt, Artificial Sequence
  Description of Artificial Sequence: Synthetic oligonucleotide
  Antisense strand to SEQ ID NO: 231434
uguaccauaccuuaaacua

SEQ ID NO: 231436 - RNA, 19 nt, Artificial Sequence
  Description of Artificial Sequence: Synthetic oligonucleotide
  Sense strand starting at position 2645 SEQ ID NO: 2979
acaggauauuaucuuguau

SEQ ID NO: 231437 - RNA, 19 nt, Artificial Sequence
  Description of Artificial Sequence: Synthetic oligonucleotide
  Antisense strand to SEQ ID NO: 231436
auacaagauaauauccugu

SEQ ID NO: 231438 - RNA, 19 nt, Artificial Sequence
  Description of Artificial Sequence: Synthetic oligonucleotide
  Sense strand starting at position 3044 SEQ ID NO: 2979
guauccauauuugcucauu

SEQ ID NO: 231439 - RNA, 19 nt, Artificial Sequence
  Description of Artificial Sequence: Synthetic oligonucleotide
  Antisense strand to SEQ ID NO: 231438
aaugagcaaauauggauac

SEQ ID NO: 231440 - RNA, 19 nt, Artificial Sequence
  Description of Artificial Sequence: Synthetic oligonucleotide
  Sense strand starting at position 3094 SEQ ID NO: 2979
cugugagcuuauucuaaca

SEQ ID NO: 231441 - RNA, 19 nt, Artificial Sequence
  Description of Artificial Sequence: Synthetic oligonucleotide
  Antisense strand to SEQ ID NO: 231440
uguuagaauaagcucacag

SEQ ID NO: 231442 - RNA, 19 nt, Artificial Sequence
  Description of Artificial Sequence: Synthetic oligonucleotide
  Sense strand starting at position 3110 SEQ ID NO: 2979
acaucuuugucaucucagu

SEQ ID NO: 231443 - RNA, 19 nt, Artificial Sequence
  Description of Artificial Sequence: Synthetic oligonucleotide
  Antisense strand to SEQ ID NO: 231442
acugagaugacaaagaugu

SEQ ID NO: 231444 - RNA, 19 nt, Artificial Sequence
  Description of Artificial Sequence: Synthetic oligonucleotide
  Sense strand starting at position 3126 SEQ ID NO: 2979
agugcuggucucuauugaa

SEQ ID NO: 231445 - RNA, 19 nt, Artificial Sequence
  Description of Artificial Sequence: Synthetic oligonucleotide
  Antisense strand to SEQ ID NO: 231444
uucaauagagaccagcacu

SEQ ID NO: 231446 - RNA, 19 nt, Artificial Sequence
  Description of Artificial Sequence: Synthetic oligonucleotide
  Sense strand starting at position 3136 SEQ ID NO: 2979
ucuauugaagucugaacau

SEQ ID NO: 231447 - RNA, 19 nt, Artificial Sequence
  Description of Artificial Sequence: Synthetic oligonucleotide
  Antisense strand to SEQ ID NO: 231446
auguucagacuucaauaga

SEQ ID NO: 231448 - RNA, 19 nt, Artificial Sequence
  Description of Artificial Sequence: Synthetic oligonucleotide
  Sense strand starting at position 3222 SEQ ID NO: 2979
ccaaucuaacaggguuaau

SEQ ID NO: 231449 - RNA, 19 nt, Artificial Sequence
  Description of Artificial Sequence: Synthetic oligonucleotide
  Antisense strand to SEQ ID NO: 231448
auuaacccuguuagauugg

SEQ ID NO: 231450 - RNA, 19 nt, Artificial Sequence
  Description of Artificial Sequence: Synthetic oligonucleotide
  Sense strand starting at position 3242 SEQ ID NO: 2979
agguuaccaccucauuacu

SEQ ID NO: 231451 - RNA, 19 nt, Artificial Sequence
  Description of Artificial Sequence: Synthetic oligonucleotide
  Antisense strand to SEQ ID NO: 231450
aguaaugaggugguaaccu

SEQ ID NO: 231452 - RNA, 19 nt, Artificial Sequence
  Description of Artificial Sequence: Synthetic oligonucleotide
  Sense strand starting at position 3255 SEQ ID NO: 2979
auuacugccagauggagau

SEQ ID NO: 231453 - RNA, 19 nt, Artificial Sequence
  Description of Artificial Sequence: Synthetic oligonucleotide
  Antisense strand to SEQ ID NO: 231452
aucuccaucuggcaguaau

SEQ ID NO: 231454 - RNA, 19 nt, Artificial Sequence
  Description of Artificial Sequence: Synthetic oligonucleotide
  Sense strand starting at position 3315 SEQ ID NO: 2979
gggccaaaguuccucauua

SEQ ID NO: 231455 - RNA, 19 nt, Artificial Sequence
  Description of Artificial Sequence: Synthetic oligonucleotide
  Antisense strand to SEQ ID NO: 231454
uaaugaggaacuuuggccc

SEQ ID NO: 231456 - RNA, 19 nt, Artificial Sequence
  Description of Artificial Sequence: Synthetic oligonucleotide
  Sense strand starting at position 3316 SEQ ID NO: 2979
ggccaaaguuccucauuac

SEQ ID NO: 231457 - RNA, 19 nt, Artificial Sequence
  Description of Artificial Sequence: Synthetic oligonucleotide
  Antisense strand to SEQ ID NO: 231456
guaaugaggaacuuuggcc

SEQ ID NO: 231458 - RNA, 19 nt, Artificial Sequence
  Description of Artificial Sequence: Synthetic oligonucleotide
  Sense strand starting at position 3335 SEQ ID NO: 2979
ugcuguguagaccaugauu

SEQ ID NO: 231459 - RNA, 19 nt, Artificial Sequence
  Description of Artificial Sequence: Synthetic oligonucleotide
  Antisense strand to SEQ ID NO: 231458
aaucauggucuacacagca

SEQ ID NO: 231460 - RNA, 19 nt, Artificial Sequence
  Description of Artificial Sequence: Synthetic oligonucleotide
  Sense strand starting at position 3344 SEQ ID NO: 2979
gaccaugauuuagagauuc

SEQ ID NO: 231461 - RNA, 19 nt, Artificial Sequence
  Description of Artificial Sequence: Synthetic oligonucleotide
  Antisense strand to SEQ ID NO: 231460
gaaucucuaaaucaugguc

SEQ ID NO: 231462 - RNA, 19 nt, Artificial Sequence
  Description of Artificial Sequence: Synthetic oligonucleotide
  Sense strand starting at position 3354 SEQ ID NO: 2979
uagagauucuagucaggcu

SEQ ID NO: 231463 - RNA, 19 nt, Artificial Sequence
  Description of Artificial Sequence: Synthetic oligonucleotide
  Antisense strand to SEQ ID NO: 231462
agccugacuagaaucucua

SEQ ID NO: 231464 - RNA, 19 nt, Artificial Sequence
  Description of Artificial Sequence: Synthetic oligonucleotide
  Sense strand starting at position 3355 SEQ ID NO: 2979
agagauucuagucaggcua

SEQ ID NO: 231465 - RNA, 19 nt, Artificial Sequence
  Description of Artificial Sequence: Synthetic oligonucleotide
  Antisense strand to SEQ ID NO: 231464
uagccugacuagaaucucu

SEQ ID NO: 231466 - RNA, 19 nt, Artificial Sequence
  Description of Artificial Sequence: Synthetic oligonucleotide
  Sense strand starting at position 3407 SEQ ID NO: 2979
augguauaaucuucucgag

SEQ ID NO: 231467 - RNA, 19 nt, Artificial Sequence
  Description of Artificial Sequence: Synthetic oligonucleotide
  Antisense strand to SEQ ID NO: 231466
cucgagaagauuauaccau

SEQ ID NO: 231468 - RNA, 19 nt, Artificial Sequence
  Description of Artificial Sequence: Synthetic oligonucleotide
  Sense strand starting at position 3409 SEQ ID NO: 2979
gguauaaucuucucgagaa

SEQ ID NO: 231469 - RNA, 19 nt, Artificial Sequence
  Description of Artificial Sequence: Synthetic oligonucleotide
  Antisense strand to SEQ ID NO: 231468
uucucgagaagauuauacc

SEQ ID NO: 231470 - RNA, 19 nt, Artificial Sequence
  Description of Artificial Sequence: Synthetic oligonucleotide
  Sense strand starting at position 3708 SEQ ID NO: 2979
cugagcauuugucucuuua

SEQ ID NO: 231471 - RNA, 19 nt, Artificial Sequence
  Description of Artificial Sequence: Synthetic oligonucleotide
  Antisense strand to SEQ ID NO: 231470
uaaagagacaaaugcucag

SEQ ID NO: 231472 - RNA, 19 nt, Artificial Sequence
  Description of Artificial Sequence: Synthetic oligonucleotide
  Sense strand starting at position 3712 SEQ ID NO: 2979
gcauuugucucuuuacuug

SEQ ID NO: 231473 - RNA, 19 nt, Artificial Sequence
  Description of Artificial Sequence: Synthetic oligonucleotide
  Antisense strand to SEQ ID NO: 231472
caaguaaagagacaaaugc

SEQ ID NO: 231474 - RNA, 19 nt, Artificial Sequence
  Description of Artificial Sequence: Synthetic oligonucleotide
  Sense strand starting at position 3726 SEQ ID NO: 2979
acuugauguucccuggcaa

SEQ ID NO: 231475 - RNA, 19 nt, Artificial Sequence
  Description of Artificial Sequence: Synthetic oligonucleotide
  Antisense strand to SEQ ID NO: 231474
uugccagggaacaucaagu

SEQ ID NO: 231476 - RNA, 19 nt, Artificial Sequence
  Description of Artificial Sequence: Synthetic oligonucleotide
  Sense strand starting at position 3774 SEQ ID NO: 2979
uguuaaggauuugaaagau

SEQ ID NO: 231477 - RNA, 19 nt, Artificial Sequence
  Description of Artificial Sequence: Synthetic oligonucleotide
  Antisense strand to SEQ ID NO: 231476
aucuuucaaauccuuaaca

SEQ ID NO: 231478 - RNA, 19 nt, Artificial Sequence
  Description of Artificial Sequence: Synthetic oligonucleotide
  Sense strand starting at position 45 SEQ ID NO: 2981
uugggaauguuuccaccau

SEQ ID NO: 231479 - RNA, 19 nt, Artificial Sequence
  Description of Artificial Sequence: Synthetic oligonucleotide
  Antisense strand to SEQ ID NO: 231478
augguggaaacauucccaa

SEQ ID NO: 231480 - RNA, 19 nt, Artificial Sequence
  Description of Artificial Sequence: Synthetic oligonucleotide
  Sense strand starting at position 111 SEQ ID NO: 2981
ucacuaagccuauaugagu

SEQ ID NO: 231481 - RNA, 19 nt, Artificial Sequence
  Description of Artificial Sequence: Synthetic oligonucleotide
  Antisense strand to SEQ ID NO: 231480
acucauauaggcuuaguga

SEQ ID NO: 231482 - RNA, 19 nt, Artificial Sequence
  Description of Artificial Sequence: Synthetic oligonucleotide
  Sense strand starting at position 554 SEQ ID NO: 2981
ucaagugauucggccaaag

SEQ ID NO: 231483 - RNA, 19 nt, Artificial Sequence
  Description of Artificial Sequence: Synthetic oligonucleotide
  Antisense strand to SEQ ID NO: 231482
cuuuggccgaaucacuuga

SEQ ID NO: 231484 - RNA, 19 nt, Artificial Sequence
  Description of Artificial Sequence: Synthetic oligonucleotide
  Sense strand starting at position 556 SEQ ID NO: 2981
aagugauucggccaaagua

SEQ ID NO: 231485 - RNA, 19 nt, Artificial Sequence
  Description of Artificial Sequence: Synthetic oligonucleotide
  Antisense strand to SEQ ID NO: 231484
uacuuuggccgaaucacuu

SEQ ID NO: 231486 - RNA, 19 nt, Artificial Sequence
  Description of Artificial Sequence: Synthetic oligonucleotide
  Sense strand starting at position 644 SEQ ID NO: 2981
auaguaaauuucuagggaa

SEQ ID NO: 231487 - RNA, 19 nt, Artificial Sequence
  Description of Artificial Sequence: Synthetic oligonucleotide
  Antisense strand to SEQ ID NO: 231486
uucccuagaaauuuacuau

SEQ ID NO: 231488 - RNA, 19 nt, Artificial Sequence
  Description of Artificial Sequence: Synthetic oligonucleotide
  Sense strand starting at position 711 SEQ ID NO: 2981
aaggguuacuuccuuaagu

SEQ ID NO: 231489 - RNA, 19 nt, Artificial Sequence
  Description of Artificial Sequence: Synthetic oligonucleotide
  Antisense strand to SEQ ID NO: 231488
acuuaaggaaguaacccuu

SEQ ID NO: 231490 - RNA, 19 nt, Artificial Sequence
  Description of Artificial Sequence: Synthetic oligonucleotide
  Sense strand starting at position 712 SEQ ID NO: 2981
aggguuacuuccuuaagug

SEQ ID NO: 231491 - RNA, 19 nt, Artificial Sequence
  Description of Artificial Sequence: Synthetic oligonucleotide
  Antisense strand to SEQ ID NO: 231490
cacuuaaggaaguaacccu

SEQ ID NO: 231492 - RNA, 19 nt, Artificial Sequence
  Description of Artificial Sequence: Synthetic oligonucleotide
  Sense strand starting at position 713 SEQ ID NO: 2981
ggguuacuuccuuaagugu

SEQ ID NO: 231493 - RNA, 19 nt, Artificial Sequence
  Description of Artificial Sequence: Synthetic oligonucleotide
  Antisense strand to SEQ ID NO: 231492
acacuuaaggaaguaaccc

SEQ ID NO: 231494 - RNA, 19 nt, Artificial Sequence
  Description of Artificial Sequence: Synthetic oligonucleotide
  Sense strand starting at position 1193 SEQ ID NO: 2981
cgguucuggacagaaucua

SEQ ID NO: 231495 - RNA, 19 nt, Artificial Sequence
  Description of Artificial Sequence: Synthetic oligonucleotide
  Antisense strand to SEQ ID NO: 231494
uagauucuguccagaaccg

SEQ ID NO: 231496 - RNA, 19 nt, Artificial Sequence
  Description of Artificial Sequence: Synthetic oligonucleotide
  Sense strand starting at position 1201 SEQ ID NO: 2981
gacagaaucuacccaguga

SEQ ID NO: 231497 - RNA, 19 nt, Artificial Sequence
  Description of Artificial Sequence: Synthetic oligonucleotide
  Antisense strand to SEQ ID NO: 231496
ucacuggguagauucuguc

SEQ ID NO: 231498 - RNA, 19 nt, Artificial Sequence
  Description of Artificial Sequence: Synthetic oligonucleotide
  Sense strand starting at position 1205 SEQ ID NO: 2981
gaaucuacccagugaccga

SEQ ID NO: 231499 - RNA, 19 nt, Artificial Sequence
  Description of Artificial Sequence: Synthetic oligonucleotide
  Antisense strand to SEQ ID NO: 231498
ucggucacuggguagauuc

SEQ ID NO: 231500 - RNA, 19 nt, Artificial Sequence
  Description of Artificial Sequence: Synthetic oligonucleotide
  Sense strand starting at position 1402 SEQ ID NO: 2981
ccguuuaaagcugauauga

SEQ ID NO: 231501 - RNA, 19 nt, Artificial Sequence
  Description of Artificial Sequence: Synthetic oligonucleotide
  Antisense strand to SEQ ID NO: 231500
ucauaucagcuuuaaacgg

SEQ ID NO: 231502 - RNA, 19 nt, Artificial Sequence
  Description of Artificial Sequence: Synthetic oligonucleotide
  Sense strand starting at position 1562 SEQ ID NO: 2981
cggagauucuggguauagu

SEQ ID NO: 231503 - RNA, 19 nt, Artificial Sequence
  Description of Artificial Sequence: Synthetic oligonucleotide
  Antisense strand to SEQ ID NO: 231502
acuauacccagaaucuccg

SEQ ID NO: 231504 - RNA, 19 nt, Artificial Sequence
  Description of Artificial Sequence: Synthetic oligonucleotide
  Sense strand starting at position 1563 SEQ ID NO: 2981
ggagauucuggguauaguu

SEQ ID NO: 231505 - RNA, 19 nt, Artificial Sequence
  Description of Artificial Sequence: Synthetic oligonucleotide
  Antisense strand to SEQ ID NO: 231504
aacuauacccagaaucucc

SEQ ID NO: 231506 - RNA, 19 nt, Artificial Sequence
  Description of Artificial Sequence: Synthetic oligonucleotide
  Sense strand starting at position 2247 SEQ ID NO: 2981
cccaguuacucaccugaga

SEQ ID NO: 231507 - RNA, 19 nt, Artificial Sequence
  Description of Artificial Sequence: Synthetic oligonucleotide
  Antisense strand to SEQ ID NO: 231506
ucucaggugaguaacuggg

SEQ ID NO: 231508 - RNA, 19 nt, Artificial Sequence
  Description of Artificial Sequence: Synthetic oligonucleotide
  Sense strand starting at position 2509 SEQ ID NO: 2981
ggcgcuauuccgcuguaac

SEQ ID NO: 231509 - RNA, 19 nt, Artificial Sequence
  Description of Artificial Sequence: Synthetic oligonucleotide
  Antisense strand to SEQ ID NO: 231508
guuacagcggaauagcgcc

SEQ ID NO: 231510 - RNA, 19 nt, Artificial Sequence
  Description of Artificial Sequence: Synthetic oligonucleotide
  Sense strand starting at position 2549 SEQ ID NO: 2981
guugauguccugcaucuaa

SEQ ID NO: 231511 - RNA, 19 nt, Artificial Sequence
  Description of Artificial Sequence: Synthetic oligonucleotide
  Antisense strand to SEQ ID NO: 231510
uuagaugcaggacaucaac

SEQ ID NO: 231512 - RNA, 19 nt, Artificial Sequence
  Description of Artificial Sequence: Synthetic oligonucleotide
  Sense strand starting at position 2589 SEQ ID NO: 2981
gagcgagcuccggaggaau

SEQ ID NO: 231513 - RNA, 19 nt, Artificial Sequence
  Description of Artificial Sequence: Synthetic oligonucleotide
  Antisense strand to SEQ ID NO: 231512
auuccuccggagcucgcuc

SEQ ID NO: 231514 - RNA, 19 nt, Artificial Sequence
  Description of Artificial Sequence: Synthetic oligonucleotide
  Sense strand starting at position 2591 SEQ ID NO: 2981
gcgagcuccggaggaauuu

SEQ ID NO: 231515 - RNA, 19 nt, Artificial Sequence
  Description of Artificial Sequence: Synthetic oligonucleotide
  Antisense strand to SEQ ID NO: 231514
aaauuccuccggagcucgc

SEQ ID NO: 231516 - RNA, 19 nt, Artificial Sequence
  Description of Artificial Sequence: Synthetic oligonucleotide
  Sense strand starting at position 2701 SEQ ID NO: 2981
gugggagaacuucggguuu

SEQ ID NO: 231517 - RNA, 19 nt, Artificial Sequence
  Description of Artificial Sequence: Synthetic oligonucleotide
  Antisense strand to SEQ ID NO: 231516
aaacccgaaguucucccac

SEQ ID NO: 231518 - RNA, 19 nt, Artificial Sequence
  Description of Artificial Sequence: Synthetic oligonucleotide
  Sense strand starting at position 2871 SEQ ID NO: 2981
uugagaguuccucagucuc

SEQ ID NO: 231519 - RNA, 19 nt, Artificial Sequence
  Description of Artificial Sequence: Synthetic oligonucleotide
  Antisense strand to SEQ ID NO: 231518
gagacugaggaacucucaa

SEQ ID NO: 231520 - RNA, 19 nt, Artificial Sequence
  Description of Artificial Sequence: Synthetic oligonucleotide
  Sense strand starting at position 2873 SEQ ID NO: 2981
gagaguuccucagucucua

SEQ ID NO: 231521 - RNA, 19 nt, Artificial Sequence
  Description of Artificial Sequence: Synthetic oligonucleotide
  Antisense strand to SEQ ID NO: 231520
uagagacugaggaacucuc

SEQ ID NO: 231522 - RNA, 19 nt, Artificial Sequence
  Description of Artificial Sequence: Synthetic oligonucleotide
  Sense strand starting at position 2891 SEQ ID NO: 2981
acccuagugucagugauag

SEQ ID NO: 231523 - RNA, 19 nt, Artificial Sequence
  Description of Artificial Sequence: Synthetic oligonucleotide
  Antisense strand to SEQ ID NO: 231522
cuaucacugacacuagggu

SEQ ID NO: 231524 - RNA, 19 nt, Artificial Sequence
  Description of Artificial Sequence: Synthetic oligonucleotide
  Sense strand starting at position 2893 SEQ ID NO: 2981
ccuagugucagugauagug

SEQ ID NO: 231525 - RNA, 19 nt, Artificial Sequence
  Description of Artificial Sequence: Synthetic oligonucleotide
  Antisense strand to SEQ ID NO: 231524
cacuaucacugacacuagg

SEQ ID NO: 231526 - RNA, 19 nt, Artificial Sequence
  Description of Artificial Sequence: Synthetic oligonucleotide
  Sense strand starting at position 2958 SEQ ID NO: 2981
uuaggauuaucuccuugac

SEQ ID NO: 231527 - RNA, 19 nt, Artificial Sequence
  Description of Artificial Sequence: Synthetic oligonucleotide
  Antisense strand to SEQ ID NO: 231526
gucaaggagauaauccuaa

SEQ ID NO: 231528 - RNA, 19 nt, Artificial Sequence
  Description of Artificial Sequence: Synthetic oligonucleotide
  Sense strand starting at position 2960 SEQ ID NO: 2981
aggauuaucuccuugacuu

SEQ ID NO: 231529 - RNA, 19 nt, Artificial Sequence
  Description of Artificial Sequence: Synthetic oligonucleotide
  Antisense strand to SEQ ID NO: 231528
aagucaaggagauaauccu

SEQ ID NO: 231530 - RNA, 19 nt, Artificial Sequence
  Description of Artificial Sequence: Synthetic oligonucleotide
  Sense strand starting at position 2961 SEQ ID NO: 2981
ggauuaucuccuugacuua

SEQ ID NO: 231531 - RNA, 19 nt, Artificial Sequence
  Description of Artificial Sequence: Synthetic oligonucleotide
  Antisense strand to SEQ ID NO: 231530
uaagucaaggagauaaucc

SEQ ID NO: 231532 - RNA, 19 nt, Artificial Sequence
  Description of Artificial Sequence: Synthetic oligonucleotide
  Sense strand starting at position 2973 SEQ ID NO: 2981
ugacuuaaagucgauaucu

SEQ ID NO: 231533 - RNA, 19 nt, Artificial Sequence
  Description of Artificial Sequence: Synthetic oligonucleotide
  Antisense strand to SEQ ID NO: 231532
agauaucgacuuuaaguca

SEQ ID NO: 231534 - RNA, 19 nt, Artificial Sequence
  Description of Artificial Sequence: Synthetic oligonucleotide
  Sense strand starting at position 2975 SEQ ID NO: 2981
acuuaaagucgauaucuca

SEQ ID NO: 231535 - RNA, 19 nt, Artificial Sequence
  Description of Artificial Sequence: Synthetic oligonucleotide
  Antisense strand to SEQ ID NO: 231534
ugagauaucgacuuuaagu

SEQ ID NO: 231536 - RNA, 19 nt, Artificial Sequence
  Description of Artificial Sequence: Synthetic oligonucleotide
  Sense strand starting at position 2978 SEQ ID NO: 2981
uaaagucgauaucucagaa

SEQ ID NO: 231537 - RNA, 19 nt, Artificial Sequence
  Description of Artificial Sequence: Synthetic oligonucleotide
  Antisense strand to SEQ ID NO: 231536
uucugagauaucgacuuua

SEQ ID NO: 231538 - RNA, 19 nt, Artificial Sequence
  Description of Artificial Sequence: Synthetic oligonucleotide
  Sense strand starting at position 2991 SEQ ID NO: 2981
ucagaagaguccucaacua

SEQ ID NO: 231539 - RNA, 19 nt, Artificial Sequence
  Description of Artificial Sequence: Synthetic oligonucleotide
  Antisense strand to SEQ ID NO: 231538
uaguugaggacucuucuga

SEQ ID NO: 231540 - RNA, 19 nt, Artificial Sequence
  Description of Artificial Sequence: Synthetic oligonucleotide
  Sense strand starting at position 3130 SEQ ID NO: 2981
ugccaugugggacauaauu

SEQ ID NO: 231541 - RNA, 19 nt, Artificial Sequence
  Description of Artificial Sequence: Synthetic oligonucleotide
  Antisense strand to SEQ ID NO: 231540
aauuaugucccacauggca

SEQ ID NO: 231542 - RNA, 19 nt, Artificial Sequence
  Description of Artificial Sequence: Synthetic oligonucleotide
  Sense strand starting at position 3192 SEQ ID NO: 2981
gucuuacguauugggaaua

SEQ ID NO: 231543 - RNA, 19 nt, Artificial Sequence
  Description of Artificial Sequence: Synthetic oligonucleotide
  Antisense strand to SEQ ID NO: 231542
uauucccaauacguaagac

SEQ ID NO: 231544 - RNA, 19 nt, Artificial Sequence
  Description of Artificial Sequence: Synthetic oligonucleotide
  Sense strand starting at position 3241 SEQ ID NO: 2981
acauucuaguguuugagag

SEQ ID NO: 231545 - RNA, 19 nt, Artificial Sequence
  Description of Artificial Sequence: Synthetic oligonucleotide
  Antisense strand to SEQ ID NO: 231544
cucucaaacacuagaaugu

SEQ ID NO: 231546 - RNA, 19 nt, Artificial Sequence
  Description of Artificial Sequence: Synthetic oligonucleotide
  Sense strand starting at position 3322 SEQ ID NO: 2981
cgcuuagagguguaagaug

SEQ ID NO: 231547 - RNA, 19 nt, Artificial Sequence
  Description of Artificial Sequence: Synthetic oligonucleotide
  Antisense strand to SEQ ID NO: 231546
caucuuacaccucuaagcg

SEQ ID NO: 231548 - RNA, 19 nt, Artificial Sequence
  Description of Artificial Sequence: Synthetic oligonucleotide
  Sense strand starting at position 3327 SEQ ID NO: 2981
agagguguaagaugaaguu

SEQ ID NO: 231549 - RNA, 19 nt, Artificial Sequence
  Description of Artificial Sequence: Synthetic oligonucleotide
  Antisense strand to SEQ ID NO: 231548
aacuucaucuuacaccucu

SEQ ID NO: 231550 - RNA, 19 nt, Artificial Sequence
  Description of Artificial Sequence: Synthetic oligonucleotide
  Sense strand starting at position 3548 SEQ ID NO: 2981
gcaauugaccauuguauau

SEQ ID NO: 231551 - RNA, 19 nt, Artificial Sequence
  Description of Artificial Sequence: Synthetic oligonucleotide
  Antisense strand to SEQ ID NO: 231550
auauacaauggucaauugc

SEQ ID NO: 231552 - RNA, 19 nt, Artificial Sequence
  Description of Artificial Sequence: Synthetic oligonucleotide
  Sense strand starting at position 3552 SEQ ID NO: 2981
uugaccauuguauauguaa

SEQ ID NO: 231553 - RNA, 19 nt, Artificial Sequence
  Description of Artificial Sequence: Synthetic oligonucleotide
  Antisense strand to SEQ ID NO: 231552
uuacauauacaauggucaa

SEQ ID NO: 231554 - RNA, 19 nt, Artificial Sequence
  Description of Artificial Sequence: Synthetic oligonucleotide
  Sense strand starting at position 3561 SEQ ID NO: 2981
guauauguaaauggagacu

SEQ ID NO: 231555 - RNA, 19 nt, Artificial Sequence
  Description of Artificial Sequence: Synthetic oligonucleotide
  Antisense strand to SEQ ID NO: 231554
agucuccauuuacauauac

SEQ ID NO: 231556 - RNA, 19 nt, Artificial Sequence
  Description of Artificial Sequence: Synthetic oligonucleotide
  Sense strand starting at position 3721 SEQ ID NO: 2981
uuggaugauaguugacuuu

SEQ ID NO: 231557 - RNA, 19 nt, Artificial Sequence
  Description of Artificial Sequence: Synthetic oligonucleotide
  Antisense strand to SEQ ID NO: 231556
aaagucaacuaucauccaa

SEQ ID NO: 231558 - RNA, 19 nt, Artificial Sequence
  Description of Artificial Sequence: Synthetic oligonucleotide
  Sense strand starting at position 287 SEQ ID NO: 2980
ugcucugccuggucuagau

SEQ ID NO: 231559 - RNA, 19 nt, Artificial Sequence
  Description of Artificial Sequence: Synthetic oligonucleotide
  Antisense strand to SEQ ID NO: 231558
aucuagaccaggcagagca

SEQ ID NO: 231560 - RNA, 19 nt, Artificial Sequence
  Description of Artificial Sequence: Synthetic oligonucleotide
  Sense strand starting at position 291 SEQ ID NO: 2980
cugccuggucuagauagaa

SEQ ID NO: 231561 - RNA, 19 nt, Artificial Sequence
  Description of Artificial Sequence: Synthetic oligonucleotide
  Antisense strand to SEQ ID NO: 231560
uucuaucuagaccaggcag

SEQ ID NO: 231562 - RNA, 19 nt, Artificial Sequence
  Description of Artificial Sequence: Synthetic oligonucleotide
  Sense strand starting at position 303 SEQ ID NO: 2980
gauagaacuccugggcuca

SEQ ID NO: 231563 - RNA, 19 nt, Artificial Sequence
  Description of Artificial Sequence: Synthetic oligonucleotide
  Antisense strand to SEQ ID NO: 231562
ugagcccaggaguucuauc

SEQ ID NO: 231564 - RNA, 19 nt, Artificial Sequence
  Description of Artificial Sequence: Synthetic oligonucleotide
  Sense strand starting at position 783 SEQ ID NO: 2980
agaaacuuauagcuauguu

SEQ ID NO: 231565 - RNA, 19 nt, Artificial Sequence
  Description of Artificial Sequence: Synthetic oligonucleotide
  Antisense strand to SEQ ID NO: 231564
aacauagcuauaaguuucu

SEQ ID NO: 231566 - RNA, 19 nt, Artificial Sequence
  Description of Artificial Sequence: Synthetic oligonucleotide
  Sense strand starting at position 787 SEQ ID NO: 2980
acuuauagcuauguuacau

SEQ ID NO: 231567 - RNA, 19 nt, Artificial Sequence
  Description of Artificial Sequence: Synthetic oligonucleotide
  Antisense strand to SEQ ID NO: 231566
auguaacauagcuauaagu

SEQ ID NO: 231568 - RNA, 19 nt, Artificial Sequence
  Description of Artificial Sequence: Synthetic oligonucleotide
  Sense strand starting at position 1216 SEQ ID NO: 2980
ccaccuguguccuugcaca

SEQ ID NO: 231569 - RNA, 19 nt, Artificial Sequence
  Description of Artificial Sequence: Synthetic oligonucleotide
  Antisense strand to SEQ ID NO: 231568
ugugcaaggacacaggugg

SEQ ID NO: 231570 - RNA, 19 nt, Artificial Sequence
  Description of Artificial Sequence: Synthetic oligonucleotide
  Sense strand starting at position 1326 SEQ ID NO: 2980
ccuuuauaagcaggcgaga

SEQ ID NO: 231571 - RNA, 19 nt, Artificial Sequence
  Description of Artificial Sequence: Synthetic oligonucleotide
  Antisense strand to SEQ ID NO: 231570
ucucgccugcuuauaaagg

SEQ ID NO: 231572 - RNA, 19 nt, Artificial Sequence
  Description of Artificial Sequence: Synthetic oligonucleotide
  Sense strand starting at position 1339 SEQ ID NO: 2980
gcgagaugcucuuugaaag

SEQ ID NO: 231573 - RNA, 19 nt, Artificial Sequence
  Description of Artificial Sequence: Synthetic oligonucleotide
  Antisense strand to SEQ ID NO: 231572
cuuucaaagagcaucucgc

SEQ ID NO: 231574 - RNA, 19 nt, Artificial Sequence
  Description of Artificial Sequence: Synthetic oligonucleotide
  Sense strand starting at position 1340 SEQ ID NO: 2980
cgagaugcucuuugaaaga

SEQ ID NO: 231575 - RNA, 19 nt, Artificial Sequence
  Description of Artificial Sequence: Synthetic oligonucleotide
  Antisense strand to SEQ ID NO: 231574
ucuuucaaagagcaucucg

SEQ ID NO: 231576 - RNA, 19 nt, Artificial Sequence
  Description of Artificial Sequence: Synthetic oligonucleotide
  Sense strand starting at position 1443 SEQ ID NO: 2980
cggagucccauuugcaaca

SEQ ID NO: 231577 - RNA, 19 nt, Artificial Sequence
  Description of Artificial Sequence: Synthetic oligonucleotide
  Antisense strand to SEQ ID NO: 231576
uguugcaaaugggacuccg

SEQ ID NO: 231578 - RNA, 19 nt, Artificial Sequence
  Description of Artificial Sequence: Synthetic oligonucleotide
  Sense strand starting at position 1498 SEQ ID NO: 2980
gcaacuuucuggccacaga

SEQ ID NO: 231579 - RNA, 19 nt, Artificial Sequence
  Description of Artificial Sequence: Synthetic oligonucleotide
  Antisense strand to SEQ ID NO: 231578
ucuguggccagaaaguugc

SEQ ID NO: 231580 - RNA, 19 nt, Artificial Sequence
  Description of Artificial Sequence: Synthetic oligonucleotide
  Sense strand starting at position 1523 SEQ ID NO: 2980
ggcugagcugcuuagagaa

SEQ ID NO: 231581 - RNA, 19 nt, Artificial Sequence
  Description of Artificial Sequence: Synthetic oligonucleotide
  Antisense strand to SEQ ID NO: 231580
uucucuaagcagcucagcc

SEQ ID NO: 231582 - RNA, 19 nt, Artificial Sequence
  Description of Artificial Sequence: Synthetic oligonucleotide
  Sense strand starting at position 1570 SEQ ID NO: 2980
gcgagucuucgagcucuga

SEQ ID NO: 231583 - RNA, 19 nt, Artificial Sequence
  Description of Artificial Sequence: Synthetic oligonucleotide
  Antisense strand to SEQ ID NO: 231582
ucagagcucgaagacucgc

SEQ ID NO: 231584 - RNA, 19 nt, Artificial Sequence
  Description of Artificial Sequence: Synthetic oligonucleotide
  Sense strand starting at position 2391 SEQ ID NO: 2980
gggacuugugcgggaaaug

SEQ ID NO: 231585 - RNA, 19 nt, Artificial Sequence
  Description of Artificial Sequence: Synthetic oligonucleotide
  Antisense strand to SEQ ID NO: 231584
cauuucccgcacaaguccc

SEQ ID NO: 231586 - RNA, 19 nt, Artificial Sequence
  Description of Artificial Sequence: Synthetic oligonucleotide
  Sense strand starting at position 2392 SEQ ID NO: 2980
ggacuugugcgggaaaugu

SEQ ID NO: 231587 - RNA, 19 nt, Artificial Sequence
  Description of Artificial Sequence: Synthetic oligonucleotide
  Antisense strand to SEQ ID NO: 231586
acauuucccgcacaagucc

SEQ ID NO: 231588 - RNA, 19 nt, Artificial Sequence
  Description of Artificial Sequence: Synthetic oligonucleotide
  Sense strand starting at position 2400 SEQ ID NO: 2980
gcgggaaauguggguuuaa

SEQ ID NO: 231589 - RNA, 19 nt, Artificial Sequence
  Description of Artificial Sequence: Synthetic oligonucleotide
  Antisense strand to SEQ ID NO: 231588
uuaaacccacauuucccgc

SEQ ID NO: 231590 - RNA, 19 nt, Artificial Sequence
  Description of Artificial Sequence: Synthetic oligonucleotide
  Sense strand starting at position 2401 SEQ ID NO: 2980
cgggaaauguggguuuaag

SEQ ID NO: 231591 - RNA, 19 nt, Artificial Sequence
  Description of Artificial Sequence: Synthetic oligonucleotide
  Antisense strand to SEQ ID NO: 231590
cuuaaacccacauuucccg

SEQ ID NO: 231592 - RNA, 19 nt, Artificial Sequence
  Description of Artificial Sequence: Synthetic oligonucleotide
  Sense strand starting at position 2411 SEQ ID NO: 2980
ggguuuaagugccuucaag

SEQ ID NO: 231593 - RNA, 19 nt, Artificial Sequence
  Description of Artificial Sequence: Synthetic oligonucleotide
  Antisense strand to SEQ ID NO: 231592
cuugaaggcacuuaaaccc

SEQ ID NO: 231594 - RNA, 19 nt, Artificial Sequence
  Description of Artificial Sequence: Synthetic oligonucleotide
  Sense strand starting at position 2438 SEQ ID NO: 2980
aguccauugggauguugau

SEQ ID NO: 231595 - RNA, 19 nt, Artificial Sequence
  Description of Artificial Sequence: Synthetic oligonucleotide
  Antisense strand to SEQ ID NO: 231594
aucaacaucccaauggacu

SEQ ID NO: 231596 - RNA, 19 nt, Artificial Sequence
  Description of Artificial Sequence: Synthetic oligonucleotide
  Sense strand starting at position 2447 SEQ ID NO: 2980
ggauguugaucagcguuca

SEQ ID NO: 231597 - RNA, 19 nt, Artificial Sequence
  Description of Artificial Sequence: Synthetic oligonucleotide
  Antisense strand to SEQ ID NO: 231596
ugaacgcugaucaacaucc

SEQ ID NO: 231598 - RNA, 19 nt, Artificial Sequence
  Description of Artificial Sequence: Synthetic oligonucleotide
  Sense strand starting at position 2494 SEQ ID NO: 2980
agggaauguguggguuuau

SEQ ID NO: 231599 - RNA, 19 nt, Artificial Sequence
  Description of Artificial Sequence: Synthetic oligonucleotide
  Antisense strand to SEQ ID NO: 231598
auaaacccacacauucccu

SEQ ID NO: 231600 - RNA, 19 nt, Artificial Sequence
  Description of Artificial Sequence: Synthetic oligonucleotide
  Sense strand starting at position 2495 SEQ ID NO: 2980
gggaauguguggguuuaug

SEQ ID NO: 231601 - RNA, 19 nt, Artificial Sequence
  Description of Artificial Sequence: Synthetic oligonucleotide
  Antisense strand to SEQ ID NO: 231600
cauaaacccacacauuccc

SEQ ID NO: 231602 - RNA, 19 nt, Artificial Sequence
  Description of Artificial Sequence: Synthetic oligonucleotide
  Sense strand starting at position 2506 SEQ ID NO: 2980
gguuuauggccacgcauaa

SEQ ID NO: 231603 - RNA, 19 nt, Artificial Sequence
  Description of Artificial Sequence: Synthetic oligonucleotide
  Antisense strand to SEQ ID NO: 231602
uuaugcguggccauaaacc

SEQ ID NO: 231604 - RNA, 19 nt, Artificial Sequence
  Description of Artificial Sequence: Synthetic oligonucleotide
  Sense strand starting at position 2530 SEQ ID NO: 2980
uuuagucguguuuaacuua

SEQ ID NO: 231605 - RNA, 19 nt, Artificial Sequence
  Description of Artificial Sequence: Synthetic oligonucleotide
  Antisense strand to SEQ ID NO: 231604
uaaguuaaacacgacuaaa

SEQ ID NO: 231606 - RNA, 19 nt, Artificial Sequence
  Description of Artificial Sequence: Synthetic oligonucleotide
  Sense strand starting at position 2533 SEQ ID NO: 2980
agucguguuuaacuuagca

SEQ ID NO: 231607 - RNA, 19 nt, Artificial Sequence
  Description of Artificial Sequence: Synthetic oligonucleotide
  Antisense strand to SEQ ID NO: 231606
ugcuaaguuaaacacgacu

SEQ ID NO: 231608 - RNA, 19 nt, Artificial Sequence
  Description of Artificial Sequence: Synthetic oligonucleotide
  Sense strand starting at position 2613 SEQ ID NO: 2980
uuucucaguguguaauguu

SEQ ID NO: 231609 - RNA, 19 nt, Artificial Sequence
  Description of Artificial Sequence: Synthetic oligonucleotide
  Antisense strand to SEQ ID NO: 231608
aacauuacacacugagaaa

SEQ ID NO: 231610 - RNA, 19 nt, Artificial Sequence
  Description of Artificial Sequence: Synthetic oligonucleotide
  Sense strand starting at position 2644 SEQ ID NO: 2980
gcagauaauccugauguaa

SEQ ID NO: 231611 - RNA, 19 nt, Artificial Sequence
  Description of Artificial Sequence: Synthetic oligonucleotide
  Antisense strand to SEQ ID NO: 231610
uuacaucaggauuaucugc

SEQ ID NO: 231612 - RNA, 19 nt, Artificial Sequence
  Description of Artificial Sequence: Synthetic oligonucleotide
  Sense strand starting at position 2681 SEQ ID NO: 2980
aaaucaccaggcugugauu

SEQ ID NO: 231613 - RNA, 19 nt, Artificial Sequence
  Description of Artificial Sequence: Synthetic oligonucleotide
  Antisense strand to SEQ ID NO: 231612
aaucacagccuggugauuu

SEQ ID NO: 231614 - RNA, 19 nt, Artificial Sequence
  Description of Artificial Sequence: Synthetic oligonucleotide
  Sense strand starting at position 2718 SEQ ID NO: 2980
aaccuauucugugugagcu

SEQ ID NO: 231615 - RNA, 19 nt, Artificial Sequence
  Description of Artificial Sequence: Synthetic oligonucleotide
  Antisense strand to SEQ ID NO: 231614
agcucacacagaauagguu

SEQ ID NO: 231616 - RNA, 19 nt, Artificial Sequence
  Description of Artificial Sequence: Synthetic oligonucleotide
  Sense strand starting at position 2724 SEQ ID NO: 2980
uucugugugagcugugauu

SEQ ID NO: 231617 - RNA, 19 nt, Artificial Sequence
  Description of Artificial Sequence: Synthetic oligonucleotide
  Antisense strand to SEQ ID NO: 231616
aaucacagcucacacagaa

SEQ ID NO: 231618 - RNA, 19 nt, Artificial Sequence
  Description of Artificial Sequence: Synthetic oligonucleotide
  Sense strand starting at position 2823 SEQ ID NO: 2980
aguacacuugcugaucuua

SEQ ID NO: 231619 - RNA, 19 nt, Artificial Sequence
  Description of Artificial Sequence: Synthetic oligonucleotide
  Antisense strand to SEQ ID NO: 231618
uaagaucagcaaguguacu

SEQ ID NO: 231620 - RNA, 19 nt, Artificial Sequence
  Description of Artificial Sequence: Synthetic oligonucleotide
  Sense strand starting at position 2843 SEQ ID NO: 2980
aacugucugcagugucuua

SEQ ID NO: 231621 - RNA, 19 nt, Artificial Sequence
  Description of Artificial Sequence: Synthetic oligonucleotide
  Antisense strand to SEQ ID NO: 231620
uaagacacugcagacaguu

SEQ ID NO: 231622 - RNA, 19 nt, Artificial Sequence
  Description of Artificial Sequence: Synthetic oligonucleotide
  Sense strand starting at position 2958 SEQ ID NO: 2980
cagagcuuauuguuagaca

SEQ ID NO: 231623 - RNA, 19 nt, Artificial Sequence
  Description of Artificial Sequence: Synthetic oligonucleotide
  Antisense strand to SEQ ID NO: 231622
ugucuaacaauaagcucug

SEQ ID NO: 231624 - RNA, 19 nt, Artificial Sequence
  Description of Artificial Sequence: Synthetic oligonucleotide
  Sense strand starting at position 3482 SEQ ID NO: 2980
uuagguuucuaggcuuagu

SEQ ID NO: 231625 - RNA, 19 nt, Artificial Sequence
  Description of Artificial Sequence: Synthetic oligonucleotide
  Antisense strand to SEQ ID NO: 231624
acuaagccuagaaaccuaa

SEQ ID NO: 231626 - RNA, 19 nt, Artificial Sequence
  Description of Artificial Sequence: Synthetic oligonucleotide
  Sense strand starting at position 3573 SEQ ID NO: 2980
aguucuacugccuggaaga

SEQ ID NO: 231627 - RNA, 19 nt, Artificial Sequence
  Description of Artificial Sequence: Synthetic oligonucleotide
  Antisense strand to SEQ ID NO: 231626
ucuuccaggcaguagaacu

SEQ ID NO: 231628 - RNA, 19 nt, Artificial Sequence
  Description of Artificial Sequence: Synthetic oligonucleotide
  Sense strand starting at position 3574 SEQ ID NO: 2980
guucuacugccuggaagac

SEQ ID NO: 231629 - RNA, 19 nt, Artificial Sequence
  Description of Artificial Sequence: Synthetic oligonucleotide
  Antisense strand to SEQ ID NO: 231628
gucuuccaggcaguagaac

SEQ ID NO: 231630 - RNA, 19 nt, Artificial Sequence
  Description of Artificial Sequence: Synthetic oligonucleotide
  Sense strand starting at position 3587 SEQ ID NO: 2980
gaagacuggucaucuguga

SEQ ID NO: 231631 - RNA, 19 nt, Artificial Sequence
  Description of Artificial Sequence: Synthetic oligonucleotide
  Antisense strand to SEQ ID NO: 231630
ucacagaugaccagucuuc

SEQ ID NO: 231632 - RNA, 19 nt, Artificial Sequence
  Description of Artificial Sequence: Synthetic oligonucleotide
  Sense strand starting at position 3591 SEQ ID NO: 2980
acuggucaucugugaaagc

SEQ ID NO: 231633 - RNA, 19 nt, Artificial Sequence
  Description of Artificial Sequence: Synthetic oligonucleotide
  Antisense strand to SEQ ID NO: 231632
gcuuucacagaugaccagu

SEQ ID NO: 231634 - RNA, 19 nt, Artificial Sequence
  Description of Artificial Sequence: Synthetic oligonucleotide
  Sense strand starting at position 3725 SEQ ID NO: 2980
gccagcucuccuggaacaa

SEQ ID NO: 231635 - RNA, 19 nt, Artificial Sequence
  Description of Artificial Sequence: Synthetic oligonucleotide
  Antisense strand to SEQ ID NO: 231634
uuguuccaggagagcuggc

SEQ ID NO: 231636 - RNA, 19 nt, Artificial Sequence
  Description of Artificial Sequence: Synthetic oligonucleotide
  Sense strand starting at position 3882 SEQ ID NO: 2980
cguagagucucugucacaa

SEQ ID NO: 231637 - RNA, 19 nt, Artificial Sequence
  Description of Artificial Sequence: Synthetic oligonucleotide
  Antisense strand to SEQ ID NO: 231636
uugugacagagacucuacg

SEQ ID NO: 231638 - RNA, 19 nt, Artificial Sequence
  Description of Artificial Sequence: Synthetic oligonucleotide
  Sense strand starting at position 37 SEQ ID NO: 2982
cagagaugcguguauguca

SEQ ID NO: 231639 - RNA, 19 nt, Artificial Sequence
  Description of Artificial Sequence: Synthetic oligonucleotide
  Antisense strand to SEQ ID NO: 231638
ugacauacacgcaucucug

SEQ ID NO: 231640 - RNA, 19 nt, Artificial Sequence
  Description of Artificial Sequence: Synthetic oligonucleotide
  Sense strand starting at position 45 SEQ ID NO: 2982
cguguaugucagcuucauc

SEQ ID NO: 231641 - RNA, 19 nt, Artificial Sequence
  Description of Artificial Sequence: Synthetic oligonucleotide
  Antisense strand to SEQ ID NO: 231640
gaugaagcugacauacacg

SEQ ID NO: 231642 - RNA, 19 nt, Artificial Sequence
  Description of Artificial Sequence: Synthetic oligonucleotide
  Sense strand starting at position 228 SEQ ID NO: 2982
ugagguccuuugccacauu

SEQ ID NO: 231643 - RNA, 19 nt, Artificial Sequence
  Description of Artificial Sequence: Synthetic oligonucleotide
  Antisense strand to SEQ ID NO: 231642
aauguggcaaaggaccuca

SEQ ID NO: 231644 - RNA, 19 nt, Artificial Sequence
  Description of Artificial Sequence: Synthetic oligonucleotide
  Sense strand starting at position 269 SEQ ID NO: 2982
ggcaguaugcgcccacuau

SEQ ID NO: 231645 - RNA, 19 nt, Artificial Sequence
  Description of Artificial Sequence: Synthetic oligonucleotide
  Antisense strand to SEQ ID NO: 231644
auagugggcgcauacugcc

SEQ ID NO: 231646 - RNA, 19 nt, Artificial Sequence
  Description of Artificial Sequence: Synthetic oligonucleotide
  Sense strand starting at position 456 SEQ ID NO: 2982
ccauguuuaugacuguuua

SEQ ID NO: 231647 - RNA, 19 nt, Artificial Sequence
  Description of Artificial Sequence: Synthetic oligonucleotide
  Antisense strand to SEQ ID NO: 231646
uaaacagucauaaacaugg

SEQ ID NO: 231648 - RNA, 19 nt, Artificial Sequence
  Description of Artificial Sequence: Synthetic oligonucleotide
  Sense strand starting at position 460 SEQ ID NO: 2982
guuuaugacuguuuauuuc

SEQ ID NO: 231649 - RNA, 19 nt, Artificial Sequence
  Description of Artificial Sequence: Synthetic oligonucleotide
  Antisense strand to SEQ ID NO: 231648
gaaauaaacagucauaaac

SEQ ID NO: 231650 - RNA, 19 nt, Artificial Sequence
  Description of Artificial Sequence: Synthetic oligonucleotide
  Sense strand starting at position 675 SEQ ID NO: 2982
accagagaucagugaaagc

SEQ ID NO: 231651 - RNA, 19 nt, Artificial Sequence
  Description of Artificial Sequence: Synthetic oligonucleotide
  Antisense strand to SEQ ID NO: 231650
gcuuucacugaucucuggu

SEQ ID NO: 231652 - RNA, 19 nt, Artificial Sequence
  Description of Artificial Sequence: Synthetic oligonucleotide
  Sense strand starting at position 685 SEQ ID NO: 2982
agugaaagccgacaaugau

SEQ ID NO: 231653 - RNA, 19 nt, Artificial Sequence
  Description of Artificial Sequence: Synthetic oligonucleotide
  Antisense strand to SEQ ID NO: 231652
aucauugucggcuuucacu

SEQ ID NO: 231654 - RNA, 19 nt, Artificial Sequence
  Description of Artificial Sequence: Synthetic oligonucleotide
  Sense strand starting at position 846 SEQ ID NO: 2982
gucccauccagaggagaua

SEQ ID NO: 231655 - RNA, 19 nt, Artificial Sequence
  Description of Artificial Sequence: Synthetic oligonucleotide
  Antisense strand to SEQ ID NO: 231654
uaucuccucuggaugggac

SEQ ID NO: 231656 - RNA, 19 nt, Artificial Sequence
  Description of Artificial Sequence: Synthetic oligonucleotide
  Sense strand starting at position 859 SEQ ID NO: 2982
gagauagugacuggugaca

SEQ ID NO: 231657 - RNA, 19 nt, Artificial Sequence
  Description of Artificial Sequence: Synthetic oligonucleotide
  Antisense strand to SEQ ID NO: 231656
ugucaccagucacuaucuc

SEQ ID NO: 231658 - RNA, 19 nt, Artificial Sequence
  Description of Artificial Sequence: Synthetic oligonucleotide
  Sense strand starting at position 1031 SEQ ID NO: 2982
gaaagauugcuccaucagu

SEQ ID NO: 231659 - RNA, 19 nt, Artificial Sequence
  Description of Artificial Sequence: Synthetic oligonucleotide
  Antisense strand to SEQ ID NO: 231658
acugauggagcaaucuuuc

SEQ ID NO: 231660 - RNA, 19 nt, Artificial Sequence
  Description of Artificial Sequence: Synthetic oligonucleotide
  Sense strand starting at position 1219 SEQ ID NO: 2982
cagagaaugucuccuggca

SEQ ID NO: 231661 - RNA, 19 nt, Artificial Sequence
  Description of Artificial Sequence: Synthetic oligonucleotide
  Antisense strand to SEQ ID NO: 231660
ugccaggagacauucucug

SEQ ID NO: 231662 - RNA, 19 nt, Artificial Sequence
  Description of Artificial Sequence: Synthetic oligonucleotide
  Sense strand starting at position 1298 SEQ ID NO: 2982
gggucaaauuguucccaaa

SEQ ID NO: 231663 - RNA, 19 nt, Artificial Sequence
  Description of Artificial Sequence: Synthetic oligonucleotide
  Antisense strand to SEQ ID NO: 231662
uuugggaacaauuugaccc

SEQ ID NO: 231664 - RNA, 19 nt, Artificial Sequence
  Description of Artificial Sequence: Synthetic oligonucleotide
  Sense strand starting at position 1308 SEQ ID NO: 2982
guucccaaagcucaguauu

SEQ ID NO: 231665 - RNA, 19 nt, Artificial Sequence
  Description of Artificial Sequence: Synthetic oligonucleotide
  Antisense strand to SEQ ID NO: 231664
aauacugagcuuugggaac

SEQ ID NO: 231666 - RNA, 19 nt, Artificial Sequence
  Description of Artificial Sequence: Synthetic oligonucleotide
  Sense strand starting at position 1311 SEQ ID NO: 2982
cccaaagcucaguauugga

SEQ ID NO: 231667 - RNA, 19 nt, Artificial Sequence
  Description of Artificial Sequence: Synthetic oligonucleotide
  Antisense strand to SEQ ID NO: 231666
uccaauacugagcuuuggg

SEQ ID NO: 231668 - RNA, 19 nt, Artificial Sequence
  Description of Artificial Sequence: Synthetic oligonucleotide
  Sense strand starting at position 1416 SEQ ID NO: 2982
cuuucuggcuggcuaagaa

SEQ ID NO: 231669 - RNA, 19 nt, Artificial Sequence
  Description of Artificial Sequence: Synthetic oligonucleotide
  Antisense strand to SEQ ID NO: 231668
uucuuagccagccagaaag

SEQ ID NO: 231670 - RNA, 19 nt, Artificial Sequence
  Description of Artificial Sequence: Synthetic oligonucleotide
  Sense strand starting at position 1625 SEQ ID NO: 2982
gggaggguggucugggaaa

SEQ ID NO: 231671 - RNA, 19 nt, Artificial Sequence
  Description of Artificial Sequence: Synthetic oligonucleotide
  Antisense strand to SEQ ID NO: 231670
uuucccagaccacccuccc

SEQ ID NO: 231672 - RNA, 19 nt, Artificial Sequence
  Description of Artificial Sequence: Synthetic oligonucleotide
  Sense strand starting at position 2305 SEQ ID NO: 2982
acgguugcccuccaagaaa

SEQ ID NO: 231673 - RNA, 19 nt, Artificial Sequence
  Description of Artificial Sequence: Synthetic oligonucleotide
  Antisense strand to SEQ ID NO: 231672
uuucuuggagggcaaccgu

SEQ ID NO: 231674 - RNA, 19 nt, Artificial Sequence
  Description of Artificial Sequence: Synthetic oligonucleotide
  Sense strand starting at position 2488 SEQ ID NO: 2982
gcaguuauccgauaggacc

SEQ ID NO: 231675 - RNA, 19 nt, Artificial Sequence
  Description of Artificial Sequence: Synthetic oligonucleotide
  Antisense strand to SEQ ID NO: 231674
gguccuaucggauaacugc

SEQ ID NO: 231676 - RNA, 19 nt, Artificial Sequence
  Description of Artificial Sequence: Synthetic oligonucleotide
  Sense strand starting at position 2507 SEQ ID NO: 2982
acuguaaagucuucccaaa

SEQ ID NO: 231677 - RNA, 19 nt, Artificial Sequence
  Description of Artificial Sequence: Synthetic oligonucleotide
  Antisense strand to SEQ ID NO: 231676
uuugggaagacuuuacagu

SEQ ID NO: 231678 - RNA, 19 nt, Artificial Sequence
  Description of Artificial Sequence: Synthetic oligonucleotide
  Sense strand starting at position 2600 SEQ ID NO: 2982
aagaaaguaguggguuaca

SEQ ID NO: 231679 - RNA, 19 nt, Artificial Sequence
  Description of Artificial Sequence: Synthetic oligonucleotide
  Antisense strand to SEQ ID NO: 231678
uguaacccacuacuuucuu

SEQ ID NO: 231680 - RNA, 19 nt, Artificial Sequence
  Description of Artificial Sequence: Synthetic oligonucleotide
  Sense strand starting at position 2620 SEQ ID NO: 2982
cgucauugacgugaucauu

SEQ ID NO: 231681 - RNA, 19 nt, Artificial Sequence
  Description of Artificial Sequence: Synthetic oligonucleotide
  Antisense strand to SEQ ID NO: 231680
aaugaucacgucaaugacg

SEQ ID NO: 231682 - RNA, 19 nt, Artificial Sequence
  Description of Artificial Sequence: Synthetic oligonucleotide
  Sense strand starting at position 2623 SEQ ID NO: 2982
cauugacgugaucauuguu

SEQ ID NO: 231683 - RNA, 19 nt, Artificial Sequence
  Description of Artificial Sequence: Synthetic oligonucleotide
  Antisense strand to SEQ ID NO: 231682
aacaaugaucacgucaaug

SEQ ID NO: 231684 - RNA, 19 nt, Artificial Sequence
  Description of Artificial Sequence: Synthetic oligonucleotide
  Sense strand starting at position 2628 SEQ ID NO: 2982
acgugaucauuguucuaaa

SEQ ID NO: 231685 - RNA, 19 nt, Artificial Sequence
  Description of Artificial Sequence: Synthetic oligonucleotide
  Antisense strand to SEQ ID NO: 231684
uuuagaacaaugaucacgu

SEQ ID NO: 231686 - RNA, 19 nt, Artificial Sequence
  Description of Artificial Sequence: Synthetic oligonucleotide
  Sense strand starting at position 2974 SEQ ID NO: 2982
ggacuuguugcccaagcuu

SEQ ID NO: 231687 - RNA, 19 nt, Artificial Sequence
  Description of Artificial Sequence: Synthetic oligonucleotide
  Antisense strand to SEQ ID NO: 231686
aagcuugggcaacaagucc

SEQ ID NO: 231688 - RNA, 19 nt, Artificial Sequence
  Description of Artificial Sequence: Synthetic oligonucleotide
  Sense strand starting at position 3191 SEQ ID NO: 2982
ugucaauuccugcaaaggu

SEQ ID NO: 231689 - RNA, 19 nt, Artificial Sequence
  Description of Artificial Sequence: Synthetic oligonucleotide
  Antisense strand to SEQ ID NO: 231688
accuuugcaggaauugaca

SEQ ID NO: 231690 - RNA, 19 nt, Artificial Sequence
  Description of Artificial Sequence: Synthetic oligonucleotide
  Sense strand starting at position 3553 SEQ ID NO: 2982
ccuucuugccaugagguaa

SEQ ID NO: 231691 - RNA, 19 nt, Artificial Sequence
  Description of Artificial Sequence: Synthetic oligonucleotide
  Antisense strand to SEQ ID NO: 231690
uuaccucauggcaagaagg

SEQ ID NO: 231692 - RNA, 19 nt, Artificial Sequence
  Description of Artificial Sequence: Synthetic oligonucleotide
  Sense strand starting at position 3564 SEQ ID NO: 2982
ugagguaaaccaugucuac

SEQ ID NO: 231693 - RNA, 19 nt, Artificial Sequence
  Description of Artificial Sequence: Synthetic oligonucleotide
  Antisense strand to SEQ ID NO: 231692
guagacaugguuuaccuca

SEQ ID NO: 231694 - RNA, 19 nt, Artificial Sequence
  Description of Artificial Sequence: Synthetic oligonucleotide
  Sense strand starting at position 3568 SEQ ID NO: 2982
guaaaccaugucuacuaca

SEQ ID NO: 231695 - RNA, 19 nt, Artificial Sequence
  Description of Artificial Sequence: Synthetic oligonucleotide
  Antisense strand to SEQ ID NO: 231694
uguaguagacaugguuuac

SEQ ID NO: 231696 - RNA, 19 nt, Artificial Sequence
  Description of Artificial Sequence: Synthetic oligonucleotide
  Sense strand starting at position 3652 SEQ ID NO: 2982
aucuguccaccuugaguuu

SEQ ID NO: 231697 - RNA, 19 nt, Artificial Sequence
  Description of Artificial Sequence: Synthetic oligonucleotide
  Antisense strand to SEQ ID NO: 231696
aaacucaagguggacagau

SEQ ID NO: 231698 - RNA, 19 nt, Artificial Sequence
  Description of Artificial Sequence: Synthetic oligonucleotide
  Sense strand starting at position 3795 SEQ ID NO: 2982
ucaaguuugugaguagacu

SEQ ID NO: 231699 - RNA, 19 nt, Artificial Sequence
  Description of Artificial Sequence: Synthetic oligonucleotide
  Antisense strand to SEQ ID NO: 231698
agucuacucacaaacuuga

SEQ ID NO: 231700 - RNA, 19 nt, Artificial Sequence
  Description of Artificial Sequence: Synthetic oligonucleotide
  Sense strand starting at position 3796 SEQ ID NO: 2982
caaguuugugaguagacua

SEQ ID NO: 231701 - RNA, 19 nt, Artificial Sequence
  Description of Artificial Sequence: Synthetic oligonucleotide
  Antisense strand to SEQ ID NO: 231700
uagucuacucacaaacuug

SEQ ID NO: 231702 - RNA, 19 nt, Artificial Sequence
  Description of Artificial Sequence: Synthetic oligonucleotide
  Sense strand starting at position 3808 SEQ ID NO: 2982
uagacuauuugaugcauga

SEQ ID NO: 231703 - RNA, 19 nt, Artificial Sequence
  Description of Artificial Sequence: Synthetic oligonucleotide
  Antisense strand to SEQ ID NO: 231702
ucaugcaucaaauagucua

SEQ ID NO: 231704 - RNA, 19 nt, Artificial Sequence
  Description of Artificial Sequence: Synthetic oligonucleotide
  Sense strand starting at position 3872 SEQ ID NO: 2982
gagggauaccugcauggua

SEQ ID NO: 231705 - RNA, 19 nt, Artificial Sequence
  Description of Artificial Sequence: Synthetic oligonucleotide
  Antisense strand to SEQ ID NO: 231704
uaccaugcagguaucccuc

SEQ ID NO: 231706 - RNA, 19 nt, Artificial Sequence
  Description of Artificial Sequence: Synthetic oligonucleotide
  Sense strand starting at position 3874 SEQ ID NO: 2982
gggauaccugcaugguauu

SEQ ID NO: 231707 - RNA, 19 nt, Artificial Sequence
  Description of Artificial Sequence: Synthetic oligonucleotide
  Antisense strand to SEQ ID NO: 231706
aauaccaugcagguauccc

SEQ ID NO: 231708 - RNA, 19 nt, Artificial Sequence
  Description of Artificial Sequence: Synthetic oligonucleotide
  Sense strand starting at position 3892 SEQ ID NO: 2982
ugcccagcccauuaugaaa

SEQ ID NO: 231709 - RNA, 19 nt, Artificial Sequence
  Description of Artificial Sequence: Synthetic oligonucleotide
  Antisense strand to SEQ ID NO: 231708
uuucauaaugggcugggca

SEQ ID NO: 231710 - RNA, 19 nt, Artificial Sequence
  Description of Artificial Sequence: Synthetic oligonucleotide
  Sense strand starting at position 3921 SEQ ID NO: 2982
uucuaaugaucagugugga

SEQ ID NO: 231711 - RNA, 19 nt, Artificial Sequence
  Description of Artificial Sequence: Synthetic oligonucleotide
  Antisense strand to SEQ ID NO: 231710
uccacacugaucauuagaa

SEQ ID NO: 231712 - RNA, 19 nt, Artificial Sequence
  Description of Artificial Sequence: Synthetic oligonucleotide
  Sense strand starting at position 3922 SEQ ID NO: 2982
ucuaaugaucaguguggaa

SEQ ID NO: 231713 - RNA, 19 nt, Artificial Sequence
  Description of Artificial Sequence: Synthetic oligonucleotide
  Antisense strand to SEQ ID NO: 231712
uuccacacugaucauuaga

SEQ ID NO: 231714 - RNA, 19 nt, Artificial Sequence
  Description of Artificial Sequence: Synthetic oligonucleotide
  Sense strand starting at position 3924 SEQ ID NO: 2982
uaaugaucaguguggaauu

SEQ ID NO: 231715 - RNA, 19 nt, Artificial Sequence
  Description of Artificial Sequence: Synthetic oligonucleotide
  Antisense strand to SEQ ID NO: 231714
aauuccacacugaucauua

SEQ ID NO: 231716 - RNA, 19 nt, Artificial Sequence
  Description of Artificial Sequence: Synthetic oligonucleotide
  Sense strand starting at position 3948 SEQ ID NO: 2982
auugaauguuuccuaagac

SEQ ID NO: 231717 - RNA, 19 nt, Artificial Sequence
  Description of Artificial Sequence: Synthetic oligonucleotide
  Antisense strand to SEQ ID NO: 231716
gucuuaggaaacauucaau

SEQ ID NO: 231718 - RNA, 19 nt, Artificial Sequence
  Description of Artificial Sequence: Synthetic oligonucleotide
  Sense strand starting at position 1715 SEQ ID NO: 2983
ccguuuccaaggcaaagaa

SEQ ID NO: 231719 - RNA, 19 nt, Artificial Sequence
  Description of Artificial Sequence: Synthetic oligonucleotide
  Antisense strand to SEQ ID NO: 231718
uucuuugccuuggaaacgg

SEQ ID NO: 231720 - RNA, 19 nt, Artificial Sequence
  Description of Artificial Sequence: Synthetic oligonucleotide
  Sense strand starting at position 2053 SEQ ID NO: 2983
ggugcucgagcugugucaa

SEQ ID NO: 231721 - RNA, 19 nt, Artificial Sequence
  Description of Artificial Sequence: Synthetic oligonucleotide
  Antisense strand to SEQ ID NO: 231720
uugacacagcucgagcacc

SEQ ID NO: 231722 - RNA, 19 nt, Artificial Sequence
  Description of Artificial Sequence: Synthetic oligonucleotide
  Sense strand starting at position 2056 SEQ ID NO: 2983
gcucgagcugugucaaucu

SEQ ID NO: 231723 - RNA, 19 nt, Artificial Sequence
  Description of Artificial Sequence: Synthetic oligonucleotide
  Antisense strand to SEQ ID NO: 231722
agauugacacagcucgagc

SEQ ID NO: 231724 - RNA, 19 nt, Artificial Sequence
  Description of Artificial Sequence: Synthetic oligonucleotide
  Sense strand starting at position 2266 SEQ ID NO: 2983
agcugauugugacugagaa

SEQ ID NO: 231725 - RNA, 19 nt, Artificial Sequence
  Description of Artificial Sequence: Synthetic oligonucleotide
  Antisense strand to SEQ ID NO: 231724
uucucagucacaaucagcu

SEQ ID NO: 231726 - RNA, 19 nt, Artificial Sequence
  Description of Artificial Sequence: Synthetic oligonucleotide
  Sense strand starting at position 2267 SEQ ID NO: 2983
gcugauugugacugagaac

SEQ ID NO: 231727 - RNA, 19 nt, Artificial Sequence
  Description of Artificial Sequence: Synthetic oligonucleotide
  Antisense strand to SEQ ID NO: 231726
guucucagucacaaucagc

SEQ ID NO: 231728 - RNA, 19 nt, Artificial Sequence
  Description of Artificial Sequence: Synthetic oligonucleotide
  Sense strand starting at position 2529 SEQ ID NO: 2983
gaaauugcuccugcgacgu

SEQ ID NO: 231729 - RNA, 19 nt, Artificial Sequence
  Description of Artificial Sequence: Synthetic oligonucleotide
  Antisense strand to SEQ ID NO: 231728
acgucgcaggagcaauuuc

SEQ ID NO: 231730 - RNA, 19 nt, Artificial Sequence
  Description of Artificial Sequence: Synthetic oligonucleotide
  Sense strand starting at position 2556 SEQ ID NO: 2983
ucuucuuugacuggaguga

SEQ ID NO: 231731 - RNA, 19 nt, Artificial Sequence
  Description of Artificial Sequence: Synthetic oligonucleotide
  Antisense strand to SEQ ID NO: 231730
ucacuccagucaaagaaga

SEQ ID NO: 231732 - RNA, 19 nt, Artificial Sequence
  Description of Artificial Sequence: Synthetic oligonucleotide
  Sense strand starting at position 2587 SEQ ID NO: 2983
agagcugaugcccgauuua

SEQ ID NO: 231733 - RNA, 19 nt, Artificial Sequence
  Description of Artificial Sequence: Synthetic oligonucleotide
  Antisense strand to SEQ ID NO: 231732
uaaaucgggcaucagcucu

SEQ ID NO: 231734 - RNA, 19 nt, Artificial Sequence
  Description of Artificial Sequence: Synthetic oligonucleotide
  Sense strand starting at position 2641 SEQ ID NO: 2983
gagcuuuggccggugcauu

SEQ ID NO: 231735 - RNA, 19 nt, Artificial Sequence
  Description of Artificial Sequence: Synthetic oligonucleotide
  Antisense strand to SEQ ID NO: 231734
aaugcaccggccaaagcuc

SEQ ID NO: 231736 - RNA, 19 nt, Artificial Sequence
  Description of Artificial Sequence: Synthetic oligonucleotide
  Sense strand starting at position 2672 SEQ ID NO: 2983
cuaugauauuggccuccaa

SEQ ID NO: 231737 - RNA, 19 nt, Artificial Sequence
  Description of Artificial Sequence: Synthetic oligonucleotide
  Antisense strand to SEQ ID NO: 231736
uuggaggccaauaucauag

SEQ ID NO: 231738 - RNA, 19 nt, Artificial Sequence
  Description of Artificial Sequence: Synthetic oligonucleotide
  Sense strand starting at position 2783 SEQ ID NO: 2983
cagaauugggauugcuaag

SEQ ID NO: 231739 - RNA, 19 nt, Artificial Sequence
  Description of Artificial Sequence: Synthetic oligonucleotide
  Antisense strand to SEQ ID NO: 231738
cuuagcaaucccaauucug

SEQ ID NO: 231740 - RNA, 19 nt, Artificial Sequence
  Description of Artificial Sequence: Synthetic oligonucleotide
  Sense strand starting at position 2790 SEQ ID NO: 2983
gggauugcuaagcaaguuu

SEQ ID NO: 231741 - RNA, 19 nt, Artificial Sequence
  Description of Artificial Sequence: Synthetic oligonucleotide
  Antisense strand to SEQ ID NO: 231740
aaacuugcuuagcaauccc

SEQ ID NO: 231742 - RNA, 19 nt, Artificial Sequence
  Description of Artificial Sequence: Synthetic oligonucleotide
  Sense strand starting at position 2850 SEQ ID NO: 2983
gauuacauuucuggaugga

SEQ ID NO: 231743 - RNA, 19 nt, Artificial Sequence
  Description of Artificial Sequence: Synthetic oligonucleotide
  Antisense strand to SEQ ID NO: 231742
uccauccagaaauguaauc

SEQ ID NO: 231744 - RNA, 19 nt, Artificial Sequence
  Description of Artificial Sequence: Synthetic oligonucleotide
  Sense strand starting at position 2875 SEQ ID NO: 2983
augaaugaauguguucuga

SEQ ID NO: 231745 - RNA, 19 nt, Artificial Sequence
  Description of Artificial Sequence: Synthetic oligonucleotide
  Antisense strand to SEQ ID NO: 231744
ucagaacacauucauucau

SEQ ID NO: 231746 - RNA, 19 nt, Artificial Sequence
  Description of Artificial Sequence: Synthetic oligonucleotide
  Sense strand starting at position 2877 SEQ ID NO: 2983
gaaugaauguguucugaau

SEQ ID NO: 231747 - RNA, 19 nt, Artificial Sequence
  Description of Artificial Sequence: Synthetic oligonucleotide
  Antisense strand to SEQ ID NO: 231746
auucagaacacauucauuc

SEQ ID NO: 231748 - RNA, 19 nt, Artificial Sequence
  Description of Artificial Sequence: Synthetic oligonucleotide
  Sense strand starting at position 2883 SEQ ID NO: 2983
auguguucugaauauugga

SEQ ID NO: 231749 - RNA, 19 nt, Artificial Sequence
  Description of Artificial Sequence: Synthetic oligonucleotide
  Antisense strand to SEQ ID NO: 231748
uccaauauucagaacacau

SEQ ID NO: 231750 - RNA, 19 nt, Artificial Sequence
  Description of Artificial Sequence: Synthetic oligonucleotide
  Sense strand starting at position 2890 SEQ ID NO: 2983
cugaauauuggaugcugaa

SEQ ID NO: 231751 - RNA, 19 nt, Artificial Sequence
  Description of Artificial Sequence: Synthetic oligonucleotide
  Antisense strand to SEQ ID NO: 231750
uucagcauccaauauucag

SEQ ID NO: 231752 - RNA, 19 nt, Artificial Sequence
  Description of Artificial Sequence: Synthetic oligonucleotide
  Sense strand starting at position 2971 SEQ ID NO: 2983
cucaaagaguucuuagaca

SEQ ID NO: 231753 - RNA, 19 nt, Artificial Sequence
  Description of Artificial Sequence: Synthetic oligonucleotide
  Antisense strand to SEQ ID NO: 231752
ugucuaagaacucuuugag

SEQ ID NO: 231754 - RNA, 19 nt, Artificial Sequence
  Description of Artificial Sequence: Synthetic oligonucleotide
  Sense strand starting at position 3057 SEQ ID NO: 2983
uuucuuucccaaugaggaa

SEQ ID NO: 231755 - RNA, 19 nt, Artificial Sequence
  Description of Artificial Sequence: Synthetic oligonucleotide
  Antisense strand to SEQ ID NO: 231754
uuccucauugggaaagaaa

SEQ ID NO: 231756 - RNA, 19 nt, Artificial Sequence
  Description of Artificial Sequence: Synthetic oligonucleotide
  Sense strand starting at position 3114 SEQ ID NO: 2983
caaagcgaauuccuugaga

SEQ ID NO: 231757 - RNA, 19 nt, Artificial Sequence
  Description of Artificial Sequence: Synthetic oligonucleotide
  Antisense strand to SEQ ID NO: 231756
ucucaaggaauucgcuuug

SEQ ID NO: 231758 - RNA, 19 nt, Artificial Sequence
  Description of Artificial Sequence: Synthetic oligonucleotide
  Sense strand starting at position 3116 SEQ ID NO: 2983
aagcgaauuccuugagaau

SEQ ID NO: 231759 - RNA, 19 nt, Artificial Sequence
  Description of Artificial Sequence: Synthetic oligonucleotide
  Antisense strand to SEQ ID NO: 231758
auucucaaggaauucgcuu

SEQ ID NO: 231760 - RNA, 19 nt, Artificial Sequence
  Description of Artificial Sequence: Synthetic oligonucleotide
  Sense strand starting at position 3117 SEQ ID NO: 2983
agcgaauuccuugagaaua

SEQ ID NO: 231761 - RNA, 19 nt, Artificial Sequence
  Description of Artificial Sequence: Synthetic oligonucleotide
  Antisense strand to SEQ ID NO: 231760
uauucucaaggaauucgcu

SEQ ID NO: 231762 - RNA, 19 nt, Artificial Sequence
  Description of Artificial Sequence: Synthetic oligonucleotide
  Sense strand starting at position 3130 SEQ ID NO: 2983
agaauagacuuugcauucu

SEQ ID NO: 231763 - RNA, 19 nt, Artificial Sequence
  Description of Artificial Sequence: Synthetic oligonucleotide
  Antisense strand to SEQ ID NO: 231762
agaaugcaaagucuauucu

SEQ ID NO: 231764 - RNA, 19 nt, Artificial Sequence
  Description of Artificial Sequence: Synthetic oligonucleotide
  Sense strand starting at position 3182 SEQ ID NO: 2983
gcuagucaugcaguguguu

SEQ ID NO: 231765 - RNA, 19 nt, Artificial Sequence
  Description of Artificial Sequence: Synthetic oligonucleotide
  Antisense strand to SEQ ID NO: 231764
aacacacugcaugacuagc

SEQ ID NO: 231766 - RNA, 19 nt, Artificial Sequence
  Description of Artificial Sequence: Synthetic oligonucleotide
  Sense strand starting at position 3241 SEQ ID NO: 2983
acuuauacguggucagaca

SEQ ID NO: 231767 - RNA, 19 nt, Artificial Sequence
  Description of Artificial Sequence: Synthetic oligonucleotide
  Antisense strand to SEQ ID NO: 231766
ugucugaccacguauaagu

SEQ ID NO: 231768 - RNA, 19 nt, Artificial Sequence
  Description of Artificial Sequence: Synthetic oligonucleotide
  Sense strand starting at position 3291 SEQ ID NO: 2983
auuauuccucuguagggua

SEQ ID NO: 231769 - RNA, 19 nt, Artificial Sequence
  Description of Artificial Sequence: Synthetic oligonucleotide
  Antisense strand to SEQ ID NO: 231768
uacccuacagaggaauaau

SEQ ID NO: 231770 - RNA, 19 nt, Artificial Sequence
  Description of Artificial Sequence: Synthetic oligonucleotide
  Sense strand starting at position 3299 SEQ ID NO: 2983
ucuguaggguacucacuaa

SEQ ID NO: 231771 - RNA, 19 nt, Artificial Sequence
  Description of Artificial Sequence: Synthetic oligonucleotide
  Antisense strand to SEQ ID NO: 231770
uuagugaguacccuacaga

SEQ ID NO: 231772 - RNA, 19 nt, Artificial Sequence
  Description of Artificial Sequence: Synthetic oligonucleotide
  Sense strand starting at position 3473 SEQ ID NO: 2983
aaguuagaugauuggcuca

SEQ ID NO: 231773 - RNA, 19 nt, Artificial Sequence
  Description of Artificial Sequence: Synthetic oligonucleotide
  Antisense strand to SEQ ID NO: 231772
ugagccaaucaucuaacuu

SEQ ID NO: 231774 - RNA, 19 nt, Artificial Sequence
  Description of Artificial Sequence: Synthetic oligonucleotide
  Sense strand starting at position 3475 SEQ ID NO: 2983
guuagaugauuggcucaag

SEQ ID NO: 231775 - RNA, 19 nt, Artificial Sequence
  Description of Artificial Sequence: Synthetic oligonucleotide
  Antisense strand to SEQ ID NO: 231774
cuugagccaaucaucuaac

SEQ ID NO: 231776 - RNA, 19 nt, Artificial Sequence
  Description of Artificial Sequence: Synthetic oligonucleotide
  Sense strand starting at position 3478 SEQ ID NO: 2983
agaugauuggcucaagguu

SEQ ID NO: 231777 - RNA, 19 nt, Artificial Sequence
  Description of Artificial Sequence: Synthetic oligonucleotide
  Antisense strand to SEQ ID NO: 231776
aaccuugagccaaucaucu

SEQ ID NO: 231778 - RNA, 19 nt, Artificial Sequence
  Description of Artificial Sequence: Synthetic oligonucleotide
  Sense strand starting at position 3679 SEQ ID NO: 2983
uuaaaugaccaucgguaua

SEQ ID NO: 231779 - RNA, 19 nt, Artificial Sequence
  Description of Artificial Sequence: Synthetic oligonucleotide
  Antisense strand to SEQ ID NO: 231778
uauaccgauggucauuuaa

SEQ ID NO: 231780 - RNA, 19 nt, Artificial Sequence
  Description of Artificial Sequence: Synthetic oligonucleotide
  Sense strand starting at position 3681 SEQ ID NO: 2983
aaaugaccaucgguauaca

SEQ ID NO: 231781 - RNA, 19 nt, Artificial Sequence
  Description of Artificial Sequence: Synthetic oligonucleotide
  Antisense strand to SEQ ID NO: 231780
uguauaccgauggucauuu

SEQ ID NO: 231782 - RNA, 19 nt, Artificial Sequence
  Description of Artificial Sequence: Synthetic oligonucleotide
  Sense strand starting at position 3684 SEQ ID NO: 2983
ugaccaucgguauacaauu

SEQ ID NO: 231783 - RNA, 19 nt, Artificial Sequence
  Description of Artificial Sequence: Synthetic oligonucleotide
  Antisense strand to SEQ ID NO: 231782
aauuguauaccgaugguca

SEQ ID NO: 231784 - RNA, 19 nt, Artificial Sequence
  Description of Artificial Sequence: Synthetic oligonucleotide
  Sense strand starting at position 3745 SEQ ID NO: 2983
gcaugcaaguuaucagaaa

SEQ ID NO: 231785 - RNA, 19 nt, Artificial Sequence
  Description of Artificial Sequence: Synthetic oligonucleotide
  Antisense strand to SEQ ID NO: 231784
uuucugauaacuugcaugc

SEQ ID NO: 231786 - RNA, 19 nt, Artificial Sequence
  Description of Artificial Sequence: Synthetic oligonucleotide
  Sense strand starting at position 3769 SEQ ID NO: 2983
uugccauucguggaacuga

SEQ ID NO: 231787 - RNA, 19 nt, Artificial Sequence
  Description of Artificial Sequence: Synthetic oligonucleotide
  Antisense strand to SEQ ID NO: 231786
ucaguuccacgaauggcaa

SEQ ID NO: 231788 - RNA, 19 nt, Artificial Sequence
  Description of Artificial Sequence: Synthetic oligonucleotide
  Sense strand starting at position 3884 SEQ ID NO: 2983
uaaggagugaguuauuggu

SEQ ID NO: 231789 - RNA, 19 nt, Artificial Sequence
  Description of Artificial Sequence: Synthetic oligonucleotide
  Antisense strand to SEQ ID NO: 231788
accaauaacucacuccuua

SEQ ID NO: 231790 - RNA, 19 nt, Artificial Sequence
  Description of Artificial Sequence: Synthetic oligonucleotide
  Sense strand starting at position 3886 SEQ ID NO: 2983
aggagugaguuauuggucu

SEQ ID NO: 231791 - RNA, 19 nt, Artificial Sequence
  Description of Artificial Sequence: Synthetic oligonucleotide
  Antisense strand to SEQ ID NO: 231790
agaccaauaacucacuccu

SEQ ID NO: 231792 - RNA, 19 nt, Artificial Sequence
  Description of Artificial Sequence: Synthetic oligonucleotide
  Sense strand starting at position 3956 SEQ ID NO: 2983
cauuguugaugucugagaa

SEQ ID NO: 231793 - RNA, 19 nt, Artificial Sequence
  Description of Artificial Sequence: Synthetic oligonucleotide
  Antisense strand to SEQ ID NO: 231792
uucucagacaucaacaaug

SEQ ID NO: 231794 - RNA, 19 nt, Artificial Sequence
  Description of Artificial Sequence: Synthetic oligonucleotide
  Sense strand starting at position 3957 SEQ ID NO: 2983
auuguugaugucugagaag

SEQ ID NO: 231795 - RNA, 19 nt, Artificial Sequence
  Description of Artificial Sequence: Synthetic oligonucleotide
  Antisense strand to SEQ ID NO: 231794
cuucucagacaucaacaau

SEQ ID NO: 231796 - RNA, 19 nt, Artificial Sequence
  Description of Artificial Sequence: Synthetic oligonucleotide
  Sense strand starting at position 3971 SEQ ID NO: 2983
agaagaacucuuugaaagc

SEQ ID NO: 231797 - RNA, 19 nt, Artificial Sequence
  Description of Artificial Sequence: Synthetic oligonucleotide
  Antisense strand to SEQ ID NO: 231796
gcuuucaaagaguucuucu

SEQ ID NO: 231798 - RNA, 19 nt, Artificial Sequence
  Description of Artificial Sequence: Synthetic oligonucleotide
  Sense strand starting at position 141 SEQ ID NO: 2984
ccaccaaacuaaguaguua

SEQ ID NO: 231799 - RNA, 19 nt, Artificial Sequence
  Description of Artificial Sequence: Synthetic oligonucleotide
  Antisense strand to SEQ ID NO: 231798
uaacuacuuaguuuggugg

SEQ ID NO: 231800 - RNA, 19 nt, Artificial Sequence
  Description of Artificial Sequence: Synthetic oligonucleotide
  Sense strand starting at position 212 SEQ ID NO: 2984
augucaaguaguuauguga

SEQ ID NO: 231801 - RNA, 19 nt, Artificial Sequence
  Description of Artificial Sequence: Synthetic oligonucleotide
  Antisense strand to SEQ ID NO: 231800
ucacauaacuacuugacau

SEQ ID NO: 231802 - RNA, 19 nt, Artificial Sequence
  Description of Artificial Sequence: Synthetic oligonucleotide
  Sense strand starting at position 219 SEQ ID NO: 2984
guaguuaugugauuacaau

SEQ ID NO: 231803 - RNA, 19 nt, Artificial Sequence
  Description of Artificial Sequence: Synthetic oligonucleotide
  Antisense strand to SEQ ID NO: 231802
auuguaaucacauaacuac

SEQ ID NO: 231804 - RNA, 19 nt, Artificial Sequence
  Description of Artificial Sequence: Synthetic oligonucleotide
  Sense strand starting at position 244 SEQ ID NO: 2984
aguaacaauuacuuguaca

SEQ ID NO: 231805 - RNA, 19 nt, Artificial Sequence
  Description of Artificial Sequence: Synthetic oligonucleotide
  Antisense strand to SEQ ID NO: 231804
uguacaaguaauuguuacu

SEQ ID NO: 231806 - RNA, 19 nt, Artificial Sequence
  Description of Artificial Sequence: Synthetic oligonucleotide
  Sense strand starting at position 338 SEQ ID NO: 2984
gccaauucuuaagugacca

SEQ ID NO: 231807 - RNA, 19 nt, Artificial Sequence
  Description of Artificial Sequence: Synthetic oligonucleotide
  Antisense strand to SEQ ID NO: 231806
uggucacuuaagaauuggc

SEQ ID NO: 231808 - RNA, 19 nt, Artificial Sequence
  Description of Artificial Sequence: Synthetic oligonucleotide
  Sense strand starting at position 435 SEQ ID NO: 2984
ugucauuuauuccagaaag

SEQ ID NO: 231809 - RNA, 19 nt, Artificial Sequence
  Description of Artificial Sequence: Synthetic oligonucleotide
  Antisense strand to SEQ ID NO: 231808
cuuucuggaauaaaugaca

SEQ ID NO: 231810 - RNA, 19 nt, Artificial Sequence
  Description of Artificial Sequence: Synthetic oligonucleotide
  Sense strand starting at position 831 SEQ ID NO: 2984
uuucuacuaggguaguaaa

SEQ ID NO: 231811 - RNA, 19 nt, Artificial Sequence
  Description of Artificial Sequence: Synthetic oligonucleotide
  Antisense strand to SEQ ID NO: 231810
uuuacuacccuaguagaaa

SEQ ID NO: 231812 - RNA, 19 nt, Artificial Sequence
  Description of Artificial Sequence: Synthetic oligonucleotide
  Sense strand starting at position 858 SEQ ID NO: 2984
auaggcagacuuugggaau

SEQ ID NO: 231813 - RNA, 19 nt, Artificial Sequence
  Description of Artificial Sequence: Synthetic oligonucleotide
  Antisense strand to SEQ ID NO: 231812
auucccaaagucugccuau

SEQ ID NO: 231814 - RNA, 19 nt, Artificial Sequence
  Description of Artificial Sequence: Synthetic oligonucleotide
  Sense strand starting at position 871 SEQ ID NO: 2984
gggaauccucaagguguuu

SEQ ID NO: 231815 - RNA, 19 nt, Artificial Sequence
  Description of Artificial Sequence: Synthetic oligonucleotide
  Antisense strand to SEQ ID NO: 231814
aaacaccuugaggauuccc

SEQ ID NO: 231816 - RNA, 19 nt, Artificial Sequence
  Description of Artificial Sequence: Synthetic oligonucleotide
  Sense strand starting at position 914 SEQ ID NO: 2984
aagguuuccuugucaugga

SEQ ID NO: 231817 - RNA, 19 nt, Artificial Sequence
  Description of Artificial Sequence: Synthetic oligonucleotide
  Antisense strand to SEQ ID NO: 231816
uccaugacaaggaaaccuu

SEQ ID NO: 231818 - RNA, 19 nt, Artificial Sequence
  Description of Artificial Sequence: Synthetic oligonucleotide
  Sense strand starting at position 1018 SEQ ID NO: 2984
guagguaaguaucuaacca

SEQ ID NO: 231819 - RNA, 19 nt, Artificial Sequence
  Description of Artificial Sequence: Synthetic oligonucleotide
  Antisense strand to SEQ ID NO: 231818
ugguuagauacuuaccuac

SEQ ID NO: 231820 - RNA, 19 nt, Artificial Sequence
  Description of Artificial Sequence: Synthetic oligonucleotide
  Sense strand starting at position 1022 SEQ ID NO: 2984
guaaguaucuaaccauaca

SEQ ID NO: 231821 - RNA, 19 nt, Artificial Sequence
  Description of Artificial Sequence: Synthetic oligonucleotide
  Antisense strand to SEQ ID NO: 231820
uguaugguuagauacuuac

SEQ ID NO: 231822 - RNA, 19 nt, Artificial Sequence
  Description of Artificial Sequence: Synthetic oligonucleotide
  Sense strand starting at position 1079 SEQ ID NO: 2984
cguucucaaguuuaauaga

SEQ ID NO: 231823 - RNA, 19 nt, Artificial Sequence
  Description of Artificial Sequence: Synthetic oligonucleotide
  Antisense strand to SEQ ID NO: 231822
ucuauuaaacuugagaacg

SEQ ID NO: 231824 - RNA, 19 nt, Artificial Sequence
  Description of Artificial Sequence: Synthetic oligonucleotide
  Sense strand starting at position 1101 SEQ ID NO: 2984
cacugaucugggugaccca

SEQ ID NO: 231825 - RNA, 19 nt, Artificial Sequence
  Description of Artificial Sequence: Synthetic oligonucleotide
  Antisense strand to SEQ ID NO: 231824
ugggucacccagaucagug

SEQ ID NO: 231826 - RNA, 19 nt, Artificial Sequence
  Description of Artificial Sequence: Synthetic oligonucleotide
  Sense strand starting at position 1367 SEQ ID NO: 2984
auacaaguggcuuagcgaa

SEQ ID NO: 231827 - RNA, 19 nt, Artificial Sequence
  Description of Artificial Sequence: Synthetic oligonucleotide
  Antisense strand to SEQ ID NO: 231826
uucgcuaagccacuuguau

SEQ ID NO: 231828 - RNA, 19 nt, Artificial Sequence
  Description of Artificial Sequence: Synthetic oligonucleotide
  Sense strand starting at position 1391 SEQ ID NO: 2984
ggugcaugcagagaugacu

SEQ ID NO: 231829 - RNA, 19 nt, Artificial Sequence
  Description of Artificial Sequence: Synthetic oligonucleotide
  Antisense strand to SEQ ID NO: 231828
agucaucucugcaugcacc

SEQ ID NO: 231830 - RNA, 19 nt, Artificial Sequence
  Description of Artificial Sequence: Synthetic oligonucleotide
  Sense strand starting at position 1470 SEQ ID NO: 2984
guaggaaauuuggagaaca

SEQ ID NO: 231831 - RNA, 19 nt, Artificial Sequence
  Description of Artificial Sequence: Synthetic oligonucleotide
  Antisense strand to SEQ ID NO: 231830
uguucuccaaauuuccuac

SEQ ID NO: 231832 - RNA, 19 nt, Artificial Sequence
  Description of Artificial Sequence: Synthetic oligonucleotide
  Sense strand starting at position 1509 SEQ ID NO: 2984
uuuggcaaccuuuagaguu

SEQ ID NO: 231833 - RNA, 19 nt, Artificial Sequence
  Description of Artificial Sequence: Synthetic oligonucleotide
  Antisense strand to SEQ ID NO: 231832
aacucuaaagguugccaaa

SEQ ID NO: 231834 - RNA, 19 nt, Artificial Sequence
  Description of Artificial Sequence: Synthetic oligonucleotide
  Sense strand starting at position 1674 SEQ ID NO: 2984
ggguguugggauuggagga

SEQ ID NO: 231835 - RNA, 19 nt, Artificial Sequence
  Description of Artificial Sequence: Synthetic oligonucleotide
  Antisense strand to SEQ ID NO: 231834
uccuccaaucccaacaccc

SEQ ID NO: 231836 - RNA, 19 nt, Artificial Sequence
  Description of Artificial Sequence: Synthetic oligonucleotide
  Sense strand starting at position 1900 SEQ ID NO: 2984
gucagucuccaugagguca

SEQ ID NO: 231837 - RNA, 19 nt, Artificial Sequence
  Description of Artificial Sequence: Synthetic oligonucleotide
  Antisense strand to SEQ ID NO: 231836
ugaccucauggagacugac

SEQ ID NO: 231838 - RNA, 19 nt, Artificial Sequence
  Description of Artificial Sequence: Synthetic oligonucleotide
  Sense strand starting at position 2144 SEQ ID NO: 2984
cgcguuacuggaucgugaa

SEQ ID NO: 231839 - RNA, 19 nt, Artificial Sequence
  Description of Artificial Sequence: Synthetic oligonucleotide
  Antisense strand to SEQ ID NO: 231838
uucacgauccaguaacgcg

SEQ ID NO: 231840 - RNA, 19 nt, Artificial Sequence
  Description of Artificial Sequence: Synthetic oligonucleotide
  Sense strand starting at position 2634 SEQ ID NO: 2984
agacacuaagcauguuauu

SEQ ID NO: 231841 - RNA, 19 nt, Artificial Sequence
  Description of Artificial Sequence: Synthetic oligonucleotide
  Antisense strand to SEQ ID NO: 231840
aauaacaugcuuagugucu

SEQ ID NO: 231842 - RNA, 19 nt, Artificial Sequence
  Description of Artificial Sequence: Synthetic oligonucleotide
  Sense strand starting at position 2712 SEQ ID NO: 2984
uaguuuagacagugaauaa

SEQ ID NO: 231843 - RNA, 19 nt, Artificial Sequence
  Description of Artificial Sequence: Synthetic oligonucleotide
  Antisense strand to SEQ ID NO: 231842
uuauucacugucuaaacua

SEQ ID NO: 231844 - RNA, 19 nt, Artificial Sequence
  Description of Artificial Sequence: Synthetic oligonucleotide
  Sense strand starting at position 2760 SEQ ID NO: 2984
acauuauuugcccggguga

SEQ ID NO: 231845 - RNA, 19 nt, Artificial Sequence
  Description of Artificial Sequence: Synthetic oligonucleotide
  Antisense strand to SEQ ID NO: 231844
ucacccgggcaaauaaugu

SEQ ID NO: 231846 - RNA, 19 nt, Artificial Sequence
  Description of Artificial Sequence: Synthetic oligonucleotide
  Sense strand starting at position 2761 SEQ ID NO: 2984
cauuauuugcccgggugaa

SEQ ID NO: 231847 - RNA, 19 nt, Artificial Sequence
  Description of Artificial Sequence: Synthetic oligonucleotide
  Antisense strand to SEQ ID NO: 231846
uucacccgggcaaauaaug

SEQ ID NO: 231848 - RNA, 19 nt, Artificial Sequence
  Description of Artificial Sequence: Synthetic oligonucleotide
  Sense strand starting at position 2823 SEQ ID NO: 2984
uacugaggguguguuuaga

SEQ ID NO: 231849 - RNA, 19 nt, Artificial Sequence
  Description of Artificial Sequence: Synthetic oligonucleotide
  Antisense strand to SEQ ID NO: 231848
ucuaaacacacccucagua

SEQ ID NO: 231850 - RNA, 19 nt, Artificial Sequence
  Description of Artificial Sequence: Synthetic oligonucleotide
  Sense strand starting at position 2913 SEQ ID NO: 2984
cguacuguuaaaucgugua

SEQ ID NO: 231851 - RNA, 19 nt, Artificial Sequence
  Description of Artificial Sequence: Synthetic oligonucleotide
  Antisense strand to SEQ ID NO: 231850
uacacgauuuaacaguacg

SEQ ID NO: 231852 - RNA, 19 nt, Artificial Sequence
  Description of Artificial Sequence: Synthetic oligonucleotide
  Sense strand starting at position 2921 SEQ ID NO: 2984
uaaaucguguaggcauuua

SEQ ID NO: 231853 - RNA, 19 nt, Artificial Sequence
  Description of Artificial Sequence: Synthetic oligonucleotide
  Antisense strand to SEQ ID NO: 231852
uaaaugccuacacgauuua

SEQ ID NO: 231854 - RNA, 19 nt, Artificial Sequence
  Description of Artificial Sequence: Synthetic oligonucleotide
  Sense strand starting at position 2952 SEQ ID NO: 2984
ucauauugauaccuguuga

SEQ ID NO: 231855 - RNA, 19 nt, Artificial Sequence
  Description of Artificial Sequence: Synthetic oligonucleotide
  Antisense strand to SEQ ID NO: 231854
ucaacagguaucaauauga

SEQ ID NO: 231856 - RNA, 19 nt, Artificial Sequence
  Description of Artificial Sequence: Synthetic oligonucleotide
  Sense strand starting at position 2997 SEQ ID NO: 2984
uugugucugauggauagau

SEQ ID NO: 231857 - RNA, 19 nt, Artificial Sequence
  Description of Artificial Sequence: Synthetic oligonucleotide
  Antisense strand to SEQ ID NO: 231856
aucuauccaucagacacaa

SEQ ID NO: 231858 - RNA, 19 nt, Artificial Sequence
  Description of Artificial Sequence: Synthetic oligonucleotide
  Sense strand starting at position 2999 SEQ ID NO: 2984
gugucugauggauagaugu

SEQ ID NO: 231859 - RNA, 19 nt, Artificial Sequence
  Description of Artificial Sequence: Synthetic oligonucleotide
  Antisense strand to SEQ ID NO: 231858
acaucuauccaucagacac

SEQ ID NO: 231860 - RNA, 19 nt, Artificial Sequence
  Description of Artificial Sequence: Synthetic oligonucleotide
  Sense strand starting at position 3006 SEQ ID NO: 2984
auggauagauguuccuauc

SEQ ID NO: 231861 - RNA, 19 nt, Artificial Sequence
  Description of Artificial Sequence: Synthetic oligonucleotide
  Antisense strand to SEQ ID NO: 231860
gauaggaacaucuauccau

SEQ ID NO: 231862 - RNA, 19 nt, Artificial Sequence
  Description of Artificial Sequence: Synthetic oligonucleotide
  Sense strand starting at position 3428 SEQ ID NO: 2984
cuugauauggcccauuaug

SEQ ID NO: 231863 - RNA, 19 nt, Artificial Sequence
  Description of Artificial Sequence: Synthetic oligonucleotide
  Antisense strand to SEQ ID NO: 231862
cauaaugggccauaucaag

SEQ ID NO: 231864 - RNA, 19 nt, Artificial Sequence
  Description of Artificial Sequence: Synthetic oligonucleotide
  Sense strand starting at position 3466 SEQ ID NO: 2984
gugugaauauuagucacau

SEQ ID NO: 231865 - RNA, 19 nt, Artificial Sequence
  Description of Artificial Sequence: Synthetic oligonucleotide
  Antisense strand to SEQ ID NO: 231864
augugacuaauauucacac

SEQ ID NO: 231866 - RNA, 19 nt, Artificial Sequence
  Description of Artificial Sequence: Synthetic oligonucleotide
  Sense strand starting at position 3467 SEQ ID NO: 2984
ugugaauauuagucacauu

SEQ ID NO: 231867 - RNA, 19 nt, Artificial Sequence
  Description of Artificial Sequence: Synthetic oligonucleotide
  Antisense strand to SEQ ID NO: 231866
aaugugacuaauauucaca

SEQ ID NO: 231868 - RNA, 19 nt, Artificial Sequence
  Description of Artificial Sequence: Synthetic oligonucleotide
  Sense strand starting at position 3505 SEQ ID NO: 2984
ggcugaguggcuuaauaau

SEQ ID NO: 231869 - RNA, 19 nt, Artificial Sequence
  Description of Artificial Sequence: Synthetic oligonucleotide
  Antisense strand to SEQ ID NO: 231868
auuauuaagccacucagcc

SEQ ID NO: 231870 - RNA, 19 nt, Artificial Sequence
  Description of Artificial Sequence: Synthetic oligonucleotide
  Sense strand starting at position 3722 SEQ ID NO: 2984
uccucauaggguuguugaa

SEQ ID NO: 231871 - RNA, 19 nt, Artificial Sequence
  Description of Artificial Sequence: Synthetic oligonucleotide
  Antisense strand to SEQ ID NO: 231870
uucaacaacccuaugagga

SEQ ID NO: 231872 - RNA, 19 nt, Artificial Sequence
  Description of Artificial Sequence: Synthetic oligonucleotide
  Sense strand starting at position 3868 SEQ ID NO: 2984
aauauuagugaaugaacga

SEQ ID NO: 231873 - RNA, 19 nt, Artificial Sequence
  Description of Artificial Sequence: Synthetic oligonucleotide
  Antisense strand to SEQ ID NO: 231872
ucguucauucacuaauauu

SEQ ID NO: 231874 - RNA, 19 nt, Artificial Sequence
  Description of Artificial Sequence: Synthetic oligonucleotide
  Sense strand starting at position 3873 SEQ ID NO: 2984
uagugaaugaacgagugau

SEQ ID NO: 231875 - RNA, 19 nt, Artificial Sequence
  Description of Artificial Sequence: Synthetic oligonucleotide
  Antisense strand to SEQ ID NO: 231874
aucacucguucauucacua

SEQ ID NO: 231876 - RNA, 19 nt, Artificial Sequence
  Description of Artificial Sequence: Synthetic oligonucleotide
  Sense strand starting at position 3951 SEQ ID NO: 2984
ggaauaguauucucuuucu

SEQ ID NO: 231877 - RNA, 19 nt, Artificial Sequence
  Description of Artificial Sequence: Synthetic oligonucleotide
  Antisense strand to SEQ ID NO: 231876
agaaagagaauacuauucc

SEQ ID NO: 231878 - RNA, 19 nt, Artificial Sequence
  Description of Artificial Sequence: Synthetic oligonucleotide
  Sense strand starting at position 99 SEQ ID NO: 2985
agaauuguuccagguuaga

SEQ ID NO: 231879 - RNA, 19 nt, Artificial Sequence
  Description of Artificial Sequence: Synthetic oligonucleotide
  Antisense strand to SEQ ID NO: 231878
ucuaaccuggaacaauucu

SEQ ID NO: 231880 - RNA, 19 nt, Artificial Sequence
  Description of Artificial Sequence: Synthetic oligonucleotide
  Sense strand starting at position 102 SEQ ID NO: 2985
auuguuccagguuagacau

SEQ ID NO: 231881 - RNA, 19 nt, Artificial Sequence
  Description of Artificial Sequence: Synthetic oligonucleotide
  Antisense strand to SEQ ID NO: 231880
augucuaaccuggaacaau

SEQ ID NO: 231882 - RNA, 19 nt, Artificial Sequence
  Description of Artificial Sequence: Synthetic oligonucleotide
  Sense strand starting at position 282 SEQ ID NO: 2985
gaguguguccucguucuua

SEQ ID NO: 231883 - RNA, 19 nt, Artificial Sequence
  Description of Artificial Sequence: Synthetic oligonucleotide
  Antisense strand to SEQ ID NO: 231882
uaagaacgaggacacacuc

SEQ ID NO: 231884 - RNA, 19 nt, Artificial Sequence
  Description of Artificial Sequence: Synthetic oligonucleotide
  Sense strand starting at position 284 SEQ ID NO: 2985
guguguccucguucuuaug

SEQ ID NO: 231885 - RNA, 19 nt, Artificial Sequence
  Description of Artificial Sequence: Synthetic oligonucleotide
  Antisense strand to SEQ ID NO: 231884
cauaagaacgaggacacac

SEQ ID NO: 231886 - RNA, 19 nt, Artificial Sequence
  Description of Artificial Sequence: Synthetic oligonucleotide
  Sense strand starting at position 298 SEQ ID NO: 2985
uuaugaaauguaugcucaa

SEQ ID NO: 231887 - RNA, 19 nt, Artificial Sequence
  Description of Artificial Sequence: Synthetic oligonucleotide
  Antisense strand to SEQ ID NO: 231886
uugagcauacauuucauaa

SEQ ID NO: 231888 - RNA, 19 nt, Artificial Sequence
  Description of Artificial Sequence: Synthetic oligonucleotide
  Sense strand starting at position 299 SEQ ID NO: 2985
uaugaaauguaugcucaag

SEQ ID NO: 231889 - RNA, 19 nt, Artificial Sequence
  Description of Artificial Sequence: Synthetic oligonucleotide
  Antisense strand to SEQ ID NO: 231888
cuugagcauacauuucaua

SEQ ID NO: 231890 - RNA, 19 nt, Artificial Sequence
  Description of Artificial Sequence: Synthetic oligonucleotide
  Sense strand starting at position 301 SEQ ID NO: 2985
ugaaauguaugcucaagua

SEQ ID NO: 231891 - RNA, 19 nt, Artificial Sequence
  Description of Artificial Sequence: Synthetic oligonucleotide
  Antisense strand to SEQ ID NO: 231890
uacuugagcauacauuuca

SEQ ID NO: 231892 - RNA, 19 nt, Artificial Sequence
  Description of Artificial Sequence: Synthetic oligonucleotide
  Sense strand starting at position 573 SEQ ID NO: 2985
gcagguacaaauuggaauu

SEQ ID NO: 231893 - RNA, 19 nt, Artificial Sequence
  Description of Artificial Sequence: Synthetic oligonucleotide
  Antisense strand to SEQ ID NO: 231892
aauuccaauuuguaccugc

SEQ ID NO: 231894 - RNA, 19 nt, Artificial Sequence
  Description of Artificial Sequence: Synthetic oligonucleotide
  Sense strand starting at position 665 SEQ ID NO: 2985
ggccuuagcagauauagac

SEQ ID NO: 231895 - RNA, 19 nt, Artificial Sequence
  Description of Artificial Sequence: Synthetic oligonucleotide
  Antisense strand to SEQ ID NO: 231894
gucuauaucugcuaaggcc

SEQ ID NO: 231896 - RNA, 19 nt, Artificial Sequence
  Description of Artificial Sequence: Synthetic oligonucleotide
  Sense strand starting at position 771 SEQ ID NO: 2985
uucuaaauguugucuacaa

SEQ ID NO: 231897 - RNA, 19 nt, Artificial Sequence
  Description of Artificial Sequence: Synthetic oligonucleotide
  Antisense strand to SEQ ID NO: 231896
uuguagacaacauuuagaa

SEQ ID NO: 231898 - RNA, 19 nt, Artificial Sequence
  Description of Artificial Sequence: Synthetic oligonucleotide
  Sense strand starting at position 772 SEQ ID NO: 2985
ucuaaauguugucuacaag

SEQ ID NO: 231899 - RNA, 19 nt, Artificial Sequence
  Description of Artificial Sequence: Synthetic oligonucleotide
  Antisense strand to SEQ ID NO: 231898
cuuguagacaacauuuaga

SEQ ID NO: 231900 - RNA, 19 nt, Artificial Sequence
  Description of Artificial Sequence: Synthetic oligonucleotide
  Sense strand starting at position 773 SEQ ID NO: 2985
cuaaauguugucuacaaga

SEQ ID NO: 231901 - RNA, 19 nt, Artificial Sequence
  Description of Artificial Sequence: Synthetic oligonucleotide
  Antisense strand to SEQ ID NO: 231900
ucuuguagacaacauuuag

SEQ ID NO: 231902 - RNA, 19 nt, Artificial Sequence
  Description of Artificial Sequence: Synthetic oligonucleotide
  Sense strand starting at position 778 SEQ ID NO: 2985
uguugucuacaagagaauc

SEQ ID NO: 231903 - RNA, 19 nt, Artificial Sequence
  Description of Artificial Sequence: Synthetic oligonucleotide
  Antisense strand to SEQ ID NO: 231902
gauucucuuguagacaaca

SEQ ID NO: 231904 - RNA, 19 nt, Artificial Sequence
  Description of Artificial Sequence: Synthetic oligonucleotide
  Sense strand starting at position 1078 SEQ ID NO: 2985
gggauucugaugugaucau

SEQ ID NO: 231905 - RNA, 19 nt, Artificial Sequence
  Description of Artificial Sequence: Synthetic oligonucleotide
  Antisense strand to SEQ ID NO: 231904
augaucacaucagaauccc

SEQ ID NO: 231906 - RNA, 19 nt, Artificial Sequence
  Description of Artificial Sequence: Synthetic oligonucleotide
  Sense strand starting at position 1087 SEQ ID NO: 2985
augugaucaucagcaaaua

SEQ ID NO: 231907 - RNA, 19 nt, Artificial Sequence
  Description of Artificial Sequence: Synthetic oligonucleotide
  Antisense strand to SEQ ID NO: 231906
uauuugcugaugaucacau

SEQ ID NO: 231908 - RNA, 19 nt, Artificial Sequence
  Description of Artificial Sequence: Synthetic oligonucleotide
  Sense strand starting at position 1088 SEQ ID NO: 2985
ugugaucaucagcaaauaa

SEQ ID NO: 231909 - RNA, 19 nt, Artificial Sequence
  Description of Artificial Sequence: Synthetic oligonucleotide
  Antisense strand to SEQ ID NO: 231908
uuauuugcugaugaucaca

SEQ ID NO: 231910 - RNA, 19 nt, Artificial Sequence
  Description of Artificial Sequence: Synthetic oligonucleotide
  Sense strand starting at position 1322 SEQ ID NO: 2985
augcuucuccuagaagaua

SEQ ID NO: 231911 - RNA, 19 nt, Artificial Sequence
  Description of Artificial Sequence: Synthetic oligonucleotide
  Antisense strand to SEQ ID NO: 231910
uaucuucuaggagaagcau

SEQ ID NO: 231912 - RNA, 19 nt, Artificial Sequence
  Description of Artificial Sequence: Synthetic oligonucleotide
  Sense strand starting at position 1361 SEQ ID NO: 2985
guacauacgacuuggcaaa

SEQ ID NO: 231913 - RNA, 19 nt, Artificial Sequence
  Description of Artificial Sequence: Synthetic oligonucleotide
  Antisense strand to SEQ ID NO: 231912
uuugccaagucguauguac

SEQ ID NO: 231914 - RNA, 19 nt, Artificial Sequence
  Description of Artificial Sequence: Synthetic oligonucleotide
  Sense strand starting at position 1442 SEQ ID NO: 2985
cagauucccgagugaacuc

SEQ ID NO: 231915 - RNA, 19 nt, Artificial Sequence
  Description of Artificial Sequence: Synthetic oligonucleotide
  Antisense strand to SEQ ID NO: 231914
gaguucacucgggaaucug

SEQ ID NO: 231916 - RNA, 19 nt, Artificial Sequence
  Description of Artificial Sequence: Synthetic oligonucleotide
  Sense strand starting at position 1473 SEQ ID NO: 2985
ggagguggaggguguuaaa

SEQ ID NO: 231917 - RNA, 19 nt, Artificial Sequence
  Description of Artificial Sequence: Synthetic oligonucleotide
  Antisense strand to SEQ ID NO: 231916
uuuaacacccuccaccucc

SEQ ID NO: 231918 - RNA, 19 nt, Artificial Sequence
  Description of Artificial Sequence: Synthetic oligonucleotide
  Sense strand starting at position 1772 SEQ ID NO: 2985
agacuucuccgcgcagcua

SEQ ID NO: 231919 - RNA, 19 nt, Artificial Sequence
  Description of Artificial Sequence: Synthetic oligonucleotide
  Antisense strand to SEQ ID NO: 231918
uagcugcgcggagaagucu

SEQ ID NO: 231920 - RNA, 19 nt, Artificial Sequence
  Description of Artificial Sequence: Synthetic oligonucleotide
  Sense strand starting at position 1799 SEQ ID NO: 2985
gaggcucucuuagcuagaa

SEQ ID NO: 231921 - RNA, 19 nt, Artificial Sequence
  Description of Artificial Sequence: Synthetic oligonucleotide
  Antisense strand to SEQ ID NO: 231920
uucuagcuaagagagccuc

SEQ ID NO: 231922 - RNA, 19 nt, Artificial Sequence
  Description of Artificial Sequence: Synthetic oligonucleotide
  Sense strand starting at position 1800 SEQ ID NO: 2985
aggcucucuuagcuagaaa

SEQ ID NO: 231923 - RNA, 19 nt, Artificial Sequence
  Description of Artificial Sequence: Synthetic oligonucleotide
  Antisense strand to SEQ ID NO: 231922
uuucuagcuaagagagccu

SEQ ID NO: 231924 - RNA, 19 nt, Artificial Sequence
  Description of Artificial Sequence: Synthetic oligonucleotide
  Sense strand starting at position 1801 SEQ ID NO: 2985
ggcucucuuagcuagaaag

SEQ ID NO: 231925 - RNA, 19 nt, Artificial Sequence
  Description of Artificial Sequence: Synthetic oligonucleotide
  Antisense strand to SEQ ID NO: 231924
cuuucuagcuaagagagcc

SEQ ID NO: 231926 - RNA, 19 nt, Artificial Sequence
  Description of Artificial Sequence: Synthetic oligonucleotide
  Sense strand starting at position 1803 SEQ ID NO: 2985
cucucuuagcuagaaagca

SEQ ID NO: 231927 - RNA, 19 nt, Artificial Sequence
  Description of Artificial Sequence: Synthetic oligonucleotide
  Antisense strand to SEQ ID NO: 231926
ugcuuucuagcuaagagag

SEQ ID NO: 231928 - RNA, 19 nt, Artificial Sequence
  Description of Artificial Sequence: Synthetic oligonucleotide
  Sense strand starting at position 1844 SEQ ID NO: 2985
cgagaugaaucccucauac

SEQ ID NO: 231929 - RNA, 19 nt, Artificial Sequence
  Description of Artificial Sequence: Synthetic oligonucleotide
  Antisense strand to SEQ ID NO: 231928
guaugagggauucaucucg

SEQ ID NO: 231930 - RNA, 19 nt, Artificial Sequence
  Description of Artificial Sequence: Synthetic oligonucleotide
  Sense strand starting at position 2145 SEQ ID NO: 2985
gagggaagauugcccucaa

SEQ ID NO: 231931 - RNA, 19 nt, Artificial Sequence
  Description of Artificial Sequence: Synthetic oligonucleotide
  Antisense strand to SEQ ID NO: 231930
uugagggcaaucuucccuc

SEQ ID NO: 231932 - RNA, 19 nt, Artificial Sequence
  Description of Artificial Sequence: Synthetic oligonucleotide
  Sense strand starting at position 2265 SEQ ID NO: 2985
uguugcauuuccuccagaa

SEQ ID NO: 231933 - RNA, 19 nt, Artificial Sequence
  Description of Artificial Sequence: Synthetic oligonucleotide
  Antisense strand to SEQ ID NO: 231932
uucuggaggaaaugcaaca

SEQ ID NO: 231934 - RNA, 19 nt, Artificial Sequence
  Description of Artificial Sequence: Synthetic oligonucleotide
  Sense strand starting at position 2531 SEQ ID NO: 2985
guguacggcacucacaaau

SEQ ID NO: 231935 - RNA, 19 nt, Artificial Sequence
  Description of Artificial Sequence: Synthetic oligonucleotide
  Antisense strand to SEQ ID NO: 231934
auuugugagugccguacac

SEQ ID NO: 231936 - RNA, 19 nt, Artificial Sequence
  Description of Artificial Sequence: Synthetic oligonucleotide
  Sense strand starting at position 2564 SEQ ID NO: 2985
augaguaaagauugcugau

SEQ ID NO: 231937 - RNA, 19 nt, Artificial Sequence
  Description of Artificial Sequence: Synthetic oligonucleotide
  Antisense strand to SEQ ID NO: 231936
aucagcaaucuuuacucau

SEQ ID NO: 231938 - RNA, 19 nt, Artificial Sequence
  Description of Artificial Sequence: Synthetic oligonucleotide
  Sense strand starting at position 2576 SEQ ID NO: 2985
ugcugauggacuugaacuu

SEQ ID NO: 231939 - RNA, 19 nt, Artificial Sequence
  Description of Artificial Sequence: Synthetic oligonucleotide
  Antisense strand to SEQ ID NO: 231938
aaguucaaguccaucagca

SEQ ID NO: 231940 - RNA, 19 nt, Artificial Sequence
  Description of Artificial Sequence: Synthetic oligonucleotide
  Sense strand starting at position 2853 SEQ ID NO: 2985
uccugaagauucuuaaagu

SEQ ID NO: 231941 - RNA, 19 nt, Artificial Sequence
  Description of Artificial Sequence: Synthetic oligonucleotide
  Antisense strand to SEQ ID NO: 231940
acuuuaagaaucuucagga

SEQ ID NO: 231942 - RNA, 19 nt, Artificial Sequence
  Description of Artificial Sequence: Synthetic oligonucleotide
  Sense strand starting at position 2875 SEQ ID NO: 2985
acaagaauuugucacagca

SEQ ID NO: 231943 - RNA, 19 nt, Artificial Sequence
  Description of Artificial Sequence: Synthetic oligonucleotide
  Antisense strand to SEQ ID NO: 231942
ugcugugacaaauucuugu

SEQ ID NO: 231944 - RNA, 19 nt, Artificial Sequence
  Description of Artificial Sequence: Synthetic oligonucleotide
  Sense strand starting at position 2892 SEQ ID NO: 2985
cauucuggaugcuuacaga

SEQ ID NO: 231945 - RNA, 19 nt, Artificial Sequence
  Description of Artificial Sequence: Synthetic oligonucleotide
  Antisense strand to SEQ ID NO: 231944
ucuguaagcauccagaaug

SEQ ID NO: 231946 - RNA, 19 nt, Artificial Sequence
  Description of Artificial Sequence: Synthetic oligonucleotide
  Sense strand starting at position 2920 SEQ ID NO: 2985
uggagcagugguuagauau

SEQ ID NO: 231947 - RNA, 19 nt, Artificial Sequence
  Description of Artificial Sequence: Synthetic oligonucleotide
  Antisense strand to SEQ ID NO: 231946
auaucuaaccacugcucca

SEQ ID NO: 231948 - RNA, 19 nt, Artificial Sequence
  Description of Artificial Sequence: Synthetic oligonucleotide
  Sense strand starting at position 3478 SEQ ID NO: 2985
agauguuucucauucccua

SEQ ID NO: 231949 - RNA, 19 nt, Artificial Sequence
  Description of Artificial Sequence: Synthetic oligonucleotide
  Antisense strand to SEQ ID NO: 231948
uagggaaugagaaacaucu

SEQ ID NO: 231950 - RNA, 19 nt, Artificial Sequence
  Description of Artificial Sequence: Synthetic oligonucleotide
  Sense strand starting at position 3588 SEQ ID NO: 2985
caugcuaagguuugaggau

SEQ ID NO: 231951 - RNA, 19 nt, Artificial Sequence
  Description of Artificial Sequence: Synthetic oligonucleotide
  Antisense strand to SEQ ID NO: 231950
auccucaaaccuuagcaug

SEQ ID NO: 231952 - RNA, 19 nt, Artificial Sequence
  Description of Artificial Sequence: Synthetic oligonucleotide
  Sense strand starting at position 3640 SEQ ID NO: 2985
uuugcaacucgguaauuaa

SEQ ID NO: 231953 - RNA, 19 nt, Artificial Sequence
  Description of Artificial Sequence: Synthetic oligonucleotide
  Antisense strand to SEQ ID NO: 231952
uuaauuaccgaguugcaaa

SEQ ID NO: 231954 - RNA, 19 nt, Artificial Sequence
  Description of Artificial Sequence: Synthetic oligonucleotide
  Sense strand starting at position 3643 SEQ ID NO: 2985
gcaacucgguaauuaagga

SEQ ID NO: 231955 - RNA, 19 nt, Artificial Sequence
  Description of Artificial Sequence: Synthetic oligonucleotide
  Antisense strand to SEQ ID NO: 231954
uccuuaauuaccgaguugc

SEQ ID NO: 231956 - RNA, 19 nt, Artificial Sequence
  Description of Artificial Sequence: Synthetic oligonucleotide
  Sense strand starting at position 3792 SEQ ID NO: 2985
uauuguauccaguauguua

SEQ ID NO: 231957 - RNA, 19 nt, Artificial Sequence
  Description of Artificial Sequence: Synthetic oligonucleotide
  Antisense strand to SEQ ID NO: 231956
uaacauacuggauacaaua

SEQ ID NO: 231958 - RNA, 19 nt, Artificial Sequence
  Description of Artificial Sequence: Synthetic oligonucleotide
  Sense strand starting at position 8 SEQ ID NO: 2986
aacauuuauuucugagggu

SEQ ID NO: 231959 - RNA, 19 nt, Artificial Sequence
  Description of Artificial Sequence: Synthetic oligonucleotide
  Antisense strand to SEQ ID NO: 231958
acccucagaaauaaauguu

SEQ ID NO: 231960 - RNA, 19 nt, Artificial Sequence
  Description of Artificial Sequence: Synthetic oligonucleotide
  Sense strand starting at position 21 SEQ ID NO: 2986
gagggugcagaguaucaau

SEQ ID NO: 231961 - RNA, 19 nt, Artificial Sequence
  Description of Artificial Sequence: Synthetic oligonucleotide
  Antisense strand to SEQ ID NO: 231960
auugauacucugcacccuc

SEQ ID NO: 231962 - RNA, 19 nt, Artificial Sequence
  Description of Artificial Sequence: Synthetic oligonucleotide
  Sense strand starting at position 43 SEQ ID NO: 2986
aagguugaguuucuuuaaa

SEQ ID NO: 231963 - RNA, 19 nt, Artificial Sequence
  Description of Artificial Sequence: Synthetic oligonucleotide
  Antisense strand to SEQ ID NO: 231962
uuuaaagaaacucaaccuu

SEQ ID NO: 231964 - RNA, 19 nt, Artificial Sequence
  Description of Artificial Sequence: Synthetic oligonucleotide
  Sense strand starting at position 132 SEQ ID NO: 2986
gcugguaugagggaaaugu

SEQ ID NO: 231965 - RNA, 19 nt, Artificial Sequence
  Description of Artificial Sequence: Synthetic oligonucleotide
  Antisense strand to SEQ ID NO: 231964
acauuucccucauaccagc

SEQ ID NO: 231966 - RNA, 19 nt, Artificial Sequence
  Description of Artificial Sequence: Synthetic oligonucleotide
  Sense strand starting at position 718 SEQ ID NO: 2986
cugauaucagcccauagua

SEQ ID NO: 231967 - RNA, 19 nt, Artificial Sequence
  Description of Artificial Sequence: Synthetic oligonucleotide
  Antisense strand to SEQ ID NO: 231966
uacuaugggcugauaucag

SEQ ID NO: 231968 - RNA, 19 nt, Artificial Sequence
  Description of Artificial Sequence: Synthetic oligonucleotide
  Sense strand starting at position 896 SEQ ID NO: 2986
acagcuauuccugagaucu

SEQ ID NO: 231969 - RNA, 19 nt, Artificial Sequence
  Description of Artificial Sequence: Synthetic oligonucleotide
  Antisense strand to SEQ ID NO: 231968
agaucucaggaauagcugu

SEQ ID NO: 231970 - RNA, 19 nt, Artificial Sequence
  Description of Artificial Sequence: Synthetic oligonucleotide
  Sense strand starting at position 904 SEQ ID NO: 2986
uccugagaucuguauucuc

SEQ ID NO: 231971 - RNA, 19 nt, Artificial Sequence
  Description of Artificial Sequence: Synthetic oligonucleotide
  Antisense strand to SEQ ID NO: 231970
gagaauacagaucucagga

SEQ ID NO: 231972 - RNA, 19 nt, Artificial Sequence
  Description of Artificial Sequence: Synthetic oligonucleotide
  Sense strand starting at position 907 SEQ ID NO: 2986
ugagaucuguauucucaac

SEQ ID NO: 231973 - RNA, 19 nt, Artificial Sequence
  Description of Artificial Sequence: Synthetic oligonucleotide
  Antisense strand to SEQ ID NO: 231972
guugagaauacagaucuca

SEQ ID NO: 231974 - RNA, 19 nt, Artificial Sequence
  Description of Artificial Sequence: Synthetic oligonucleotide
  Sense strand starting at position 1075 SEQ ID NO: 2986
ccugucaaagcuuguauuu

SEQ ID NO: 231975 - RNA, 19 nt, Artificial Sequence
  Description of Artificial Sequence: Synthetic oligonucleotide
  Antisense strand to SEQ ID NO: 231974
aaauacaagcuuugacagg

SEQ ID NO: 231976 - RNA, 19 nt, Artificial Sequence
  Description of Artificial Sequence: Synthetic oligonucleotide
  Sense strand starting at position 1199 SEQ ID NO: 2986
caguauuucuggucuugca

SEQ ID NO: 231977 - RNA, 19 nt, Artificial Sequence
  Description of Artificial Sequence: Synthetic oligonucleotide
  Antisense strand to SEQ ID NO: 231976
ugcaagaccagaaauacug

SEQ ID NO: 231978 - RNA, 19 nt, Artificial Sequence
  Description of Artificial Sequence: Synthetic oligonucleotide
  Sense strand starting at position 1209 SEQ ID NO: 2986
ggucuugcacaacaacaua

SEQ ID NO: 231979 - RNA, 19 nt, Artificial Sequence
  Description of Artificial Sequence: Synthetic oligonucleotide
  Antisense strand to SEQ ID NO: 231978
uauguuguugugcaagacc

SEQ ID NO: 231980 - RNA, 19 nt, Artificial Sequence
  Description of Artificial Sequence: Synthetic oligonucleotide
  Sense strand starting at position 1331 SEQ ID NO: 2986
agcuauucuaggcagauag

SEQ ID NO: 231981 - RNA, 19 nt, Artificial Sequence
  Description of Artificial Sequence: Synthetic oligonucleotide
  Antisense strand to SEQ ID NO: 231980
cuaucugccuagaauagcu

SEQ ID NO: 231982 - RNA, 19 nt, Artificial Sequence
  Description of Artificial Sequence: Synthetic oligonucleotide
  Sense strand starting at position 1588 SEQ ID NO: 2986
cuauaauugcuggaauucu

SEQ ID NO: 231983 - RNA, 19 nt, Artificial Sequence
  Description of Artificial Sequence: Synthetic oligonucleotide
  Antisense strand to SEQ ID NO: 231982
agaauuccagcaauuauag

SEQ ID NO: 231984 - RNA, 19 nt, Artificial Sequence
  Description of Artificial Sequence: Synthetic oligonucleotide
  Sense strand starting at position 1620 SEQ ID NO: 2986
ggacaaauguuucuacagu

SEQ ID NO: 231985 - RNA, 19 nt, Artificial Sequence
  Description of Artificial Sequence: Synthetic oligonucleotide
  Antisense strand to SEQ ID NO: 231984
acuguagaaacauuugucc

SEQ ID NO: 231986 - RNA, 19 nt, Artificial Sequence
  Description of Artificial Sequence: Synthetic oligonucleotide
  Sense strand starting at position 1993 SEQ ID NO: 2986
gcguucuuggcccucaaau

SEQ ID NO: 231987 - RNA, 19 nt, Artificial Sequence
  Description of Artificial Sequence: Synthetic oligonucleotide
  Antisense strand to SEQ ID NO: 231986
auuugagggccaagaacgc

SEQ ID NO: 231988 - RNA, 19 nt, Artificial Sequence
  Description of Artificial Sequence: Synthetic oligonucleotide
  Sense strand starting at position 2019 SEQ ID NO: 2986
gagugacucaagggaaguu

SEQ ID NO: 231989 - RNA, 19 nt, Artificial Sequence
  Description of Artificial Sequence: Synthetic oligonucleotide
  Antisense strand to SEQ ID NO: 231988
aacuucccuugagucacuc

SEQ ID NO: 231990 - RNA, 19 nt, Artificial Sequence
  Description of Artificial Sequence: Synthetic oligonucleotide
  Sense strand starting at position 2310 SEQ ID NO: 2986
agaaaugugccauauaacu

SEQ ID NO: 231991 - RNA, 19 nt, Artificial Sequence
  Description of Artificial Sequence: Synthetic oligonucleotide
  Antisense strand to SEQ ID NO: 231990
aguuauauggcacauuucu

SEQ ID NO: 231992 - RNA, 19 nt, Artificial Sequence
  Description of Artificial Sequence: Synthetic oligonucleotide
  Sense strand starting at position 2469 SEQ ID NO: 2986
gcugcuuuacuuuaaagaa

SEQ ID NO: 231993 - RNA, 19 nt, Artificial Sequence
  Description of Artificial Sequence: Synthetic oligonucleotide
  Antisense strand to SEQ ID NO: 231992
uucuuuaaaguaaagcagc

SEQ ID NO: 231994 - RNA, 19 nt, Artificial Sequence
  Description of Artificial Sequence: Synthetic oligonucleotide
  Sense strand starting at position 2562 SEQ ID NO: 2986
agaauaauuuaccagcaga

SEQ ID NO: 231995 - RNA, 19 nt, Artificial Sequence
  Description of Artificial Sequence: Synthetic oligonucleotide
  Antisense strand to SEQ ID NO: 231994
ucugcugguaaauuauucu

SEQ ID NO: 231996 - RNA, 19 nt, Artificial Sequence
  Description of Artificial Sequence: Synthetic oligonucleotide
  Sense strand starting at position 2573 SEQ ID NO: 2986
ccagcagaccuuuggaaga

SEQ ID NO: 231997 - RNA, 19 nt, Artificial Sequence
  Description of Artificial Sequence: Synthetic oligonucleotide
  Antisense strand to SEQ ID NO: 231996
ucuuccaaaggucugcugg

SEQ ID NO: 231998 - RNA, 19 nt, Artificial Sequence
  Description of Artificial Sequence: Synthetic oligonucleotide
  Sense strand starting at position 2760 SEQ ID NO: 2986
agaaauuggucaucuugac

SEQ ID NO: 231999 - RNA, 19 nt, Artificial Sequence
  Description of Artificial Sequence: Synthetic oligonucleotide
  Antisense strand to SEQ ID NO: 231998
gucaagaugaccaauuucu

SEQ ID NO: 232000 - RNA, 19 nt, Artificial Sequence
  Description of Artificial Sequence: Synthetic oligonucleotide
  Sense strand starting at position 2905 SEQ ID NO: 2986
ucuacuguguccuuaauuu

SEQ ID NO: 232001 - RNA, 19 nt, Artificial Sequence
  Description of Artificial Sequence: Synthetic oligonucleotide
  Antisense strand to SEQ ID NO: 232000
aaauuaaggacacaguaga

SEQ ID NO: 232002 - RNA, 19 nt, Artificial Sequence
  Description of Artificial Sequence: Synthetic oligonucleotide
  Sense strand starting at position 3079 SEQ ID NO: 2986
gggacacuuucuccagcaa

SEQ ID NO: 232003 - RNA, 19 nt, Artificial Sequence
  Description of Artificial Sequence: Synthetic oligonucleotide
  Antisense strand to SEQ ID NO: 232002
uugcuggagaaaguguccc

SEQ ID NO: 232004 - RNA, 19 nt, Artificial Sequence
  Description of Artificial Sequence: Synthetic oligonucleotide
  Sense strand starting at position 3080 SEQ ID NO: 2986
ggacacuuucuccagcaaa

SEQ ID NO: 232005 - RNA, 19 nt, Artificial Sequence
  Description of Artificial Sequence: Synthetic oligonucleotide
  Antisense strand to SEQ ID NO: 232004
uuugcuggagaaagugucc

SEQ ID NO: 232006 - RNA, 19 nt, Artificial Sequence
  Description of Artificial Sequence: Synthetic oligonucleotide
  Sense strand starting at position 3210 SEQ ID NO: 2986
ggcagagaacuguauuccu

SEQ ID NO: 232007 - RNA, 19 nt, Artificial Sequence
  Description of Artificial Sequence: Synthetic oligonucleotide
  Antisense strand to SEQ ID NO: 232006
aggaauacaguucucugcc

SEQ ID NO: 232008 - RNA, 19 nt, Artificial Sequence
  Description of Artificial Sequence: Synthetic oligonucleotide
  Sense strand starting at position 3265 SEQ ID NO: 2986
ggagucaccucuuuacaaa

SEQ ID NO: 232009 - RNA, 19 nt, Artificial Sequence
  Description of Artificial Sequence: Synthetic oligonucleotide
  Antisense strand to SEQ ID NO: 232008
uuuguaaagaggugacucc

SEQ ID NO: 232010 - RNA, 19 nt, Artificial Sequence
  Description of Artificial Sequence: Synthetic oligonucleotide
  Sense strand starting at position 3335 SEQ ID NO: 2986
aucuccaagugauugugaa

SEQ ID NO: 232011 - RNA, 19 nt, Artificial Sequence
  Description of Artificial Sequence: Synthetic oligonucleotide
  Antisense strand to SEQ ID NO: 232010
uucacaaucacuuggagau

SEQ ID NO: 232012 - RNA, 19 nt, Artificial Sequence
  Description of Artificial Sequence: Synthetic oligonucleotide
  Sense strand starting at position 3336 SEQ ID NO: 2986
ucuccaagugauugugaaa

SEQ ID NO: 232013 - RNA, 19 nt, Artificial Sequence
  Description of Artificial Sequence: Synthetic oligonucleotide
  Antisense strand to SEQ ID NO: 232012
uuucacaaucacuuggaga

SEQ ID NO: 232014 - RNA, 19 nt, Artificial Sequence
  Description of Artificial Sequence: Synthetic oligonucleotide
  Sense strand starting at position 3380 SEQ ID NO: 2986
cagccagguccugaaugaa

SEQ ID NO: 232015 - RNA, 19 nt, Artificial Sequence
  Description of Artificial Sequence: Synthetic oligonucleotide
  Antisense strand to SEQ ID NO: 232014
uucauucaggaccuggcug

SEQ ID NO: 232016 - RNA, 19 nt, Artificial Sequence
  Description of Artificial Sequence: Synthetic oligonucleotide
  Sense strand starting at position 3426 SEQ ID NO: 2986
gauugucuucucuggaaca

SEQ ID NO: 232017 - RNA, 19 nt, Artificial Sequence
  Description of Artificial Sequence: Synthetic oligonucleotide
  Antisense strand to SEQ ID NO: 232016
uguuccagagaagacaauc

SEQ ID NO: 232018 - RNA, 19 nt, Artificial Sequence
  Description of Artificial Sequence: Synthetic oligonucleotide
  Sense strand starting at position 3606 SEQ ID NO: 2986
uuaagaaugcacugacaug

SEQ ID NO: 232019 - RNA, 19 nt, Artificial Sequence
  Description of Artificial Sequence: Synthetic oligonucleotide
  Antisense strand to SEQ ID NO: 232018
caugucagugcauucuuaa

SEQ ID NO: 232020 - RNA, 19 nt, Artificial Sequence
  Description of Artificial Sequence: Synthetic oligonucleotide
  Sense strand starting at position 3694 SEQ ID NO: 2986
gcucuaugaagagguugga

SEQ ID NO: 232021 - RNA, 19 nt, Artificial Sequence
  Description of Artificial Sequence: Synthetic oligonucleotide
  Antisense strand to SEQ ID NO: 232020
uccaaccucuucauagagc

SEQ ID NO: 232022 - RNA, 19 nt, Artificial Sequence
  Description of Artificial Sequence: Synthetic oligonucleotide
  Sense strand starting at position 3707 SEQ ID NO: 2986
guuggagugcuuuaagaua

SEQ ID NO: 232023 - RNA, 19 nt, Artificial Sequence
  Description of Artificial Sequence: Synthetic oligonucleotide
  Antisense strand to SEQ ID NO: 232022
uaucuuaaagcacuccaac

SEQ ID NO: 232024 - RNA, 19 nt, Artificial Sequence
  Description of Artificial Sequence: Synthetic oligonucleotide
  Sense strand starting at position 3742 SEQ ID NO: 2986
auuaguaagggugggaaau

SEQ ID NO: 232025 - RNA, 19 nt, Artificial Sequence
  Description of Artificial Sequence: Synthetic oligonucleotide
  Antisense strand to SEQ ID NO: 232024
auuucccacccuuacuaau

SEQ ID NO: 232026 - RNA, 19 nt, Artificial Sequence
  Description of Artificial Sequence: Synthetic oligonucleotide
  Sense strand starting at position 3769 SEQ ID NO: 2986
ugaaacaaugucuguuuaa

SEQ ID NO: 232027 - RNA, 19 nt, Artificial Sequence
  Description of Artificial Sequence: Synthetic oligonucleotide
  Antisense strand to SEQ ID NO: 232026
uuaaacagacauuguuuca

SEQ ID NO: 232028 - RNA, 19 nt, Artificial Sequence
  Description of Artificial Sequence: Synthetic oligonucleotide
  Sense strand starting at position 3770 SEQ ID NO: 2986
gaaacaaugucuguuuaag

SEQ ID NO: 232029 - RNA, 19 nt, Artificial Sequence
  Description of Artificial Sequence: Synthetic oligonucleotide
  Antisense strand to SEQ ID NO: 232028
cuuaaacagacauuguuuc

SEQ ID NO: 232030 - RNA, 19 nt, Artificial Sequence
  Description of Artificial Sequence: Synthetic oligonucleotide
  Sense strand starting at position 3807 SEQ ID NO: 2986
ggaagguugggugagucaa

SEQ ID NO: 232031 - RNA, 19 nt, Artificial Sequence
  Description of Artificial Sequence: Synthetic oligonucleotide
  Antisense strand to SEQ ID NO: 232030
uugacucacccaaccuucc

SEQ ID NO: 232032 - RNA, 19 nt, Artificial Sequence
  Description of Artificial Sequence: Synthetic oligonucleotide
  Sense strand starting at position 3925 SEQ ID NO: 2986
gguuuagggagguauuguu

SEQ ID NO: 232033 - RNA, 19 nt, Artificial Sequence
  Description of Artificial Sequence: Synthetic oligonucleotide
  Antisense strand to SEQ ID NO: 232032
aacaauaccucccuaaacc

SEQ ID NO: 232034 - RNA, 19 nt, Artificial Sequence
  Description of Artificial Sequence: Synthetic oligonucleotide
  Sense strand starting at position 3965 SEQ ID NO: 2986
auucguuugagauaaugug

SEQ ID NO: 232035 - RNA, 19 nt, Artificial Sequence
  Description of Artificial Sequence: Synthetic oligonucleotide
  Antisense strand to SEQ ID NO: 232034
cacauuaucucaaacgaau

SEQ ID NO: 232036 - RNA, 19 nt, Artificial Sequence
  Description of Artificial Sequence: Synthetic oligonucleotide
  Sense strand starting at position 3974 SEQ ID NO: 2986
agauaaugugaauguauuc

SEQ ID NO: 232037 - RNA, 19 nt, Artificial Sequence
  Description of Artificial Sequence: Synthetic oligonucleotide
  Antisense strand to SEQ ID NO: 232036
gaauacauucacauuaucu

SEQ ID NO: 232038 - RNA, 19 nt, Artificial Sequence
  Description of Artificial Sequence: Synthetic oligonucleotide
  Sense strand starting at position 402 SEQ ID NO: 2987
ucaacuuccucuuugggaa

SEQ ID NO: 232039 - RNA, 19 nt, Artificial Sequence
  Description of Artificial Sequence: Synthetic oligonucleotide
  Antisense strand to SEQ ID NO: 232038
uucccaaagaggaaguuga

SEQ ID NO: 232040 - RNA, 19 nt, Artificial Sequence
  Description of Artificial Sequence: Synthetic oligonucleotide
  Sense strand starting at position 406 SEQ ID NO: 2987
cuuccucuuugggaaagga

SEQ ID NO: 232041 - RNA, 19 nt, Artificial Sequence
  Description of Artificial Sequence: Synthetic oligonucleotide
  Antisense strand to SEQ ID NO: 232040
uccuuucccaaagaggaag

SEQ ID NO: 232042 - RNA, 19 nt, Artificial Sequence
  Description of Artificial Sequence: Synthetic oligonucleotide
  Sense strand starting at position 449 SEQ ID NO: 2987
uuuacuaacgacugauagu

SEQ ID NO: 232043 - RNA, 19 nt, Artificial Sequence
  Description of Artificial Sequence: Synthetic oligonucleotide
  Antisense strand to SEQ ID NO: 232042
acuaucagucguuaguaaa

SEQ ID NO: 232044 - RNA, 19 nt, Artificial Sequence
  Description of Artificial Sequence: Synthetic oligonucleotide
  Sense strand starting at position 455 SEQ ID NO: 2987
aacgacugauaguccuaua

SEQ ID NO: 232045 - RNA, 19 nt, Artificial Sequence
  Description of Artificial Sequence: Synthetic oligonucleotide
  Antisense strand to SEQ ID NO: 232044
uauaggacuaucagucguu

SEQ ID NO: 232046 - RNA, 19 nt, Artificial Sequence
  Description of Artificial Sequence: Synthetic oligonucleotide
  Sense strand starting at position 460 SEQ ID NO: 2987
cugauaguccuauagguaa

SEQ ID NO: 232047 - RNA, 19 nt, Artificial Sequence
  Description of Artificial Sequence: Synthetic oligonucleotide
  Antisense strand to SEQ ID NO: 232046
uuaccuauaggacuaucag

SEQ ID NO: 232048 - RNA, 19 nt, Artificial Sequence
  Description of Artificial Sequence: Synthetic oligonucleotide
  Sense strand starting at position 463 SEQ ID NO: 2987
auaguccuauagguaaaua

SEQ ID NO: 232049 - RNA, 19 nt, Artificial Sequence
  Description of Artificial Sequence: Synthetic oligonucleotide
  Antisense strand to SEQ ID NO: 232048
uauuuaccuauaggacuau

SEQ ID NO: 232050 - RNA, 19 nt, Artificial Sequence
  Description of Artificial Sequence: Synthetic oligonucleotide
  Sense strand starting at position 517 SEQ ID NO: 2987
aucagcauuuaguuuguua

SEQ ID NO: 232051 - RNA, 19 nt, Artificial Sequence
  Description of Artificial Sequence: Synthetic oligonucleotide
  Antisense strand to SEQ ID NO: 232050
uaacaaacuaaaugcugau

SEQ ID NO: 232052 - RNA, 19 nt, Artificial Sequence
  Description of Artificial Sequence: Synthetic oligonucleotide
  Sense strand starting at position 521 SEQ ID NO: 2987
gcauuuaguuuguuaacag

SEQ ID NO: 232053 - RNA, 19 nt, Artificial Sequence
  Description of Artificial Sequence: Synthetic oligonucleotide
  Antisense strand to SEQ ID NO: 232052
cuguuaacaaacuaaaugc

SEQ ID NO: 232054 - RNA, 19 nt, Artificial Sequence
  Description of Artificial Sequence: Synthetic oligonucleotide
  Sense strand starting at position 528 SEQ ID NO: 2987
guuuguuaacagugaacca

SEQ ID NO: 232055 - RNA, 19 nt, Artificial Sequence
  Description of Artificial Sequence: Synthetic oligonucleotide
  Antisense strand to SEQ ID NO: 232054
ugguucacuguuaacaaac

SEQ ID NO: 232056 - RNA, 19 nt, Artificial Sequence
  Description of Artificial Sequence: Synthetic oligonucleotide
  Sense strand starting at position 540 SEQ ID NO: 2987
ugaaccaccuaaugagaau

SEQ ID NO: 232057 - RNA, 19 nt, Artificial Sequence
  Description of Artificial Sequence: Synthetic oligonucleotide
  Antisense strand to SEQ ID NO: 232056
auucucauuaggugguuca

SEQ ID NO: 232058 - RNA, 19 nt, Artificial Sequence
  Description of Artificial Sequence: Synthetic oligonucleotide
  Sense strand starting at position 601 SEQ ID NO: 2987
gcaaguacccuagguguga

SEQ ID NO: 232059 - RNA, 19 nt, Artificial Sequence
  Description of Artificial Sequence: Synthetic oligonucleotide
  Antisense strand to SEQ ID NO: 232058
ucacaccuaggguacuugc

SEQ ID NO: 232060 - RNA, 19 nt, Artificial Sequence
  Description of Artificial Sequence: Synthetic oligonucleotide
  Sense strand starting at position 686 SEQ ID NO: 2987
uuggucaugucucugaaga

SEQ ID NO: 232061 - RNA, 19 nt, Artificial Sequence
  Description of Artificial Sequence: Synthetic oligonucleotide
  Antisense strand to SEQ ID NO: 232060
ucuucagagacaugaccaa

SEQ ID NO: 232062 - RNA, 19 nt, Artificial Sequence
  Description of Artificial Sequence: Synthetic oligonucleotide
  Sense strand starting at position 687 SEQ ID NO: 2987
uggucaugucucugaagag

SEQ ID NO: 232063 - RNA, 19 nt, Artificial Sequence
  Description of Artificial Sequence: Synthetic oligonucleotide
  Antisense strand to SEQ ID NO: 232062
cucuucagagacaugacca

SEQ ID NO: 232064 - RNA, 19 nt, Artificial Sequence
  Description of Artificial Sequence: Synthetic oligonucleotide
  Sense strand starting at position 893 SEQ ID NO: 2987
aaaucugugucgccuguua

SEQ ID NO: 232065 - RNA, 19 nt, Artificial Sequence
  Description of Artificial Sequence: Synthetic oligonucleotide
  Antisense strand to SEQ ID NO: 232064
uaacaggcgacacagauuu

SEQ ID NO: 232066 - RNA, 19 nt, Artificial Sequence
  Description of Artificial Sequence: Synthetic oligonucleotide
  Sense strand starting at position 897 SEQ ID NO: 2987
cugugucgccuguuauaag

SEQ ID NO: 232067 - RNA, 19 nt, Artificial Sequence
  Description of Artificial Sequence: Synthetic oligonucleotide
  Antisense strand to SEQ ID NO: 232066
cuuauaacaggcgacacag

SEQ ID NO: 232068 - RNA, 19 nt, Artificial Sequence
  Description of Artificial Sequence: Synthetic oligonucleotide
  Sense strand starting at position 952 SEQ ID NO: 2987
accucaggguuaucaaaca

SEQ ID NO: 232069 - RNA, 19 nt, Artificial Sequence
  Description of Artificial Sequence: Synthetic oligonucleotide
  Antisense strand to SEQ ID NO: 232068
uguuugauaacccugaggu

SEQ ID NO: 232070 - RNA, 19 nt, Artificial Sequence
  Description of Artificial Sequence: Synthetic oligonucleotide
  Sense strand starting at position 1208 SEQ ID NO: 2987
cccguaauucgggugugua

SEQ ID NO: 232071 - RNA, 19 nt, Artificial Sequence
  Description of Artificial Sequence: Synthetic oligonucleotide
  Antisense strand to SEQ ID NO: 232070
uacacacccgaauuacggg

SEQ ID NO: 232072 - RNA, 19 nt, Artificial Sequence
  Description of Artificial Sequence: Synthetic oligonucleotide
  Sense strand starting at position 1211 SEQ ID NO: 2987
guaauucggguguguaaug

SEQ ID NO: 232073 - RNA, 19 nt, Artificial Sequence
  Description of Artificial Sequence: Synthetic oligonucleotide
  Antisense strand to SEQ ID NO: 232072
cauuacacacccgaauuac

SEQ ID NO: 232074 - RNA, 19 nt, Artificial Sequence
  Description of Artificial Sequence: Synthetic oligonucleotide
  Sense strand starting at position 1222 SEQ ID NO: 2987
guguaauguacugggccau

SEQ ID NO: 232075 - RNA, 19 nt, Artificial Sequence
  Description of Artificial Sequence: Synthetic oligonucleotide
  Antisense strand to SEQ ID NO: 232074
auggcccaguacauuacac

SEQ ID NO: 232076 - RNA, 19 nt, Artificial Sequence
  Description of Artificial Sequence: Synthetic oligonucleotide
  Sense strand starting at position 1223 SEQ ID NO: 2987
uguaauguacugggccaua

SEQ ID NO: 232077 - RNA, 19 nt, Artificial Sequence
  Description of Artificial Sequence: Synthetic oligonucleotide
  Antisense strand to SEQ ID NO: 232076
uauggcccaguacauuaca

SEQ ID NO: 232078 - RNA, 19 nt, Artificial Sequence
  Description of Artificial Sequence: Synthetic oligonucleotide
  Sense strand starting at position 1301 SEQ ID NO: 2987
uagcccuuaguggaguaaa

SEQ ID NO: 232079 - RNA, 19 nt, Artificial Sequence
  Description of Artificial Sequence: Synthetic oligonucleotide
  Antisense strand to SEQ ID NO: 232078
uuuacuccacuaagggcua

SEQ ID NO: 232080 - RNA, 19 nt, Artificial Sequence
  Description of Artificial Sequence: Synthetic oligonucleotide
  Sense strand starting at position 1455 SEQ ID NO: 2987
guguccuuccgggauggga

SEQ ID NO: 232081 - RNA, 19 nt, Artificial Sequence
  Description of Artificial Sequence: Synthetic oligonucleotide
  Antisense strand to SEQ ID NO: 232080
ucccaucccggaaggacac

SEQ ID NO: 232082 - RNA, 19 nt, Artificial Sequence
  Description of Artificial Sequence: Synthetic oligonucleotide
  Sense strand starting at position 2092 SEQ ID NO: 2987
ucgaguucugauuggugaa

SEQ ID NO: 232083 - RNA, 19 nt, Artificial Sequence
  Description of Artificial Sequence: Synthetic oligonucleotide
  Antisense strand to SEQ ID NO: 232082
uucaccaaucagaacucga

SEQ ID NO: 232084 - RNA, 19 nt, Artificial Sequence
  Description of Artificial Sequence: Synthetic oligonucleotide
  Sense strand starting at position 2093 SEQ ID NO: 2987
cgaguucugauuggugaac

SEQ ID NO: 232085 - RNA, 19 nt, Artificial Sequence
  Description of Artificial Sequence: Synthetic oligonucleotide
  Antisense strand to SEQ ID NO: 232084
guucaccaaucagaacucg

SEQ ID NO: 232086 - RNA, 19 nt, Artificial Sequence
  Description of Artificial Sequence: Synthetic oligonucleotide
  Sense strand starting at position 2138 SEQ ID NO: 2987
ggcagcugcguaggauaua

SEQ ID NO: 232087 - RNA, 19 nt, Artificial Sequence
  Description of Artificial Sequence: Synthetic oligonucleotide
  Antisense strand to SEQ ID NO: 232086
uauauccuacgcagcugcc

SEQ ID NO: 232088 - RNA, 19 nt, Artificial Sequence
  Description of Artificial Sequence: Synthetic oligonucleotide
  Sense strand starting at position 2141 SEQ ID NO: 2987
agcugcguaggauauaaau

SEQ ID NO: 232089 - RNA, 19 nt, Artificial Sequence
  Description of Artificial Sequence: Synthetic oligonucleotide
  Antisense strand to SEQ ID NO: 232088
auuuauauccuacgcagcu

SEQ ID NO: 232090 - RNA, 19 nt, Artificial Sequence
  Description of Artificial Sequence: Synthetic oligonucleotide
  Sense strand starting at position 2143 SEQ ID NO: 2987
cugcguaggauauaaaucu

SEQ ID NO: 232091 - RNA, 19 nt, Artificial Sequence
  Description of Artificial Sequence: Synthetic oligonucleotide
  Antisense strand to SEQ ID NO: 232090
agauuuauauccuacgcag

SEQ ID NO: 232092 - RNA, 19 nt, Artificial Sequence
  Description of Artificial Sequence: Synthetic oligonucleotide
  Sense strand starting at position 2149 SEQ ID NO: 2987
aggauauaaaucugugcag

SEQ ID NO: 232093 - RNA, 19 nt, Artificial Sequence
  Description of Artificial Sequence: Synthetic oligonucleotide
  Antisense strand to SEQ ID NO: 232092
cugcacagauuuauauccu

SEQ ID NO: 232094 - RNA, 19 nt, Artificial Sequence
  Description of Artificial Sequence: Synthetic oligonucleotide
  Sense strand starting at position 2655 SEQ ID NO: 2987
aggucuugggcgaggucua

SEQ ID NO: 232095 - RNA, 19 nt, Artificial Sequence
  Description of Artificial Sequence: Synthetic oligonucleotide
  Antisense strand to SEQ ID NO: 232094
uagaccucgcccaagaccu

SEQ ID NO: 232096 - RNA, 19 nt, Artificial Sequence
  Description of Artificial Sequence: Synthetic oligonucleotide
  Sense strand starting at position 2942 SEQ ID NO: 2987
cugugcuaaggcugagaca

SEQ ID NO: 232097 - RNA, 19 nt, Artificial Sequence
  Description of Artificial Sequence: Synthetic oligonucleotide
  Antisense strand to SEQ ID NO: 232096
ugucucagccuuagcacag

SEQ ID NO: 232098 - RNA, 19 nt, Artificial Sequence
  Description of Artificial Sequence: Synthetic oligonucleotide
  Sense strand starting at position 3048 SEQ ID NO: 2987
uucccuucucuugagaagu

SEQ ID NO: 232099 - RNA, 19 nt, Artificial Sequence
  Description of Artificial Sequence: Synthetic oligonucleotide
  Antisense strand to SEQ ID NO: 232098
acuucucaagagaagggaa

SEQ ID NO: 232100 - RNA, 19 nt, Artificial Sequence
  Description of Artificial Sequence: Synthetic oligonucleotide
  Sense strand starting at position 3145 SEQ ID NO: 2987
guggcuguugagggaauaa

SEQ ID NO: 232101 - RNA, 19 nt, Artificial Sequence
  Description of Artificial Sequence: Synthetic oligonucleotide
  Antisense strand to SEQ ID NO: 232100
uuauucccucaacagccac

SEQ ID NO: 232102 - RNA, 19 nt, Artificial Sequence
  Description of Artificial Sequence: Synthetic oligonucleotide
  Sense strand starting at position 3189 SEQ ID NO: 2987
uuaagagacuccuccuaug

SEQ ID NO: 232103 - RNA, 19 nt, Artificial Sequence
  Description of Artificial Sequence: Synthetic oligonucleotide
  Antisense strand to SEQ ID NO: 232102
cauaggaggagucucuuaa

SEQ ID NO: 232104 - RNA, 19 nt, Artificial Sequence
  Description of Artificial Sequence: Synthetic oligonucleotide
  Sense strand starting at position 3234 SEQ ID NO: 2987
gacccuucguuucccagaa

SEQ ID NO: 232105 - RNA, 19 nt, Artificial Sequence
  Description of Artificial Sequence: Synthetic oligonucleotide
  Antisense strand to SEQ ID NO: 232104
uucugggaaacgaaggguc

SEQ ID NO: 232106 - RNA, 19 nt, Artificial Sequence
  Description of Artificial Sequence: Synthetic oligonucleotide
  Sense strand starting at position 3598 SEQ ID NO: 2987
gcagcugucagcugaggaa

SEQ ID NO: 232107 - RNA, 19 nt, Artificial Sequence
  Description of Artificial Sequence: Synthetic oligonucleotide
  Antisense strand to SEQ ID NO: 232106
uuccucagcugacagcugc

SEQ ID NO: 232108 - RNA, 19 nt, Artificial Sequence
  Description of Artificial Sequence: Synthetic oligonucleotide
  Sense strand starting at position 3707 SEQ ID NO: 2987
cugggaugaucaguccagu

SEQ ID NO: 232109 - RNA, 19 nt, Artificial Sequence
  Description of Artificial Sequence: Synthetic oligonucleotide
  Antisense strand to SEQ ID NO: 232108
acuggacugaucaucccag

SEQ ID NO: 232110 - RNA, 19 nt, Artificial Sequence
  Description of Artificial Sequence: Synthetic oligonucleotide
  Sense strand starting at position 3819 SEQ ID NO: 2987
gccuuagccuauucuugaa

SEQ ID NO: 232111 - RNA, 19 nt, Artificial Sequence
  Description of Artificial Sequence: Synthetic oligonucleotide
  Antisense strand to SEQ ID NO: 232110
uucaagaauaggcuaaggc

SEQ ID NO: 232112 - RNA, 19 nt, Artificial Sequence
  Description of Artificial Sequence: Synthetic oligonucleotide
  Sense strand starting at position 3896 SEQ ID NO: 2987
guaauuuaguaguugcuau

SEQ ID NO: 232113 - RNA, 19 nt, Artificial Sequence
  Description of Artificial Sequence: Synthetic oligonucleotide
  Antisense strand to SEQ ID NO: 232112
auagcaacuacuaaauuac

SEQ ID NO: 232114 - RNA, 19 nt, Artificial Sequence
  Description of Artificial Sequence: Synthetic oligonucleotide
  Sense strand starting at position 3909 SEQ ID NO: 2987
ugcuauuaucaaugcgauu

SEQ ID NO: 232115 - RNA, 19 nt, Artificial Sequence
  Description of Artificial Sequence: Synthetic oligonucleotide
  Antisense strand to SEQ ID NO: 232114
aaucgcauugauaauagca

SEQ ID NO: 232116 - RNA, 19 nt, Artificial Sequence
  Description of Artificial Sequence: Synthetic oligonucleotide
  Sense strand starting at position 3967 SEQ ID NO: 2987
acugacuucuuaguguuaa

SEQ ID NO: 232117 - RNA, 19 nt, Artificial Sequence
  Description of Artificial Sequence: Synthetic oligonucleotide
  Antisense strand to SEQ ID NO: 232116
uuaacacuaagaagucagu

SEQ ID NO: 232118 - RNA, 19 nt, Artificial Sequence
  Description of Artificial Sequence: Synthetic oligonucleotide
  Sense strand starting at position 64 SEQ ID NO: 2988
gguauacagacugagcauu

SEQ ID NO: 232119 - RNA, 19 nt, Artificial Sequence
  Description of Artificial Sequence: Synthetic oligonucleotide
  Antisense strand to SEQ ID NO: 232118
aaugcucagucuguauacc

SEQ ID NO: 232120 - RNA, 19 nt, Artificial Sequence
  Description of Artificial Sequence: Synthetic oligonucleotide
  Sense strand starting at position 127 SEQ ID NO: 2988
ccuuaaagugcagacauga

SEQ ID NO: 232121 - RNA, 19 nt, Artificial Sequence
  Description of Artificial Sequence: Synthetic oligonucleotide
  Antisense strand to SEQ ID NO: 232120
ucaugucugcacuuuaagg

SEQ ID NO: 232122 - RNA, 19 nt, Artificial Sequence
  Description of Artificial Sequence: Synthetic oligonucleotide
  Sense strand starting at position 265 SEQ ID NO: 2988
gcauauaagguauauguga

SEQ ID NO: 232123 - RNA, 19 nt, Artificial Sequence
  Description of Artificial Sequence: Synthetic oligonucleotide
  Antisense strand to SEQ ID NO: 232122
ucacauauaccuuauaugc

SEQ ID NO: 232124 - RNA, 19 nt, Artificial Sequence
  Description of Artificial Sequence: Synthetic oligonucleotide
  Sense strand starting at position 432 SEQ ID NO: 2988
gugagaauaugguuuagaa

SEQ ID NO: 232125 - RNA, 19 nt, Artificial Sequence
  Description of Artificial Sequence: Synthetic oligonucleotide
  Antisense strand to SEQ ID NO: 232124
uucuaaaccauauucucac

SEQ ID NO: 232126 - RNA, 19 nt, Artificial Sequence
  Description of Artificial Sequence: Synthetic oligonucleotide
  Sense strand starting at position 489 SEQ ID NO: 2988
aagcgauuaggcgauuaga

SEQ ID NO: 232127 - RNA, 19 nt, Artificial Sequence
  Description of Artificial Sequence: Synthetic oligonucleotide
  Antisense strand to SEQ ID NO: 232126
ucuaaucgccuaaucgcuu

SEQ ID NO: 232128 - RNA, 19 nt, Artificial Sequence
  Description of Artificial Sequence: Synthetic oligonucleotide
  Sense strand starting at position 528 SEQ ID NO: 2988
guaauacaauacccuugua

SEQ ID NO: 232129 - RNA, 19 nt, Artificial Sequence
  Description of Artificial Sequence: Synthetic oligonucleotide
  Antisense strand to SEQ ID NO: 232128
uacaaggguauuguauuac

SEQ ID NO: 232130 - RNA, 19 nt, Artificial Sequence
  Description of Artificial Sequence: Synthetic oligonucleotide
  Sense strand starting at position 662 SEQ ID NO: 2988
cuguaacaguaaucuuauu

SEQ ID NO: 232131 - RNA, 19 nt, Artificial Sequence
  Description of Artificial Sequence: Synthetic oligonucleotide
  Antisense strand to SEQ ID NO: 232130
aauaagauuacuguuacag

SEQ ID NO: 232132 - RNA, 19 nt, Artificial Sequence
  Description of Artificial Sequence: Synthetic oligonucleotide
  Sense strand starting at position 668 SEQ ID NO: 2988
caguaaucuuauucuggga

SEQ ID NO: 232133 - RNA, 19 nt, Artificial Sequence
  Description of Artificial Sequence: Synthetic oligonucleotide
  Antisense strand to SEQ ID NO: 232132
ucccagaauaagauuacug

SEQ ID NO: 232134 - RNA, 19 nt, Artificial Sequence
  Description of Artificial Sequence: Synthetic oligonucleotide
  Sense strand starting at position 770 SEQ ID NO: 2988
ugguccagccuuuauacaa

SEQ ID NO: 232135 - RNA, 19 nt, Artificial Sequence
  Description of Artificial Sequence: Synthetic oligonucleotide
  Antisense strand to SEQ ID NO: 232134
uuguauaaaggcuggacca

SEQ ID NO: 232136 - RNA, 19 nt, Artificial Sequence
  Description of Artificial Sequence: Synthetic oligonucleotide
  Sense strand starting at position 1129 SEQ ID NO: 2988
cugugagguaacugauaac

SEQ ID NO: 232137 - RNA, 19 nt, Artificial Sequence
  Description of Artificial Sequence: Synthetic oligonucleotide
  Antisense strand to SEQ ID NO: 232136
guuaucaguuaccucacag

SEQ ID NO: 232138 - RNA, 19 nt, Artificial Sequence
  Description of Artificial Sequence: Synthetic oligonucleotide
  Sense strand starting at position 1282 SEQ ID NO: 2988
aaaguuguucuuggcacaa

SEQ ID NO: 232139 - RNA, 19 nt, Artificial Sequence
  Description of Artificial Sequence: Synthetic oligonucleotide
  Antisense strand to SEQ ID NO: 232138
uugugccaagaacaacuuu

SEQ ID NO: 232140 - RNA, 19 nt, Artificial Sequence
  Description of Artificial Sequence: Synthetic oligonucleotide
  Sense strand starting at position 1364 SEQ ID NO: 2988
auugucugccuccaucaga

SEQ ID NO: 232141 - RNA, 19 nt, Artificial Sequence
  Description of Artificial Sequence: Synthetic oligonucleotide
  Antisense strand to SEQ ID NO: 232140
ucugauggaggcagacaau

SEQ ID NO: 232142 - RNA, 19 nt, Artificial Sequence
  Description of Artificial Sequence: Synthetic oligonucleotide
  Sense strand starting at position 1665 SEQ ID NO: 2988
auggcagaucgcugaauga

SEQ ID NO: 232143 - RNA, 19 nt, Artificial Sequence
  Description of Artificial Sequence: Synthetic oligonucleotide
  Antisense strand to SEQ ID NO: 232142
ucauucagcgaucugccau

SEQ ID NO: 232144 - RNA, 19 nt, Artificial Sequence
  Description of Artificial Sequence: Synthetic oligonucleotide
  Sense strand starting at position 2045 SEQ ID NO: 2988
gugcguguugucuugaaua

SEQ ID NO: 232145 - RNA, 19 nt, Artificial Sequence
  Description of Artificial Sequence: Synthetic oligonucleotide
  Antisense strand to SEQ ID NO: 232144
uauucaagacaacacgcac

SEQ ID NO: 232146 - RNA, 19 nt, Artificial Sequence
  Description of Artificial Sequence: Synthetic oligonucleotide
  Sense strand starting at position 2122 SEQ ID NO: 2988
ccauuaccucgcugauuaa

SEQ ID NO: 232147 - RNA, 19 nt, Artificial Sequence
  Description of Artificial Sequence: Synthetic oligonucleotide
  Antisense strand to SEQ ID NO: 232146
uuaaucagcgagguaaugg

SEQ ID NO: 232148 - RNA, 19 nt, Artificial Sequence
  Description of Artificial Sequence: Synthetic oligonucleotide
  Sense strand starting at position 2125 SEQ ID NO: 2988
uuaccucgcugauuaaaug

SEQ ID NO: 232149 - RNA, 19 nt, Artificial Sequence
  Description of Artificial Sequence: Synthetic oligonucleotide
  Antisense strand to SEQ ID NO: 232148
cauuuaaucagcgagguaa

SEQ ID NO: 232150 - RNA, 19 nt, Artificial Sequence
  Description of Artificial Sequence: Synthetic oligonucleotide
  Sense strand starting at position 2236 SEQ ID NO: 2988
ccugaagucccggaugcuu

SEQ ID NO: 232151 - RNA, 19 nt, Artificial Sequence
  Description of Artificial Sequence: Synthetic oligonucleotide
  Antisense strand to SEQ ID NO: 232150
aagcauccgggacuucagg

SEQ ID NO: 232152 - RNA, 19 nt, Artificial Sequence
  Description of Artificial Sequence: Synthetic oligonucleotide
  Sense strand starting at position 2339 SEQ ID NO: 2988
ggagaucuugccuggaggu

SEQ ID NO: 232153 - RNA, 19 nt, Artificial Sequence
  Description of Artificial Sequence: Synthetic oligonucleotide
  Antisense strand to SEQ ID NO: 232152
accuccaggcaagaucucc

SEQ ID NO: 232154 - RNA, 19 nt, Artificial Sequence
  Description of Artificial Sequence: Synthetic oligonucleotide
  Sense strand starting at position 2383 SEQ ID NO: 2988
caaggcuuccugcagagaa

SEQ ID NO: 232155 - RNA, 19 nt, Artificial Sequence
  Description of Artificial Sequence: Synthetic oligonucleotide
  Antisense strand to SEQ ID NO: 232154
uucucugcaggaagccuug

SEQ ID NO: 232156 - RNA, 19 nt, Artificial Sequence
  Description of Artificial Sequence: Synthetic oligonucleotide
  Sense strand starting at position 2385 SEQ ID NO: 2988
aggcuuccugcagagaaag

SEQ ID NO: 232157 - RNA, 19 nt, Artificial Sequence
  Description of Artificial Sequence: Synthetic oligonucleotide
  Antisense strand to SEQ ID NO: 232156
cuuucucugcaggaagccu

SEQ ID NO: 232158 - RNA, 19 nt, Artificial Sequence
  Description of Artificial Sequence: Synthetic oligonucleotide
  Sense strand starting at position 2395 SEQ ID NO: 2988
cagagaaaggugugcaaau

SEQ ID NO: 232159 - RNA, 19 nt, Artificial Sequence
  Description of Artificial Sequence: Synthetic oligonucleotide
  Antisense strand to SEQ ID NO: 232158
auuugcacaccuuucucug

SEQ ID NO: 232160 - RNA, 19 nt, Artificial Sequence
  Description of Artificial Sequence: Synthetic oligonucleotide
  Sense strand starting at position 2396 SEQ ID NO: 2988
agagaaaggugugcaaauc

SEQ ID NO: 232161 - RNA, 19 nt, Artificial Sequence
  Description of Artificial Sequence: Synthetic oligonucleotide
  Antisense strand to SEQ ID NO: 232160
gauuugcacaccuuucucu

SEQ ID NO: 232162 - RNA, 19 nt, Artificial Sequence
  Description of Artificial Sequence: Synthetic oligonucleotide
  Sense strand starting at position 2474 SEQ ID NO: 2988
ccucuacucguauaaguga

SEQ ID NO: 232163 - RNA, 19 nt, Artificial Sequence
  Description of Artificial Sequence: Synthetic oligonucleotide
  Antisense strand to SEQ ID NO: 232162
ucacuuauacgaguagagg

SEQ ID NO: 232164 - RNA, 19 nt, Artificial Sequence
  Description of Artificial Sequence: Synthetic oligonucleotide
  Sense strand starting at position 2477 SEQ ID NO: 2988
cuacucguauaagugauau

SEQ ID NO: 232165 - RNA, 19 nt, Artificial Sequence
  Description of Artificial Sequence: Synthetic oligonucleotide
  Antisense strand to SEQ ID NO: 232164
auaucacuuauacgaguag

SEQ ID NO: 232166 - RNA, 19 nt, Artificial Sequence
  Description of Artificial Sequence: Synthetic oligonucleotide
  Sense strand starting at position 2483 SEQ ID NO: 2988
guauaagugauauaccugu

SEQ ID NO: 232167 - RNA, 19 nt, Artificial Sequence
  Description of Artificial Sequence: Synthetic oligonucleotide
  Antisense strand to SEQ ID NO: 232166
acagguauaucacuuauac

SEQ ID NO: 232168 - RNA, 19 nt, Artificial Sequence
  Description of Artificial Sequence: Synthetic oligonucleotide
  Sense strand starting at position 2561 SEQ ID NO: 2988
ugucuauuugcucagugcu

SEQ ID NO: 232169 - RNA, 19 nt, Artificial Sequence
  Description of Artificial Sequence: Synthetic oligonucleotide
  Antisense strand to SEQ ID NO: 232168
agcacugagcaaauagaca

SEQ ID NO: 232170 - RNA, 19 nt, Artificial Sequence
  Description of Artificial Sequence: Synthetic oligonucleotide
  Sense strand starting at position 2605 SEQ ID NO: 2988
gcccucugccagcauuaaa

SEQ ID NO: 232171 - RNA, 19 nt, Artificial Sequence
  Description of Artificial Sequence: Synthetic oligonucleotide
  Antisense strand to SEQ ID NO: 232170
uuuaaugcuggcagagggc

SEQ ID NO: 232172 - RNA, 19 nt, Artificial Sequence
  Description of Artificial Sequence: Synthetic oligonucleotide
  Sense strand starting at position 2647 SEQ ID NO: 2988
guguaauaggcugaauaac

SEQ ID NO: 232173 - RNA, 19 nt, Artificial Sequence
  Description of Artificial Sequence: Synthetic oligonucleotide
  Antisense strand to SEQ ID NO: 232172
guuauucagccuauuacac

SEQ ID NO: 232174 - RNA, 19 nt, Artificial Sequence
  Description of Artificial Sequence: Synthetic oligonucleotide
  Sense strand starting at position 2728 SEQ ID NO: 2988
gcgucuuugcagguuaagu

SEQ ID NO: 232175 - RNA, 19 nt, Artificial Sequence
  Description of Artificial Sequence: Synthetic oligonucleotide
  Antisense strand to SEQ ID NO: 232174
acuuaaccugcaaagacgc

SEQ ID NO: 232176 - RNA, 19 nt, Artificial Sequence
  Description of Artificial Sequence: Synthetic oligonucleotide
  Sense strand starting at position 2729 SEQ ID NO: 2988
cgucuuugcagguuaaguu

SEQ ID NO: 232177 - RNA, 19 nt, Artificial Sequence
  Description of Artificial Sequence: Synthetic oligonucleotide
  Antisense strand to SEQ ID NO: 232176
aacuuaaccugcaaagacg

SEQ ID NO: 232178 - RNA, 19 nt, Artificial Sequence
  Description of Artificial Sequence: Synthetic oligonucleotide
  Sense strand starting at position 2730 SEQ ID NO: 2988
gucuuugcagguuaaguua

SEQ ID NO: 232179 - RNA, 19 nt, Artificial Sequence
  Description of Artificial Sequence: Synthetic oligonucleotide
  Antisense strand to SEQ ID NO: 232178
uaacuuaaccugcaaagac

SEQ ID NO: 232180 - RNA, 19 nt, Artificial Sequence
  Description of Artificial Sequence: Synthetic oligonucleotide
  Sense strand starting at position 2767 SEQ ID NO: 2988
uuauccuggauucgaaaga

SEQ ID NO: 232181 - RNA, 19 nt, Artificial Sequence
  Description of Artificial Sequence: Synthetic oligonucleotide
  Antisense strand to SEQ ID NO: 232180
ucuuucgaauccaggauaa

SEQ ID NO: 232182 - RNA, 19 nt, Artificial Sequence
  Description of Artificial Sequence: Synthetic oligonucleotide
  Sense strand starting at position 2857 SEQ ID NO: 2988
gguggcagagauuggagua

SEQ ID NO: 232183 - RNA, 19 nt, Artificial Sequence
  Description of Artificial Sequence: Synthetic oligonucleotide
  Antisense strand to SEQ ID NO: 232182
uacuccaaucucugccacc

SEQ ID NO: 232184 - RNA, 19 nt, Artificial Sequence
  Description of Artificial Sequence: Synthetic oligonucleotide
  Sense strand starting at position 2858 SEQ ID NO: 2988
guggcagagauuggaguau

SEQ ID NO: 232185 - RNA, 19 nt, Artificial Sequence
  Description of Artificial Sequence: Synthetic oligonucleotide
  Antisense strand to SEQ ID NO: 232184
auacuccaaucucugccac

SEQ ID NO: 232186 - RNA, 19 nt, Artificial Sequence
  Description of Artificial Sequence: Synthetic oligonucleotide
  Sense strand starting at position 3132 SEQ ID NO: 2988
cccuauaaugcaugcugau

SEQ ID NO: 232187 - RNA, 19 nt, Artificial Sequence
  Description of Artificial Sequence: Synthetic oligonucleotide
  Antisense strand to SEQ ID NO: 232186
aucagcaugcauuauaggg

SEQ ID NO: 232188 - RNA, 19 nt, Artificial Sequence
  Description of Artificial Sequence: Synthetic oligonucleotide
  Sense strand starting at position 3213 SEQ ID NO: 2988
gguuuaagucagcaaguuc

SEQ ID NO: 232189 - RNA, 19 nt, Artificial Sequence
  Description of Artificial Sequence: Synthetic oligonucleotide
  Antisense strand to SEQ ID NO: 232188
gaacuugcugacuuaaacc

SEQ ID NO: 232190 - RNA, 19 nt, Artificial Sequence
  Description of Artificial Sequence: Synthetic oligonucleotide
  Sense strand starting at position 3411 SEQ ID NO: 2988
aaagcugagccagauguaa

SEQ ID NO: 232191 - RNA, 19 nt, Artificial Sequence
  Description of Artificial Sequence: Synthetic oligonucleotide
  Antisense strand to SEQ ID NO: 232190
uuacaucuggcucagcuuu

SEQ ID NO: 232192 - RNA, 19 nt, Artificial Sequence
  Description of Artificial Sequence: Synthetic oligonucleotide
  Sense strand starting at position 3496 SEQ ID NO: 2988
gucccuucccagugaccaa

SEQ ID NO: 232193 - RNA, 19 nt, Artificial Sequence
  Description of Artificial Sequence: Synthetic oligonucleotide
  Antisense strand to SEQ ID NO: 232192
uuggucacugggaagggac

SEQ ID NO: 232194 - RNA, 19 nt, Artificial Sequence
  Description of Artificial Sequence: Synthetic oligonucleotide
  Sense strand starting at position 3587 SEQ ID NO: 2988
gugcuuucugcucaauuaa

SEQ ID NO: 232195 - RNA, 19 nt, Artificial Sequence
  Description of Artificial Sequence: Synthetic oligonucleotide
  Antisense strand to SEQ ID NO: 232194
uuaauugagcagaaagcac

SEQ ID NO: 232196 - RNA, 19 nt, Artificial Sequence
  Description of Artificial Sequence: Synthetic oligonucleotide
  Sense strand starting at position 3614 SEQ ID NO: 2988
ggacuagugccaggcauga

SEQ ID NO: 232197 - RNA, 19 nt, Artificial Sequence
  Description of Artificial Sequence: Synthetic oligonucleotide
  Antisense strand to SEQ ID NO: 232196
ucaugccuggcacuagucc

SEQ ID NO: 232198 - RNA, 19 nt, Artificial Sequence
  Description of Artificial Sequence: Synthetic oligonucleotide
  Sense strand starting at position 8 SEQ ID NO: 2989
augggucgaaauugaaaca

SEQ ID NO: 232199 - RNA, 19 nt, Artificial Sequence
  Description of Artificial Sequence: Synthetic oligonucleotide
  Antisense strand to SEQ ID NO: 232198
uguuucaauuucgacccau

SEQ ID NO: 232200 - RNA, 19 nt, Artificial Sequence
  Description of Artificial Sequence: Synthetic oligonucleotide
  Sense strand starting at position 162 SEQ ID NO: 2989
ugcaauaagcagggauaca

SEQ ID NO: 232201 - RNA, 19 nt, Artificial Sequence
  Description of Artificial Sequence: Synthetic oligonucleotide
  Antisense strand to SEQ ID NO: 232200
uguaucccugcuuauugca

SEQ ID NO: 232202 - RNA, 19 nt, Artificial Sequence
  Description of Artificial Sequence: Synthetic oligonucleotide
  Sense strand starting at position 375 SEQ ID NO: 2989
auagcagaauuugaucaaa

SEQ ID NO: 232203 - RNA, 19 nt, Artificial Sequence
  Description of Artificial Sequence: Synthetic oligonucleotide
  Antisense strand to SEQ ID NO: 232202
uuugaucaaauucugcuau

SEQ ID NO: 232204 - RNA, 19 nt, Artificial Sequence
  Description of Artificial Sequence: Synthetic oligonucleotide
  Sense strand starting at position 862 SEQ ID NO: 2989
ucaagucaugcugaaacaa

SEQ ID NO: 232205 - RNA, 19 nt, Artificial Sequence
  Description of Artificial Sequence: Synthetic oligonucleotide
  Antisense strand to SEQ ID NO: 232204
uuguuucagcaugacuuga

SEQ ID NO: 232206 - RNA, 19 nt, Artificial Sequence
  Description of Artificial Sequence: Synthetic oligonucleotide
  Sense strand starting at position 955 SEQ ID NO: 2989
uugagaaguaaugguuaga

SEQ ID NO: 232207 - RNA, 19 nt, Artificial Sequence
  Description of Artificial Sequence: Synthetic oligonucleotide
  Antisense strand to SEQ ID NO: 232206
ucuaaccauuacuucucaa

SEQ ID NO: 232208 - RNA, 19 nt, Artificial Sequence
  Description of Artificial Sequence: Synthetic oligonucleotide
  Sense strand starting at position 1069 SEQ ID NO: 2989
gcuaaccuuccagguugau

SEQ ID NO: 232209 - RNA, 19 nt, Artificial Sequence
  Description of Artificial Sequence: Synthetic oligonucleotide
  Antisense strand to SEQ ID NO: 232208
aucaaccuggaagguuagc

SEQ ID NO: 232210 - RNA, 19 nt, Artificial Sequence
  Description of Artificial Sequence: Synthetic oligonucleotide
  Sense strand starting at position 1208 SEQ ID NO: 2989
acaaaucaacgcuguauca

SEQ ID NO: 232211 - RNA, 19 nt, Artificial Sequence
  Description of Artificial Sequence: Synthetic oligonucleotide
  Antisense strand to SEQ ID NO: 232210
ugauacagcguugauuugu

SEQ ID NO: 232212 - RNA, 19 nt, Artificial Sequence
  Description of Artificial Sequence: Synthetic oligonucleotide
  Sense strand starting at position 1439 SEQ ID NO: 2989
cagcucaaugguuagcaua

SEQ ID NO: 232213 - RNA, 19 nt, Artificial Sequence
  Description of Artificial Sequence: Synthetic oligonucleotide
  Antisense strand to SEQ ID NO: 232212
uaugcuaaccauugagcug

SEQ ID NO: 232214 - RNA, 19 nt, Artificial Sequence
  Description of Artificial Sequence: Synthetic oligonucleotide
  Sense strand starting at position 1441 SEQ ID NO: 2989
gcucaaugguuagcauaga

SEQ ID NO: 232215 - RNA, 19 nt, Artificial Sequence
  Description of Artificial Sequence: Synthetic oligonucleotide
  Antisense strand to SEQ ID NO: 232214
ucuaugcuaaccauugagc

SEQ ID NO: 232216 - RNA, 19 nt, Artificial Sequence
  Description of Artificial Sequence: Synthetic oligonucleotide
  Sense strand starting at position 1648 SEQ ID NO: 2989
gaaggaagccuccguaucu

SEQ ID NO: 232217 - RNA, 19 nt, Artificial Sequence
  Description of Artificial Sequence: Synthetic oligonucleotide
  Antisense strand to SEQ ID NO: 232216
agauacggaggcuuccuuc

SEQ ID NO: 232218 - RNA, 19 nt, Artificial Sequence
  Description of Artificial Sequence: Synthetic oligonucleotide
  Sense strand starting at position 1694 SEQ ID NO: 2989
aaacgugcugggugggaaa

SEQ ID NO: 232219 - RNA, 19 nt, Artificial Sequence
  Description of Artificial Sequence: Synthetic oligonucleotide
  Antisense strand to SEQ ID NO: 232218
uuucccacccagcacguuu

SEQ ID NO: 232220 - RNA, 19 nt, Artificial Sequence
  Description of Artificial Sequence: Synthetic oligonucleotide
  Sense strand starting at position 1807 SEQ ID NO: 2989
cucagaagucaggguuauu

SEQ ID NO: 232221 - RNA, 19 nt, Artificial Sequence
  Description of Artificial Sequence: Synthetic oligonucleotide
  Antisense strand to SEQ ID NO: 232220
aauaacccugacuucugag

SEQ ID NO: 232222 - RNA, 19 nt, Artificial Sequence
  Description of Artificial Sequence: Synthetic oligonucleotide
  Sense strand starting at position 1817 SEQ ID NO: 2989
aggguuauuccugguccca

SEQ ID NO: 232223 - RNA, 19 nt, Artificial Sequence
  Description of Artificial Sequence: Synthetic oligonucleotide
  Antisense strand to SEQ ID NO: 232222
ugggaccaggaauaacccu

SEQ ID NO: 232224 - RNA, 19 nt, Artificial Sequence
  Description of Artificial Sequence: Synthetic oligonucleotide
  Sense strand starting at position 1819 SEQ ID NO: 2989
gguuauuccuggucccaac

SEQ ID NO: 232225 - RNA, 19 nt, Artificial Sequence
  Description of Artificial Sequence: Synthetic oligonucleotide
  Antisense strand to SEQ ID NO: 232224
guugggaccaggaauaacc

SEQ ID NO: 232226 - RNA, 19 nt, Artificial Sequence
  Description of Artificial Sequence: Synthetic oligonucleotide
  Sense strand starting at position 1873 SEQ ID NO: 2989
cucauaucucaggguuuau

SEQ ID NO: 232227 - RNA, 19 nt, Artificial Sequence
  Description of Artificial Sequence: Synthetic oligonucleotide
  Antisense strand to SEQ ID NO: 232226
auaaacccugagauaugag

SEQ ID NO: 232228 - RNA, 19 nt, Artificial Sequence
  Description of Artificial Sequence: Synthetic oligonucleotide
  Sense strand starting at position 1888 SEQ ID NO: 2989
uuauaaccuuucuucgaga

SEQ ID NO: 232229 - RNA, 19 nt, Artificial Sequence
  Description of Artificial Sequence: Synthetic oligonucleotide
  Antisense strand to SEQ ID NO: 232228
ucucgaagaaagguuauaa

SEQ ID NO: 232230 - RNA, 19 nt, Artificial Sequence
  Description of Artificial Sequence: Synthetic oligonucleotide
  Sense strand starting at position 1890 SEQ ID NO: 2989
auaaccuuucuucgagaga

SEQ ID NO: 232231 - RNA, 19 nt, Artificial Sequence
  Description of Artificial Sequence: Synthetic oligonucleotide
  Antisense strand to SEQ ID NO: 232230
ucucucgaagaaagguuau

SEQ ID NO: 232232 - RNA, 19 nt, Artificial Sequence
  Description of Artificial Sequence: Synthetic oligonucleotide
  Sense strand starting at position 1893 SEQ ID NO: 2989
accuuucuucgagagacau

SEQ ID NO: 232233 - RNA, 19 nt, Artificial Sequence
  Description of Artificial Sequence: Synthetic oligonucleotide
  Antisense strand to SEQ ID NO: 232232
augucucucgaagaaaggu

SEQ ID NO: 232234 - RNA, 19 nt, Artificial Sequence
  Description of Artificial Sequence: Synthetic oligonucleotide
  Sense strand starting at position 1899 SEQ ID NO: 2989
cuucgagagacaugaccuu

SEQ ID NO: 232235 - RNA, 19 nt, Artificial Sequence
  Description of Artificial Sequence: Synthetic oligonucleotide
  Antisense strand to SEQ ID NO: 232234
aaggucaugucucucgaag

SEQ ID NO: 232236 - RNA, 19 nt, Artificial Sequence
  Description of Artificial Sequence: Synthetic oligonucleotide
  Sense strand starting at position 1911 SEQ ID NO: 2989
ugaccuuucccaugagacc

SEQ ID NO: 232237 - RNA, 19 nt, Artificial Sequence
  Description of Artificial Sequence: Synthetic oligonucleotide
  Antisense strand to SEQ ID NO: 232236
ggucucaugggaaagguca

SEQ ID NO: 232238 - RNA, 19 nt, Artificial Sequence
  Description of Artificial Sequence: Synthetic oligonucleotide
  Sense strand starting at position 1979 SEQ ID NO: 2989
gaagucacgcacuacauau

SEQ ID NO: 232239 - RNA, 19 nt, Artificial Sequence
  Description of Artificial Sequence: Synthetic oligonucleotide
  Antisense strand to SEQ ID NO: 232238
auauguagugcgugacuuc

SEQ ID NO: 232240 - RNA, 19 nt, Artificial Sequence
  Description of Artificial Sequence: Synthetic oligonucleotide
  Sense strand starting at position 2052 SEQ ID NO: 2989
gggaauucugggcauugua

SEQ ID NO: 232241 - RNA, 19 nt, Artificial Sequence
  Description of Artificial Sequence: Synthetic oligonucleotide
  Antisense strand to SEQ ID NO: 232240
uacaaugcccagaauuccc

SEQ ID NO: 232242 - RNA, 19 nt, Artificial Sequence
  Description of Artificial Sequence: Synthetic oligonucleotide
  Sense strand starting at position 2065 SEQ ID NO: 2989
auuguaguuccucauugag

SEQ ID NO: 232243 - RNA, 19 nt, Artificial Sequence
  Description of Artificial Sequence: Synthetic oligonucleotide
  Antisense strand to SEQ ID NO: 232242
cucaaugaggaacuacaau

SEQ ID NO: 232244 - RNA, 19 nt, Artificial Sequence
  Description of Artificial Sequence: Synthetic oligonucleotide
  Sense strand starting at position 2068 SEQ ID NO: 2989
guaguuccucauugaggga

SEQ ID NO: 232245 - RNA, 19 nt, Artificial Sequence
  Description of Artificial Sequence: Synthetic oligonucleotide
  Antisense strand to SEQ ID NO: 232244
ucccucaaugaggaacuac

SEQ ID NO: 232246 - RNA, 19 nt, Artificial Sequence
  Description of Artificial Sequence: Synthetic oligonucleotide
  Sense strand starting at position 2106 SEQ ID NO: 2989
gcuuaagcuguugaagaag

SEQ ID NO: 232247 - RNA, 19 nt, Artificial Sequence
  Description of Artificial Sequence: Synthetic oligonucleotide
  Antisense strand to SEQ ID NO: 232246
cuucuucaacagcuuaagc

SEQ ID NO: 232248 - RNA, 19 nt, Artificial Sequence
  Description of Artificial Sequence: Synthetic oligonucleotide
  Sense strand starting at position 2118 SEQ ID NO: 2989
gaagaagauauaggucguu

SEQ ID NO: 232249 - RNA, 19 nt, Artificial Sequence
  Description of Artificial Sequence: Synthetic oligonucleotide
  Antisense strand to SEQ ID NO: 232248
aacgaccuauaucuucuuc

SEQ ID NO: 232250 - RNA, 19 nt, Artificial Sequence
  Description of Artificial Sequence: Synthetic oligonucleotide
  Sense strand starting at position 2121 SEQ ID NO: 2989
gaagauauaggucguuuag

SEQ ID NO: 232251 - RNA, 19 nt, Artificial Sequence
  Description of Artificial Sequence: Synthetic oligonucleotide
  Antisense strand to SEQ ID NO: 232250
cuaaacgaccuauaucuuc

SEQ ID NO: 232252 - RNA, 19 nt, Artificial Sequence
  Description of Artificial Sequence: Synthetic oligonucleotide
  Sense strand starting at position 2136 SEQ ID NO: 2989
uuaggugauucucuacuau

SEQ ID NO: 232253 - RNA, 19 nt, Artificial Sequence
  Description of Artificial Sequence: Synthetic oligonucleotide
  Antisense strand to SEQ ID NO: 232252
auaguagagaaucaccuaa

SEQ ID NO: 232254 - RNA, 19 nt, Artificial Sequence
  Description of Artificial Sequence: Synthetic oligonucleotide
  Sense strand starting at position 2153 SEQ ID NO: 2989
aucuaagguuguucuccua

SEQ ID NO: 232255 - RNA, 19 nt, Artificial Sequence
  Description of Artificial Sequence: Synthetic oligonucleotide
  Antisense strand to SEQ ID NO: 232254
uaggagaacaaccuuagau

SEQ ID NO: 232256 - RNA, 19 nt, Artificial Sequence
  Description of Artificial Sequence: Synthetic oligonucleotide
  Sense strand starting at position 2165 SEQ ID NO: 2989
ucuccuaguccuuggaagu

SEQ ID NO: 232257 - RNA, 19 nt, Artificial Sequence
  Description of Artificial Sequence: Synthetic oligonucleotide
  Antisense strand to SEQ ID NO: 232256
acuuccaaggacuaggaga

SEQ ID NO: 232258 - RNA, 19 nt, Artificial Sequence
  Description of Artificial Sequence: Synthetic oligonucleotide
  Sense strand starting at position 2290 SEQ ID NO: 2989
acgaaauaacucugucgag

SEQ ID NO: 232259 - RNA, 19 nt, Artificial Sequence
  Description of Artificial Sequence: Synthetic oligonucleotide
  Antisense strand to SEQ ID NO: 232258
cucgacagaguuauuucgu

SEQ ID NO: 232260 - RNA, 19 nt, Artificial Sequence
  Description of Artificial Sequence: Synthetic oligonucleotide
  Sense strand starting at position 2297 SEQ ID NO: 2989
aacucugucgaguaacuuu

SEQ ID NO: 232261 - RNA, 19 nt, Artificial Sequence
  Description of Artificial Sequence: Synthetic oligonucleotide
  Antisense strand to SEQ ID NO: 232260
aaaguuacucgacagaguu

SEQ ID NO: 232262 - RNA, 19 nt, Artificial Sequence
  Description of Artificial Sequence: Synthetic oligonucleotide
  Sense strand starting at position 2312 SEQ ID NO: 2989
cuuugaaaguaugcaaacu

SEQ ID NO: 232263 - RNA, 19 nt, Artificial Sequence
  Description of Artificial Sequence: Synthetic oligonucleotide
  Antisense strand to SEQ ID NO: 232262
aguuugcauacuuucaaag

SEQ ID NO: 232264 - RNA, 19 nt, Artificial Sequence
  Description of Artificial Sequence: Synthetic oligonucleotide
  Sense strand starting at position 2349 SEQ ID NO: 2989
acuuaugucguggauaggu

SEQ ID NO: 232265 - RNA, 19 nt, Artificial Sequence
  Description of Artificial Sequence: Synthetic oligonucleotide
  Antisense strand to SEQ ID NO: 232264
accuauccacgacauaagu

SEQ ID NO: 232266 - RNA, 19 nt, Artificial Sequence
  Description of Artificial Sequence: Synthetic oligonucleotide
  Sense strand starting at position 2474 SEQ ID NO: 2989
guggaaugcuuaccaaagu

SEQ ID NO: 232267 - RNA, 19 nt, Artificial Sequence
  Description of Artificial Sequence: Synthetic oligonucleotide
  Antisense strand to SEQ ID NO: 232266
acuuugguaagcauuccac

SEQ ID NO: 232268 - RNA, 19 nt, Artificial Sequence
  Description of Artificial Sequence: Synthetic oligonucleotide
  Sense strand starting at position 2531 SEQ ID NO: 2989
aaaguaaggcucuaaaggu

SEQ ID NO: 232269 - RNA, 19 nt, Artificial Sequence
  Description of Artificial Sequence: Synthetic oligonucleotide
  Antisense strand to SEQ ID NO: 232268
accuuuagagccuuacuuu

SEQ ID NO: 232270 - RNA, 19 nt, Artificial Sequence
  Description of Artificial Sequence: Synthetic oligonucleotide
  Sense strand starting at position 2548 SEQ ID NO: 2989
guaccaaacugauauuugu

SEQ ID NO: 232271 - RNA, 19 nt, Artificial Sequence
  Description of Artificial Sequence: Synthetic oligonucleotide
  Antisense strand to SEQ ID NO: 232270
acaaauaucaguuugguac

SEQ ID NO: 232272 - RNA, 19 nt, Artificial Sequence
  Description of Artificial Sequence: Synthetic oligonucleotide
  Sense strand starting at position 2555 SEQ ID NO: 2989
acugauauuuguuggaaua

SEQ ID NO: 232273 - RNA, 19 nt, Artificial Sequence
  Description of Artificial Sequence: Synthetic oligonucleotide
  Antisense strand to SEQ ID NO: 232272
uauuccaacaaauaucagu

SEQ ID NO: 232274 - RNA, 19 nt, Artificial Sequence
  Description of Artificial Sequence: Synthetic oligonucleotide
  Sense strand starting at position 2557 SEQ ID NO: 2989
ugauauuuguuggaauaug

SEQ ID NO: 232275 - RNA, 19 nt, Artificial Sequence
  Description of Artificial Sequence: Synthetic oligonucleotide
  Antisense strand to SEQ ID NO: 232274
cauauuccaacaaauauca

SEQ ID NO: 232276 - RNA, 19 nt, Artificial Sequence
  Description of Artificial Sequence: Synthetic oligonucleotide
  Sense strand starting at position 2569 SEQ ID NO: 2989
gaauaugcugugcaacuuu

SEQ ID NO: 232277 - RNA, 19 nt, Artificial Sequence
  Description of Artificial Sequence: Synthetic oligonucleotide
  Antisense strand to SEQ ID NO: 232276
aaaguugcacagcauauuc

SEQ ID NO: 232278 - RNA, 19 nt, Artificial Sequence
  Description of Artificial Sequence: Synthetic oligonucleotide
  Sense strand starting at position 892 SEQ ID NO: 2990
gugggcucccuccaaucua

SEQ ID NO: 232279 - RNA, 19 nt, Artificial Sequence
  Description of Artificial Sequence: Synthetic oligonucleotide
  Antisense strand to SEQ ID NO: 232278
uagauuggagggagcccac

SEQ ID NO: 232280 - RNA, 19 nt, Artificial Sequence
  Description of Artificial Sequence: Synthetic oligonucleotide
  Sense strand starting at position 946 SEQ ID NO: 2990
uuuggaaguagucauugua

SEQ ID NO: 232281 - RNA, 19 nt, Artificial Sequence
  Description of Artificial Sequence: Synthetic oligonucleotide
  Antisense strand to SEQ ID NO: 232280
uacaaugacuacuuccaaa

SEQ ID NO: 232282 - RNA, 19 nt, Artificial Sequence
  Description of Artificial Sequence: Synthetic oligonucleotide
  Sense strand starting at position 949 SEQ ID NO: 2990
ggaaguagucauuguauua

SEQ ID NO: 232283 - RNA, 19 nt, Artificial Sequence
  Description of Artificial Sequence: Synthetic oligonucleotide
  Antisense strand to SEQ ID NO: 232282
uaauacaaugacuacuucc

SEQ ID NO: 232284 - RNA, 19 nt, Artificial Sequence
  Description of Artificial Sequence: Synthetic oligonucleotide
  Sense strand starting at position 998 SEQ ID NO: 2990
uaaagcuuucucuguagga

SEQ ID NO: 232285 - RNA, 19 nt, Artificial Sequence
  Description of Artificial Sequence: Synthetic oligonucleotide
  Antisense strand to SEQ ID NO: 232284
uccuacagagaaagcuuua

SEQ ID NO: 232286 - RNA, 19 nt, Artificial Sequence
  Description of Artificial Sequence: Synthetic oligonucleotide
  Sense strand starting at position 999 SEQ ID NO: 2990
aaagcuuucucuguaggag

SEQ ID NO: 232287 - RNA, 19 nt, Artificial Sequence
  Description of Artificial Sequence: Synthetic oligonucleotide
  Antisense strand to SEQ ID NO: 232286
cuccuacagagaaagcuuu

SEQ ID NO: 232288 - RNA, 19 nt, Artificial Sequence
  Description of Artificial Sequence: Synthetic oligonucleotide
  Sense strand starting at position 1000 SEQ ID NO: 2990
aagcuuucucuguaggaga

SEQ ID NO: 232289 - RNA, 19 nt, Artificial Sequence
  Description of Artificial Sequence: Synthetic oligonucleotide
  Antisense strand to SEQ ID NO: 232288
ucuccuacagagaaagcuu

SEQ ID NO: 232290 - RNA, 19 nt, Artificial Sequence
  Description of Artificial Sequence: Synthetic oligonucleotide
  Sense strand starting at position 1002 SEQ ID NO: 2990
gcuuucucuguaggagaga

SEQ ID NO: 232291 - RNA, 19 nt, Artificial Sequence
  Description of Artificial Sequence: Synthetic oligonucleotide
  Antisense strand to SEQ ID NO: 232290
ucucuccuacagagaaagc

SEQ ID NO: 232292 - RNA, 19 nt, Artificial Sequence
  Description of Artificial Sequence: Synthetic oligonucleotide
  Sense strand starting at position 1029 SEQ ID NO: 2990
ggcauuguuauggaaaugu

SEQ ID NO: 232293 - RNA, 19 nt, Artificial Sequence
  Description of Artificial Sequence: Synthetic oligonucleotide
  Antisense strand to SEQ ID NO: 232292
acauuuccauaacaaugcc

SEQ ID NO: 232294 - RNA, 19 nt, Artificial Sequence
  Description of Artificial Sequence: Synthetic oligonucleotide
  Sense strand starting at position 1038 SEQ ID NO: 2990
auggaaauguccucgguga

SEQ ID NO: 232295 - RNA, 19 nt, Artificial Sequence
  Description of Artificial Sequence: Synthetic oligonucleotide
  Antisense strand to SEQ ID NO: 232294
ucaccgaggacauuuccau

SEQ ID NO: 232296 - RNA, 19 nt, Artificial Sequence
  Description of Artificial Sequence: Synthetic oligonucleotide
  Sense strand starting at position 1039 SEQ ID NO: 2990
uggaaauguccucggugaa

SEQ ID NO: 232297 - RNA, 19 nt, Artificial Sequence
  Description of Artificial Sequence: Synthetic oligonucleotide
  Antisense strand to SEQ ID NO: 232296
uucaccgaggacauuucca

SEQ ID NO: 232298 - RNA, 19 nt, Artificial Sequence
  Description of Artificial Sequence: Synthetic oligonucleotide
  Sense strand starting at position 1040 SEQ ID NO: 2990
ggaaauguccucggugaaa

SEQ ID NO: 232299 - RNA, 19 nt, Artificial Sequence
  Description of Artificial Sequence: Synthetic oligonucleotide
  Antisense strand to SEQ ID NO: 232298
uuucaccgaggacauuucc

SEQ ID NO: 232300 - RNA, 19 nt, Artificial Sequence
  Description of Artificial Sequence: Synthetic oligonucleotide
  Sense strand starting at position 1530 SEQ ID NO: 2990
agaggaagaucuuauacaa

SEQ ID NO: 232301 - RNA, 19 nt, Artificial Sequence
  Description of Artificial Sequence: Synthetic oligonucleotide
  Antisense strand to SEQ ID NO: 232300
uuguauaagaucuuccucu

SEQ ID NO: 232302 - RNA, 19 nt, Artificial Sequence
  Description of Artificial Sequence: Synthetic oligonucleotide
  Sense strand starting at position 2324 SEQ ID NO: 2990
ggaaacauaucccugccuu

SEQ ID NO: 232303 - RNA, 19 nt, Artificial Sequence
  Description of Artificial Sequence: Synthetic oligonucleotide
  Antisense strand to SEQ ID NO: 232302
aaggcagggauauguuucc

SEQ ID NO: 232304 - RNA, 19 nt, Artificial Sequence
  Description of Artificial Sequence: Synthetic oligonucleotide
  Sense strand starting at position 2382 SEQ ID NO: 2990
uuugauacggugugauuaa

SEQ ID NO: 232305 - RNA, 19 nt, Artificial Sequence
  Description of Artificial Sequence: Synthetic oligonucleotide
  Antisense strand to SEQ ID NO: 232304
uuaaucacaccguaucaaa

SEQ ID NO: 232306 - RNA, 19 nt, Artificial Sequence
  Description of Artificial Sequence: Synthetic oligonucleotide
  Sense strand starting at position 2392 SEQ ID NO: 2990
ugugauuaacgcgaugaag

SEQ ID NO: 232307 - RNA, 19 nt, Artificial Sequence
  Description of Artificial Sequence: Synthetic oligonucleotide
  Antisense strand to SEQ ID NO: 232306
cuucaucgcguuaaucaca

SEQ ID NO: 232308 - RNA, 19 nt, Artificial Sequence
  Description of Artificial Sequence: Synthetic oligonucleotide
  Sense strand starting at position 2394 SEQ ID NO: 2990
ugauuaacgcgaugaagga

SEQ ID NO: 232309 - RNA, 19 nt, Artificial Sequence
  Description of Artificial Sequence: Synthetic oligonucleotide
  Antisense strand to SEQ ID NO: 232308
uccuucaucgcguuaauca

SEQ ID NO: 232310 - RNA, 19 nt, Artificial Sequence
  Description of Artificial Sequence: Synthetic oligonucleotide
  Sense strand starting at position 2512 SEQ ID NO: 2990
cugaguugugaagguguga

SEQ ID NO: 232311 - RNA, 19 nt, Artificial Sequence
  Description of Artificial Sequence: Synthetic oligonucleotide
  Antisense strand to SEQ ID NO: 232310
ucacaccuucacaacucag

SEQ ID NO: 232312 - RNA, 19 nt, Artificial Sequence
  Description of Artificial Sequence: Synthetic oligonucleotide
  Sense strand starting at position 2533 SEQ ID NO: 2990
ugaggaggcuauuccaaau

SEQ ID NO: 232313 - RNA, 19 nt, Artificial Sequence
  Description of Artificial Sequence: Synthetic oligonucleotide
  Antisense strand to SEQ ID NO: 232312
auuuggaauagccuccuca

SEQ ID NO: 232314 - RNA, 19 nt, Artificial Sequence
  Description of Artificial Sequence: Synthetic oligonucleotide
  Sense strand starting at position 2639 SEQ ID NO: 2990
gagccagguccuugcauuu

SEQ ID NO: 232315 - RNA, 19 nt, Artificial Sequence
  Description of Artificial Sequence: Synthetic oligonucleotide
  Antisense strand to SEQ ID NO: 232314
aaaugcaaggaccuggcuc

SEQ ID NO: 232316 - RNA, 19 nt, Artificial Sequence
  Description of Artificial Sequence: Synthetic oligonucleotide
  Sense strand starting at position 2668 SEQ ID NO: 2990
aagcaaagguguuugaacu

SEQ ID NO: 232317 - RNA, 19 nt, Artificial Sequence
  Description of Artificial Sequence: Synthetic oligonucleotide
  Antisense strand to SEQ ID NO: 232316
aguucaaacaccuuugcuu

SEQ ID NO: 232318 - RNA, 19 nt, Artificial Sequence
  Description of Artificial Sequence: Synthetic oligonucleotide
  Sense strand starting at position 2679 SEQ ID NO: 2990
uuugaacuguauccugaaa

SEQ ID NO: 232319 - RNA, 19 nt, Artificial Sequence
  Description of Artificial Sequence: Synthetic oligonucleotide
  Antisense strand to SEQ ID NO: 232318
uuucaggauacaguucaaa

SEQ ID NO: 232320 - RNA, 19 nt, Artificial Sequence
  Description of Artificial Sequence: Synthetic oligonucleotide
  Sense strand starting at position 2726 SEQ ID NO: 2990
gcaggagaguagucuuaau

SEQ ID NO: 232321 - RNA, 19 nt, Artificial Sequence
  Description of Artificial Sequence: Synthetic oligonucleotide
  Antisense strand to SEQ ID NO: 232320
auuaagacuacucuccugc

SEQ ID NO: 232322 - RNA, 19 nt, Artificial Sequence
  Description of Artificial Sequence: Synthetic oligonucleotide
  Sense strand starting at position 2738 SEQ ID NO: 2990
ucuuaaugaguuugcauuu

SEQ ID NO: 232323 - RNA, 19 nt, Artificial Sequence
  Description of Artificial Sequence: Synthetic oligonucleotide
  Antisense strand to SEQ ID NO: 232322
aaaugcaaacucauuaaga

SEQ ID NO: 232324 - RNA, 19 nt, Artificial Sequence
  Description of Artificial Sequence: Synthetic oligonucleotide
  Sense strand starting at position 2887 SEQ ID NO: 2990
agaguagacugcucuucca

SEQ ID NO: 232325 - RNA, 19 nt, Artificial Sequence
  Description of Artificial Sequence: Synthetic oligonucleotide
  Antisense strand to SEQ ID NO: 232324
uggaagagcagucuacucu

SEQ ID NO: 232326 - RNA, 19 nt, Artificial Sequence
  Description of Artificial Sequence: Synthetic oligonucleotide
  Sense strand starting at position 2922 SEQ ID NO: 2990
ccaaucagucuuggaagaa

SEQ ID NO: 232327 - RNA, 19 nt, Artificial Sequence
  Description of Artificial Sequence: Synthetic oligonucleotide
  Antisense strand to SEQ ID NO: 232326
uucuuccaagacugauugg

SEQ ID NO: 232328 - RNA, 19 nt, Artificial Sequence
  Description of Artificial Sequence: Synthetic oligonucleotide
  Sense strand starting at position 3407 SEQ ID NO: 2990
ggugggaagucaguggaaa

SEQ ID NO: 232329 - RNA, 19 nt, Artificial Sequence
  Description of Artificial Sequence: Synthetic oligonucleotide
  Antisense strand to SEQ ID NO: 232328
uuuccacugacuucccacc

SEQ ID NO: 232330 - RNA, 19 nt, Artificial Sequence
  Description of Artificial Sequence: Synthetic oligonucleotide
  Sense strand starting at position 3433 SEQ ID NO: 2990
gagaauguugcauguauga

SEQ ID NO: 232331 - RNA, 19 nt, Artificial Sequence
  Description of Artificial Sequence: Synthetic oligonucleotide
  Antisense strand to SEQ ID NO: 232330
ucauacaugcaacauucuc

SEQ ID NO: 232332 - RNA, 19 nt, Artificial Sequence
  Description of Artificial Sequence: Synthetic oligonucleotide
  Sense strand starting at position 3463 SEQ ID NO: 2990
caggguucuauaggaacga

SEQ ID NO: 232333 - RNA, 19 nt, Artificial Sequence
  Description of Artificial Sequence: Synthetic oligonucleotide
  Antisense strand to SEQ ID NO: 232332
ucguuccuauagaacccug

SEQ ID NO: 232334 - RNA, 19 nt, Artificial Sequence
  Description of Artificial Sequence: Synthetic oligonucleotide
  Sense strand starting at position 3542 SEQ ID NO: 2990
ccugaaagaugauaaugaa

SEQ ID NO: 232335 - RNA, 19 nt, Artificial Sequence
  Description of Artificial Sequence: Synthetic oligonucleotide
  Antisense strand to SEQ ID NO: 232334
uucauuaucaucuuucagg

SEQ ID NO: 232336 - RNA, 19 nt, Artificial Sequence
  Description of Artificial Sequence: Synthetic oligonucleotide
  Sense strand starting at position 3557 SEQ ID NO: 2990
ugaauuaccuaacagagaa

SEQ ID NO: 232337 - RNA, 19 nt, Artificial Sequence
  Description of Artificial Sequence: Synthetic oligonucleotide
  Antisense strand to SEQ ID NO: 232336
uucucuguuagguaauuca

SEQ ID NO: 232338 - RNA, 19 nt, Artificial Sequence
  Description of Artificial Sequence: Synthetic oligonucleotide
  Sense strand starting at position 3636 SEQ ID NO: 2990
agaacuaguuuggugacaa

SEQ ID NO: 232339 - RNA, 19 nt, Artificial Sequence
  Description of Artificial Sequence: Synthetic oligonucleotide
  Antisense strand to SEQ ID NO: 232338
uugucaccaaacuaguucu

SEQ ID NO: 232340 - RNA, 19 nt, Artificial Sequence
  Description of Artificial Sequence: Synthetic oligonucleotide
  Sense strand starting at position 3644 SEQ ID NO: 2990
uuuggugacaauugagaau

SEQ ID NO: 232341 - RNA, 19 nt, Artificial Sequence
  Description of Artificial Sequence: Synthetic oligonucleotide
  Antisense strand to SEQ ID NO: 232340
auucucaauugucaccaaa

SEQ ID NO: 232342 - RNA, 19 nt, Artificial Sequence
  Description of Artificial Sequence: Synthetic oligonucleotide
  Sense strand starting at position 3689 SEQ ID NO: 2990
guuuauuaggacugaagca

SEQ ID NO: 232343 - RNA, 19 nt, Artificial Sequence
  Description of Artificial Sequence: Synthetic oligonucleotide
  Antisense strand to SEQ ID NO: 232342
ugcuucaguccuaauaaac

SEQ ID NO: 232344 - RNA, 19 nt, Artificial Sequence
  Description of Artificial Sequence: Synthetic oligonucleotide
  Sense strand starting at position 3741 SEQ ID NO: 2990
gcuagaguuagauaaugua

SEQ ID NO: 232345 - RNA, 19 nt, Artificial Sequence
  Description of Artificial Sequence: Synthetic oligonucleotide
  Antisense strand to SEQ ID NO: 232344
uacauuaucuaacucuagc

SEQ ID NO: 232346 - RNA, 19 nt, Artificial Sequence
  Description of Artificial Sequence: Synthetic oligonucleotide
  Sense strand starting at position 3785 SEQ ID NO: 2990
uuuagacuuuauccagagu

SEQ ID NO: 232347 - RNA, 19 nt, Artificial Sequence
  Description of Artificial Sequence: Synthetic oligonucleotide
  Antisense strand to SEQ ID NO: 232346
acucuggauaaagucuaaa

SEQ ID NO: 232348 - RNA, 19 nt, Artificial Sequence
  Description of Artificial Sequence: Synthetic oligonucleotide
  Sense strand starting at position 3858 SEQ ID NO: 2990
gaauguuacggcuauagug

SEQ ID NO: 232349 - RNA, 19 nt, Artificial Sequence
  Description of Artificial Sequence: Synthetic oligonucleotide
  Antisense strand to SEQ ID NO: 232348
cacuauagccguaacauuc

SEQ ID NO: 232350 - RNA, 19 nt, Artificial Sequence
  Description of Artificial Sequence: Synthetic oligonucleotide
  Sense strand starting at position 3867 SEQ ID NO: 2990
ggcuauagugugggacaaa

SEQ ID NO: 232351 - RNA, 19 nt, Artificial Sequence
  Description of Artificial Sequence: Synthetic oligonucleotide
  Antisense strand to SEQ ID NO: 232350
uuugucccacacuauagcc

SEQ ID NO: 232352 - RNA, 19 nt, Artificial Sequence
  Description of Artificial Sequence: Synthetic oligonucleotide
  Sense strand starting at position 3914 SEQ ID NO: 2990
agacuagugcuauagucca

SEQ ID NO: 232353 - RNA, 19 nt, Artificial Sequence
  Description of Artificial Sequence: Synthetic oligonucleotide
  Antisense strand to SEQ ID NO: 232352
uggacuauagcacuagucu

SEQ ID NO: 232354 - RNA, 19 nt, Artificial Sequence
  Description of Artificial Sequence: Synthetic oligonucleotide
  Sense strand starting at position 3921 SEQ ID NO: 2990
ugcuauaguccaggaggga

SEQ ID NO: 232355 - RNA, 19 nt, Artificial Sequence
  Description of Artificial Sequence: Synthetic oligonucleotide
  Antisense strand to SEQ ID NO: 232354
ucccuccuggacuauagca

SEQ ID NO: 232356 - RNA, 19 nt, Artificial Sequence
  Description of Artificial Sequence: Synthetic oligonucleotide
  Sense strand starting at position 3941 SEQ ID NO: 2990
uugauugugaccuggccua

SEQ ID NO: 232357 - RNA, 19 nt, Artificial Sequence
  Description of Artificial Sequence: Synthetic oligonucleotide
  Antisense strand to SEQ ID NO: 232356
uaggccaggucacaaucaa

SEQ ID NO: 232358 - RNA, 19 nt, Artificial Sequence
  Description of Artificial Sequence: Synthetic oligonucleotide
  Sense strand starting at position 2118 SEQ ID NO: 2991
cgcauaugugcgggugacu

SEQ ID NO: 232359 - RNA, 19 nt, Artificial Sequence
  Description of Artificial Sequence: Synthetic oligonucleotide
  Antisense strand to SEQ ID NO: 232358
agucacccgcacauaugcg

SEQ ID NO: 232360 - RNA, 19 nt, Artificial Sequence
  Description of Artificial Sequence: Synthetic oligonucleotide
  Sense strand starting at position 2335 SEQ ID NO: 2991
gacugagcucuccauccga

SEQ ID NO: 232361 - RNA, 19 nt, Artificial Sequence
  Description of Artificial Sequence: Synthetic oligonucleotide
  Antisense strand to SEQ ID NO: 232360
ucggauggagagcucaguc

SEQ ID NO: 232362 - RNA, 19 nt, Artificial Sequence
  Description of Artificial Sequence: Synthetic oligonucleotide
  Sense strand starting at position 2340 SEQ ID NO: 2991
agcucuccauccgaauaaa

SEQ ID NO: 232363 - RNA, 19 nt, Artificial Sequence
  Description of Artificial Sequence: Synthetic oligonucleotide
  Antisense strand to SEQ ID NO: 232362
uuuauucggauggagagcu

SEQ ID NO: 232364 - RNA, 19 nt, Artificial Sequence
  Description of Artificial Sequence: Synthetic oligonucleotide
  Sense strand starting at position 2351 SEQ ID NO: 2991
cgaauaaacuagugucccu

SEQ ID NO: 232365 - RNA, 19 nt, Artificial Sequence
  Description of Artificial Sequence: Synthetic oligonucleotide
  Antisense strand to SEQ ID NO: 232364
agggacacuaguuuauucg

SEQ ID NO: 232366 - RNA, 19 nt, Artificial Sequence
  Description of Artificial Sequence: Synthetic oligonucleotide
  Sense strand starting at position 2442 SEQ ID NO: 2991
ggaucuacguccuucugau

SEQ ID NO: 232367 - RNA, 19 nt, Artificial Sequence
  Description of Artificial Sequence: Synthetic oligonucleotide
  Antisense strand to SEQ ID NO: 232366
aucagaaggacguagaucc

SEQ ID NO: 232368 - RNA, 19 nt, Artificial Sequence
  Description of Artificial Sequence: Synthetic oligonucleotide
  Sense strand starting at position 2495 SEQ ID NO: 2991
caguuuaaaucggagguca

SEQ ID NO: 232369 - RNA, 19 nt, Artificial Sequence
  Description of Artificial Sequence: Synthetic oligonucleotide
  Antisense strand to SEQ ID NO: 232368
ugaccuccgauuuaaacug

SEQ ID NO: 232370 - RNA, 19 nt, Artificial Sequence
  Description of Artificial Sequence: Synthetic oligonucleotide
  Sense strand starting at position 2507 SEQ ID NO: 2991
gaggucagguucuagaaca

SEQ ID NO: 232371 - RNA, 19 nt, Artificial Sequence
  Description of Artificial Sequence: Synthetic oligonucleotide
  Antisense strand to SEQ ID NO: 232370
uguucuagaaccugaccuc

SEQ ID NO: 232372 - RNA, 19 nt, Artificial Sequence
  Description of Artificial Sequence: Synthetic oligonucleotide
  Sense strand starting at position 2567 SEQ ID NO: 2991
gcaugagcagucugaaguc

SEQ ID NO: 232373 - RNA, 19 nt, Artificial Sequence
  Description of Artificial Sequence: Synthetic oligonucleotide
  Antisense strand to SEQ ID NO: 232372
gacuucagacugcucaugc

SEQ ID NO: 232374 - RNA, 19 nt, Artificial Sequence
  Description of Artificial Sequence: Synthetic oligonucleotide
  Sense strand starting at position 2649 SEQ ID NO: 2991
gacguucuuccuggaaggu

SEQ ID NO: 232375 - RNA, 19 nt, Artificial Sequence
  Description of Artificial Sequence: Synthetic oligonucleotide
  Antisense strand to SEQ ID NO: 232374
accuuccaggaagaacguc

SEQ ID NO: 232376 - RNA, 19 nt, Artificial Sequence
  Description of Artificial Sequence: Synthetic oligonucleotide
  Sense strand starting at position 2650 SEQ ID NO: 2991
acguucuuccuggaagguu

SEQ ID NO: 232377 - RNA, 19 nt, Artificial Sequence
  Description of Artificial Sequence: Synthetic oligonucleotide
  Antisense strand to SEQ ID NO: 232376
aaccuuccaggaagaacgu

SEQ ID NO: 232378 - RNA, 19 nt, Artificial Sequence
  Description of Artificial Sequence: Synthetic oligonucleotide
  Sense strand starting at position 2686 SEQ ID NO: 2991
gcagauguccugggacaca

SEQ ID NO: 232379 - RNA, 19 nt, Artificial Sequence
  Description of Artificial Sequence: Synthetic oligonucleotide
  Antisense strand to SEQ ID NO: 232378
ugugucccaggacaucugc

SEQ ID NO: 232380 - RNA, 19 nt, Artificial Sequence
  Description of Artificial Sequence: Synthetic oligonucleotide
  Sense strand starting at position 2813 SEQ ID NO: 2991
ggagcuguuucccagcaga

SEQ ID NO: 232381 - RNA, 19 nt, Artificial Sequence
  Description of Artificial Sequence: Synthetic oligonucleotide
  Antisense strand to SEQ ID NO: 232380
ucugcugggaaacagcucc

SEQ ID NO: 232382 - RNA, 19 nt, Artificial Sequence
  Description of Artificial Sequence: Synthetic oligonucleotide
  Sense strand starting at position 2956 SEQ ID NO: 2991
agaucaaggugucaauaga

SEQ ID NO: 232383 - RNA, 19 nt, Artificial Sequence
  Description of Artificial Sequence: Synthetic oligonucleotide
  Antisense strand to SEQ ID NO: 232382
ucuauugacaccuugaucu

SEQ ID NO: 232384 - RNA, 19 nt, Artificial Sequence
  Description of Artificial Sequence: Synthetic oligonucleotide
  Sense strand starting at position 2964 SEQ ID NO: 2991
gugucaauagauuaggugu

SEQ ID NO: 232385 - RNA, 19 nt, Artificial Sequence
  Description of Artificial Sequence: Synthetic oligonucleotide
  Antisense strand to SEQ ID NO: 232384
acaccuaaucuauugacac

SEQ ID NO: 232386 - RNA, 19 nt, Artificial Sequence
  Description of Artificial Sequence: Synthetic oligonucleotide
  Sense strand starting at position 2966 SEQ ID NO: 2991
gucaauagauuagguguuu

SEQ ID NO: 232387 - RNA, 19 nt, Artificial Sequence
  Description of Artificial Sequence: Synthetic oligonucleotide
  Antisense strand to SEQ ID NO: 232386
aaacaccuaaucuauugac

SEQ ID NO: 232388 - RNA, 19 nt, Artificial Sequence
  Description of Artificial Sequence: Synthetic oligonucleotide
  Sense strand starting at position 3124 SEQ ID NO: 2991
augccaucaucuugggaau

SEQ ID NO: 232389 - RNA, 19 nt, Artificial Sequence
  Description of Artificial Sequence: Synthetic oligonucleotide
  Antisense strand to SEQ ID NO: 232388
auucccaagaugauggcau

SEQ ID NO: 232390 - RNA, 19 nt, Artificial Sequence
  Description of Artificial Sequence: Synthetic oligonucleotide
  Sense strand starting at position 3125 SEQ ID NO: 2991
ugccaucaucuugggaaug

SEQ ID NO: 232391 - RNA, 19 nt, Artificial Sequence
  Description of Artificial Sequence: Synthetic oligonucleotide
  Antisense strand to SEQ ID NO: 232390
cauucccaagaugauggca

SEQ ID NO: 232392 - RNA, 19 nt, Artificial Sequence
  Description of Artificial Sequence: Synthetic oligonucleotide
  Sense strand starting at position 3126 SEQ ID NO: 2991
gccaucaucuugggaauga

SEQ ID NO: 232393 - RNA, 19 nt, Artificial Sequence
  Description of Artificial Sequence: Synthetic oligonucleotide
  Antisense strand to SEQ ID NO: 232392
ucauucccaagaugauggc

SEQ ID NO: 232394 - RNA, 19 nt, Artificial Sequence
  Description of Artificial Sequence: Synthetic oligonucleotide
  Sense strand starting at position 3127 SEQ ID NO: 2991
ccaucaucuugggaaugag

SEQ ID NO: 232395 - RNA, 19 nt, Artificial Sequence
  Description of Artificial Sequence: Synthetic oligonucleotide
  Antisense strand to SEQ ID NO: 232394
cucauucccaagaugaugg

SEQ ID NO: 232396 - RNA, 19 nt, Artificial Sequence
  Description of Artificial Sequence: Synthetic oligonucleotide
  Sense strand starting at position 3130 SEQ ID NO: 2991
ucaucuugggaaugagguu

SEQ ID NO: 232397 - RNA, 19 nt, Artificial Sequence
  Description of Artificial Sequence: Synthetic oligonucleotide
  Antisense strand to SEQ ID NO: 232396
aaccucauucccaagauga

SEQ ID NO: 232398 - RNA, 19 nt, Artificial Sequence
  Description of Artificial Sequence: Synthetic oligonucleotide
  Sense strand starting at position 3139 SEQ ID NO: 2991
gaaugagguuuccaacaua

SEQ ID NO: 232399 - RNA, 19 nt, Artificial Sequence
  Description of Artificial Sequence: Synthetic oligonucleotide
  Antisense strand to SEQ ID NO: 232398
uauguuggaaaccucauuc

SEQ ID NO: 232400 - RNA, 19 nt, Artificial Sequence
  Description of Artificial Sequence: Synthetic oligonucleotide
  Sense strand starting at position 3238 SEQ ID NO: 2991
ggcauugguugcccaggaa

SEQ ID NO: 232401 - RNA, 19 nt, Artificial Sequence
  Description of Artificial Sequence: Synthetic oligonucleotide
  Antisense strand to SEQ ID NO: 232400
uuccugggcaaccaaugcc

SEQ ID NO: 232402 - RNA, 19 nt, Artificial Sequence
  Description of Artificial Sequence: Synthetic oligonucleotide
  Sense strand starting at position 3241 SEQ ID NO: 2991
auugguugcccaggaaauc

SEQ ID NO: 232403 - RNA, 19 nt, Artificial Sequence
  Description of Artificial Sequence: Synthetic oligonucleotide
  Antisense strand to SEQ ID NO: 232402
gauuuccugggcaaccaau

SEQ ID NO: 232404 - RNA, 19 nt, Artificial Sequence
  Description of Artificial Sequence: Synthetic oligonucleotide
  Sense strand starting at position 3609 SEQ ID NO: 2991
cugcaagggauccauguaa

SEQ ID NO: 232405 - RNA, 19 nt, Artificial Sequence
  Description of Artificial Sequence: Synthetic oligonucleotide
  Antisense strand to SEQ ID NO: 232404
uuacauggaucccuugcag

SEQ ID NO: 232406 - RNA, 19 nt, Artificial Sequence
  Description of Artificial Sequence: Synthetic oligonucleotide
  Sense strand starting at position 3635 SEQ ID NO: 2991
uugcauuccugguugaaca

SEQ ID NO: 232407 - RNA, 19 nt, Artificial Sequence
  Description of Artificial Sequence: Synthetic oligonucleotide
  Antisense strand to SEQ ID NO: 232406
uguucaaccaggaaugcaa

SEQ ID NO: 232408 - RNA, 19 nt, Artificial Sequence
  Description of Artificial Sequence: Synthetic oligonucleotide
  Sense strand starting at position 3636 SEQ ID NO: 2991
ugcauuccugguugaacau

SEQ ID NO: 232409 - RNA, 19 nt, Artificial Sequence
  Description of Artificial Sequence: Synthetic oligonucleotide
  Antisense strand to SEQ ID NO: 232408
auguucaaccaggaaugca

SEQ ID NO: 232410 - RNA, 19 nt, Artificial Sequence
  Description of Artificial Sequence: Synthetic oligonucleotide
  Sense strand starting at position 3645 SEQ ID NO: 2991
gguugaacauccugaagag

SEQ ID NO: 232411 - RNA, 19 nt, Artificial Sequence
  Description of Artificial Sequence: Synthetic oligonucleotide
  Antisense strand to SEQ ID NO: 232410
cucuucaggauguucaacc

SEQ ID NO: 232412 - RNA, 19 nt, Artificial Sequence
  Description of Artificial Sequence: Synthetic oligonucleotide
  Sense strand starting at position 3760 SEQ ID NO: 2991
cucgaucucucauguguuu

SEQ ID NO: 232413 - RNA, 19 nt, Artificial Sequence
  Description of Artificial Sequence: Synthetic oligonucleotide
  Antisense strand to SEQ ID NO: 232412
aaacacaugagagaucgag

SEQ ID NO: 232414 - RNA, 19 nt, Artificial Sequence
  Description of Artificial Sequence: Synthetic oligonucleotide
  Sense strand starting at position 3769 SEQ ID NO: 2991
ucauguguuugcugucugu

SEQ ID NO: 232415 - RNA, 19 nt, Artificial Sequence
  Description of Artificial Sequence: Synthetic oligonucleotide
  Antisense strand to SEQ ID NO: 232414
acagacagcaaacacauga

SEQ ID NO: 232416 - RNA, 19 nt, Artificial Sequence
  Description of Artificial Sequence: Synthetic oligonucleotide
  Sense strand starting at position 3771 SEQ ID NO: 2991
auguguuugcugucuguac

SEQ ID NO: 232417 - RNA, 19 nt, Artificial Sequence
  Description of Artificial Sequence: Synthetic oligonucleotide
  Antisense strand to SEQ ID NO: 232416
guacagacagcaaacacau

SEQ ID NO: 232418 - RNA, 19 nt, Artificial Sequence
  Description of Artificial Sequence: Synthetic oligonucleotide
  Sense strand starting at position 3773 SEQ ID NO: 2991
guguuugcugucuguacca

SEQ ID NO: 232419 - RNA, 19 nt, Artificial Sequence
  Description of Artificial Sequence: Synthetic oligonucleotide
  Antisense strand to SEQ ID NO: 232418
ugguacagacagcaaacac

SEQ ID NO: 232420 - RNA, 19 nt, Artificial Sequence
  Description of Artificial Sequence: Synthetic oligonucleotide
  Sense strand starting at position 3775 SEQ ID NO: 2991
guuugcugucuguaccaaa

SEQ ID NO: 232421 - RNA, 19 nt, Artificial Sequence
  Description of Artificial Sequence: Synthetic oligonucleotide
  Antisense strand to SEQ ID NO: 232420
uuugguacagacagcaaac

SEQ ID NO: 232422 - RNA, 19 nt, Artificial Sequence
  Description of Artificial Sequence: Synthetic oligonucleotide
  Sense strand starting at position 3867 SEQ ID NO: 2991
ggcugcauuuauuaauauu

SEQ ID NO: 232423 - RNA, 19 nt, Artificial Sequence
  Description of Artificial Sequence: Synthetic oligonucleotide
  Antisense strand to SEQ ID NO: 232422
aauauuaauaaaugcagcc

SEQ ID NO: 232424 - RNA, 19 nt, Artificial Sequence
  Description of Artificial Sequence: Synthetic oligonucleotide
  Sense strand starting at position 3981 SEQ ID NO: 2991
agacaucgggcagauguaa

SEQ ID NO: 232425 - RNA, 19 nt, Artificial Sequence
  Description of Artificial Sequence: Synthetic oligonucleotide
  Antisense strand to SEQ ID NO: 232424
uuacaucugcccgaugucu

SEQ ID NO: 232426 - RNA, 19 nt, Artificial Sequence
  Description of Artificial Sequence: Synthetic oligonucleotide
  Sense strand starting at position 596 SEQ ID NO: 2993
acaagacccuaucucgaau

SEQ ID NO: 232427 - RNA, 19 nt, Artificial Sequence
  Description of Artificial Sequence: Synthetic oligonucleotide
  Antisense strand to SEQ ID NO: 232426
auucgagauagggucuugu

SEQ ID NO: 232428 - RNA, 19 nt, Artificial Sequence
  Description of Artificial Sequence: Synthetic oligonucleotide
  Sense strand starting at position 660 SEQ ID NO: 2993
aagagcuaccucugggaau

SEQ ID NO: 232429 - RNA, 19 nt, Artificial Sequence
  Description of Artificial Sequence: Synthetic oligonucleotide
  Antisense strand to SEQ ID NO: 232428
auucccagagguagcucuu

SEQ ID NO: 232430 - RNA, 19 nt, Artificial Sequence
  Description of Artificial Sequence: Synthetic oligonucleotide
  Sense strand starting at position 662 SEQ ID NO: 2993
gagcuaccucugggaauga

SEQ ID NO: 232431 - RNA, 19 nt, Artificial Sequence
  Description of Artificial Sequence: Synthetic oligonucleotide
  Antisense strand to SEQ ID NO: 232430
ucauucccagagguagcuc

SEQ ID NO: 232432 - RNA, 19 nt, Artificial Sequence
  Description of Artificial Sequence: Synthetic oligonucleotide
  Sense strand starting at position 1203 SEQ ID NO: 2993
gcagaaugaucucuugagc

SEQ ID NO: 232433 - RNA, 19 nt, Artificial Sequence
  Description of Artificial Sequence: Synthetic oligonucleotide
  Antisense strand to SEQ ID NO: 232432
gcucaagagaucauucugc

SEQ ID NO: 232434 - RNA, 19 nt, Artificial Sequence
  Description of Artificial Sequence: Synthetic oligonucleotide
  Sense strand starting at position 1412 SEQ ID NO: 2993
acacauuucuucugagaga

SEQ ID NO: 232435 - RNA, 19 nt, Artificial Sequence
  Description of Artificial Sequence: Synthetic oligonucleotide
  Antisense strand to SEQ ID NO: 232434
ucucucagaagaaaugugu

SEQ ID NO: 232436 - RNA, 19 nt, Artificial Sequence
  Description of Artificial Sequence: Synthetic oligonucleotide
  Sense strand starting at position 1413 SEQ ID NO: 2993
cacauuucuucugagagag

SEQ ID NO: 232437 - RNA, 19 nt, Artificial Sequence
  Description of Artificial Sequence: Synthetic oligonucleotide
  Antisense strand to SEQ ID NO: 232436
cucucucagaagaaaugug

SEQ ID NO: 232438 - RNA, 19 nt, Artificial Sequence
  Description of Artificial Sequence: Synthetic oligonucleotide
  Sense strand starting at position 1415 SEQ ID NO: 2993
cauuucuucugagagagua

SEQ ID NO: 232439 - RNA, 19 nt, Artificial Sequence
  Description of Artificial Sequence: Synthetic oligonucleotide
  Antisense strand to SEQ ID NO: 232438
uacucucucagaagaaaug

SEQ ID NO: 232440 - RNA, 19 nt, Artificial Sequence
  Description of Artificial Sequence: Synthetic oligonucleotide
  Sense strand starting at position 1624 SEQ ID NO: 2993
gacagugguuccuucuauu

SEQ ID NO: 232441 - RNA, 19 nt, Artificial Sequence
  Description of Artificial Sequence: Synthetic oligonucleotide
  Antisense strand to SEQ ID NO: 232440
aauagaaggaaccacuguc

SEQ ID NO: 232442 - RNA, 19 nt, Artificial Sequence
  Description of Artificial Sequence: Synthetic oligonucleotide
  Sense strand starting at position 1733 SEQ ID NO: 2993
gauguaaucuucuuuagug

SEQ ID NO: 232443 - RNA, 19 nt, Artificial Sequence
  Description of Artificial Sequence: Synthetic oligonucleotide
  Antisense strand to SEQ ID NO: 232442
cacuaaagaagauuacauc

SEQ ID NO: 232444 - RNA, 19 nt, Artificial Sequence
  Description of Artificial Sequence: Synthetic oligonucleotide
  Sense strand starting at position 1735 SEQ ID NO: 2993
uguaaucuucuuuagugga

SEQ ID NO: 232445 - RNA, 19 nt, Artificial Sequence
  Description of Artificial Sequence: Synthetic oligonucleotide
  Antisense strand to SEQ ID NO: 232444
uccacuaaagaagauuaca

SEQ ID NO: 232446 - RNA, 19 nt, Artificial Sequence
  Description of Artificial Sequence: Synthetic oligonucleotide
  Sense strand starting at position 1758 SEQ ID NO: 2993
uuuagaauuuaccagaugu

SEQ ID NO: 232447 - RNA, 19 nt, Artificial Sequence
  Description of Artificial Sequence: Synthetic oligonucleotide
  Antisense strand to SEQ ID NO: 232446
acaucugguaaauucuaaa

SEQ ID NO: 232448 - RNA, 19 nt, Artificial Sequence
  Description of Artificial Sequence: Synthetic oligonucleotide
  Sense strand starting at position 1765 SEQ ID NO: 2993
uuuaccagauguucuuuau

SEQ ID NO: 232449 - RNA, 19 nt, Artificial Sequence
  Description of Artificial Sequence: Synthetic oligonucleotide
  Antisense strand to SEQ ID NO: 232448
auaaagaacaucugguaaa

SEQ ID NO: 232450 - RNA, 19 nt, Artificial Sequence
  Description of Artificial Sequence: Synthetic oligonucleotide
  Sense strand starting at position 1768 SEQ ID NO: 2993
accagauguucuuuauguc

SEQ ID NO: 232451 - RNA, 19 nt, Artificial Sequence
  Description of Artificial Sequence: Synthetic oligonucleotide
  Antisense strand to SEQ ID NO: 232450
gacauaaagaacaucuggu

SEQ ID NO: 232452 - RNA, 19 nt, Artificial Sequence
  Description of Artificial Sequence: Synthetic oligonucleotide
  Sense strand starting at position 1769 SEQ ID NO: 2993
ccagauguucuuuauguca

SEQ ID NO: 232453 - RNA, 19 nt, Artificial Sequence
  Description of Artificial Sequence: Synthetic oligonucleotide
  Antisense strand to SEQ ID NO: 232452
ugacauaaagaacaucugg

SEQ ID NO: 232454 - RNA, 19 nt, Artificial Sequence
  Description of Artificial Sequence: Synthetic oligonucleotide
  Sense strand starting at position 1816 SEQ ID NO: 2993
gcuaucuucugaguauaua

SEQ ID NO: 232455 - RNA, 19 nt, Artificial Sequence
  Description of Artificial Sequence: Synthetic oligonucleotide
  Antisense strand to SEQ ID NO: 232454
uauauacucagaagauagc

SEQ ID NO: 232456 - RNA, 19 nt, Artificial Sequence
  Description of Artificial Sequence: Synthetic oligonucleotide
  Sense strand starting at position 1890 SEQ ID NO: 2993
cugaaagguuaacuuacuu

SEQ ID NO: 232457 - RNA, 19 nt, Artificial Sequence
  Description of Artificial Sequence: Synthetic oligonucleotide
  Antisense strand to SEQ ID NO: 232456
aaguaaguuaaccuuucag

SEQ ID NO: 232458 - RNA, 19 nt, Artificial Sequence
  Description of Artificial Sequence: Synthetic oligonucleotide
  Sense strand starting at position 1914 SEQ ID NO: 2993
cuuguucuucuuuggaaua

SEQ ID NO: 232459 - RNA, 19 nt, Artificial Sequence
  Description of Artificial Sequence: Synthetic oligonucleotide
  Antisense strand to SEQ ID NO: 232458
uauuccaaagaagaacaag

SEQ ID NO: 232460 - RNA, 19 nt, Artificial Sequence
  Description of Artificial Sequence: Synthetic oligonucleotide
  Sense strand starting at position 2001 SEQ ID NO: 2993
acaguaucauguguuuaua

SEQ ID NO: 232461 - RNA, 19 nt, Artificial Sequence
  Description of Artificial Sequence: Synthetic oligonucleotide
  Antisense strand to SEQ ID NO: 232460
uauaaacacaugauacugu

SEQ ID NO: 232462 - RNA, 19 nt, Artificial Sequence
  Description of Artificial Sequence: Synthetic oligonucleotide
  Sense strand starting at position 2003 SEQ ID NO: 2993
aguaucauguguuuauaca

SEQ ID NO: 232463 - RNA, 19 nt, Artificial Sequence
  Description of Artificial Sequence: Synthetic oligonucleotide
  Antisense strand to SEQ ID NO: 232462
uguauaaacacaugauacu

SEQ ID NO: 232464 - RNA, 19 nt, Artificial Sequence
  Description of Artificial Sequence: Synthetic oligonucleotide
  Sense strand starting at position 2004 SEQ ID NO: 2993
guaucauguguuuauacac

SEQ ID NO: 232465 - RNA, 19 nt, Artificial Sequence
  Description of Artificial Sequence: Synthetic oligonucleotide
  Antisense strand to SEQ ID NO: 232464
guguauaaacacaugauac

SEQ ID NO: 232466 - RNA, 19 nt, Artificial Sequence
  Description of Artificial Sequence: Synthetic oligonucleotide
  Sense strand starting at position 2084 SEQ ID NO: 2993
ugguucuagcuagacaguu

SEQ ID NO: 232467 - RNA, 19 nt, Artificial Sequence
  Description of Artificial Sequence: Synthetic oligonucleotide
  Antisense strand to SEQ ID NO: 232466
aacugucuagcuagaacca

SEQ ID NO: 232468 - RNA, 19 nt, Artificial Sequence
  Description of Artificial Sequence: Synthetic oligonucleotide
  Sense strand starting at position 2186 SEQ ID NO: 2993
auuuguucuugguugagua

SEQ ID NO: 232469 - RNA, 19 nt, Artificial Sequence
  Description of Artificial Sequence: Synthetic oligonucleotide
  Antisense strand to SEQ ID NO: 232468
uacucaaccaagaacaaau

SEQ ID NO: 232470 - RNA, 19 nt, Artificial Sequence
  Description of Artificial Sequence: Synthetic oligonucleotide
  Sense strand starting at position 2482 SEQ ID NO: 2993
uuuaaauccgguuauguug

SEQ ID NO: 232471 - RNA, 19 nt, Artificial Sequence
  Description of Artificial Sequence: Synthetic oligonucleotide
  Antisense strand to SEQ ID NO: 232470
caacauaaccggauuuaaa

SEQ ID NO: 232472 - RNA, 19 nt, Artificial Sequence
  Description of Artificial Sequence: Synthetic oligonucleotide
  Sense strand starting at position 2551 SEQ ID NO: 2993
uaaauaaaucugugauugg

SEQ ID NO: 232473 - RNA, 19 nt, Artificial Sequence
  Description of Artificial Sequence: Synthetic oligonucleotide
  Antisense strand to SEQ ID NO: 232472
ccaaucacagauuuauuua

SEQ ID NO: 232474 - RNA, 19 nt, Artificial Sequence
  Description of Artificial Sequence: Synthetic oligonucleotide
  Sense strand starting at position 2585 SEQ ID NO: 2993
uguagacuauucccuagaa

SEQ ID NO: 232475 - RNA, 19 nt, Artificial Sequence
  Description of Artificial Sequence: Synthetic oligonucleotide
  Antisense strand to SEQ ID NO: 232474
uucuagggaauagucuaca

SEQ ID NO: 232476 - RNA, 19 nt, Artificial Sequence
  Description of Artificial Sequence: Synthetic oligonucleotide
  Sense strand starting at position 2586 SEQ ID NO: 2993
guagacuauucccuagaau

SEQ ID NO: 232477 - RNA, 19 nt, Artificial Sequence
  Description of Artificial Sequence: Synthetic oligonucleotide
  Antisense strand to SEQ ID NO: 232476
auucuagggaauagucuac

SEQ ID NO: 232478 - RNA, 19 nt, Artificial Sequence
  Description of Artificial Sequence: Synthetic oligonucleotide
  Sense strand starting at position 2734 SEQ ID NO: 2993
uugguuuagguuuauaaga

SEQ ID NO: 232479 - RNA, 19 nt, Artificial Sequence
  Description of Artificial Sequence: Synthetic oligonucleotide
  Antisense strand to SEQ ID NO: 232478
ucuuauaaaccuaaaccaa

SEQ ID NO: 232480 - RNA, 19 nt, Artificial Sequence
  Description of Artificial Sequence: Synthetic oligonucleotide
  Sense strand starting at position 2745 SEQ ID NO: 2993
uuauaagaagccuguaaga

SEQ ID NO: 232481 - RNA, 19 nt, Artificial Sequence
  Description of Artificial Sequence: Synthetic oligonucleotide
  Antisense strand to SEQ ID NO: 232480
ucuuacaggcuucuuauaa

SEQ ID NO: 232482 - RNA, 19 nt, Artificial Sequence
  Description of Artificial Sequence: Synthetic oligonucleotide
  Sense strand starting at position 2755 SEQ ID NO: 2993
ccuguaagaugguccgaca

SEQ ID NO: 232483 - RNA, 19 nt, Artificial Sequence
  Description of Artificial Sequence: Synthetic oligonucleotide
  Antisense strand to SEQ ID NO: 232482
ugucggaccaucuuacagg

SEQ ID NO: 232484 - RNA, 19 nt, Artificial Sequence
  Description of Artificial Sequence: Synthetic oligonucleotide
  Sense strand starting at position 2776 SEQ ID NO: 2993
uuaucaagugagugugaga

SEQ ID NO: 232485 - RNA, 19 nt, Artificial Sequence
  Description of Artificial Sequence: Synthetic oligonucleotide
  Antisense strand to SEQ ID NO: 232484
ucucacacucacuugauaa

SEQ ID NO: 232486 - RNA, 19 nt, Artificial Sequence
  Description of Artificial Sequence: Synthetic oligonucleotide
  Sense strand starting at position 2783 SEQ ID NO: 2993
gugagugugagaugaguca

SEQ ID NO: 232487 - RNA, 19 nt, Artificial Sequence
  Description of Artificial Sequence: Synthetic oligonucleotide
  Antisense strand to SEQ ID NO: 232486
ugacucaucucacacucac

SEQ ID NO: 232488 - RNA, 19 nt, Artificial Sequence
  Description of Artificial Sequence: Synthetic oligonucleotide
  Sense strand starting at position 3103 SEQ ID NO: 2993
accuguugugaucaacauu

SEQ ID NO: 232489 - RNA, 19 nt, Artificial Sequence
  Description of Artificial Sequence: Synthetic oligonucleotide
  Antisense strand to SEQ ID NO: 232488
aauguugaucacaacaggu

SEQ ID NO: 232490 - RNA, 19 nt, Artificial Sequence
  Description of Artificial Sequence: Synthetic oligonucleotide
  Sense strand starting at position 3106 SEQ ID NO: 2993
uguugugaucaacauuaaa

SEQ ID NO: 232491 - RNA, 19 nt, Artificial Sequence
  Description of Artificial Sequence: Synthetic oligonucleotide
  Antisense strand to SEQ ID NO: 232490
uuuaauguugaucacaaca

SEQ ID NO: 232492 - RNA, 19 nt, Artificial Sequence
  Description of Artificial Sequence: Synthetic oligonucleotide
  Sense strand starting at position 3265 SEQ ID NO: 2993
ucgcaaacuuauccuggaa

SEQ ID NO: 232493 - RNA, 19 nt, Artificial Sequence
  Description of Artificial Sequence: Synthetic oligonucleotide
  Antisense strand to SEQ ID NO: 232492
uuccaggauaaguuugcga

SEQ ID NO: 232494 - RNA, 19 nt, Artificial Sequence
  Description of Artificial Sequence: Synthetic oligonucleotide
  Sense strand starting at position 3560 SEQ ID NO: 2993
ugaacugacuuccugauua

SEQ ID NO: 232495 - RNA, 19 nt, Artificial Sequence
  Description of Artificial Sequence: Synthetic oligonucleotide
  Antisense strand to SEQ ID NO: 232494
uaaucaggaagucaguuca

SEQ ID NO: 232496 - RNA, 19 nt, Artificial Sequence
  Description of Artificial Sequence: Synthetic oligonucleotide
  Sense strand starting at position 3564 SEQ ID NO: 2993
cugacuuccugauuaucag

SEQ ID NO: 232497 - RNA, 19 nt, Artificial Sequence
  Description of Artificial Sequence: Synthetic oligonucleotide
  Antisense strand to SEQ ID NO: 232496
cugauaaucaggaagucag

SEQ ID NO: 232498 - RNA, 19 nt, Artificial Sequence
  Description of Artificial Sequence: Synthetic oligonucleotide
  Sense strand starting at position 3565 SEQ ID NO: 2993
ugacuuccugauuaucagu

SEQ ID NO: 232499 - RNA, 19 nt, Artificial Sequence
  Description of Artificial Sequence: Synthetic oligonucleotide
  Antisense strand to SEQ ID NO: 232498
acugauaaucaggaaguca

SEQ ID NO: 232500 - RNA, 19 nt, Artificial Sequence
  Description of Artificial Sequence: Synthetic oligonucleotide
  Sense strand starting at position 3620 SEQ ID NO: 2993
auccuaaaguugcugugaa

SEQ ID NO: 232501 - RNA, 19 nt, Artificial Sequence
  Description of Artificial Sequence: Synthetic oligonucleotide
  Antisense strand to SEQ ID NO: 232500
uucacagcaacuuuaggau

SEQ ID NO: 232502 - RNA, 19 nt, Artificial Sequence
  Description of Artificial Sequence: Synthetic oligonucleotide
  Sense strand starting at position 3743 SEQ ID NO: 2993
gggacuguaucaucaauca

SEQ ID NO: 232503 - RNA, 19 nt, Artificial Sequence
  Description of Artificial Sequence: Synthetic oligonucleotide
  Antisense strand to SEQ ID NO: 232502
ugauugaugauacaguccc

SEQ ID NO: 232504 - RNA, 19 nt, Artificial Sequence
  Description of Artificial Sequence: Synthetic oligonucleotide
  Sense strand starting at position 3763 SEQ ID NO: 2993
guaguaugaguucacgaca

SEQ ID NO: 232505 - RNA, 19 nt, Artificial Sequence
  Description of Artificial Sequence: Synthetic oligonucleotide
  Antisense strand to SEQ ID NO: 232504
ugucgugaacucauacuac

SEQ ID NO: 232506 - RNA, 19 nt, Artificial Sequence
  Description of Artificial Sequence: Synthetic oligonucleotide
  Sense strand starting at position 31 SEQ ID NO: 2992
agaacauuauuugaacgga

SEQ ID NO: 232507 - RNA, 19 nt, Artificial Sequence
  Description of Artificial Sequence: Synthetic oligonucleotide
  Antisense strand to SEQ ID NO: 232506
uccguucaaauaauguucu

SEQ ID NO: 232508 - RNA, 19 nt, Artificial Sequence
  Description of Artificial Sequence: Synthetic oligonucleotide
  Sense strand starting at position 82 SEQ ID NO: 2992
aggaaauaaugagacuaca

SEQ ID NO: 232509 - RNA, 19 nt, Artificial Sequence
  Description of Artificial Sequence: Synthetic oligonucleotide
  Antisense strand to SEQ ID NO: 232508
uguagucucauuauuuccu

SEQ ID NO: 232510 - RNA, 19 nt, Artificial Sequence
  Description of Artificial Sequence: Synthetic oligonucleotide
  Sense strand starting at position 247 SEQ ID NO: 2992
uuaacagugacuggugaaa

SEQ ID NO: 232511 - RNA, 19 nt, Artificial Sequence
  Description of Artificial Sequence: Synthetic oligonucleotide
  Antisense strand to SEQ ID NO: 232510
uuucaccagucacuguuaa

SEQ ID NO: 232512 - RNA, 19 nt, Artificial Sequence
  Description of Artificial Sequence: Synthetic oligonucleotide
  Sense strand starting at position 539 SEQ ID NO: 2992
gcgaacagcuaauuaauaa
